United States Patent Application Publication US 2018/0305689 A1 - sequence listing, part 31

SEQ ID NO: 404222 - RNA, 19 nt, Artificial Sequence
  Description of Artificial Sequence: Synthetic oligonucleotide
  Antisense Strand to SEQ ID NO: 404221
uugucacagagaagugccc

SEQ ID NO: 404223 - RNA, 19 nt, Artificial Sequence
  Description of Artificial Sequence: Synthetic oligonucleotide
  Sense Strand Starting at position 1090 of SEQ ID NO: 316407
ggcacuucucugugacaaa

SEQ ID NO: 404224 - RNA, 19 nt, Artificial Sequence
  Description of Artificial Sequence: Synthetic oligonucleotide
  Antisense Strand to SEQ ID NO: 404223
uuugucacagagaagugcc

SEQ ID NO: 404225 - RNA, 19 nt, Artificial Sequence
  Description of Artificial Sequence: Synthetic oligonucleotide
  Sense Strand Starting at position 1090 of SEQ ID NO: 316630
agugucaaagguuaucaca

SEQ ID NO: 404226 - RNA, 19 nt, Artificial Sequence
  Description of Artificial Sequence: Synthetic oligonucleotide
  Antisense Strand to SEQ ID NO: 404225
ugugauaaccuuugacacu

SEQ ID NO: 404227 - RNA, 19 nt, Artificial Sequence
  Description of Artificial Sequence: Synthetic oligonucleotide
  Sense Strand Starting at position 1090 of SEQ ID NO: 316632
ugucaaagguuaucacaac

SEQ ID NO: 404228 - RNA, 19 nt, Artificial Sequence
  Description of Artificial Sequence: Synthetic oligonucleotide
  Antisense Strand to SEQ ID NO: 404227
guugugauaaccuuugaca

SEQ ID NO: 404229 - RNA, 19 nt, Artificial Sequence
  Description of Artificial Sequence: Synthetic oligonucleotide
  Sense Strand Starting at position 1090 of SEQ ID NO: 316649
acaggauaucuguguuuaa

SEQ ID NO: 404230 - RNA, 19 nt, Artificial Sequence
  Description of Artificial Sequence: Synthetic oligonucleotide
  Antisense Strand to SEQ ID NO: 404229
uuaaacacagauauccugu

SEQ ID NO: 404231 - RNA, 19 nt, Artificial Sequence
  Description of Artificial Sequence: Synthetic oligonucleotide
  Sense Strand Starting at position 1090 of SEQ ID NO: 316652
ggauaucuguguuuaaaug

SEQ ID NO: 404232 - RNA, 19 nt, Artificial Sequence
  Description of Artificial Sequence: Synthetic oligonucleotide
  Antisense Strand to SEQ ID NO: 404231
cauuuaaacacagauaucc

SEQ ID NO: 404233 - RNA, 19 nt, Artificial Sequence
  Description of Artificial Sequence: Synthetic oligonucleotide
  Sense Strand Starting at position 1090 of SEQ ID NO: 316658
cuguguuuaaauggaaaga

SEQ ID NO: 404234 - RNA, 19 nt, Artificial Sequence
  Description of Artificial Sequence: Synthetic oligonucleotide
  Antisense Strand to SEQ ID NO: 404233
ucuuuccauuuaaacacag

SEQ ID NO: 404235 - RNA, 19 nt, Artificial Sequence
  Description of Artificial Sequence: Synthetic oligonucleotide
  Sense Strand Starting at position 1090 of SEQ ID NO: 316824
gguggcgcugaguauuaga

SEQ ID NO: 404236 - RNA, 19 nt, Artificial Sequence
  Description of Artificial Sequence: Synthetic oligonucleotide
  Antisense Strand to SEQ ID NO: 404235
ucuaauacucagcgccacc

SEQ ID NO: 404237 - RNA, 19 nt, Artificial Sequence
  Description of Artificial Sequence: Synthetic oligonucleotide
  Sense Strand Starting at position 1090 of SEQ ID NO: 316850
cuaauugaguaccugcaau

SEQ ID NO: 404238 - RNA, 19 nt, Artificial Sequence
  Description of Artificial Sequence: Synthetic oligonucleotide
  Antisense Strand to SEQ ID NO: 404237
auugcagguacucaauuag

SEQ ID NO: 404239 - RNA, 19 nt, Artificial Sequence
  Description of Artificial Sequence: Synthetic oligonucleotide
  Sense Strand Starting at position 1090 of SEQ ID NO: 316858
guaccugcaaugugaagau

SEQ ID NO: 404240 - RNA, 19 nt, Artificial Sequence
  Description of Artificial Sequence: Synthetic oligonucleotide
  Antisense Strand to SEQ ID NO: 404239
aucuucacauugcagguac

SEQ ID NO: 404241 - RNA, 19 nt, Artificial Sequence
  Description of Artificial Sequence: Synthetic oligonucleotide
  Sense Strand Starting at position 1090 of SEQ ID NO: 317254
uugcuuaaccaccaggaua

SEQ ID NO: 404242 - RNA, 19 nt, Artificial Sequence
  Description of Artificial Sequence: Synthetic oligonucleotide
  Antisense Strand to SEQ ID NO: 404241
uauccuggugguuaagcaa

SEQ ID NO: 404243 - RNA, 19 nt, Artificial Sequence
  Description of Artificial Sequence: Synthetic oligonucleotide
  Sense Strand Starting at position 1090 of SEQ ID NO: 317318
caacauggaguguaaguua

SEQ ID NO: 404244 - RNA, 19 nt, Artificial Sequence
  Description of Artificial Sequence: Synthetic oligonucleotide
  Antisense Strand to SEQ ID NO: 404243
uaacuuacacuccauguug

SEQ ID NO: 404245 - RNA, 19 nt, Artificial Sequence
  Description of Artificial Sequence: Synthetic oligonucleotide
  Sense Strand Starting at position 1090 of SEQ ID NO: 317323
uggaguguaaguuacacaa

SEQ ID NO: 404246 - RNA, 19 nt, Artificial Sequence
  Description of Artificial Sequence: Synthetic oligonucleotide
  Antisense Strand to SEQ ID NO: 404245
uuguguaacuuacacucca

SEQ ID NO: 404247 - RNA, 19 nt, Artificial Sequence
  Description of Artificial Sequence: Synthetic oligonucleotide
  Sense Strand Starting at position 1090 of SEQ ID NO: 317423
gaccguccugaauacugua

SEQ ID NO: 404248 - RNA, 19 nt, Artificial Sequence
  Description of Artificial Sequence: Synthetic oligonucleotide
  Antisense Strand to SEQ ID NO: 404247
uacaguauucaggacgguc

SEQ ID NO: 404249 - RNA, 19 nt, Artificial Sequence
  Description of Artificial Sequence: Synthetic oligonucleotide
  Sense Strand Starting at position 1090 of SEQ ID NO: 317459
gguaaauauuuauggaucu

SEQ ID NO: 404250 - RNA, 19 nt, Artificial Sequence
  Description of Artificial Sequence: Synthetic oligonucleotide
  Antisense Strand to SEQ ID NO: 404249
agauccauaaauauuuacc

SEQ ID NO: 404251 - RNA, 19 nt, Artificial Sequence
  Description of Artificial Sequence: Synthetic oligonucleotide
  Sense Strand Starting at position 1090 of SEQ ID NO: 317544
ggguacuuaccaugaacaa

SEQ ID NO: 404252 - RNA, 19 nt, Artificial Sequence
  Description of Artificial Sequence: Synthetic oligonucleotide
  Antisense Strand to SEQ ID NO: 404251
uuguucaugguaaguaccc

SEQ ID NO: 404253 - RNA, 19 nt, Artificial Sequence
  Description of Artificial Sequence: Synthetic oligonucleotide
  Sense Strand Starting at position 1090 of SEQ ID NO: 317573
acuagaaguuauucugagu

SEQ ID NO: 404254 - RNA, 19 nt, Artificial Sequence
  Description of Artificial Sequence: Synthetic oligonucleotide
  Antisense Strand to SEQ ID NO: 404253
acucagaauaacuucuagu

SEQ ID NO: 404255 - RNA, 19 nt, Artificial Sequence
  Description of Artificial Sequence: Synthetic oligonucleotide
  Sense Strand Starting at position 1090 of SEQ ID NO: 317579
aguuauucugagugaguca

SEQ ID NO: 404256 - RNA, 19 nt, Artificial Sequence
  Description of Artificial Sequence: Synthetic oligonucleotide
  Antisense Strand to SEQ ID NO: 404255
ugacucacucagaauaacu

SEQ ID NO: 404257 - RNA, 19 nt, Artificial Sequence
  Description of Artificial Sequence: Synthetic oligonucleotide
  Sense Strand Starting at position 1090 of SEQ ID NO: 317762
cucauuaucugagugacaa

SEQ ID NO: 404258 - RNA, 19 nt, Artificial Sequence
  Description of Artificial Sequence: Synthetic oligonucleotide
  Antisense Strand to SEQ ID NO: 404257
uugucacucagauaaugag

SEQ ID NO: 404259 - RNA, 19 nt, Artificial Sequence
  Description of Artificial Sequence: Synthetic oligonucleotide
  Sense Strand Starting at position 1090 of SEQ ID NO: 317763
ucauuaucugagugacaaa

SEQ ID NO: 404260 - RNA, 19 nt, Artificial Sequence
  Description of Artificial Sequence: Synthetic oligonucleotide
  Antisense Strand to SEQ ID NO: 404259
uuugucacucagauaauga

SEQ ID NO: 404261 - RNA, 19 nt, Artificial Sequence
  Description of Artificial Sequence: Synthetic oligonucleotide
  Sense Strand Starting at position 1090 of SEQ ID NO: 317883
acugaauagaugugaguuu

SEQ ID NO: 404262 - RNA, 19 nt, Artificial Sequence
  Description of Artificial Sequence: Synthetic oligonucleotide
  Antisense Strand to SEQ ID NO: 404261
aaacucacaucuauucagu

SEQ ID NO: 404263 - RNA, 19 nt, Artificial Sequence
  Description of Artificial Sequence: Synthetic oligonucleotide
  Sense Strand Starting at position 1090 of SEQ ID NO: 317982
ccauaaagauuauaaagga

SEQ ID NO: 404264 - RNA, 19 nt, Artificial Sequence
  Description of Artificial Sequence: Synthetic oligonucleotide
  Antisense Strand to SEQ ID NO: 404263
uccuuuauaaucuuuaugg

SEQ ID NO: 404265 - RNA, 19 nt, Artificial Sequence
  Description of Artificial Sequence: Synthetic oligonucleotide
  Sense Strand Starting at position 1090 of SEQ ID NO: 318139
auuguacagcuguacaauu

SEQ ID NO: 404266 - RNA, 19 nt, Artificial Sequence
  Description of Artificial Sequence: Synthetic oligonucleotide
  Antisense Strand to SEQ ID NO: 404265
aauuguacagcuguacaau

SEQ ID NO: 404267 - RNA, 19 nt, Artificial Sequence
  Description of Artificial Sequence: Synthetic oligonucleotide
  Sense Strand Starting at position 1090 of SEQ ID NO: 318272
cagucaggaucaucaguau

SEQ ID NO: 404268 - RNA, 19 nt, Artificial Sequence
  Description of Artificial Sequence: Synthetic oligonucleotide
  Antisense Strand to SEQ ID NO: 404267
auacugaugauccugacug

SEQ ID NO: 404269 - RNA, 19 nt, Artificial Sequence
  Description of Artificial Sequence: Synthetic oligonucleotide
  Sense Strand Starting at position 1090 of SEQ ID NO: 318323
ggcagaucuucaguggcaa

SEQ ID NO: 404270 - RNA, 19 nt, Artificial Sequence
  Description of Artificial Sequence: Synthetic oligonucleotide
  Antisense Strand to SEQ ID NO: 404269
uugccacugaagaucugcc

SEQ ID NO: 404271 - RNA, 19 nt, Artificial Sequence
  Description of Artificial Sequence: Synthetic oligonucleotide
  Sense Strand Starting at position 1090 of SEQ ID NO: 318378
ugccuuccucuggaauacu

SEQ ID NO: 404272 - RNA, 19 nt, Artificial Sequence
  Description of Artificial Sequence: Synthetic oligonucleotide
  Antisense Strand to SEQ ID NO: 404271
aguauuccagaggaaggca

SEQ ID NO: 404273 - RNA, 19 nt, Artificial Sequence
  Description of Artificial Sequence: Synthetic oligonucleotide
  Sense Strand Starting at position 1090 of SEQ ID NO: 319105
aauguagucguuuauuauc

SEQ ID NO: 404274 - RNA, 19 nt, Artificial Sequence
  Description of Artificial Sequence: Synthetic oligonucleotide
  Antisense Strand to SEQ ID NO: 404273
gauaauaaacgacuacauu

SEQ ID NO: 404275 - RNA, 19 nt, Artificial Sequence
  Description of Artificial Sequence: Synthetic oligonucleotide
  Sense Strand Starting at position 1090 of SEQ ID NO: 319110
agucguuuauuaucaacua

SEQ ID NO: 404276 - RNA, 19 nt, Artificial Sequence
  Description of Artificial Sequence: Synthetic oligonucleotide
  Antisense Strand to SEQ ID NO: 404275
uaguugauaauaaacgacu

SEQ ID NO: 404277 - RNA, 19 nt, Artificial Sequence
  Description of Artificial Sequence: Synthetic oligonucleotide
  Sense Strand Starting at position 1090 of SEQ ID NO: 319140
acauaauuguaugugcuga

SEQ ID NO: 404278 - RNA, 19 nt, Artificial Sequence
  Description of Artificial Sequence: Synthetic oligonucleotide
  Antisense Strand to SEQ ID NO: 404277
ucagcacauacaauuaugu

SEQ ID NO: 404279 - RNA, 19 nt, Artificial Sequence
  Description of Artificial Sequence: Synthetic oligonucleotide
  Sense Strand Starting at position 1090 of SEQ ID NO: 319145
auuguaugugcugaaguuu

SEQ ID NO: 404280 - RNA, 19 nt, Artificial Sequence
  Description of Artificial Sequence: Synthetic oligonucleotide
  Antisense Strand to SEQ ID NO: 404279
aaacuucagcacauacaau

SEQ ID NO: 404281 - RNA, 19 nt, Artificial Sequence
  Description of Artificial Sequence: Synthetic oligonucleotide
  Sense Strand Starting at position 1090 of SEQ ID NO: 319204
uaccauaaacuugggagua

SEQ ID NO: 404282 - RNA, 19 nt, Artificial Sequence
  Description of Artificial Sequence: Synthetic oligonucleotide
  Antisense Strand to SEQ ID NO: 404281
uacucccaaguuuauggua

SEQ ID NO: 404283 - RNA, 19 nt, Artificial Sequence
  Description of Artificial Sequence: Synthetic oligonucleotide
  Sense Strand Starting at position 1091 of SEQ ID NO: 315291
augaauccugaacgcagaa

SEQ ID NO: 404284 - RNA, 19 nt, Artificial Sequence
  Description of Artificial Sequence: Synthetic oligonucleotide
  Antisense Strand to SEQ ID NO: 404283
uucugcguucaggauucau

SEQ ID NO: 404285 - RNA, 19 nt, Artificial Sequence
  Description of Artificial Sequence: Synthetic oligonucleotide
  Sense Strand Starting at position 1091 of SEQ ID NO: 315303
cgcagaauaauagaaaugu

SEQ ID NO: 404286 - RNA, 19 nt, Artificial Sequence
  Description of Artificial Sequence: Synthetic oligonucleotide
  Antisense Strand to SEQ ID NO: 404285
acauuucuauuauucugcg

SEQ ID NO: 404287 - RNA, 19 nt, Artificial Sequence
  Description of Artificial Sequence: Synthetic oligonucleotide
  Sense Strand Starting at position 1091 of SEQ ID NO: 315486
cucaauuauuugcaugaga

SEQ ID NO: 404288 - RNA, 19 nt, Artificial Sequence
  Description of Artificial Sequence: Synthetic oligonucleotide
  Antisense Strand to SEQ ID NO: 404287
ucucaugcaaauaauugag

SEQ ID NO: 404289 - RNA, 19 nt, Artificial Sequence
  Description of Artificial Sequence: Synthetic oligonucleotide
  Sense Strand Starting at position 1091 of SEQ ID NO: 315562
gauuauuggcaguaaacau

SEQ ID NO: 404290 - RNA, 19 nt, Artificial Sequence
  Description of Artificial Sequence: Synthetic oligonucleotide
  Antisense Strand to SEQ ID NO: 404289
auguuuacugccaauaauc

SEQ ID NO: 404291 - RNA, 19 nt, Artificial Sequence
  Description of Artificial Sequence: Synthetic oligonucleotide
  Sense Strand Starting at position 1091 of SEQ ID NO: 315667
ccauaauugguguacaaca

SEQ ID NO: 404292 - RNA, 19 nt, Artificial Sequence
  Description of Artificial Sequence: Synthetic oligonucleotide
  Antisense Strand to SEQ ID NO: 404291
uguuguacaccaauuaugg

SEQ ID NO: 404293 - RNA, 19 nt, Artificial Sequence
  Description of Artificial Sequence: Synthetic oligonucleotide
  Sense Strand Starting at position 1091 of SEQ ID NO: 315728
ccaucacuggcucaauaga

SEQ ID NO: 404294 - RNA, 19 nt, Artificial Sequence
  Description of Artificial Sequence: Synthetic oligonucleotide
  Antisense Strand to SEQ ID NO: 404293
ucuauugagccagugaugg

SEQ ID NO: 404295 - RNA, 19 nt, Artificial Sequence
  Description of Artificial Sequence: Synthetic oligonucleotide
  Sense Strand Starting at position 1091 of SEQ ID NO: 315738
cucaauagaguccauaugu

SEQ ID NO: 404296 - RNA, 19 nt, Artificial Sequence
  Description of Artificial Sequence: Synthetic oligonucleotide
  Antisense Strand to SEQ ID NO: 404295
acauauggacucuauugag

SEQ ID NO: 404297 - RNA, 19 nt, Artificial Sequence
  Description of Artificial Sequence: Synthetic oligonucleotide
  Sense Strand Starting at position 1091 of SEQ ID NO: 315746
aguccauauguccaacuca

SEQ ID NO: 404298 - RNA, 19 nt, Artificial Sequence
  Description of Artificial Sequence: Synthetic oligonucleotide
  Antisense Strand to SEQ ID NO: 404297
ugaguuggacauauggacu

SEQ ID NO: 404299 - RNA, 19 nt, Artificial Sequence
  Description of Artificial Sequence: Synthetic oligonucleotide
  Sense Strand Starting at position 1091 of SEQ ID NO: 315782
uagaacugcguguguauuu

SEQ ID NO: 404300 - RNA, 19 nt, Artificial Sequence
  Description of Artificial Sequence: Synthetic oligonucleotide
  Antisense Strand to SEQ ID NO: 404299
aaauacacacgcaguucua

SEQ ID NO: 404301 - RNA, 19 nt, Artificial Sequence
  Description of Artificial Sequence: Synthetic oligonucleotide
  Sense Strand Starting at position 1091 of SEQ ID NO: 315841
uaagaagaugccgguaaga

SEQ ID NO: 404302 - RNA, 19 nt, Artificial Sequence
  Description of Artificial Sequence: Synthetic oligonucleotide
  Antisense Strand to SEQ ID NO: 404301
ucuuaccggcaucuucuua

SEQ ID NO: 404303 - RNA, 19 nt, Artificial Sequence
  Description of Artificial Sequence: Synthetic oligonucleotide
  Sense Strand Starting at position 1091 of SEQ ID NO: 315843
agaagaugccgguaagagu

SEQ ID NO: 404304 - RNA, 19 nt, Artificial Sequence
  Description of Artificial Sequence: Synthetic oligonucleotide
  Antisense Strand to SEQ ID NO: 404303
acucuuaccggcaucuucu

SEQ ID NO: 404305 - RNA, 19 nt, Artificial Sequence
  Description of Artificial Sequence: Synthetic oligonucleotide
  Sense Strand Starting at position 1091 of SEQ ID NO: 315854
guaagagucucagcauaau

SEQ ID NO: 404306 - RNA, 19 nt, Artificial Sequence
  Description of Artificial Sequence: Synthetic oligonucleotide
  Antisense Strand to SEQ ID NO: 404305
auuaugcugagacucuuac

SEQ ID NO: 404307 - RNA, 19 nt, Artificial Sequence
  Description of Artificial Sequence: Synthetic oligonucleotide
  Sense Strand Starting at position 1091 of SEQ ID NO: 315936
ugcuaugauucuccaaaug

SEQ ID NO: 404308 - RNA, 19 nt, Artificial Sequence
  Description of Artificial Sequence: Synthetic oligonucleotide
  Antisense Strand to SEQ ID NO: 404307
cauuuggagaaucauagca

SEQ ID NO: 404309 - RNA, 19 nt, Artificial Sequence
  Description of Artificial Sequence: Synthetic oligonucleotide
  Sense Strand Starting at position 1091 of SEQ ID NO: 316025
cuaagacuuuaggcuuagu

SEQ ID NO: 404310 - RNA, 19 nt, Artificial Sequence
  Description of Artificial Sequence: Synthetic oligonucleotide
  Antisense Strand to SEQ ID NO: 404309
acuaagccuaaagucuuag

SEQ ID NO: 404311 - RNA, 19 nt, Artificial Sequence
  Description of Artificial Sequence: Synthetic oligonucleotide
  Sense Strand Starting at position 1091 of SEQ ID NO: 316030
acuuuaggcuuaguccuaa

SEQ ID NO: 404312 - RNA, 19 nt, Artificial Sequence
  Description of Artificial Sequence: Synthetic oligonucleotide
  Antisense Strand to SEQ ID NO: 404311
uuaggacuaagccuaaagu

SEQ ID NO: 404313 - RNA, 19 nt, Artificial Sequence
  Description of Artificial Sequence: Synthetic oligonucleotide
  Sense Strand Starting at position 1091 of SEQ ID NO: 317285
gauggcucccgacauaaac

SEQ ID NO: 404314 - RNA, 19 nt, Artificial Sequence
  Description of Artificial Sequence: Synthetic oligonucleotide
  Antisense Strand to SEQ ID NO: 404313
guuuaugucgggagccauc

SEQ ID NO: 404315 - RNA, 19 nt, Artificial Sequence
  Description of Artificial Sequence: Synthetic oligonucleotide
  Sense Strand Starting at position 1091 of SEQ ID NO: 317619
cagaguaacccucgcacaa

SEQ ID NO: 404316 - RNA, 19 nt, Artificial Sequence
  Description of Artificial Sequence: Synthetic oligonucleotide
  Antisense Strand to SEQ ID NO: 404315
uugugcgaggguuacucug

SEQ ID NO: 404317 - RNA, 19 nt, Artificial Sequence
  Description of Artificial Sequence: Synthetic oligonucleotide
  Sense Strand Starting at position 1091 of SEQ ID NO: 317772
uggaauauuaugcaaucgu

SEQ ID NO: 404318 - RNA, 19 nt, Artificial Sequence
  Description of Artificial Sequence: Synthetic oligonucleotide
  Antisense Strand to SEQ ID NO: 404317
acgauugcauaauauucca

SEQ ID NO: 404319 - RNA, 19 nt, Artificial Sequence
  Description of Artificial Sequence: Synthetic oligonucleotide
  Sense Strand Starting at position 1091 of SEQ ID NO: 317803
ggugauuccauauggcaaa

SEQ ID NO: 404320 - RNA, 19 nt, Artificial Sequence
  Description of Artificial Sequence: Synthetic oligonucleotide
  Antisense Strand to SEQ ID NO: 404319
uuugccauauggaaucacc

SEQ ID NO: 404321 - RNA, 19 nt, Artificial Sequence
  Description of Artificial Sequence: Synthetic oligonucleotide
  Sense Strand Starting at position 1091 of SEQ ID NO: 317827
ucccgaaguguguaauaag

SEQ ID NO: 404322 - RNA, 19 nt, Artificial Sequence
  Description of Artificial Sequence: Synthetic oligonucleotide
  Antisense Strand to SEQ ID NO: 404321
cuuauuacacacuucggga

SEQ ID NO: 404323 - RNA, 19 nt, Artificial Sequence
  Description of Artificial Sequence: Synthetic oligonucleotide
  Sense Strand Starting at position 1091 of SEQ ID NO: 317978
acaguuugguaagugauga

SEQ ID NO: 404324 - RNA, 19 nt, Artificial Sequence
  Description of Artificial Sequence: Synthetic oligonucleotide
  Antisense Strand to SEQ ID NO: 404323
ucaucacuuaccaaacugu

SEQ ID NO: 404325 - RNA, 19 nt, Artificial Sequence
  Description of Artificial Sequence: Synthetic oligonucleotide
  Sense Strand Starting at position 1091 of SEQ ID NO: 317979
caguuugguaagugaugau

SEQ ID NO: 404326 - RNA, 19 nt, Artificial Sequence
  Description of Artificial Sequence: Synthetic oligonucleotide
  Antisense Strand to SEQ ID NO: 404325
aucaucacuuaccaaacug

SEQ ID NO: 404327 - RNA, 19 nt, Artificial Sequence
  Description of Artificial Sequence: Synthetic oligonucleotide
  Sense Strand Starting at position 1091 of SEQ ID NO: 318006
uuuaguccaucuguaaaga

SEQ ID NO: 404328 - RNA, 19 nt, Artificial Sequence
  Description of Artificial Sequence: Synthetic oligonucleotide
  Antisense Strand to SEQ ID NO: 404327
ucuuuacagauggacuaaa

SEQ ID NO: 404329 - RNA, 19 nt, Artificial Sequence
  Description of Artificial Sequence: Synthetic oligonucleotide
  Sense Strand Starting at position 1091 of SEQ ID NO: 318007
uuaguccaucuguaaagaa

SEQ ID NO: 404330 - RNA, 19 nt, Artificial Sequence
  Description of Artificial Sequence: Synthetic oligonucleotide
  Antisense Strand to SEQ ID NO: 404329
uucuuuacagauggacuaa

SEQ ID NO: 404331 - RNA, 19 nt, Artificial Sequence
  Description of Artificial Sequence: Synthetic oligonucleotide
  Sense Strand Starting at position 1091 of SEQ ID NO: 318091
gggugccauuuacagauuu

SEQ ID NO: 404332 - RNA, 19 nt, Artificial Sequence
  Description of Artificial Sequence: Synthetic oligonucleotide
  Antisense Strand to SEQ ID NO: 404331
aaaucuguaaauggcaccc

SEQ ID NO: 404333 - RNA, 19 nt, Artificial Sequence
  Description of Artificial Sequence: Synthetic oligonucleotide
  Sense Strand Starting at position 1091 of SEQ ID NO: 318142
gagccaggucaggaaugua

SEQ ID NO: 404334 - RNA, 19 nt, Artificial Sequence
  Description of Artificial Sequence: Synthetic oligonucleotide
  Antisense Strand to SEQ ID NO: 404333
uacauuccugaccuggcuc

SEQ ID NO: 404335 - RNA, 19 nt, Artificial Sequence
  Description of Artificial Sequence: Synthetic oligonucleotide
  Sense Strand Starting at position 1091 of SEQ ID NO: 318145
ccaggucaggaauguaaga

SEQ ID NO: 404336 - RNA, 19 nt, Artificial Sequence
  Description of Artificial Sequence: Synthetic oligonucleotide
  Antisense Strand to SEQ ID NO: 404335
ucuuacauuccugaccugg

SEQ ID NO: 404337 - RNA, 19 nt, Artificial Sequence
  Description of Artificial Sequence: Synthetic oligonucleotide
  Sense Strand Starting at position 1091 of SEQ ID NO: 318170
ccugauaguuucccaucga

SEQ ID NO: 404338 - RNA, 19 nt, Artificial Sequence
  Description of Artificial Sequence: Synthetic oligonucleotide
  Antisense Strand to SEQ ID NO: 404337
ucgaugggaaacuaucagg

SEQ ID NO: 404339 - RNA, 19 nt, Artificial Sequence
  Description of Artificial Sequence: Synthetic oligonucleotide
  Sense Strand Starting at position 1091 of SEQ ID NO: 318174
auaguuucccaucgaaauc

SEQ ID NO: 404340 - RNA, 19 nt, Artificial Sequence
  Description of Artificial Sequence: Synthetic oligonucleotide
  Antisense Strand to SEQ ID NO: 404339
gauuucgaugggaaacuau

SEQ ID NO: 404341 - RNA, 19 nt, Artificial Sequence
  Description of Artificial Sequence: Synthetic oligonucleotide
  Sense Strand Starting at position 1091 of SEQ ID NO: 318228
gcaggaacauuguccugau

SEQ ID NO: 404342 - RNA, 19 nt, Artificial Sequence
  Description of Artificial Sequence: Synthetic oligonucleotide
  Antisense Strand to SEQ ID NO: 404341
aucaggacaauguuccugc

SEQ ID NO: 404343 - RNA, 19 nt, Artificial Sequence
  Description of Artificial Sequence: Synthetic oligonucleotide
  Sense Strand Starting at position 1091 of SEQ ID NO: 318265
gaagauuucguagguguuu

SEQ ID NO: 404344 - RNA, 19 nt, Artificial Sequence
  Description of Artificial Sequence: Synthetic oligonucleotide
  Antisense Strand to SEQ ID NO: 404343
aaacaccuacgaaaucuuc

SEQ ID NO: 404345 - RNA, 19 nt, Artificial Sequence
  Description of Artificial Sequence: Synthetic oligonucleotide
  Sense Strand Starting at position 1091 of SEQ ID NO: 318452
ugguaacuauugcuuugau

SEQ ID NO: 404346 - RNA, 19 nt, Artificial Sequence
  Description of Artificial Sequence: Synthetic oligonucleotide
  Antisense Strand to SEQ ID NO: 404345
aucaaagcaauaguuacca

SEQ ID NO: 404347 - RNA, 19 nt, Artificial Sequence
  Description of Artificial Sequence: Synthetic oligonucleotide
  Sense Strand Starting at position 1091 of SEQ ID NO: 318462
ugcuuugauccagaaucau

SEQ ID NO: 404348 - RNA, 19 nt, Artificial Sequence
  Description of Artificial Sequence: Synthetic oligonucleotide
  Antisense Strand to SEQ ID NO: 404347
augauucuggaucaaagca

SEQ ID NO: 404349 - RNA, 19 nt, Artificial Sequence
  Description of Artificial Sequence: Synthetic oligonucleotide
  Sense Strand Starting at position 1091 of SEQ ID NO: 318482
cugagaaagcuauguuuga

SEQ ID NO: 404350 - RNA, 19 nt, Artificial Sequence
  Description of Artificial Sequence: Synthetic oligonucleotide
  Antisense Strand to SEQ ID NO: 404349
ucaaacauagcuuucucag

SEQ ID NO: 404351 - RNA, 19 nt, Artificial Sequence
  Description of Artificial Sequence: Synthetic oligonucleotide
  Sense Strand Starting at position 1091 of SEQ ID NO: 318483
ugagaaagcuauguuugau

SEQ ID NO: 404352 - RNA, 19 nt, Artificial Sequence
  Description of Artificial Sequence: Synthetic oligonucleotide
  Antisense Strand to SEQ ID NO: 404351
aucaaacauagcuuucuca

SEQ ID NO: 404353 - RNA, 19 nt, Artificial Sequence
  Description of Artificial Sequence: Synthetic oligonucleotide
  Sense Strand Starting at position 1091 of SEQ ID NO: 318652
gugagaaauguguaaguag

SEQ ID NO: 404354 - RNA, 19 nt, Artificial Sequence
  Description of Artificial Sequence: Synthetic oligonucleotide
  Antisense Strand to SEQ ID NO: 404353
cuacuuacacauuucucac

SEQ ID NO: 404355 - RNA, 19 nt, Artificial Sequence
  Description of Artificial Sequence: Synthetic oligonucleotide
  Sense Strand Starting at position 1091 of SEQ ID NO: 318655
agaaauguguaaguagaac

SEQ ID NO: 404356 - RNA, 19 nt, Artificial Sequence
  Description of Artificial Sequence: Synthetic oligonucleotide
  Antisense Strand to SEQ ID NO: 404355
guucuacuuacacauuucu

SEQ ID NO: 404357 - RNA, 19 nt, Artificial Sequence
  Description of Artificial Sequence: Synthetic oligonucleotide
  Sense Strand Starting at position 1091 of SEQ ID NO: 318666
aguagaaccaguugaaaug

SEQ ID NO: 404358 - RNA, 19 nt, Artificial Sequence
  Description of Artificial Sequence: Synthetic oligonucleotide
  Antisense Strand to SEQ ID NO: 404357
cauuucaacugguucuacu

SEQ ID NO: 404359 - RNA, 19 nt, Artificial Sequence
  Description of Artificial Sequence: Synthetic oligonucleotide
  Sense Strand Starting at position 1091 of SEQ ID NO: 318675
aguugaaaugucuauggug

SEQ ID NO: 404360 - RNA, 19 nt, Artificial Sequence
  Description of Artificial Sequence: Synthetic oligonucleotide
  Antisense Strand to SEQ ID NO: 404359
caccauagacauuucaacu

SEQ ID NO: 404361 - RNA, 19 nt, Artificial Sequence
  Description of Artificial Sequence: Synthetic oligonucleotide
  Sense Strand Starting at position 1091 of SEQ ID NO: 319176
guaagaaacuuucugagau

SEQ ID NO: 404362 - RNA, 19 nt, Artificial Sequence
  Description of Artificial Sequence: Synthetic oligonucleotide
  Antisense Strand to SEQ ID NO: 404361
aucucagaaaguuucuuac

SEQ ID NO: 404363 - RNA, 19 nt, Artificial Sequence
  Description of Artificial Sequence: Synthetic oligonucleotide
  Sense Strand Starting at position 1092 of SEQ ID NO: 315283
cagagcagauguuauuuau

SEQ ID NO: 404364 - RNA, 19 nt, Artificial Sequence
  Description of Artificial Sequence: Synthetic oligonucleotide
  Antisense Strand to SEQ ID NO: 404363
auaaauaacaucugcucug

SEQ ID NO: 404365 - RNA, 19 nt, Artificial Sequence
  Description of Artificial Sequence: Synthetic oligonucleotide
  Sense Strand Starting at position 1092 of SEQ ID NO: 315298
uuauacuagcaguauagau

SEQ ID NO: 404366 - RNA, 19 nt, Artificial Sequence
  Description of Artificial Sequence: Synthetic oligonucleotide
  Antisense Strand to SEQ ID NO: 404365
aucuauacugcuaguauaa

SEQ ID NO: 404367 - RNA, 19 nt, Artificial Sequence
  Description of Artificial Sequence: Synthetic oligonucleotide
  Sense Strand Starting at position 1092 of SEQ ID NO: 315371
gguaauacugaauggucuu

SEQ ID NO: 404368 - RNA, 19 nt, Artificial Sequence
  Description of Artificial Sequence: Synthetic oligonucleotide
  Antisense Strand to SEQ ID NO: 404367
aagaccauucaguauuacc

SEQ ID NO: 404369 - RNA, 19 nt, Artificial Sequence
  Description of Artificial Sequence: Synthetic oligonucleotide
  Sense Strand Starting at position 1092 of SEQ ID NO: 315419
auccuuugcgagugaacuu

SEQ ID NO: 404370 - RNA, 19 nt, Artificial Sequence
  Description of Artificial Sequence: Synthetic oligonucleotide
  Antisense Strand to SEQ ID NO: 404369
aaguucacucgcaaaggau

SEQ ID NO: 404371 - RNA, 19 nt, Artificial Sequence
  Description of Artificial Sequence: Synthetic oligonucleotide
  Sense Strand Starting at position 1092 of SEQ ID NO: 315420
uccuuugcgagugaacuua

SEQ ID NO: 404372 - RNA, 19 nt, Artificial Sequence
  Description of Artificial Sequence: Synthetic oligonucleotide
  Antisense Strand to SEQ ID NO: 404371
uaaguucacucgcaaagga

SEQ ID NO: 404373 - RNA, 19 nt, Artificial Sequence
  Description of Artificial Sequence: Synthetic oligonucleotide
  Sense Strand Starting at position 1092 of SEQ ID NO: 316117
gccuuuagcgucuaaagac

SEQ ID NO: 404374 - RNA, 19 nt, Artificial Sequence
  Description of Artificial Sequence: Synthetic oligonucleotide
  Antisense Strand to SEQ ID NO: 404373
gucuuuagacgcuaaaggc

SEQ ID NO: 404375 - RNA, 19 nt, Artificial Sequence
  Description of Artificial Sequence: Synthetic oligonucleotide
  Sense Strand Starting at position 1092 of SEQ ID NO: 316125
cgucuaaagacugguugca

SEQ ID NO: 404376 - RNA, 19 nt, Artificial Sequence
  Description of Artificial Sequence: Synthetic oligonucleotide
  Antisense Strand to SEQ ID NO: 404375
ugcaaccagucuuuagacg

SEQ ID NO: 404377 - RNA, 19 nt, Artificial Sequence
  Description of Artificial Sequence: Synthetic oligonucleotide
  Sense Strand Starting at position 1092 of SEQ ID NO: 317230
acgugaggguguucugagu

SEQ ID NO: 404378 - RNA, 19 nt, Artificial Sequence
  Description of Artificial Sequence: Synthetic oligonucleotide
  Antisense Strand to SEQ ID NO: 404377
acucagaacacccucacgu

SEQ ID NO: 404379 - RNA, 19 nt, Artificial Sequence
  Description of Artificial Sequence: Synthetic oligonucleotide
  Sense Strand Starting at position 1092 of SEQ ID NO: 317398
gccaacgugggcuauugau

SEQ ID NO: 404380 - RNA, 19 nt, Artificial Sequence
  Description of Artificial Sequence: Synthetic oligonucleotide
  Antisense Strand to SEQ ID NO: 404379
aucaauagcccacguuggc

SEQ ID NO: 404381 - RNA, 19 nt, Artificial Sequence
  Description of Artificial Sequence: Synthetic oligonucleotide
  Sense Strand Starting at position 1092 of SEQ ID NO: 317461
guggaaugcuuucuccuua

SEQ ID NO: 404382 - RNA, 19 nt, Artificial Sequence
  Description of Artificial Sequence: Synthetic oligonucleotide
  Antisense Strand to SEQ ID NO: 404381
uaaggagaaagcauuccac

SEQ ID NO: 404383 - RNA, 19 nt, Artificial Sequence
  Description of Artificial Sequence: Synthetic oligonucleotide
  Sense Strand Starting at position 1092 of SEQ ID NO: 317550
guggaauugauauguacug

SEQ ID NO: 404384 - RNA, 19 nt, Artificial Sequence
  Description of Artificial Sequence: Synthetic oligonucleotide
  Antisense Strand to SEQ ID NO: 404383
caguacauaucaauuccac

SEQ ID NO: 404385 - RNA, 19 nt, Artificial Sequence
  Description of Artificial Sequence: Synthetic oligonucleotide
  Sense Strand Starting at position 1092 of SEQ ID NO: 317557
ugauauguacuguaugcau

SEQ ID NO: 404386 - RNA, 19 nt, Artificial Sequence
  Description of Artificial Sequence: Synthetic oligonucleotide
  Antisense Strand to SEQ ID NO: 404385
augcauacaguacauauca

SEQ ID NO: 404387 - RNA, 19 nt, Artificial Sequence
  Description of Artificial Sequence: Synthetic oligonucleotide
  Sense Strand Starting at position 1092 of SEQ ID NO: 317559
auauguacuguaugcauaa

SEQ ID NO: 404388 - RNA, 19 nt, Artificial Sequence
  Description of Artificial Sequence: Synthetic oligonucleotide
  Antisense Strand to SEQ ID NO: 404387
uuaugcauacaguacauau

SEQ ID NO: 404389 - RNA, 19 nt, Artificial Sequence
  Description of Artificial Sequence: Synthetic oligonucleotide
  Sense Strand Starting at position 1092 of SEQ ID NO: 317730
aggccuagucuggaggauu

SEQ ID NO: 404390 - RNA, 19 nt, Artificial Sequence
  Description of Artificial Sequence: Synthetic oligonucleotide
  Antisense Strand to SEQ ID NO: 404389
aauccuccagacuaggccu

SEQ ID NO: 404391 - RNA, 19 nt, Artificial Sequence
  Description of Artificial Sequence: Synthetic oligonucleotide
  Sense Strand Starting at position 1092 of SEQ ID NO: 317731
ggccuagucuggaggauug

SEQ ID NO: 404392 - RNA, 19 nt, Artificial Sequence
  Description of Artificial Sequence: Synthetic oligonucleotide
  Antisense Strand to SEQ ID NO: 404391
caauccuccagacuaggcc

SEQ ID NO: 404393 - RNA, 19 nt, Artificial Sequence
  Description of Artificial Sequence: Synthetic oligonucleotide
  Sense Strand Starting at position 1092 of SEQ ID NO: 317840
uuuaaauguggcuaguaaa

SEQ ID NO: 404394 - RNA, 19 nt, Artificial Sequence
  Description of Artificial Sequence: Synthetic oligonucleotide
  Antisense Strand to SEQ ID NO: 404393
uuuacuagccacauuuaaa

SEQ ID NO: 404395 - RNA, 19 nt, Artificial Sequence
  Description of Artificial Sequence: Synthetic oligonucleotide
  Sense Strand Starting at position 1092 of SEQ ID NO: 317884
ccauuacauuucuguagga

SEQ ID NO: 404396 - RNA, 19 nt, Artificial Sequence
  Description of Artificial Sequence: Synthetic oligonucleotide
  Antisense Strand to SEQ ID NO: 404395
uccuacagaaauguaaugg

SEQ ID NO: 404397 - RNA, 19 nt, Artificial Sequence
  Description of Artificial Sequence: Synthetic oligonucleotide
  Sense Strand Starting at position 1092 of SEQ ID NO: 317907
gcuggucuaguuggucaaa

SEQ ID NO: 404398 - RNA, 19 nt, Artificial Sequence
  Description of Artificial Sequence: Synthetic oligonucleotide
  Antisense Strand to SEQ ID NO: 404397
uuugaccaacuagaccagc

SEQ ID NO: 404399 - RNA, 19 nt, Artificial Sequence
  Description of Artificial Sequence: Synthetic oligonucleotide
  Sense Strand Starting at position 1092 of SEQ ID NO: 317932
guuuauugcucaccuggaa

SEQ ID NO: 404400 - RNA, 19 nt, Artificial Sequence
  Description of Artificial Sequence: Synthetic oligonucleotide
  Antisense Strand to SEQ ID NO: 404399
uuccaggugagcaauaaac

SEQ ID NO: 404401 - RNA, 19 nt, Artificial Sequence
  Description of Artificial Sequence: Synthetic oligonucleotide
  Sense Strand Starting at position 1092 of SEQ ID NO: 317947
ggaaucugucaauggcuuu

SEQ ID NO: 404402 - RNA, 19 nt, Artificial Sequence
  Description of Artificial Sequence: Synthetic oligonucleotide
  Antisense Strand to SEQ ID NO: 404401
aaagccauugacagauucc

SEQ ID NO: 404403 - RNA, 19 nt, Artificial Sequence
  Description of Artificial Sequence: Synthetic oligonucleotide
  Sense Strand Starting at position 1092 of SEQ ID NO: 317990
gccugucuggcugauccau

SEQ ID NO: 404404 - RNA, 19 nt, Artificial Sequence
  Description of Artificial Sequence: Synthetic oligonucleotide
  Antisense Strand to SEQ ID NO: 404403
auggaucagccagacaggc

SEQ ID NO: 404405 - RNA, 19 nt, Artificial Sequence
  Description of Artificial Sequence: Synthetic oligonucleotide
  Sense Strand Starting at position 1092 of SEQ ID NO: 318015
gcauuacugcugggauccu

SEQ ID NO: 404406 - RNA, 19 nt, Artificial Sequence
  Description of Artificial Sequence: Synthetic oligonucleotide
  Antisense Strand to SEQ ID NO: 404405
aggaucccagcaguaaugc

SEQ ID NO: 404407 - RNA, 19 nt, Artificial Sequence
  Description of Artificial Sequence: Synthetic oligonucleotide
  Sense Strand Starting at position 1092 of SEQ ID NO: 318051
ugcaguggcccugguaaua

SEQ ID NO: 404408 - RNA, 19 nt, Artificial Sequence
  Description of Artificial Sequence: Synthetic oligonucleotide
  Antisense Strand to SEQ ID NO: 404407
uauuaccagggccacugca

SEQ ID NO: 404409 - RNA, 19 nt, Artificial Sequence
  Description of Artificial Sequence: Synthetic oligonucleotide
  Sense Strand Starting at position 1092 of SEQ ID NO: 318063
gguaauaaaguccaagcuu

SEQ ID NO: 404410 - RNA, 19 nt, Artificial Sequence
  Description of Artificial Sequence: Synthetic oligonucleotide
  Antisense Strand to SEQ ID NO: 404409
aagcuuggacuuuauuacc

SEQ ID NO: 404411 - RNA, 19 nt, Artificial Sequence
  Description of Artificial Sequence: Synthetic oligonucleotide
  Sense Strand Starting at position 1092 of SEQ ID NO: 318125
agaacuagaucagaaagga

SEQ ID NO: 404412 - RNA, 19 nt, Artificial Sequence
  Description of Artificial Sequence: Synthetic oligonucleotide
  Antisense Strand to SEQ ID NO: 404411
uccuuucugaucuaguucu

SEQ ID NO: 404413 - RNA, 19 nt, Artificial Sequence
  Description of Artificial Sequence: Synthetic oligonucleotide
  Sense Strand Starting at position 1092 of SEQ ID NO: 318191
gcuucugagguacauagaa

SEQ ID NO: 404414 - RNA, 19 nt, Artificial Sequence
  Description of Artificial Sequence: Synthetic oligonucleotide
  Antisense Strand to SEQ ID NO: 404413
uucuauguaccucagaagc

SEQ ID NO: 404415 - RNA, 19 nt, Artificial Sequence
  Description of Artificial Sequence: Synthetic oligonucleotide
  Sense Strand Starting at position 1092 of SEQ ID NO: 318232
ggagguuauucccagaaag

SEQ ID NO: 404416 - RNA, 19 nt, Artificial Sequence
  Description of Artificial Sequence: Synthetic oligonucleotide
  Antisense Strand to SEQ ID NO: 404415
cuuucugggaauaaccucc

SEQ ID NO: 404417 - RNA, 19 nt, Artificial Sequence
  Description of Artificial Sequence: Synthetic oligonucleotide
  Sense Strand Starting at position 1092 of SEQ ID NO: 318590
acaaaccugccuggugauu

SEQ ID NO: 404418 - RNA, 19 nt, Artificial Sequence
  Description of Artificial Sequence: Synthetic oligonucleotide
  Antisense Strand to SEQ ID NO: 404417
aaucaccaggcagguuugu

SEQ ID NO: 404419 - RNA, 19 nt, Artificial Sequence
  Description of Artificial Sequence: Synthetic oligonucleotide
  Sense Strand Starting at position 1092 of SEQ ID NO: 318595
ccugccuggugauugaaua

SEQ ID NO: 404420 - RNA, 19 nt, Artificial Sequence
  Description of Artificial Sequence: Synthetic oligonucleotide
  Antisense Strand to SEQ ID NO: 404419
uauucaaucaccaggcagg

SEQ ID NO: 404421 - RNA, 19 nt, Artificial Sequence
  Description of Artificial Sequence: Synthetic oligonucleotide
  Sense Strand Starting at position 1092 of SEQ ID NO: 318603
gugauugaauacuuugcua

SEQ ID NO: 404422 - RNA, 19 nt, Artificial Sequence
  Description of Artificial Sequence: Synthetic oligonucleotide
  Antisense Strand to SEQ ID NO: 404421
uagcaaaguauucaaucac

SEQ ID NO: 404423 - RNA, 19 nt, Artificial Sequence
  Description of Artificial Sequence: Synthetic oligonucleotide
  Sense Strand Starting at position 1092 of SEQ ID NO: 318651
uucuuugugcaguagugau

SEQ ID NO: 404424 - RNA, 19 nt, Artificial Sequence
  Description of Artificial Sequence: Synthetic oligonucleotide
  Antisense Strand to SEQ ID NO: 404423
aucacuacugcacaaagaa

SEQ ID NO: 404425 - RNA, 19 nt, Artificial Sequence
  Description of Artificial Sequence: Synthetic oligonucleotide
  Sense Strand Starting at position 1092 of SEQ ID NO: 318661
aguagugauguugauaacu

SEQ ID NO: 404426 - RNA, 19 nt, Artificial Sequence
  Description of Artificial Sequence: Synthetic oligonucleotide
  Antisense Strand to SEQ ID NO: 404425
aguuaucaacaucacuacu

SEQ ID NO: 404427 - RNA, 19 nt, Artificial Sequence
  Description of Artificial Sequence: Synthetic oligonucleotide
  Sense Strand Starting at position 1092 of SEQ ID NO: 318666
ugauguugauaacuaugca

SEQ ID NO: 404428 - RNA, 19 nt, Artificial Sequence
  Description of Artificial Sequence: Synthetic oligonucleotide
  Antisense Strand to SEQ ID NO: 404427
ugcauaguuaucaacauca

SEQ ID NO: 404429 - RNA, 19 nt, Artificial Sequence
  Description of Artificial Sequence: Synthetic oligonucleotide
  Sense Strand Starting at position 1092 of SEQ ID NO: 318670
guugauaacuaugcacuga

SEQ ID NO: 404430 - RNA, 19 nt, Artificial Sequence
  Description of Artificial Sequence: Synthetic oligonucleotide
  Antisense Strand to SEQ ID NO: 404429
ucagugcauaguuaucaac

SEQ ID NO: 404431 - RNA, 19 nt, Artificial Sequence
  Description of Artificial Sequence: Synthetic oligonucleotide
  Sense Strand Starting at position 1092 of SEQ ID NO: 318742
cugauuccauaagacaaga

SEQ ID NO: 404432 - RNA, 19 nt, Artificial Sequence
  Description of Artificial Sequence: Synthetic oligonucleotide
  Antisense Strand to SEQ ID NO: 404431
ucuugucuuauggaaucag

SEQ ID NO: 404433 - RNA, 19 nt, Artificial Sequence
  Description of Artificial Sequence: Synthetic oligonucleotide
  Sense Strand Starting at position 1092 of SEQ ID NO: 318775
gaaaucauggguuggcgua

SEQ ID NO: 404434 - RNA, 19 nt, Artificial Sequence
  Description of Artificial Sequence: Synthetic oligonucleotide
  Antisense Strand to SEQ ID NO: 404433
uacgccaacccaugauuuc

SEQ ID NO: 404435 - RNA, 19 nt, Artificial Sequence
  Description of Artificial Sequence: Synthetic oligonucleotide
  Sense Strand Starting at position 1092 of SEQ ID NO: 318776
aaaucauggguuggcguau

SEQ ID NO: 404436 - RNA, 19 nt, Artificial Sequence
  Description of Artificial Sequence: Synthetic oligonucleotide
  Antisense Strand to SEQ ID NO: 404435
auacgccaacccaugauuu

SEQ ID NO: 404437 - RNA, 19 nt, Artificial Sequence
  Description of Artificial Sequence: Synthetic oligonucleotide
  Sense Strand Starting at position 1092 of SEQ ID NO: 318908
gaagaaaugggcuggcuuu

SEQ ID NO: 404438 - RNA, 19 nt, Artificial Sequence
  Description of Artificial Sequence: Synthetic oligonucleotide
  Antisense Strand to SEQ ID NO: 404437
aaagccagcccauuucuuc

SEQ ID NO: 404439 - RNA, 19 nt, Artificial Sequence
  Description of Artificial Sequence: Synthetic oligonucleotide
  Sense Strand Starting at position 1092 of SEQ ID NO: 319081
cacccauuggcagaugagu

SEQ ID NO: 404440 - RNA, 19 nt, Artificial Sequence
  Description of Artificial Sequence: Synthetic oligonucleotide
  Antisense Strand to SEQ ID NO: 404439
acucaucugccaaugggug

SEQ ID NO: 404441 - RNA, 19 nt, Artificial Sequence
  Description of Artificial Sequence: Synthetic oligonucleotide
  Sense Strand Starting at position 1092 of SEQ ID NO: 319188
aggucauuagcauaaggca

SEQ ID NO: 404442 - RNA, 19 nt, Artificial Sequence
  Description of Artificial Sequence: Synthetic oligonucleotide
  Antisense Strand to SEQ ID NO: 404441
ugccuuaugcuaaugaccu

SEQ ID NO: 404443 - RNA, 19 nt, Artificial Sequence
  Description of Artificial Sequence: Synthetic oligonucleotide
  Sense Strand Starting at position 1093 of SEQ ID NO: 315316
acacauacuugagcuguga

SEQ ID NO: 404444 - RNA, 19 nt, Artificial Sequence
  Description of Artificial Sequence: Synthetic oligonucleotide
  Antisense Strand to SEQ ID NO: 404443
ucacagcucaaguaugugu

SEQ ID NO: 404445 - RNA, 19 nt, Artificial Sequence
  Description of Artificial Sequence: Synthetic oligonucleotide
  Sense Strand Starting at position 1093 of SEQ ID NO: 315318
acauacuugagcugugaga

SEQ ID NO: 404446 - RNA, 19 nt, Artificial Sequence
  Description of Artificial Sequence: Synthetic oligonucleotide
  Antisense Strand to SEQ ID NO: 404445
ucucacagcucaaguaugu

SEQ ID NO: 404447 - RNA, 19 nt, Artificial Sequence
  Description of Artificial Sequence: Synthetic oligonucleotide
  Sense Strand Starting at position 1093 of SEQ ID NO: 315360
gugguauagccucggacaa

SEQ ID NO: 404448 - RNA, 19 nt, Artificial Sequence
  Description of Artificial Sequence: Synthetic oligonucleotide
  Antisense Strand to SEQ ID NO: 404447
uuguccgaggcuauaccac

SEQ ID NO: 404449 - RNA, 19 nt, Artificial Sequence
  Description of Artificial Sequence: Synthetic oligonucleotide
  Sense Strand Starting at position 1093 of SEQ ID NO: 315609
gcacauacuccugacuguu

SEQ ID NO: 404450 - RNA, 19 nt, Artificial Sequence
  Description of Artificial Sequence: Synthetic oligonucleotide
  Antisense Strand to SEQ ID NO: 404449
aacagucaggaguaugugc

SEQ ID NO: 404451 - RNA, 19 nt, Artificial Sequence
  Description of Artificial Sequence: Synthetic oligonucleotide
  Sense Strand Starting at position 1093 of SEQ ID NO: 315692
cuggcugucucauugauca

SEQ ID NO: 404452 - RNA, 19 nt, Artificial Sequence
  Description of Artificial Sequence: Synthetic oligonucleotide
  Antisense Strand to SEQ ID NO: 404451
ugaucaaugagacagccag

SEQ ID NO: 404453 - RNA, 19 nt, Artificial Sequence
  Description of Artificial Sequence: Synthetic oligonucleotide
  Sense Strand Starting at position 1093 of SEQ ID NO: 315694
ggcugucucauugaucaug

SEQ ID NO: 404454 - RNA, 19 nt, Artificial Sequence
  Description of Artificial Sequence: Synthetic oligonucleotide
  Antisense Strand to SEQ ID NO: 404453
caugaucaaugagacagcc

SEQ ID NO: 404455 - RNA, 19 nt, Artificial Sequence
  Description of Artificial Sequence: Synthetic oligonucleotide
  Sense Strand Starting at position 1093 of SEQ ID NO: 315696
cugucucauugaucaugga

SEQ ID NO: 404456 - RNA, 19 nt, Artificial Sequence
  Description of Artificial Sequence: Synthetic oligonucleotide
  Antisense Strand to SEQ ID NO: 404455
uccaugaucaaugagacag

SEQ ID NO: 404457 - RNA, 19 nt, Artificial Sequence
  Description of Artificial Sequence: Synthetic oligonucleotide
  Sense Strand Starting at position 1093 of SEQ ID NO: 315871
cuuccaguucuggauaaau

SEQ ID NO: 404458 - RNA, 19 nt, Artificial Sequence
  Description of Artificial Sequence: Synthetic oligonucleotide
  Antisense Strand to SEQ ID NO: 404457
auuuauccagaacuggaag

SEQ ID NO: 404459 - RNA, 19 nt, Artificial Sequence
  Description of Artificial Sequence: Synthetic oligonucleotide
  Sense Strand Starting at position 1093 of SEQ ID NO: 315873
uccaguucuggauaaaugu

SEQ ID NO: 404460 - RNA, 19 nt, Artificial Sequence
  Description of Artificial Sequence: Synthetic oligonucleotide
  Antisense Strand to SEQ ID NO: 404459
acauuuauccagaacugga

SEQ ID NO: 404461 - RNA, 19 nt, Artificial Sequence
  Description of Artificial Sequence: Synthetic oligonucleotide
  Sense Strand Starting at position 1093 of SEQ ID NO: 315882
ggauaaauguacucagauu

SEQ ID NO: 404462 - RNA, 19 nt, Artificial Sequence
  Description of Artificial Sequence: Synthetic oligonucleotide
  Antisense Strand to SEQ ID NO: 404461
aaucugaguacauuuaucc

SEQ ID NO: 404463 - RNA, 19 nt, Artificial Sequence
  Description of Artificial Sequence: Synthetic oligonucleotide
  Sense Strand Starting at position 1093 of SEQ ID NO: 315894
ucagauuauggcugcauga

SEQ ID NO: 404464 - RNA, 19 nt, Artificial Sequence
  Description of Artificial Sequence: Synthetic oligonucleotide
  Antisense Strand to SEQ ID NO: 404463
ucaugcagccauaaucuga

SEQ ID NO: 404465 - RNA, 19 nt, Artificial Sequence
  Description of Artificial Sequence: Synthetic oligonucleotide
  Sense Strand Starting at position 1093 of SEQ ID NO: 315896
agauuauggcugcaugaac

SEQ ID NO: 404466 - RNA, 19 nt, Artificial Sequence
  Description of Artificial Sequence: Synthetic oligonucleotide
  Antisense Strand to SEQ ID NO: 404465
guucaugcagccauaaucu

SEQ ID NO: 404467 - RNA, 19 nt, Artificial Sequence
  Description of Artificial Sequence: Synthetic oligonucleotide
  Sense Strand Starting at position 1093 of SEQ ID NO: 315951
ggaguaaacccugagcuca

SEQ ID NO: 404468 - RNA, 19 nt, Artificial Sequence
  Description of Artificial Sequence: Synthetic oligonucleotide
  Antisense Strand to SEQ ID NO: 404467
ugagcucaggguuuacucc

SEQ ID NO: 404469 - RNA, 19 nt, Artificial Sequence
  Description of Artificial Sequence: Synthetic oligonucleotide
  Sense Strand Starting at position 1093 of SEQ ID NO: 315973
gcccuuaagcauggcuaga

SEQ ID NO: 404470 - RNA, 19 nt, Artificial Sequence
  Description of Artificial Sequence: Synthetic oligonucleotide
  Antisense Strand to SEQ ID NO: 404469
ucuagccaugcuuaagggc

SEQ ID NO: 404471 - RNA, 19 nt, Artificial Sequence
  Description of Artificial Sequence: Synthetic oligonucleotide
  Sense Strand Starting at position 1093 of SEQ ID NO: 315975
ccuuaagcauggcuagaaa

SEQ ID NO: 404472 - RNA, 19 nt, Artificial Sequence
  Description of Artificial Sequence: Synthetic oligonucleotide
  Antisense Strand to SEQ ID NO: 404471
uuucuagccaugcuuaagg

SEQ ID NO: 404473 - RNA, 19 nt, Artificial Sequence
  Description of Artificial Sequence: Synthetic oligonucleotide
  Sense Strand Starting at position 1093 of SEQ ID NO: 316049
agaggcucucuguggagua

SEQ ID NO: 404474 - RNA, 19 nt, Artificial Sequence
  Description of Artificial Sequence: Synthetic oligonucleotide
  Antisense Strand to SEQ ID NO: 404473
uacuccacagagagccucu

SEQ ID NO: 404475 - RNA, 19 nt, Artificial Sequence
  Description of Artificial Sequence: Synthetic oligonucleotide
  Sense Strand Starting at position 1093 of SEQ ID NO: 316312
ccaugauggaugugggcau

SEQ ID NO: 404476 - RNA, 19 nt, Artificial Sequence
  Description of Artificial Sequence: Synthetic oligonucleotide
  Antisense Strand to SEQ ID NO: 404475
augcccacauccaucaugg

SEQ ID NO: 404477 - RNA, 19 nt, Artificial Sequence
  Description of Artificial Sequence: Synthetic oligonucleotide
  Sense Strand Starting at position 1093 of SEQ ID NO: 316366
cggagaugugccgggaagu

SEQ ID NO: 404478 - RNA, 19 nt, Artificial Sequence
  Description of Artificial Sequence: Synthetic oligonucleotide
  Antisense Strand to SEQ ID NO: 404477
acuucccggcacaucuccg

SEQ ID NO: 404479 - RNA, 19 nt, Artificial Sequence
  Description of Artificial Sequence: Synthetic oligonucleotide
  Sense Strand Starting at position 1093 of SEQ ID NO: 316367
ggagaugugccgggaagug

SEQ ID NO: 404480 - RNA, 19 nt, Artificial Sequence
  Description of Artificial Sequence: Synthetic oligonucleotide
  Antisense Strand to SEQ ID NO: 404479
cacuucccggcacaucucc

SEQ ID NO: 404481 - RNA, 19 nt, Artificial Sequence
  Description of Artificial Sequence: Synthetic oligonucleotide
  Sense Strand Starting at position 1093 of SEQ ID NO: 316986
gcuuguguugcagacagca

SEQ ID NO: 404482 - RNA, 19 nt, Artificial Sequence
  Description of Artificial Sequence: Synthetic oligonucleotide
  Antisense Strand to SEQ ID NO: 404481
ugcugucugcaacacaagc

SEQ ID NO: 404483 - RNA, 19 nt, Artificial Sequence
  Description of Artificial Sequence: Synthetic oligonucleotide
  Sense Strand Starting at position 1093 of SEQ ID NO: 317207
ugaacuuuggcuggugaga

SEQ ID NO: 404484 - RNA, 19 nt, Artificial Sequence
  Description of Artificial Sequence: Synthetic oligonucleotide
  Antisense Strand to SEQ ID NO: 404483
ucucaccagccaaaguuca

SEQ ID NO: 404485 - RNA, 19 nt, Artificial Sequence
  Description of Artificial Sequence: Synthetic oligonucleotide
  Sense Strand Starting at position 1093 of SEQ ID NO: 317222
gagaaagccucuuucuagg

SEQ ID NO: 404486 - RNA, 19 nt, Artificial Sequence
  Description of Artificial Sequence: Synthetic oligonucleotide
  Antisense Strand to SEQ ID NO: 404485
ccuagaaagaggcuuucuc

SEQ ID NO: 404487 - RNA, 19 nt, Artificial Sequence
  Description of Artificial Sequence: Synthetic oligonucleotide
  Sense Strand Starting at position 1093 of SEQ ID NO: 317227
agccucuuucuaggacaaa

SEQ ID NO: 404488 - RNA, 19 nt, Artificial Sequence
  Description of Artificial Sequence: Synthetic oligonucleotide
  Antisense Strand to SEQ ID NO: 404487
uuuguccuagaaagaggcu

SEQ ID NO: 404489 - RNA, 19 nt, Artificial Sequence
  Description of Artificial Sequence: Synthetic oligonucleotide
  Sense Strand Starting at position 1093 of SEQ ID NO: 317265
caggaugagcacuagcuau

SEQ ID NO: 404490 - RNA, 19 nt, Artificial Sequence
  Description of Artificial Sequence: Synthetic oligonucleotide
  Antisense Strand to SEQ ID NO: 404489
auagcuagugcucauccug

SEQ ID NO: 404491 - RNA, 19 nt, Artificial Sequence
  Description of Artificial Sequence: Synthetic oligonucleotide
  Sense Strand Starting at position 1093 of SEQ ID NO: 317306
cccagugcugaguguucua

SEQ ID NO: 404492 - RNA, 19 nt, Artificial Sequence
  Description of Artificial Sequence: Synthetic oligonucleotide
  Antisense Strand to SEQ ID NO: 404491
uagaacacucagcacuggg

SEQ ID NO: 404493 - RNA, 19 nt, Artificial Sequence
  Description of Artificial Sequence: Synthetic oligonucleotide
  Sense Strand Starting at position 1093 of SEQ ID NO: 317309
agugcugaguguucuacca

SEQ ID NO: 404494 - RNA, 19 nt, Artificial Sequence
  Description of Artificial Sequence: Synthetic oligonucleotide
  Antisense Strand to SEQ ID NO: 404493
ugguagaacacucagcacu

SEQ ID NO: 404495 - RNA, 19 nt, Artificial Sequence
  Description of Artificial Sequence: Synthetic oligonucleotide
  Sense Strand Starting at position 1093 of SEQ ID NO: 317612
cuggcucucaccugagaag

SEQ ID NO: 404496 - RNA, 19 nt, Artificial Sequence
  Description of Artificial Sequence: Synthetic oligonucleotide
  Antisense Strand to SEQ ID NO: 404495
cuucucaggugagagccag

SEQ ID NO: 404497 - RNA, 19 nt, Artificial Sequence
  Description of Artificial Sequence: Synthetic oligonucleotide
  Sense Strand Starting at position 1093 of SEQ ID NO: 317627
gaaggagcuugcucuugga

SEQ ID NO: 404498 - RNA, 19 nt, Artificial Sequence
  Description of Artificial Sequence: Synthetic oligonucleotide
  Antisense Strand to SEQ ID NO: 404497
uccaagagcaagcuccuuc

SEQ ID NO: 404499 - RNA, 19 nt, Artificial Sequence
  Description of Artificial Sequence: Synthetic oligonucleotide
  Sense Strand Starting at position 1093 of SEQ ID NO: 317714
aagagcucaccugggaaua

SEQ ID NO: 404500 - RNA, 19 nt, Artificial Sequence
  Description of Artificial Sequence: Synthetic oligonucleotide
  Antisense Strand to SEQ ID NO: 404499
uauucccaggugagcucuu

SEQ ID NO: 404501 - RNA, 19 nt, Artificial Sequence
  Description of Artificial Sequence: Synthetic oligonucleotide
  Sense Strand Starting at position 1093 of SEQ ID NO: 317716
gagcucaccugggaauaga

SEQ ID NO: 404502 - RNA, 19 nt, Artificial Sequence
  Description of Artificial Sequence: Synthetic oligonucleotide
  Antisense Strand to SEQ ID NO: 404501
ucuauucccaggugagcuc

SEQ ID NO: 404503 - RNA, 19 nt, Artificial Sequence
  Description of Artificial Sequence: Synthetic oligonucleotide
  Sense Strand Starting at position 1093 of SEQ ID NO: 317778
agggaaucuuuaucagccu

SEQ ID NO: 404504 - RNA, 19 nt, Artificial Sequence
  Description of Artificial Sequence: Synthetic oligonucleotide
  Antisense Strand to SEQ ID NO: 404503
aggcugauaaagauucccu

SEQ ID NO: 404505 - RNA, 19 nt, Artificial Sequence
  Description of Artificial Sequence: Synthetic oligonucleotide
  Sense Strand Starting at position 1093 of SEQ ID NO: 317784
ucuuuaucagccuggcaag

SEQ ID NO: 404506 - RNA, 19 nt, Artificial Sequence
  Description of Artificial Sequence: Synthetic oligonucleotide
  Antisense Strand to SEQ ID NO: 404505
cuugccaggcugauaaaga

SEQ ID NO: 404507 - RNA, 19 nt, Artificial Sequence
  Description of Artificial Sequence: Synthetic oligonucleotide
  Sense Strand Starting at position 1093 of SEQ ID NO: 317861
gaucucacaugggaagaaa

SEQ ID NO: 404508 - RNA, 19 nt, Artificial Sequence
  Description of Artificial Sequence: Synthetic oligonucleotide
  Antisense Strand to SEQ ID NO: 404507
uuucuucccaugugagauc

SEQ ID NO: 404509 - RNA, 19 nt, Artificial Sequence
  Description of Artificial Sequence: Synthetic oligonucleotide
  Sense Strand Starting at position 1093 of SEQ ID NO: 317971
agcugucaccugggaauag

SEQ ID NO: 404510 - RNA, 19 nt, Artificial Sequence
  Description of Artificial Sequence: Synthetic oligonucleotide
  Antisense Strand to SEQ ID NO: 404509
cuauucccaggugacagcu

SEQ ID NO: 404511 - RNA, 19 nt, Artificial Sequence
  Description of Artificial Sequence: Synthetic oligonucleotide
  Sense Strand Starting at position 1093 of SEQ ID NO: 317982
gggaauagaucucacagaa

SEQ ID NO: 404512 - RNA, 19 nt, Artificial Sequence
  Description of Artificial Sequence: Synthetic oligonucleotide
  Antisense Strand to SEQ ID NO: 404511
uucugugagaucuauuccc

SEQ ID NO: 404513 - RNA, 19 nt, Artificial Sequence
  Description of Artificial Sequence: Synthetic oligonucleotide
  Sense Strand Starting at position 1093 of SEQ ID NO: 318051
caggaaaguucugaucuag

SEQ ID NO: 404514 - RNA, 19 nt, Artificial Sequence
  Description of Artificial Sequence: Synthetic oligonucleotide
  Antisense Strand to SEQ ID NO: 404513
cuagaucagaacuuuccug

SEQ ID NO: 404515 - RNA, 19 nt, Artificial Sequence
  Description of Artificial Sequence: Synthetic oligonucleotide
  Sense Strand Starting at position 1093 of SEQ ID NO: 318086
gggagaggaucccauuuga

SEQ ID NO: 404516 - RNA, 19 nt, Artificial Sequence
  Description of Artificial Sequence: Synthetic oligonucleotide
  Antisense Strand to SEQ ID NO: 404515
ucaaaugggauccucuccc

SEQ ID NO: 404517 - RNA, 19 nt, Artificial Sequence
  Description of Artificial Sequence: Synthetic oligonucleotide
  Sense Strand Starting at position 1093 of SEQ ID NO: 318175
ggaagauccucagagacuc

SEQ ID NO: 404518 - RNA, 19 nt, Artificial Sequence
  Description of Artificial Sequence: Synthetic oligonucleotide
  Antisense Strand to SEQ ID NO: 404517
gagucucugaggaucuucc

SEQ ID NO: 404519 - RNA, 19 nt, Artificial Sequence
  Description of Artificial Sequence: Synthetic oligonucleotide
  Sense Strand Starting at position 1093 of SEQ ID NO: 318200
ccgcuaucucaaggagauc

SEQ ID NO: 404520 - RNA, 19 nt, Artificial Sequence
  Description of Artificial Sequence: Synthetic oligonucleotide
  Antisense Strand to SEQ ID NO: 404519
gaucuccuugagauagcgg

SEQ ID NO: 404521 - RNA, 19 nt, Artificial Sequence
  Description of Artificial Sequence: Synthetic oligonucleotide
  Sense Strand Starting at position 1093 of SEQ ID NO: 318230
ucuccuuuccuacgugagu

SEQ ID NO: 404522 - RNA, 19 nt, Artificial Sequence
  Description of Artificial Sequence: Synthetic oligonucleotide
  Antisense Strand to SEQ ID NO: 404521
acucacguaggaaaggaga

SEQ ID NO: 404523 - RNA, 19 nt, Artificial Sequence
  Description of Artificial Sequence: Synthetic oligonucleotide
  Sense Strand Starting at position 1094 of SEQ ID NO: 315339
gcuuguguugcagacagca

SEQ ID NO: 404524 - RNA, 19 nt, Artificial Sequence
  Description of Artificial Sequence: Synthetic oligonucleotide
  Antisense Strand to SEQ ID NO: 404523
ugcugucugcaacacaagc

SEQ ID NO: 404525 - RNA, 19 nt, Artificial Sequence
  Description of Artificial Sequence: Synthetic oligonucleotide
  Sense Strand Starting at position 1094 of SEQ ID NO: 315560
ugaacuuuggcuggugaga

SEQ ID NO: 404526 - RNA, 19 nt, Artificial Sequence
  Description of Artificial Sequence: Synthetic oligonucleotide
  Antisense Strand to SEQ ID NO: 404525
ucucaccagccaaaguuca

SEQ ID NO: 404527 - RNA, 19 nt, Artificial Sequence
  Description of Artificial Sequence: Synthetic oligonucleotide
  Sense Strand Starting at position 1094 of SEQ ID NO: 315575
gagaaagccucuuucuagg

SEQ ID NO: 404528 - RNA, 19 nt, Artificial Sequence
  Description of Artificial Sequence: Synthetic oligonucleotide
  Antisense Strand to SEQ ID NO: 404527
ccuagaaagaggcuuucuc

SEQ ID NO: 404529 - RNA, 19 nt, Artificial Sequence
  Description of Artificial Sequence: Synthetic oligonucleotide
  Sense Strand Starting at position 1094 of SEQ ID NO: 315580
agccucuuucuaggacaaa

SEQ ID NO: 404530 - RNA, 19 nt, Artificial Sequence
  Description of Artificial Sequence: Synthetic oligonucleotide
  Antisense Strand to SEQ ID NO: 404529
uuuguccuagaaagaggcu

SEQ ID NO: 404531 - RNA, 19 nt, Artificial Sequence
  Description of Artificial Sequence: Synthetic oligonucleotide
  Sense Strand Starting at position 1094 of SEQ ID NO: 315618
caggaugagcacuagcuau

SEQ ID NO: 404532 - RNA, 19 nt, Artificial Sequence
  Description of Artificial Sequence: Synthetic oligonucleotide
  Antisense Strand to SEQ ID NO: 404531
auagcuagugcucauccug

SEQ ID NO: 404533 - RNA, 19 nt, Artificial Sequence
  Description of Artificial Sequence: Synthetic oligonucleotide
  Sense Strand Starting at position 1094 of SEQ ID NO: 315659
cccagugcugaguguucua

SEQ ID NO: 404534 - RNA, 19 nt, Artificial Sequence
  Description of Artificial Sequence: Synthetic oligonucleotide
  Antisense Strand to SEQ ID NO: 404533
uagaacacucagcacuggg

SEQ ID NO: 404535 - RNA, 19 nt, Artificial Sequence
  Description of Artificial Sequence: Synthetic oligonucleotide
  Sense Strand Starting at position 1094 of SEQ ID NO: 315662
agugcugaguguucuacca

SEQ ID NO: 404536 - RNA, 19 nt, Artificial Sequence
  Description of Artificial Sequence: Synthetic oligonucleotide
  Antisense Strand to SEQ ID NO: 404535
ugguagaacacucagcacu

SEQ ID NO: 404537 - RNA, 19 nt, Artificial Sequence
  Description of Artificial Sequence: Synthetic oligonucleotide
  Sense Strand Starting at position 1094 of SEQ ID NO: 315965
cuggcucucaccugagaag

SEQ ID NO: 404538 - RNA, 19 nt, Artificial Sequence
  Description of Artificial Sequence: Synthetic oligonucleotide
  Antisense Strand to SEQ ID NO: 404537
cuucucaggugagagccag

SEQ ID NO: 404539 - RNA, 19 nt, Artificial Sequence
  Description of Artificial Sequence: Synthetic oligonucleotide
  Sense Strand Starting at position 1094 of SEQ ID NO: 315980
gaaggagcuugcucuugga

SEQ ID NO: 404540 - RNA, 19 nt, Artificial Sequence
  Description of Artificial Sequence: Synthetic oligonucleotide
  Antisense Strand to SEQ ID NO: 404539
uccaagagcaagcuccuuc

SEQ ID NO: 404541 - RNA, 19 nt, Artificial Sequence
  Description of Artificial Sequence: Synthetic oligonucleotide
  Sense Strand Starting at position 1094 of SEQ ID NO: 316067
aagagcucaccugggaaua

SEQ ID NO: 404542 - RNA, 19 nt, Artificial Sequence
  Description of Artificial Sequence: Synthetic oligonucleotide
  Antisense Strand to SEQ ID NO: 404541
uauucccaggugagcucuu

SEQ ID NO: 404543 - RNA, 19 nt, Artificial Sequence
  Description of Artificial Sequence: Synthetic oligonucleotide
  Sense Strand Starting at position 1094 of SEQ ID NO: 316069
gagcucaccugggaauaga

SEQ ID NO: 404544 - RNA, 19 nt, Artificial Sequence
  Description of Artificial Sequence: Synthetic oligonucleotide
  Antisense Strand to SEQ ID NO: 404543
ucuauucccaggugagcuc

SEQ ID NO: 404545 - RNA, 19 nt, Artificial Sequence
  Description of Artificial Sequence: Synthetic oligonucleotide
  Sense Strand Starting at position 1094 of SEQ ID NO: 316131
agggaaucuuuaucagccu

SEQ ID NO: 404546 - RNA, 19 nt, Artificial Sequence
  Description of Artificial Sequence: Synthetic oligonucleotide
  Antisense Strand to SEQ ID NO: 404545
aggcugauaaagauucccu

SEQ ID NO: 404547 - RNA, 19 nt, Artificial Sequence
  Description of Artificial Sequence: Synthetic oligonucleotide
  Sense Strand Starting at position 1094 of SEQ ID NO: 316137
ucuuuaucagccuggcaag

SEQ ID NO: 404548 - RNA, 19 nt, Artificial Sequence
  Description of Artificial Sequence: Synthetic oligonucleotide
  Antisense Strand to SEQ ID NO: 404547
cuugccaggcugauaaaga

SEQ ID NO: 404549 - RNA, 19 nt, Artificial Sequence
  Description of Artificial Sequence: Synthetic oligonucleotide
  Sense Strand Starting at position 1094 of SEQ ID NO: 316214
gaucucacaugggaagaaa

SEQ ID NO: 404550 - RNA, 19 nt, Artificial Sequence
  Description of Artificial Sequence: Synthetic oligonucleotide
  Antisense Strand to SEQ ID NO: 404549
uuucuucccaugugagauc

SEQ ID NO: 404551 - RNA, 19 nt, Artificial Sequence
  Description of Artificial Sequence: Synthetic oligonucleotide
  Sense Strand Starting at position 1094 of SEQ ID NO: 316324
agcugucaccugggaauag

SEQ ID NO: 404552 - RNA, 19 nt, Artificial Sequence
  Description of Artificial Sequence: Synthetic oligonucleotide
  Antisense Strand to SEQ ID NO: 404551
cuauucccaggugacagcu

SEQ ID NO: 404553 - RNA, 19 nt, Artificial Sequence
  Description of Artificial Sequence: Synthetic oligonucleotide
  Sense Strand Starting at position 1094 of SEQ ID NO: 316335
gggaauagaucucacagaa

SEQ ID NO: 404554 - RNA, 19 nt, Artificial Sequence
  Description of Artificial Sequence: Synthetic oligonucleotide
  Antisense Strand to SEQ ID NO: 404553
uucugugagaucuauuccc

SEQ ID NO: 404555 - RNA, 19 nt, Artificial Sequence
  Description of Artificial Sequence: Synthetic oligonucleotide
  Sense Strand Starting at position 1094 of SEQ ID NO: 316404
caggaaaguucugaucuag

SEQ ID NO: 404556 - RNA, 19 nt, Artificial Sequence
  Description of Artificial Sequence: Synthetic oligonucleotide
  Antisense Strand to SEQ ID NO: 404555
cuagaucagaacuuuccug

SEQ ID NO: 404557 - RNA, 19 nt, Artificial Sequence
  Description of Artificial Sequence: Synthetic oligonucleotide
  Sense Strand Starting at position 1094 of SEQ ID NO: 316439
gggagaggaucccauuuga

SEQ ID NO: 404558 - RNA, 19 nt, Artificial Sequence
  Description of Artificial Sequence: Synthetic oligonucleotide
  Antisense Strand to SEQ ID NO: 404557
ucaaaugggauccucuccc

SEQ ID NO: 404559 - RNA, 19 nt, Artificial Sequence
  Description of Artificial Sequence: Synthetic oligonucleotide
  Sense Strand Starting at position 1094 of SEQ ID NO: 316528
ggaagauccucagagacuc

SEQ ID NO: 404560 - RNA, 19 nt, Artificial Sequence
  Description of Artificial Sequence: Synthetic oligonucleotide
  Antisense Strand to SEQ ID NO: 404559
gagucucugaggaucuucc

SEQ ID NO: 404561 - RNA, 19 nt, Artificial Sequence
  Description of Artificial Sequence: Synthetic oligonucleotide
  Sense Strand Starting at position 1094 of SEQ ID NO: 316553
ccgcuaucucaaggagauc

SEQ ID NO: 404562 - RNA, 19 nt, Artificial Sequence
  Description of Artificial Sequence: Synthetic oligonucleotide
  Antisense Strand to SEQ ID NO: 404561
gaucuccuugagauagcgg

SEQ ID NO: 404563 - RNA, 19 nt, Artificial Sequence
  Description of Artificial Sequence: Synthetic oligonucleotide
  Sense Strand Starting at position 1094 of SEQ ID NO: 316583
ucuccuuuccuacgugagu

SEQ ID NO: 404564 - RNA, 19 nt, Artificial Sequence
  Description of Artificial Sequence: Synthetic oligonucleotide
  Antisense Strand to SEQ ID NO: 404563
acucacguaggaaaggaga

SEQ ID NO: 404565 - RNA, 19 nt, Artificial Sequence
  Description of Artificial Sequence: Synthetic oligonucleotide
  Sense Strand Starting at position 1094 of SEQ ID NO: 317715
gccagaaaugguuggagga

SEQ ID NO: 404566 - RNA, 19 nt, Artificial Sequence
  Description of Artificial Sequence: Synthetic oligonucleotide
  Antisense Strand to SEQ ID NO: 404565
uccuccaaccauuucuggc

SEQ ID NO: 404567 - RNA, 19 nt, Artificial Sequence
  Description of Artificial Sequence: Synthetic oligonucleotide
  Sense Strand Starting at position 1094 of SEQ ID NO: 317867
aagagcaguuccucagguu

SEQ ID NO: 404568 - RNA, 19 nt, Artificial Sequence
  Description of Artificial Sequence: Synthetic oligonucleotide
  Antisense Strand to SEQ ID NO: 404567
aaccugaggaacugcucuu

SEQ ID NO: 404569 - RNA, 19 nt, Artificial Sequence
  Description of Artificial Sequence: Synthetic oligonucleotide
  Sense Strand Starting at position 1094 of SEQ ID NO: 317925
gcugcagacccugaagaau

SEQ ID NO: 404570 - RNA, 19 nt, Artificial Sequence
  Description of Artificial Sequence: Synthetic oligonucleotide
  Antisense Strand to SEQ ID NO: 404569
auucuucagggucugcagc

SEQ ID NO: 404571 - RNA, 19 nt, Artificial Sequence
  Description of Artificial Sequence: Synthetic oligonucleotide
  Sense Strand Starting at position 1094 of SEQ ID NO: 318061
gugaaagagaucugccaug

SEQ ID NO: 404572 - RNA, 19 nt, Artificial Sequence
  Description of Artificial Sequence: Synthetic oligonucleotide
  Antisense Strand to SEQ ID NO: 404571
cauggcagaucucuuucac

SEQ ID NO: 404573 - RNA, 19 nt, Artificial Sequence
  Description of Artificial Sequence: Synthetic oligonucleotide
  Sense Strand Starting at position 1094 of SEQ ID NO: 318066
agagaucugccaugaaaug

SEQ ID NO: 404574 - RNA, 19 nt, Artificial Sequence
  Description of Artificial Sequence: Synthetic oligonucleotide
  Antisense Strand to SEQ ID NO: 404573
cauuucauggcagaucucu

SEQ ID NO: 404575 - RNA, 19 nt, Artificial Sequence
  Description of Artificial Sequence: Synthetic oligonucleotide
  Sense Strand Starting at position 1094 of SEQ ID NO: 318115
ggcucagauuccucccaaa

SEQ ID NO: 404576 - RNA, 19 nt, Artificial Sequence
  Description of Artificial Sequence: Synthetic oligonucleotide
  Antisense Strand to SEQ ID NO: 404575
uuugggaggaaucugagcc

SEQ ID NO: 404577 - RNA, 19 nt, Artificial Sequence
  Description of Artificial Sequence: Synthetic oligonucleotide
  Sense Strand Starting at position 1094 of SEQ ID NO: 318118
ucagauuccucccaaaggu

SEQ ID NO: 404578 - RNA, 19 nt, Artificial Sequence
  Description of Artificial Sequence: Synthetic oligonucleotide
  Antisense Strand to SEQ ID NO: 404577
accuuugggaggaaucuga

SEQ ID NO: 404579 - RNA, 19 nt, Artificial Sequence
  Description of Artificial Sequence: Synthetic oligonucleotide
  Sense Strand Starting at position 1094 of SEQ ID NO: 318133
aggucagucuggcuugaau

SEQ ID NO: 404580 - RNA, 19 nt, Artificial Sequence
  Description of Artificial Sequence: Synthetic oligonucleotide
  Antisense Strand to SEQ ID NO: 404579
auucaagccagacugaccu

SEQ ID NO: 404581 - RNA, 19 nt, Artificial Sequence
  Description of Artificial Sequence: Synthetic oligonucleotide
  Sense Strand Starting at position 1094 of SEQ ID NO: 318135
gucagucuggcuugaauca

SEQ ID NO: 404582 - RNA, 19 nt, Artificial Sequence
  Description of Artificial Sequence: Synthetic oligonucleotide
  Antisense Strand to SEQ ID NO: 404581
ugauucaagccagacugac

SEQ ID NO: 404583 - RNA, 19 nt, Artificial Sequence
  Description of Artificial Sequence: Synthetic oligonucleotide
  Sense Strand Starting at position 1094 of SEQ ID NO: 318136
ucagucuggcuugaaucau

SEQ ID NO: 404584 - RNA, 19 nt, Artificial Sequence
  Description of Artificial Sequence: Synthetic oligonucleotide
  Antisense Strand to SEQ ID NO: 404583
augauucaagccagacuga

SEQ ID NO: 404585 - RNA, 19 nt, Artificial Sequence
  Description of Artificial Sequence: Synthetic oligonucleotide
  Sense Strand Starting at position 1094 of SEQ ID NO: 318385
ggguccuucucgguaagga

SEQ ID NO: 404586 - RNA, 19 nt, Artificial Sequence
  Description of Artificial Sequence: Synthetic oligonucleotide
  Antisense Strand to SEQ ID NO: 404585
uccuuaccgagaaggaccc

SEQ ID NO: 404587 - RNA, 19 nt, Artificial Sequence
  Description of Artificial Sequence: Synthetic oligonucleotide
  Sense Strand Starting at position 1094 of SEQ ID NO: 318386
gguccuucucgguaaggag

SEQ ID NO: 404588 - RNA, 19 nt, Artificial Sequence
  Description of Artificial Sequence: Synthetic oligonucleotide
  Antisense Strand to SEQ ID NO: 404587
cuccuuaccgagaaggacc

SEQ ID NO: 404589 - RNA, 19 nt, Artificial Sequence
  Description of Artificial Sequence: Synthetic oligonucleotide
  Sense Strand Starting at position 1094 of SEQ ID NO: 318453
uuucuaaucucccaggaag

SEQ ID NO: 404590 - RNA, 19 nt, Artificial Sequence
  Description of Artificial Sequence: Synthetic oligonucleotide
  Antisense Strand to SEQ ID NO: 404589
cuuccugggagauuagaaa

SEQ ID NO: 404591 - RNA, 19 nt, Artificial Sequence
  Description of Artificial Sequence: Synthetic oligonucleotide
  Sense Strand Starting at position 1094 of SEQ ID NO: 318471
gcugcuucccaagaguaug

SEQ ID NO: 404592 - RNA, 19 nt, Artificial Sequence
  Description of Artificial Sequence: Synthetic oligonucleotide
  Antisense Strand to SEQ ID NO: 404591
cauacucuugggaagcagc

SEQ ID NO: 404593 - RNA, 19 nt, Artificial Sequence
  Description of Artificial Sequence: Synthetic oligonucleotide
  Sense Strand Starting at position 1094 of SEQ ID NO: 318596
gcuguuaaacgggacucaa

SEQ ID NO: 404594 - RNA, 19 nt, Artificial Sequence
  Description of Artificial Sequence: Synthetic oligonucleotide
  Antisense Strand to SEQ ID NO: 404593
uugagucccguuuaacagc

SEQ ID NO: 404595 - RNA, 19 nt, Artificial Sequence
  Description of Artificial Sequence: Synthetic oligonucleotide
  Sense Strand Starting at position 1094 of SEQ ID NO: 318618
ugaccuucggccugggaga

SEQ ID NO: 404596 - RNA, 19 nt, Artificial Sequence
  Description of Artificial Sequence: Synthetic oligonucleotide
  Antisense Strand to SEQ ID NO: 404595
ucucccaggccgaagguca

SEQ ID NO: 404597 - RNA, 19 nt, Artificial Sequence
  Description of Artificial Sequence: Synthetic oligonucleotide
  Sense Strand Starting at position 1094 of SEQ ID NO: 319023
ccuacauucugggucuuga

SEQ ID NO: 404598 - RNA, 19 nt, Artificial Sequence
  Description of Artificial Sequence: Synthetic oligonucleotide
  Antisense Strand to SEQ ID NO: 404597
ucaagacccagaauguagg

SEQ ID NO: 404599 - RNA, 19 nt, Artificial Sequence
  Description of Artificial Sequence: Synthetic oligonucleotide
  Sense Strand Starting at position 1094 of SEQ ID NO: 319108
ggcagugucagggaaucaa

SEQ ID NO: 404600 - RNA, 19 nt, Artificial Sequence
  Description of Artificial Sequence: Synthetic oligonucleotide
  Antisense Strand to SEQ ID NO: 404599
uugauucccugacacugcc

SEQ ID NO: 404601 - RNA, 19 nt, Artificial Sequence
  Description of Artificial Sequence: Synthetic oligonucleotide
  Sense Strand Starting at position 1094 of SEQ ID NO: 319191
gcaggaaugucugacuaga

SEQ ID NO: 404602 - RNA, 19 nt, Artificial Sequence
  Description of Artificial Sequence: Synthetic oligonucleotide
  Antisense Strand to SEQ ID NO: 404601
ucuagucagacauuccugc

SEQ ID NO: 404603 - RNA, 19 nt, Artificial Sequence
  Description of Artificial Sequence: Synthetic oligonucleotide
  Sense Strand Starting at position 1095 of SEQ ID NO: 315411
uuuauccugggcuauaaua

SEQ ID NO: 404604 - RNA, 19 nt, Artificial Sequence
  Description of Artificial Sequence: Synthetic oligonucleotide
  Antisense Strand to SEQ ID NO: 404603
uauuauagcccaggauaaa

SEQ ID NO: 404605 - RNA, 19 nt, Artificial Sequence
  Description of Artificial Sequence: Synthetic oligonucleotide
  Sense Strand Starting at position 1095 of SEQ ID NO: 315419
gggcuauaauacucaugaa

SEQ ID NO: 404606 - RNA, 19 nt, Artificial Sequence
  Description of Artificial Sequence: Synthetic oligonucleotide
  Antisense Strand to SEQ ID NO: 404605
uucaugaguauuauagccc

SEQ ID NO: 404607 - RNA, 19 nt, Artificial Sequence
  Description of Artificial Sequence: Synthetic oligonucleotide
  Sense Strand Starting at position 1095 of SEQ ID NO: 315711
guacuaguauaaucccuga

SEQ ID NO: 404608 - RNA, 19 nt, Artificial Sequence
  Description of Artificial Sequence: Synthetic oligonucleotide
  Antisense Strand to SEQ ID NO: 404607
ucagggauuauacuaguac

SEQ ID NO: 404609 - RNA, 19 nt, Artificial Sequence
  Description of Artificial Sequence: Synthetic oligonucleotide
  Sense Strand Starting at position 1095 of SEQ ID NO: 315757
aguuucuuugccuauaaag

SEQ ID NO: 404610 - RNA, 19 nt, Artificial Sequence
  Description of Artificial Sequence: Synthetic oligonucleotide
  Antisense Strand to SEQ ID NO: 404609
cuuuauaggcaaagaaacu

SEQ ID NO: 404611 - RNA, 19 nt, Artificial Sequence
  Description of Artificial Sequence: Synthetic oligonucleotide
  Sense Strand Starting at position 1095 of SEQ ID NO: 315776
gguauauuguauccuaaua

SEQ ID NO: 404612 - RNA, 19 nt, Artificial Sequence
  Description of Artificial Sequence: Synthetic oligonucleotide
  Antisense Strand to SEQ ID NO: 404611
uauuaggauacaauauacc

SEQ ID NO: 404613 - RNA, 19 nt, Artificial Sequence
  Description of Artificial Sequence: Synthetic oligonucleotide
  Sense Strand Starting at position 1095 of SEQ ID NO: 315947
aggaauguucagcagagua

SEQ ID NO: 404614 - RNA, 19 nt, Artificial Sequence
  Description of Artificial Sequence: Synthetic oligonucleotide
  Antisense Strand to SEQ ID NO: 404613
uacucugcugaacauuccu

SEQ ID NO: 404615 - RNA, 19 nt, Artificial Sequence
  Description of Artificial Sequence: Synthetic oligonucleotide
  Sense Strand Starting at position 1095 of SEQ ID NO: 316005
ggcacagauugaucaacuu

SEQ ID NO: 404616 - RNA, 19 nt, Artificial Sequence
  Description of Artificial Sequence: Synthetic oligonucleotide
  Antisense Strand to SEQ ID NO: 404615
aaguugaucaaucugugcc

SEQ ID NO: 404617 - RNA, 19 nt, Artificial Sequence
  Description of Artificial Sequence: Synthetic oligonucleotide
  Sense Strand Starting at position 1095 of SEQ ID NO: 316143
acaguagugaagugaucau

SEQ ID NO: 404618 - RNA, 19 nt, Artificial Sequence
  Description of Artificial Sequence: Synthetic oligonucleotide
  Antisense Strand to SEQ ID NO: 404617
augaucacuucacuacugu

SEQ ID NO: 404619 - RNA, 19 nt, Artificial Sequence
  Description of Artificial Sequence: Synthetic oligonucleotide
  Sense Strand Starting at position 1095 of SEQ ID NO: 316147
uagugaagugaucauucca

SEQ ID NO: 404620 - RNA, 19 nt, Artificial Sequence
  Description of Artificial Sequence: Synthetic oligonucleotide
  Antisense Strand to SEQ ID NO: 404619
uggaaugaucacuucacua

SEQ ID NO: 404621 - RNA, 19 nt, Artificial Sequence
  Description of Artificial Sequence: Synthetic oligonucleotide
  Sense Strand Starting at position 1095 of SEQ ID NO: 316273
gcuguagauauuuguguca

SEQ ID NO: 404622 - RNA, 19 nt, Artificial Sequence
  Description of Artificial Sequence: Synthetic oligonucleotide
  Antisense Strand to SEQ ID NO: 404621
ugacacaaauaucuacagc

SEQ ID NO: 404623 - RNA, 19 nt, Artificial Sequence
  Description of Artificial Sequence: Synthetic oligonucleotide
  Sense Strand Starting at position 1095 of SEQ ID NO: 316358
uauuauauccaagagugug

SEQ ID NO: 404624 - RNA, 19 nt, Artificial Sequence
  Description of Artificial Sequence: Synthetic oligonucleotide
  Antisense Strand to SEQ ID NO: 404623
cacacucuuggauauaaua

SEQ ID NO: 404625 - RNA, 19 nt, Artificial Sequence
  Description of Artificial Sequence: Synthetic oligonucleotide
  Sense Strand Starting at position 1095 of SEQ ID NO: 316363
uauccaagagugugaaauu

SEQ ID NO: 404626 - RNA, 19 nt, Artificial Sequence
  Description of Artificial Sequence: Synthetic oligonucleotide
  Antisense Strand to SEQ ID NO: 404625
aauuucacacucuuggaua

SEQ ID NO: 404627 - RNA, 19 nt, Artificial Sequence
  Description of Artificial Sequence: Synthetic oligonucleotide
  Sense Strand Starting at position 1095 of SEQ ID NO: 316576
gaagauucccgaugaguuu

SEQ ID NO: 404628 - RNA, 19 nt, Artificial Sequence
  Description of Artificial Sequence: Synthetic oligonucleotide
  Antisense Strand to SEQ ID NO: 404627
aaacucaucgggaaucuuc

SEQ ID NO: 404629 - RNA, 19 nt, Artificial Sequence
  Description of Artificial Sequence: Synthetic oligonucleotide
  Sense Strand Starting at position 1095 of SEQ ID NO: 316668
uaguaauaugguuaugcac

SEQ ID NO: 404630 - RNA, 19 nt, Artificial Sequence
  Description of Artificial Sequence: Synthetic oligonucleotide
  Antisense Strand to SEQ ID NO: 404629
gugcauaaccauauuacua

SEQ ID NO: 404631 - RNA, 19 nt, Artificial Sequence
  Description of Artificial Sequence: Synthetic oligonucleotide
  Sense Strand Starting at position 1095 of SEQ ID NO: 316838
ucuguaugacuugacugua

SEQ ID NO: 404632 - RNA, 19 nt, Artificial Sequence
  Description of Artificial Sequence: Synthetic oligonucleotide
  Antisense Strand to SEQ ID NO: 404631
uacagucaagucauacaga

SEQ ID NO: 404633 - RNA, 19 nt, Artificial Sequence
  Description of Artificial Sequence: Synthetic oligonucleotide
  Sense Strand Starting at position 1095 of SEQ ID NO: 317177
uuuguuccacuaggaaaga

SEQ ID NO: 404634 - RNA, 19 nt, Artificial Sequence
  Description of Artificial Sequence: Synthetic oligonucleotide
  Antisense Strand to SEQ ID NO: 404633
ucuuuccuaguggaacaaa

SEQ ID NO: 404635 - RNA, 19 nt, Artificial Sequence
  Description of Artificial Sequence: Synthetic oligonucleotide
  Sense Strand Starting at position 1095 of SEQ ID NO: 317267
gcaguaauugggagcuggu

SEQ ID NO: 404636 - RNA, 19 nt, Artificial Sequence
  Description of Artificial Sequence: Synthetic oligonucleotide
  Antisense Strand to SEQ ID NO: 404635
accagcucccaauuacugc

SEQ ID NO: 404637 - RNA, 19 nt, Artificial Sequence
  Description of Artificial Sequence: Synthetic oligonucleotide
  Sense Strand Starting at position 1095 of SEQ ID NO: 317435
gaccauuguugacuugaau

SEQ ID NO: 404638 - RNA, 19 nt, Artificial Sequence
  Description of Artificial Sequence: Synthetic oligonucleotide
  Antisense Strand to SEQ ID NO: 404637
auucaagucaacaaugguc

SEQ ID NO: 404639 - RNA, 19 nt, Artificial Sequence
  Description of Artificial Sequence: Synthetic oligonucleotide
  Sense Strand Starting at position 1095 of SEQ ID NO: 317447
cuugaaugguuaccuggau

SEQ ID NO: 404640 - RNA, 19 nt, Artificial Sequence
  Description of Artificial Sequence: Synthetic oligonucleotide
  Antisense Strand to SEQ ID NO: 404639
auccagguaaccauucaag

SEQ ID NO: 404641 - RNA, 19 nt, Artificial Sequence
  Description of Artificial Sequence: Synthetic oligonucleotide
  Sense Strand Starting at position 1095 of SEQ ID NO: 317467
agcuuuggauuguuaggga

SEQ ID NO: 404642 - RNA, 19 nt, Artificial Sequence
  Description of Artificial Sequence: Synthetic oligonucleotide
  Antisense Strand to SEQ ID NO: 404641
ucccuaacaauccaaagcu

SEQ ID NO: 404643 - RNA, 19 nt, Artificial Sequence
  Description of Artificial Sequence: Synthetic oligonucleotide
  Sense Strand Starting at position 1095 of SEQ ID NO: 317482
gggacuuggguuugaaucu

SEQ ID NO: 404644 - RNA, 19 nt, Artificial Sequence
  Description of Artificial Sequence: Synthetic oligonucleotide
  Antisense Strand to SEQ ID NO: 404643
agauucaaacccaaguccc

SEQ ID NO: 404645 - RNA, 19 nt, Artificial Sequence
  Description of Artificial Sequence: Synthetic oligonucleotide
  Sense Strand Starting at position 1095 of SEQ ID NO: 317739
aacguagaguucucaaaua

SEQ ID NO: 404646 - RNA, 19 nt, Artificial Sequence
  Description of Artificial Sequence: Synthetic oligonucleotide
  Antisense Strand to SEQ ID NO: 404645
uauuugagaacucuacguu

SEQ ID NO: 404647 - RNA, 19 nt, Artificial Sequence
  Description of Artificial Sequence: Synthetic oligonucleotide
  Sense Strand Starting at position 1095 of SEQ ID NO: 317775
ugaucuugggccuaaguau

SEQ ID NO: 404648 - RNA, 19 nt, Artificial Sequence
  Description of Artificial Sequence: Synthetic oligonucleotide
  Antisense Strand to SEQ ID NO: 404647
auacuuaggcccaagauca

SEQ ID NO: 404649 - RNA, 19 nt, Artificial Sequence
  Description of Artificial Sequence: Synthetic oligonucleotide
  Sense Strand Starting at position 1095 of SEQ ID NO: 318062
aaauguuugguuugagaag

SEQ ID NO: 404650 - RNA, 19 nt, Artificial Sequence
  Description of Artificial Sequence: Synthetic oligonucleotide
  Antisense Strand to SEQ ID NO: 404649
cuucucaaaccaaacauuu

SEQ ID NO: 404651 - RNA, 19 nt, Artificial Sequence
  Description of Artificial Sequence: Synthetic oligonucleotide
  Sense Strand Starting at position 1095 of SEQ ID NO: 318068
uugguuugagaagguaauu

SEQ ID NO: 404652 - RNA, 19 nt, Artificial Sequence
  Description of Artificial Sequence: Synthetic oligonucleotide
  Antisense Strand to SEQ ID NO: 404651
aauuaccuucucaaaccaa

SEQ ID NO: 404653 - RNA, 19 nt, Artificial Sequence
  Description of Artificial Sequence: Synthetic oligonucleotide
  Sense Strand Starting at position 1095 of SEQ ID NO: 318130
cuccgagaugacugagaua

SEQ ID NO: 404654 - RNA, 19 nt, Artificial Sequence
  Description of Artificial Sequence: Synthetic oligonucleotide
  Antisense Strand to SEQ ID NO: 404653
uaucucagucaucucggag

SEQ ID NO: 404655 - RNA, 19 nt, Artificial Sequence
  Description of Artificial Sequence: Synthetic oligonucleotide
  Sense Strand Starting at position 1095 of SEQ ID NO: 318168
uuucuagguguuuauaaca

SEQ ID NO: 404656 - RNA, 19 nt, Artificial Sequence
  Description of Artificial Sequence: Synthetic oligonucleotide
  Antisense Strand to SEQ ID NO: 404655
uguuauaaacaccuagaaa

SEQ ID NO: 404657 - RNA, 19 nt, Artificial Sequence
  Description of Artificial Sequence: Synthetic oligonucleotide
  Sense Strand Starting at position 1095 of SEQ ID NO: 318259
uaguaaugaugguuaaucu

SEQ ID NO: 404658 - RNA, 19 nt, Artificial Sequence
  Description of Artificial Sequence: Synthetic oligonucleotide
  Antisense Strand to SEQ ID NO: 404657
agauuaaccaucauuacua

SEQ ID NO: 404659 - RNA, 19 nt, Artificial Sequence
  Description of Artificial Sequence: Synthetic oligonucleotide
  Sense Strand Starting at position 1095 of SEQ ID NO: 318260
aguaaugaugguuaaucuu

SEQ ID NO: 404660 - RNA, 19 nt, Artificial Sequence
  Description of Artificial Sequence: Synthetic oligonucleotide
  Antisense Strand to SEQ ID NO: 404659
aagauuaaccaucauuacu

SEQ ID NO: 404661 - RNA, 19 nt, Artificial Sequence
  Description of Artificial Sequence: Synthetic oligonucleotide
  Sense Strand Starting at position 1095 of SEQ ID NO: 318266
gaugguuaaucuuuacuga

SEQ ID NO: 404662 - RNA, 19 nt, Artificial Sequence
  Description of Artificial Sequence: Synthetic oligonucleotide
  Antisense Strand to SEQ ID NO: 404661
ucaguaaagauuaaccauc

SEQ ID NO: 404663 - RNA, 19 nt, Artificial Sequence
  Description of Artificial Sequence: Synthetic oligonucleotide
  Sense Strand Starting at position 1095 of SEQ ID NO: 318314
agcacuugacauggauuaa

SEQ ID NO: 404664 - RNA, 19 nt, Artificial Sequence
  Description of Artificial Sequence: Synthetic oligonucleotide
  Antisense Strand to SEQ ID NO: 404663
uuaauccaugucaagugcu

SEQ ID NO: 404665 - RNA, 19 nt, Artificial Sequence
  Description of Artificial Sequence: Synthetic oligonucleotide
  Sense Strand Starting at position 1095 of SEQ ID NO: 318327
gauuaacucguuuagucau

SEQ ID NO: 404666 - RNA, 19 nt, Artificial Sequence
  Description of Artificial Sequence: Synthetic oligonucleotide
  Antisense Strand to SEQ ID NO: 404665
augacuaaacgaguuaauc

SEQ ID NO: 404667 - RNA, 19 nt, Artificial Sequence
  Description of Artificial Sequence: Synthetic oligonucleotide
  Sense Strand Starting at position 1095 of SEQ ID NO: 318505
ggcauuugccagugacaug

SEQ ID NO: 404668 - RNA, 19 nt, Artificial Sequence
  Description of Artificial Sequence: Synthetic oligonucleotide
  Antisense Strand to SEQ ID NO: 404667
caugucacuggcaaaugcc

SEQ ID NO: 404669 - RNA, 19 nt, Artificial Sequence
  Description of Artificial Sequence: Synthetic oligonucleotide
  Sense Strand Starting at position 1095 of SEQ ID NO: 318519
acaugacauucugcaggaa

SEQ ID NO: 404670 - RNA, 19 nt, Artificial Sequence
  Description of Artificial Sequence: Synthetic oligonucleotide
  Antisense Strand to SEQ ID NO: 404669
uuccugcagaaugucaugu

SEQ ID NO: 404671 - RNA, 19 nt, Artificial Sequence
  Description of Artificial Sequence: Synthetic oligonucleotide
  Sense Strand Starting at position 1095 of SEQ ID NO: 318548
ugccgcgucguaaaugaua

SEQ ID NO: 404672 - RNA, 19 nt, Artificial Sequence
  Description of Artificial Sequence: Synthetic oligonucleotide
  Antisense Strand to SEQ ID NO: 404671
uaucauuuacgacgcggca

SEQ ID NO: 404673 - RNA, 19 nt, Artificial Sequence
  Description of Artificial Sequence: Synthetic oligonucleotide
  Sense Strand Starting at position 1095 of SEQ ID NO: 318841
caccaucugggauaugcua

SEQ ID NO: 404674 - RNA, 19 nt, Artificial Sequence
  Description of Artificial Sequence: Synthetic oligonucleotide
  Antisense Strand to SEQ ID NO: 404673
uagcauaucccagauggug

SEQ ID NO: 404675 - RNA, 19 nt, Artificial Sequence
  Description of Artificial Sequence: Synthetic oligonucleotide
  Sense Strand Starting at position 1095 of SEQ ID NO: 318884
gggugcgauucauuuacau

SEQ ID NO: 404676 - RNA, 19 nt, Artificial Sequence
  Description of Artificial Sequence: Synthetic oligonucleotide
  Antisense Strand to SEQ ID NO: 404675
auguaaaugaaucgcaccc

SEQ ID NO: 404677 - RNA, 19 nt, Artificial Sequence
  Description of Artificial Sequence: Synthetic oligonucleotide
  Sense Strand Starting at position 1095 of SEQ ID NO: 319191
uaauguaaucuugguggau

SEQ ID NO: 404678 - RNA, 19 nt, Artificial Sequence
  Description of Artificial Sequence: Synthetic oligonucleotide
  Antisense Strand to SEQ ID NO: 404677
auccaccaagauuacauua

SEQ ID NO: 404679 - RNA, 19 nt, Artificial Sequence
  Description of Artificial Sequence: Synthetic oligonucleotide
  Sense Strand Starting at position 1095 of SEQ ID NO: 319192
aauguaaucuugguggaug

SEQ ID NO: 404680 - RNA, 19 nt, Artificial Sequence
  Description of Artificial Sequence: Synthetic oligonucleotide
  Antisense Strand to SEQ ID NO: 404679
cauccaccaagauuacauu

SEQ ID NO: 404681 - RNA, 19 nt, Artificial Sequence
  Description of Artificial Sequence: Synthetic oligonucleotide
  Sense Strand Starting at position 1095 of SEQ ID NO: 319214
gaaguucuagguggugaca

SEQ ID NO: 404682 - RNA, 19 nt, Artificial Sequence
  Description of Artificial Sequence: Synthetic oligonucleotide
  Antisense Strand to SEQ ID NO: 404681
ugucaccaccuagaacuuc

SEQ ID NO: 404683 - RNA, 19 nt, Artificial Sequence
  Description of Artificial Sequence: Synthetic oligonucleotide
  Sense Strand Starting at position 1096 of SEQ ID NO: 315404
aaauguuaucugcaaugug

SEQ ID NO: 404684 - RNA, 19 nt, Artificial Sequence
  Description of Artificial Sequence: Synthetic oligonucleotide
  Antisense Strand to SEQ ID NO: 404683
cacauugcagauaacauuu

SEQ ID NO: 404685 - RNA, 19 nt, Artificial Sequence
  Description of Artificial Sequence: Synthetic oligonucleotide
  Sense Strand Starting at position 1096 of SEQ ID NO: 315568
acgaauaaacccuguucca

SEQ ID NO: 404686 - RNA, 19 nt, Artificial Sequence
  Description of Artificial Sequence: Synthetic oligonucleotide
  Antisense Strand to SEQ ID NO: 404685
uggaacaggguuuauucgu

SEQ ID NO: 404687 - RNA, 19 nt, Artificial Sequence
  Description of Artificial Sequence: Synthetic oligonucleotide
  Sense Strand Starting at position 1096 of SEQ ID NO: 315598
gcuggauucuggguacaac

SEQ ID NO: 404688 - RNA, 19 nt, Artificial Sequence
  Description of Artificial Sequence: Synthetic oligonucleotide
  Antisense Strand to SEQ ID NO: 404687
guuguacccagaauccagc

SEQ ID NO: 404689 - RNA, 19 nt, Artificial Sequence
  Description of Artificial Sequence: Synthetic oligonucleotide
  Sense Strand Starting at position 1096 of SEQ ID NO: 315626
agaaauggauuagaaagua

SEQ ID NO: 404690 - RNA, 19 nt, Artificial Sequence
  Description of Artificial Sequence: Synthetic oligonucleotide
  Antisense Strand to SEQ ID NO: 404689
uacuuucuaauccauuucu

SEQ ID NO: 404691 - RNA, 19 nt, Artificial Sequence
  Description of Artificial Sequence: Synthetic oligonucleotide
  Sense Strand Starting at position 1096 of SEQ ID NO: 315713
aagugugcauuuguguauu

SEQ ID NO: 404692 - RNA, 19 nt, Artificial Sequence
  Description of Artificial Sequence: Synthetic oligonucleotide
  Antisense Strand to SEQ ID NO: 404691
aauacacaaaugcacacuu

SEQ ID NO: 404693 - RNA, 19 nt, Artificial Sequence
  Description of Artificial Sequence: Synthetic oligonucleotide
  Sense Strand Starting at position 1096 of SEQ ID NO: 315753
ggacucgguuguguuauuu

SEQ ID NO: 404694 - RNA, 19 nt, Artificial Sequence
  Description of Artificial Sequence: Synthetic oligonucleotide
  Antisense Strand to SEQ ID NO: 404693
aaauaacacaaccgagucc

SEQ ID NO: 404695 - RNA, 19 nt, Artificial Sequence
  Description of Artificial Sequence: Synthetic oligonucleotide
  Sense Strand Starting at position 1096 of SEQ ID NO: 315757
ucgguuguguuauuugaug

SEQ ID NO: 404696 - RNA, 19 nt, Artificial Sequence
  Description of Artificial Sequence: Synthetic oligonucleotide
  Antisense Strand to SEQ ID NO: 404695
caucaaauaacacaaccga

SEQ ID NO: 404697 - RNA, 19 nt, Artificial Sequence
  Description of Artificial Sequence: Synthetic oligonucleotide
  Sense Strand Starting at position 1096 of SEQ ID NO: 315802
gugaucauuugauugcucu

SEQ ID NO: 404698 - RNA, 19 nt, Artificial Sequence
  Description of Artificial Sequence: Synthetic oligonucleotide
  Antisense Strand to SEQ ID NO: 404697
agagcaaucaaaugaucac

SEQ ID NO: 404699 - RNA, 19 nt, Artificial Sequence
  Description of Artificial Sequence: Synthetic oligonucleotide
  Sense Strand Starting at position 1096 of SEQ ID NO: 315853
gaagcucauuuggacgaaa

SEQ ID NO: 404700 - RNA, 19 nt, Artificial Sequence
  Description of Artificial Sequence: Synthetic oligonucleotide
  Antisense Strand to SEQ ID NO: 404699
uuucguccaaaugagcuuc

SEQ ID NO: 404701 - RNA, 19 nt, Artificial Sequence
  Description of Artificial Sequence: Synthetic oligonucleotide
  Sense Strand Starting at position 1096 of SEQ ID NO: 316163
auaguuaacgcccaaccau

SEQ ID NO: 404702 - RNA, 19 nt, Artificial Sequence
  Description of Artificial Sequence: Synthetic oligonucleotide
  Antisense Strand to SEQ ID NO: 404701
augguugggcguuaacuau

SEQ ID NO: 404703 - RNA, 19 nt, Artificial Sequence
  Description of Artificial Sequence: Synthetic oligonucleotide
  Sense Strand Starting at position 1096 of SEQ ID NO: 316195
cugaguggcggccaagaau

SEQ ID NO: 404704 - RNA, 19 nt, Artificial Sequence
  Description of Artificial Sequence: Synthetic oligonucleotide
  Antisense Strand to SEQ ID NO: 404703
auucuuggccgccacucag

SEQ ID NO: 404705 - RNA, 19 nt, Artificial Sequence
  Description of Artificial Sequence: Synthetic oligonucleotide
  Sense Strand Starting at position 1096 of SEQ ID NO: 316284
gguccaccugaguggauaa

SEQ ID NO: 404706 - RNA, 19 nt, Artificial Sequence
  Description of Artificial Sequence: Synthetic oligonucleotide
  Antisense Strand to SEQ ID NO: 404705
uuauccacucagguggacc

SEQ ID NO: 404707 - RNA, 19 nt, Artificial Sequence
  Description of Artificial Sequence: Synthetic oligonucleotide
  Sense Strand Starting at position 1096 of SEQ ID NO: 316346
caagauuugcgacgaccga

SEQ ID NO: 404708 - RNA, 19 nt, Artificial Sequence
  Description of Artificial Sequence: Synthetic oligonucleotide
  Antisense Strand to SEQ ID NO: 404707
ucggucgucgcaaaucuug

SEQ ID NO: 404709 - RNA, 19 nt, Artificial Sequence
  Description of Artificial Sequence: Synthetic oligonucleotide
  Sense Strand Starting at position 1096 of SEQ ID NO: 316401
agaguaauuugagacugaa

SEQ ID NO: 404710 - RNA, 19 nt, Artificial Sequence
  Description of Artificial Sequence: Synthetic oligonucleotide
  Antisense Strand to SEQ ID NO: 404709
uucagucucaaauuacucu

SEQ ID NO: 404711 - RNA, 19 nt, Artificial Sequence
  Description of Artificial Sequence: Synthetic oligonucleotide
  Sense Strand Starting at position 1096 of SEQ ID NO: 316438
gaagaaagcuuggucugua

SEQ ID NO: 404712 - RNA, 19 nt, Artificial Sequence
  Description of Artificial Sequence: Synthetic oligonucleotide
  Antisense Strand to SEQ ID NO: 404711
uacagaccaagcuuucuuc

SEQ ID NO: 404713 - RNA, 19 nt, Artificial Sequence
  Description of Artificial Sequence: Synthetic oligonucleotide
  Sense Strand Starting at position 1096 of SEQ ID NO: 316439
aagaaagcuuggucuguau

SEQ ID NO: 404714 - RNA, 19 nt, Artificial Sequence
  Description of Artificial Sequence: Synthetic oligonucleotide
  Antisense Strand to SEQ ID NO: 404713
auacagaccaagcuuucuu

SEQ ID NO: 404715 - RNA, 19 nt, Artificial Sequence
  Description of Artificial Sequence: Synthetic oligonucleotide
  Sense Strand Starting at position 1096 of SEQ ID NO: 316517
cccugaagcacguaaagaa

SEQ ID NO: 404716 - RNA, 19 nt, Artificial Sequence
  Description of Artificial Sequence: Synthetic oligonucleotide
  Antisense Strand to SEQ ID NO: 404715
uucuuuacgugcuucaggg

SEQ ID NO: 404717 - RNA, 19 nt, Artificial Sequence
  Description of Artificial Sequence: Synthetic oligonucleotide
  Sense Strand Starting at position 1096 of SEQ ID NO: 316554
ugcuuaguucggcccggaa

SEQ ID NO: 404718 - RNA, 19 nt, Artificial Sequence
  Description of Artificial Sequence: Synthetic oligonucleotide
  Antisense Strand to SEQ ID NO: 404717
uuccgggccgaacuaagca

SEQ ID NO: 404719 - RNA, 19 nt, Artificial Sequence
  Description of Artificial Sequence: Synthetic oligonucleotide
  Sense Strand Starting at position 1096 of SEQ ID NO: 316756
ggagauggugggugacaua

SEQ ID NO: 404720 - RNA, 19 nt, Artificial Sequence
  Description of Artificial Sequence: Synthetic oligonucleotide
  Antisense Strand to SEQ ID NO: 404719
uaugucacccaccaucucc

SEQ ID NO: 404721 - RNA, 19 nt, Artificial Sequence
  Description of Artificial Sequence: Synthetic oligonucleotide
  Sense Strand Starting at position 1096 of SEQ ID NO: 317170
gagcacuuucucuacagga

SEQ ID NO: 404722 - RNA, 19 nt, Artificial Sequence
  Description of Artificial Sequence: Synthetic oligonucleotide
  Antisense Strand to SEQ ID NO: 404721
uccuguagagaaagugcuc

SEQ ID NO: 404723 - RNA, 19 nt, Artificial Sequence
  Description of Artificial Sequence: Synthetic oligonucleotide
  Sense Strand Starting at position 1096 of SEQ ID NO: 317172
gcacuuucucuacaggacu

SEQ ID NO: 404724 - RNA, 19 nt, Artificial Sequence
  Description of Artificial Sequence: Synthetic oligonucleotide
  Antisense Strand to SEQ ID NO: 404723
aguccuguagagaaagugc

SEQ ID NO: 404725 - RNA, 19 nt, Artificial Sequence
  Description of Artificial Sequence: Synthetic oligonucleotide
  Sense Strand Starting at position 1096 of SEQ ID NO: 317309
gaaacaaugcuugguggga

SEQ ID NO: 404726 - RNA, 19 nt, Artificial Sequence
  Description of Artificial Sequence: Synthetic oligonucleotide
  Antisense Strand to SEQ ID NO: 404725
ucccaccaagcauuguuuc

SEQ ID NO: 404727 - RNA, 19 nt, Artificial Sequence
  Description of Artificial Sequence: Synthetic oligonucleotide
  Sense Strand Starting at position 1096 of SEQ ID NO: 317310
aaacaaugcuuggugggaa

SEQ ID NO: 404728 - RNA, 19 nt, Artificial Sequence
  Description of Artificial Sequence: Synthetic oligonucleotide
  Antisense Strand to SEQ ID NO: 404727
uucccaccaagcauuguuu

SEQ ID NO: 404729 - RNA, 19 nt, Artificial Sequence
  Description of Artificial Sequence: Synthetic oligonucleotide
  Sense Strand Starting at position 1096 of SEQ ID NO: 317511
gguugagugauguaaucac

SEQ ID NO: 404730 - RNA, 19 nt, Artificial Sequence
  Description of Artificial Sequence: Synthetic oligonucleotide
  Antisense Strand to SEQ ID NO: 404729
gugauuacaucacucaacc

SEQ ID NO: 404731 - RNA, 19 nt, Artificial Sequence
  Description of Artificial Sequence: Synthetic oligonucleotide
  Sense Strand Starting at position 1096 of SEQ ID NO: 317646
ggguagaaggauugacguu

SEQ ID NO: 404732 - RNA, 19 nt, Artificial Sequence
  Description of Artificial Sequence: Synthetic oligonucleotide
  Antisense Strand to SEQ ID NO: 404731
aacgucaauccuucuaccc

SEQ ID NO: 404733 - RNA, 19 nt, Artificial Sequence
  Description of Artificial Sequence: Synthetic oligonucleotide
  Sense Strand Starting at position 1096 of SEQ ID NO: 317647
gguagaaggauugacguuu

SEQ ID NO: 404734 - RNA, 19 nt, Artificial Sequence
  Description of Artificial Sequence: Synthetic oligonucleotide
  Antisense Strand to SEQ ID NO: 404733
aaacgucaauccuucuacc

SEQ ID NO: 404735 - RNA, 19 nt, Artificial Sequence
  Description of Artificial Sequence: Synthetic oligonucleotide
  Sense Strand Starting at position 1096 of SEQ ID NO: 317653
aggauugacguuuacgaag

SEQ ID NO: 404736 - RNA, 19 nt, Artificial Sequence
  Description of Artificial Sequence: Synthetic oligonucleotide
  Antisense Strand to SEQ ID NO: 404735
cuucguaaacgucaauccu

SEQ ID NO: 404737 - RNA, 19 nt, Artificial Sequence
  Description of Artificial Sequence: Synthetic oligonucleotide
  Sense Strand Starting at position 1096 of SEQ ID NO: 317755
gugccuacauauuuauagu

SEQ ID NO: 404738 - RNA, 19 nt, Artificial Sequence
  Description of Artificial Sequence: Synthetic oligonucleotide
  Antisense Strand to SEQ ID NO: 404737
acuauaaauauguaggcac

SEQ ID NO: 404739 - RNA, 19 nt, Artificial Sequence
  Description of Artificial Sequence: Synthetic oligonucleotide
  Sense Strand Starting at position 1096 of SEQ ID NO: 317863
cucuaauuacauuggugau

SEQ ID NO: 404740 - RNA, 19 nt, Artificial Sequence
  Description of Artificial Sequence: Synthetic oligonucleotide
  Antisense Strand to SEQ ID NO: 404739
aucaccaauguaauuagag

SEQ ID NO: 404741 - RNA, 19 nt, Artificial Sequence
  Description of Artificial Sequence: Synthetic oligonucleotide
  Sense Strand Starting at position 1096 of SEQ ID NO: 317869
uuacauuggugauuggaag

SEQ ID NO: 404742 - RNA, 19 nt, Artificial Sequence
  Description of Artificial Sequence: Synthetic oligonucleotide
  Antisense Strand to SEQ ID NO: 404741
cuuccaaucaccaauguaa

SEQ ID NO: 404743 - RNA, 19 nt, Artificial Sequence
  Description of Artificial Sequence: Synthetic oligonucleotide
  Sense Strand Starting at position 1096 of SEQ ID NO: 317881
uuggaagacucguuacauc

SEQ ID NO: 404744 - RNA, 19 nt, Artificial Sequence
  Description of Artificial Sequence: Synthetic oligonucleotide
  Antisense Strand to SEQ ID NO: 404743
gauguaacgagucuuccaa

SEQ ID NO: 404745 - RNA, 19 nt, Artificial Sequence
  Description of Artificial Sequence: Synthetic oligonucleotide
  Sense Strand Starting at position 1096 of SEQ ID NO: 318382
ugggauuacaaacguaaug

SEQ ID NO: 404746 - RNA, 19 nt, Artificial Sequence
  Description of Artificial Sequence: Synthetic oligonucleotide
  Antisense Strand to SEQ ID NO: 404745
cauuacguuuguaauccca

SEQ ID NO: 404747 - RNA, 19 nt, Artificial Sequence
  Description of Artificial Sequence: Synthetic oligonucleotide
  Sense Strand Starting at position 1096 of SEQ ID NO: 318703
acuguaaaguccucuaauc

SEQ ID NO: 404748 - RNA, 19 nt, Artificial Sequence
  Description of Artificial Sequence: Synthetic oligonucleotide
  Antisense Strand to SEQ ID NO: 404747
gauuagaggacuuuacagu

SEQ ID NO: 404749 - RNA, 19 nt, Artificial Sequence
  Description of Artificial Sequence: Synthetic oligonucleotide
  Sense Strand Starting at position 1096 of SEQ ID NO: 318705
uguaaaguccucuaaucuu

SEQ ID NO: 404750 - RNA, 19 nt, Artificial Sequence
  Description of Artificial Sequence: Synthetic oligonucleotide
  Antisense Strand to SEQ ID NO: 404749
aagauuagaggacuuuaca

SEQ ID NO: 404751 - RNA, 19 nt, Artificial Sequence
  Description of Artificial Sequence: Synthetic oligonucleotide
  Sense Strand Starting at position 1096 of SEQ ID NO: 318714
cucuaaucuuuguuaagua

SEQ ID NO: 404752 - RNA, 19 nt, Artificial Sequence
  Description of Artificial Sequence: Synthetic oligonucleotide
  Antisense Strand to SEQ ID NO: 404751
uacuuaacaaagauuagag

SEQ ID NO: 404753 - RNA, 19 nt, Artificial Sequence
  Description of Artificial Sequence: Synthetic oligonucleotide
  Sense Strand Starting at position 1096 of SEQ ID NO: 318718
aaucuuuguuaaguagaag

SEQ ID NO: 404754 - RNA, 19 nt, Artificial Sequence
  Description of Artificial Sequence: Synthetic oligonucleotide
  Antisense Strand to SEQ ID NO: 404753
cuucuacuuaacaaagauu

SEQ ID NO: 404755 - RNA, 19 nt, Artificial Sequence
  Description of Artificial Sequence: Synthetic oligonucleotide
  Sense Strand Starting at position 1096 of SEQ ID NO: 319075
aaccaugagugggauuuau

SEQ ID NO: 404756 - RNA, 19 nt, Artificial Sequence
  Description of Artificial Sequence: Synthetic oligonucleotide
  Antisense Strand to SEQ ID NO: 404755
auaaaucccacucaugguu

SEQ ID NO: 404757 - RNA, 19 nt, Artificial Sequence
  Description of Artificial Sequence: Synthetic oligonucleotide
  Sense Strand Starting at position 1096 of SEQ ID NO: 319129
uugugccuuggacagauua

SEQ ID NO: 404758 - RNA, 19 nt, Artificial Sequence
  Description of Artificial Sequence: Synthetic oligonucleotide
  Antisense Strand to SEQ ID NO: 404757
uaaucuguccaaggcacaa

SEQ ID NO: 404759 - RNA, 19 nt, Artificial Sequence
  Description of Artificial Sequence: Synthetic oligonucleotide
  Sense Strand Starting at position 1096 of SEQ ID NO: 319131
gugccuuggacagauuacu

SEQ ID NO: 404760 - RNA, 19 nt, Artificial Sequence
  Description of Artificial Sequence: Synthetic oligonucleotide
  Antisense Strand to SEQ ID NO: 404759
aguaaucuguccaaggcac

SEQ ID NO: 404761 - RNA, 19 nt, Artificial Sequence
  Description of Artificial Sequence: Synthetic oligonucleotide
  Sense Strand Starting at position 1096 of SEQ ID NO: 319204
cagagaguugugggaguua

SEQ ID NO: 404762 - RNA, 19 nt, Artificial Sequence
  Description of Artificial Sequence: Synthetic oligonucleotide
  Antisense Strand to SEQ ID NO: 404761
uaacucccacaacucucug

SEQ ID NO: 404763 - RNA, 19 nt, Artificial Sequence
  Description of Artificial Sequence: Synthetic oligonucleotide
  Sense Strand Starting at position 1097 of SEQ ID NO: 315422
uugcuauagguccagaaac

SEQ ID NO: 404764 - RNA, 19 nt, Artificial Sequence
  Description of Artificial Sequence: Synthetic oligonucleotide
  Antisense Strand to SEQ ID NO: 404763
guuucuggaccuauagcaa

SEQ ID NO: 404765 - RNA, 19 nt, Artificial Sequence
  Description of Artificial Sequence: Synthetic oligonucleotide
  Sense Strand Starting at position 1097 of SEQ ID NO: 315424
gcuauagguccagaaacac

SEQ ID NO: 404766 - RNA, 19 nt, Artificial Sequence
  Description of Artificial Sequence: Synthetic oligonucleotide
  Antisense Strand to SEQ ID NO: 404765
guguuucuggaccuauagc

SEQ ID NO: 404767 - RNA, 19 nt, Artificial Sequence
  Description of Artificial Sequence: Synthetic oligonucleotide
  Sense Strand Starting at position 1097 of SEQ ID NO: 315439
acaccuguugauugaauua

SEQ ID NO: 404768 - RNA, 19 nt, Artificial Sequence
  Description of Artificial Sequence: Synthetic oligonucleotide
  Antisense Strand to SEQ ID NO: 404767
uaauucaaucaacaggugu

SEQ ID NO: 404769 - RNA, 19 nt, Artificial Sequence
  Description of Artificial Sequence: Synthetic oligonucleotide
  Sense Strand Starting at position 1097 of SEQ ID NO: 315501
uuuguaucugauugacuca

SEQ ID NO: 404770 - RNA, 19 nt, Artificial Sequence
  Description of Artificial Sequence: Synthetic oligonucleotide
  Antisense Strand to SEQ ID NO: 404769
ugagucaaucagauacaaa

SEQ ID NO: 404771 - RNA, 19 nt, Artificial Sequence
  Description of Artificial Sequence: Synthetic oligonucleotide
  Sense Strand Starting at position 1097 of SEQ ID NO: 315504
guaucugauugacucacau

SEQ ID NO: 404772 - RNA, 19 nt, Artificial Sequence
  Description of Artificial Sequence: Synthetic oligonucleotide
  Antisense Strand to SEQ ID NO: 404771
augugagucaaucagauac

SEQ ID NO: 404773 - RNA, 19 nt, Artificial Sequence
  Description of Artificial Sequence: Synthetic oligonucleotide
  Sense Strand Starting at position 1097 of SEQ ID NO: 315544
uuucuuguugaggaaugca

SEQ ID NO: 404774 - RNA, 19 nt, Artificial Sequence
  Description of Artificial Sequence: Synthetic oligonucleotide
  Antisense Strand to SEQ ID NO: 404773
ugcauuccucaacaagaaa

SEQ ID NO: 404775 - RNA, 19 nt, Artificial Sequence
  Description of Artificial Sequence: Synthetic oligonucleotide
  Sense Strand Starting at position 1097 of SEQ ID NO: 315552
ugaggaaugcaagguuaaa

SEQ ID NO: 404776 - RNA, 19 nt, Artificial Sequence
  Description of Artificial Sequence: Synthetic oligonucleotide
  Antisense Strand to SEQ ID NO: 404775
uuuaaccuugcauuccuca

SEQ ID NO: 404777 - RNA, 19 nt, Artificial Sequence
  Description of Artificial Sequence: Synthetic oligonucleotide
  Sense Strand Starting at position 1097 of SEQ ID NO: 315614
gcauuauuauuuccauguu

SEQ ID NO: 404778 - RNA, 19 nt, Artificial Sequence
  Description of Artificial Sequence: Synthetic oligonucleotide
  Antisense Strand to SEQ ID NO: 404777
aacauggaaauaauaaugc

SEQ ID NO: 404779 - RNA, 19 nt, Artificial Sequence
  Description of Artificial Sequence: Synthetic oligonucleotide
  Sense Strand Starting at position 1097 of SEQ ID NO: 315659
agagaugugugauuagaug

SEQ ID NO: 404780 - RNA, 19 nt, Artificial Sequence
  Description of Artificial Sequence: Synthetic oligonucleotide
  Antisense Strand to SEQ ID NO: 404779
caucuaaucacacaucucu

SEQ ID NO: 404781 - RNA, 19 nt, Artificial Sequence
  Description of Artificial Sequence: Synthetic oligonucleotide
  Sense Strand Starting at position 1097 of SEQ ID NO: 315665
gugugauuagauggaagug

SEQ ID NO: 404782 - RNA, 19 nt, Artificial Sequence
  Description of Artificial Sequence: Synthetic oligonucleotide
  Antisense Strand to SEQ ID NO: 404781
cacuuccaucuaaucacac

SEQ ID NO: 404783 - RNA, 19 nt, Artificial Sequence
  Description of Artificial Sequence: Synthetic oligonucleotide
  Sense Strand Starting at position 1097 of SEQ ID NO: 315675
auggaagugcuccaugcau

SEQ ID NO: 404784 - RNA, 19 nt, Artificial Sequence
  Description of Artificial Sequence: Synthetic oligonucleotide
  Antisense Strand to SEQ ID NO: 404783
augcauggagcacuuccau

SEQ ID NO: 404785 - RNA, 19 nt, Artificial Sequence
  Description of Artificial Sequence: Synthetic oligonucleotide
  Sense Strand Starting at position 1097 of SEQ ID NO: 315958
uuuggcuaugacuauauca

SEQ ID NO: 404786 - RNA, 19 nt, Artificial Sequence
  Description of Artificial Sequence: Synthetic oligonucleotide
  Antisense Strand to SEQ ID NO: 404785
ugauauagucauagccaaa

SEQ ID NO: 404787 - RNA, 19 nt, Artificial Sequence
  Description of Artificial Sequence: Synthetic oligonucleotide
  Sense Strand Starting at position 1097 of SEQ ID NO: 316590
auggaaauaucugaaacac

SEQ ID NO: 404788 - RNA, 19 nt, Artificial Sequence
  Description of Artificial Sequence: Synthetic oligonucleotide
  Antisense Strand to SEQ ID NO: 404787
guguuucagauauuuccau

SEQ ID NO: 404789 - RNA, 19 nt, Artificial Sequence
  Description of Artificial Sequence: Synthetic oligonucleotide
  Sense Strand Starting at position 1097 of SEQ ID NO: 316629
cuaguuaguguuugaaaug

SEQ ID NO: 404790 - RNA, 19 nt, Artificial Sequence
  Description of Artificial Sequence: Synthetic oligonucleotide
  Antisense Strand to SEQ ID NO: 404789
cauuucaaacacuaacuag

SEQ ID NO: 404791 - RNA, 19 nt, Artificial Sequence
  Description of Artificial Sequence: Synthetic oligonucleotide
  Sense Strand Starting at position 1097 of SEQ ID NO: 316634
uaguguuugaaauggagga

SEQ ID NO: 404792 - RNA, 19 nt, Artificial Sequence
  Description of Artificial Sequence: Synthetic oligonucleotide
  Antisense Strand to SEQ ID NO: 404791
uccuccauuucaaacacua

SEQ ID NO: 404793 - RNA, 19 nt, Artificial Sequence
  Description of Artificial Sequence: Synthetic oligonucleotide
  Sense Strand Starting at position 1097 of SEQ ID NO: 316656
cguagaaaucaaugaaucu

SEQ ID NO: 404794 - RNA, 19 nt, Artificial Sequence
  Description of Artificial Sequence: Synthetic oligonucleotide
  Antisense Strand to SEQ ID NO: 404793
agauucauugauuucuacg

SEQ ID NO: 404795 - RNA, 19 nt, Artificial Sequence
  Description of Artificial Sequence: Synthetic oligonucleotide
  Sense Strand Starting at position 1097 of SEQ ID NO: 317714
caggaugcagaaugugauu

SEQ ID NO: 404796 - RNA, 19 nt, Artificial Sequence
  Description of Artificial Sequence: Synthetic oligonucleotide
  Antisense Strand to SEQ ID NO: 404795
aaucacauucugcauccug

SEQ ID NO: 404797 - RNA, 19 nt, Artificial Sequence
  Description of Artificial Sequence: Synthetic oligonucleotide
  Sense Strand Starting at position 1097 of SEQ ID NO: 317716
ggaugcagaaugugauuaa

SEQ ID NO: 404798 - RNA, 19 nt, Artificial Sequence
  Description of Artificial Sequence: Synthetic oligonucleotide
  Antisense Strand to SEQ ID NO: 404797
uuaaucacauucugcaucc

SEQ ID NO: 404799 - RNA, 19 nt, Artificial Sequence
  Description of Artificial Sequence: Synthetic oligonucleotide
  Sense Strand Starting at position 1097 of SEQ ID NO: 317719
ugcagaaugugauuaauac

SEQ ID NO: 404800 - RNA, 19 nt, Artificial Sequence
  Description of Artificial Sequence: Synthetic oligonucleotide
  Antisense Strand to SEQ ID NO: 404799
guauuaaucacauucugca

SEQ ID NO: 404801 - RNA, 19 nt, Artificial Sequence
  Description of Artificial Sequence: Synthetic oligonucleotide
  Sense Strand Starting at position 1097 of SEQ ID NO: 317720
gcagaaugugauuaauacu

SEQ ID NO: 404802 - RNA, 19 nt, Artificial Sequence
  Description of Artificial Sequence: Synthetic oligonucleotide
  Antisense Strand to SEQ ID NO: 404801
aguauuaaucacauucugc

SEQ ID NO: 404803 - RNA, 19 nt, Artificial Sequence
  Description of Artificial Sequence: Synthetic oligonucleotide
  Sense Strand Starting at position 1097 of SEQ ID NO: 318067
uucggaggcugaguagauu

SEQ ID NO: 404804 - RNA, 19 nt, Artificial Sequence
  Description of Artificial Sequence: Synthetic oligonucleotide
  Antisense Strand to SEQ ID NO: 404803
aaucuacucagccuccgaa

SEQ ID NO: 404805 - RNA, 19 nt, Artificial Sequence
  Description of Artificial Sequence: Synthetic oligonucleotide
  Sense Strand Starting at position 1097 of SEQ ID NO: 318073
ggcugaguagauugaagaa

SEQ ID NO: 404806 - RNA, 19 nt, Artificial Sequence
  Description of Artificial Sequence: Synthetic oligonucleotide
  Antisense Strand to SEQ ID NO: 404805
uucuucaaucuacucagcc

SEQ ID NO: 404807 - RNA, 19 nt, Artificial Sequence
  Description of Artificial Sequence: Synthetic oligonucleotide
  Sense Strand Starting at position 1097 of SEQ ID NO: 318080
uagauugaagaacguuaaa

SEQ ID NO: 404808 - RNA, 19 nt, Artificial Sequence
  Description of Artificial Sequence: Synthetic oligonucleotide
  Antisense Strand to SEQ ID NO: 404807
uuuaacguucuucaaucua

SEQ ID NO: 404809 - RNA, 19 nt, Artificial Sequence
  Description of Artificial Sequence: Synthetic oligonucleotide
  Sense Strand Starting at position 1097 of SEQ ID NO: 318261
gaucccaacucguuuagau

SEQ ID NO: 404810 - RNA, 19 nt, Artificial Sequence
  Description of Artificial Sequence: Synthetic oligonucleotide
  Antisense Strand to SEQ ID NO: 404809
aucuaaacgaguugggauc

SEQ ID NO: 404811 - RNA, 19 nt, Artificial Sequence
  Description of Artificial Sequence: Synthetic oligonucleotide
  Sense Strand Starting at position 1097 of SEQ ID NO: 318270
ucguuuagauuucagagga

SEQ ID NO: 404812 - RNA, 19 nt, Artificial Sequence
  Description of Artificial Sequence: Synthetic oligonucleotide
  Antisense Strand to SEQ ID NO: 404811
uccucugaaaucuaaacga

SEQ ID NO: 404813 - RNA, 19 nt, Artificial Sequence
  Description of Artificial Sequence: Synthetic oligonucleotide
  Sense Strand Starting at position 1097 of SEQ ID NO: 318410
ugaccuuccuggcuguaua

SEQ ID NO: 404814 - RNA, 19 nt, Artificial Sequence
  Description of Artificial Sequence: Synthetic oligonucleotide
  Antisense Strand to SEQ ID NO: 404813
uauacagccaggaagguca

SEQ ID NO: 404815 - RNA, 19 nt, Artificial Sequence
  Description of Artificial Sequence: Synthetic oligonucleotide
  Sense Strand Starting at position 1097 of SEQ ID NO: 318411
gaccuuccuggcuguauaa

SEQ ID NO: 404816 - RNA, 19 nt, Artificial Sequence
  Description of Artificial Sequence: Synthetic oligonucleotide
  Antisense Strand to SEQ ID NO: 404815
uuauacagccaggaagguc

SEQ ID NO: 404817 - RNA, 19 nt, Artificial Sequence
  Description of Artificial Sequence: Synthetic oligonucleotide
  Sense Strand Starting at position 1097 of SEQ ID NO: 318413
ccuuccuggcuguauaauu

SEQ ID NO: 404818 - RNA, 19 nt, Artificial Sequence
  Description of Artificial Sequence: Synthetic oligonucleotide
  Antisense Strand to SEQ ID NO: 404817
aauuauacagccaggaagg

SEQ ID NO: 404819 - RNA, 19 nt, Artificial Sequence
  Description of Artificial Sequence: Synthetic oligonucleotide
  Sense Strand Starting at position 1097 of SEQ ID NO: 318439
auauauuggcaacaguaca

SEQ ID NO: 404820 - RNA, 19 nt, Artificial Sequence
  Description of Artificial Sequence: Synthetic oligonucleotide
  Antisense Strand to SEQ ID NO: 404819
uguacuguugccaauauau

SEQ ID NO: 404821 - RNA, 19 nt, Artificial Sequence
  Description of Artificial Sequence: Synthetic oligonucleotide
  Sense Strand Starting at position 1097 of SEQ ID NO: 318621
aguaaauuaaugggaaguu

SEQ ID NO: 404822 - RNA, 19 nt, Artificial Sequence
  Description of Artificial Sequence: Synthetic oligonucleotide
  Antisense Strand to SEQ ID NO: 404821
aacuucccauuaauuuacu

SEQ ID NO: 404823 - RNA, 19 nt, Artificial Sequence
  Description of Artificial Sequence: Synthetic oligonucleotide
  Sense Strand Starting at position 1097 of SEQ ID NO: 318776
agggaaguacuaggucuau

SEQ ID NO: 404824 - RNA, 19 nt, Artificial Sequence
  Description of Artificial Sequence: Synthetic oligonucleotide
  Antisense Strand to SEQ ID NO: 404823
auagaccuaguacuucccu

SEQ ID NO: 404825 - RNA, 19 nt, Artificial Sequence
  Description of Artificial Sequence: Synthetic oligonucleotide
  Sense Strand Starting at position 1097 of SEQ ID NO: 318835
auaacuuauuggccaagua

SEQ ID NO: 404826 - RNA, 19 nt, Artificial Sequence
  Description of Artificial Sequence: Synthetic oligonucleotide
  Antisense Strand to SEQ ID NO: 404825
uacuuggccaauaaguuau

SEQ ID NO: 404827 - RNA, 19 nt, Artificial Sequence
  Description of Artificial Sequence: Synthetic oligonucleotide
  Sense Strand Starting at position 1097 of SEQ ID NO: 319019
auaucuaccuagguauaca

SEQ ID NO: 404828 - RNA, 19 nt, Artificial Sequence
  Description of Artificial Sequence: Synthetic oligonucleotide
  Antisense Strand to SEQ ID NO: 404827
uguauaccuagguagauau

SEQ ID NO: 404829 - RNA, 19 nt, Artificial Sequence
  Description of Artificial Sequence: Synthetic oligonucleotide
  Sense Strand Starting at position 1097 of SEQ ID NO: 319068
uuuaguuuccgggagagag

SEQ ID NO: 404830 - RNA, 19 nt, Artificial Sequence
  Description of Artificial Sequence: Synthetic oligonucleotide
  Antisense Strand to SEQ ID NO: 404829
cucucucccggaaacuaaa

SEQ ID NO: 404831 - RNA, 19 nt, Artificial Sequence
  Description of Artificial Sequence: Synthetic oligonucleotide
  Sense Strand Starting at position 1097 of SEQ ID NO: 319140
ucaggaguccaucauacuu

SEQ ID NO: 404832 - RNA, 19 nt, Artificial Sequence
  Description of Artificial Sequence: Synthetic oligonucleotide
  Antisense Strand to SEQ ID NO: 404831
aaguaugauggacuccuga

SEQ ID NO: 404833 - RNA, 19 nt, Artificial Sequence
  Description of Artificial Sequence: Synthetic oligonucleotide
  Sense Strand Starting at position 1097 of SEQ ID NO: 319183
uuggcaugucaguauguau

SEQ ID NO: 404834 - RNA, 19 nt, Artificial Sequence
  Description of Artificial Sequence: Synthetic oligonucleotide
  Antisense Strand to SEQ ID NO: 404833
auacauacugacaugccaa

SEQ ID NO: 404835 - RNA, 19 nt, Artificial Sequence
  Description of Artificial Sequence: Synthetic oligonucleotide
  Sense Strand Starting at position 1097 of SEQ ID NO: 319194
guauguaugguauaugucu

SEQ ID NO: 404836 - RNA, 19 nt, Artificial Sequence
  Description of Artificial Sequence: Synthetic oligonucleotide
  Antisense Strand to SEQ ID NO: 404835
agacauauaccauacauac

SEQ ID NO: 404837 - RNA, 19 nt, Artificial Sequence
  Description of Artificial Sequence: Synthetic oligonucleotide
  Sense Strand Starting at position 1097 of SEQ ID NO: 319199
uaugguauaugucuuuagu

SEQ ID NO: 404838 - RNA, 19 nt, Artificial Sequence
  Description of Artificial Sequence: Synthetic oligonucleotide
  Antisense Strand to SEQ ID NO: 404837
acuaaagacauauaccaua

SEQ ID NO: 404839 - RNA, 19 nt, Artificial Sequence
  Description of Artificial Sequence: Synthetic oligonucleotide
  Sense Strand Starting at position 1097 of SEQ ID NO: 319201
ugguauaugucuuuaguaa

SEQ ID NO: 404840 - RNA, 19 nt, Artificial Sequence
  Description of Artificial Sequence: Synthetic oligonucleotide
  Antisense Strand to SEQ ID NO: 404839
uuacuaaagacauauacca

SEQ ID NO: 404841 - RNA, 19 nt, Artificial Sequence
  Description of Artificial Sequence: Synthetic oligonucleotide
  Sense Strand Starting at position 1097 of SEQ ID NO: 319202
gguauaugucuuuaguaaa

SEQ ID NO: 404842 - RNA, 19 nt, Artificial Sequence
  Description of Artificial Sequence: Synthetic oligonucleotide
  Antisense Strand to SEQ ID NO: 404841
uuuacuaaagacauauacc

SEQ ID NO: 404843 - RNA, 19 nt, Artificial Sequence
  Description of Artificial Sequence: Synthetic oligonucleotide
  Sense Strand Starting at position 1098 of SEQ ID NO: 315326
uuaagcuuucuuuaaggaa

SEQ ID NO: 404844 - RNA, 19 nt, Artificial Sequence
  Description of Artificial Sequence: Synthetic oligonucleotide
  Antisense Strand to SEQ ID NO: 404843
uuccuuaaagaaagcuuaa

SEQ ID NO: 404845 - RNA, 19 nt, Artificial Sequence
  Description of Artificial Sequence: Synthetic oligonucleotide
  Sense Strand Starting at position 1098 of SEQ ID NO: 315385
uuuguucuggaauguaaau

SEQ ID NO: 404846 - RNA, 19 nt, Artificial Sequence
  Description of Artificial Sequence: Synthetic oligonucleotide
  Antisense Strand to SEQ ID NO: 404845
auuuacauuccagaacaaa

SEQ ID NO: 404847 - RNA, 19 nt, Artificial Sequence
  Description of Artificial Sequence: Synthetic oligonucleotide
  Sense Strand Starting at position 1098 of SEQ ID NO: 315391
cuggaauguaaaugaguau

SEQ ID NO: 404848 - RNA, 19 nt, Artificial Sequence
  Description of Artificial Sequence: Synthetic oligonucleotide
  Antisense Strand to SEQ ID NO: 404847
auacucauuuacauuccag

SEQ ID NO: 404849 - RNA, 19 nt, Artificial Sequence
  Description of Artificial Sequence: Synthetic oligonucleotide
  Sense Strand Starting at position 1098 of SEQ ID NO: 315460
gugccuuuggaacagauga

SEQ ID NO: 404850 - RNA, 19 nt, Artificial Sequence
  Description of Artificial Sequence: Synthetic oligonucleotide
  Antisense Strand to SEQ ID NO: 404849
ucaucuguuccaaaggcac

SEQ ID NO: 404851 - RNA, 19 nt, Artificial Sequence
  Description of Artificial Sequence: Synthetic oligonucleotide
  Sense Strand Starting at position 1098 of SEQ ID NO: 315487
auaaauggcucugcagagu

SEQ ID NO: 404852 - RNA, 19 nt, Artificial Sequence
  Description of Artificial Sequence: Synthetic oligonucleotide
  Antisense Strand to SEQ ID NO: 404851
acucugcagagccauuuau

SEQ ID NO: 404853 - RNA, 19 nt, Artificial Sequence
  Description of Artificial Sequence: Synthetic oligonucleotide
  Sense Strand Starting at position 1098 of SEQ ID NO: 315564
guggcuuguaguguguaau

SEQ ID NO: 404854 - RNA, 19 nt, Artificial Sequence
  Description of Artificial Sequence: Synthetic oligonucleotide
  Antisense Strand to SEQ ID NO: 404853
auuacacacuacaagccac

SEQ ID NO: 404855 - RNA, 19 nt, Artificial Sequence
  Description of Artificial Sequence: Synthetic oligonucleotide
  Sense Strand Starting at position 1098 of SEQ ID NO: 315602
uguauuugcauguguguua

SEQ ID NO: 404856 - RNA, 19 nt, Artificial Sequence
  Description of Artificial Sequence: Synthetic oligonucleotide
  Antisense Strand to SEQ ID NO: 404855
uaacacacaugcaaauaca

SEQ ID NO: 404857 - RNA, 19 nt, Artificial Sequence
  Description of Artificial Sequence: Synthetic oligonucleotide
  Sense Strand Starting at position 1098 of SEQ ID NO: 315606
uuugcauguguguuagguu

SEQ ID NO: 404858 - RNA, 19 nt, Artificial Sequence
  Description of Artificial Sequence: Synthetic oligonucleotide
  Antisense Strand to SEQ ID NO: 404857
aaccuaacacacaugcaaa

SEQ ID NO: 404859 - RNA, 19 nt, Artificial Sequence
  Description of Artificial Sequence: Synthetic oligonucleotide
  Sense Strand Starting at position 1098 of SEQ ID NO: 315635
ugcacauaccuguaucuuu

SEQ ID NO: 404860 - RNA, 19 nt, Artificial Sequence
  Description of Artificial Sequence: Synthetic oligonucleotide
  Antisense Strand to SEQ ID NO: 404859
aaagauacagguaugugca

SEQ ID NO: 404861 - RNA, 19 nt, Artificial Sequence
  Description of Artificial Sequence: Synthetic oligonucleotide
  Sense Strand Starting at position 1098 of SEQ ID NO: 315653
ucauaaguauaugugagaa

SEQ ID NO: 404862 - RNA, 19 nt, Artificial Sequence
  Description of Artificial Sequence: Synthetic oligonucleotide
  Antisense Strand to SEQ ID NO: 404861
uucucacauauacuuauga

SEQ ID NO: 404863 - RNA, 19 nt, Artificial Sequence
  Description of Artificial Sequence: Synthetic oligonucleotide
  Sense Strand Starting at position 1098 of SEQ ID NO: 315663
augugagaauuccuguuua

SEQ ID NO: 404864 - RNA, 19 nt, Artificial Sequence
  Description of Artificial Sequence: Synthetic oligonucleotide
  Antisense Strand to SEQ ID NO: 404863
uaaacaggaauucucacau

SEQ ID NO: 404865 - RNA, 19 nt, Artificial Sequence
  Description of Artificial Sequence: Synthetic oligonucleotide
  Sense Strand Starting at position 1098 of SEQ ID NO: 315716
aucuguuaugcauaugcuu

SEQ ID NO: 404866 - RNA, 19 nt, Artificial Sequence
  Description of Artificial Sequence: Synthetic oligonucleotide
  Antisense Strand to SEQ ID NO: 404865
aagcauaugcauaacagau

SEQ ID NO: 404867 - RNA, 19 nt, Artificial Sequence
  Description of Artificial Sequence: Synthetic oligonucleotide
  Sense Strand Starting at position 1098 of SEQ ID NO: 315760
uuugcuuucggguuauguu

SEQ ID NO: 404868 - RNA, 19 nt, Artificial Sequence
  Description of Artificial Sequence: Synthetic oligonucleotide
  Antisense Strand to SEQ ID NO: 404867
aacauaacccgaaagcaaa

SEQ ID NO: 404869 - RNA, 19 nt, Artificial Sequence
  Description of Artificial Sequence: Synthetic oligonucleotide
  Sense Strand Starting at position 1098 of SEQ ID NO: 315767
ucggguuauguucaggaaa

SEQ ID NO: 404870 - RNA, 19 nt, Artificial Sequence
  Description of Artificial Sequence: Synthetic oligonucleotide
  Antisense Strand to SEQ ID NO: 404869
uuuccugaacauaacccga

SEQ ID NO: 404871 - RNA, 19 nt, Artificial Sequence
  Description of Artificial Sequence: Synthetic oligonucleotide
  Sense Strand Starting at position 1098 of SEQ ID NO: 315788
agccucaacuugucugaaa

SEQ ID NO: 404872 - RNA, 19 nt, Artificial Sequence
  Description of Artificial Sequence: Synthetic oligonucleotide
  Antisense Strand to SEQ ID NO: 404871
uuucagacaaguugaggcu

SEQ ID NO: 404873 - RNA, 19 nt, Artificial Sequence
  Description of Artificial Sequence: Synthetic oligonucleotide
  Sense Strand Starting at position 1098 of SEQ ID NO: 316309
ugaggaaagauucgccuuu

SEQ ID NO: 404874 - RNA, 19 nt, Artificial Sequence
  Description of Artificial Sequence: Synthetic oligonucleotide
  Antisense Strand to SEQ ID NO: 404873
aaaggcgaaucuuuccuca

SEQ ID NO: 404875 - RNA, 19 nt, Artificial Sequence
  Description of Artificial Sequence: Synthetic oligonucleotide
  Sense Strand Starting at position 1098 of SEQ ID NO: 316423
cucgucuucccuugggaaa

SEQ ID NO: 404876 - RNA, 19 nt, Artificial Sequence
  Description of Artificial Sequence: Synthetic oligonucleotide
  Antisense Strand to SEQ ID NO: 404875
uuucccaagggaagacgag

SEQ ID NO: 404877 - RNA, 19 nt, Artificial Sequence
  Description of Artificial Sequence: Synthetic oligonucleotide
  Sense Strand Starting at position 1098 of SEQ ID NO: 317245
aggguugugccugaacuga

SEQ ID NO: 404878 - RNA, 19 nt, Artificial Sequence
  Description of Artificial Sequence: Synthetic oligonucleotide
  Antisense Strand to SEQ ID NO: 404877
ucaguucaggcacaacccu

SEQ ID NO: 404879 - RNA, 19 nt, Artificial Sequence
  Description of Artificial Sequence: Synthetic oligonucleotide
  Sense Strand Starting at position 1098 of SEQ ID NO: 317467
uguuuaaauauguguccag

SEQ ID NO: 404880 - RNA, 19 nt, Artificial Sequence
  Description of Artificial Sequence: Synthetic oligonucleotide
  Antisense Strand to SEQ ID NO: 404879
cuggacacauauuuaaaca

SEQ ID NO: 404881 - RNA, 19 nt, Artificial Sequence
  Description of Artificial Sequence: Synthetic oligonucleotide
  Sense Strand Starting at position 1098 of SEQ ID NO: 317470
uuaaauauguguccagcau

SEQ ID NO: 404882 - RNA, 19 nt, Artificial Sequence
  Description of Artificial Sequence: Synthetic oligonucleotide
  Antisense Strand to SEQ ID NO: 404881
augcuggacacauauuuaa

SEQ ID NO: 404883 - RNA, 19 nt, Artificial Sequence
  Description of Artificial Sequence: Synthetic oligonucleotide
  Sense Strand Starting at position 1098 of SEQ ID NO: 317474
auauguguccagcaucgga

SEQ ID NO: 404884 - RNA, 19 nt, Artificial Sequence
  Description of Artificial Sequence: Synthetic oligonucleotide
  Antisense Strand to SEQ ID NO: 404883
uccgaugcuggacacauau

SEQ ID NO: 404885 - RNA, 19 nt, Artificial Sequence
  Description of Artificial Sequence: Synthetic oligonucleotide
  Sense Strand Starting at position 1098 of SEQ ID NO: 317547
ugauaaggucucugaggga

SEQ ID NO: 404886 - RNA, 19 nt, Artificial Sequence
  Description of Artificial Sequence: Synthetic oligonucleotide
  Antisense Strand to SEQ ID NO: 404885
ucccucagagaccuuauca

SEQ ID NO: 404887 - RNA, 19 nt, Artificial Sequence
  Description of Artificial Sequence: Synthetic oligonucleotide
  Sense Strand Starting at position 1098 of SEQ ID NO: 317618
ucccaaguggaaugaauau

SEQ ID NO: 404888 - RNA, 19 nt, Artificial Sequence
  Description of Artificial Sequence: Synthetic oligonucleotide
  Antisense Strand to SEQ ID NO: 404887
auauucauuccacuuggga

SEQ ID NO: 404889 - RNA, 19 nt, Artificial Sequence
  Description of Artificial Sequence: Synthetic oligonucleotide
  Sense Strand Starting at position 1098 of SEQ ID NO: 317644
uggaaacagacuggucauu

SEQ ID NO: 404890 - RNA, 19 nt, Artificial Sequence
  Description of Artificial Sequence: Synthetic oligonucleotide
  Antisense Strand to SEQ ID NO: 404889
aaugaccagucuguuucca

SEQ ID NO: 404891 - RNA, 19 nt, Artificial Sequence
  Description of Artificial Sequence: Synthetic oligonucleotide
  Sense Strand Starting at position 1098 of SEQ ID NO: 318059
uaaugacgcccagagguuu

SEQ ID NO: 404892 - RNA, 19 nt, Artificial Sequence
  Description of Artificial Sequence: Synthetic oligonucleotide
  Antisense Strand to SEQ ID NO: 404891
aaaccucugggcgucauua

SEQ ID NO: 404893 - RNA, 19 nt, Artificial Sequence
  Description of Artificial Sequence: Synthetic oligonucleotide
  Sense Strand Starting at position 1098 of SEQ ID NO: 318067
cccagagguuuccuuuaac

SEQ ID NO: 404894 - RNA, 19 nt, Artificial Sequence
  Description of Artificial Sequence: Synthetic oligonucleotide
  Antisense Strand to SEQ ID NO: 404893
guuaaaggaaaccucuggg

SEQ ID NO: 404895 - RNA, 19 nt, Artificial Sequence
  Description of Artificial Sequence: Synthetic oligonucleotide
  Sense Strand Starting at position 1098 of SEQ ID NO: 318153
uuuccaggacgcuauaaua

SEQ ID NO: 404896 - RNA, 19 nt, Artificial Sequence
  Description of Artificial Sequence: Synthetic oligonucleotide
  Antisense Strand to SEQ ID NO: 404895
uauuauagcguccuggaaa

SEQ ID NO: 404897 - RNA, 19 nt, Artificial Sequence
  Description of Artificial Sequence: Synthetic oligonucleotide
  Sense Strand Starting at position 1098 of SEQ ID NO: 318250
agaagucuuccagagccau

SEQ ID NO: 404898 - RNA, 19 nt, Artificial Sequence
  Description of Artificial Sequence: Synthetic oligonucleotide
  Antisense Strand to SEQ ID NO: 404897
auggcucuggaagacuucu

SEQ ID NO: 404899 - RNA, 19 nt, Artificial Sequence
  Description of Artificial Sequence: Synthetic oligonucleotide
  Sense Strand Starting at position 1098 of SEQ ID NO: 318378
gcucauaaacagugugauc

SEQ ID NO: 404900 - RNA, 19 nt, Artificial Sequence
  Description of Artificial Sequence: Synthetic oligonucleotide
  Antisense Strand to SEQ ID NO: 404899
gaucacacuguuuaugagc

SEQ ID NO: 404901 - RNA, 19 nt, Artificial Sequence
  Description of Artificial Sequence: Synthetic oligonucleotide
  Sense Strand Starting at position 1098 of SEQ ID NO: 318530
gagucaauauucuuaggac

SEQ ID NO: 404902 - RNA, 19 nt, Artificial Sequence
  Description of Artificial Sequence: Synthetic oligonucleotide
  Antisense Strand to SEQ ID NO: 404901
guccuaagaauauugacuc

SEQ ID NO: 404903 - RNA, 19 nt, Artificial Sequence
  Description of Artificial Sequence: Synthetic oligonucleotide
  Sense Strand Starting at position 1098 of SEQ ID NO: 318563
uggaaacagugucugacaa

SEQ ID NO: 404904 - RNA, 19 nt, Artificial Sequence
  Description of Artificial Sequence: Synthetic oligonucleotide
  Antisense Strand to SEQ ID NO: 404903
uugucagacacuguuucca

SEQ ID NO: 404905 - RNA, 19 nt, Artificial Sequence
  Description of Artificial Sequence: Synthetic oligonucleotide
  Sense Strand Starting at position 1098 of SEQ ID NO: 318576
ugacaagugugcuuaacaa

SEQ ID NO: 404906 - RNA, 19 nt, Artificial Sequence
  Description of Artificial Sequence: Synthetic oligonucleotide
  Antisense Strand to SEQ ID NO: 404905
uuguuaagcacacuuguca

SEQ ID NO: 404907 - RNA, 19 nt, Artificial Sequence
  Description of Artificial Sequence: Synthetic oligonucleotide
  Sense Strand Starting at position 1098 of SEQ ID NO: 318611
gcaauugucaauugagagc

SEQ ID NO: 404908 - RNA, 19 nt, Artificial Sequence
  Description of Artificial Sequence: Synthetic oligonucleotide
  Antisense Strand to SEQ ID NO: 404907
gcucucaauugacaauugc

SEQ ID NO: 404909 - RNA, 19 nt, Artificial Sequence
  Description of Artificial Sequence: Synthetic oligonucleotide
  Sense Strand Starting at position 1098 of SEQ ID NO: 318632
cuggcuguuucuguagaaa

SEQ ID NO: 404910 - RNA, 19 nt, Artificial Sequence
  Description of Artificial Sequence: Synthetic oligonucleotide
  Antisense Strand to SEQ ID NO: 404909
uuucuacagaaacagccag

SEQ ID NO: 404911 - RNA, 19 nt, Artificial Sequence
  Description of Artificial Sequence: Synthetic oligonucleotide
  Sense Strand Starting at position 1098 of SEQ ID NO: 318861
ugcaguaucuuagcaagac

SEQ ID NO: 404912 - RNA, 19 nt, Artificial Sequence
  Description of Artificial Sequence: Synthetic oligonucleotide
  Antisense Strand to SEQ ID NO: 404911
gucuugcuaagauacugca

SEQ ID NO: 404913 - RNA, 19 nt, Artificial Sequence
  Description of Artificial Sequence: Synthetic oligonucleotide
  Sense Strand Starting at position 1098 of SEQ ID NO: 318865
guaucuuagcaagacuuac

SEQ ID NO: 404914 - RNA, 19 nt, Artificial Sequence
  Description of Artificial Sequence: Synthetic oligonucleotide
  Antisense Strand to SEQ ID NO: 404913
guaagucuugcuaagauac

SEQ ID NO: 404915 - RNA, 19 nt, Artificial Sequence
  Description of Artificial Sequence: Synthetic oligonucleotide
  Sense Strand Starting at position 1098 of SEQ ID NO: 318898
agcuguagcuauuugcaaa

SEQ ID NO: 404916 - RNA, 19 nt, Artificial Sequence
  Description of Artificial Sequence: Synthetic oligonucleotide
  Antisense Strand to SEQ ID NO: 404915
uuugcaaauagcuacagcu

SEQ ID NO: 404917 - RNA, 19 nt, Artificial Sequence
  Description of Artificial Sequence: Synthetic oligonucleotide
  Sense Strand Starting at position 1098 of SEQ ID NO: 319039
ucagacaugcauuaauugu

SEQ ID NO: 404918 - RNA, 19 nt, Artificial Sequence
  Description of Artificial Sequence: Synthetic oligonucleotide
  Antisense Strand to SEQ ID NO: 404917
acaauuaaugcaugucuga

SEQ ID NO: 404919 - RNA, 19 nt, Artificial Sequence
  Description of Artificial Sequence: Synthetic oligonucleotide
  Sense Strand Starting at position 1098 of SEQ ID NO: 319049
auuaauugugcugaucuca

SEQ ID NO: 404920 - RNA, 19 nt, Artificial Sequence
  Description of Artificial Sequence: Synthetic oligonucleotide
  Antisense Strand to SEQ ID NO: 404919
ugagaucagcacaauuaau

SEQ ID NO: 404921 - RNA, 19 nt, Artificial Sequence
  Description of Artificial Sequence: Synthetic oligonucleotide
  Sense Strand Starting at position 1098 of SEQ ID NO: 319179
accagcaaaguuugaguaa

SEQ ID NO: 404922 - RNA, 19 nt, Artificial Sequence
  Description of Artificial Sequence: Synthetic oligonucleotide
  Antisense Strand to SEQ ID NO: 404921
uuacucaaacuuugcuggu

SEQ ID NO: 404923 - RNA, 19 nt, Artificial Sequence
  Description of Artificial Sequence: Synthetic oligonucleotide
  Sense Strand Starting at position 1099 of SEQ ID NO: 315242
uggccaugucuacacuaaa

SEQ ID NO: 404924 - RNA, 19 nt, Artificial Sequence
  Description of Artificial Sequence: Synthetic oligonucleotide
  Antisense Strand to SEQ ID NO: 404923
uuuaguguagacauggcca

SEQ ID NO: 404925 - RNA, 19 nt, Artificial Sequence
  Description of Artificial Sequence: Synthetic oligonucleotide
  Sense Strand Starting at position 1099 of SEQ ID NO: 315274
gggucccaauucuacuaua

SEQ ID NO: 404926 - RNA, 19 nt, Artificial Sequence
  Description of Artificial Sequence: Synthetic oligonucleotide
  Antisense Strand to SEQ ID NO: 404925
uauaguagaauugggaccc

SEQ ID NO: 404927 - RNA, 19 nt, Artificial Sequence
  Description of Artificial Sequence: Synthetic oligonucleotide
  Sense Strand Starting at position 1099 of SEQ ID NO: 315578
ggagcaaccaguugucaug

SEQ ID NO: 404928 - RNA, 19 nt, Artificial Sequence
  Description of Artificial Sequence: Synthetic oligonucleotide
  Antisense Strand to SEQ ID NO: 404927
caugacaacugguugcucc

SEQ ID NO: 404929 - RNA, 19 nt, Artificial Sequence
  Description of Artificial Sequence: Synthetic oligonucleotide
  Sense Strand Starting at position 1099 of SEQ ID NO: 315863
gaucccucccgucagugau

SEQ ID NO: 404930 - RNA, 19 nt, Artificial Sequence
  Description of Artificial Sequence: Synthetic oligonucleotide
  Antisense Strand to SEQ ID NO: 404929
aucacugacgggagggauc

SEQ ID NO: 404931 - RNA, 19 nt, Artificial Sequence
  Description of Artificial Sequence: Synthetic oligonucleotide
  Sense Strand Starting at position 1099 of SEQ ID NO: 315876
agugaugcuucuugcagga

SEQ ID NO: 404932 - RNA, 19 nt, Artificial Sequence
  Description of Artificial Sequence: Synthetic oligonucleotide
  Antisense Strand to SEQ ID NO: 404931
uccugcaagaagcaucacu

SEQ ID NO: 404933 - RNA, 19 nt, Artificial Sequence
  Description of Artificial Sequence: Synthetic oligonucleotide
  Sense Strand Starting at position 1099 of SEQ ID NO: 315946
gggucucuuuagcuuucua

SEQ ID NO: 404934 - RNA, 19 nt, Artificial Sequence
  Description of Artificial Sequence: Synthetic oligonucleotide
  Antisense Strand to SEQ ID NO: 404933
uagaaagcuaaagagaccc

SEQ ID NO: 404935 - RNA, 19 nt, Artificial Sequence
  Description of Artificial Sequence: Synthetic oligonucleotide
  Sense Strand Starting at position 1099 of SEQ ID NO: 315994
gcuuccuuuccagaaggaa

SEQ ID NO: 404936 - RNA, 19 nt, Artificial Sequence
  Description of Artificial Sequence: Synthetic oligonucleotide
  Antisense Strand to SEQ ID NO: 404935
uuccuucuggaaaggaagc

SEQ ID NO: 404937 - RNA, 19 nt, Artificial Sequence
  Description of Artificial Sequence: Synthetic oligonucleotide
  Sense Strand Starting at position 1099 of SEQ ID NO: 316095
gccagagucggucauggaa

SEQ ID NO: 404938 - RNA, 19 nt, Artificial Sequence
  Description of Artificial Sequence: Synthetic oligonucleotide
  Antisense Strand to SEQ ID NO: 404937
uuccaugaccgacucuggc

SEQ ID NO: 404939 - RNA, 19 nt, Artificial Sequence
  Description of Artificial Sequence: Synthetic oligonucleotide
  Sense Strand Starting at position 1099 of SEQ ID NO: 316097
cagagucggucauggaaga

SEQ ID NO: 404940 - RNA, 19 nt, Artificial Sequence
  Description of Artificial Sequence: Synthetic oligonucleotide
  Antisense Strand to SEQ ID NO: 404939
ucuuccaugaccgacucug

SEQ ID NO: 404941 - RNA, 19 nt, Artificial Sequence
  Description of Artificial Sequence: Synthetic oligonucleotide
  Sense Strand Starting at position 1099 of SEQ ID NO: 316098
agagucggucauggaagaa

SEQ ID NO: 404942 - RNA, 19 nt, Artificial Sequence
  Description of Artificial Sequence: Synthetic oligonucleotide
  Antisense Strand to SEQ ID NO: 404941
uucuuccaugaccgacucu

SEQ ID NO: 404943 - RNA, 19 nt, Artificial Sequence
  Description of Artificial Sequence: Synthetic oligonucleotide
  Sense Strand Starting at position 1099 of SEQ ID NO: 316159
ggaaguccuccaugguguu

SEQ ID NO: 404944 - RNA, 19 nt, Artificial Sequence
  Description of Artificial Sequence: Synthetic oligonucleotide
  Antisense Strand to SEQ ID NO: 404943
aacaccauggaggacuucc

SEQ ID NO: 404945 - RNA, 19 nt, Artificial Sequence
  Description of Artificial Sequence: Synthetic oligonucleotide
  Sense Strand Starting at position 1099 of SEQ ID NO: 316619
cggagcagccgagauaaau

SEQ ID NO: 404946 - RNA, 19 nt, Artificial Sequence
  Description of Artificial Sequence: Synthetic oligonucleotide
  Antisense Strand to SEQ ID NO: 404945
auuuaucucggcugcuccg

SEQ ID NO: 404947 - RNA, 19 nt, Artificial Sequence
  Description of Artificial Sequence: Synthetic oligonucleotide
  Sense Strand Starting at position 1099 of SEQ ID NO: 317400
gagggacuccguugagucu

SEQ ID NO: 404948 - RNA, 19 nt, Artificial Sequence
  Description of Artificial Sequence: Synthetic oligonucleotide
  Antisense Strand to SEQ ID NO: 404947
agacucaacggagucccuc

SEQ ID NO: 404949 - RNA, 19 nt, Artificial Sequence
  Description of Artificial Sequence: Synthetic oligonucleotide
  Sense Strand Starting at position 1099 of SEQ ID NO: 317443
agcagauucucucugaggu

SEQ ID NO: 404950 - RNA, 19 nt, Artificial Sequence
  Description of Artificial Sequence: Synthetic oligonucleotide
  Antisense Strand to SEQ ID NO: 404949
accucagagagaaucugcu

SEQ ID NO: 404951 - RNA, 19 nt, Artificial Sequence
  Description of Artificial Sequence: Synthetic oligonucleotide
  Sense Strand Starting at position 1099 of SEQ ID NO: 317444
gcagauucucucugagguc

SEQ ID NO: 404952 - RNA, 19 nt, Artificial Sequence
  Description of Artificial Sequence: Synthetic oligonucleotide
  Antisense Strand to SEQ ID NO: 404951
gaccucagagagaaucugc

SEQ ID NO: 404953 - RNA, 19 nt, Artificial Sequence
  Description of Artificial Sequence: Synthetic oligonucleotide
  Sense Strand Starting at position 1099 of SEQ ID NO: 317457
gaggucugugggugucaca

SEQ ID NO: 404954 - RNA, 19 nt, Artificial Sequence
  Description of Artificial Sequence: Synthetic oligonucleotide
  Antisense Strand to SEQ ID NO: 404953
ugugacacccacagaccuc

SEQ ID NO: 404955 - RNA, 19 nt, Artificial Sequence
  Description of Artificial Sequence: Synthetic oligonucleotide
  Sense Strand Starting at position 1099 of SEQ ID NO: 317460
gucugugggugucacauua

SEQ ID NO: 404956 - RNA, 19 nt, Artificial Sequence
  Description of Artificial Sequence: Synthetic oligonucleotide
  Antisense Strand to SEQ ID NO: 404955
uaaugugacacccacagac

SEQ ID NO: 404957 - RNA, 19 nt, Artificial Sequence
  Description of Artificial Sequence: Synthetic oligonucleotide
  Sense Strand Starting at position 1099 of SEQ ID NO: 317483
cugaaaugcuuugcccaca

SEQ ID NO: 404958 - RNA, 19 nt, Artificial Sequence
  Description of Artificial Sequence: Synthetic oligonucleotide
  Antisense Strand to SEQ ID NO: 404957
ugugggcaaagcauuucag

SEQ ID NO: 404959 - RNA, 19 nt, Artificial Sequence
  Description of Artificial Sequence: Synthetic oligonucleotide
  Sense Strand Starting at position 1099 of SEQ ID NO: 317552
gccucagugagagaugcuu

SEQ ID NO: 404960 - RNA, 19 nt, Artificial Sequence
  Description of Artificial Sequence: Synthetic oligonucleotide
  Antisense Strand to SEQ ID NO: 404959
aagcaucucucacugaggc

SEQ ID NO: 404961 - RNA, 19 nt, Artificial Sequence
  Description of Artificial Sequence: Synthetic oligonucleotide
  Sense Strand Starting at position 1099 of SEQ ID NO: 317554
cucagugagagaugcuuga

SEQ ID NO: 404962 - RNA, 19 nt, Artificial Sequence
  Description of Artificial Sequence: Synthetic oligonucleotide
  Antisense Strand to SEQ ID NO: 404961
ucaagcaucucucacugag

SEQ ID NO: 404963 - RNA, 19 nt, Artificial Sequence
  Description of Artificial Sequence: Synthetic oligonucleotide
  Sense Strand Starting at position 1099 of SEQ ID NO: 317558
gugagagaugcuugaaugg

SEQ ID NO: 404964 - RNA, 19 nt, Artificial Sequence
  Description of Artificial Sequence: Synthetic oligonucleotide
  Antisense Strand to SEQ ID NO: 404963
ccauucaagcaucucucac

SEQ ID NO: 404965 - RNA, 19 nt, Artificial Sequence
  Description of Artificial Sequence: Synthetic oligonucleotide
  Sense Strand Starting at position 1099 of SEQ ID NO: 317961
ggcccuuggugcucagaga

SEQ ID NO: 404966 - RNA, 19 nt, Artificial Sequence
  Description of Artificial Sequence: Synthetic oligonucleotide
  Antisense Strand to SEQ ID NO: 404965
ucucugagcaccaagggcc

SEQ ID NO: 404967 - RNA, 19 nt, Artificial Sequence
  Description of Artificial Sequence: Synthetic oligonucleotide
  Sense Strand Starting at position 1099 of SEQ ID NO: 318095
cuggcucugauccgauuaa

SEQ ID NO: 404968 - RNA, 19 nt, Artificial Sequence
  Description of Artificial Sequence: Synthetic oligonucleotide
  Antisense Strand to SEQ ID NO: 404967
uuaaucggaucagagccag

SEQ ID NO: 404969 - RNA, 19 nt, Artificial Sequence
  Description of Artificial Sequence: Synthetic oligonucleotide
  Sense Strand Starting at position 1099 of SEQ ID NO: 318096
uggcucugauccgauuaau

SEQ ID NO: 404970 - RNA, 19 nt, Artificial Sequence
  Description of Artificial Sequence: Synthetic oligonucleotide
  Antisense Strand to SEQ ID NO: 404969
auuaaucggaucagagcca

SEQ ID NO: 404971 - RNA, 19 nt, Artificial Sequence
  Description of Artificial Sequence: Synthetic oligonucleotide
  Sense Strand Starting at position 1099 of SEQ ID NO: 318099
cucugauccgauuaaucuc

SEQ ID NO: 404972 - RNA, 19 nt, Artificial Sequence
  Description of Artificial Sequence: Synthetic oligonucleotide
  Antisense Strand to SEQ ID NO: 404971
gagauuaaucggaucagag

SEQ ID NO: 404973 - RNA, 19 nt, Artificial Sequence
  Description of Artificial Sequence: Synthetic oligonucleotide
  Sense Strand Starting at position 1099 of SEQ ID NO: 318107
cgauuaaucucauggccuc

SEQ ID NO: 404974 - RNA, 19 nt, Artificial Sequence
  Description of Artificial Sequence: Synthetic oligonucleotide
  Antisense Strand to SEQ ID NO: 404973
gaggccaugagauuaaucg

SEQ ID NO: 404975 - RNA, 19 nt, Artificial Sequence
  Description of Artificial Sequence: Synthetic oligonucleotide
  Sense Strand Starting at position 1099 of SEQ ID NO: 318144
uggucuucucugugucaug

SEQ ID NO: 404976 - RNA, 19 nt, Artificial Sequence
  Description of Artificial Sequence: Synthetic oligonucleotide
  Antisense Strand to SEQ ID NO: 404975
caugacacagagaagacca

SEQ ID NO: 404977 - RNA, 19 nt, Artificial Sequence
  Description of Artificial Sequence: Synthetic oligonucleotide
  Sense Strand Starting at position 1099 of SEQ ID NO: 318300
uugguuucccucugugaca

SEQ ID NO: 404978 - RNA, 19 nt, Artificial Sequence
  Description of Artificial Sequence: Synthetic oligonucleotide
  Antisense Strand to SEQ ID NO: 404977
ugucacagagggaaaccaa

SEQ ID NO: 404979 - RNA, 19 nt, Artificial Sequence
  Description of Artificial Sequence: Synthetic oligonucleotide
  Sense Strand Starting at position 1099 of SEQ ID NO: 318301
ugguuucccucugugacau

SEQ ID NO: 404980 - RNA, 19 nt, Artificial Sequence
  Description of Artificial Sequence: Synthetic oligonucleotide
  Antisense Strand to SEQ ID NO: 404979
augucacagagggaaacca

SEQ ID NO: 404981 - RNA, 19 nt, Artificial Sequence
  Description of Artificial Sequence: Synthetic oligonucleotide
  Sense Strand Starting at position 1099 of SEQ ID NO: 318317
cauggaaauggcugucuuu

SEQ ID NO: 404982 - RNA, 19 nt, Artificial Sequence
  Description of Artificial Sequence: Synthetic oligonucleotide
  Antisense Strand to SEQ ID NO: 404981
aaagacagccauuuccaug

SEQ ID NO: 404983 - RNA, 19 nt, Artificial Sequence
  Description of Artificial Sequence: Synthetic oligonucleotide
  Sense Strand Starting at position 1099 of SEQ ID NO: 318574
augguucugccaugggaca

SEQ ID NO: 404984 - RNA, 19 nt, Artificial Sequence
  Description of Artificial Sequence: Synthetic oligonucleotide
  Antisense Strand to SEQ ID NO: 404983
ugucccauggcagaaccau

SEQ ID NO: 404985 - RNA, 19 nt, Artificial Sequence
  Description of Artificial Sequence: Synthetic oligonucleotide
  Sense Strand Starting at position 1099 of SEQ ID NO: 318675
acaggagcuaucugcaaag

SEQ ID NO: 404986 - RNA, 19 nt, Artificial Sequence
  Description of Artificial Sequence: Synthetic oligonucleotide
  Antisense Strand to SEQ ID NO: 404985
cuuugcagauagcuccugu

SEQ ID NO: 404987 - RNA, 19 nt, Artificial Sequence
  Description of Artificial Sequence: Synthetic oligonucleotide
  Sense Strand Starting at position 1099 of SEQ ID NO: 319008
ggauguggcucugagagcu

SEQ ID NO: 404988 - RNA, 19 nt, Artificial Sequence
  Description of Artificial Sequence: Synthetic oligonucleotide
  Antisense Strand to SEQ ID NO: 404987
agcucucagagccacaucc

SEQ ID NO: 404989 - RNA, 19 nt, Artificial Sequence
  Description of Artificial Sequence: Synthetic oligonucleotide
  Sense Strand Starting at position 1099 of SEQ ID NO: 319033
cgccuucuuccagaggcua

SEQ ID NO: 404990 - RNA, 19 nt, Artificial Sequence
  Description of Artificial Sequence: Synthetic oligonucleotide
  Antisense Strand to SEQ ID NO: 404989
uagccucuggaagaaggcg

SEQ ID NO: 404991 - RNA, 19 nt, Artificial Sequence
  Description of Artificial Sequence: Synthetic oligonucleotide
  Sense Strand Starting at position 1100 of SEQ ID NO: 315426
agacccuugugccuugaaa

SEQ ID NO: 404992 - RNA, 19 nt, Artificial Sequence
  Description of Artificial Sequence: Synthetic oligonucleotide
  Antisense Strand to SEQ ID NO: 404991
uuucaaggcacaagggucu

SEQ ID NO: 404993 - RNA, 19 nt, Artificial Sequence
  Description of Artificial Sequence: Synthetic oligonucleotide
  Sense Strand Starting at position 1100 of SEQ ID NO: 315591
cucugucacccagaagcau

SEQ ID NO: 404994 - RNA, 19 nt, Artificial Sequence
  Description of Artificial Sequence: Synthetic oligonucleotide
  Antisense Strand to SEQ ID NO: 404993
augcuucugggugacagag

SEQ ID NO: 404995 - RNA, 19 nt, Artificial Sequence
  Description of Artificial Sequence: Synthetic oligonucleotide
  Sense Strand Starting at position 1100 of SEQ ID NO: 315924
uuucuaggucugugaccuu

SEQ ID NO: 404996 - RNA, 19 nt, Artificial Sequence
  Description of Artificial Sequence: Synthetic oligonucleotide
  Antisense Strand to SEQ ID NO: 404995
aaggucacagaccuagaaa

SEQ ID NO: 404997 - RNA, 19 nt, Artificial Sequence
  Description of Artificial Sequence: Synthetic oligonucleotide
  Sense Strand Starting at position 1100 of SEQ ID NO: 315966
ucuguugccuaaucuguga

SEQ ID NO: 404998 - RNA, 19 nt, Artificial Sequence
  Description of Artificial Sequence: Synthetic oligonucleotide
  Antisense Strand to SEQ ID NO: 404997
ucacagauuaggcaacaga

SEQ ID NO: 404999 - RNA, 19 nt, Artificial Sequence
  Description of Artificial Sequence: Synthetic oligonucleotide
  Sense Strand Starting at position 1100 of SEQ ID NO: 315969
guugccuaaucugugaaau

SEQ ID NO: 405000 - RNA, 19 nt, Artificial Sequence
  Description of Artificial Sequence: Synthetic oligonucleotide
  Antisense Strand to SEQ ID NO: 404999
auuucacagauuaggcaac

SEQ ID NO: 405001 - RNA, 19 nt, Artificial Sequence
  Description of Artificial Sequence: Synthetic oligonucleotide
  Sense Strand Starting at position 1100 of SEQ ID NO: 315970
uugccuaaucugugaaaug

SEQ ID NO: 405002 - RNA, 19 nt, Artificial Sequence
  Description of Artificial Sequence: Synthetic oligonucleotide
  Antisense Strand to SEQ ID NO: 405001
cauuucacagauuaggcaa

SEQ ID NO: 405003 - RNA, 19 nt, Artificial Sequence
  Description of Artificial Sequence: Synthetic oligonucleotide
  Sense Strand Starting at position 1100 of SEQ ID NO: 315989
ggguaauacuaccuacugu

SEQ ID NO: 405004 - RNA, 19 nt, Artificial Sequence
  Description of Artificial Sequence: Synthetic oligonucleotide
  Antisense Strand to SEQ ID NO: 405003
acaguagguaguauuaccc

SEQ ID NO: 405005 - RNA, 19 nt, Artificial Sequence
  Description of Artificial Sequence: Synthetic oligonucleotide
  Sense Strand Starting at position 1100 of SEQ ID NO: 316005
uguguagggcugugaagau

SEQ ID NO: 405006 - RNA, 19 nt, Artificial Sequence
  Description of Artificial Sequence: Synthetic oligonucleotide
  Antisense Strand to SEQ ID NO: 405005
aucuucacagcccuacaca

SEQ ID NO: 405007 - RNA, 19 nt, Artificial Sequence
  Description of Artificial Sequence: Synthetic oligonucleotide
  Sense Strand Starting at position 1100 of SEQ ID NO: 316029
ggagucaugcauuaucauc

SEQ ID NO: 405008 - RNA, 19 nt, Artificial Sequence
  Description of Artificial Sequence: Synthetic oligonucleotide
  Antisense Strand to SEQ ID NO: 405007
gaugauaaugcaugacucc

SEQ ID NO: 405009 - RNA, 19 nt, Artificial Sequence
  Description of Artificial Sequence: Synthetic oligonucleotide
  Sense Strand Starting at position 1100 of SEQ ID NO: 316104
ucagaucaauggucagaac

SEQ ID NO: 405010 - RNA, 19 nt, Artificial Sequence
  Description of Artificial Sequence: Synthetic oligonucleotide
  Antisense Strand to SEQ ID NO: 405009
guucugaccauugaucuga

SEQ ID NO: 405011 - RNA, 19 nt, Artificial Sequence
  Description of Artificial Sequence: Synthetic oligonucleotide
  Sense Strand Starting at position 1100 of SEQ ID NO: 316311
ucacuaaagucauauggaa

SEQ ID NO: 405012 - RNA, 19 nt, Artificial Sequence
  Description of Artificial Sequence: Synthetic oligonucleotide
  Antisense Strand to SEQ ID NO: 405011
uuccauaugacuuuaguga

SEQ ID NO: 405013 - RNA, 19 nt, Artificial Sequence
  Description of Artificial Sequence: Synthetic oligonucleotide
  Sense Strand Starting at position 1100 of SEQ ID NO: 316503
gggcugagccugugguaga

SEQ ID NO: 405014 - RNA, 19 nt, Artificial Sequence
  Description of Artificial Sequence: Synthetic oligonucleotide
  Antisense Strand to SEQ ID NO: 405013
ucuaccacaggcucagccc

SEQ ID NO: 405015 - RNA, 19 nt, Artificial Sequence
  Description of Artificial Sequence: Synthetic oligonucleotide
  Sense Strand Starting at position 1100 of SEQ ID NO: 316577
ggagucacgcgugugacau

SEQ ID NO: 405016 - RNA, 19 nt, Artificial Sequence
  Description of Artificial Sequence: Synthetic oligonucleotide
  Antisense Strand to SEQ ID NO: 405015
augucacacgcgugacucc

SEQ ID NO: 405017 - RNA, 19 nt, Artificial Sequence
  Description of Artificial Sequence: Synthetic oligonucleotide
  Sense Strand Starting at position 1100 of SEQ ID NO: 317370
uuauuauggagcugucaag

SEQ ID NO: 405018 - RNA, 19 nt, Artificial Sequence
  Description of Artificial Sequence: Synthetic oligonucleotide
  Antisense Strand to SEQ ID NO: 405017
cuugacagcuccauaauaa

SEQ ID NO: 405019 - RNA, 19 nt, Artificial Sequence
  Description of Artificial Sequence: Synthetic oligonucleotide
  Sense Strand Starting at position 1100 of SEQ ID NO: 317376
uggagcugucaagguagaa

SEQ ID NO: 405020 - RNA, 19 nt, Artificial Sequence
  Description of Artificial Sequence: Synthetic oligonucleotide
  Antisense Strand to SEQ ID NO: 405019
uucuaccuugacagcucca

SEQ ID NO: 405021 - RNA, 19 nt, Artificial Sequence
  Description of Artificial Sequence: Synthetic oligonucleotide
  Sense Strand Starting at position 1100 of SEQ ID NO: 317463
caacgacaagucugugcuu

SEQ ID NO: 405022 - RNA, 19 nt, Artificial Sequence
  Description of Artificial Sequence: Synthetic oligonucleotide
  Antisense Strand to SEQ ID NO: 405021
aagcacagacuugucguug

SEQ ID NO: 405023 - RNA, 19 nt, Artificial Sequence
  Description of Artificial Sequence: Synthetic oligonucleotide
  Sense Strand Starting at position 1100 of SEQ ID NO: 317529
aaagcaucccaguggauaa

SEQ ID NO: 405024 - RNA, 19 nt, Artificial Sequence
  Description of Artificial Sequence: Synthetic oligonucleotide
  Antisense Strand to SEQ ID NO: 405023
uuauccacugggaugcuuu

SEQ ID NO: 405025 - RNA, 19 nt, Artificial Sequence
  Description of Artificial Sequence: Synthetic oligonucleotide
  Sense Strand Starting at position 1100 of SEQ ID NO: 317540
guggauaaauucuccuuua

SEQ ID NO: 405026 - RNA, 19 nt, Artificial Sequence
  Description of Artificial Sequence: Synthetic oligonucleotide
  Antisense Strand to SEQ ID NO: 405025
uaaaggagaauuuauccac

SEQ ID NO: 405027 - RNA, 19 nt, Artificial Sequence
  Description of Artificial Sequence: Synthetic oligonucleotide
  Sense Strand Starting at position 1100 of SEQ ID NO: 317552
uccuuuaaauacucgagua

SEQ ID NO: 405028 - RNA, 19 nt, Artificial Sequence
  Description of Artificial Sequence: Synthetic oligonucleotide
  Antisense Strand to SEQ ID NO: 405027
uacucgaguauuuaaagga

SEQ ID NO: 405029 - RNA, 19 nt, Artificial Sequence
  Description of Artificial Sequence: Synthetic oligonucleotide
  Sense Strand Starting at position 1100 of SEQ ID NO: 317554
cuuuaaauacucgaguaug

SEQ ID NO: 405030 - RNA, 19 nt, Artificial Sequence
  Description of Artificial Sequence: Synthetic oligonucleotide
  Antisense Strand to SEQ ID NO: 405029
cauacucgaguauuuaaag

SEQ ID NO: 405031 - RNA, 19 nt, Artificial Sequence
  Description of Artificial Sequence: Synthetic oligonucleotide
  Sense Strand Starting at position 1100 of SEQ ID NO: 317557
uaaauacucgaguauguuu

SEQ ID NO: 405032 - RNA, 19 nt, Artificial Sequence
  Description of Artificial Sequence: Synthetic oligonucleotide
  Antisense Strand to SEQ ID NO: 405031
aaacauacucgaguauuua

SEQ ID NO: 405033 - RNA, 19 nt, Artificial Sequence
  Description of Artificial Sequence: Synthetic oligonucleotide
  Sense Strand Starting at position 1100 of SEQ ID NO: 317559
aauacucgaguauguuuaa

SEQ ID NO: 405034 - RNA, 19 nt, Artificial Sequence
  Description of Artificial Sequence: Synthetic oligonucleotide
  Antisense Strand to SEQ ID NO: 405033
uuaaacauacucgaguauu

SEQ ID NO: 405035 - RNA, 19 nt, Artificial Sequence
  Description of Artificial Sequence: Synthetic oligonucleotide
  Sense Strand Starting at position 1100 of SEQ ID NO: 317560
auacucgaguauguuuaau

SEQ ID NO: 405036 - RNA, 19 nt, Artificial Sequence
  Description of Artificial Sequence: Synthetic oligonucleotide
  Antisense Strand to SEQ ID NO: 405035
auuaaacauacucgaguau

SEQ ID NO: 405037 - RNA, 19 nt, Artificial Sequence
  Description of Artificial Sequence: Synthetic oligonucleotide
  Sense Strand Starting at position 1100 of SEQ ID NO: 317562
acucgaguauguuuaauca

SEQ ID NO: 405038 - RNA, 19 nt, Artificial Sequence
  Description of Artificial Sequence: Synthetic oligonucleotide
  Antisense Strand to SEQ ID NO: 405037
ugauuaaacauacucgagu

SEQ ID NO: 405039 - RNA, 19 nt, Artificial Sequence
  Description of Artificial Sequence: Synthetic oligonucleotide
  Sense Strand Starting at position 1100 of SEQ ID NO: 317566
gaguauguuuaaucaguaa

SEQ ID NO: 405040 - RNA, 19 nt, Artificial Sequence
  Description of Artificial Sequence: Synthetic oligonucleotide
  Antisense Strand to SEQ ID NO: 405039
uuacugauuaaacauacuc

SEQ ID NO: 405041 - RNA, 19 nt, Artificial Sequence
  Description of Artificial Sequence: Synthetic oligonucleotide
  Sense Strand Starting at position 1100 of SEQ ID NO: 317751
accaaaucauccgaaugga

SEQ ID NO: 405042 - RNA, 19 nt, Artificial Sequence
  Description of Artificial Sequence: Synthetic oligonucleotide
  Antisense Strand to SEQ ID NO: 405041
uccauucggaugauuuggu

SEQ ID NO: 405043 - RNA, 19 nt, Artificial Sequence
  Description of Artificial Sequence: Synthetic oligonucleotide
  Sense Strand Starting at position 1100 of SEQ ID NO: 317838
ggccgaacaugccucauua

SEQ ID NO: 405044 - RNA, 19 nt, Artificial Sequence
  Description of Artificial Sequence: Synthetic oligonucleotide
  Antisense Strand to SEQ ID NO: 405043
uaaugaggcauguucggcc

SEQ ID NO: 405045 - RNA, 19 nt, Artificial Sequence
  Description of Artificial Sequence: Synthetic oligonucleotide
  Sense Strand Starting at position 1100 of SEQ ID NO: 317932
cugcuacccuauccgaaua

SEQ ID NO: 405046 - RNA, 19 nt, Artificial Sequence
  Description of Artificial Sequence: Synthetic oligonucleotide
  Antisense Strand to SEQ ID NO: 405045
uauucggauaggguagcag

SEQ ID NO: 405047 - RNA, 19 nt, Artificial Sequence
  Description of Artificial Sequence: Synthetic oligonucleotide
  Sense Strand Starting at position 1100 of SEQ ID NO: 318059
uguuuaaguugaccuauac

SEQ ID NO: 405048 - RNA, 19 nt, Artificial Sequence
  Description of Artificial Sequence: Synthetic oligonucleotide
  Antisense Strand to SEQ ID NO: 405047
guauaggucaacuuaaaca

SEQ ID NO: 405049 - RNA, 19 nt, Artificial Sequence
  Description of Artificial Sequence: Synthetic oligonucleotide
  Sense Strand Starting at position 1100 of SEQ ID NO: 318167
gccuccucagaauguauua

SEQ ID NO: 405050 - RNA, 19 nt, Artificial Sequence
  Description of Artificial Sequence: Synthetic oligonucleotide
  Antisense Strand to SEQ ID NO: 405049
uaauacauucugaggaggc

SEQ ID NO: 405051 - RNA, 19 nt, Artificial Sequence
  Description of Artificial Sequence: Synthetic oligonucleotide
  Sense Strand Starting at position 1100 of SEQ ID NO: 318366
aaaggaguugccugaacuc

SEQ ID NO: 405052 - RNA, 19 nt, Artificial Sequence
  Description of Artificial Sequence: Synthetic oligonucleotide
  Antisense Strand to SEQ ID NO: 405051
gaguucaggcaacuccuuu

SEQ ID NO: 405053 - RNA, 19 nt, Artificial Sequence
  Description of Artificial Sequence: Synthetic oligonucleotide
  Sense Strand Starting at position 1100 of SEQ ID NO: 318378
ugaacucggagcgaagaua

SEQ ID NO: 405054 - RNA, 19 nt, Artificial Sequence
  Description of Artificial Sequence: Synthetic oligonucleotide
  Antisense Strand to SEQ ID NO: 405053
uaucuucgcuccgaguuca

SEQ ID NO: 405055 - RNA, 19 nt, Artificial Sequence
  Description of Artificial Sequence: Synthetic oligonucleotide
  Sense Strand Starting at position 1100 of SEQ ID NO: 318627
ugcgcauuugugugaggaa

SEQ ID NO: 405056 - RNA, 19 nt, Artificial Sequence
  Description of Artificial Sequence: Synthetic oligonucleotide
  Antisense Strand to SEQ ID NO: 405055
uuccucacacaaaugcgca

SEQ ID NO: 405057 - RNA, 19 nt, Artificial Sequence
  Description of Artificial Sequence: Synthetic oligonucleotide
  Sense Strand Starting at position 1100 of SEQ ID NO: 318775
guugacauccugugacaug

SEQ ID NO: 405058 - RNA, 19 nt, Artificial Sequence
  Description of Artificial Sequence: Synthetic oligonucleotide
  Antisense Strand to SEQ ID NO: 405057
caugucacaggaugucaac

SEQ ID NO: 405059 - RNA, 19 nt, Artificial Sequence
  Description of Artificial Sequence: Synthetic oligonucleotide
  Sense Strand Starting at position 1100 of SEQ ID NO: 318839
uggcuuguccaggaaugca

SEQ ID NO: 405060 - RNA, 19 nt, Artificial Sequence
  Description of Artificial Sequence: Synthetic oligonucleotide
  Antisense Strand to SEQ ID NO: 405059
ugcauuccuggacaagcca

SEQ ID NO: 405061 - RNA, 19 nt, Artificial Sequence
  Description of Artificial Sequence: Synthetic oligonucleotide
  Sense Strand Starting at position 1100 of SEQ ID NO: 319135
gucuacuugccagagcuua

SEQ ID NO: 405062 - RNA, 19 nt, Artificial Sequence
  Description of Artificial Sequence: Synthetic oligonucleotide
  Antisense Strand to SEQ ID NO: 405061
uaagcucuggcaaguagac

SEQ ID NO: 405063 - RNA, 19 nt, Artificial Sequence
  Description of Artificial Sequence: Synthetic oligonucleotide
  Sense Strand Starting at position 1100 of SEQ ID NO: 319140
cuugccagagcuuauguaa

SEQ ID NO: 405064 - RNA, 19 nt, Artificial Sequence
  Description of Artificial Sequence: Synthetic oligonucleotide
  Antisense Strand to SEQ ID NO: 405063
uuacauaagcucuggcaag

SEQ ID NO: 405065 - RNA, 19 nt, Artificial Sequence
  Description of Artificial Sequence: Synthetic oligonucleotide
  Sense Strand Starting at position 1100 of SEQ ID NO: 319166
auauaaugauccuugugca

SEQ ID NO: 405066 - RNA, 19 nt, Artificial Sequence
  Description of Artificial Sequence: Synthetic oligonucleotide
  Antisense Strand to SEQ ID NO: 405065
ugcacaaggaucauuauau

SEQ ID NO: 405067 - RNA, 19 nt, Artificial Sequence
  Description of Artificial Sequence: Synthetic oligonucleotide
  Sense Strand Starting at position 1100 of SEQ ID NO: 319212
ggucaaccuguacacuaua

SEQ ID NO: 405068 - RNA, 19 nt, Artificial Sequence
  Description of Artificial Sequence: Synthetic oligonucleotide
  Antisense Strand to SEQ ID NO: 405067
uauaguguacagguugacc

SEQ ID NO: 405069 - RNA, 19 nt, Artificial Sequence
  Description of Artificial Sequence: Synthetic oligonucleotide
  Sense Strand Starting at position 1100 of SEQ ID NO: 319217
accuguacacuauagaguu

SEQ ID NO: 405070 - RNA, 19 nt, Artificial Sequence
  Description of Artificial Sequence: Synthetic oligonucleotide
  Antisense Strand to SEQ ID NO: 405069
aacucuauaguguacaggu

SEQ ID NO: 405071 - RNA, 19 nt, Artificial Sequence
  Description of Artificial Sequence: Synthetic oligonucleotide
  Sense Strand Starting at position 1101 of SEQ ID NO: 315280
gcaggguggucucagggaa

SEQ ID NO: 405072 - RNA, 19 nt, Artificial Sequence
  Description of Artificial Sequence: Synthetic oligonucleotide
  Antisense Strand to SEQ ID NO: 405071
uucccugagaccacccugc

SEQ ID NO: 405073 - RNA, 19 nt, Artificial Sequence
  Description of Artificial Sequence: Synthetic oligonucleotide
  Sense Strand Starting at position 1101 of SEQ ID NO: 315283
ggguggucucagggaagga

SEQ ID NO: 405074 - RNA, 19 nt, Artificial Sequence
  Description of Artificial Sequence: Synthetic oligonucleotide
  Antisense Strand to SEQ ID NO: 405073
uccuucccugagaccaccc

SEQ ID NO: 405075 - RNA, 19 nt, Artificial Sequence
  Description of Artificial Sequence: Synthetic oligonucleotide
  Sense Strand Starting at position 1101 of SEQ ID NO: 315439
ggaugagcgucccaucaac

SEQ ID NO: 405076 - RNA, 19 nt, Artificial Sequence
  Description of Artificial Sequence: Synthetic oligonucleotide
  Antisense Strand to SEQ ID NO: 405075
guugaugggacgcucaucc

SEQ ID NO: 405077 - RNA, 19 nt, Artificial Sequence
  Description of Artificial Sequence: Synthetic oligonucleotide
  Sense Strand Starting at position 1101 of SEQ ID NO: 315485
gaggcaucgugagcucaga

SEQ ID NO: 405078 - RNA, 19 nt, Artificial Sequence
  Description of Artificial Sequence: Synthetic oligonucleotide
  Antisense Strand to SEQ ID NO: 405077
ucugagcucacgaugccuc

SEQ ID NO: 405079 - RNA, 19 nt, Artificial Sequence
  Description of Artificial Sequence: Synthetic oligonucleotide
  Sense Strand Starting at position 1101 of SEQ ID NO: 315633
ggguguccucauggguuga

SEQ ID NO: 405080 - RNA, 19 nt, Artificial Sequence
  Description of Artificial Sequence: Synthetic oligonucleotide
  Antisense Strand to SEQ ID NO: 405079
ucaacccaugaggacaccc

SEQ ID NO: 405081 - RNA, 19 nt, Artificial Sequence
  Description of Artificial Sequence: Synthetic oligonucleotide
  Sense Strand Starting at position 1101 of SEQ ID NO: 315634
gguguccucauggguugaa

SEQ ID NO: 405082 - RNA, 19 nt, Artificial Sequence
  Description of Artificial Sequence: Synthetic oligonucleotide
  Antisense Strand to SEQ ID NO: 405081
uucaacccaugaggacacc

SEQ ID NO: 405083 - RNA, 19 nt, Artificial Sequence
  Description of Artificial Sequence: Synthetic oligonucleotide
  Sense Strand Starting at position 1101 of SEQ ID NO: 315635
guguccucauggguugaaa

SEQ ID NO: 405084 - RNA, 19 nt, Artificial Sequence
  Description of Artificial Sequence: Synthetic oligonucleotide
  Antisense Strand to SEQ ID NO: 405083
uuucaacccaugaggacac

SEQ ID NO: 405085 - RNA, 19 nt, Artificial Sequence
  Description of Artificial Sequence: Synthetic oligonucleotide
  Sense Strand Starting at position 1101 of SEQ ID NO: 315637
guccucauggguugaaauu

SEQ ID NO: 405086 - RNA, 19 nt, Artificial Sequence
  Description of Artificial Sequence: Synthetic oligonucleotide
  Antisense Strand to SEQ ID NO: 405085
aauuucaacccaugaggac

SEQ ID NO: 405087 - RNA, 19 nt, Artificial Sequence
  Description of Artificial Sequence: Synthetic oligonucleotide
  Sense Strand Starting at position 1101 of SEQ ID NO: 316080
gggacagccuuccuccauu

SEQ ID NO: 405088 - RNA, 19 nt, Artificial Sequence
  Description of Artificial Sequence: Synthetic oligonucleotide
  Antisense Strand to SEQ ID NO: 405087
aauggaggaaggcuguccc

SEQ ID NO: 405089 - RNA, 19 nt, Artificial Sequence
  Description of Artificial Sequence: Synthetic oligonucleotide
  Sense Strand Starting at position 1101 of SEQ ID NO: 316091
ccuccauugcuugggugua

SEQ ID NO: 405090 - RNA, 19 nt, Artificial Sequence
  Description of Artificial Sequence: Synthetic oligonucleotide
  Antisense Strand to SEQ ID NO: 405089
uacacccaagcaauggagg

SEQ ID NO: 405091 - RNA, 19 nt, Artificial Sequence
  Description of Artificial Sequence: Synthetic oligonucleotide
  Sense Strand Starting at position 1101 of SEQ ID NO: 316093
uccauugcuuggguguauu

SEQ ID NO: 405092 - RNA, 19 nt, Artificial Sequence
  Description of Artificial Sequence: Synthetic oligonucleotide
  Antisense Strand to SEQ ID NO: 405091
aauacacccaagcaaugga

SEQ ID NO: 405093 - RNA, 19 nt, Artificial Sequence
  Description of Artificial Sequence: Synthetic oligonucleotide
  Sense Strand Starting at position 1101 of SEQ ID NO: 316126
aacugacucuacgaaaugu

SEQ ID NO: 405094 - RNA, 19 nt, Artificial Sequence
  Description of Artificial Sequence: Synthetic oligonucleotide
  Antisense Strand to SEQ ID NO: 405093
acauuucguagagucaguu

SEQ ID NO: 405095 - RNA, 19 nt, Artificial Sequence
  Description of Artificial Sequence: Synthetic oligonucleotide
  Sense Strand Starting at position 1101 of SEQ ID NO: 316394
gucaucugguccucacaau

SEQ ID NO: 405096 - RNA, 19 nt, Artificial Sequence
  Description of Artificial Sequence: Synthetic oligonucleotide
  Antisense Strand to SEQ ID NO: 405095
auugugaggaccagaugac

SEQ ID NO: 405097 - RNA, 19 nt, Artificial Sequence
  Description of Artificial Sequence: Synthetic oligonucleotide
  Sense Strand Starting at position 1101 of SEQ ID NO: 316406
ucacaauucugugagguga

SEQ ID NO: 405098 - RNA, 19 nt, Artificial Sequence
  Description of Artificial Sequence: Synthetic oligonucleotide
  Antisense Strand to SEQ ID NO: 405097
ucaccucacagaauuguga

SEQ ID NO: 405099 - RNA, 19 nt, Artificial Sequence
  Description of Artificial Sequence: Synthetic oligonucleotide
  Sense Strand Starting at position 1101 of SEQ ID NO: 316464
ggcagaacagugugacuaa

SEQ ID NO: 405100 - RNA, 19 nt, Artificial Sequence
  Description of Artificial Sequence: Synthetic oligonucleotide
  Antisense Strand to SEQ ID NO: 405099
uuagucacacuguucugcc

SEQ ID NO: 405101 - RNA, 19 nt, Artificial Sequence
  Description of Artificial Sequence: Synthetic oligonucleotide
  Sense Strand Starting at position 1101 of SEQ ID NO: 316465
gcagaacagugugacuaaa

SEQ ID NO: 405102 - RNA, 19 nt, Artificial Sequence
  Description of Artificial Sequence: Synthetic oligonucleotide
  Antisense Strand to SEQ ID NO: 405101
uuuagucacacuguucugc

SEQ ID NO: 405103 - RNA, 19 nt, Artificial Sequence
  Description of Artificial Sequence: Synthetic oligonucleotide
  Sense Strand Starting at position 1101 of SEQ ID NO: 316580
aggcuaagguucugacaaa

SEQ ID NO: 405104 - RNA, 19 nt, Artificial Sequence
  Description of Artificial Sequence: Synthetic oligonucleotide
  Antisense Strand to SEQ ID NO: 405103
uuugucagaaccuuagccu

SEQ ID NO: 405105 - RNA, 19 nt, Artificial Sequence
  Description of Artificial Sequence: Synthetic oligonucleotide
  Sense Strand Starting at position 1101 of SEQ ID NO: 316581
ggcuaagguucugacaaac

SEQ ID NO: 405106 - RNA, 19 nt, Artificial Sequence
  Description of Artificial Sequence: Synthetic oligonucleotide
  Antisense Strand to SEQ ID NO: 405105
guuugucagaaccuuagcc

SEQ ID NO: 405107 - RNA, 19 nt, Artificial Sequence
  Description of Artificial Sequence: Synthetic oligonucleotide
  Sense Strand Starting at position 1101 of SEQ ID NO: 316600
cuccaucauucugcgaauc

SEQ ID NO: 405108 - RNA, 19 nt, Artificial Sequence
  Description of Artificial Sequence: Synthetic oligonucleotide
  Antisense Strand to SEQ ID NO: 405107
gauucgcagaaugauggag

SEQ ID NO: 405109 - RNA, 19 nt, Artificial Sequence
  Description of Artificial Sequence: Synthetic oligonucleotide
  Sense Strand Starting at position 1101 of SEQ ID NO: 316601
uccaucauucugcgaaucu

SEQ ID NO: 405110 - RNA, 19 nt, Artificial Sequence
  Description of Artificial Sequence: Synthetic oligonucleotide
  Antisense Strand to SEQ ID NO: 405109
agauucgcagaaugaugga

SEQ ID NO: 405111 - RNA, 19 nt, Artificial Sequence
  Description of Artificial Sequence: Synthetic oligonucleotide
  Sense Strand Starting at position 1101 of SEQ ID NO: 316889
ggcacaugauggugaagaa

SEQ ID NO: 405112 - RNA, 19 nt, Artificial Sequence
  Description of Artificial Sequence: Synthetic oligonucleotide
  Antisense Strand to SEQ ID NO: 405111
uucuucaccaucaugugcc

SEQ ID NO: 405113 - RNA, 19 nt, Artificial Sequence
  Description of Artificial Sequence: Synthetic oligonucleotide
  Sense Strand Starting at position 1101 of SEQ ID NO: 316961
gcagcuucuugcccugaaa

SEQ ID NO: 405114 - RNA, 19 nt, Artificial Sequence
  Description of Artificial Sequence: Synthetic oligonucleotide
  Antisense Strand to SEQ ID NO: 405113
uuucagggcaagaagcugc

SEQ ID NO: 405115 - RNA, 19 nt, Artificial Sequence
  Description of Artificial Sequence: Synthetic oligonucleotide
  Sense Strand Starting at position 1101 of SEQ ID NO: 317195
acagaugagugaggaacaa

SEQ ID NO: 405116 - RNA, 19 nt, Artificial Sequence
  Description of Artificial Sequence: Synthetic oligonucleotide
  Antisense Strand to SEQ ID NO: 405115
uuguuccucacucaucugu

SEQ ID NO: 405117 - RNA, 19 nt, Artificial Sequence
  Description of Artificial Sequence: Synthetic oligonucleotide
  Sense Strand Starting at position 1101 of SEQ ID NO: 317687
ggaagcuguguucacagaa

SEQ ID NO: 405118 - RNA, 19 nt, Artificial Sequence
  Description of Artificial Sequence: Synthetic oligonucleotide
  Antisense Strand to SEQ ID NO: 405117
uucugugaacacagcuucc

SEQ ID NO: 405119 - RNA, 19 nt, Artificial Sequence
  Description of Artificial Sequence: Synthetic oligonucleotide
  Sense Strand Starting at position 1101 of SEQ ID NO: 317736
cuggaagacucauaaacau

SEQ ID NO: 405120 - RNA, 19 nt, Artificial Sequence
  Description of Artificial Sequence: Synthetic oligonucleotide
  Antisense Strand to SEQ ID NO: 405119
auguuuaugagucuuccag

SEQ ID NO: 405121 - RNA, 19 nt, Artificial Sequence
  Description of Artificial Sequence: Synthetic oligonucleotide
  Sense Strand Starting at position 1101 of SEQ ID NO: 318073
cggacuaucccaggcuuaa

SEQ ID NO: 405122 - RNA, 19 nt, Artificial Sequence
  Description of Artificial Sequence: Synthetic oligonucleotide
  Antisense Strand to SEQ ID NO: 405121
uuaagccugggauaguccg

SEQ ID NO: 405123 - RNA, 19 nt, Artificial Sequence
  Description of Artificial Sequence: Synthetic oligonucleotide
  Sense Strand Starting at position 1101 of SEQ ID NO: 318297
augcauaacuggcccuaaa

SEQ ID NO: 405124 - RNA, 19 nt, Artificial Sequence
  Description of Artificial Sequence: Synthetic oligonucleotide
  Antisense Strand to SEQ ID NO: 405123
uuuagggccaguuaugcau

SEQ ID NO: 405125 - RNA, 19 nt, Artificial Sequence
  Description of Artificial Sequence: Synthetic oligonucleotide
  Sense Strand Starting at position 1101 of SEQ ID NO: 318329
cccacugagagcuagaguu

SEQ ID NO: 405126 - RNA, 19 nt, Artificial Sequence
  Description of Artificial Sequence: Synthetic oligonucleotide
  Antisense Strand to SEQ ID NO: 405125
aacucuagcucucaguggg

SEQ ID NO: 405127 - RNA, 19 nt, Artificial Sequence
  Description of Artificial Sequence: Synthetic oligonucleotide
  Sense Strand Starting at position 1101 of SEQ ID NO: 318416
gucaguuucuaggcaugga

SEQ ID NO: 405128 - RNA, 19 nt, Artificial Sequence
  Description of Artificial Sequence: Synthetic oligonucleotide
  Antisense Strand to SEQ ID NO: 405127
uccaugccuagaaacugac

SEQ ID NO: 405129 - RNA, 19 nt, Artificial Sequence
  Description of Artificial Sequence: Synthetic oligonucleotide
  Sense Strand Starting at position 1101 of SEQ ID NO: 318417
ucaguuucuaggcauggau

SEQ ID NO: 405130 - RNA, 19 nt, Artificial Sequence
  Description of Artificial Sequence: Synthetic oligonucleotide
  Antisense Strand to SEQ ID NO: 405129
auccaugccuagaaacuga

SEQ ID NO: 405131 - RNA, 19 nt, Artificial Sequence
  Description of Artificial Sequence: Synthetic oligonucleotide
  Sense Strand Starting at position 1101 of SEQ ID NO: 318426
aggcauggaucuuaagaaa

SEQ ID NO: 405132 - RNA, 19 nt, Artificial Sequence
  Description of Artificial Sequence: Synthetic oligonucleotide
  Antisense Strand to SEQ ID NO: 405131
uuucuuaagauccaugccu

SEQ ID NO: 405133 - RNA, 19 nt, Artificial Sequence
  Description of Artificial Sequence: Synthetic oligonucleotide
  Sense Strand Starting at position 1101 of SEQ ID NO: 318648
ccuguagauuccgcaucaa

SEQ ID NO: 405134 - RNA, 19 nt, Artificial Sequence
  Description of Artificial Sequence: Synthetic oligonucleotide
  Antisense Strand to SEQ ID NO: 405133
uugaugcggaaucuacagg

SEQ ID NO: 405135 - RNA, 19 nt, Artificial Sequence
  Description of Artificial Sequence: Synthetic oligonucleotide
  Sense Strand Starting at position 1101 of SEQ ID NO: 318698
uuggguguccuucguuaca

SEQ ID NO: 405136 - RNA, 19 nt, Artificial Sequence
  Description of Artificial Sequence: Synthetic oligonucleotide
  Antisense Strand to SEQ ID NO: 405135
uguaacgaaggacacccaa

SEQ ID NO: 405137 - RNA, 19 nt, Artificial Sequence
  Description of Artificial Sequence: Synthetic oligonucleotide
  Sense Strand Starting at position 1101 of SEQ ID NO: 318700
ggguguccuucguuacaua

SEQ ID NO: 405138 - RNA, 19 nt, Artificial Sequence
  Description of Artificial Sequence: Synthetic oligonucleotide
  Antisense Strand to SEQ ID NO: 405137
uauguaacgaaggacaccc

SEQ ID NO: 405139 - RNA, 19 nt, Artificial Sequence
  Description of Artificial Sequence: Synthetic oligonucleotide
  Sense Strand Starting at position 1101 of SEQ ID NO: 318710
cguuacauagccguaguua

SEQ ID NO: 405140 - RNA, 19 nt, Artificial Sequence
  Description of Artificial Sequence: Synthetic oligonucleotide
  Antisense Strand to SEQ ID NO: 405139
uaacuacggcuauguaacg

SEQ ID NO: 405141 - RNA, 19 nt, Artificial Sequence
  Description of Artificial Sequence: Synthetic oligonucleotide
  Sense Strand Starting at position 1101 of SEQ ID NO: 318711
guuacauagccguaguuaa

SEQ ID NO: 405142 - RNA, 19 nt, Artificial Sequence
  Description of Artificial Sequence: Synthetic oligonucleotide
  Antisense Strand to SEQ ID NO: 405141
uuaacuacggcuauguaac

SEQ ID NO: 405143 - RNA, 19 nt, Artificial Sequence
  Description of Artificial Sequence: Synthetic oligonucleotide
  Sense Strand Starting at position 1101 of SEQ ID NO: 318719
gccguaguuaacugcauuu

SEQ ID NO: 405144 - RNA, 19 nt, Artificial Sequence
  Description of Artificial Sequence: Synthetic oligonucleotide
  Antisense Strand to SEQ ID NO: 405143
aaaugcaguuaacuacggc

SEQ ID NO: 405145 - RNA, 19 nt, Artificial Sequence
  Description of Artificial Sequence: Synthetic oligonucleotide
  Sense Strand Starting at position 1101 of SEQ ID NO: 318806
agaccucuccucugagcuu

SEQ ID NO: 405146 - RNA, 19 nt, Artificial Sequence
  Description of Artificial Sequence: Synthetic oligonucleotide
  Antisense Strand to SEQ ID NO: 405145
aagcucagaggagaggucu

SEQ ID NO: 405147 - RNA, 19 nt, Artificial Sequence
  Description of Artificial Sequence: Synthetic oligonucleotide
  Sense Strand Starting at position 1101 of SEQ ID NO: 318849
uagggaugagcauguaucu

SEQ ID NO: 405148 - RNA, 19 nt, Artificial Sequence
  Description of Artificial Sequence: Synthetic oligonucleotide
  Antisense Strand to SEQ ID NO: 405147
agauacaugcucaucccua

SEQ ID NO: 405149 - RNA, 19 nt, Artificial Sequence
  Description of Artificial Sequence: Synthetic oligonucleotide
  Sense Strand Starting at position 1101 of SEQ ID NO: 319062
ggcccuuugucccucuaau

SEQ ID NO: 405150 - RNA, 19 nt, Artificial Sequence
  Description of Artificial Sequence: Synthetic oligonucleotide
  Antisense Strand to SEQ ID NO: 405149
auuagagggacaaagggcc

SEQ ID NO: 405151 - RNA, 19 nt, Artificial Sequence
  Description of Artificial Sequence: Synthetic oligonucleotide
  Sense Strand Starting at position 1102 of SEQ ID NO: 315414
gguaguuaagguugggaau

SEQ ID NO: 405152 - RNA, 19 nt, Artificial Sequence
  Description of Artificial Sequence: Synthetic oligonucleotide
  Antisense Strand to SEQ ID NO: 405151
auucccaaccuuaacuacc

SEQ ID NO: 405153 - RNA, 19 nt, Artificial Sequence
  Description of Artificial Sequence: Synthetic oligonucleotide
  Sense Strand Starting at position 1102 of SEQ ID NO: 315484
uuauaacugcguuauaacu

SEQ ID NO: 405154 - RNA, 19 nt, Artificial Sequence
  Description of Artificial Sequence: Synthetic oligonucleotide
  Antisense Strand to SEQ ID NO: 405153
aguuauaacgcaguuauaa

SEQ ID NO: 405155 - RNA, 19 nt, Artificial Sequence
  Description of Artificial Sequence: Synthetic oligonucleotide
  Sense Strand Starting at position 1102 of SEQ ID NO: 315541
cugagcucucaguagcuua

SEQ ID NO: 405156 - RNA, 19 nt, Artificial Sequence
  Description of Artificial Sequence: Synthetic oligonucleotide
  Antisense Strand to SEQ ID NO: 405155
uaagcuacugagagcucag

SEQ ID NO: 405157 - RNA, 19 nt, Artificial Sequence
  Description of Artificial Sequence: Synthetic oligonucleotide
  Sense Strand Starting at position 1102 of SEQ ID NO: 315546
cucucaguagcuuaugaca

SEQ ID NO: 405158 - RNA, 19 nt, Artificial Sequence
  Description of Artificial Sequence: Synthetic oligonucleotide
  Antisense Strand to SEQ ID NO: 405157
ugucauaagcuacugagag

SEQ ID NO: 405159 - RNA, 19 nt, Artificial Sequence
  Description of Artificial Sequence: Synthetic oligonucleotide
  Sense Strand Starting at position 1102 of SEQ ID NO: 315554
agcuuaugacagcaaggau

SEQ ID NO: 405160 - RNA, 19 nt, Artificial Sequence
  Description of Artificial Sequence: Synthetic oligonucleotide
  Antisense Strand to SEQ ID NO: 405159
auccuugcugucauaagcu

SEQ ID NO: 405161 - RNA, 19 nt, Artificial Sequence
  Description of Artificial Sequence: Synthetic oligonucleotide
  Sense Strand Starting at position 1102 of SEQ ID NO: 315557
uuaugacagcaaggauuaa

SEQ ID NO: 405162 - RNA, 19 nt, Artificial Sequence
  Description of Artificial Sequence: Synthetic oligonucleotide
  Antisense Strand to SEQ ID NO: 405161
uuaauccuugcugucauaa

SEQ ID NO: 405163 - RNA, 19 nt, Artificial Sequence
  Description of Artificial Sequence: Synthetic oligonucleotide
  Sense Strand Starting at position 1102 of SEQ ID NO: 315602
uggguuggcagagggaaua

SEQ ID NO: 405164 - RNA, 19 nt, Artificial Sequence
  Description of Artificial Sequence: Synthetic oligonucleotide
  Antisense Strand to SEQ ID NO: 405163
uauucccucugccaaccca

SEQ ID NO: 405165 - RNA, 19 nt, Artificial Sequence
  Description of Artificial Sequence: Synthetic oligonucleotide
  Sense Strand Starting at position 1102 of SEQ ID NO: 315955
ccuuuauuaccuggagcaa

SEQ ID NO: 405166 - RNA, 19 nt, Artificial Sequence
  Description of Artificial Sequence: Synthetic oligonucleotide
  Antisense Strand to SEQ ID NO: 405165
uugcuccagguaauaaagg

SEQ ID NO: 405167 - RNA, 19 nt, Artificial Sequence
  Description of Artificial Sequence: Synthetic oligonucleotide
  Sense Strand Starting at position 1102 of SEQ ID NO: 315956
cuuuauuaccuggagcaag

SEQ ID NO: 405168 - RNA, 19 nt, Artificial Sequence
  Description of Artificial Sequence: Synthetic oligonucleotide
  Antisense Strand to SEQ ID NO: 405167
cuugcuccagguaauaaag

SEQ ID NO: 405169 - RNA, 19 nt, Artificial Sequence
  Description of Artificial Sequence: Synthetic oligonucleotide
  Sense Strand Starting at position 1102 of SEQ ID NO: 316023
acaucagaauguucuaggu

SEQ ID NO: 405170 - RNA, 19 nt, Artificial Sequence
  Description of Artificial Sequence: Synthetic oligonucleotide
  Antisense Strand to SEQ ID NO: 405169
accuagaacauucugaugu

SEQ ID NO: 405171 - RNA, 19 nt, Artificial Sequence
  Description of Artificial Sequence: Synthetic oligonucleotide
  Sense Strand Starting at position 1102 of SEQ ID NO: 316027
cagaauguucuagguaaau

SEQ ID NO: 405172 - RNA, 19 nt, Artificial Sequence
  Description of Artificial Sequence: Synthetic oligonucleotide
  Antisense Strand to SEQ ID NO: 405171
auuuaccuagaacauucug

SEQ ID NO: 405173 - RNA, 19 nt, Artificial Sequence
  Description of Artificial Sequence: Synthetic oligonucleotide
  Sense Strand Starting at position 1102 of SEQ ID NO: 316240
aagaaacagcugugugcaa

SEQ ID NO: 405174 - RNA, 19 nt, Artificial Sequence
  Description of Artificial Sequence: Synthetic oligonucleotide
  Antisense Strand to SEQ ID NO: 405173
uugcacacagcuguuucuu

SEQ ID NO: 405175 - RNA, 19 nt, Artificial Sequence
  Description of Artificial Sequence: Synthetic oligonucleotide
  Sense Strand Starting at position 1102 of SEQ ID NO: 316255
gcaacuugccaccauauga

SEQ ID NO: 405176 - RNA, 19 nt, Artificial Sequence
  Description of Artificial Sequence: Synthetic oligonucleotide
  Antisense Strand to SEQ ID NO: 405175
ucauaugguggcaaguugc

SEQ ID NO: 405177 - RNA, 19 nt, Artificial Sequence
  Description of Artificial Sequence: Synthetic oligonucleotide
  Sense Strand Starting at position 1102 of SEQ ID NO: 316284
gacggcagucauuauauua

SEQ ID NO: 405178 - RNA, 19 nt, Artificial Sequence
  Description of Artificial Sequence: Synthetic oligonucleotide
  Antisense Strand to SEQ ID NO: 405177
uaauauaaugacugccguc

SEQ ID NO: 405179 - RNA, 19 nt, Artificial Sequence
  Description of Artificial Sequence: Synthetic oligonucleotide
  Sense Strand Starting at position 1102 of SEQ ID NO: 316331
auggauuacuaucucuaug

SEQ ID NO: 405180 - RNA, 19 nt, Artificial Sequence
  Description of Artificial Sequence: Synthetic oligonucleotide
  Antisense Strand to SEQ ID NO: 405179
cauagagauaguaauccau

SEQ ID NO: 405181 - RNA, 19 nt, Artificial Sequence
  Description of Artificial Sequence: Synthetic oligonucleotide
  Sense Strand Starting at position 1102 of SEQ ID NO: 316333
ggauuacuaucucuaugag

SEQ ID NO: 405182 - RNA, 19 nt, Artificial Sequence
  Description of Artificial Sequence: Synthetic oligonucleotide
  Antisense Strand to SEQ ID NO: 405181
cucauagagauaguaaucc

SEQ ID NO: 405183 - RNA, 19 nt, Artificial Sequence
  Description of Artificial Sequence: Synthetic oligonucleotide
  Sense Strand Starting at position 1102 of SEQ ID NO: 316336
uuacuaucucuaugagaag

SEQ ID NO: 405184 - RNA, 19 nt, Artificial Sequence
  Description of Artificial Sequence: Synthetic oligonucleotide
  Antisense Strand to SEQ ID NO: 405183
cuucucauagagauaguaa

SEQ ID NO: 405185 - RNA, 19 nt, Artificial Sequence
  Description of Artificial Sequence: Synthetic oligonucleotide
  Sense Strand Starting at position 1102 of SEQ ID NO: 316353
agcaguuaucucuauggga

SEQ ID NO: 405186 - RNA, 19 nt, Artificial Sequence
  Description of Artificial Sequence: Synthetic oligonucleotide
  Antisense Strand to SEQ ID NO: 405185
ucccauagagauaacugcu

SEQ ID NO: 405187 - RNA, 19 nt, Artificial Sequence
  Description of Artificial Sequence: Synthetic oligonucleotide
  Sense Strand Starting at position 1102 of SEQ ID NO: 316355
caguuaucucuaugggaag

SEQ ID NO: 405188 - RNA, 19 nt, Artificial Sequence
  Description of Artificial Sequence: Synthetic oligonucleotide
  Antisense Strand to SEQ ID NO: 405187
cuucccauagagauaacug

SEQ ID NO: 405189 - RNA, 19 nt, Artificial Sequence
  Description of Artificial Sequence: Synthetic oligonucleotide
  Sense Strand Starting at position 1102 of SEQ ID NO: 316357
guuaucucuaugggaagca

SEQ ID NO: 405190 - RNA, 19 nt, Artificial Sequence
  Description of Artificial Sequence: Synthetic oligonucleotide
  Antisense Strand to SEQ ID NO: 405189
ugcuucccauagagauaac

SEQ ID NO: 405191 - RNA, 19 nt, Artificial Sequence
  Description of Artificial Sequence: Synthetic oligonucleotide
  Sense Strand Starting at position 1102 of SEQ ID NO: 316381
acuaauuuguuucuggcau

SEQ ID NO: 405192 - RNA, 19 nt, Artificial Sequence
  Description of Artificial Sequence: Synthetic oligonucleotide
  Antisense Strand to SEQ ID NO: 405191
augccagaaacaaauuagu

SEQ ID NO: 405193 - RNA, 19 nt, Artificial Sequence
  Description of Artificial Sequence: Synthetic oligonucleotide
  Sense Strand Starting at position 1102 of SEQ ID NO: 316408
cgugaaugaggucaccagu

SEQ ID NO: 405194 - RNA, 19 nt, Artificial Sequence
  Description of Artificial Sequence: Synthetic oligonucleotide
  Antisense Strand to SEQ ID NO: 405193
acuggugaccucauucacg

SEQ ID NO: 405195 - RNA, 19 nt, Artificial Sequence
  Description of Artificial Sequence: Synthetic oligonucleotide
  Sense Strand Starting at position 1102 of SEQ ID NO: 316621
uucuguuaacauggcgaga

SEQ ID NO: 405196 - RNA, 19 nt, Artificial Sequence
  Description of Artificial Sequence: Synthetic oligonucleotide
  Antisense Strand to SEQ ID NO: 405195
ucucgccauguuaacagaa

SEQ ID NO: 405197 - RNA, 19 nt, Artificial Sequence
  Description of Artificial Sequence: Synthetic oligonucleotide
  Sense Strand Starting at position 1102 of SEQ ID NO: 316624
uguuaacauggcgagacau

SEQ ID NO: 405198 - RNA, 19 nt, Artificial Sequence
  Description of Artificial Sequence: Synthetic oligonucleotide
  Antisense Strand to SEQ ID NO: 405197
augucucgccauguuaaca

SEQ ID NO: 405199 - RNA, 19 nt, Artificial Sequence
  Description of Artificial Sequence: Synthetic oligonucleotide
  Sense Strand Starting at position 1102 of SEQ ID NO: 316984
caaaguaugcugggaaauc

SEQ ID NO: 405200 - RNA, 19 nt, Artificial Sequence
  Description of Artificial Sequence: Synthetic oligonucleotide
  Antisense Strand to SEQ ID NO: 405199
gauuucccagcauacuuug

SEQ ID NO: 405201 - RNA, 19 nt, Artificial Sequence
  Description of Artificial Sequence: Synthetic oligonucleotide
  Sense Strand Starting at position 1102 of SEQ ID NO: 317101
gucuuauguccuuaccuua

SEQ ID NO: 405202 - RNA, 19 nt, Artificial Sequence
  Description of Artificial Sequence: Synthetic oligonucleotide
  Antisense Strand to SEQ ID NO: 405201
uaagguaaggacauaagac

SEQ ID NO: 405203 - RNA, 19 nt, Artificial Sequence
  Description of Artificial Sequence: Synthetic oligonucleotide
  Sense Strand Starting at position 1102 of SEQ ID NO: 317317
cucuucugucacgaaggau

SEQ ID NO: 405204 - RNA, 19 nt, Artificial Sequence
  Description of Artificial Sequence: Synthetic oligonucleotide
  Antisense Strand to SEQ ID NO: 405203
auccuucgugacagaagag

SEQ ID NO: 405205 - RNA, 19 nt, Artificial Sequence
  Description of Artificial Sequence: Synthetic oligonucleotide
  Sense Strand Starting at position 1102 of SEQ ID NO: 317477
uaguguuugaggcagaaca

SEQ ID NO: 405206 - RNA, 19 nt, Artificial Sequence
  Description of Artificial Sequence: Synthetic oligonucleotide
  Antisense Strand to SEQ ID NO: 405205
uguucugccucaaacacua

SEQ ID NO: 405207 - RNA, 19 nt, Artificial Sequence
  Description of Artificial Sequence: Synthetic oligonucleotide
  Sense Strand Starting at position 1102 of SEQ ID NO: 317479
guguuugaggcagaacaaa

SEQ ID NO: 405208 - RNA, 19 nt, Artificial Sequence
  Description of Artificial Sequence: Synthetic oligonucleotide
  Antisense Strand to SEQ ID NO: 405207
uuuguucugccucaaacac

SEQ ID NO: 405209 - RNA, 19 nt, Artificial Sequence
  Description of Artificial Sequence: Synthetic oligonucleotide
  Sense Strand Starting at position 1102 of SEQ ID NO: 317511
gcaguugacauggacucau

SEQ ID NO: 405210 - RNA, 19 nt, Artificial Sequence
  Description of Artificial Sequence: Synthetic oligonucleotide
  Antisense Strand to SEQ ID NO: 405209
augaguccaugucaacugc

SEQ ID NO: 405211 - RNA, 19 nt, Artificial Sequence
  Description of Artificial Sequence: Synthetic oligonucleotide
  Sense Strand Starting at position 1102 of SEQ ID NO: 317522
ggacucaucuguucuggua

SEQ ID NO: 405212 - RNA, 19 nt, Artificial Sequence
  Description of Artificial Sequence: Synthetic oligonucleotide
  Antisense Strand to SEQ ID NO: 405211
uaccagaacagaugagucc

SEQ ID NO: 405213 - RNA, 19 nt, Artificial Sequence
  Description of Artificial Sequence: Synthetic oligonucleotide
  Sense Strand Starting at position 1102 of SEQ ID NO: 317636
gaccaauucugagcuagga

SEQ ID NO: 405214 - RNA, 19 nt, Artificial Sequence
  Description of Artificial Sequence: Synthetic oligonucleotide
  Antisense Strand to SEQ ID NO: 405213
uccuagcucagaauugguc

SEQ ID NO: 405215 - RNA, 19 nt, Artificial Sequence
  Description of Artificial Sequence: Synthetic oligonucleotide
  Sense Strand Starting at position 1102 of SEQ ID NO: 317667
aggcuuuaagcagaaguga

SEQ ID NO: 405216 - RNA, 19 nt, Artificial Sequence
  Description of Artificial Sequence: Synthetic oligonucleotide
  Antisense Strand to SEQ ID NO: 405215
ucacuucugcuuaaagccu

SEQ ID NO: 405217 - RNA, 19 nt, Artificial Sequence
  Description of Artificial Sequence: Synthetic oligonucleotide
  Sense Strand Starting at position 1102 of SEQ ID NO: 318042
aggccuauuccgggagacu

SEQ ID NO: 405218 - RNA, 19 nt, Artificial Sequence
  Description of Artificial Sequence: Synthetic oligonucleotide
  Antisense Strand to SEQ ID NO: 405217
agucucccggaauaggccu

SEQ ID NO: 405219 - RNA, 19 nt, Artificial Sequence
  Description of Artificial Sequence: Synthetic oligonucleotide
  Sense Strand Starting at position 1102 of SEQ ID NO: 318043
ggccuauuccgggagacuc

SEQ ID NO: 405220 - RNA, 19 nt, Artificial Sequence
  Description of Artificial Sequence: Synthetic oligonucleotide
  Antisense Strand to SEQ ID NO: 405219
gagucucccggaauaggcc

SEQ ID NO: 405221 - RNA, 19 nt, Artificial Sequence
  Description of Artificial Sequence: Synthetic oligonucleotide
  Sense Strand Starting at position 1102 of SEQ ID NO: 318234
cugggaucaugaguagcaa

SEQ ID NO: 405222 - RNA, 19 nt, Artificial Sequence
  Description of Artificial Sequence: Synthetic oligonucleotide
  Antisense Strand to SEQ ID NO: 405221
uugcuacucaugaucccag

SEQ ID NO: 405223 - RNA, 19 nt, Artificial Sequence
  Description of Artificial Sequence: Synthetic oligonucleotide
  Sense Strand Starting at position 1102 of SEQ ID NO: 318310
acagaaguguagccaguau

SEQ ID NO: 405224 - RNA, 19 nt, Artificial Sequence
  Description of Artificial Sequence: Synthetic oligonucleotide
  Antisense Strand to SEQ ID NO: 405223
auacuggcuacacuucugu

SEQ ID NO: 405225 - RNA, 19 nt, Artificial Sequence
  Description of Artificial Sequence: Synthetic oligonucleotide
  Sense Strand Starting at position 1102 of SEQ ID NO: 318511
gccugaagauguucccaga

SEQ ID NO: 405226 - RNA, 19 nt, Artificial Sequence
  Description of Artificial Sequence: Synthetic oligonucleotide
  Antisense Strand to SEQ ID NO: 405225
ucugggaacaucuucaggc

SEQ ID NO: 405227 - RNA, 19 nt, Artificial Sequence
  Description of Artificial Sequence: Synthetic oligonucleotide
  Sense Strand Starting at position 1102 of SEQ ID NO: 318707
guguuuggugccuauagga

SEQ ID NO: 405228 - RNA, 19 nt, Artificial Sequence
  Description of Artificial Sequence: Synthetic oligonucleotide
  Antisense Strand to SEQ ID NO: 405227
uccuauaggcaccaaacac

SEQ ID NO: 405229 - RNA, 19 nt, Artificial Sequence
  Description of Artificial Sequence: Synthetic oligonucleotide
  Sense Strand Starting at position 1102 of SEQ ID NO: 319172
ccaucauacccaggugauu

SEQ ID NO: 405230 - RNA, 19 nt, Artificial Sequence
  Description of Artificial Sequence: Synthetic oligonucleotide
  Antisense Strand to SEQ ID NO: 405229
aaucaccuggguaugaugg

SEQ ID NO: 405231 - RNA, 19 nt, Artificial Sequence
  Description of Artificial Sequence: Synthetic oligonucleotide
  Sense Strand Starting at position 1103 of SEQ ID NO: 315609
cagauuauuuaggaugagu

SEQ ID NO: 405232 - RNA, 19 nt, Artificial Sequence
  Description of Artificial Sequence: Synthetic oligonucleotide
  Antisense Strand to SEQ ID NO: 405231
acucauccuaaauaaucug

SEQ ID NO: 405233 - RNA, 19 nt, Artificial Sequence
  Description of Artificial Sequence: Synthetic oligonucleotide
  Sense Strand Starting at position 1103 of SEQ ID NO: 315618
uaggaugaguuuccaguau

SEQ ID NO: 405234 - RNA, 19 nt, Artificial Sequence
  Description of Artificial Sequence: Synthetic oligonucleotide
  Antisense Strand to SEQ ID NO: 405233
auacuggaaacucauccua

SEQ ID NO: 405235 - RNA, 19 nt, Artificial Sequence
  Description of Artificial Sequence: Synthetic oligonucleotide
  Sense Strand Starting at position 1103 of SEQ ID NO: 315622
augaguuuccaguauucca

SEQ ID NO: 405236 - RNA, 19 nt, Artificial Sequence
  Description of Artificial Sequence: Synthetic oligonucleotide
  Antisense Strand to SEQ ID NO: 405235
uggaauacuggaaacucau

SEQ ID NO: 405237 - RNA, 19 nt, Artificial Sequence
  Description of Artificial Sequence: Synthetic oligonucleotide
  Sense Strand Starting at position 1103 of SEQ ID NO: 315625
aguuuccaguauuccauua

SEQ ID NO: 405238 - RNA, 19 nt, Artificial Sequence
  Description of Artificial Sequence: Synthetic oligonucleotide
  Antisense Strand to SEQ ID NO: 405237
uaauggaauacuggaaacu

SEQ ID NO: 405239 - RNA, 19 nt, Artificial Sequence
  Description of Artificial Sequence: Synthetic oligonucleotide
  Sense Strand Starting at position 1103 of SEQ ID NO: 315690
cugucuggugacugaguuu

SEQ ID NO: 405240 - RNA, 19 nt, Artificial Sequence
  Description of Artificial Sequence: Synthetic oligonucleotide
  Antisense Strand to SEQ ID NO: 405239
aaacucagucaccagacag

SEQ ID NO: 405241 - RNA, 19 nt, Artificial Sequence
  Description of Artificial Sequence: Synthetic oligonucleotide
  Sense Strand Starting at position 1103 of SEQ ID NO: 315720
agagaacuuauaugaacgu

SEQ ID NO: 405242 - RNA, 19 nt, Artificial Sequence
  Description of Artificial Sequence: Synthetic oligonucleotide
  Antisense Strand to SEQ ID NO: 405241
acguucauauaaguucucu

SEQ ID NO: 405243 - RNA, 19 nt, Artificial Sequence
  Description of Artificial Sequence: Synthetic oligonucleotide
  Sense Strand Starting at position 1103 of SEQ ID NO: 315721
gagaacuuauaugaacgua

SEQ ID NO: 405244 - RNA, 19 nt, Artificial Sequence
  Description of Artificial Sequence: Synthetic oligonucleotide
  Antisense Strand to SEQ ID NO: 405243
uacguucauauaaguucuc

SEQ ID NO: 405245 - RNA, 19 nt, Artificial Sequence
  Description of Artificial Sequence: Synthetic oligonucleotide
  Sense Strand Starting at position 1103 of SEQ ID NO: 315866
uugugaaagaccggacaau

SEQ ID NO: 405246 - RNA, 19 nt, Artificial Sequence
  Description of Artificial Sequence: Synthetic oligonucleotide
  Antisense Strand to SEQ ID NO: 405245
auuguccggucuuucacaa

SEQ ID NO: 405247 - RNA, 19 nt, Artificial Sequence
  Description of Artificial Sequence: Synthetic oligonucleotide
  Sense Strand Starting at position 1103 of SEQ ID NO: 315951
acuuccaucuccuuugagu

SEQ ID NO: 405248 - RNA, 19 nt, Artificial Sequence
  Description of Artificial Sequence: Synthetic oligonucleotide
  Antisense Strand to SEQ ID NO: 405247
acucaaaggagauggaagu

SEQ ID NO: 405249 - RNA, 19 nt, Artificial Sequence
  Description of Artificial Sequence: Synthetic oligonucleotide
  Sense Strand Starting at position 1103 of SEQ ID NO: 315953
uuccaucuccuuugaguca

SEQ ID NO: 405250 - RNA, 19 nt, Artificial Sequence
  Description of Artificial Sequence: Synthetic oligonucleotide
  Antisense Strand to SEQ ID NO: 405249
ugacucaaaggagauggaa

SEQ ID NO: 405251 - RNA, 19 nt, Artificial Sequence
  Description of Artificial Sequence: Synthetic oligonucleotide
  Sense Strand Starting at position 1103 of SEQ ID NO: 316004
ggacgcaugugcucuaaag

SEQ ID NO: 405252 - RNA, 19 nt, Artificial Sequence
  Description of Artificial Sequence: Synthetic oligonucleotide
  Antisense Strand to SEQ ID NO: 405251
cuuuagagcacaugcgucc

SEQ ID NO: 405253 - RNA, 19 nt, Artificial Sequence
  Description of Artificial Sequence: Synthetic oligonucleotide
  Sense Strand Starting at position 1103 of SEQ ID NO: 316006
acgcaugugcucuaaagaa

SEQ ID NO: 405254 - RNA, 19 nt, Artificial Sequence
  Description of Artificial Sequence: Synthetic oligonucleotide
  Antisense Strand to SEQ ID NO: 405253
uucuuuagagcacaugcgu

SEQ ID NO: 405255 - RNA, 19 nt, Artificial Sequence
  Description of Artificial Sequence: Synthetic oligonucleotide
  Sense Strand Starting at position 1103 of SEQ ID NO: 316125
aagccagucucaguaggaa

SEQ ID NO: 405256 - RNA, 19 nt, Artificial Sequence
  Description of Artificial Sequence: Synthetic oligonucleotide
  Antisense Strand to SEQ ID NO: 405255
uuccuacugagacuggcuu

SEQ ID NO: 405257 - RNA, 19 nt, Artificial Sequence
  Description of Artificial Sequence: Synthetic oligonucleotide
  Sense Strand Starting at position 1103 of SEQ ID NO: 316146
gcgaucuugcuagcugagu

SEQ ID NO: 405258 - RNA, 19 nt, Artificial Sequence
  Description of Artificial Sequence: Synthetic oligonucleotide
  Antisense Strand to SEQ ID NO: 405257
acucagcuagcaagaucgc

SEQ ID NO: 405259 - RNA, 19 nt, Artificial Sequence
  Description of Artificial Sequence: Synthetic oligonucleotide
  Sense Strand Starting at position 1103 of SEQ ID NO: 316322
cggagaacucaccgaacaa

SEQ ID NO: 405260 - RNA, 19 nt, Artificial Sequence
  Description of Artificial Sequence: Synthetic oligonucleotide
  Antisense Strand to SEQ ID NO: 405259
uuguucggugaguucuccg

SEQ ID NO: 405261 - RNA, 19 nt, Artificial Sequence
  Description of Artificial Sequence: Synthetic oligonucleotide
  Sense Strand Starting at position 1103 of SEQ ID NO: 317429
ggacauuugucccagccaa

SEQ ID NO: 405262 - RNA, 19 nt, Artificial Sequence
  Description of Artificial Sequence: Synthetic oligonucleotide
  Antisense Strand to SEQ ID NO: 405261
uuggcugggacaaaugucc

SEQ ID NO: 405263 - RNA, 19 nt, Artificial Sequence
  Description of Artificial Sequence: Synthetic oligonucleotide
  Sense Strand Starting at position 1103 of SEQ ID NO: 317519
agcuuaauugaccgaagcu

SEQ ID NO: 405264 - RNA, 19 nt, Artificial Sequence
  Description of Artificial Sequence: Synthetic oligonucleotide
  Antisense Strand to SEQ ID NO: 405263
agcuucggucaauuaagcu

SEQ ID NO: 405265 - RNA, 19 nt, Artificial Sequence
  Description of Artificial Sequence: Synthetic oligonucleotide
  Sense Strand Starting at position 1103 of SEQ ID NO: 317520
gcuuaauugaccgaagcug

SEQ ID NO: 405266 - RNA, 19 nt, Artificial Sequence
  Description of Artificial Sequence: Synthetic oligonucleotide
  Antisense Strand to SEQ ID NO: 405265
cagcuucggucaauuaagc

SEQ ID NO: 405267 - RNA, 19 nt, Artificial Sequence
  Description of Artificial Sequence: Synthetic oligonucleotide
  Sense Strand Starting at position 1103 of SEQ ID NO: 317536
cugagcgucuaacuaguuu

SEQ ID NO: 405268 - RNA, 19 nt, Artificial Sequence
  Description of Artificial Sequence: Synthetic oligonucleotide
  Antisense Strand to SEQ ID NO: 405267
aaacuaguuagacgcucag

SEQ ID NO: 405269 - RNA, 19 nt, Artificial Sequence
  Description of Artificial Sequence: Synthetic oligonucleotide
  Sense Strand Starting at position 1103 of SEQ ID NO: 317707
ucacgacuccuggaaguuu

SEQ ID NO: 405270 - RNA, 19 nt, Artificial Sequence
  Description of Artificial Sequence: Synthetic oligonucleotide
  Antisense Strand to SEQ ID NO: 405269
aaacuuccaggagucguga

SEQ ID NO: 405271 - RNA, 19 nt, Artificial Sequence
  Description of Artificial Sequence: Synthetic oligonucleotide
  Sense Strand Starting at position 1103 of SEQ ID NO: 318195
ccuucuguaacgggaugau

SEQ ID NO: 405272 - RNA, 19 nt, Artificial Sequence
  Description of Artificial Sequence: Synthetic oligonucleotide
  Antisense Strand to SEQ ID NO: 405271
aucaucccguuacagaagg

SEQ ID NO: 405273 - RNA, 19 nt, Artificial Sequence
  Description of Artificial Sequence: Synthetic oligonucleotide
  Sense Strand Starting at position 1103 of SEQ ID NO: 318198
ucuguaacgggaugauugu

SEQ ID NO: 405274 - RNA, 19 nt, Artificial Sequence
  Description of Artificial Sequence: Synthetic oligonucleotide
  Antisense Strand to SEQ ID NO: 405273
acaaucaucccguuacaga

SEQ ID NO: 405275 - RNA, 19 nt, Artificial Sequence
  Description of Artificial Sequence: Synthetic oligonucleotide
  Sense Strand Starting at position 1103 of SEQ ID NO: 318231
aggcucauugaaggauuaa

SEQ ID NO: 405276 - RNA, 19 nt, Artificial Sequence
  Description of Artificial Sequence: Synthetic oligonucleotide
  Antisense Strand to SEQ ID NO: 405275
uuaauccuucaaugagccu

SEQ ID NO: 405277 - RNA, 19 nt, Artificial Sequence
  Description of Artificial Sequence: Synthetic oligonucleotide
  Sense Strand Starting at position 1103 of SEQ ID NO: 318312
cagguuucucuugaguguu

SEQ ID NO: 405278 - RNA, 19 nt, Artificial Sequence
  Description of Artificial Sequence: Synthetic oligonucleotide
  Antisense Strand to SEQ ID NO: 405277
aacacucaagagaaaccug

SEQ ID NO: 405279 - RNA, 19 nt, Artificial Sequence
  Description of Artificial Sequence: Synthetic oligonucleotide
  Sense Strand Starting at position 1103 of SEQ ID NO: 318664
ggagagguuuaguugggaa

SEQ ID NO: 405280 - RNA, 19 nt, Artificial Sequence
  Description of Artificial Sequence: Synthetic oligonucleotide
  Antisense Strand to SEQ ID NO: 405279
uucccaacuaaaccucucc

SEQ ID NO: 405281 - RNA, 19 nt, Artificial Sequence
  Description of Artificial Sequence: Synthetic oligonucleotide
  Sense Strand Starting at position 1103 of SEQ ID NO: 318666
agagguuuaguugggaaga

SEQ ID NO: 405282 - RNA, 19 nt, Artificial Sequence
  Description of Artificial Sequence: Synthetic oligonucleotide
  Antisense Strand to SEQ ID NO: 405281
ucuucccaacuaaaccucu

SEQ ID NO: 405283 - RNA, 19 nt, Artificial Sequence
  Description of Artificial Sequence: Synthetic oligonucleotide
  Sense Strand Starting at position 1103 of SEQ ID NO: 318668
agguuuaguugggaagaac

SEQ ID NO: 405284 - RNA, 19 nt, Artificial Sequence
  Description of Artificial Sequence: Synthetic oligonucleotide
  Antisense Strand to SEQ ID NO: 405283
guucuucccaacuaaaccu

SEQ ID NO: 405285 - RNA, 19 nt, Artificial Sequence
  Description of Artificial Sequence: Synthetic oligonucleotide
  Sense Strand Starting at position 1103 of SEQ ID NO: 318750
ucuccaacuggguauuagu

SEQ ID NO: 405286 - RNA, 19 nt, Artificial Sequence
  Description of Artificial Sequence: Synthetic oligonucleotide
  Antisense Strand to SEQ ID NO: 405285
acuaauacccaguuggaga

SEQ ID NO: 405287 - RNA, 19 nt, Artificial Sequence
  Description of Artificial Sequence: Synthetic oligonucleotide
  Sense Strand Starting at position 1103 of SEQ ID NO: 318783
gcaauagguagcuagguau

SEQ ID NO: 405288 - RNA, 19 nt, Artificial Sequence
  Description of Artificial Sequence: Synthetic oligonucleotide
  Antisense Strand to SEQ ID NO: 405287
auaccuagcuaccuauugc

SEQ ID NO: 405289 - RNA, 19 nt, Artificial Sequence
  Description of Artificial Sequence: Synthetic oligonucleotide
  Sense Strand Starting at position 1103 of SEQ ID NO: 318794
cuagguaugcuggaugacu

SEQ ID NO: 405290 - RNA, 19 nt, Artificial Sequence
  Description of Artificial Sequence: Synthetic oligonucleotide
  Antisense Strand to SEQ ID NO: 405289
agucauccagcauaccuag

SEQ ID NO: 405291 - RNA, 19 nt, Artificial Sequence
  Description of Artificial Sequence: Synthetic oligonucleotide
  Sense Strand Starting at position 1103 of SEQ ID NO: 318844
uccuaaauuucccagagag

SEQ ID NO: 405292 - RNA, 19 nt, Artificial Sequence
  Description of Artificial Sequence: Synthetic oligonucleotide
  Antisense Strand to SEQ ID NO: 405291
cucucugggaaauuuagga

SEQ ID NO: 405293 - RNA, 19 nt, Artificial Sequence
  Description of Artificial Sequence: Synthetic oligonucleotide
  Sense Strand Starting at position 1103 of SEQ ID NO: 318892
uuacuuguacaagagcaga

SEQ ID NO: 405294 - RNA, 19 nt, Artificial Sequence
  Description of Artificial Sequence: Synthetic oligonucleotide
  Antisense Strand to SEQ ID NO: 405293
ucugcucuuguacaaguaa

SEQ ID NO: 405295 - RNA, 19 nt, Artificial Sequence
  Description of Artificial Sequence: Synthetic oligonucleotide
  Sense Strand Starting at position 1103 of SEQ ID NO: 318934
uguaaagaggccuacaauu

SEQ ID NO: 405296 - RNA, 19 nt, Artificial Sequence
  Description of Artificial Sequence: Synthetic oligonucleotide
  Antisense Strand to SEQ ID NO: 405295
aauuguaggccucuuuaca

SEQ ID NO: 405297 - RNA, 19 nt, Artificial Sequence
  Description of Artificial Sequence: Synthetic oligonucleotide
  Sense Strand Starting at position 1103 of SEQ ID NO: 318950
auuagagacugugacauuu

SEQ ID NO: 405298 - RNA, 19 nt, Artificial Sequence
  Description of Artificial Sequence: Synthetic oligonucleotide
  Antisense Strand to SEQ ID NO: 405297
aaaugucacagucucuaau

SEQ ID NO: 405299 - RNA, 19 nt, Artificial Sequence
  Description of Artificial Sequence: Synthetic oligonucleotide
  Sense Strand Starting at position 1103 of SEQ ID NO: 318959
ugugacauuuggcaaacau

SEQ ID NO: 405300 - RNA, 19 nt, Artificial Sequence
  Description of Artificial Sequence: Synthetic oligonucleotide
  Antisense Strand to SEQ ID NO: 405299
auguuugccaaaugucaca

SEQ ID NO: 405301 - RNA, 19 nt, Artificial Sequence
  Description of Artificial Sequence: Synthetic oligonucleotide
  Sense Strand Starting at position 1103 of SEQ ID NO: 319060
agacgcagaucuuugugaa

SEQ ID NO: 405302 - RNA, 19 nt, Artificial Sequence
  Description of Artificial Sequence: Synthetic oligonucleotide
  Antisense Strand to SEQ ID NO: 405301
uucacaaagaucugcgucu

SEQ ID NO: 405303 - RNA, 19 nt, Artificial Sequence
  Description of Artificial Sequence: Synthetic oligonucleotide
  Sense Strand Starting at position 1103 of SEQ ID NO: 319061
gacgcagaucuuugugaag

SEQ ID NO: 405304 - RNA, 19 nt, Artificial Sequence
  Description of Artificial Sequence: Synthetic oligonucleotide
  Antisense Strand to SEQ ID NO: 405303
cuucacaaagaucugcguc

SEQ ID NO: 405305 - RNA, 19 nt, Artificial Sequence
  Description of Artificial Sequence: Synthetic oligonucleotide
  Sense Strand Starting at position 1103 of SEQ ID NO: 319088
gggcaagaccaucacucuu

SEQ ID NO: 405306 - RNA, 19 nt, Artificial Sequence
  Description of Artificial Sequence: Synthetic oligonucleotide
  Antisense Strand to SEQ ID NO: 405305
aagagugauggucuugccc

SEQ ID NO: 405307 - RNA, 19 nt, Artificial Sequence
  Description of Artificial Sequence: Synthetic oligonucleotide
  Sense Strand Starting at position 1103 of SEQ ID NO: 319185
aucugauacuugcuggcaa

SEQ ID NO: 405308 - RNA, 19 nt, Artificial Sequence
  Description of Artificial Sequence: Synthetic oligonucleotide
  Antisense Strand to SEQ ID NO: 405307
uugccagcaaguaucagau

SEQ ID NO: 405309 - RNA, 19 nt, Artificial Sequence
  Description of Artificial Sequence: Synthetic oligonucleotide
  Sense Strand Starting at position 1103 of SEQ ID NO: 319187
cugauacuugcuggcaaac

SEQ ID NO: 405310 - RNA, 19 nt, Artificial Sequence
  Description of Artificial Sequence: Synthetic oligonucleotide
  Antisense Strand to SEQ ID NO: 405309
guuugccagcaaguaucag

SEQ ID NO: 405311 - RNA, 19 nt, Artificial Sequence
  Description of Artificial Sequence: Synthetic oligonucleotide
  Sense Strand Starting at position 1104 of SEQ ID NO: 315541
acuauauacugucugugaa

SEQ ID NO: 405312 - RNA, 19 nt, Artificial Sequence
  Description of Artificial Sequence: Synthetic oligonucleotide
  Antisense Strand to SEQ ID NO: 405311
uucacagacaguauauagu

SEQ ID NO: 405313 - RNA, 19 nt, Artificial Sequence
  Description of Artificial Sequence: Synthetic oligonucleotide
  Sense Strand Starting at position 1104 of SEQ ID NO: 315678
caaggagugcuaggaaaca

SEQ ID NO: 405314 - RNA, 19 nt, Artificial Sequence
  Description of Artificial Sequence: Synthetic oligonucleotide
  Antisense Strand to SEQ ID NO: 405313
uguuuccuagcacuccuug

SEQ ID NO: 405315 - RNA, 19 nt, Artificial Sequence
  Description of Artificial Sequence: Synthetic oligonucleotide
  Sense Strand Starting at position 1104 of SEQ ID NO: 315755
ucucaaagauaguuguuua

SEQ ID NO: 405316 - RNA, 19 nt, Artificial Sequence
  Description of Artificial Sequence: Synthetic oligonucleotide
  Antisense Strand to SEQ ID NO: 405315
uaaacaacuaucuuugaga

SEQ ID NO: 405317 - RNA, 19 nt, Artificial Sequence
  Description of Artificial Sequence: Synthetic oligonucleotide
  Sense Strand Starting at position 1104 of SEQ ID NO: 315758
caaagauaguuguuuacug

SEQ ID NO: 405318 - RNA, 19 nt, Artificial Sequence
  Description of Artificial Sequence: Synthetic oligonucleotide
  Antisense Strand to SEQ ID NO: 405317
caguaaacaacuaucuuug

SEQ ID NO: 405319 - RNA, 19 nt, Artificial Sequence
  Description of Artificial Sequence: Synthetic oligonucleotide
  Sense Strand Starting at position 1104 of SEQ ID NO: 315782
gcacauuguagugaauaag

SEQ ID NO: 405320 - RNA, 19 nt, Artificial Sequence
  Description of Artificial Sequence: Synthetic oligonucleotide
  Antisense Strand to SEQ ID NO: 405319
cuuauucacuacaaugugc

SEQ ID NO: 405321 - RNA, 19 nt, Artificial Sequence
  Description of Artificial Sequence: Synthetic oligonucleotide
  Sense Strand Starting at position 1104 of SEQ ID NO: 316692
aucagagaucccugucaca

SEQ ID NO: 405322 - RNA, 19 nt, Artificial Sequence
  Description of Artificial Sequence: Synthetic oligonucleotide
  Antisense Strand to SEQ ID NO: 405321
ugugacagggaucucugau

SEQ ID NO: 405323 - RNA, 19 nt, Artificial Sequence
  Description of Artificial Sequence: Synthetic oligonucleotide
  Sense Strand Starting at position 1104 of SEQ ID NO: 316733
gacauauggcuauagccua

SEQ ID NO: 405324 - RNA, 19 nt, Artificial Sequence
  Description of Artificial Sequence: Synthetic oligonucleotide
  Antisense Strand to SEQ ID NO: 405323
uaggcuauagccauauguc

SEQ ID NO: 405325 - RNA, 19 nt, Artificial Sequence
  Description of Artificial Sequence: Synthetic oligonucleotide
  Sense Strand Starting at position 1104 of SEQ ID NO: 316738
auggcuauagccuaaagua

SEQ ID NO: 405326 - RNA, 19 nt, Artificial Sequence
  Description of Artificial Sequence: Synthetic oligonucleotide
  Antisense Strand to SEQ ID NO: 405325
uacuuuaggcuauagccau

SEQ ID NO: 405327 - RNA, 19 nt, Artificial Sequence
  Description of Artificial Sequence: Synthetic oligonucleotide
  Sense Strand Starting at position 1104 of SEQ ID NO: 316798
auaguuaucgaacacuuua

SEQ ID NO: 405328 - RNA, 19 nt, Artificial Sequence
  Description of Artificial Sequence: Synthetic oligonucleotide
  Antisense Strand to SEQ ID NO: 405327
uaaaguguucgauaacuau

SEQ ID NO: 405329 - RNA, 19 nt, Artificial Sequence
  Description of Artificial Sequence: Synthetic oligonucleotide
  Sense Strand Starting at position 1104 of SEQ ID NO: 317016
ggaugauacuauucuaagc

SEQ ID NO: 405330 - RNA, 19 nt, Artificial Sequence
  Description of Artificial Sequence: Synthetic oligonucleotide
  Antisense Strand to SEQ ID NO: 405329
gcuuagaauaguaucaucc

SEQ ID NO: 405331 - RNA, 19 nt, Artificial Sequence
  Description of Artificial Sequence: Synthetic oligonucleotide
  Sense Strand Starting at position 1104 of SEQ ID NO: 317149
gacgaaaucuuuccauagu

SEQ ID NO: 405332 - RNA, 19 nt, Artificial Sequence
  Description of Artificial Sequence: Synthetic oligonucleotide
  Antisense Strand to SEQ ID NO: 405331
acuauggaaagauuucguc

SEQ ID NO: 405333 - RNA, 19 nt, Artificial Sequence
  Description of Artificial Sequence: Synthetic oligonucleotide
  Sense Strand Starting at position 1104 of SEQ ID NO: 317181
cuuguuucugaugauguaa

SEQ ID NO: 405334 - RNA, 19 nt, Artificial Sequence
  Description of Artificial Sequence: Synthetic oligonucleotide
  Antisense Strand to SEQ ID NO: 405333
uuacaucaucagaaacaag

SEQ ID NO: 405335 - RNA, 19 nt, Artificial Sequence
  Description of Artificial Sequence: Synthetic oligonucleotide
  Sense Strand Starting at position 1104 of SEQ ID NO: 317245
gauuuaggucacugugcuu

SEQ ID NO: 405336 - RNA, 19 nt, Artificial Sequence
  Description of Artificial Sequence: Synthetic oligonucleotide
  Antisense Strand to SEQ ID NO: 405335
aagcacagugaccuaaauc

SEQ ID NO: 405337 - RNA, 19 nt, Artificial Sequence
  Description of Artificial Sequence: Synthetic oligonucleotide
  Sense Strand Starting at position 1104 of SEQ ID NO: 317258
gugcuuugcagagaugaau

SEQ ID NO: 405338 - RNA, 19 nt, Artificial Sequence
  Description of Artificial Sequence: Synthetic oligonucleotide
  Antisense Strand to SEQ ID NO: 405337
auucaucucugcaaagcac

SEQ ID NO: 405339 - RNA, 19 nt, Artificial Sequence
  Description of Artificial Sequence: Synthetic oligonucleotide
  Sense Strand Starting at position 1104 of SEQ ID NO: 317370
auaacagauuuggaaagua

SEQ ID NO: 405340 - RNA, 19 nt, Artificial Sequence
  Description of Artificial Sequence: Synthetic oligonucleotide
  Antisense Strand to SEQ ID NO: 405339
uacuuuccaaaucuguuau

SEQ ID NO: 405341 - RNA, 19 nt, Artificial Sequence
  Description of Artificial Sequence: Synthetic oligonucleotide
  Sense Strand Starting at position 1104 of SEQ ID NO: 317474
aagagugcauacucuaaga

SEQ ID NO: 405342 - RNA, 19 nt, Artificial Sequence
  Description of Artificial Sequence: Synthetic oligonucleotide
  Antisense Strand to SEQ ID NO: 405341
ucuuagaguaugcacucuu

SEQ ID NO: 405343 - RNA, 19 nt, Artificial Sequence
  Description of Artificial Sequence: Synthetic oligonucleotide
  Sense Strand Starting at position 1104 of SEQ ID NO: 317476
gagugcauacucuaagaau

SEQ ID NO: 405344 - RNA, 19 nt, Artificial Sequence
  Description of Artificial Sequence: Synthetic oligonucleotide
  Antisense Strand to SEQ ID NO: 405343
auucuuagaguaugcacuc

SEQ ID NO: 405345 - RNA, 19 nt, Artificial Sequence
  Description of Artificial Sequence: Synthetic oligonucleotide
  Sense Strand Starting at position 1104 of SEQ ID NO: 317492
aauauauguggauggaugu

SEQ ID NO: 405346 - RNA, 19 nt, Artificial Sequence
  Description of Artificial Sequence: Synthetic oligonucleotide
  Antisense Strand to SEQ ID NO: 405345
acauccauccacauauauu

SEQ ID NO: 405347 - RNA, 19 nt, Artificial Sequence
  Description of Artificial Sequence: Synthetic oligonucleotide
  Sense Strand Starting at position 1104 of SEQ ID NO: 317498
uguggauggaugugugaga

SEQ ID NO: 405348 - RNA, 19 nt, Artificial Sequence
  Description of Artificial Sequence: Synthetic oligonucleotide
  Antisense Strand to SEQ ID NO: 405347
ucucacacauccauccaca

SEQ ID NO: 405349 - RNA, 19 nt, Artificial Sequence
  Description of Artificial Sequence: Synthetic oligonucleotide
  Sense Strand Starting at position 1104 of SEQ ID NO: 317500
uggauggaugugugagagu

SEQ ID NO: 405350 - RNA, 19 nt, Artificial Sequence
  Description of Artificial Sequence: Synthetic oligonucleotide
  Antisense Strand to SEQ ID NO: 405349
acucucacacauccaucca

SEQ ID NO: 405351 - RNA, 19 nt, Artificial Sequence
  Description of Artificial Sequence: Synthetic oligonucleotide
  Sense Strand Starting at position 1104 of SEQ ID NO: 317511
gugagaguaugguuuauaa

SEQ ID NO: 405352 - RNA, 19 nt, Artificial Sequence
  Description of Artificial Sequence: Synthetic oligonucleotide
  Antisense Strand to SEQ ID NO: 405351
uuauaaaccauacucucac

SEQ ID NO: 405353 - RNA, 19 nt, Artificial Sequence
  Description of Artificial Sequence: Synthetic oligonucleotide
  Sense Strand Starting at position 1104 of SEQ ID NO: 317614
ugggauucucuacauucuu

SEQ ID NO: 405354 - RNA, 19 nt, Artificial Sequence
  Description of Artificial Sequence: Synthetic oligonucleotide
  Antisense Strand to SEQ ID NO: 405353
aagaauguagagaauccca

SEQ ID NO: 405355 - RNA, 19 nt, Artificial Sequence
  Description of Artificial Sequence: Synthetic oligonucleotide
  Sense Strand Starting at position 1104 of SEQ ID NO: 317652
aaaggaccuugguuuauau

SEQ ID NO: 405356 - RNA, 19 nt, Artificial Sequence
  Description of Artificial Sequence: Synthetic oligonucleotide
  Antisense Strand to SEQ ID NO: 405355
auauaaaccaagguccuuu

SEQ ID NO: 405357 - RNA, 19 nt, Artificial Sequence
  Description of Artificial Sequence: Synthetic oligonucleotide
  Sense Strand Starting at position 1104 of SEQ ID NO: 317661
ugguuuauauaaguuacca

SEQ ID NO: 405358 - RNA, 19 nt, Artificial Sequence
  Description of Artificial Sequence: Synthetic oligonucleotide
  Antisense Strand to SEQ ID NO: 405357
ugguaacuuauauaaacca

SEQ ID NO: 405359 - RNA, 19 nt, Artificial Sequence
  Description of Artificial Sequence: Synthetic oligonucleotide
  Sense Strand Starting at position 1104 of SEQ ID NO: 317952
agauauucugcuggaaagg

SEQ ID NO: 405360 - RNA, 19 nt, Artificial Sequence
  Description of Artificial Sequence: Synthetic oligonucleotide
  Antisense Strand to SEQ ID NO: 405359
ccuuuccagcagaauaucu

SEQ ID NO: 405361 - RNA, 19 nt, Artificial Sequence
  Description of Artificial Sequence: Synthetic oligonucleotide
  Sense Strand Starting at position 1104 of SEQ ID NO: 317997
gguaguuauggacauuccu

SEQ ID NO: 405362 - RNA, 19 nt, Artificial Sequence
  Description of Artificial Sequence: Synthetic oligonucleotide
  Antisense Strand to SEQ ID NO: 405361
aggaauguccauaacuacc

SEQ ID NO: 405363 - RNA, 19 nt, Artificial Sequence
  Description of Artificial Sequence: Synthetic oligonucleotide
  Sense Strand Starting at position 1104 of SEQ ID NO: 318005
uggacauuccucugauagu

SEQ ID NO: 405364 - RNA, 19 nt, Artificial Sequence
  Description of Artificial Sequence: Synthetic oligonucleotide
  Antisense Strand to SEQ ID NO: 405363
acuaucagaggaaugucca

SEQ ID NO: 405365 - RNA, 19 nt, Artificial Sequence
  Description of Artificial Sequence: Synthetic oligonucleotide
  Sense Strand Starting at position 1104 of SEQ ID NO: 318139
uugaauggaucucucacau

SEQ ID NO: 405366 - RNA, 19 nt, Artificial Sequence
  Description of Artificial Sequence: Synthetic oligonucleotide
  Antisense Strand to SEQ ID NO: 405365
augugagagauccauucaa

SEQ ID NO: 405367 - RNA, 19 nt, Artificial Sequence
  Description of Artificial Sequence: Synthetic oligonucleotide
  Sense Strand Starting at position 1104 of SEQ ID NO: 318171
guguucacaggguauuaga

SEQ ID NO: 405368 - RNA, 19 nt, Artificial Sequence
  Description of Artificial Sequence: Synthetic oligonucleotide
  Antisense Strand to SEQ ID NO: 405367
ucuaauacccugugaacac

SEQ ID NO: 405369 - RNA, 19 nt, Artificial Sequence
  Description of Artificial Sequence: Synthetic oligonucleotide
  Sense Strand Starting at position 1104 of SEQ ID NO: 318267
aucucauaaguccaaguau

SEQ ID NO: 405370 - RNA, 19 nt, Artificial Sequence
  Description of Artificial Sequence: Synthetic oligonucleotide
  Antisense Strand to SEQ ID NO: 405369
auacuuggacuuaugagau

SEQ ID NO: 405371 - RNA, 19 nt, Artificial Sequence
  Description of Artificial Sequence: Synthetic oligonucleotide
  Sense Strand Starting at position 1104 of SEQ ID NO: 318357
uuauuaucauggguaacaa

SEQ ID NO: 405372 - RNA, 19 nt, Artificial Sequence
  Description of Artificial Sequence: Synthetic oligonucleotide
  Antisense Strand to SEQ ID NO: 405371
uuguuacccaugauaauaa

SEQ ID NO: 405373 - RNA, 19 nt, Artificial Sequence
  Description of Artificial Sequence: Synthetic oligonucleotide
  Sense Strand Starting at position 1104 of SEQ ID NO: 318445
gcccaaguaugauuaacca

SEQ ID NO: 405374 - RNA, 19 nt, Artificial Sequence
  Description of Artificial Sequence: Synthetic oligonucleotide
  Antisense Strand to SEQ ID NO: 405373
ugguuaaucauacuugggc

SEQ ID NO: 405375 - RNA, 19 nt, Artificial Sequence
  Description of Artificial Sequence: Synthetic oligonucleotide
  Sense Strand Starting at position 1104 of SEQ ID NO: 318575
uuggauaugcagcagaaau

SEQ ID NO: 405376 - RNA, 19 nt, Artificial Sequence
  Description of Artificial Sequence: Synthetic oligonucleotide
  Antisense Strand to SEQ ID NO: 405375
auuucugcugcauauccaa

SEQ ID NO: 405377 - RNA, 19 nt, Artificial Sequence
  Description of Artificial Sequence: Synthetic oligonucleotide
  Sense Strand Starting at position 1104 of SEQ ID NO: 318577
ggauaugcagcagaaaugu

SEQ ID NO: 405378 - RNA, 19 nt, Artificial Sequence
  Description of Artificial Sequence: Synthetic oligonucleotide
  Antisense Strand to SEQ ID NO: 405377
acauuucugcugcauaucc

SEQ ID NO: 405379 - RNA, 19 nt, Artificial Sequence
  Description of Artificial Sequence: Synthetic oligonucleotide
  Sense Strand Starting at position 1104 of SEQ ID NO: 318829
acugaugacgugcacuaaa

SEQ ID NO: 405380 - RNA, 19 nt, Artificial Sequence
  Description of Artificial Sequence: Synthetic oligonucleotide
  Antisense Strand to SEQ ID NO: 405379
uuuagugcacgucaucagu

SEQ ID NO: 405381 - RNA, 19 nt, Artificial Sequence
  Description of Artificial Sequence: Synthetic oligonucleotide
  Sense Strand Starting at position 1104 of SEQ ID NO: 318832
gaugacgugcacuaaauaa

SEQ ID NO: 405382 - RNA, 19 nt, Artificial Sequence
  Description of Artificial Sequence: Synthetic oligonucleotide
  Antisense Strand to SEQ ID NO: 405381
uuauuuagugcacgucauc

SEQ ID NO: 405383 - RNA, 19 nt, Artificial Sequence
  Description of Artificial Sequence: Synthetic oligonucleotide
  Sense Strand Starting at position 1104 of SEQ ID NO: 318891
ggagacugacuguacguaa

SEQ ID NO: 405384 - RNA, 19 nt, Artificial Sequence
  Description of Artificial Sequence: Synthetic oligonucleotide
  Antisense Strand to SEQ ID NO: 405383
uuacguacagucagucucc

SEQ ID NO: 405385 - RNA, 19 nt, Artificial Sequence
  Description of Artificial Sequence: Synthetic oligonucleotide
  Sense Strand Starting at position 1104 of SEQ ID NO: 318911
aggugauagacaugucaua

SEQ ID NO: 405386 - RNA, 19 nt, Artificial Sequence
  Description of Artificial Sequence: Synthetic oligonucleotide
  Antisense Strand to SEQ ID NO: 405385
uaugacaugucuaucaccu

SEQ ID NO: 405387 - RNA, 19 nt, Artificial Sequence
  Description of Artificial Sequence: Synthetic oligonucleotide
  Sense Strand Starting at position 1104 of SEQ ID NO: 319100
agacauaugucagucaaug

SEQ ID NO: 405388 - RNA, 19 nt, Artificial Sequence
  Description of Artificial Sequence: Synthetic oligonucleotide
  Antisense Strand to SEQ ID NO: 405387
cauugacugacauaugucu

SEQ ID NO: 405389 - RNA, 19 nt, Artificial Sequence
  Description of Artificial Sequence: Synthetic oligonucleotide
  Sense Strand Starting at position 1104 of SEQ ID NO: 319211
ccaguaauccuaggacccu

SEQ ID NO: 405390 - RNA, 19 nt, Artificial Sequence
  Description of Artificial Sequence: Synthetic oligonucleotide
  Antisense Strand to SEQ ID NO: 405389
aggguccuaggauuacugg

SEQ ID NO: 405391 - RNA, 19 nt, Artificial Sequence
  Description of Artificial Sequence: Synthetic oligonucleotide
  Sense Strand Starting at position 1105 of SEQ ID NO: 315338
ucagaaaggcuggaucgua

SEQ ID NO: 405392 - RNA, 19 nt, Artificial Sequence
  Description of Artificial Sequence: Synthetic oligonucleotide
  Antisense Strand to SEQ ID NO: 405391
uacgauccagccuuucuga

SEQ ID NO: 405393 - RNA, 19 nt, Artificial Sequence
  Description of Artificial Sequence: Synthetic oligonucleotide
  Sense Strand Starting at position 1105 of SEQ ID NO: 315369
cugguucaccugugugaag

SEQ ID NO: 405394 - RNA, 19 nt, Artificial Sequence
  Description of Artificial Sequence: Synthetic oligonucleotide
  Antisense Strand to SEQ ID NO: 405393
cuucacacaggugaaccag

SEQ ID NO: 405395 - RNA, 19 nt, Artificial Sequence
  Description of Artificial Sequence: Synthetic oligonucleotide
  Sense Strand Starting at position 1105 of SEQ ID NO: 315371
gguucaccugugugaagca

SEQ ID NO: 405396 - RNA, 19 nt, Artificial Sequence
  Description of Artificial Sequence: Synthetic oligonucleotide
  Antisense Strand to SEQ ID NO: 405395
ugcuucacacaggugaacc

SEQ ID NO: 405397 - RNA, 19 nt, Artificial Sequence
  Description of Artificial Sequence: Synthetic oligonucleotide
  Sense Strand Starting at position 1105 of SEQ ID NO: 315536
cgcaguguccgcaguuuga

SEQ ID NO: 405398 - RNA, 19 nt, Artificial Sequence
  Description of Artificial Sequence: Synthetic oligonucleotide
  Antisense Strand to SEQ ID NO: 405397
ucaaacugcggacacugcg

SEQ ID NO: 405399 - RNA, 19 nt, Artificial Sequence
  Description of Artificial Sequence: Synthetic oligonucleotide
  Sense Strand Starting at position 1105 of SEQ ID NO: 315545
cgcaguuugaaugagcuuu

SEQ ID NO: 405400 - RNA, 19 nt, Artificial Sequence
  Description of Artificial Sequence: Synthetic oligonucleotide
  Antisense Strand to SEQ ID NO: 405399
aaagcucauucaaacugcg

SEQ ID NO: 405401 - RNA, 19 nt, Artificial Sequence
  Description of Artificial Sequence: Synthetic oligonucleotide
  Sense Strand Starting at position 1105 of SEQ ID NO: 315636
cacugacuccuugaggcau

SEQ ID NO: 405402 - RNA, 19 nt, Artificial Sequence
  Description of Artificial Sequence: Synthetic oligonucleotide
  Antisense Strand to SEQ ID NO: 405401
augccucaaggagucagug

SEQ ID NO: 405403 - RNA, 19 nt, Artificial Sequence
  Description of Artificial Sequence: Synthetic oligonucleotide
  Sense Strand Starting at position 1105 of SEQ ID NO: 315668
agccuuaaccacgaugaca

SEQ ID NO: 405404 - RNA, 19 nt, Artificial Sequence
  Description of Artificial Sequence: Synthetic oligonucleotide
  Antisense Strand to SEQ ID NO: 405403
ugucaucgugguuaaggcu

SEQ ID NO: 405405 - RNA, 19 nt, Artificial Sequence
  Description of Artificial Sequence: Synthetic oligonucleotide
  Sense Strand Starting at position 1105 of SEQ ID NO: 315899
cuguguaccuggcgagaca

SEQ ID NO: 405406 - RNA, 19 nt, Artificial Sequence
  Description of Artificial Sequence: Synthetic oligonucleotide
  Antisense Strand to SEQ ID NO: 405405
ugucucgccagguacacag

SEQ ID NO: 405407 - RNA, 19 nt, Artificial Sequence
  Description of Artificial Sequence: Synthetic oligonucleotide
  Sense Strand Starting at position 1105 of SEQ ID NO: 316246
uggucugucuuggcucaua

SEQ ID NO: 405408 - RNA, 19 nt, Artificial Sequence
  Description of Artificial Sequence: Synthetic oligonucleotide
  Antisense Strand to SEQ ID NO: 405407
uaugagccaagacagacca

SEQ ID NO: 405409 - RNA, 19 nt, Artificial Sequence
  Description of Artificial Sequence: Synthetic oligonucleotide
  Sense Strand Starting at position 1105 of SEQ ID NO: 316314
ccaugaguaagcugggacu

SEQ ID NO: 405410 - RNA, 19 nt, Artificial Sequence
  Description of Artificial Sequence: Synthetic oligonucleotide
  Antisense Strand to SEQ ID NO: 405409
agucccagcuuacucaugg

SEQ ID NO: 405411 - RNA, 19 nt, Artificial Sequence
  Description of Artificial Sequence: Synthetic oligonucleotide
  Sense Strand Starting at position 1105 of SEQ ID NO: 316401
cucagacacuggucucgaa

SEQ ID NO: 405412 - RNA, 19 nt, Artificial Sequence
  Description of Artificial Sequence: Synthetic oligonucleotide
  Antisense Strand to SEQ ID NO: 405411
uucgagaccagugucugag

SEQ ID NO: 405413 - RNA, 19 nt, Artificial Sequence
  Description of Artificial Sequence: Synthetic oligonucleotide
  Sense Strand Starting at position 1105 of SEQ ID NO: 316679
gaggaagggugaguccuua

SEQ ID NO: 405414 - RNA, 19 nt, Artificial Sequence
  Description of Artificial Sequence: Synthetic oligonucleotide
  Antisense Strand to SEQ ID NO: 405413
uaaggacucacccuuccuc

SEQ ID NO: 405415 - RNA, 19 nt, Artificial Sequence
  Description of Artificial Sequence: Synthetic oligonucleotide
  Sense Strand Starting at position 1105 of SEQ ID NO: 316683
aagggugaguccuuacaga

SEQ ID NO: 405416 - RNA, 19 nt, Artificial Sequence
  Description of Artificial Sequence: Synthetic oligonucleotide
  Antisense Strand to SEQ ID NO: 405415
ucuguaaggacucacccuu

SEQ ID NO: 405417 - RNA, 19 nt, Artificial Sequence
  Description of Artificial Sequence: Synthetic oligonucleotide
  Sense Strand Starting at position 1105 of SEQ ID NO: 316731
ugccauuuccucugcgaau

SEQ ID NO: 405418 - RNA, 19 nt, Artificial Sequence
  Description of Artificial Sequence: Synthetic oligonucleotide
  Antisense Strand to SEQ ID NO: 405417
auucgcagaggaaauggca

SEQ ID NO: 405419 - RNA, 19 nt, Artificial Sequence
  Description of Artificial Sequence: Synthetic oligonucleotide
  Sense Strand Starting at position 1105 of SEQ ID NO: 316732
gccauuuccucugcgaaug

SEQ ID NO: 405420 - RNA, 19 nt, Artificial Sequence
  Description of Artificial Sequence: Synthetic oligonucleotide
  Antisense Strand to SEQ ID NO: 405419
cauucgcagaggaaauggc

SEQ ID NO: 405421 - RNA, 19 nt, Artificial Sequence
  Description of Artificial Sequence: Synthetic oligonucleotide
  Sense Strand Starting at position 1105 of SEQ ID NO: 317252
cggaguucccugugccuga

SEQ ID NO: 405422 - RNA, 19 nt, Artificial Sequence
  Description of Artificial Sequence: Synthetic oligonucleotide
  Antisense Strand to SEQ ID NO: 405421
ucaggcacagggaacuccg

SEQ ID NO: 405423 - RNA, 19 nt, Artificial Sequence
  Description of Artificial Sequence: Synthetic oligonucleotide
  Sense Strand Starting at position 1105 of SEQ ID NO: 317344
cggcccauccuauaggauu

SEQ ID NO: 405424 - RNA, 19 nt, Artificial Sequence
  Description of Artificial Sequence: Synthetic oligonucleotide
  Antisense Strand to SEQ ID NO: 405423
aauccuauaggaugggccg

SEQ ID NO: 405425 - RNA, 19 nt, Artificial Sequence
  Description of Artificial Sequence: Synthetic oligonucleotide
  Sense Strand Starting at position 1105 of SEQ ID NO: 317579
gccugauguguggaaggga

SEQ ID NO: 405426 - RNA, 19 nt, Artificial Sequence
  Description of Artificial Sequence: Synthetic oligonucleotide
  Antisense Strand to SEQ ID NO: 405425
ucccuuccacacaucaggc

SEQ ID NO: 405427 - RNA, 19 nt, Artificial Sequence
  Description of Artificial Sequence: Synthetic oligonucleotide
  Sense Strand Starting at position 1105 of SEQ ID NO: 317691
gccggaagaugcuguauuu

SEQ ID NO: 405428 - RNA, 19 nt, Artificial Sequence
  Description of Artificial Sequence: Synthetic oligonucleotide
  Antisense Strand to SEQ ID NO: 405427
aaauacagcaucuuccggc

SEQ ID NO: 405429 - RNA, 19 nt, Artificial Sequence
  Description of Artificial Sequence: Synthetic oligonucleotide
  Sense Strand Starting at position 1105 of SEQ ID NO: 317717
agaguugcagagugagauu

SEQ ID NO: 405430 - RNA, 19 nt, Artificial Sequence
  Description of Artificial Sequence: Synthetic oligonucleotide
  Antisense Strand to SEQ ID NO: 405429
aaucucacucugcaacucu

SEQ ID NO: 405431 - RNA, 19 nt, Artificial Sequence
  Description of Artificial Sequence: Synthetic oligonucleotide
  Sense Strand Starting at position 1105 of SEQ ID NO: 317728
gugagauugcugggcauuu

SEQ ID NO: 405432 - RNA, 19 nt, Artificial Sequence
  Description of Artificial Sequence: Synthetic oligonucleotide
  Antisense Strand to SEQ ID NO: 405431
aaaugcccagcaaucucac

SEQ ID NO: 405433 - RNA, 19 nt, Artificial Sequence
  Description of Artificial Sequence: Synthetic oligonucleotide
  Sense Strand Starting at position 1105 of SEQ ID NO: 317831
acugaaaucucuucgaagc

SEQ ID NO: 405434 - RNA, 19 nt, Artificial Sequence
  Description of Artificial Sequence: Synthetic oligonucleotide
  Antisense Strand to SEQ ID NO: 405433
gcuucgaagagauuucagu

SEQ ID NO: 405435 - RNA, 19 nt, Artificial Sequence
  Description of Artificial Sequence: Synthetic oligonucleotide
  Sense Strand Starting at position 1105 of SEQ ID NO: 317833
ugaaaucucuucgaagcca

SEQ ID NO: 405436 - RNA, 19 nt, Artificial Sequence
  Description of Artificial Sequence: Synthetic oligonucleotide
  Antisense Strand to SEQ ID NO: 405435
uggcuucgaagagauuuca

SEQ ID NO: 405437 - RNA, 19 nt, Artificial Sequence
  Description of Artificial Sequence: Synthetic oligonucleotide
  Sense Strand Starting at position 1105 of SEQ ID NO: 318006
caguguguuccuuagcuua

SEQ ID NO: 405438 - RNA, 19 nt, Artificial Sequence
  Description of Artificial Sequence: Synthetic oligonucleotide
  Antisense Strand to SEQ ID NO: 405437
uaagcuaaggaacacacug

SEQ ID NO: 405439 - RNA, 19 nt, Artificial Sequence
  Description of Artificial Sequence: Synthetic oligonucleotide
  Sense Strand Starting at position 1105 of SEQ ID NO: 318008
guguguuccuuagcuuauu

SEQ ID NO: 405440 - RNA, 19 nt, Artificial Sequence
  Description of Artificial Sequence: Synthetic oligonucleotide
  Antisense Strand to SEQ ID NO: 405439
aauaagcuaaggaacacac

SEQ ID NO: 405441 - RNA, 19 nt, Artificial Sequence
  Description of Artificial Sequence: Synthetic oligonucleotide
  Sense Strand Starting at position 1105 of SEQ ID NO: 318009
uguguuccuuagcuuauuu

SEQ ID NO: 405442 - RNA, 19 nt, Artificial Sequence
  Description of Artificial Sequence: Synthetic oligonucleotide
  Antisense Strand to SEQ ID NO: 405441
aaauaagcuaaggaacaca

SEQ ID NO: 405443 - RNA, 19 nt, Artificial Sequence
  Description of Artificial Sequence: Synthetic oligonucleotide
  Sense Strand Starting at position 1105 of SEQ ID NO: 318028
aaacuuuaccaccgcguua

SEQ ID NO: 405444 - RNA, 19 nt, Artificial Sequence
  Description of Artificial Sequence: Synthetic oligonucleotide
  Antisense Strand to SEQ ID NO: 405443
uaacgcggugguaaaguuu

SEQ ID NO: 405445 - RNA, 19 nt, Artificial Sequence
  Description of Artificial Sequence: Synthetic oligonucleotide
  Sense Strand Starting at position 1105 of SEQ ID NO: 318039
ccgcguuacaagggaagua

SEQ ID NO: 405446 - RNA, 19 nt, Artificial Sequence
  Description of Artificial Sequence: Synthetic oligonucleotide
  Antisense Strand to SEQ ID NO: 405445
uacuucccuuguaacgcgg

SEQ ID NO: 405447 - RNA, 19 nt, Artificial Sequence
  Description of Artificial Sequence: Synthetic oligonucleotide
  Sense Strand Starting at position 1105 of SEQ ID NO: 318055
guaguauccuuauucccau

SEQ ID NO: 405448 - RNA, 19 nt, Artificial Sequence
  Description of Artificial Sequence: Synthetic oligonucleotide
  Antisense Strand to SEQ ID NO: 405447
augggaauaaggauacuac

SEQ ID NO: 405449 - RNA, 19 nt, Artificial Sequence
  Description of Artificial Sequence: Synthetic oligonucleotide
  Sense Strand Starting at position 1105 of SEQ ID NO: 318234
ggucaauucugggaaggga

SEQ ID NO: 405450 - RNA, 19 nt, Artificial Sequence
  Description of Artificial Sequence: Synthetic oligonucleotide
  Antisense Strand to SEQ ID NO: 405449
ucccuucccagaauugacc

SEQ ID NO: 405451 - RNA, 19 nt, Artificial Sequence
  Description of Artificial Sequence: Synthetic oligonucleotide
  Sense Strand Starting at position 1105 of SEQ ID NO: 318356
agucucucccaagagucaa

SEQ ID NO: 405452 - RNA, 19 nt, Artificial Sequence
  Description of Artificial Sequence: Synthetic oligonucleotide
  Antisense Strand to SEQ ID NO: 405451
uugacucuugggagagacu

SEQ ID NO: 405453 - RNA, 19 nt, Artificial Sequence
  Description of Artificial Sequence: Synthetic oligonucleotide
  Sense Strand Starting at position 1105 of SEQ ID NO: 318425
aggacaaugucgugaggca

SEQ ID NO: 405454 - RNA, 19 nt, Artificial Sequence
  Description of Artificial Sequence: Synthetic oligonucleotide
  Antisense Strand to SEQ ID NO: 405453
ugccucacgacauuguccu

SEQ ID NO: 405455 - RNA, 19 nt, Artificial Sequence
  Description of Artificial Sequence: Synthetic oligonucleotide
  Sense Strand Starting at position 1105 of SEQ ID NO: 318589
gcacguucgccaggucauu

SEQ ID NO: 405456 - RNA, 19 nt, Artificial Sequence
  Description of Artificial Sequence: Synthetic oligonucleotide
  Antisense Strand to SEQ ID NO: 405455
aaugaccuggcgaacgugc

SEQ ID NO: 405457 - RNA, 19 nt, Artificial Sequence
  Description of Artificial Sequence: Synthetic oligonucleotide
  Sense Strand Starting at position 1105 of SEQ ID NO: 318621
cugagaggccuuggguuua

SEQ ID NO: 405458 - RNA, 19 nt, Artificial Sequence
  Description of Artificial Sequence: Synthetic oligonucleotide
  Antisense Strand to SEQ ID NO: 405457
uaaacccaaggccucucag

SEQ ID NO: 405459 - RNA, 19 nt, Artificial Sequence
  Description of Artificial Sequence: Synthetic oligonucleotide
  Sense Strand Starting at position 1105 of SEQ ID NO: 318660
uuagacuucccagagcuga

SEQ ID NO: 405460 - RNA, 19 nt, Artificial Sequence
  Description of Artificial Sequence: Synthetic oligonucleotide
  Antisense Strand to SEQ ID NO: 405459
ucagcucugggaagucuaa

SEQ ID NO: 405461 - RNA, 19 nt, Artificial Sequence
  Description of Artificial Sequence: Synthetic oligonucleotide
  Sense Strand Starting at position 1105 of SEQ ID NO: 318958
cagcuaaggcuuggucaga

SEQ ID NO: 405462 - RNA, 19 nt, Artificial Sequence
  Description of Artificial Sequence: Synthetic oligonucleotide
  Antisense Strand to SEQ ID NO: 405461
ucugaccaagccuuagcug

SEQ ID NO: 405463 - RNA, 19 nt, Artificial Sequence
  Description of Artificial Sequence: Synthetic oligonucleotide
  Sense Strand Starting at position 1105 of SEQ ID NO: 318963
aaggcuuggucagagagga

SEQ ID NO: 405464 - RNA, 19 nt, Artificial Sequence
  Description of Artificial Sequence: Synthetic oligonucleotide
  Antisense Strand to SEQ ID NO: 405463
uccucucugaccaagccuu

SEQ ID NO: 405465 - RNA, 19 nt, Artificial Sequence
  Description of Artificial Sequence: Synthetic oligonucleotide
  Sense Strand Starting at position 1105 of SEQ ID NO: 319112
augauagcaucaucugaca

SEQ ID NO: 405466 - RNA, 19 nt, Artificial Sequence
  Description of Artificial Sequence: Synthetic oligonucleotide
  Antisense Strand to SEQ ID NO: 405465
ugucagaugaugcuaucau

SEQ ID NO: 405467 - RNA, 19 nt, Artificial Sequence
  Description of Artificial Sequence: Synthetic oligonucleotide
  Sense Strand Starting at position 1105 of SEQ ID NO: 319124
ucugacacuuauugagaca

SEQ ID NO: 405468 - RNA, 19 nt, Artificial Sequence
  Description of Artificial Sequence: Synthetic oligonucleotide
  Antisense Strand to SEQ ID NO: 405467
ugucucaauaagugucaga

SEQ ID NO: 405469 - RNA, 19 nt, Artificial Sequence
  Description of Artificial Sequence: Synthetic oligonucleotide
  Sense Strand Starting at position 1106 of SEQ ID NO: 315236
ccaucuaaguuccuggaga

SEQ ID NO: 405470 - RNA, 19 nt, Artificial Sequence
  Description of Artificial Sequence: Synthetic oligonucleotide
  Antisense Strand to SEQ ID NO: 405469
ucuccaggaacuuagaugg

SEQ ID NO: 405471 - RNA, 19 nt, Artificial Sequence
  Description of Artificial Sequence: Synthetic oligonucleotide
  Sense Strand Starting at position 1106 of SEQ ID NO: 315459
gugcuuggcuggagacaga

SEQ ID NO: 405472 - RNA, 19 nt, Artificial Sequence
  Description of Artificial Sequence: Synthetic oligonucleotide
  Antisense Strand to SEQ ID NO: 405471
ucugucuccagccaagcac

SEQ ID NO: 405473 - RNA, 19 nt, Artificial Sequence
  Description of Artificial Sequence: Synthetic oligonucleotide
  Sense Strand Starting at position 1106 of SEQ ID NO: 315505
acgauuuauuucugaggcu

SEQ ID NO: 405474 - RNA, 19 nt, Artificial Sequence
  Description of Artificial Sequence: Synthetic oligonucleotide
  Antisense Strand to SEQ ID NO: 405473
agccucagaaauaaaucgu

SEQ ID NO: 405475 - RNA, 19 nt, Artificial Sequence
  Description of Artificial Sequence: Synthetic oligonucleotide
  Sense Strand Starting at position 1106 of SEQ ID NO: 315506
cgauuuauuucugaggcuc

SEQ ID NO: 405476 - RNA, 19 nt, Artificial Sequence
  Description of Artificial Sequence: Synthetic oligonucleotide
  Antisense Strand to SEQ ID NO: 405475
gagccucagaaauaaaucg

SEQ ID NO: 405477 - RNA, 19 nt, Artificial Sequence
  Description of Artificial Sequence: Synthetic oligonucleotide
  Sense Strand Starting at position 1106 of SEQ ID NO: 315508
auuuauuucugaggcucaa

SEQ ID NO: 405478 - RNA, 19 nt, Artificial Sequence
  Description of Artificial Sequence: Synthetic oligonucleotide
  Antisense Strand to SEQ ID NO: 405477
uugagccucagaaauaaau

SEQ ID NO: 405479 - RNA, 19 nt, Artificial Sequence
  Description of Artificial Sequence: Synthetic oligonucleotide
  Sense Strand Starting at position 1106 of SEQ ID NO: 315673
cugggucaguccuucccaa

SEQ ID NO: 405480 - RNA, 19 nt, Artificial Sequence
  Description of Artificial Sequence: Synthetic oligonucleotide
  Antisense Strand to SEQ ID NO: 405479
uugggaaggacugacccag

SEQ ID NO: 405481 - RNA, 19 nt, Artificial Sequence
  Description of Artificial Sequence: Synthetic oligonucleotide
  Sense Strand Starting at position 1106 of SEQ ID NO: 315687
cccaaugugcuccaaagau

SEQ ID NO: 405482 - RNA, 19 nt, Artificial Sequence
  Description of Artificial Sequence: Synthetic oligonucleotide
  Antisense Strand to SEQ ID NO: 405481
aucuuuggagcacauuggg

SEQ ID NO: 405483 - RNA, 19 nt, Artificial Sequence
  Description of Artificial Sequence: Synthetic oligonucleotide
  Sense Strand Starting at position 1106 of SEQ ID NO: 315881
acccaccuugugugucaua

SEQ ID NO: 405484 - RNA, 19 nt, Artificial Sequence
  Description of Artificial Sequence: Synthetic oligonucleotide
  Antisense Strand to SEQ ID NO: 405483
uaugacacacaaggugggu

SEQ ID NO: 405485 - RNA, 19 nt, Artificial Sequence
  Description of Artificial Sequence: Synthetic oligonucleotide
  Sense Strand Starting at position 1106 of SEQ ID NO: 315934
cugauaccgucucugauuu

SEQ ID NO: 405486 - RNA, 19 nt, Artificial Sequence
  Description of Artificial Sequence: Synthetic oligonucleotide
  Antisense Strand to SEQ ID NO: 405485
aaaucagagacgguaucag

SEQ ID NO: 405487 - RNA, 19 nt, Artificial Sequence
  Description of Artificial Sequence: Synthetic oligonucleotide
  Sense Strand Starting at position 1106 of SEQ ID NO: 316070
cggaaagaacgugguguua

SEQ ID NO: 405488 - RNA, 19 nt, Artificial Sequence
  Description of Artificial Sequence: Synthetic oligonucleotide
  Antisense Strand to SEQ ID NO: 405487
uaacaccacguucuuuccg

SEQ ID NO: 405489 - RNA, 19 nt, Artificial Sequence
  Description of Artificial Sequence: Synthetic oligonucleotide
  Sense Strand Starting at position 1106 of SEQ ID NO: 316082
gguguuaucauuuggcuuu

SEQ ID NO: 405490 - RNA, 19 nt, Artificial Sequence
  Description of Artificial Sequence: Synthetic oligonucleotide
  Antisense Strand to SEQ ID NO: 405489
aaagccaaaugauaacacc

SEQ ID NO: 405491 - RNA, 19 nt, Artificial Sequence
  Description of Artificial Sequence: Synthetic oligonucleotide
  Sense Strand Starting at position 1106 of SEQ ID NO: 316176
cugaguuucuugucugaag

SEQ ID NO: 405492 - RNA, 19 nt, Artificial Sequence
  Description of Artificial Sequence: Synthetic oligonucleotide
  Antisense Strand to SEQ ID NO: 405491
cuucagacaagaaacucag

SEQ ID NO: 405493 - RNA, 19 nt, Artificial Sequence
  Description of Artificial Sequence: Synthetic oligonucleotide
  Sense Strand Starting at position 1106 of SEQ ID NO: 316177
ugaguuucuugucugaaga

SEQ ID NO: 405494 - RNA, 19 nt, Artificial Sequence
  Description of Artificial Sequence: Synthetic oligonucleotide
  Antisense Strand to SEQ ID NO: 405493
ucuucagacaagaaacuca

SEQ ID NO: 405495 - RNA, 19 nt, Artificial Sequence
  Description of Artificial Sequence: Synthetic oligonucleotide
  Sense Strand Starting at position 1106 of SEQ ID NO: 316178
gaguuucuugucugaagac

SEQ ID NO: 405496 - RNA, 19 nt, Artificial Sequence
  Description of Artificial Sequence: Synthetic oligonucleotide
  Antisense Strand to SEQ ID NO: 405495
gucuucagacaagaaacuc

SEQ ID NO: 405497 - RNA, 19 nt, Artificial Sequence
  Description of Artificial Sequence: Synthetic oligonucleotide
  Sense Strand Starting at position 1106 of SEQ ID NO: 316399
cccacaucucuuggagaaa

SEQ ID NO: 405498 - RNA, 19 nt, Artificial Sequence
  Description of Artificial Sequence: Synthetic oligonucleotide
  Antisense Strand to SEQ ID NO: 405497
uuucuccaagagauguggg

SEQ ID NO: 405499 - RNA, 19 nt, Artificial Sequence
  Description of Artificial Sequence: Synthetic oligonucleotide
  Sense Strand Starting at position 1106 of SEQ ID NO: 316400
ccacaucucuuggagaaag

SEQ ID NO: 405500 - RNA, 19 nt, Artificial Sequence
  Description of Artificial Sequence: Synthetic oligonucleotide
  Antisense Strand to SEQ ID NO: 405499
cuuucuccaagagaugugg

SEQ ID NO: 405501 - RNA, 19 nt, Artificial Sequence
  Description of Artificial Sequence: Synthetic oligonucleotide
  Sense Strand Starting at position 1106 of SEQ ID NO: 316880
cuucauguggcucagggaa

SEQ ID NO: 405502 - RNA, 19 nt, Artificial Sequence
  Description of Artificial Sequence: Synthetic oligonucleotide
  Antisense Strand to SEQ ID NO: 405501
uucccugagccacaugaag

SEQ ID NO: 405503 - RNA, 19 nt, Artificial Sequence
  Description of Artificial Sequence: Synthetic oligonucleotide
  Sense Strand Starting at position 1106 of SEQ ID NO: 317879
gcccguuacaccuggaaac

SEQ ID NO: 405504 - RNA, 19 nt, Artificial Sequence
  Description of Artificial Sequence: Synthetic oligonucleotide
  Antisense Strand to SEQ ID NO: 405503
guuuccagguguaacgggc

SEQ ID NO: 405505 - RNA, 19 nt, Artificial Sequence
  Description of Artificial Sequence: Synthetic oligonucleotide
  Sense Strand Starting at position 1106 of SEQ ID NO: 317880
cccguuacaccuggaaaca

SEQ ID NO: 405506 - RNA, 19 nt, Artificial Sequence
  Description of Artificial Sequence: Synthetic oligonucleotide
  Antisense Strand to SEQ ID NO: 405505
uguuuccagguguaacggg

SEQ ID NO: 405507 - RNA, 19 nt, Artificial Sequence
  Description of Artificial Sequence: Synthetic oligonucleotide
  Sense Strand Starting at position 1106 of SEQ ID NO: 317986
gcgguuggucauggagaca

SEQ ID NO: 405508 - RNA, 19 nt, Artificial Sequence
  Description of Artificial Sequence: Synthetic oligonucleotide
  Antisense Strand to SEQ ID NO: 405507
ugucuccaugaccaaccgc

SEQ ID NO: 405509 - RNA, 19 nt, Artificial Sequence
  Description of Artificial Sequence: Synthetic oligonucleotide
  Sense Strand Starting at position 1106 of SEQ ID NO: 318014
guguguauggauggacaga

SEQ ID NO: 405510 - RNA, 19 nt, Artificial Sequence
  Description of Artificial Sequence: Synthetic oligonucleotide
  Antisense Strand to SEQ ID NO: 405509
ucuguccauccauacacac

SEQ ID NO: 405511 - RNA, 19 nt, Artificial Sequence
  Description of Artificial Sequence: Synthetic oligonucleotide
  Sense Strand Starting at position 1106 of SEQ ID NO: 318093
cucucaguucuugagguuu

SEQ ID NO: 405512 - RNA, 19 nt, Artificial Sequence
  Description of Artificial Sequence: Synthetic oligonucleotide
  Antisense Strand to SEQ ID NO: 405511
aaaccucaagaacugagag

SEQ ID NO: 405513 - RNA, 19 nt, Artificial Sequence
  Description of Artificial Sequence: Synthetic oligonucleotide
  Sense Strand Starting at position 1106 of SEQ ID NO: 318099
guucuugagguuugaggga

SEQ ID NO: 405514 - RNA, 19 nt, Artificial Sequence
  Description of Artificial Sequence: Synthetic oligonucleotide
  Antisense Strand to SEQ ID NO: 405513
ucccucaaaccucaagaac

SEQ ID NO: 405515 - RNA, 19 nt, Artificial Sequence
  Description of Artificial Sequence: Synthetic oligonucleotide
  Sense Strand Starting at position 1106 of SEQ ID NO: 318112
gagggauucucccagagaa

SEQ ID NO: 405516 - RNA, 19 nt, Artificial Sequence
  Description of Artificial Sequence: Synthetic oligonucleotide
  Antisense Strand to SEQ ID NO: 405515
uucucugggagaaucccuc

SEQ ID NO: 405517 - RNA, 19 nt, Artificial Sequence
  Description of Artificial Sequence: Synthetic oligonucleotide
  Sense Strand Starting at position 1106 of SEQ ID NO: 318214
uauaaaggcuucugggaau

SEQ ID NO: 405518 - RNA, 19 nt, Artificial Sequence
  Description of Artificial Sequence: Synthetic oligonucleotide
  Antisense Strand to SEQ ID NO: 405517
auucccagaagccuuuaua

SEQ ID NO: 405519 - RNA, 19 nt, Artificial Sequence
  Description of Artificial Sequence: Synthetic oligonucleotide
  Sense Strand Starting at position 1106 of SEQ ID NO: 318333
agggauggccuuugcugau

SEQ ID NO: 405520 - RNA, 19 nt, Artificial Sequence
  Description of Artificial Sequence: Synthetic oligonucleotide
  Antisense Strand to SEQ ID NO: 405519
aucagcaaaggccaucccu

SEQ ID NO: 405521 - RNA, 19 nt, Artificial Sequence
  Description of Artificial Sequence: Synthetic oligonucleotide
  Sense Strand Starting at position 1106 of SEQ ID NO: 318480
cagggaaucuuggugucuu

SEQ ID NO: 405522 - RNA, 19 nt, Artificial Sequence
  Description of Artificial Sequence: Synthetic oligonucleotide
  Antisense Strand to SEQ ID NO: 405521
aagacaccaagauucccug

SEQ ID NO: 405523 - RNA, 19 nt, Artificial Sequence
  Description of Artificial Sequence: Synthetic oligonucleotide
  Sense Strand Starting at position 1106 of SEQ ID NO: 318484
gaaucuuggugucuuucuu

SEQ ID NO: 405524 - RNA, 19 nt, Artificial Sequence
  Description of Artificial Sequence: Synthetic oligonucleotide
  Antisense Strand to SEQ ID NO: 405523
aagaaagacaccaagauuc

SEQ ID NO: 405525 - RNA, 19 nt, Artificial Sequence
  Description of Artificial Sequence: Synthetic oligonucleotide
  Sense Strand Starting at position 1106 of SEQ ID NO: 318491
ggugucuuucuugacccau

SEQ ID NO: 405526 - RNA, 19 nt, Artificial Sequence
  Description of Artificial Sequence: Synthetic oligonucleotide
  Antisense Strand to SEQ ID NO: 405525
augggucaagaaagacacc

SEQ ID NO: 405527 - RNA, 19 nt, Artificial Sequence
  Description of Artificial Sequence: Synthetic oligonucleotide
  Sense Strand Starting at position 1106 of SEQ ID NO: 318535
ucauaugugcuguggacuu

SEQ ID NO: 405528 - RNA, 19 nt, Artificial Sequence
  Description of Artificial Sequence: Synthetic oligonucleotide
  Antisense Strand to SEQ ID NO: 405527
aaguccacagcacauauga

SEQ ID NO: 405529 - RNA, 19 nt, Artificial Sequence
  Description of Artificial Sequence: Synthetic oligonucleotide
  Sense Strand Starting at position 1106 of SEQ ID NO: 318546
guggacuuccguugguauu

SEQ ID NO: 405530 - RNA, 19 nt, Artificial Sequence
  Description of Artificial Sequence: Synthetic oligonucleotide
  Antisense Strand to SEQ ID NO: 405529
aauaccaacggaaguccac

SEQ ID NO: 405531 - RNA, 19 nt, Artificial Sequence
  Description of Artificial Sequence: Synthetic oligonucleotide
  Sense Strand Starting at position 1106 of SEQ ID NO: 318547
uggacuuccguugguauuu

SEQ ID NO: 405532 - RNA, 19 nt, Artificial Sequence
  Description of Artificial Sequence: Synthetic oligonucleotide
  Antisense Strand to SEQ ID NO: 405531
aaauaccaacggaagucca

SEQ ID NO: 405533 - RNA, 19 nt, Artificial Sequence
  Description of Artificial Sequence: Synthetic oligonucleotide
  Sense Strand Starting at position 1106 of SEQ ID NO: 318569
auaaauauuucccgaguuc

SEQ ID NO: 405534 - RNA, 19 nt, Artificial Sequence
  Description of Artificial Sequence: Synthetic oligonucleotide
  Antisense Strand to SEQ ID NO: 405533
gaacucgggaaauauuuau

SEQ ID NO: 405535 - RNA, 19 nt, Artificial Sequence
  Description of Artificial Sequence: Synthetic oligonucleotide
  Sense Strand Starting at position 1106 of SEQ ID NO: 318783
gggaugguuugggaagguu

SEQ ID NO: 405536 - RNA, 19 nt, Artificial Sequence
  Description of Artificial Sequence: Synthetic oligonucleotide
  Antisense Strand to SEQ ID NO: 405535
aaccuucccaaaccauccc

SEQ ID NO: 405537 - RNA, 19 nt, Artificial Sequence
  Description of Artificial Sequence: Synthetic oligonucleotide
  Sense Strand Starting at position 1106 of SEQ ID NO: 318872
cauagcuuugaguggagau

SEQ ID NO: 405538 - RNA, 19 nt, Artificial Sequence
  Description of Artificial Sequence: Synthetic oligonucleotide
  Antisense Strand to SEQ ID NO: 405537
aucuccacucaaagcuaug

SEQ ID NO: 405539 - RNA, 19 nt, Artificial Sequence
  Description of Artificial Sequence: Synthetic oligonucleotide
  Sense Strand Starting at position 1106 of SEQ ID NO: 318873
auagcuuugaguggagaua

SEQ ID NO: 405540 - RNA, 19 nt, Artificial Sequence
  Description of Artificial Sequence: Synthetic oligonucleotide
  Antisense Strand to SEQ ID NO: 405539
uaucuccacucaaagcuau

SEQ ID NO: 405541 - RNA, 19 nt, Artificial Sequence
  Description of Artificial Sequence: Synthetic oligonucleotide
  Sense Strand Starting at position 1106 of SEQ ID NO: 319102
gugacauaugcugggccaa

SEQ ID NO: 405542 - RNA, 19 nt, Artificial Sequence
  Description of Artificial Sequence: Synthetic oligonucleotide
  Antisense Strand to SEQ ID NO: 405541
uuggcccagcauaugucac

SEQ ID NO: 405543 - RNA, 19 nt, Artificial Sequence
  Description of Artificial Sequence: Synthetic oligonucleotide
  Sense Strand Starting at position 1106 of SEQ ID NO: 319122
gagaacucugucugggacu

SEQ ID NO: 405544 - RNA, 19 nt, Artificial Sequence
  Description of Artificial Sequence: Synthetic oligonucleotide
  Antisense Strand to SEQ ID NO: 405543
agucccagacagaguucuc

SEQ ID NO: 405545 - RNA, 19 nt, Artificial Sequence
  Description of Artificial Sequence: Synthetic oligonucleotide
  Sense Strand Starting at position 1106 of SEQ ID NO: 319124
gaacucugucugggacuuu

SEQ ID NO: 405546 - RNA, 19 nt, Artificial Sequence
  Description of Artificial Sequence: Synthetic oligonucleotide
  Antisense Strand to SEQ ID NO: 405545
aaagucccagacagaguuc

SEQ ID NO: 405547 - RNA, 19 nt, Artificial Sequence
  Description of Artificial Sequence: Synthetic oligonucleotide
  Sense Strand Starting at position 1106 of SEQ ID NO: 319205
ggcagccaucuuugcagaa

SEQ ID NO: 405548 - RNA, 19 nt, Artificial Sequence
  Description of Artificial Sequence: Synthetic oligonucleotide
  Antisense Strand to SEQ ID NO: 405547
uucugcaaagauggcugcc

SEQ ID NO: 405549 - RNA, 19 nt, Artificial Sequence
  Description of Artificial Sequence: Synthetic oligonucleotide
  Sense Strand Starting at position 1107 of SEQ ID NO: 315255
gcuacuaacccuuaggaca

SEQ ID NO: 405550 - RNA, 19 nt, Artificial Sequence
  Description of Artificial Sequence: Synthetic oligonucleotide
  Antisense Strand to SEQ ID NO: 405549
uguccuaaggguuaguagc

SEQ ID NO: 405551 - RNA, 19 nt, Artificial Sequence
  Description of Artificial Sequence: Synthetic oligonucleotide
  Sense Strand Starting at position 1107 of SEQ ID NO: 315315
acucuuggcuagucagaaa

SEQ ID NO: 405552 - RNA, 19 nt, Artificial Sequence
  Description of Artificial Sequence: Synthetic oligonucleotide
  Antisense Strand to SEQ ID NO: 405551
uuucugacuagccaagagu

SEQ ID NO: 405553 - RNA, 19 nt, Artificial Sequence
  Description of Artificial Sequence: Synthetic oligonucleotide
  Sense Strand Starting at position 1107 of SEQ ID NO: 315715
gugccuucaggaugaaugu

SEQ ID NO: 405554 - RNA, 19 nt, Artificial Sequence
  Description of Artificial Sequence: Synthetic oligonucleotide
  Antisense Strand to SEQ ID NO: 405553
acauucauccugaaggcac

SEQ ID NO: 405555 - RNA, 19 nt, Artificial Sequence
  Description of Artificial Sequence: Synthetic oligonucleotide
  Sense Strand Starting at position 1107 of SEQ ID NO: 315923
acaggcucuuccuucgaga

SEQ ID NO: 405556 - RNA, 19 nt, Artificial Sequence
  Description of Artificial Sequence: Synthetic oligonucleotide
  Antisense Strand to SEQ ID NO: 405555
ucucgaaggaagagccugu

SEQ ID NO: 405557 - RNA, 19 nt, Artificial Sequence
  Description of Artificial Sequence: Synthetic oligonucleotide
  Sense Strand Starting at position 1107 of SEQ ID NO: 315925
aggcucuuccuucgagaaa

SEQ ID NO: 405558 - RNA, 19 nt, Artificial Sequence
  Description of Artificial Sequence: Synthetic oligonucleotide
  Antisense Strand to SEQ ID NO: 405557
uuucucgaaggaagagccu

SEQ ID NO: 405559 - RNA, 19 nt, Artificial Sequence
  Description of Artificial Sequence: Synthetic oligonucleotide
  Sense Strand Starting at position 1107 of SEQ ID NO: 315928
cucuuccuucgagaaauug

SEQ ID NO: 405560 - RNA, 19 nt, Artificial Sequence
  Description of Artificial Sequence: Synthetic oligonucleotide
  Antisense Strand to SEQ ID NO: 405559
caauuucucgaaggaagag

SEQ ID NO: 405561 - RNA, 19 nt, Artificial Sequence
  Description of Artificial Sequence: Synthetic oligonucleotide
  Sense Strand Starting at position 1107 of SEQ ID NO: 315990
cccagcuguccugccgaua

SEQ ID NO: 405562 - RNA, 19 nt, Artificial Sequence
  Description of Artificial Sequence: Synthetic oligonucleotide
  Antisense Strand to SEQ ID NO: 405561
uaucggcaggacagcuggg

SEQ ID NO: 405563 - RNA, 19 nt, Artificial Sequence
  Description of Artificial Sequence: Synthetic oligonucleotide
  Sense Strand Starting at position 1107 of SEQ ID NO: 315991
ccagcuguccugccgauau

SEQ ID NO: 405564 - RNA, 19 nt, Artificial Sequence
  Description of Artificial Sequence: Synthetic oligonucleotide
  Antisense Strand to SEQ ID NO: 405563
auaucggcaggacagcugg

SEQ ID NO: 405565 - RNA, 19 nt, Artificial Sequence
  Description of Artificial Sequence: Synthetic oligonucleotide
  Sense Strand Starting at position 1107 of SEQ ID NO: 315995
cuguccugccgauaugaca

SEQ ID NO: 405566 - RNA, 19 nt, Artificial Sequence
  Description of Artificial Sequence: Synthetic oligonucleotide
  Antisense Strand to SEQ ID NO: 405565
ugucauaucggcaggacag

SEQ ID NO: 405567 - RNA, 19 nt, Artificial Sequence
  Description of Artificial Sequence: Synthetic oligonucleotide
  Sense Strand Starting at position 1107 of SEQ ID NO: 316060
uacggauucgcugcugcau

SEQ ID NO: 405568 - RNA, 19 nt, Artificial Sequence
  Description of Artificial Sequence: Synthetic oligonucleotide
  Antisense Strand to SEQ ID NO: 405567
augcagcagcgaauccgua

SEQ ID NO: 405569 - RNA, 19 nt, Artificial Sequence
  Description of Artificial Sequence: Synthetic oligonucleotide
  Sense Strand Starting at position 1107 of SEQ ID NO: 316236
guugucaauucuuccacca

SEQ ID NO: 405570 - RNA, 19 nt, Artificial Sequence
  Description of Artificial Sequence: Synthetic oligonucleotide
  Antisense Strand to SEQ ID NO: 405569
ugguggaagaauugacaac

SEQ ID NO: 405571 - RNA, 19 nt, Artificial Sequence
  Description of Artificial Sequence: Synthetic oligonucleotide
  Sense Strand Starting at position 1107 of SEQ ID NO: 316262
cccaaauauuggcccuaga

SEQ ID NO: 405572 - RNA, 19 nt, Artificial Sequence
  Description of Artificial Sequence: Synthetic oligonucleotide
  Antisense Strand to SEQ ID NO: 405571
ucuagggccaauauuuggg

SEQ ID NO: 405573 - RNA, 19 nt, Artificial Sequence
  Description of Artificial Sequence: Synthetic oligonucleotide
  Sense Strand Starting at position 1107 of SEQ ID NO: 316285
ggcuuaagagcagacgaaa

SEQ ID NO: 405574 - RNA, 19 nt, Artificial Sequence
  Description of Artificial Sequence: Synthetic oligonucleotide
  Antisense Strand to SEQ ID NO: 405573
uuucgucugcucuuaagcc

SEQ ID NO: 405575 - RNA, 19 nt, Artificial Sequence
  Description of Artificial Sequence: Synthetic oligonucleotide
  Sense Strand Starting at position 1107 of SEQ ID NO: 316381
ggccuuugacaucagaauc

SEQ ID NO: 405576 - RNA, 19 nt, Artificial Sequence
  Description of Artificial Sequence: Synthetic oligonucleotide
  Antisense Strand to SEQ ID NO: 405575
gauucugaugucaaaggcc

SEQ ID NO: 405577 - RNA, 19 nt, Artificial Sequence
  Description of Artificial Sequence: Synthetic oligonucleotide
  Sense Strand Starting at position 1107 of SEQ ID NO: 316418
gagugagacuucucugacc

SEQ ID NO: 405578 - RNA, 19 nt, Artificial Sequence
  Description of Artificial Sequence: Synthetic oligonucleotide
  Antisense Strand to SEQ ID NO: 405577
ggucagagaagucucacuc

SEQ ID NO: 405579 - RNA, 19 nt, Artificial Sequence
  Description of Artificial Sequence: Synthetic oligonucleotide
  Sense Strand Starting at position 1107 of SEQ ID NO: 316420
gugagacuucucugacccu

SEQ ID NO: 405580 - RNA, 19 nt, Artificial Sequence
  Description of Artificial Sequence: Synthetic oligonucleotide
  Antisense Strand to SEQ ID NO: 405579
agggucagagaagucucac

SEQ ID NO: 405581 - RNA, 19 nt, Artificial Sequence
  Description of Artificial Sequence: Synthetic oligonucleotide
  Sense Strand Starting at position 1107 of SEQ ID NO: 316549
cugagaccacuuugaucau

SEQ ID NO: 405582 - RNA, 19 nt, Artificial Sequence
  Description of Artificial Sequence: Synthetic oligonucleotide
  Antisense Strand to SEQ ID NO: 405581
augaucaaaguggucucag

SEQ ID NO: 405583 - RNA, 19 nt, Artificial Sequence
  Description of Artificial Sequence: Synthetic oligonucleotide
  Sense Strand Starting at position 1107 of SEQ ID NO: 317584
gguuuccuguuucuaauaa

SEQ ID NO: 405584 - RNA, 19 nt, Artificial Sequence
  Description of Artificial Sequence: Synthetic oligonucleotide
  Antisense Strand to SEQ ID NO: 405583
uuauuagaaacaggaaacc

SEQ ID NO: 405585 - RNA, 19 nt, Artificial Sequence
  Description of Artificial Sequence: Synthetic oligonucleotide
  Sense Strand Starting at position 1107 of SEQ ID NO: 317657
gcgggucuuguuuaaacua

SEQ ID NO: 405586 - RNA, 19 nt, Artificial Sequence
  Description of Artificial Sequence: Synthetic oligonucleotide
  Antisense Strand to SEQ ID NO: 405585
uaguuuaaacaagacccgc

SEQ ID NO: 405587 - RNA, 19 nt, Artificial Sequence
  Description of Artificial Sequence: Synthetic oligonucleotide
  Sense Strand Starting at position 1107 of SEQ ID NO: 317870
gaccguguggcaguuaagu

SEQ ID NO: 405588 - RNA, 19 nt, Artificial Sequence
  Description of Artificial Sequence: Synthetic oligonucleotide
  Antisense Strand to SEQ ID NO: 405587
acuuaacugccacacgguc

SEQ ID NO: 405589 - RNA, 19 nt, Artificial Sequence
  Description of Artificial Sequence: Synthetic oligonucleotide
  Sense Strand Starting at position 1107 of SEQ ID NO: 317896
ucuggaaacaggugaaucu

SEQ ID NO: 405590 - RNA, 19 nt, Artificial Sequence
  Description of Artificial Sequence: Synthetic oligonucleotide
  Antisense Strand to SEQ ID NO: 405589
agauucaccuguuuccaga

SEQ ID NO: 405591 - RNA, 19 nt, Artificial Sequence
  Description of Artificial Sequence: Synthetic oligonucleotide
  Sense Strand Starting at position 1107 of SEQ ID NO: 317905
aggugaaucuaaguugugu

SEQ ID NO: 405592 - RNA, 19 nt, Artificial Sequence
  Description of Artificial Sequence: Synthetic oligonucleotide
  Antisense Strand to SEQ ID NO: 405591
acacaacuuagauucaccu

SEQ ID NO: 405593 - RNA, 19 nt, Artificial Sequence
  Description of Artificial Sequence: Synthetic oligonucleotide
  Sense Strand Starting at position 1107 of SEQ ID NO: 317907
gugaaucuaaguuguguga

SEQ ID NO: 405594 - RNA, 19 nt, Artificial Sequence
  Description of Artificial Sequence: Synthetic oligonucleotide
  Antisense Strand to SEQ ID NO: 405593
ucacacaacuuagauucac

SEQ ID NO: 405595 - RNA, 19 nt, Artificial Sequence
  Description of Artificial Sequence: Synthetic oligonucleotide
  Sense Strand Starting at position 1107 of SEQ ID NO: 317975
aagguaauaucaguaguau

SEQ ID NO: 405596 - RNA, 19 nt, Artificial Sequence
  Description of Artificial Sequence: Synthetic oligonucleotide
  Antisense Strand to SEQ ID NO: 405595
auacuacugauauuaccuu

SEQ ID NO: 405597 - RNA, 19 nt, Artificial Sequence
  Description of Artificial Sequence: Synthetic oligonucleotide
  Sense Strand Starting at position 1107 of SEQ ID NO: 317976
agguaauaucaguaguauc

SEQ ID NO: 405598 - RNA, 19 nt, Artificial Sequence
  Description of Artificial Sequence: Synthetic oligonucleotide
  Antisense Strand to SEQ ID NO: 405597
gauacuacugauauuaccu

SEQ ID NO: 405599 - RNA, 19 nt, Artificial Sequence
  Description of Artificial Sequence: Synthetic oligonucleotide
  Sense Strand Starting at position 1107 of SEQ ID NO: 318056
aggucuugauaccuugaaa

SEQ ID NO: 405600 - RNA, 19 nt, Artificial Sequence
  Description of Artificial Sequence: Synthetic oligonucleotide
  Antisense Strand to SEQ ID NO: 405599
uuucaagguaucaagaccu

SEQ ID NO: 405601 - RNA, 19 nt, Artificial Sequence
  Description of Artificial Sequence: Synthetic oligonucleotide
  Sense Strand Starting at position 1107 of SEQ ID NO: 318067
ccuugaaagugcccaauga

SEQ ID NO: 405602 - RNA, 19 nt, Artificial Sequence
  Description of Artificial Sequence: Synthetic oligonucleotide
  Antisense Strand to SEQ ID NO: 405601
ucauugggcacuuucaagg

SEQ ID NO: 405603 - RNA, 19 nt, Artificial Sequence
  Description of Artificial Sequence: Synthetic oligonucleotide
  Sense Strand Starting at position 1107 of SEQ ID NO: 318068
cuugaaagugcccaaugaa

SEQ ID NO: 405604 - RNA, 19 nt, Artificial Sequence
  Description of Artificial Sequence: Synthetic oligonucleotide
  Antisense Strand to SEQ ID NO: 405603
uucauugggcacuuucaag

SEQ ID NO: 405605 - RNA, 19 nt, Artificial Sequence
  Description of Artificial Sequence: Synthetic oligonucleotide
  Sense Strand Starting at position 1107 of SEQ ID NO: 318158
ucuccucacuuaguuguaa

SEQ ID NO: 405606 - RNA, 19 nt, Artificial Sequence
  Description of Artificial Sequence: Synthetic oligonucleotide
  Antisense Strand to SEQ ID NO: 405605
uuacaacuaagugaggaga

SEQ ID NO: 405607 - RNA, 19 nt, Artificial Sequence
  Description of Artificial Sequence: Synthetic oligonucleotide
  Sense Strand Starting at position 1107 of SEQ ID NO: 318222
gcacaagacuuggugcaua

SEQ ID NO: 405608 - RNA, 19 nt, Artificial Sequence
  Description of Artificial Sequence: Synthetic oligonucleotide
  Antisense Strand to SEQ ID NO: 405607
uaugcaccaagucuugugc

SEQ ID NO: 405609 - RNA, 19 nt, Artificial Sequence
  Description of Artificial Sequence: Synthetic oligonucleotide
  Sense Strand Starting at position 1107 of SEQ ID NO: 318225
caagacuuggugcauagua

SEQ ID NO: 405610 - RNA, 19 nt, Artificial Sequence
  Description of Artificial Sequence: Synthetic oligonucleotide
  Antisense Strand to SEQ ID NO: 405609
uacuaugcaccaagucuug

SEQ ID NO: 405611 - RNA, 19 nt, Artificial Sequence
  Description of Artificial Sequence: Synthetic oligonucleotide
  Sense Strand Starting at position 1107 of SEQ ID NO: 318254
aaauguuuguggcuagaga

SEQ ID NO: 405612 - RNA, 19 nt, Artificial Sequence
  Description of Artificial Sequence: Synthetic oligonucleotide
  Antisense Strand to SEQ ID NO: 405611
ucucuagccacaaacauuu

SEQ ID NO: 405613 - RNA, 19 nt, Artificial Sequence
  Description of Artificial Sequence: Synthetic oligonucleotide
  Sense Strand Starting at position 1107 of SEQ ID NO: 318255
aauguuuguggcuagagag

SEQ ID NO: 405614 - RNA, 19 nt, Artificial Sequence
  Description of Artificial Sequence: Synthetic oligonucleotide
  Antisense Strand to SEQ ID NO: 405613
cucucuagccacaaacauu

SEQ ID NO: 405615 - RNA, 19 nt, Artificial Sequence
  Description of Artificial Sequence: Synthetic oligonucleotide
  Sense Strand Starting at position 1107 of SEQ ID NO: 318789
agguaacuuucugcaccau

SEQ ID NO: 405616 - RNA, 19 nt, Artificial Sequence
  Description of Artificial Sequence: Synthetic oligonucleotide
  Antisense Strand to SEQ ID NO: 405615
auggugcagaaaguuaccu

SEQ ID NO: 405617 - RNA, 19 nt, Artificial Sequence
  Description of Artificial Sequence: Synthetic oligonucleotide
  Sense Strand Starting at position 1107 of SEQ ID NO: 318790
gguaacuuucugcaccauu

SEQ ID NO: 405618 - RNA, 19 nt, Artificial Sequence
  Description of Artificial Sequence: Synthetic oligonucleotide
  Antisense Strand to SEQ ID NO: 405617
aauggugcagaaaguuacc

SEQ ID NO: 405619 - RNA, 19 nt, Artificial Sequence
  Description of Artificial Sequence: Synthetic oligonucleotide
  Sense Strand Starting at position 1107 of SEQ ID NO: 318990
ugccuagguuauguuuaaa

SEQ ID NO: 405620 - RNA, 19 nt, Artificial Sequence
  Description of Artificial Sequence: Synthetic oligonucleotide
  Antisense Strand to SEQ ID NO: 405619
uuuaaacauaaccuaggca

SEQ ID NO: 405621 - RNA, 19 nt, Artificial Sequence
  Description of Artificial Sequence: Synthetic oligonucleotide
  Sense Strand Starting at position 1107 of SEQ ID NO: 319023
gguguucagggugagacua

SEQ ID NO: 405622 - RNA, 19 nt, Artificial Sequence
  Description of Artificial Sequence: Synthetic oligonucleotide
  Antisense Strand to SEQ ID NO: 405621
uagucucacccugaacacc

SEQ ID NO: 405623 - RNA, 19 nt, Artificial Sequence
  Description of Artificial Sequence: Synthetic oligonucleotide
  Sense Strand Starting at position 1107 of SEQ ID NO: 319187
guaggagcucugugaacag

SEQ ID NO: 405624 - RNA, 19 nt, Artificial Sequence
  Description of Artificial Sequence: Synthetic oligonucleotide
  Antisense Strand to SEQ ID NO: 405623
cuguucacagagcuccuac

SEQ ID NO: 405625 - RNA, 19 nt, Artificial Sequence
  Description of Artificial Sequence: Synthetic oligonucleotide
  Sense Strand Starting at position 1107 of SEQ ID NO: 319194
cucugugaacaguagcuau

SEQ ID NO: 405626 - RNA, 19 nt, Artificial Sequence
  Description of Artificial Sequence: Synthetic oligonucleotide
  Antisense Strand to SEQ ID NO: 405625
auagcuacuguucacagag

SEQ ID NO: 405627 - RNA, 19 nt, Artificial Sequence
  Description of Artificial Sequence: Synthetic oligonucleotide
  Sense Strand Starting at position 1107 of SEQ ID NO: 319197
ugugaacaguagcuauuau

SEQ ID NO: 405628 - RNA, 19 nt, Artificial Sequence
  Description of Artificial Sequence: Synthetic oligonucleotide
  Antisense Strand to SEQ ID NO: 405627
auaauagcuacuguucaca

SEQ ID NO: 405629 - RNA, 19 nt, Artificial Sequence
  Description of Artificial Sequence: Synthetic oligonucleotide
  Sense Strand Starting at position 1108 of SEQ ID NO: 315345
ucaggugauggugguauua

SEQ ID NO: 405630 - RNA, 19 nt, Artificial Sequence
  Description of Artificial Sequence: Synthetic oligonucleotide
  Antisense Strand to SEQ ID NO: 405629
uaauaccaccaucaccuga

SEQ ID NO: 405631 - RNA, 19 nt, Artificial Sequence
  Description of Artificial Sequence: Synthetic oligonucleotide
  Sense Strand Starting at position 1108 of SEQ ID NO: 315371
ggaauuaaguagucaugug

SEQ ID NO: 405632 - RNA, 19 nt, Artificial Sequence
  Description of Artificial Sequence: Synthetic oligonucleotide
  Antisense Strand to SEQ ID NO: 405631
cacaugacuacuuaauucc

SEQ ID NO: 405633 - RNA, 19 nt, Artificial Sequence
  Description of Artificial Sequence: Synthetic oligonucleotide
  Sense Strand Starting at position 1108 of SEQ ID NO: 315438
aaagguaucauggguaggu

SEQ ID NO: 405634 - RNA, 19 nt, Artificial Sequence
  Description of Artificial Sequence: Synthetic oligonucleotide
  Antisense Strand to SEQ ID NO: 405633
accuacccaugauaccuuu

SEQ ID NO: 405635 - RNA, 19 nt, Artificial Sequence
  Description of Artificial Sequence: Synthetic oligonucleotide
  Sense Strand Starting at position 1108 of SEQ ID NO: 315476
guggaaaucucauucugac

SEQ ID NO: 405636 - RNA, 19 nt, Artificial Sequence
  Description of Artificial Sequence: Synthetic oligonucleotide
  Antisense Strand to SEQ ID NO: 405635
gucagaaugagauuuccac

SEQ ID NO: 405637 - RNA, 19 nt, Artificial Sequence
  Description of Artificial Sequence: Synthetic oligonucleotide
  Sense Strand Starting at position 1108 of SEQ ID NO: 315740
guaaauacuuuggucuaac

SEQ ID NO: 405638 - RNA, 19 nt, Artificial Sequence
  Description of Artificial Sequence: Synthetic oligonucleotide
  Antisense Strand to SEQ ID NO: 405637
guuagaccaaaguauuuac

SEQ ID NO: 405639 - RNA, 19 nt, Artificial Sequence
  Description of Artificial Sequence: Synthetic oligonucleotide
  Sense Strand Starting at position 1108 of SEQ ID NO: 315751
ggucuaacaucuuccauga

SEQ ID NO: 405640 - RNA, 19 nt, Artificial Sequence
  Description of Artificial Sequence: Synthetic oligonucleotide
  Antisense Strand to SEQ ID NO: 405639
ucauggaagauguuagacc

SEQ ID NO: 405641 - RNA, 19 nt, Artificial Sequence
  Description of Artificial Sequence: Synthetic oligonucleotide
  Sense Strand Starting at position 1108 of SEQ ID NO: 316068
uugaauggaugcucuauaa

SEQ ID NO: 405642 - RNA, 19 nt, Artificial Sequence
  Description of Artificial Sequence: Synthetic oligonucleotide
  Antisense Strand to SEQ ID NO: 405641
uuauagagcauccauucaa

SEQ ID NO: 405643 - RNA, 19 nt, Artificial Sequence
  Description of Artificial Sequence: Synthetic oligonucleotide
  Sense Strand Starting at position 1108 of SEQ ID NO: 316304
cgagguuauagacaugugu

SEQ ID NO: 405644 - RNA, 19 nt, Artificial Sequence
  Description of Artificial Sequence: Synthetic oligonucleotide
  Antisense Strand to SEQ ID NO: 405643
acacaugucuauaaccucg

SEQ ID NO: 405645 - RNA, 19 nt, Artificial Sequence
  Description of Artificial Sequence: Synthetic oligonucleotide
  Sense Strand Starting at position 1108 of SEQ ID NO: 316306
agguuauagacauguguag

SEQ ID NO: 405646 - RNA, 19 nt, Artificial Sequence
  Description of Artificial Sequence: Synthetic oligonucleotide
  Antisense Strand to SEQ ID NO: 405645
cuacacaugucuauaaccu

SEQ ID NO: 405647 - RNA, 19 nt, Artificial Sequence
  Description of Artificial Sequence: Synthetic oligonucleotide
  Sense Strand Starting at position 1108 of SEQ ID NO: 316308
guuauagacauguguagaa

SEQ ID NO: 405648 - RNA, 19 nt, Artificial Sequence
  Description of Artificial Sequence: Synthetic oligonucleotide
  Antisense Strand to SEQ ID NO: 405647
uucuacacaugucuauaac

SEQ ID NO: 405649 - RNA, 19 nt, Artificial Sequence
  Description of Artificial Sequence: Synthetic oligonucleotide
  Sense Strand Starting at position 1108 of SEQ ID NO: 316403
ugaugcuucggaggaaaca

SEQ ID NO: 405650 - RNA, 19 nt, Artificial Sequence
  Description of Artificial Sequence: Synthetic oligonucleotide
  Antisense Strand to SEQ ID NO: 405649
uguuuccuccgaagcauca

SEQ ID NO: 405651 - RNA, 19 nt, Artificial Sequence
  Description of Artificial Sequence: Synthetic oligonucleotide
  Sense Strand Starting at position 1108 of SEQ ID NO: 316465
cugcuuucugucguuccaa

SEQ ID NO: 405652 - RNA, 19 nt, Artificial Sequence
  Description of Artificial Sequence: Synthetic oligonucleotide
  Antisense Strand to SEQ ID NO: 405651
uuggaacgacagaaagcag

SEQ ID NO: 405653 - RNA, 19 nt, Artificial Sequence
  Description of Artificial Sequence: Synthetic oligonucleotide
  Sense Strand Starting at position 1108 of SEQ ID NO: 316521
ggcucaagauucucuuaac

SEQ ID NO: 405654 - RNA, 19 nt, Artificial Sequence
  Description of Artificial Sequence: Synthetic oligonucleotide
  Antisense Strand to SEQ ID NO: 405653
guuaagagaaucuugagcc

SEQ ID NO: 405655 - RNA, 19 nt, Artificial Sequence
  Description of Artificial Sequence: Synthetic oligonucleotide
  Sense Strand Starting at position 1108 of SEQ ID NO: 316569
ggaucugaaaguuguauaa

SEQ ID NO: 405656 - RNA, 19 nt, Artificial Sequence
  Description of Artificial Sequence: Synthetic oligonucleotide
  Antisense Strand to SEQ ID NO: 405655
uuauacaacuuucagaucc

SEQ ID NO: 405657 - RNA, 19 nt, Artificial Sequence
  Description of Artificial Sequence: Synthetic oligonucleotide
  Sense Strand Starting at position 1108 of SEQ ID NO: 316573
cugaaaguuguauaacgag

SEQ ID NO: 405658 - RNA, 19 nt, Artificial Sequence
  Description of Artificial Sequence: Synthetic oligonucleotide
  Antisense Strand to SEQ ID NO: 405657
cucguuauacaacuuucag

SEQ ID NO: 405659 - RNA, 19 nt, Artificial Sequence
  Description of Artificial Sequence: Synthetic oligonucleotide
  Sense Strand Starting at position 1108 of SEQ ID NO: 316588
cgaguuucuguugaauaag

SEQ ID NO: 405660 - RNA, 19 nt, Artificial Sequence
  Description of Artificial Sequence: Synthetic oligonucleotide
  Antisense Strand to SEQ ID NO: 405659
cuuauucaacagaaacucg

SEQ ID NO: 405661 - RNA, 19 nt, Artificial Sequence
  Description of Artificial Sequence: Synthetic oligonucleotide
  Sense Strand Starting at position 1108 of SEQ ID NO: 316591
guuucuguugaauaagaca

SEQ ID NO: 405662 - RNA, 19 nt, Artificial Sequence
  Description of Artificial Sequence: Synthetic oligonucleotide
  Antisense Strand to SEQ ID NO: 405661
ugucuuauucaacagaaac

SEQ ID NO: 405663 - RNA, 19 nt, Artificial Sequence
  Description of Artificial Sequence: Synthetic oligonucleotide
  Sense Strand Starting at position 1108 of SEQ ID NO: 316657
acgucagaccauugacacu

SEQ ID NO: 405664 - RNA, 19 nt, Artificial Sequence
  Description of Artificial Sequence: Synthetic oligonucleotide
  Antisense Strand to SEQ ID NO: 405663
agugucaauggucugacgu

SEQ ID NO: 405665 - RNA, 19 nt, Artificial Sequence
  Description of Artificial Sequence: Synthetic oligonucleotide
  Sense Strand Starting at position 1108 of SEQ ID NO: 316828
cgagguguccugggaacac

SEQ ID NO: 405666 - RNA, 19 nt, Artificial Sequence
  Description of Artificial Sequence: Synthetic oligonucleotide
  Antisense Strand to SEQ ID NO: 405665
guguucccaggacaccucg

SEQ ID NO: 405667 - RNA, 19 nt, Artificial Sequence
  Description of Artificial Sequence: Synthetic oligonucleotide
  Sense Strand Starting at position 1108 of SEQ ID NO: 316856
uguaacuucggacaaauca

SEQ ID NO: 405668 - RNA, 19 nt, Artificial Sequence
  Description of Artificial Sequence: Synthetic oligonucleotide
  Antisense Strand to SEQ ID NO: 405667
ugauuuguccgaaguuaca

SEQ ID NO: 405669 - RNA, 19 nt, Artificial Sequence
  Description of Artificial Sequence: Synthetic oligonucleotide
  Sense Strand Starting at position 1108 of SEQ ID NO: 316891
cucagugugccguucugua

SEQ ID NO: 405670 - RNA, 19 nt, Artificial Sequence
  Description of Artificial Sequence: Synthetic oligonucleotide
  Antisense Strand to SEQ ID NO: 405669
uacagaacggcacacugag

SEQ ID NO: 405671 - RNA, 19 nt, Artificial Sequence
  Description of Artificial Sequence: Synthetic oligonucleotide
  Sense Strand Starting at position 1108 of SEQ ID NO: 317346
cgggaaggcacccgagauu

SEQ ID NO: 405672 - RNA, 19 nt, Artificial Sequence
  Description of Artificial Sequence: Synthetic oligonucleotide
  Antisense Strand to SEQ ID NO: 405671
aaucucgggugccuucccg

SEQ ID NO: 405673 - RNA, 19 nt, Artificial Sequence
  Description of Artificial Sequence: Synthetic oligonucleotide
  Sense Strand Starting at position 1108 of SEQ ID NO: 317572
cuugaauuggacugcauga

SEQ ID NO: 405674 - RNA, 19 nt, Artificial Sequence
  Description of Artificial Sequence: Synthetic oligonucleotide
  Antisense Strand to SEQ ID NO: 405673
ucaugcaguccaauucaag

SEQ ID NO: 405675 - RNA, 19 nt, Artificial Sequence
  Description of Artificial Sequence: Synthetic oligonucleotide
  Sense Strand Starting at position 1108 of SEQ ID NO: 317656
cacguauaagacugagaga

SEQ ID NO: 405676 - RNA, 19 nt, Artificial Sequence
  Description of Artificial Sequence: Synthetic oligonucleotide
  Antisense Strand to SEQ ID NO: 405675
ucucucagucuuauacgug

SEQ ID NO: 405677 - RNA, 19 nt, Artificial Sequence
  Description of Artificial Sequence: Synthetic oligonucleotide
  Sense Strand Starting at position 1108 of SEQ ID NO: 317745
gggcuucucagaggagaga

SEQ ID NO: 405678 - RNA, 19 nt, Artificial Sequence
  Description of Artificial Sequence: Synthetic oligonucleotide
  Antisense Strand to SEQ ID NO: 405677
ucucuccucugagaagccc

SEQ ID NO: 405679 - RNA, 19 nt, Artificial Sequence
  Description of Artificial Sequence: Synthetic oligonucleotide
  Sense Strand Starting at position 1108 of SEQ ID NO: 317993
acgugauuugcuugagggu

SEQ ID NO: 405680 - RNA, 19 nt, Artificial Sequence
  Description of Artificial Sequence: Synthetic oligonucleotide
  Antisense Strand to SEQ ID NO: 405679
acccucaagcaaaucacgu

SEQ ID NO: 405681 - RNA, 19 nt, Artificial Sequence
  Description of Artificial Sequence: Synthetic oligonucleotide
  Sense Strand Starting at position 1108 of SEQ ID NO: 318034
uggugcuuugcaguaaugu

SEQ ID NO: 405682 - RNA, 19 nt, Artificial Sequence
  Description of Artificial Sequence: Synthetic oligonucleotide
  Antisense Strand to SEQ ID NO: 405681
acauuacugcaaagcacca

SEQ ID NO: 405683 - RNA, 19 nt, Artificial Sequence
  Description of Artificial Sequence: Synthetic oligonucleotide
  Sense Strand Starting at position 1108 of SEQ ID NO: 318192
agcucaugugaggauuaau

SEQ ID NO: 405684 - RNA, 19 nt, Artificial Sequence
  Description of Artificial Sequence: Synthetic oligonucleotide
  Antisense Strand to SEQ ID NO: 405683
auuaauccucacaugagcu

SEQ ID NO: 405685 - RNA, 19 nt, Artificial Sequence
  Description of Artificial Sequence: Synthetic oligonucleotide
  Sense Strand Starting at position 1108 of SEQ ID NO: 318210
uugggaacuuagcuuacua

SEQ ID NO: 405686 - RNA, 19 nt, Artificial Sequence
  Description of Artificial Sequence: Synthetic oligonucleotide
  Antisense Strand to SEQ ID NO: 405685
uaguaagcuaaguucccaa

SEQ ID NO: 405687 - RNA, 19 nt, Artificial Sequence
  Description of Artificial Sequence: Synthetic oligonucleotide
  Sense Strand Starting at position 1108 of SEQ ID NO: 318325
uugaacagugccuaauaca

SEQ ID NO: 405688 - RNA, 19 nt, Artificial Sequence
  Description of Artificial Sequence: Synthetic oligonucleotide
  Antisense Strand to SEQ ID NO: 405687
uguauuaggcacuguucaa

SEQ ID NO: 405689 - RNA, 19 nt, Artificial Sequence
  Description of Artificial Sequence: Synthetic oligonucleotide
  Sense Strand Starting at position 1108 of SEQ ID NO: 318437
ugaaaucagugcucuagga

SEQ ID NO: 405690 - RNA, 19 nt, Artificial Sequence
  Description of Artificial Sequence: Synthetic oligonucleotide
  Antisense Strand to SEQ ID NO: 405689
uccuagagcacugauuuca

SEQ ID NO: 405691 - RNA, 19 nt, Artificial Sequence
  Description of Artificial Sequence: Synthetic oligonucleotide
  Sense Strand Starting at position 1108 of SEQ ID NO: 318439
aaaucagugcucuaggaca

SEQ ID NO: 405692 - RNA, 19 nt, Artificial Sequence
  Description of Artificial Sequence: Synthetic oligonucleotide
  Antisense Strand to SEQ ID NO: 405691
uguccuagagcacugauuu

SEQ ID NO: 405693 - RNA, 19 nt, Artificial Sequence
  Description of Artificial Sequence: Synthetic oligonucleotide
  Sense Strand Starting at position 1108 of SEQ ID NO: 318551
auuaccuguccuggaacuu

SEQ ID NO: 405694 - RNA, 19 nt, Artificial Sequence
  Description of Artificial Sequence: Synthetic oligonucleotide
  Antisense Strand to SEQ ID NO: 405693
aaguuccaggacagguaau

SEQ ID NO: 405695 - RNA, 19 nt, Artificial Sequence
  Description of Artificial Sequence: Synthetic oligonucleotide
  Sense Strand Starting at position 1108 of SEQ ID NO: 318563
ggaacuuccuaccucgaaa

SEQ ID NO: 405696 - RNA, 19 nt, Artificial Sequence
  Description of Artificial Sequence: Synthetic oligonucleotide
  Antisense Strand to SEQ ID NO: 405695
uuucgagguaggaaguucc

SEQ ID NO: 405697 - RNA, 19 nt, Artificial Sequence
  Description of Artificial Sequence: Synthetic oligonucleotide
  Sense Strand Starting at position 1108 of SEQ ID NO: 318747
aauuaaaugggauguacuu

SEQ ID NO: 405698 - RNA, 19 nt, Artificial Sequence
  Description of Artificial Sequence: Synthetic oligonucleotide
  Antisense Strand to SEQ ID NO: 405697
aaguacaucccauuuaauu

SEQ ID NO: 405699 - RNA, 19 nt, Artificial Sequence
  Description of Artificial Sequence: Synthetic oligonucleotide
  Sense Strand Starting at position 1108 of SEQ ID NO: 318908
gucuguguugucuccaguu

SEQ ID NO: 405700 - RNA, 19 nt, Artificial Sequence
  Description of Artificial Sequence: Synthetic oligonucleotide
  Antisense Strand to SEQ ID NO: 405699
aacuggagacaacacagac

SEQ ID NO: 405701 - RNA, 19 nt, Artificial Sequence
  Description of Artificial Sequence: Synthetic oligonucleotide
  Sense Strand Starting at position 1108 of SEQ ID NO: 318999
ugggaacuucuuggccuua

SEQ ID NO: 405702 - RNA, 19 nt, Artificial Sequence
  Description of Artificial Sequence: Synthetic oligonucleotide
  Antisense Strand to SEQ ID NO: 405701
uaaggccaagaaguuccca

SEQ ID NO: 405703 - RNA, 19 nt, Artificial Sequence
  Description of Artificial Sequence: Synthetic oligonucleotide
  Sense Strand Starting at position 1108 of SEQ ID NO: 319004
acuucuuggccuuaggaua

SEQ ID NO: 405704 - RNA, 19 nt, Artificial Sequence
  Description of Artificial Sequence: Synthetic oligonucleotide
  Antisense Strand to SEQ ID NO: 405703
uauccuaaggccaagaagu

SEQ ID NO: 405705 - RNA, 19 nt, Artificial Sequence
  Description of Artificial Sequence: Synthetic oligonucleotide
  Sense Strand Starting at position 1108 of SEQ ID NO: 319024
guguguuuggcuuuagcag

SEQ ID NO: 405706 - RNA, 19 nt, Artificial Sequence
  Description of Artificial Sequence: Synthetic oligonucleotide
  Antisense Strand to SEQ ID NO: 405705
cugcuaaagccaaacacac

SEQ ID NO: 405707 - RNA, 19 nt, Artificial Sequence
  Description of Artificial Sequence: Synthetic oligonucleotide
  Sense Strand Starting at position 1108 of SEQ ID NO: 319160
cuuguagguguauagugau

SEQ ID NO: 405708 - RNA, 19 nt, Artificial Sequence
  Description of Artificial Sequence: Synthetic oligonucleotide
  Antisense Strand to SEQ ID NO: 405707
aucacuauacaccuacaag

SEQ ID NO: 405709 - RNA, 19 nt, Artificial Sequence
  Description of Artificial Sequence: Synthetic oligonucleotide
  Sense Strand Starting at position 1109 of SEQ ID NO: 315249
accucuggucccugguuua

SEQ ID NO: 405710 - RNA, 19 nt, Artificial Sequence
  Description of Artificial Sequence: Synthetic oligonucleotide
  Antisense Strand to SEQ ID NO: 405709
uaaaccagggaccagaggu

SEQ ID NO: 405711 - RNA, 19 nt, Artificial Sequence
  Description of Artificial Sequence: Synthetic oligonucleotide
  Sense Strand Starting at position 1109 of SEQ ID NO: 315256
gucccugguuuacucuaua

SEQ ID NO: 405712 - RNA, 19 nt, Artificial Sequence
  Description of Artificial Sequence: Synthetic oligonucleotide
  Antisense Strand to SEQ ID NO: 405711
uauagaguaaaccagggac

SEQ ID NO: 405713 - RNA, 19 nt, Artificial Sequence
  Description of Artificial Sequence: Synthetic oligonucleotide
  Sense Strand Starting at position 1109 of SEQ ID NO: 315487
ccacaaucccugggugacu

SEQ ID NO: 405714 - RNA, 19 nt, Artificial Sequence
  Description of Artificial Sequence: Synthetic oligonucleotide
  Antisense Strand to SEQ ID NO: 405713
agucacccagggauugugg

SEQ ID NO: 405715 - RNA, 19 nt, Artificial Sequence
  Description of Artificial Sequence: Synthetic oligonucleotide
  Sense Strand Starting at position 1109 of SEQ ID NO: 315570
acuccuucuggcuaggaga

SEQ ID NO: 405716 - RNA, 19 nt, Artificial Sequence
  Description of Artificial Sequence: Synthetic oligonucleotide
  Antisense Strand to SEQ ID NO: 405715
ucuccuagccagaaggagu

SEQ ID NO: 405717 - RNA, 19 nt, Artificial Sequence
  Description of Artificial Sequence: Synthetic oligonucleotide
  Sense Strand Starting at position 1109 of SEQ ID NO: 315646
agaucuccucagugacauu

SEQ ID NO: 405718 - RNA, 19 nt, Artificial Sequence
  Description of Artificial Sequence: Synthetic oligonucleotide
  Antisense Strand to SEQ ID NO: 405717
aaugucacugaggagaucu

SEQ ID NO: 405719 - RNA, 19 nt, Artificial Sequence
  Description of Artificial Sequence: Synthetic oligonucleotide
  Sense Strand Starting at position 1109 of SEQ ID NO: 315670
gaacgucagcugugccaaa

SEQ ID NO: 405720 - RNA, 19 nt, Artificial Sequence
  Description of Artificial Sequence: Synthetic oligonucleotide
  Antisense Strand to SEQ ID NO: 405719
uuuggcacagcugacguuc

SEQ ID NO: 405721 - RNA, 19 nt, Artificial Sequence
  Description of Artificial Sequence: Synthetic oligonucleotide
  Sense Strand Starting at position 1109 of SEQ ID NO: 315717
ggagccaugcgccaguaaa

SEQ ID NO: 405722 - RNA, 19 nt, Artificial Sequence
  Description of Artificial Sequence: Synthetic oligonucleotide
  Antisense Strand to SEQ ID NO: 405721
uuuacuggcgcauggcucc

SEQ ID NO: 405723 - RNA, 19 nt, Artificial Sequence
  Description of Artificial Sequence: Synthetic oligonucleotide
  Sense Strand Starting at position 1109 of SEQ ID NO: 315758
ucaagugucugggcaauua

SEQ ID NO: 405724 - RNA, 19 nt, Artificial Sequence
  Description of Artificial Sequence: Synthetic oligonucleotide
  Antisense Strand to SEQ ID NO: 405723
uaauugcccagacacuuga

SEQ ID NO: 405725 - RNA, 19 nt, Artificial Sequence
  Description of Artificial Sequence: Synthetic oligonucleotide
  Sense Strand Starting at position 1109 of SEQ ID NO: 315767
ugggcaauuacugagcuga

SEQ ID NO: 405726 - RNA, 19 nt, Artificial Sequence
  Description of Artificial Sequence: Synthetic oligonucleotide
  Antisense Strand to SEQ ID NO: 405725
ucagcucaguaauugccca

SEQ ID NO: 405727 - RNA, 19 nt, Artificial Sequence
  Description of Artificial Sequence: Synthetic oligonucleotide
  Sense Strand Starting at position 1109 of SEQ ID NO: 315769
ggcaauuacugagcugauu

SEQ ID NO: 405728 - RNA, 19 nt, Artificial Sequence
  Description of Artificial Sequence: Synthetic oligonucleotide
  Antisense Strand to SEQ ID NO: 405727
aaucagcucaguaauugcc

SEQ ID NO: 405729 - RNA, 19 nt, Artificial Sequence
  Description of Artificial Sequence: Synthetic oligonucleotide
  Sense Strand Starting at position 1109 of SEQ ID NO: 315998
ggaggaggucccuggaauu

SEQ ID NO: 405730 - RNA, 19 nt, Artificial Sequence
  Description of Artificial Sequence: Synthetic oligonucleotide
  Antisense Strand to SEQ ID NO: 405729
aauuccagggaccuccucc

SEQ ID NO: 405731 - RNA, 19 nt, Artificial Sequence
  Description of Artificial Sequence: Synthetic oligonucleotide
  Sense Strand Starting at position 1109 of SEQ ID NO: 316048
acgagaaucuccuacucaa

SEQ ID NO: 405732 - RNA, 19 nt, Artificial Sequence
  Description of Artificial Sequence: Synthetic oligonucleotide
  Antisense Strand to SEQ ID NO: 405731
uugaguaggagauucucgu

SEQ ID NO: 405733 - RNA, 19 nt, Artificial Sequence
  Description of Artificial Sequence: Synthetic oligonucleotide
  Sense Strand Starting at position 1109 of SEQ ID NO: 317839
ggcuguuaugaagauccaa

SEQ ID NO: 405734 - RNA, 19 nt, Artificial Sequence
  Description of Artificial Sequence: Synthetic oligonucleotide
  Antisense Strand to SEQ ID NO: 405733
uuggaucuucauaacagcc

SEQ ID NO: 405735 - RNA, 19 nt, Artificial Sequence
  Description of Artificial Sequence: Synthetic oligonucleotide
  Sense Strand Starting at position 1109 of SEQ ID NO: 317857
agguuaacagcguagagaa

SEQ ID NO: 405736 - RNA, 19 nt, Artificial Sequence
  Description of Artificial Sequence: Synthetic oligonucleotide
  Antisense Strand to SEQ ID NO: 405735
uucucuacgcuguuaaccu

SEQ ID NO: 405737 - RNA, 19 nt, Artificial Sequence
  Description of Artificial Sequence: Synthetic oligonucleotide
  Sense Strand Starting at position 1109 of SEQ ID NO: 317915
gucagcuaaugugacuauu

SEQ ID NO: 405738 - RNA, 19 nt, Artificial Sequence
  Description of Artificial Sequence: Synthetic oligonucleotide
  Antisense Strand to SEQ ID NO: 405737
aauagucacauuagcugac

SEQ ID NO: 405739 - RNA, 19 nt, Artificial Sequence
  Description of Artificial Sequence: Synthetic oligonucleotide
  Sense Strand Starting at position 1109 of SEQ ID NO: 317955
ugccauuauucuuguccuu

SEQ ID NO: 405740 - RNA, 19 nt, Artificial Sequence
  Description of Artificial Sequence: Synthetic oligonucleotide
  Antisense Strand to SEQ ID NO: 405739
aaggacaagaauaauggca

SEQ ID NO: 405741 - RNA, 19 nt, Artificial Sequence
  Description of Artificial Sequence: Synthetic oligonucleotide
  Sense Strand Starting at position 1109 of SEQ ID NO: 317966
uuguccuuauuugaaugaa

SEQ ID NO: 405742 - RNA, 19 nt, Artificial Sequence
  Description of Artificial Sequence: Synthetic oligonucleotide
  Antisense Strand to SEQ ID NO: 405741
uucauucaaauaaggacaa

SEQ ID NO: 405743 - RNA, 19 nt, Artificial Sequence
  Description of Artificial Sequence: Synthetic oligonucleotide
  Sense Strand Starting at position 1109 of SEQ ID NO: 318122
agccgauccuuccaccauu

SEQ ID NO: 405744 - RNA, 19 nt, Artificial Sequence
  Description of Artificial Sequence: Synthetic oligonucleotide
  Antisense Strand to SEQ ID NO: 405743
aaugguggaaggaucggcu

SEQ ID NO: 405745 - RNA, 19 nt, Artificial Sequence
  Description of Artificial Sequence: Synthetic oligonucleotide
  Sense Strand Starting at position 1109 of SEQ ID NO: 318832
ugagcacucuccuuugagu

SEQ ID NO: 405746 - RNA, 19 nt, Artificial Sequence
  Description of Artificial Sequence: Synthetic oligonucleotide
  Antisense Strand to SEQ ID NO: 405745
acucaaaggagagugcuca

SEQ ID NO: 405747 - RNA, 19 nt, Artificial Sequence
  Description of Artificial Sequence: Synthetic oligonucleotide
  Sense Strand Starting at position 1109 of SEQ ID NO: 318936
cuaugagguucccucauga

SEQ ID NO: 405748 - RNA, 19 nt, Artificial Sequence
  Description of Artificial Sequence: Synthetic oligonucleotide
  Antisense Strand to SEQ ID NO: 405747
ucaugagggaaccucauag

SEQ ID NO: 405749 - RNA, 19 nt, Artificial Sequence
  Description of Artificial Sequence: Synthetic oligonucleotide
  Sense Strand Starting at position 1109 of SEQ ID NO: 318940
gagguucccucaugaacug

SEQ ID NO: 405750 - RNA, 19 nt, Artificial Sequence
  Description of Artificial Sequence: Synthetic oligonucleotide
  Antisense Strand to SEQ ID NO: 405749
caguucaugagggaaccuc

SEQ ID NO: 405751 - RNA, 19 nt, Artificial Sequence
  Description of Artificial Sequence: Synthetic oligonucleotide
  Sense Strand Starting at position 1109 of SEQ ID NO: 318997
gugcauguguggucgcaca

SEQ ID NO: 405752 - RNA, 19 nt, Artificial Sequence
  Description of Artificial Sequence: Synthetic oligonucleotide
  Antisense Strand to SEQ ID NO: 405751
ugugcgaccacacaugcac

SEQ ID NO: 405753 - RNA, 19 nt, Artificial Sequence
  Description of Artificial Sequence: Synthetic oligonucleotide
  Sense Strand Starting at position 1109 of SEQ ID NO: 319061
ggacuccaggauugaaguu

SEQ ID NO: 405754 - RNA, 19 nt, Artificial Sequence
  Description of Artificial Sequence: Synthetic oligonucleotide
  Antisense Strand to SEQ ID NO: 405753
aacuucaauccuggagucc

SEQ ID NO: 405755 - RNA, 19 nt, Artificial Sequence
  Description of Artificial Sequence: Synthetic oligonucleotide
  Sense Strand Starting at position 1109 of SEQ ID NO: 319132
ggaagcaaguucuagcaga

SEQ ID NO: 405756 - RNA, 19 nt, Artificial Sequence
  Description of Artificial Sequence: Synthetic oligonucleotide
  Antisense Strand to SEQ ID NO: 405755
ucugcuagaacuugcuucc

SEQ ID NO: 405757 - RNA, 19 nt, Artificial Sequence
  Description of Artificial Sequence: Synthetic oligonucleotide
  Sense Strand Starting at position 1109 of SEQ ID NO: 319169
gccugagagcaagguuguu

SEQ ID NO: 405758 - RNA, 19 nt, Artificial Sequence
  Description of Artificial Sequence: Synthetic oligonucleotide
  Antisense Strand to SEQ ID NO: 405757
aacaaccuugcucucaggc

SEQ ID NO: 405759 - RNA, 19 nt, Artificial Sequence
  Description of Artificial Sequence: Synthetic oligonucleotide
  Sense Strand Starting at position 1110 of SEQ ID NO: 315395
gcugcuuagcgaucuuuau

SEQ ID NO: 405760 - RNA, 19 nt, Artificial Sequence
  Description of Artificial Sequence: Synthetic oligonucleotide
  Antisense Strand to SEQ ID NO: 405759
auaaagaucgcuaagcagc

SEQ ID NO: 405761 - RNA, 19 nt, Artificial Sequence
  Description of Artificial Sequence: Synthetic oligonucleotide
  Sense Strand Starting at position 1110 of SEQ ID NO: 315401
uagcgaucuuuaucuagag

SEQ ID NO: 405762 - RNA, 19 nt, Artificial Sequence
  Description of Artificial Sequence: Synthetic oligonucleotide
  Antisense Strand to SEQ ID NO: 405761
cucuagauaaagaucgcua

SEQ ID NO: 405763 - RNA, 19 nt, Artificial Sequence
  Description of Artificial Sequence: Synthetic oligonucleotide
  Sense Strand Starting at position 1110 of SEQ ID NO: 315405
gaucuuuaucuagagcaug

SEQ ID NO: 405764 - RNA, 19 nt, Artificial Sequence
  Description of Artificial Sequence: Synthetic oligonucleotide
  Antisense Strand to SEQ ID NO: 405763
caugcucuagauaaagauc

SEQ ID NO: 405765 - RNA, 19 nt, Artificial Sequence
  Description of Artificial Sequence: Synthetic oligonucleotide
  Sense Strand Starting at position 1110 of SEQ ID NO: 315408
cuuuaucuagagcauguaa

SEQ ID NO: 405766 - RNA, 19 nt, Artificial Sequence
  Description of Artificial Sequence: Synthetic oligonucleotide
  Antisense Strand to SEQ ID NO: 405765
uuacaugcucuagauaaag

SEQ ID NO: 405767 - RNA, 19 nt, Artificial Sequence
  Description of Artificial Sequence: Synthetic oligonucleotide
  Sense Strand Starting at position 1110 of SEQ ID NO: 315508
auucucugauuccugaaag

SEQ ID NO: 405768 - RNA, 19 nt, Artificial Sequence
  Description of Artificial Sequence: Synthetic oligonucleotide
  Antisense Strand to SEQ ID NO: 405767
cuuucaggaaucagagaau

SEQ ID NO: 405769 - RNA, 19 nt, Artificial Sequence
  Description of Artificial Sequence: Synthetic oligonucleotide
  Sense Strand Starting at position 1110 of SEQ ID NO: 315621
gaggaagcucccgaaguua

SEQ ID NO: 405770 - RNA, 19 nt, Artificial Sequence
  Description of Artificial Sequence: Synthetic oligonucleotide
  Antisense Strand to SEQ ID NO: 405769
uaacuucgggagcuuccuc

SEQ ID NO: 405771 - RNA, 19 nt, Artificial Sequence
  Description of Artificial Sequence: Synthetic oligonucleotide
  Sense Strand Starting at position 1110 of SEQ ID NO: 315782
cuuagaacccuuuaggguu

SEQ ID NO: 405772 - RNA, 19 nt, Artificial Sequence
  Description of Artificial Sequence: Synthetic oligonucleotide
  Antisense Strand to SEQ ID NO: 405771
aacccuaaaggguucuaag

SEQ ID NO: 405773 - RNA, 19 nt, Artificial Sequence
  Description of Artificial Sequence: Synthetic oligonucleotide
  Sense Strand Starting at position 1110 of SEQ ID NO: 316314
gugcuuuggaaugggagaa

SEQ ID NO: 405774 - RNA, 19 nt, Artificial Sequence
  Description of Artificial Sequence: Synthetic oligonucleotide
  Antisense Strand to SEQ ID NO: 405773
uucucccauuccaaagcac

SEQ ID NO: 405775 - RNA, 19 nt, Artificial Sequence
  Description of Artificial Sequence: Synthetic oligonucleotide
  Sense Strand Starting at position 1110 of SEQ ID NO: 317643
ggagccuucguugcucuua

SEQ ID NO: 405776 - RNA, 19 nt, Artificial Sequence
  Description of Artificial Sequence: Synthetic oligonucleotide
  Antisense Strand to SEQ ID NO: 405775
uaagagcaacgaaggcucc

SEQ ID NO: 405777 - RNA, 19 nt, Artificial Sequence
  Description of Artificial Sequence: Synthetic oligonucleotide
  Sense Strand Starting at position 1110 of SEQ ID NO: 317707
guugauuucuccucuccuc

SEQ ID NO: 405778 - RNA, 19 nt, Artificial Sequence
  Description of Artificial Sequence: Synthetic oligonucleotide
  Antisense Strand to SEQ ID NO: 405777
gaggagaggagaaaucaac

SEQ ID NO: 405779 - RNA, 19 nt, Artificial Sequence
  Description of Artificial Sequence: Synthetic oligonucleotide
  Sense Strand Starting at position 1110 of SEQ ID NO: 317783
aacaucuuaugggugcaaa

SEQ ID NO: 405780 - RNA, 19 nt, Artificial Sequence
  Description of Artificial Sequence: Synthetic oligonucleotide
  Antisense Strand to SEQ ID NO: 405779
uuugcacccauaagauguu

SEQ ID NO: 405781 - RNA, 19 nt, Artificial Sequence
  Description of Artificial Sequence: Synthetic oligonucleotide
  Sense Strand Starting at position 1110 of SEQ ID NO: 317784
acaucuuaugggugcaaag

SEQ ID NO: 405782 - RNA, 19 nt, Artificial Sequence
  Description of Artificial Sequence: Synthetic oligonucleotide
  Antisense Strand to SEQ ID NO: 405781
cuuugcacccauaagaugu

SEQ ID NO: 405783 - RNA, 19 nt, Artificial Sequence
  Description of Artificial Sequence: Synthetic oligonucleotide
  Sense Strand Starting at position 1110 of SEQ ID NO: 317786
aucuuaugggugcaaagau

SEQ ID NO: 405784 - RNA, 19 nt, Artificial Sequence
  Description of Artificial Sequence: Synthetic oligonucleotide
  Antisense Strand to SEQ ID NO: 405783
aucuuugcacccauaagau

SEQ ID NO: 405785 - RNA, 19 nt, Artificial Sequence
  Description of Artificial Sequence: Synthetic oligonucleotide
  Sense Strand Starting at position 1110 of SEQ ID NO: 317908
caguauugucaugagauug

SEQ ID NO: 405786 - RNA, 19 nt, Artificial Sequence
  Description of Artificial Sequence: Synthetic oligonucleotide
  Antisense Strand to SEQ ID NO: 405785
caaucucaugacaauacug

SEQ ID NO: 405787 - RNA, 19 nt, Artificial Sequence
  Description of Artificial Sequence: Synthetic oligonucleotide
  Sense Strand Starting at position 1110 of SEQ ID NO: 317957
ccuagaguuggacagguau

SEQ ID NO: 405788 - RNA, 19 nt, Artificial Sequence
  Description of Artificial Sequence: Synthetic oligonucleotide
  Antisense Strand to SEQ ID NO: 405787
auaccuguccaacucuagg

SEQ ID NO: 405789 - RNA, 19 nt, Artificial Sequence
  Description of Artificial Sequence: Synthetic oligonucleotide
  Sense Strand Starting at position 1110 of SEQ ID NO: 318174
cuuuaagaugaguguccua

SEQ ID NO: 405790 - RNA, 19 nt, Artificial Sequence
  Description of Artificial Sequence: Synthetic oligonucleotide
  Antisense Strand to SEQ ID NO: 405789
uaggacacucaucuuaaag

SEQ ID NO: 405791 - RNA, 19 nt, Artificial Sequence
  Description of Artificial Sequence: Synthetic oligonucleotide
  Sense Strand Starting at position 1110 of SEQ ID NO: 318177
uaagaugaguguccuagag

SEQ ID NO: 405792 - RNA, 19 nt, Artificial Sequence
  Description of Artificial Sequence: Synthetic oligonucleotide
  Antisense Strand to SEQ ID NO: 405791
cucuaggacacucaucuua

SEQ ID NO: 405793 - RNA, 19 nt, Artificial Sequence
  Description of Artificial Sequence: Synthetic oligonucleotide
  Sense Strand Starting at position 1110 of SEQ ID NO: 318287
guagacugauuuggaugaa

SEQ ID NO: 405794 - RNA, 19 nt, Artificial Sequence
  Description of Artificial Sequence: Synthetic oligonucleotide
  Antisense Strand to SEQ ID NO: 405793
uucauccaaaucagucuac

SEQ ID NO: 405795 - RNA, 19 nt, Artificial Sequence
  Description of Artificial Sequence: Synthetic oligonucleotide
  Sense Strand Starting at position 1110 of SEQ ID NO: 318299
ggaugaaaguuaucuacau

SEQ ID NO: 405796 - RNA, 19 nt, Artificial Sequence
  Description of Artificial Sequence: Synthetic oligonucleotide
  Antisense Strand to SEQ ID NO: 405795
auguagauaacuuucaucc

SEQ ID NO: 405797 - RNA, 19 nt, Artificial Sequence
  Description of Artificial Sequence: Synthetic oligonucleotide
  Sense Strand Starting at position 1110 of SEQ ID NO: 318375
ucuccuauccuuggaaaug

SEQ ID NO: 405798 - RNA, 19 nt, Artificial Sequence
  Description of Artificial Sequence: Synthetic oligonucleotide
  Antisense Strand to SEQ ID NO: 405797
cauuuccaaggauaggaga

SEQ ID NO: 405799 - RNA, 19 nt, Artificial Sequence
  Description of Artificial Sequence: Synthetic oligonucleotide
  Sense Strand Starting at position 1110 of SEQ ID NO: 318416
ggagaauacuggcugacug

SEQ ID NO: 405800 - RNA, 19 nt, Artificial Sequence
  Description of Artificial Sequence: Synthetic oligonucleotide
  Antisense Strand to SEQ ID NO: 405799
cagucagccaguauucucc

SEQ ID NO: 405801 - RNA, 19 nt, Artificial Sequence
  Description of Artificial Sequence: Synthetic oligonucleotide
  Sense Strand Starting at position 1110 of SEQ ID NO: 318417
gagaauacuggcugacuga

SEQ ID NO: 405802 - RNA, 19 nt, Artificial Sequence
  Description of Artificial Sequence: Synthetic oligonucleotide
  Antisense Strand to SEQ ID NO: 405801
ucagucagccaguauucuc

SEQ ID NO: 405803 - RNA, 19 nt, Artificial Sequence
  Description of Artificial Sequence: Synthetic oligonucleotide
  Sense Strand Starting at position 1110 of SEQ ID NO: 318490
gggcucuucccagaaaguu

SEQ ID NO: 405804 - RNA, 19 nt, Artificial Sequence
  Description of Artificial Sequence: Synthetic oligonucleotide
  Antisense Strand to SEQ ID NO: 405803
aacuuucugggaagagccc

SEQ ID NO: 405805 - RNA, 19 nt, Artificial Sequence
  Description of Artificial Sequence: Synthetic oligonucleotide
  Sense Strand Starting at position 1110 of SEQ ID NO: 318498
cccagaaaguugcuugauc

SEQ ID NO: 405806 - RNA, 19 nt, Artificial Sequence
  Description of Artificial Sequence: Synthetic oligonucleotide
  Antisense Strand to SEQ ID NO: 405805
gaucaagcaacuuucuggg

SEQ ID NO: 405807 - RNA, 19 nt, Artificial Sequence
  Description of Artificial Sequence: Synthetic oligonucleotide
  Sense Strand Starting at position 1110 of SEQ ID NO: 318499
ccagaaaguugcuugauca

SEQ ID NO: 405808 - RNA, 19 nt, Artificial Sequence
  Description of Artificial Sequence: Synthetic oligonucleotide
  Antisense Strand to SEQ ID NO: 405807
ugaucaagcaacuuucugg

SEQ ID NO: 405809 - RNA, 19 nt, Artificial Sequence
  Description of Artificial Sequence: Synthetic oligonucleotide
  Sense Strand Starting at position 1110 of SEQ ID NO: 318500
cagaaaguugcuugaucau

SEQ ID NO: 405810 - RNA, 19 nt, Artificial Sequence
  Description of Artificial Sequence: Synthetic oligonucleotide
  Antisense Strand to SEQ ID NO: 405809
augaucaagcaacuuucug

SEQ ID NO: 405811 - RNA, 19 nt, Artificial Sequence
  Description of Artificial Sequence: Synthetic oligonucleotide
  Sense Strand Starting at position 1110 of SEQ ID NO: 318512
ugaucauugccaggacagu

SEQ ID NO: 405812 - RNA, 19 nt, Artificial Sequence
  Description of Artificial Sequence: Synthetic oligonucleotide
  Antisense Strand to SEQ ID NO: 405811
acuguccuggcaaugauca

SEQ ID NO: 405813 - RNA, 19 nt, Artificial Sequence
  Description of Artificial Sequence: Synthetic oligonucleotide
  Sense Strand Starting at position 1110 of SEQ ID NO: 318525
gacagucuugguuagucca

SEQ ID NO: 405814 - RNA, 19 nt, Artificial Sequence
  Description of Artificial Sequence: Synthetic oligonucleotide
  Antisense Strand to SEQ ID NO: 405813
uggacuaaccaagacuguc

SEQ ID NO: 405815 - RNA, 19 nt, Artificial Sequence
  Description of Artificial Sequence: Synthetic oligonucleotide
  Sense Strand Starting at position 1110 of SEQ ID NO: 318574
agcaucuaagccugacaau

SEQ ID NO: 405816 - RNA, 19 nt, Artificial Sequence
  Description of Artificial Sequence: Synthetic oligonucleotide
  Antisense Strand to SEQ ID NO: 405815
auugucaggcuuagaugcu

SEQ ID NO: 405817 - RNA, 19 nt, Artificial Sequence
  Description of Artificial Sequence: Synthetic oligonucleotide
  Sense Strand Starting at position 1110 of SEQ ID NO: 318575
gcaucuaagccugacaaua

SEQ ID NO: 405818 - RNA, 19 nt, Artificial Sequence
  Description of Artificial Sequence: Synthetic oligonucleotide
  Antisense Strand to SEQ ID NO: 405817
uauugucaggcuuagaugc

SEQ ID NO: 405819 - RNA, 19 nt, Artificial Sequence
  Description of Artificial Sequence: Synthetic oligonucleotide
  Sense Strand Starting at position 1110 of SEQ ID NO: 318612
ugaguaguucugcaggaua

SEQ ID NO: 405820 - RNA, 19 nt, Artificial Sequence
  Description of Artificial Sequence: Synthetic oligonucleotide
  Antisense Strand to SEQ ID NO: 405819
uauccugcagaacuacuca

SEQ ID NO: 405821 - RNA, 19 nt, Artificial Sequence
  Description of Artificial Sequence: Synthetic oligonucleotide
  Sense Strand Starting at position 1110 of SEQ ID NO: 318617
aguucugcaggauauguua

SEQ ID NO: 405822 - RNA, 19 nt, Artificial Sequence
  Description of Artificial Sequence: Synthetic oligonucleotide
  Antisense Strand to SEQ ID NO: 405821
uaacauauccugcagaacu

SEQ ID NO: 405823 - RNA, 19 nt, Artificial Sequence
  Description of Artificial Sequence: Synthetic oligonucleotide
  Sense Strand Starting at position 1110 of SEQ ID NO: 318632
guuagaccuccugggauca

SEQ ID NO: 405824 - RNA, 19 nt, Artificial Sequence
  Description of Artificial Sequence: Synthetic oligonucleotide
  Antisense Strand to SEQ ID NO: 405823
ugaucccaggaggucuaac

SEQ ID NO: 405825 - RNA, 19 nt, Artificial Sequence
  Description of Artificial Sequence: Synthetic oligonucleotide
  Sense Strand Starting at position 1110 of SEQ ID NO: 318648
ucaccaagaagcugugaga

SEQ ID NO: 405826 - RNA, 19 nt, Artificial Sequence
  Description of Artificial Sequence: Synthetic oligonucleotide
  Antisense Strand to SEQ ID NO: 405825
ucucacagcuucuugguga

SEQ ID NO: 405827 - RNA, 19 nt, Artificial Sequence
  Description of Artificial Sequence: Synthetic oligonucleotide
  Sense Strand Starting at position 1110 of SEQ ID NO: 318655
gaagcugugagacauugua

SEQ ID NO: 405828 - RNA, 19 nt, Artificial Sequence
  Description of Artificial Sequence: Synthetic oligonucleotide
  Antisense Strand to SEQ ID NO: 405827
uacaaugucucacagcuuc

SEQ ID NO: 405829 - RNA, 19 nt, Artificial Sequence
  Description of Artificial Sequence: Synthetic oligonucleotide
  Sense Strand Starting at position 1110 of SEQ ID NO: 318815
uauauaagaugguugugau

SEQ ID NO: 405830 - RNA, 19 nt, Artificial Sequence
  Description of Artificial Sequence: Synthetic oligonucleotide
  Antisense Strand to SEQ ID NO: 405829
aucacaaccaucuuauaua

SEQ ID NO: 405831 - RNA, 19 nt, Artificial Sequence
  Description of Artificial Sequence: Synthetic oligonucleotide
  Sense Strand Starting at position 1110 of SEQ ID NO: 318816
auauaagaugguugugaug

SEQ ID NO: 405832 - RNA, 19 nt, Artificial Sequence
  Description of Artificial Sequence: Synthetic oligonucleotide
  Antisense Strand to SEQ ID NO: 405831
caucacaaccaucuuauau

SEQ ID NO: 405833 - RNA, 19 nt, Artificial Sequence
  Description of Artificial Sequence: Synthetic oligonucleotide
  Sense Strand Starting at position 1110 of SEQ ID NO: 318910
agucuauucuaguccaaau

SEQ ID NO: 405834 - RNA, 19 nt, Artificial Sequence
  Description of Artificial Sequence: Synthetic oligonucleotide
  Antisense Strand to SEQ ID NO: 405833
auuuggacuagaauagacu

SEQ ID NO: 405835 - RNA, 19 nt, Artificial Sequence
  Description of Artificial Sequence: Synthetic oligonucleotide
  Sense Strand Starting at position 1110 of SEQ ID NO: 318993
ugguguguugcucuaaguc

SEQ ID NO: 405836 - RNA, 19 nt, Artificial Sequence
  Description of Artificial Sequence: Synthetic oligonucleotide
  Antisense Strand to SEQ ID NO: 405835
gacuuagagcaacacacca

SEQ ID NO: 405837 - RNA, 19 nt, Artificial Sequence
  Description of Artificial Sequence: Synthetic oligonucleotide
  Sense Strand Starting at position 1110 of SEQ ID NO: 319045
auuggagaacugcauucuu

SEQ ID NO: 405838 - RNA, 19 nt, Artificial Sequence
  Description of Artificial Sequence: Synthetic oligonucleotide
  Antisense Strand to SEQ ID NO: 405837
aagaaugcaguucuccaau

SEQ ID NO: 405839 - RNA, 19 nt, Artificial Sequence
  Description of Artificial Sequence: Synthetic oligonucleotide
  Sense Strand Starting at position 1111 of SEQ ID NO: 315257
cguuaagacccucaauacu

SEQ ID NO: 405840 - RNA, 19 nt, Artificial Sequence
  Description of Artificial Sequence: Synthetic oligonucleotide
  Antisense Strand to SEQ ID NO: 405839
aguauugagggucuuaacg

SEQ ID NO: 405841 - RNA, 19 nt, Artificial Sequence
  Description of Artificial Sequence: Synthetic oligonucleotide
  Sense Strand Starting at position 1111 of SEQ ID NO: 315266
ccucaauacuggcugggaa

SEQ ID NO: 405842 - RNA, 19 nt, Artificial Sequence
  Description of Artificial Sequence: Synthetic oligonucleotide
  Antisense Strand to SEQ ID NO: 405841
uucccagccaguauugagg

SEQ ID NO: 405843 - RNA, 19 nt, Artificial Sequence
  Description of Artificial Sequence: Synthetic oligonucleotide
  Sense Strand Starting at position 1111 of SEQ ID NO: 315267
cucaauacuggcugggaau

SEQ ID NO: 405844 - RNA, 19 nt, Artificial Sequence
  Description of Artificial Sequence: Synthetic oligonucleotide
  Antisense Strand to SEQ ID NO: 405843
auucccagccaguauugag

SEQ ID NO: 405845 - RNA, 19 nt, Artificial Sequence
  Description of Artificial Sequence: Synthetic oligonucleotide
  Sense Strand Starting at position 1111 of SEQ ID NO: 315330
aguggaucucuuuaggcca

SEQ ID NO: 405846 - RNA, 19 nt, Artificial Sequence
  Description of Artificial Sequence: Synthetic oligonucleotide
  Antisense Strand to SEQ ID NO: 405845
uggccuaaagagauccacu

SEQ ID NO: 405847 - RNA, 19 nt, Artificial Sequence
  Description of Artificial Sequence: Synthetic oligonucleotide
  Sense Strand Starting at position 1111 of SEQ ID NO: 315448
uugcauuuggguuauguuu

SEQ ID NO: 405848 - RNA, 19 nt, Artificial Sequence
  Description of Artificial Sequence: Synthetic oligonucleotide
  Antisense Strand to SEQ ID NO: 405847
aaacauaacccaaaugcaa

SEQ ID NO: 405849 - RNA, 19 nt, Artificial Sequence
  Description of Artificial Sequence: Synthetic oligonucleotide
  Sense Strand Starting at position 1111 of SEQ ID NO: 315696
ccuccugagccugaaacuu

SEQ ID NO: 405850 - RNA, 19 nt, Artificial Sequence
  Description of Artificial Sequence: Synthetic oligonucleotide
  Antisense Strand to SEQ ID NO: 405849
aaguuucaggcucaggagg

SEQ ID NO: 405851 - RNA, 19 nt, Artificial Sequence
  Description of Artificial Sequence: Synthetic oligonucleotide
  Sense Strand Starting at position 1111 of SEQ ID NO: 315741
gugggauccacuuaaggcu

SEQ ID NO: 405852 - RNA, 19 nt, Artificial Sequence
  Description of Artificial Sequence: Synthetic oligonucleotide
  Antisense Strand to SEQ ID NO: 405851
agccuuaaguggaucccac

SEQ ID NO: 405853 - RNA, 19 nt, Artificial Sequence
  Description of Artificial Sequence: Synthetic oligonucleotide
  Sense Strand Starting at position 1111 of SEQ ID NO: 315748
ccacuuaaggcuuaggauu

SEQ ID NO: 405854 - RNA, 19 nt, Artificial Sequence
  Description of Artificial Sequence: Synthetic oligonucleotide
  Antisense Strand to SEQ ID NO: 405853
aauccuaagccuuaagugg

SEQ ID NO: 405855 - RNA, 19 nt, Artificial Sequence
  Description of Artificial Sequence: Synthetic oligonucleotide
  Sense Strand Starting at position 1111 of SEQ ID NO: 315838
auugaucuguacccugaau

SEQ ID NO: 405856 - RNA, 19 nt, Artificial Sequence
  Description of Artificial Sequence: Synthetic oligonucleotide
  Antisense Strand to SEQ ID NO: 405855
auucaggguacagaucaau

SEQ ID NO: 405857 - RNA, 19 nt, Artificial Sequence
  Description of Artificial Sequence: Synthetic oligonucleotide
  Sense Strand Starting at position 1111 of SEQ ID NO: 315978
ccauuaucaggcugagaua

SEQ ID NO: 405858 - RNA, 19 nt, Artificial Sequence
  Description of Artificial Sequence: Synthetic oligonucleotide
  Antisense Strand to SEQ ID NO: 405857
uaucucagccugauaaugg

SEQ ID NO: 405859 - RNA, 19 nt, Artificial Sequence
  Description of Artificial Sequence: Synthetic oligonucleotide
  Sense Strand Starting at position 1111 of SEQ ID NO: 315992
agauaagagcagugaagua

SEQ ID NO: 405860 - RNA, 19 nt, Artificial Sequence
  Description of Artificial Sequence: Synthetic oligonucleotide
  Antisense Strand to SEQ ID NO: 405859
uacuucacugcucuuaucu

SEQ ID NO: 405861 - RNA, 19 nt, Artificial Sequence
  Description of Artificial Sequence: Synthetic oligonucleotide
  Sense Strand Starting at position 1111 of SEQ ID NO: 316078
gacagauaaucucugucag

SEQ ID NO: 405862 - RNA, 19 nt, Artificial Sequence
  Description of Artificial Sequence: Synthetic oligonucleotide
  Antisense Strand to SEQ ID NO: 405861
cugacagagauuaucuguc

SEQ ID NO: 405863 - RNA, 19 nt, Artificial Sequence
  Description of Artificial Sequence: Synthetic oligonucleotide
  Sense Strand Starting at position 1111 of SEQ ID NO: 316129
guaaguugcccagaaagag

SEQ ID NO: 405864 - RNA, 19 nt, Artificial Sequence
  Description of Artificial Sequence: Synthetic oligonucleotide
  Antisense Strand to SEQ ID NO: 405863
cucuuucugggcaacuuac

SEQ ID NO: 405865 - RNA, 19 nt, Artificial Sequence
  Description of Artificial Sequence: Synthetic oligonucleotide
  Sense Strand Starting at position 1111 of SEQ ID NO: 316329
aagacacuguucguauaaa

SEQ ID NO: 405866 - RNA, 19 nt, Artificial Sequence
  Description of Artificial Sequence: Synthetic oligonucleotide
  Antisense Strand to SEQ ID NO: 405865
uuuauacgaacagugucuu

SEQ ID NO: 405867 - RNA, 19 nt, Artificial Sequence
  Description of Artificial Sequence: Synthetic oligonucleotide
  Sense Strand Starting at position 1111 of SEQ ID NO: 316618
gcauuaugugccgugugag

SEQ ID NO: 405868 - RNA, 19 nt, Artificial Sequence
  Description of Artificial Sequence: Synthetic oligonucleotide
  Antisense Strand to SEQ ID NO: 405867
cucacacggcacauaaugc

SEQ ID NO: 405869 - RNA, 19 nt, Artificial Sequence
  Description of Artificial Sequence: Synthetic oligonucleotide
  Sense Strand Starting at position 1111 of SEQ ID NO: 316635
agaacaugacugugacauu

SEQ ID NO: 405870 - RNA, 19 nt, Artificial Sequence
  Description of Artificial Sequence: Synthetic oligonucleotide
  Antisense Strand to SEQ ID NO: 405869
aaugucacagucauguucu

SEQ ID NO: 405871 - RNA, 19 nt, Artificial Sequence
  Description of Artificial Sequence: Synthetic oligonucleotide
  Sense Strand Starting at position 1111 of SEQ ID NO: 316636
gaacaugacugugacauuu

SEQ ID NO: 405872 - RNA, 19 nt, Artificial Sequence
  Description of Artificial Sequence: Synthetic oligonucleotide
  Antisense Strand to SEQ ID NO: 405871
aaaugucacagucauguuc

SEQ ID NO: 405873 - RNA, 19 nt, Artificial Sequence
  Description of Artificial Sequence: Synthetic oligonucleotide
  Sense Strand Starting at position 1111 of SEQ ID NO: 316688
cuguaaagagauuagcauu

SEQ ID NO: 405874 - RNA, 19 nt, Artificial Sequence
  Description of Artificial Sequence: Synthetic oligonucleotide
  Antisense Strand to SEQ ID NO: 405873
aaugcuaaucucuuuacag

SEQ ID NO: 405875 - RNA, 19 nt, Artificial Sequence
  Description of Artificial Sequence: Synthetic oligonucleotide
  Sense Strand Starting at position 1111 of SEQ ID NO: 317000
ugacauaacccuugacugu

SEQ ID NO: 405876 - RNA, 19 nt, Artificial Sequence
  Description of Artificial Sequence: Synthetic oligonucleotide
  Antisense Strand to SEQ ID NO: 405875
acagucaaggguuauguca

SEQ ID NO: 405877 - RNA, 19 nt, Artificial Sequence
  Description of Artificial Sequence: Synthetic oligonucleotide
  Sense Strand Starting at position 1111 of SEQ ID NO: 317099
gucugacugccugagaauu

SEQ ID NO: 405878 - RNA, 19 nt, Artificial Sequence
  Description of Artificial Sequence: Synthetic oligonucleotide
  Antisense Strand to SEQ ID NO: 405877
aauucucaggcagucagac

SEQ ID NO: 405879 - RNA, 19 nt, Artificial Sequence
  Description of Artificial Sequence: Synthetic oligonucleotide
  Sense Strand Starting at position 1111 of SEQ ID NO: 317268
ucuuaaugucuuuaaguga

SEQ ID NO: 405880 - RNA, 19 nt, Artificial Sequence
  Description of Artificial Sequence: Synthetic oligonucleotide
  Antisense Strand to SEQ ID NO: 405879
ucacuuaaagacauuaaga

SEQ ID NO: 405881 - RNA, 19 nt, Artificial Sequence
  Description of Artificial Sequence: Synthetic oligonucleotide
  Sense Strand Starting at position 1111 of SEQ ID NO: 317314
uggacaaaucugcaagcaa

SEQ ID NO: 405882 - RNA, 19 nt, Artificial Sequence
  Description of Artificial Sequence: Synthetic oligonucleotide
  Antisense Strand to SEQ ID NO: 405881
uugcuugcagauuugucca

SEQ ID NO: 405883 - RNA, 19 nt, Artificial Sequence
  Description of Artificial Sequence: Synthetic oligonucleotide
  Sense Strand Starting at position 1111 of SEQ ID NO: 317336
ugcuaagaucuugaaucac

SEQ ID NO: 405884 - RNA, 19 nt, Artificial Sequence
  Description of Artificial Sequence: Synthetic oligonucleotide
  Antisense Strand to SEQ ID NO: 405883
gugauucaagaucuuagca

SEQ ID NO: 405885 - RNA, 19 nt, Artificial Sequence
  Description of Artificial Sequence: Synthetic oligonucleotide
  Sense Strand Starting at position 1111 of SEQ ID NO: 317567
cuaaauggaucagcauauu

SEQ ID NO: 405886 - RNA, 19 nt, Artificial Sequence
  Description of Artificial Sequence: Synthetic oligonucleotide
  Antisense Strand to SEQ ID NO: 405885
aauaugcugauccauuuag

SEQ ID NO: 405887 - RNA, 19 nt, Artificial Sequence
  Description of Artificial Sequence: Synthetic oligonucleotide
  Sense Strand Starting at position 1111 of SEQ ID NO: 317641
aguaucucacaaugggauu

SEQ ID NO: 405888 - RNA, 19 nt, Artificial Sequence
  Description of Artificial Sequence: Synthetic oligonucleotide
  Antisense Strand to SEQ ID NO: 405887
aaucccauugugagauacu

SEQ ID NO: 405889 - RNA, 19 nt, Artificial Sequence
  Description of Artificial Sequence: Synthetic oligonucleotide
  Sense Strand Starting at position 1111 of SEQ ID NO: 317707
augacuguacauugguuaa

SEQ ID NO: 405890 - RNA, 19 nt, Artificial Sequence
  Description of Artificial Sequence: Synthetic oligonucleotide
  Antisense Strand to SEQ ID NO: 405889
uuaaccaauguacagucau

SEQ ID NO: 405891 - RNA, 19 nt, Artificial Sequence
  Description of Artificial Sequence: Synthetic oligonucleotide
  Sense Strand Starting at position 1111 of SEQ ID NO: 317711
cuguacauugguuaagcaa

SEQ ID NO: 405892 - RNA, 19 nt, Artificial Sequence
  Description of Artificial Sequence: Synthetic oligonucleotide
  Antisense Strand to SEQ ID NO: 405891
uugcuuaaccaauguacag

SEQ ID NO: 405893 - RNA, 19 nt, Artificial Sequence
  Description of Artificial Sequence: Synthetic oligonucleotide
  Sense Strand Starting at position 1111 of SEQ ID NO: 317809
ggcuuuauauaauugauag

SEQ ID NO: 405894 - RNA, 19 nt, Artificial Sequence
  Description of Artificial Sequence: Synthetic oligonucleotide
  Antisense Strand to SEQ ID NO: 405893
cuaucaauuauauaaagcc

SEQ ID NO: 405895 - RNA, 19 nt, Artificial Sequence
  Description of Artificial Sequence: Synthetic oligonucleotide
  Sense Strand Starting at position 1111 of SEQ ID NO: 317816
uauaauugauaguugcaga

SEQ ID NO: 405896 - RNA, 19 nt, Artificial Sequence
  Description of Artificial Sequence: Synthetic oligonucleotide
  Antisense Strand to SEQ ID NO: 405895
ucugcaacuaucaauuaua

SEQ ID NO: 405897 - RNA, 19 nt, Artificial Sequence
  Description of Artificial Sequence: Synthetic oligonucleotide
  Sense Strand Starting at position 1111 of SEQ ID NO: 318118
aauguugcucacugagaaa

SEQ ID NO: 405898 - RNA, 19 nt, Artificial Sequence
  Description of Artificial Sequence: Synthetic oligonucleotide
  Antisense Strand to SEQ ID NO: 405897
uuucucagugagcaacauu

SEQ ID NO: 405899 - RNA, 19 nt, Artificial Sequence
  Description of Artificial Sequence: Synthetic oligonucleotide
  Sense Strand Starting at position 1111 of SEQ ID NO: 318137
ugguucugccaccagaaau

SEQ ID NO: 405900 - RNA, 19 nt, Artificial Sequence
  Description of Artificial Sequence: Synthetic oligonucleotide
  Antisense Strand to SEQ ID NO: 405899
auuucugguggcagaacca

SEQ ID NO: 405901 - RNA, 19 nt, Artificial Sequence
  Description of Artificial Sequence: Synthetic oligonucleotide
  Sense Strand Starting at position 1111 of SEQ ID NO: 318270
agauaauaccauggguucu

SEQ ID NO: 405902 - RNA, 19 nt, Artificial Sequence
  Description of Artificial Sequence: Synthetic oligonucleotide
  Antisense Strand to SEQ ID NO: 405901
agaacccaugguauuaucu

SEQ ID NO: 405903 - RNA, 19 nt, Artificial Sequence
  Description of Artificial Sequence: Synthetic oligonucleotide
  Sense Strand Starting at position 1111 of SEQ ID NO: 318553
aaaggucaagcauguaaua

SEQ ID NO: 405904 - RNA, 19 nt, Artificial Sequence
  Description of Artificial Sequence: Synthetic oligonucleotide
  Antisense Strand to SEQ ID NO: 405903
uauuacaugcuugaccuuu

SEQ ID NO: 405905 - RNA, 19 nt, Artificial Sequence
  Description of Artificial Sequence: Synthetic oligonucleotide
  Sense Strand Starting at position 1111 of SEQ ID NO: 318688
uuauuuccucucugaguuu

SEQ ID NO: 405906 - RNA, 19 nt, Artificial Sequence
  Description of Artificial Sequence: Synthetic oligonucleotide
  Antisense Strand to SEQ ID NO: 405905
aaacucagagaggaaauaa

SEQ ID NO: 405907 - RNA, 19 nt, Artificial Sequence
  Description of Artificial Sequence: Synthetic oligonucleotide
  Sense Strand Starting at position 1111 of SEQ ID NO: 318767
gcaggaauaucugugauga

SEQ ID NO: 405908 - RNA, 19 nt, Artificial Sequence
  Description of Artificial Sequence: Synthetic oligonucleotide
  Antisense Strand to SEQ ID NO: 405907
ucaucacagauauuccugc

SEQ ID NO: 405909 - RNA, 19 nt, Artificial Sequence
  Description of Artificial Sequence: Synthetic oligonucleotide
  Sense Strand Starting at position 1111 of SEQ ID NO: 318768
caggaauaucugugaugac

SEQ ID NO: 405910 - RNA, 19 nt, Artificial Sequence
  Description of Artificial Sequence: Synthetic oligonucleotide
  Antisense Strand to SEQ ID NO: 405909
gucaucacagauauuccug

SEQ ID NO: 405911 - RNA, 19 nt, Artificial Sequence
  Description of Artificial Sequence: Synthetic oligonucleotide
  Sense Strand Starting at position 1111 of SEQ ID NO: 318853
agguucuaccuuuaugauu

SEQ ID NO: 405912 - RNA, 19 nt, Artificial Sequence
  Description of Artificial Sequence: Synthetic oligonucleotide
  Antisense Strand to SEQ ID NO: 405911
aaucauaaagguagaaccu

SEQ ID NO: 405913 - RNA, 19 nt, Artificial Sequence
  Description of Artificial Sequence: Synthetic oligonucleotide
  Sense Strand Starting at position 1111 of SEQ ID NO: 318893
cgaguugucagauauacaa

SEQ ID NO: 405914 - RNA, 19 nt, Artificial Sequence
  Description of Artificial Sequence: Synthetic oligonucleotide
  Antisense Strand to SEQ ID NO: 405913
uuguauaucugacaacucg

SEQ ID NO: 405915 - RNA, 19 nt, Artificial Sequence
  Description of Artificial Sequence: Synthetic oligonucleotide
  Sense Strand Starting at position 1111 of SEQ ID NO: 319007
auaaacauucucugguuga

SEQ ID NO: 405916 - RNA, 19 nt, Artificial Sequence
  Description of Artificial Sequence: Synthetic oligonucleotide
  Antisense Strand to SEQ ID NO: 405915
ucaaccagagaauguuuau

SEQ ID NO: 405917 - RNA, 19 nt, Artificial Sequence
  Description of Artificial Sequence: Synthetic oligonucleotide
  Sense Strand Starting at position 1111 of SEQ ID NO: 319133
guuugaugucaacacauuc

SEQ ID NO: 405918 - RNA, 19 nt, Artificial Sequence
  Description of Artificial Sequence: Synthetic oligonucleotide
  Antisense Strand to SEQ ID NO: 405917
gaauguguugacaucaaac

SEQ ID NO: 405919 - RNA, 19 nt, Artificial Sequence
  Description of Artificial Sequence: Synthetic oligonucleotide
  Sense Strand Starting at position 1112 of SEQ ID NO: 315506
auguuaaauguauggguaa

SEQ ID NO: 405920 - RNA, 19 nt, Artificial Sequence
  Description of Artificial Sequence: Synthetic oligonucleotide
  Antisense Strand to SEQ ID NO: 405919
uuacccauacauuuaacau

SEQ ID NO: 405921 - RNA, 19 nt, Artificial Sequence
  Description of Artificial Sequence: Synthetic oligonucleotide
  Sense Strand Starting at position 1112 of SEQ ID NO: 315509
uuaaauguauggguaagga

SEQ ID NO: 405922 - RNA, 19 nt, Artificial Sequence
  Description of Artificial Sequence: Synthetic oligonucleotide
  Antisense Strand to SEQ ID NO: 405921
uccuuacccauacauuuaa

SEQ ID NO: 405923 - RNA, 19 nt, Artificial Sequence
  Description of Artificial Sequence: Synthetic oligonucleotide
  Sense Strand Starting at position 1112 of SEQ ID NO: 315959
auagguccucugcauuaau

SEQ ID NO: 405924 - RNA, 19 nt, Artificial Sequence
  Description of Artificial Sequence: Synthetic oligonucleotide
  Antisense Strand to SEQ ID NO: 405923
auuaaugcagaggaccuau

SEQ ID NO: 405925 - RNA, 19 nt, Artificial Sequence
  Description of Artificial Sequence: Synthetic oligonucleotide
  Sense Strand Starting at position 1112 of SEQ ID NO: 316379
ugaauuuguccuugucagu

SEQ ID NO: 405926 - RNA, 19 nt, Artificial Sequence
  Description of Artificial Sequence: Synthetic oligonucleotide
  Antisense Strand to SEQ ID NO: 405925
acugacaaggacaaauuca

SEQ ID NO: 405927 - RNA, 19 nt, Artificial Sequence
  Description of Artificial Sequence: Synthetic oligonucleotide
  Sense Strand Starting at position 1112 of SEQ ID NO: 316396
gucagccagcauugagaaa

SEQ ID NO: 405928 - RNA, 19 nt, Artificial Sequence
  Description of Artificial Sequence: Synthetic oligonucleotide
  Antisense Strand to SEQ ID NO: 405927
uuucucaaugcuggcugac

SEQ ID NO: 405929 - RNA, 19 nt, Artificial Sequence
  Description of Artificial Sequence: Synthetic oligonucleotide
  Sense Strand Starting at position 1112 of SEQ ID NO: 316420
ucucaugaaccguaaguca

SEQ ID NO: 405930 - RNA, 19 nt, Artificial Sequence
  Description of Artificial Sequence: Synthetic oligonucleotide
  Antisense Strand to SEQ ID NO: 405929
ugacuuacgguucaugaga

SEQ ID NO: 405931 - RNA, 19 nt, Artificial Sequence
  Description of Artificial Sequence: Synthetic oligonucleotide
  Sense Strand Starting at position 1112 of SEQ ID NO: 316539
gugggaucucaguaaucuu

SEQ ID NO: 405932 - RNA, 19 nt, Artificial Sequence
  Description of Artificial Sequence: Synthetic oligonucleotide
  Antisense Strand to SEQ ID NO: 405931
aagauuacugagaucccac

SEQ ID NO: 405933 - RNA, 19 nt, Artificial Sequence
  Description of Artificial Sequence: Synthetic oligonucleotide
  Sense Strand Starting at position 1112 of SEQ ID NO: 316610
uggauugucuccuuaguaa

SEQ ID NO: 405934 - RNA, 19 nt, Artificial Sequence
  Description of Artificial Sequence: Synthetic oligonucleotide
  Antisense Strand to SEQ ID NO: 405933
uuacuaaggagacaaucca

SEQ ID NO: 405935 - RNA, 19 nt, Artificial Sequence
  Description of Artificial Sequence: Synthetic oligonucleotide
  Sense Strand Starting at position 1112 of SEQ ID NO: 316613
auugucuccuuaguaaacu

SEQ ID NO: 405936 - RNA, 19 nt, Artificial Sequence
  Description of Artificial Sequence: Synthetic oligonucleotide
  Antisense Strand to SEQ ID NO: 405935
aguuuacuaaggagacaau

SEQ ID NO: 405937 - RNA, 19 nt, Artificial Sequence
  Description of Artificial Sequence: Synthetic oligonucleotide
  Sense Strand Starting at position 1112 of SEQ ID NO: 316911
gcuagcugaucuuugggaa

SEQ ID NO: 405938 - RNA, 19 nt, Artificial Sequence
  Description of Artificial Sequence: Synthetic oligonucleotide
  Antisense Strand to SEQ ID NO: 405937
uucccaaagaucagcuagc

SEQ ID NO: 405939 - RNA, 19 nt, Artificial Sequence
  Description of Artificial Sequence: Synthetic oligonucleotide
  Sense Strand Starting at position 1112 of SEQ ID NO: 316912
cuagcugaucuuugggaaa

SEQ ID NO: 405940 - RNA, 19 nt, Artificial Sequence
  Description of Artificial Sequence: Synthetic oligonucleotide
  Antisense Strand to SEQ ID NO: 405939
uuucccaaagaucagcuag

SEQ ID NO: 405941 - RNA, 19 nt, Artificial Sequence
  Description of Artificial Sequence: Synthetic oligonucleotide
  Sense Strand Starting at position 1112 of SEQ ID NO: 316937
cauggucugccacaagaaa

SEQ ID NO: 405942 - RNA, 19 nt, Artificial Sequence
  Description of Artificial Sequence: Synthetic oligonucleotide
  Antisense Strand to SEQ ID NO: 405941
uuucuuguggcagaccaug

SEQ ID NO: 405943 - RNA, 19 nt, Artificial Sequence
  Description of Artificial Sequence: Synthetic oligonucleotide
  Sense Strand Starting at position 1112 of SEQ ID NO: 317152
ggcagcuauuucgcucaca

SEQ ID NO: 405944 - RNA, 19 nt, Artificial Sequence
  Description of Artificial Sequence: Synthetic oligonucleotide
  Antisense Strand to SEQ ID NO: 405943
ugugagcgaaauagcugcc

SEQ ID NO: 405945 - RNA, 19 nt, Artificial Sequence
  Description of Artificial Sequence: Synthetic oligonucleotide
  Sense Strand Starting at position 1112 of SEQ ID NO: 317265
uuacuugauuggcugauga

SEQ ID NO: 405946 - RNA, 19 nt, Artificial Sequence
  Description of Artificial Sequence: Synthetic oligonucleotide
  Antisense Strand to SEQ ID NO: 405945
ucaucagccaaucaaguaa

SEQ ID NO: 405947 - RNA, 19 nt, Artificial Sequence
  Description of Artificial Sequence: Synthetic oligonucleotide
  Sense Strand Starting at position 1112 of SEQ ID NO: 317279
gaugaaaugcaacgucauu

SEQ ID NO: 405948 - RNA, 19 nt, Artificial Sequence
  Description of Artificial Sequence: Synthetic oligonucleotide
  Antisense Strand to SEQ ID NO: 405947
aaugacguugcauuucauc

SEQ ID NO: 405949 - RNA, 19 nt, Artificial Sequence
  Description of Artificial Sequence: Synthetic oligonucleotide
  Sense Strand Starting at position 1112 of SEQ ID NO: 317312
caggcauuugacggcuuaa

SEQ ID NO: 405950 - RNA, 19 nt, Artificial Sequence
  Description of Artificial Sequence: Synthetic oligonucleotide
  Antisense Strand to SEQ ID NO: 405949
uuaagccgucaaaugccug

SEQ ID NO: 405951 - RNA, 19 nt, Artificial Sequence
  Description of Artificial Sequence: Synthetic oligonucleotide
  Sense Strand Starting at position 1112 of SEQ ID NO: 317385
gaaauugcgccauuguguu

SEQ ID NO: 405952 - RNA, 19 nt, Artificial Sequence
  Description of Artificial Sequence: Synthetic oligonucleotide
  Antisense Strand to SEQ ID NO: 405951
aacacaauggcgcaauuuc

SEQ ID NO: 405953 - RNA, 19 nt, Artificial Sequence
  Description of Artificial Sequence: Synthetic oligonucleotide
  Sense Strand Starting at position 1112 of SEQ ID NO: 317423
guggauuucugacaaagag

SEQ ID NO: 405954 - RNA, 19 nt, Artificial Sequence
  Description of Artificial Sequence: Synthetic oligonucleotide
  Antisense Strand to SEQ ID NO: 405953
cucuuugucagaaauccac

SEQ ID NO: 405955 - RNA, 19 nt, Artificial Sequence
  Description of Artificial Sequence: Synthetic oligonucleotide
  Sense Strand Starting at position 1112 of SEQ ID NO: 317431
cugacaaagagcuguugga

SEQ ID NO: 405956 - RNA, 19 nt, Artificial Sequence
  Description of Artificial Sequence: Synthetic oligonucleotide
  Antisense Strand to SEQ ID NO: 405955
uccaacagcucuuugucag

SEQ ID NO: 405957 - RNA, 19 nt, Artificial Sequence
  Description of Artificial Sequence: Synthetic oligonucleotide
  Sense Strand Starting at position 1112 of SEQ ID NO: 317447
ggacacugcuuucccagaa

SEQ ID NO: 405958 - RNA, 19 nt, Artificial Sequence
  Description of Artificial Sequence: Synthetic oligonucleotide
  Antisense Strand to SEQ ID NO: 405957
uucugggaaagcagugucc

SEQ ID NO: 405959 - RNA, 19 nt, Artificial Sequence
  Description of Artificial Sequence: Synthetic oligonucleotide
  Sense Strand Starting at position 1112 of SEQ ID NO: 317494
gauagugugguagagauau

SEQ ID NO: 405960 - RNA, 19 nt, Artificial Sequence
  Description of Artificial Sequence: Synthetic oligonucleotide
  Antisense Strand to SEQ ID NO: 405959
auaucucuaccacacuauc

SEQ ID NO: 405961 - RNA, 19 nt, Artificial Sequence
  Description of Artificial Sequence: Synthetic oligonucleotide
  Sense Strand Starting at position 1112 of SEQ ID NO: 317496
uagugugguagagauauga

SEQ ID NO: 405962 - RNA, 19 nt, Artificial Sequence
  Description of Artificial Sequence: Synthetic oligonucleotide
  Antisense Strand to SEQ ID NO: 405961
ucauaucucuaccacacua

SEQ ID NO: 405963 - RNA, 19 nt, Artificial Sequence
  Description of Artificial Sequence: Synthetic oligonucleotide
  Sense Strand Starting at position 1112 of SEQ ID NO: 317549
ggauauugugggcauguaa

SEQ ID NO: 405964 - RNA, 19 nt, Artificial Sequence
  Description of Artificial Sequence: Synthetic oligonucleotide
  Antisense Strand to SEQ ID NO: 405963
uuacaugcccacaauaucc

SEQ ID NO: 405965 - RNA, 19 nt, Artificial Sequence
  Description of Artificial Sequence: Synthetic oligonucleotide
  Sense Strand Starting at position 1112 of SEQ ID NO: 317604
cuggguuauaugugaggaa

SEQ ID NO: 405966 - RNA, 19 nt, Artificial Sequence
  Description of Artificial Sequence: Synthetic oligonucleotide
  Antisense Strand to SEQ ID NO: 405965
uuccucacauauaacccag

SEQ ID NO: 405967 - RNA, 19 nt, Artificial Sequence
  Description of Artificial Sequence: Synthetic oligonucleotide
  Sense Strand Starting at position 1112 of SEQ ID NO: 317808
gacccacacguuuauaagu

SEQ ID NO: 405968 - RNA, 19 nt, Artificial Sequence
  Description of Artificial Sequence: Synthetic oligonucleotide
  Antisense Strand to SEQ ID NO: 405967
acuuauaaacguguggguc

SEQ ID NO: 405969 - RNA, 19 nt, Artificial Sequence
  Description of Artificial Sequence: Synthetic oligonucleotide
  Sense Strand Starting at position 1112 of SEQ ID NO: 317813
acacguuuauaagugaaug

SEQ ID NO: 405970 - RNA, 19 nt, Artificial Sequence
  Description of Artificial Sequence: Synthetic oligonucleotide
  Antisense Strand to SEQ ID NO: 405969
cauucacuuauaaacgugu

SEQ ID NO: 405971 - RNA, 19 nt, Artificial Sequence
  Description of Artificial Sequence: Synthetic oligonucleotide
  Sense Strand Starting at position 1112 of SEQ ID NO: 317815
acguuuauaagugaauggu

SEQ ID NO: 405972 - RNA, 19 nt, Artificial Sequence
  Description of Artificial Sequence: Synthetic oligonucleotide
  Antisense Strand to SEQ ID NO: 405971
accauucacuuauaaacgu

SEQ ID NO: 405973 - RNA, 19 nt, Artificial Sequence
  Description of Artificial Sequence: Synthetic oligonucleotide
  Sense Strand Starting at position 1112 of SEQ ID NO: 317819
uuauaagugaaugguggua

SEQ ID NO: 405974 - RNA, 19 nt, Artificial Sequence
  Description of Artificial Sequence: Synthetic oligonucleotide
  Antisense Strand to SEQ ID NO: 405973
uaccaccauucacuuauaa

SEQ ID NO: 405975 - RNA, 19 nt, Artificial Sequence
  Description of Artificial Sequence: Synthetic oligonucleotide
  Sense Strand Starting at position 1112 of SEQ ID NO: 317866
cugauacuacccugaugaa

SEQ ID NO: 405976 - RNA, 19 nt, Artificial Sequence
  Description of Artificial Sequence: Synthetic oligonucleotide
  Antisense Strand to SEQ ID NO: 405975
uucaucaggguaguaucag

SEQ ID NO: 405977 - RNA, 19 nt, Artificial Sequence
  Description of Artificial Sequence: Synthetic oligonucleotide
  Sense Strand Starting at position 1112 of SEQ ID NO: 318068
uaugguaugggugaaguuu

SEQ ID NO: 405978 - RNA, 19 nt, Artificial Sequence
  Description of Artificial Sequence: Synthetic oligonucleotide
  Antisense Strand to SEQ ID NO: 405977
aaacuucacccauaccaua

SEQ ID NO: 405979 - RNA, 19 nt, Artificial Sequence
  Description of Artificial Sequence: Synthetic oligonucleotide
  Sense Strand Starting at position 1112 of SEQ ID NO: 318164
agagcaguuacuggugaaa

SEQ ID NO: 405980 - RNA, 19 nt, Artificial Sequence
  Description of Artificial Sequence: Synthetic oligonucleotide
  Antisense Strand to SEQ ID NO: 405979
uuucaccaguaacugcucu

SEQ ID NO: 405981 - RNA, 19 nt, Artificial Sequence
  Description of Artificial Sequence: Synthetic oligonucleotide
  Sense Strand Starting at position 1112 of SEQ ID NO: 318530
aaggauucucauuguugga

SEQ ID NO: 405982 - RNA, 19 nt, Artificial Sequence
  Description of Artificial Sequence: Synthetic oligonucleotide
  Antisense Strand to SEQ ID NO: 405981
uccaacaaugagaauccuu

SEQ ID NO: 405983 - RNA, 19 nt, Artificial Sequence
  Description of Artificial Sequence: Synthetic oligonucleotide
  Sense Strand Starting at position 1112 of SEQ ID NO: 318532
ggauucucauuguuggaaa

SEQ ID NO: 405984 - RNA, 19 nt, Artificial Sequence
  Description of Artificial Sequence: Synthetic oligonucleotide
  Antisense Strand to SEQ ID NO: 405983
uuuccaacaaugagaaucc

SEQ ID NO: 405985 - RNA, 19 nt, Artificial Sequence
  Description of Artificial Sequence: Synthetic oligonucleotide
  Sense Strand Starting at position 1112 of SEQ ID NO: 318534
auucucauuguuggaaaua

SEQ ID NO: 405986 - RNA, 19 nt, Artificial Sequence
  Description of Artificial Sequence: Synthetic oligonucleotide
  Antisense Strand to SEQ ID NO: 405985
uauuuccaacaaugagaau

SEQ ID NO: 405987 - RNA, 19 nt, Artificial Sequence
  Description of Artificial Sequence: Synthetic oligonucleotide
  Sense Strand Starting at position 1112 of SEQ ID NO: 318580
gguucauguguggauauau

SEQ ID NO: 405988 - RNA, 19 nt, Artificial Sequence
  Description of Artificial Sequence: Synthetic oligonucleotide
  Antisense Strand to SEQ ID NO: 405987
auauauccacacaugaacc

SEQ ID NO: 405989 - RNA, 19 nt, Artificial Sequence
  Description of Artificial Sequence: Synthetic oligonucleotide
  Sense Strand Starting at position 1112 of SEQ ID NO: 318654
auauacauaugucuugcua

SEQ ID NO: 405990 - RNA, 19 nt, Artificial Sequence
  Description of Artificial Sequence: Synthetic oligonucleotide
  Antisense Strand to SEQ ID NO: 405989
uagcaagacauauguauau

SEQ ID NO: 405991 - RNA, 19 nt, Artificial Sequence
  Description of Artificial Sequence: Synthetic oligonucleotide
  Sense Strand Starting at position 1112 of SEQ ID NO: 318772
acuggacauccuuguaauc

SEQ ID NO: 405992 - RNA, 19 nt, Artificial Sequence
  Description of Artificial Sequence: Synthetic oligonucleotide
  Antisense Strand to SEQ ID NO: 405991
gauuacaaggauguccagu

SEQ ID NO: 405993 - RNA, 19 nt, Artificial Sequence
  Description of Artificial Sequence: Synthetic oligonucleotide
  Sense Strand Starting at position 1112 of SEQ ID NO: 318849
aagguagugguaugaccau

SEQ ID NO: 405994 - RNA, 19 nt, Artificial Sequence
  Description of Artificial Sequence: Synthetic oligonucleotide
  Antisense Strand to SEQ ID NO: 405993
auggucauaccacuaccuu

SEQ ID NO: 405995 - RNA, 19 nt, Artificial Sequence
  Description of Artificial Sequence: Synthetic oligonucleotide
  Sense Strand Starting at position 1112 of SEQ ID NO: 318930
uugggugaauacuucuaca

SEQ ID NO: 405996 - RNA, 19 nt, Artificial Sequence
  Description of Artificial Sequence: Synthetic oligonucleotide
  Antisense Strand to SEQ ID NO: 405995
uguagaaguauucacccaa

SEQ ID NO: 405997 - RNA, 19 nt, Artificial Sequence
  Description of Artificial Sequence: Synthetic oligonucleotide
  Sense Strand Starting at position 1112 of SEQ ID NO: 318935
ugaauacuucuacaggcau

SEQ ID NO: 405998 - RNA, 19 nt, Artificial Sequence
  Description of Artificial Sequence: Synthetic oligonucleotide
  Antisense Strand to SEQ ID NO: 405997
augccuguagaaguauuca

SEQ ID NO: 405999 - RNA, 19 nt, Artificial Sequence
  Description of Artificial Sequence: Synthetic oligonucleotide
  Sense Strand Starting at position 1113 of SEQ ID NO: 315327
ucaggaaucuguucuggac

SEQ ID NO: 406000 - RNA, 19 nt, Artificial Sequence
  Description of Artificial Sequence: Synthetic oligonucleotide
  Antisense Strand to SEQ ID NO: 405999
guccagaacagauuccuga

SEQ ID NO: 406001 - RNA, 19 nt, Artificial Sequence
  Description of Artificial Sequence: Synthetic oligonucleotide
  Sense Strand Starting at position 1113 of SEQ ID NO: 315647
uauuuauugcggugcggaa

SEQ ID NO: 406002 - RNA, 19 nt, Artificial Sequence
  Description of Artificial Sequence: Synthetic oligonucleotide
  Antisense Strand to SEQ ID NO: 406001
uuccgcaccgcaauaaaua

SEQ ID NO: 406003 - RNA, 19 nt, Artificial Sequence
  Description of Artificial Sequence: Synthetic oligonucleotide
  Sense Strand Starting at position 1113 of SEQ ID NO: 315683
ggagaucccagcugaguaa

SEQ ID NO: 406004 - RNA, 19 nt, Artificial Sequence
  Description of Artificial Sequence: Synthetic oligonucleotide
  Antisense Strand to SEQ ID NO: 406003
uuacucagcugggaucucc

SEQ ID NO: 406005 - RNA, 19 nt, Artificial Sequence
  Description of Artificial Sequence: Synthetic oligonucleotide
  Sense Strand Starting at position 1113 of SEQ ID NO: 315687
aucccagcugaguaaguau

SEQ ID NO: 406006 - RNA, 19 nt, Artificial Sequence
  Description of Artificial Sequence: Synthetic oligonucleotide
  Antisense Strand to SEQ ID NO: 406005
auacuuacucagcugggau

SEQ ID NO: 406007 - RNA, 19 nt, Artificial Sequence
  Description of Artificial Sequence: Synthetic oligonucleotide
  Sense Strand Starting at position 1113 of SEQ ID NO: 315699
uaaguaugcaggugagauc

SEQ ID NO: 406008 - RNA, 19 nt, Artificial Sequence
  Description of Artificial Sequence: Synthetic oligonucleotide
  Antisense Strand to SEQ ID NO: 406007
gaucucaccugcauacuua

SEQ ID NO: 406009 - RNA, 19 nt, Artificial Sequence
  Description of Artificial Sequence: Synthetic oligonucleotide
  Sense Strand Starting at position 1113 of SEQ ID NO: 315734
ucccuuucuguuggacaca

SEQ ID NO: 406010 - RNA, 19 nt, Artificial Sequence
  Description of Artificial Sequence: Synthetic oligonucleotide
  Antisense Strand to SEQ ID NO: 406009
uguguccaacagaaaggga

SEQ ID NO: 406011 - RNA, 19 nt, Artificial Sequence
  Description of Artificial Sequence: Synthetic oligonucleotide
  Sense Strand Starting at position 1113 of SEQ ID NO: 315737
cuuucuguuggacacauau

SEQ ID NO: 406012 - RNA, 19 nt, Artificial Sequence
  Description of Artificial Sequence: Synthetic oligonucleotide
  Antisense Strand to SEQ ID NO: 406011
auauguguccaacagaaag

SEQ ID NO: 406013 - RNA, 19 nt, Artificial Sequence
  Description of Artificial Sequence: Synthetic oligonucleotide
  Sense Strand Starting at position 1113 of SEQ ID NO: 315822
aggcuuuacucagucccau

SEQ ID NO: 406014 - RNA, 19 nt, Artificial Sequence
  Description of Artificial Sequence: Synthetic oligonucleotide
  Antisense Strand to SEQ ID NO: 406013
augggacugaguaaagccu

SEQ ID NO: 406015 - RNA, 19 nt, Artificial Sequence
  Description of Artificial Sequence: Synthetic oligonucleotide
  Sense Strand Starting at position 1113 of SEQ ID NO: 315843
gacuguauguuugugggaa

SEQ ID NO: 406016 - RNA, 19 nt, Artificial Sequence
  Description of Artificial Sequence: Synthetic oligonucleotide
  Antisense Strand to SEQ ID NO: 406015
uucccacaaacauacaguc

SEQ ID NO: 406017 - RNA, 19 nt, Artificial Sequence
  Description of Artificial Sequence: Synthetic oligonucleotide
  Sense Strand Starting at position 1113 of SEQ ID NO: 316079
ugggaaaggugcucucauc

SEQ ID NO: 406018 - RNA, 19 nt, Artificial Sequence
  Description of Artificial Sequence: Synthetic oligonucleotide
  Antisense Strand to SEQ ID NO: 406017
gaugagagcaccuuuccca

SEQ ID NO: 406019 - RNA, 19 nt, Artificial Sequence
  Description of Artificial Sequence: Synthetic oligonucleotide
  Sense Strand Starting at position 1113 of SEQ ID NO: 316159
cugcuuagaccuuacugaa

SEQ ID NO: 406020 - RNA, 19 nt, Artificial Sequence
  Description of Artificial Sequence: Synthetic oligonucleotide
  Antisense Strand to SEQ ID NO: 406019
uucaguaaggucuaagcag

SEQ ID NO: 406021 - RNA, 19 nt, Artificial Sequence
  Description of Artificial Sequence: Synthetic oligonucleotide
  Sense Strand Starting at position 1113 of SEQ ID NO: 316167
accuuacugaaccgugaga

SEQ ID NO: 406022 - RNA, 19 nt, Artificial Sequence
  Description of Artificial Sequence: Synthetic oligonucleotide
  Antisense Strand to SEQ ID NO: 406021
ucucacgguucaguaaggu

SEQ ID NO: 406023 - RNA, 19 nt, Artificial Sequence
  Description of Artificial Sequence: Synthetic oligonucleotide
  Sense Strand Starting at position 1113 of SEQ ID NO: 316500
agcguuccucgagaugauc

SEQ ID NO: 406024 - RNA, 19 nt, Artificial Sequence
  Description of Artificial Sequence: Synthetic oligonucleotide
  Antisense Strand to SEQ ID NO: 406023
gaucaucucgaggaacgcu

SEQ ID NO: 406025 - RNA, 19 nt, Artificial Sequence
  Description of Artificial Sequence: Synthetic oligonucleotide
  Sense Strand Starting at position 1113 of SEQ ID NO: 316532
gaggacaauucucucgcuu

SEQ ID NO: 406026 - RNA, 19 nt, Artificial Sequence
  Description of Artificial Sequence: Synthetic oligonucleotide
  Antisense Strand to SEQ ID NO: 406025
aagcgagagaauuguccuc

SEQ ID NO: 406027 - RNA, 19 nt, Artificial Sequence
  Description of Artificial Sequence: Synthetic oligonucleotide
  Sense Strand Starting at position 1113 of SEQ ID NO: 316549
uuauaacucugccuggagu

SEQ ID NO: 406028 - RNA, 19 nt, Artificial Sequence
  Description of Artificial Sequence: Synthetic oligonucleotide
  Antisense Strand to SEQ ID NO: 406027
acuccaggcagaguuauaa

SEQ ID NO: 406029 - RNA, 19 nt, Artificial Sequence
  Description of Artificial Sequence: Synthetic oligonucleotide
  Sense Strand Starting at position 1113 of SEQ ID NO: 316562
uggaguuguccgaguaagc

SEQ ID NO: 406030 - RNA, 19 nt, Artificial Sequence
  Description of Artificial Sequence: Synthetic oligonucleotide
  Antisense Strand to SEQ ID NO: 406029
gcuuacucggacaacucca

SEQ ID NO: 406031 - RNA, 19 nt, Artificial Sequence
  Description of Artificial Sequence: Synthetic oligonucleotide
  Sense Strand Starting at position 1113 of SEQ ID NO: 316605
cauuacuuaguccgaugaa

SEQ ID NO: 406032 - RNA, 19 nt, Artificial Sequence
  Description of Artificial Sequence: Synthetic oligonucleotide
  Antisense Strand to SEQ ID NO: 406031
uucaucggacuaaguaaug

SEQ ID NO: 406033 - RNA, 19 nt, Artificial Sequence
  Description of Artificial Sequence: Synthetic oligonucleotide
  Sense Strand Starting at position 1113 of SEQ ID NO: 316864
accuuaauguugccgaaga

SEQ ID NO: 406034 - RNA, 19 nt, Artificial Sequence
  Description of Artificial Sequence: Synthetic oligonucleotide
  Antisense Strand to SEQ ID NO: 406033
ucuucggcaacauuaaggu

SEQ ID NO: 406035 - RNA, 19 nt, Artificial Sequence
  Description of Artificial Sequence: Synthetic oligonucleotide
  Sense Strand Starting at position 1113 of SEQ ID NO: 317586
gcuuguuugcacucgcaga

SEQ ID NO: 406036 - RNA, 19 nt, Artificial Sequence
  Description of Artificial Sequence: Synthetic oligonucleotide
  Antisense Strand to SEQ ID NO: 406035
ucugcgagugcaaacaagc

SEQ ID NO: 406037 - RNA, 19 nt, Artificial Sequence
  Description of Artificial Sequence: Synthetic oligonucleotide
  Sense Strand Starting at position 1113 of SEQ ID NO: 317655
guuuguguugaggacugau

SEQ ID NO: 406038 - RNA, 19 nt, Artificial Sequence
  Description of Artificial Sequence: Synthetic oligonucleotide
  Antisense Strand to SEQ ID NO: 406037
aucaguccucaacacaaac

SEQ ID NO: 406039 - RNA, 19 nt, Artificial Sequence
  Description of Artificial Sequence: Synthetic oligonucleotide
  Sense Strand Starting at position 1113 of SEQ ID NO: 317882
cuucucagugcuggaauga

SEQ ID NO: 406040 - RNA, 19 nt, Artificial Sequence
  Description of Artificial Sequence: Synthetic oligonucleotide
  Antisense Strand to SEQ ID NO: 406039
ucauuccagcacugagaag

SEQ ID NO: 406041 - RNA, 19 nt, Artificial Sequence
  Description of Artificial Sequence: Synthetic oligonucleotide
  Sense Strand Starting at position 1113 of SEQ ID NO: 317883
uucucagugcuggaaugaa

SEQ ID NO: 406042 - RNA, 19 nt, Artificial Sequence
  Description of Artificial Sequence: Synthetic oligonucleotide
  Antisense Strand to SEQ ID NO: 406041
uucauuccagcacugagaa

SEQ ID NO: 406043 - RNA, 19 nt, Artificial Sequence
  Description of Artificial Sequence: Synthetic oligonucleotide
  Sense Strand Starting at position 1113 of SEQ ID NO: 317895
gaaugaauaguggguuuau

SEQ ID NO: 406044 - RNA, 19 nt, Artificial Sequence
  Description of Artificial Sequence: Synthetic oligonucleotide
  Antisense Strand to SEQ ID NO: 406043
auaaacccacuauucauuc

SEQ ID NO: 406045 - RNA, 19 nt, Artificial Sequence
  Description of Artificial Sequence: Synthetic oligonucleotide
  Sense Strand Starting at position 1113 of SEQ ID NO: 317896
aaugaauaguggguuuauu

SEQ ID NO: 406046 - RNA, 19 nt, Artificial Sequence
  Description of Artificial Sequence: Synthetic oligonucleotide
  Antisense Strand to SEQ ID NO: 406045
aauaaacccacuauucauu

SEQ ID NO: 406047 - RNA, 19 nt, Artificial Sequence
  Description of Artificial Sequence: Synthetic oligonucleotide
  Sense Strand Starting at position 1113 of SEQ ID NO: 317968
aggcuucucaagggaagga

SEQ ID NO: 406048 - RNA, 19 nt, Artificial Sequence
  Description of Artificial Sequence: Synthetic oligonucleotide
  Antisense Strand to SEQ ID NO: 406047
uccuucccuugagaagccu

SEQ ID NO: 406049 - RNA, 19 nt, Artificial Sequence
  Description of Artificial Sequence: Synthetic oligonucleotide
  Sense Strand Starting at position 1113 of SEQ ID NO: 318057
uucuguagucccgugcaga

SEQ ID NO: 406050 - RNA, 19 nt, Artificial Sequence
  Description of Artificial Sequence: Synthetic oligonucleotide
  Antisense Strand to SEQ ID NO: 406049
ucugcacgggacuacagaa

SEQ ID NO: 406051 - RNA, 19 nt, Artificial Sequence
  Description of Artificial Sequence: Synthetic oligonucleotide
  Sense Strand Starting at position 1113 of SEQ ID NO: 318117
cgucaauauccaggaggcu

SEQ ID NO: 406052 - RNA, 19 nt, Artificial Sequence
  Description of Artificial Sequence: Synthetic oligonucleotide
  Antisense Strand to SEQ ID NO: 406051
agccuccuggauauugacg

SEQ ID NO: 406053 - RNA, 19 nt, Artificial Sequence
  Description of Artificial Sequence: Synthetic oligonucleotide
  Sense Strand Starting at position 1113 of SEQ ID NO: 318118
gucaauauccaggaggcuu

SEQ ID NO: 406054 - RNA, 19 nt, Artificial Sequence
  Description of Artificial Sequence: Synthetic oligonucleotide
  Antisense Strand to SEQ ID NO: 406053
aagccuccuggauauugac

SEQ ID NO: 406055 - RNA, 19 nt, Artificial Sequence
  Description of Artificial Sequence: Synthetic oligonucleotide
  Sense Strand Starting at position 1113 of SEQ ID NO: 318129
ggaggcuuuggcuaagaca

SEQ ID NO: 406056 - RNA, 19 nt, Artificial Sequence
  Description of Artificial Sequence: Synthetic oligonucleotide
  Antisense Strand to SEQ ID NO: 406055
ugucuuagccaaagccucc

SEQ ID NO: 406057 - RNA, 19 nt, Artificial Sequence
  Description of Artificial Sequence: Synthetic oligonucleotide
  Sense Strand Starting at position 1113 of SEQ ID NO: 318401
gcaugaauuccagguccca

SEQ ID NO: 406058 - RNA, 19 nt, Artificial Sequence
  Description of Artificial Sequence: Synthetic oligonucleotide
  Antisense Strand to SEQ ID NO: 406057
ugggaccuggaauucaugc

SEQ ID NO: 406059 - RNA, 19 nt, Artificial Sequence
  Description of Artificial Sequence: Synthetic oligonucleotide
  Sense Strand Starting at position 1113 of SEQ ID NO: 318417
ccaucuguccacugggaga

SEQ ID NO: 406060 - RNA, 19 nt, Artificial Sequence
  Description of Artificial Sequence: Synthetic oligonucleotide
  Antisense Strand to SEQ ID NO: 406059
ucucccaguggacagaugg

SEQ ID NO: 406061 - RNA, 19 nt, Artificial Sequence
  Description of Artificial Sequence: Synthetic oligonucleotide
  Sense Strand Starting at position 1113 of SEQ ID NO: 318538
acguuagcccuacagguau

SEQ ID NO: 406062 - RNA, 19 nt, Artificial Sequence
  Description of Artificial Sequence: Synthetic oligonucleotide
  Antisense Strand to SEQ ID NO: 406061
auaccuguagggcuaacgu

SEQ ID NO: 406063 - RNA, 19 nt, Artificial Sequence
  Description of Artificial Sequence: Synthetic oligonucleotide
  Sense Strand Starting at position 1113 of SEQ ID NO: 318596
agagcagucggcuaagaaa

SEQ ID NO: 406064 - RNA, 19 nt, Artificial Sequence
  Description of Artificial Sequence: Synthetic oligonucleotide
  Antisense Strand to SEQ ID NO: 406063
uuucuuagccgacugcucu

SEQ ID NO: 406065 - RNA, 19 nt, Artificial Sequence
  Description of Artificial Sequence: Synthetic oligonucleotide
  Sense Strand Starting at position 1113 of SEQ ID NO: 318605
ggcuaagaaagcugucuga

SEQ ID NO: 406066 - RNA, 19 nt, Artificial Sequence
  Description of Artificial Sequence: Synthetic oligonucleotide
  Antisense Strand to SEQ ID NO: 406065
ucagacagcuuucuuagcc

SEQ ID NO: 406067 - RNA, 19 nt, Artificial Sequence
  Description of Artificial Sequence: Synthetic oligonucleotide
  Sense Strand Starting at position 1113 of SEQ ID NO: 318608
uaagaaagcugucugaaag

SEQ ID NO: 406068 - RNA, 19 nt, Artificial Sequence
  Description of Artificial Sequence: Synthetic oligonucleotide
  Antisense Strand to SEQ ID NO: 406067
cuuucagacagcuuucuua

SEQ ID NO: 406069 - RNA, 19 nt, Artificial Sequence
  Description of Artificial Sequence: Synthetic oligonucleotide
  Sense Strand Starting at position 1113 of SEQ ID NO: 318666
agccuugucugacuccuaa

SEQ ID NO: 406070 - RNA, 19 nt, Artificial Sequence
  Description of Artificial Sequence: Synthetic oligonucleotide
  Antisense Strand to SEQ ID NO: 406069
uuaggagucagacaaggcu

SEQ ID NO: 406071 - RNA, 19 nt, Artificial Sequence
  Description of Artificial Sequence: Synthetic oligonucleotide
  Sense Strand Starting at position 1113 of SEQ ID NO: 318711
ugauaaguugucuagucca

SEQ ID NO: 406072 - RNA, 19 nt, Artificial Sequence
  Description of Artificial Sequence: Synthetic oligonucleotide
  Antisense Strand to SEQ ID NO: 406071
uggacuagacaacuuauca

SEQ ID NO: 406073 - RNA, 19 nt, Artificial Sequence
  Description of Artificial Sequence: Synthetic oligonucleotide
  Sense Strand Starting at position 1113 of SEQ ID NO: 318811
ccuggagcuucuuucucaa

SEQ ID NO: 406074 - RNA, 19 nt, Artificial Sequence
  Description of Artificial Sequence: Synthetic oligonucleotide
  Antisense Strand to SEQ ID NO: 406073
uugagaaagaagcuccagg

SEQ ID NO: 406075 - RNA, 19 nt, Artificial Sequence
  Description of Artificial Sequence: Synthetic oligonucleotide
  Sense Strand Starting at position 1113 of SEQ ID NO: 319002
gaccuuuacuggguggagu

SEQ ID NO: 406076 - RNA, 19 nt, Artificial Sequence
  Description of Artificial Sequence: Synthetic oligonucleotide
  Antisense Strand to SEQ ID NO: 406075
acuccacccaguaaagguc

SEQ ID NO: 406077 - RNA, 19 nt, Artificial Sequence
  Description of Artificial Sequence: Synthetic oligonucleotide
  Sense Strand Starting at position 1113 of SEQ ID NO: 319082
uaauuagaagucugcuagu

SEQ ID NO: 406078 - RNA, 19 nt, Artificial Sequence
  Description of Artificial Sequence: Synthetic oligonucleotide
  Antisense Strand to SEQ ID NO: 406077
acuagcagacuucuaauua

SEQ ID NO: 406079 - RNA, 19 nt, Artificial Sequence
  Description of Artificial Sequence: Synthetic oligonucleotide
  Sense Strand Starting at position 1114 of SEQ ID NO: 315258
gauggaaucgauggguaac

SEQ ID NO: 406080 - RNA, 19 nt, Artificial Sequence
  Description of Artificial Sequence: Synthetic oligonucleotide
  Antisense Strand to SEQ ID NO: 406079
guuacccaucgauuccauc

SEQ ID NO: 406081 - RNA, 19 nt, Artificial Sequence
  Description of Artificial Sequence: Synthetic oligonucleotide
  Sense Strand Starting at position 1114 of SEQ ID NO: 315294
cuuccagaugacgguaaau

SEQ ID NO: 406082 - RNA, 19 nt, Artificial Sequence
  Description of Artificial Sequence: Synthetic oligonucleotide
  Antisense Strand to SEQ ID NO: 406081
auuuaccgucaucuggaag

SEQ ID NO: 406083 - RNA, 19 nt, Artificial Sequence
  Description of Artificial Sequence: Synthetic oligonucleotide
  Sense Strand Starting at position 1114 of SEQ ID NO: 315296
uccagaugacgguaaaugu

SEQ ID NO: 406084 - RNA, 19 nt, Artificial Sequence
  Description of Artificial Sequence: Synthetic oligonucleotide
  Antisense Strand to SEQ ID NO: 406083
acauuuaccgucaucugga

SEQ ID NO: 406085 - RNA, 19 nt, Artificial Sequence
  Description of Artificial Sequence: Synthetic oligonucleotide
  Sense Strand Starting at position 1114 of SEQ ID NO: 315517
gagccauuuguuuguccag

SEQ ID NO: 406086 - RNA, 19 nt, Artificial Sequence
  Description of Artificial Sequence: Synthetic oligonucleotide
  Antisense Strand to SEQ ID NO: 406085
cuggacaaacaaauggcuc

SEQ ID NO: 406087 - RNA, 19 nt, Artificial Sequence
  Description of Artificial Sequence: Synthetic oligonucleotide
  Sense Strand Starting at position 1114 of SEQ ID NO: 315518
agccauuuguuuguccaga

SEQ ID NO: 406088 - RNA, 19 nt, Artificial Sequence
  Description of Artificial Sequence: Synthetic oligonucleotide
  Antisense Strand to SEQ ID NO: 406087
ucuggacaaacaaauggcu

SEQ ID NO: 406089 - RNA, 19 nt, Artificial Sequence
  Description of Artificial Sequence: Synthetic oligonucleotide
  Sense Strand Starting at position 1114 of SEQ ID NO: 315523
uuuguuuguccagagggag

SEQ ID NO: 406090 - RNA, 19 nt, Artificial Sequence
  Description of Artificial Sequence: Synthetic oligonucleotide
  Antisense Strand to SEQ ID NO: 406089
cucccucuggacaaacaaa

SEQ ID NO: 406091 - RNA, 19 nt, Artificial Sequence
  Description of Artificial Sequence: Synthetic oligonucleotide
  Sense Strand Starting at position 1114 of SEQ ID NO: 315715
cuuugagccgucuauagag

SEQ ID NO: 406092 - RNA, 19 nt, Artificial Sequence
  Description of Artificial Sequence: Synthetic oligonucleotide
  Antisense Strand to SEQ ID NO: 406091
cucuauagacggcucaaag

SEQ ID NO: 406093 - RNA, 19 nt, Artificial Sequence
  Description of Artificial Sequence: Synthetic oligonucleotide
  Sense Strand Starting at position 1114 of SEQ ID NO: 315880
ggccuauuuguuggaguua

SEQ ID NO: 406094 - RNA, 19 nt, Artificial Sequence
  Description of Artificial Sequence: Synthetic oligonucleotide
  Antisense Strand to SEQ ID NO: 406093
uaacuccaacaaauaggcc

SEQ ID NO: 406095 - RNA, 19 nt, Artificial Sequence
  Description of Artificial Sequence: Synthetic oligonucleotide
  Sense Strand Starting at position 1114 of SEQ ID NO: 315889
guuggaguuacuuacgaug

SEQ ID NO: 406096 - RNA, 19 nt, Artificial Sequence
  Description of Artificial Sequence: Synthetic oligonucleotide
  Antisense Strand to SEQ ID NO: 406095
caucguaaguaacuccaac

SEQ ID NO: 406097 - RNA, 19 nt, Artificial Sequence
  Description of Artificial Sequence: Synthetic oligonucleotide
  Sense Strand Starting at position 1114 of SEQ ID NO: 316320
uugagacuugcagggaaau

SEQ ID NO: 406098 - RNA, 19 nt, Artificial Sequence
  Description of Artificial Sequence: Synthetic oligonucleotide
  Antisense Strand to SEQ ID NO: 406097
auuucccugcaagucucaa

SEQ ID NO: 406099 - RNA, 19 nt, Artificial Sequence
  Description of Artificial Sequence: Synthetic oligonucleotide
  Sense Strand Starting at position 1114 of SEQ ID NO: 316343
gcugcauaccaaugggaga

SEQ ID NO: 406100 - RNA, 19 nt, Artificial Sequence
  Description of Artificial Sequence: Synthetic oligonucleotide
  Antisense Strand to SEQ ID NO: 406099
ucucccauugguaugcagc

SEQ ID NO: 406101 - RNA, 19 nt, Artificial Sequence
  Description of Artificial Sequence: Synthetic oligonucleotide
  Sense Strand Starting at position 1114 of SEQ ID NO: 316466
aggacuagguuccuuugau

SEQ ID NO: 406102 - RNA, 19 nt, Artificial Sequence
  Description of Artificial Sequence: Synthetic oligonucleotide
  Antisense Strand to SEQ ID NO: 406101
aucaaaggaaccuaguccu

SEQ ID NO: 406103 - RNA, 19 nt, Artificial Sequence
  Description of Artificial Sequence: Synthetic oligonucleotide
  Sense Strand Starting at position 1114 of SEQ ID NO: 316467
ggacuagguuccuuugauu

SEQ ID NO: 406104 - RNA, 19 nt, Artificial Sequence
  Description of Artificial Sequence: Synthetic oligonucleotide
  Antisense Strand to SEQ ID NO: 406103
aaucaaaggaaccuagucc

SEQ ID NO: 406105 - RNA, 19 nt, Artificial Sequence
  Description of Artificial Sequence: Synthetic oligonucleotide
  Sense Strand Starting at position 1114 of SEQ ID NO: 316572
ccucaaagguugucacuca

SEQ ID NO: 406106 - RNA, 19 nt, Artificial Sequence
  Description of Artificial Sequence: Synthetic oligonucleotide
  Antisense Strand to SEQ ID NO: 406105
ugagugacaaccuuugagg

SEQ ID NO: 406107 - RNA, 19 nt, Artificial Sequence
  Description of Artificial Sequence: Synthetic oligonucleotide
  Sense Strand Starting at position 1114 of SEQ ID NO: 316867
ccacuuggauuugggagau

SEQ ID NO: 406108 - RNA, 19 nt, Artificial Sequence
  Description of Artificial Sequence: Synthetic oligonucleotide
  Antisense Strand to SEQ ID NO: 406107
aucucccaaauccaagugg

SEQ ID NO: 406109 - RNA, 19 nt, Artificial Sequence
  Description of Artificial Sequence: Synthetic oligonucleotide
  Sense Strand Starting at position 1114 of SEQ ID NO: 317100
uuuaauggccuaggaaaua

SEQ ID NO: 406110 - RNA, 19 nt, Artificial Sequence
  Description of Artificial Sequence: Synthetic oligonucleotide
  Antisense Strand to SEQ ID NO: 406109
uauuuccuaggccauuaaa

SEQ ID NO: 406111 - RNA, 19 nt, Artificial Sequence
  Description of Artificial Sequence: Synthetic oligonucleotide
  Sense Strand Starting at position 1114 of SEQ ID NO: 317416
ggaagcaagugaucucucu

SEQ ID NO: 406112 - RNA, 19 nt, Artificial Sequence
  Description of Artificial Sequence: Synthetic oligonucleotide
  Antisense Strand to SEQ ID NO: 406111
agagagaucacuugcuucc

SEQ ID NO: 406113 - RNA, 19 nt, Artificial Sequence
  Description of Artificial Sequence: Synthetic oligonucleotide
  Sense Strand Starting at position 1114 of SEQ ID NO: 317602
agagacacccugugaaauu

SEQ ID NO: 406114 - RNA, 19 nt, Artificial Sequence
  Description of Artificial Sequence: Synthetic oligonucleotide
  Antisense Strand to SEQ ID NO: 406113
aauuucacagggugucucu

SEQ ID NO: 406115 - RNA, 19 nt, Artificial Sequence
  Description of Artificial Sequence: Synthetic oligonucleotide
  Sense Strand Starting at position 1114 of SEQ ID NO: 317641
ucuguacccguggauugau

SEQ ID NO: 406116 - RNA, 19 nt, Artificial Sequence
  Description of Artificial Sequence: Synthetic oligonucleotide
  Antisense Strand to SEQ ID NO: 406115
aucaauccacggguacaga

SEQ ID NO: 406117 - RNA, 19 nt, Artificial Sequence
  Description of Artificial Sequence: Synthetic oligonucleotide
  Sense Strand Starting at position 1114 of SEQ ID NO: 317649
cguggauugauuuguaacu

SEQ ID NO: 406118 - RNA, 19 nt, Artificial Sequence
  Description of Artificial Sequence: Synthetic oligonucleotide
  Antisense Strand to SEQ ID NO: 406117
aguuacaaaucaauccacg

SEQ ID NO: 406119 - RNA, 19 nt, Artificial Sequence
  Description of Artificial Sequence: Synthetic oligonucleotide
  Sense Strand Starting at position 1114 of SEQ ID NO: 317684
agagaugccuguuuggaaa

SEQ ID NO: 406120 - RNA, 19 nt, Artificial Sequence
  Description of Artificial Sequence: Synthetic oligonucleotide
  Antisense Strand to SEQ ID NO: 406119
uuuccaaacaggcaucucu

SEQ ID NO: 406121 - RNA, 19 nt, Artificial Sequence
  Description of Artificial Sequence: Synthetic oligonucleotide
  Sense Strand Starting at position 1114 of SEQ ID NO: 317717
gguggagggugaucaaauu

SEQ ID NO: 406122 - RNA, 19 nt, Artificial Sequence
  Description of Artificial Sequence: Synthetic oligonucleotide
  Antisense Strand to SEQ ID NO: 406121
aauuugaucacccuccacc

SEQ ID NO: 406123 - RNA, 19 nt, Artificial Sequence
  Description of Artificial Sequence: Synthetic oligonucleotide
  Sense Strand Starting at position 1114 of SEQ ID NO: 317736
aagaacaucugagcuguau

SEQ ID NO: 406124 - RNA, 19 nt, Artificial Sequence
  Description of Artificial Sequence: Synthetic oligonucleotide
  Antisense Strand to SEQ ID NO: 406123
auacagcucagauguucuu

SEQ ID NO: 406125 - RNA, 19 nt, Artificial Sequence
  Description of Artificial Sequence: Synthetic oligonucleotide
  Sense Strand Starting at position 1114 of SEQ ID NO: 317740
acaucugagcuguauuggu

SEQ ID NO: 406126 - RNA, 19 nt, Artificial Sequence
  Description of Artificial Sequence: Synthetic oligonucleotide
  Antisense Strand to SEQ ID NO: 406125
accaauacagcucagaugu

SEQ ID NO: 406127 - RNA, 19 nt, Artificial Sequence
  Description of Artificial Sequence: Synthetic oligonucleotide
  Sense Strand Starting at position 1114 of SEQ ID NO: 317787
gcgguuuccaagugauuug

SEQ ID NO: 406128 - RNA, 19 nt, Artificial Sequence
  Description of Artificial Sequence: Synthetic oligonucleotide
  Antisense Strand to SEQ ID NO: 406127
caaaucacuuggaaaccgc

SEQ ID NO: 406129 - RNA, 19 nt, Artificial Sequence
  Description of Artificial Sequence: Synthetic oligonucleotide
  Sense Strand Starting at position 1114 of SEQ ID NO: 317824
augauacaugggugacgau

SEQ ID NO: 406130 - RNA, 19 nt, Artificial Sequence
  Description of Artificial Sequence: Synthetic oligonucleotide
  Antisense Strand to SEQ ID NO: 406129
aucgucacccauguaucau

SEQ ID NO: 406131 - RNA, 19 nt, Artificial Sequence
  Description of Artificial Sequence: Synthetic oligonucleotide
  Sense Strand Starting at position 1114 of SEQ ID NO: 317825
ugauacaugggugacgauu

SEQ ID NO: 406132 - RNA, 19 nt, Artificial Sequence
  Description of Artificial Sequence: Synthetic oligonucleotide
  Antisense Strand to SEQ ID NO: 406131
aaucgucacccauguauca

SEQ ID NO: 406133 - RNA, 19 nt, Artificial Sequence
  Description of Artificial Sequence: Synthetic oligonucleotide
  Sense Strand Starting at position 1114 of SEQ ID NO: 317999
uguaauaacacguauguga

SEQ ID NO: 406134 - RNA, 19 nt, Artificial Sequence
  Description of Artificial Sequence: Synthetic oligonucleotide
  Antisense Strand to SEQ ID NO: 406133
ucacauacguguuauuaca

SEQ ID NO: 406135 - RNA, 19 nt, Artificial Sequence
  Description of Artificial Sequence: Synthetic oligonucleotide
  Sense Strand Starting at position 1114 of SEQ ID NO: 318001
uaauaacacguaugugaaa

SEQ ID NO: 406136 - RNA, 19 nt, Artificial Sequence
  Description of Artificial Sequence: Synthetic oligonucleotide
  Antisense Strand to SEQ ID NO: 406135
uuucacauacguguuauua

SEQ ID NO: 406137 - RNA, 19 nt, Artificial Sequence
  Description of Artificial Sequence: Synthetic oligonucleotide
  Sense Strand Starting at position 1114 of SEQ ID NO: 318014
gugaaaguauuauuacaac

SEQ ID NO: 406138 - RNA, 19 nt, Artificial Sequence
  Description of Artificial Sequence: Synthetic oligonucleotide
  Antisense Strand to SEQ ID NO: 406137
guuguaauaauacuuucac

SEQ ID NO: 406139 - RNA, 19 nt, Artificial Sequence
  Description of Artificial Sequence: Synthetic oligonucleotide
  Sense Strand Starting at position 1114 of SEQ ID NO: 318146
aucagagacuguguuggaa

SEQ ID NO: 406140 - RNA, 19 nt, Artificial Sequence
  Description of Artificial Sequence: Synthetic oligonucleotide
  Antisense Strand to SEQ ID NO: 406139
uuccaacacagucucugau

SEQ ID NO: 406141 - RNA, 19 nt, Artificial Sequence
  Description of Artificial Sequence: Synthetic oligonucleotide
  Sense Strand Starting at position 1114 of SEQ ID NO: 318149
agagacuguguuggaaaga

SEQ ID NO: 406142 - RNA, 19 nt, Artificial Sequence
  Description of Artificial Sequence: Synthetic oligonucleotide
  Antisense Strand to SEQ ID NO: 406141
ucuuuccaacacagucucu

SEQ ID NO: 406143 - RNA, 19 nt, Artificial Sequence
  Description of Artificial Sequence: Synthetic oligonucleotide
  Sense Strand Starting at position 1114 of SEQ ID NO: 318212
gggaaucaucucuguaucu

SEQ ID NO: 406144 - RNA, 19 nt, Artificial Sequence
  Description of Artificial Sequence: Synthetic oligonucleotide
  Antisense Strand to SEQ ID NO: 406143
agauacagagaugauuccc

SEQ ID NO: 406145 - RNA, 19 nt, Artificial Sequence
  Description of Artificial Sequence: Synthetic oligonucleotide
  Sense Strand Starting at position 1114 of SEQ ID NO: 318213
ggaaucaucucuguaucuc

SEQ ID NO: 406146 - RNA, 19 nt, Artificial Sequence
  Description of Artificial Sequence: Synthetic oligonucleotide
  Antisense Strand to SEQ ID NO: 406145
gagauacagagaugauucc

SEQ ID NO: 406147 - RNA, 19 nt, Artificial Sequence
  Description of Artificial Sequence: Synthetic oligonucleotide
  Sense Strand Starting at position 1114 of SEQ ID NO: 318243
uccugaagagaaugcaaua

SEQ ID NO: 406148 - RNA, 19 nt, Artificial Sequence
  Description of Artificial Sequence: Synthetic oligonucleotide
  Antisense Strand to SEQ ID NO: 406147
uauugcauucucuucagga

SEQ ID NO: 406149 - RNA, 19 nt, Artificial Sequence
  Description of Artificial Sequence: Synthetic oligonucleotide
  Sense Strand Starting at position 1114 of SEQ ID NO: 318256
gcaauacauuguccaagga

SEQ ID NO: 406150 - RNA, 19 nt, Artificial Sequence
  Description of Artificial Sequence: Synthetic oligonucleotide
  Antisense Strand to SEQ ID NO: 406149
uccuuggacaauguauugc

SEQ ID NO: 406151 - RNA, 19 nt, Artificial Sequence
  Description of Artificial Sequence: Synthetic oligonucleotide
  Sense Strand Starting at position 1114 of SEQ ID NO: 318407
gauagacaggccuggauau

SEQ ID NO: 406152 - RNA, 19 nt, Artificial Sequence
  Description of Artificial Sequence: Synthetic oligonucleotide
  Antisense Strand to SEQ ID NO: 406151
auauccaggccugucuauc

SEQ ID NO: 406153 - RNA, 19 nt, Artificial Sequence
  Description of Artificial Sequence: Synthetic oligonucleotide
  Sense Strand Starting at position 1114 of SEQ ID NO: 318408
auagacaggccuggauaua

SEQ ID NO: 406154 - RNA, 19 nt, Artificial Sequence
  Description of Artificial Sequence: Synthetic oligonucleotide
  Antisense Strand to SEQ ID NO: 406153
uauauccaggccugucuau

SEQ ID NO: 406155 - RNA, 19 nt, Artificial Sequence
  Description of Artificial Sequence: Synthetic oligonucleotide
  Sense Strand Starting at position 1114 of SEQ ID NO: 318999
gguauaucuaggcaggguu

SEQ ID NO: 406156 - RNA, 19 nt, Artificial Sequence
  Description of Artificial Sequence: Synthetic oligonucleotide
  Antisense Strand to SEQ ID NO: 406155
aacccugccuagauauacc

SEQ ID NO: 406157 - RNA, 19 nt, Artificial Sequence
  Description of Artificial Sequence: Synthetic oligonucleotide
  Sense Strand Starting at position 1114 of SEQ ID NO: 319137
agacucacuccuggauaca

SEQ ID NO: 406158 - RNA, 19 nt, Artificial Sequence
  Description of Artificial Sequence: Synthetic oligonucleotide
  Antisense Strand to SEQ ID NO: 406157
uguauccaggagugagucu

SEQ ID NO: 406159 - RNA, 19 nt, Artificial Sequence
  Description of Artificial Sequence: Synthetic oligonucleotide
  Sense Strand Starting at position 1115 of SEQ ID NO: 315405
gauuacgaguaaucuauga

SEQ ID NO: 406160 - RNA, 19 nt, Artificial Sequence
  Description of Artificial Sequence: Synthetic oligonucleotide
  Antisense Strand to SEQ ID NO: 406159
ucauagauuacucguaauc

SEQ ID NO: 406161 - RNA, 19 nt, Artificial Sequence
  Description of Artificial Sequence: Synthetic oligonucleotide
  Sense Strand Starting at position 1115 of SEQ ID NO: 315409
acgaguaaucuaugaagua

SEQ ID NO: 406162 - RNA, 19 nt, Artificial Sequence
  Description of Artificial Sequence: Synthetic oligonucleotide
  Antisense Strand to SEQ ID NO: 406161
uacuucauagauuacucgu

SEQ ID NO: 406163 - RNA, 19 nt, Artificial Sequence
  Description of Artificial Sequence: Synthetic oligonucleotide
  Sense Strand Starting at position 1115 of SEQ ID NO: 315468
gggucuguuccacagguaa

SEQ ID NO: 406164 - RNA, 19 nt, Artificial Sequence
  Description of Artificial Sequence: Synthetic oligonucleotide
  Antisense Strand to SEQ ID NO: 406163
uuaccuguggaacagaccc

SEQ ID NO: 406165 - RNA, 19 nt, Artificial Sequence
  Description of Artificial Sequence: Synthetic oligonucleotide
  Sense Strand Starting at position 1115 of SEQ ID NO: 315529
guucucauccuacacguaa

SEQ ID NO: 406166 - RNA, 19 nt, Artificial Sequence
  Description of Artificial Sequence: Synthetic oligonucleotide
  Antisense Strand to SEQ ID NO: 406165
uuacguguaggaugagaac

SEQ ID NO: 406167 - RNA, 19 nt, Artificial Sequence
  Description of Artificial Sequence: Synthetic oligonucleotide
  Sense Strand Starting at position 1115 of SEQ ID NO: 315540
acacguaaaguauagauau

SEQ ID NO: 406168 - RNA, 19 nt, Artificial Sequence
  Description of Artificial Sequence: Synthetic oligonucleotide
  Antisense Strand to SEQ ID NO: 406167
auaucuauacuuuacgugu

SEQ ID NO: 406169 - RNA, 19 nt, Artificial Sequence
  Description of Artificial Sequence: Synthetic oligonucleotide
  Sense Strand Starting at position 1115 of SEQ ID NO: 315861
gcacaaagaugagcucuuu

SEQ ID NO: 406170 - RNA, 19 nt, Artificial Sequence
  Description of Artificial Sequence: Synthetic oligonucleotide
  Antisense Strand to SEQ ID NO: 406169
aaagagcucaucuuugugc

SEQ ID NO: 406171 - RNA, 19 nt, Artificial Sequence
  Description of Artificial Sequence: Synthetic oligonucleotide
  Sense Strand Starting at position 1115 of SEQ ID NO: 315867
agaugagcucuuuaguaua

SEQ ID NO: 406172 - RNA, 19 nt, Artificial Sequence
  Description of Artificial Sequence: Synthetic oligonucleotide
  Antisense Strand to SEQ ID NO: 406171
uauacuaaagagcucaucu

SEQ ID NO: 406173 - RNA, 19 nt, Artificial Sequence
  Description of Artificial Sequence: Synthetic oligonucleotide
  Sense Strand Starting at position 1115 of SEQ ID NO: 315869
augagcucuuuaguauacu

SEQ ID NO: 406174 - RNA, 19 nt, Artificial Sequence
  Description of Artificial Sequence: Synthetic oligonucleotide
  Antisense Strand to SEQ ID NO: 406173
aguauacuaaagagcucau

SEQ ID NO: 406175 - RNA, 19 nt, Artificial Sequence
  Description of Artificial Sequence: Synthetic oligonucleotide
  Sense Strand Starting at position 1115 of SEQ ID NO: 315920
uggaaaggaucuuaauuuc

SEQ ID NO: 406176 - RNA, 19 nt, Artificial Sequence
  Description of Artificial Sequence: Synthetic oligonucleotide
  Antisense Strand to SEQ ID NO: 406175
gaaauuaagauccuuucca

SEQ ID NO: 406177 - RNA, 19 nt, Artificial Sequence
  Description of Artificial Sequence: Synthetic oligonucleotide
  Sense Strand Starting at position 1115 of SEQ ID NO: 316005
uaaauugguuacgcuuaaa

SEQ ID NO: 406178 - RNA, 19 nt, Artificial Sequence
  Description of Artificial Sequence: Synthetic oligonucleotide
  Antisense Strand to SEQ ID NO: 406177
uuuaagcguaaccaauuua

SEQ ID NO: 406179 - RNA, 19 nt, Artificial Sequence
  Description of Artificial Sequence: Synthetic oligonucleotide
  Sense Strand Starting at position 1115 of SEQ ID NO: 316128
auagcaccucuguaaguau

SEQ ID NO: 406180 - RNA, 19 nt, Artificial Sequence
  Description of Artificial Sequence: Synthetic oligonucleotide
  Antisense Strand to SEQ ID NO: 406179
auacuuacagaggugcuau

SEQ ID NO: 406181 - RNA, 19 nt, Artificial Sequence
  Description of Artificial Sequence: Synthetic oligonucleotide
  Sense Strand Starting at position 1115 of SEQ ID NO: 316135
cucuguaaguaugcauuaa

SEQ ID NO: 406182 - RNA, 19 nt, Artificial Sequence
  Description of Artificial Sequence: Synthetic oligonucleotide
  Antisense Strand to SEQ ID NO: 406181
uuaaugcauacuuacagag

SEQ ID NO: 406183 - RNA, 19 nt, Artificial Sequence
  Description of Artificial Sequence: Synthetic oligonucleotide
  Sense Strand Starting at position 1115 of SEQ ID NO: 316139
guaaguaugcauuaaguac

SEQ ID NO: 406184 - RNA, 19 nt, Artificial Sequence
  Description of Artificial Sequence: Synthetic oligonucleotide
  Antisense Strand to SEQ ID NO: 406183
guacuuaaugcauacuuac

SEQ ID NO: 406185 - RNA, 19 nt, Artificial Sequence
  Description of Artificial Sequence: Synthetic oligonucleotide
  Sense Strand Starting at position 1115 of SEQ ID NO: 316159
uaauaagugcugcagggaa

SEQ ID NO: 406186 - RNA, 19 nt, Artificial Sequence
  Description of Artificial Sequence: Synthetic oligonucleotide
  Antisense Strand to SEQ ID NO: 406185
uucccugcagcacuuauua

SEQ ID NO: 406187 - RNA, 19 nt, Artificial Sequence
  Description of Artificial Sequence: Synthetic oligonucleotide
  Sense Strand Starting at position 1115 of SEQ ID NO: 316207
guguauguucuccaacuug

SEQ ID NO: 406188 - RNA, 19 nt, Artificial Sequence
  Description of Artificial Sequence: Synthetic oligonucleotide
  Antisense Strand to SEQ ID NO: 406187
caaguuggagaacauacac

SEQ ID NO: 406189 - RNA, 19 nt, Artificial Sequence
  Description of Artificial Sequence: Synthetic oligonucleotide
  Sense Strand Starting at position 1115 of SEQ ID NO: 316309
agggcaaguauguaucaaa

SEQ ID NO: 406190 - RNA, 19 nt, Artificial Sequence
  Description of Artificial Sequence: Synthetic oligonucleotide
  Antisense Strand to SEQ ID NO: 406189
uuugauacauacuugcccu

SEQ ID NO: 406191 - RNA, 19 nt, Artificial Sequence
  Description of Artificial Sequence: Synthetic oligonucleotide
  Sense Strand Starting at position 1115 of SEQ ID NO: 316343
agguuuauaucagcaauua

SEQ ID NO: 406192 - RNA, 19 nt, Artificial Sequence
  Description of Artificial Sequence: Synthetic oligonucleotide
  Antisense Strand to SEQ ID NO: 406191
uaauugcugauauaaaccu

SEQ ID NO: 406193 - RNA, 19 nt, Artificial Sequence
  Description of Artificial Sequence: Synthetic oligonucleotide
  Sense Strand Starting at position 1115 of SEQ ID NO: 316344
gguuuauaucagcaauuau

SEQ ID NO: 406194 - RNA, 19 nt, Artificial Sequence
  Description of Artificial Sequence: Synthetic oligonucleotide
  Antisense Strand to SEQ ID NO: 406193
auaauugcugauauaaacc

SEQ ID NO: 406195 - RNA, 19 nt, Artificial Sequence
  Description of Artificial Sequence: Synthetic oligonucleotide
  Sense Strand Starting at position 1115 of SEQ ID NO: 316392
accuaaagcuauguguuaa

SEQ ID NO: 406196 - RNA, 19 nt, Artificial Sequence
  Description of Artificial Sequence: Synthetic oligonucleotide
  Antisense Strand to SEQ ID NO: 406195
uuaacacauagcuuuaggu

SEQ ID NO: 406197 - RNA, 19 nt, Artificial Sequence
  Description of Artificial Sequence: Synthetic oligonucleotide
  Sense Strand Starting at position 1115 of SEQ ID NO: 316557
cacuaucuaguuugggauu

SEQ ID NO: 406198 - RNA, 19 nt, Artificial Sequence
  Description of Artificial Sequence: Synthetic oligonucleotide
  Antisense Strand to SEQ ID NO: 406197
aaucccaaacuagauagug

SEQ ID NO: 406199 - RNA, 19 nt, Artificial Sequence
  Description of Artificial Sequence: Synthetic oligonucleotide
  Sense Strand Starting at position 1115 of SEQ ID NO: 316580
ugggaaugaccacguuauc

SEQ ID NO: 406200 - RNA, 19 nt, Artificial Sequence
  Description of Artificial Sequence: Synthetic oligonucleotide
  Antisense Strand to SEQ ID NO: 406199
gauaacguggucauuccca

SEQ ID NO: 406201 - RNA, 19 nt, Artificial Sequence
  Description of Artificial Sequence: Synthetic oligonucleotide
  Sense Strand Starting at position 1115 of SEQ ID NO: 316585
augaccacguuaucaagau

SEQ ID NO: 406202 - RNA, 19 nt, Artificial Sequence
  Description of Artificial Sequence: Synthetic oligonucleotide
  Antisense Strand to SEQ ID NO: 406201
aucuugauaacguggucau

SEQ ID NO: 406203 - RNA, 19 nt, Artificial Sequence
  Description of Artificial Sequence: Synthetic oligonucleotide
  Sense Strand Starting at position 1115 of SEQ ID NO: 316589
ccacguuaucaagaugcca

SEQ ID NO: 406204 - RNA, 19 nt, Artificial Sequence
  Description of Artificial Sequence: Synthetic oligonucleotide
  Antisense Strand to SEQ ID NO: 406203
uggcaucuugauaacgugg

SEQ ID NO: 406205 - RNA, 19 nt, Artificial Sequence
  Description of Artificial Sequence: Synthetic oligonucleotide
  Sense Strand Starting at position 1115 of SEQ ID NO: 317286
ccaucuucuucucugggaa

SEQ ID NO: 406206 - RNA, 19 nt, Artificial Sequence
  Description of Artificial Sequence: Synthetic oligonucleotide
  Antisense Strand to SEQ ID NO: 406205
uucccagagaagaagaugg

SEQ ID NO: 406207 - RNA, 19 nt, Artificial Sequence
  Description of Artificial Sequence: Synthetic oligonucleotide
  Sense Strand Starting at position 1115 of SEQ ID NO: 317289
ucuucuucucugggaagaa

SEQ ID NO: 406208 - RNA, 19 nt, Artificial Sequence
  Description of Artificial Sequence: Synthetic oligonucleotide
  Antisense Strand to SEQ ID NO: 406207
uucuucccagagaagaaga

SEQ ID NO: 406209 - RNA, 19 nt, Artificial Sequence
  Description of Artificial Sequence: Synthetic oligonucleotide
  Sense Strand Starting at position 1115 of SEQ ID NO: 317323
ggcagcuucggccaagaaa

SEQ ID NO: 406210 - RNA, 19 nt, Artificial Sequence
  Description of Artificial Sequence: Synthetic oligonucleotide
  Antisense Strand to SEQ ID NO: 406209
uuucuuggccgaagcugcc

SEQ ID NO: 406211 - RNA, 19 nt, Artificial Sequence
  Description of Artificial Sequence: Synthetic oligonucleotide
  Sense Strand Starting at position 1115 of SEQ ID NO: 317381
agaugagucacacgccaau

SEQ ID NO: 406212 - RNA, 19 nt, Artificial Sequence
  Description of Artificial Sequence: Synthetic oligonucleotide
  Antisense Strand to SEQ ID NO: 406211
auuggcgugugacucaucu

SEQ ID NO: 406213 - RNA, 19 nt, Artificial Sequence
  Description of Artificial Sequence: Synthetic oligonucleotide
  Sense Strand Starting at position 1115 of SEQ ID NO: 318119
gcaggaaacuuuccgaccu

SEQ ID NO: 406214 - RNA, 19 nt, Artificial Sequence
  Description of Artificial Sequence: Synthetic oligonucleotide
  Antisense Strand to SEQ ID NO: 406213
aggucggaaaguuuccugc

SEQ ID NO: 406215 - RNA, 19 nt, Artificial Sequence
  Description of Artificial Sequence: Synthetic oligonucleotide
  Sense Strand Starting at position 1115 of SEQ ID NO: 318361
uagugacucugacugaaac

SEQ ID NO: 406216 - RNA, 19 nt, Artificial Sequence
  Description of Artificial Sequence: Synthetic oligonucleotide
  Antisense Strand to SEQ ID NO: 406215
guuucagucagagucacua

SEQ ID NO: 406217 - RNA, 19 nt, Artificial Sequence
  Description of Artificial Sequence: Synthetic oligonucleotide
  Sense Strand Starting at position 1115 of SEQ ID NO: 318452
aggaaugucacgugaacga

SEQ ID NO: 406218 - RNA, 19 nt, Artificial Sequence
  Description of Artificial Sequence: Synthetic oligonucleotide
  Antisense Strand to SEQ ID NO: 406217
ucguucacgugacauuccu

SEQ ID NO: 406219 - RNA, 19 nt, Artificial Sequence
  Description of Artificial Sequence: Synthetic oligonucleotide
  Sense Strand Starting at position 1115 of SEQ ID NO: 318474
cacggaagccguguuggua

SEQ ID NO: 406220 - RNA, 19 nt, Artificial Sequence
  Description of Artificial Sequence: Synthetic oligonucleotide
  Antisense Strand to SEQ ID NO: 406219
uaccaacacggcuuccgug

SEQ ID NO: 406221 - RNA, 19 nt, Artificial Sequence
  Description of Artificial Sequence: Synthetic oligonucleotide
  Sense Strand Starting at position 1115 of SEQ ID NO: 318609
aacaauuugcgccguagaa

SEQ ID NO: 406222 - RNA, 19 nt, Artificial Sequence
  Description of Artificial Sequence: Synthetic oligonucleotide
  Antisense Strand to SEQ ID NO: 406221
uucuacggcgcaaauuguu

SEQ ID NO: 406223 - RNA, 19 nt, Artificial Sequence
  Description of Artificial Sequence: Synthetic oligonucleotide
  Sense Strand Starting at position 1115 of SEQ ID NO: 318704
ucuguuuaauucucgauga

SEQ ID NO: 406224 - RNA, 19 nt, Artificial Sequence
  Description of Artificial Sequence: Synthetic oligonucleotide
  Antisense Strand to SEQ ID NO: 406223
ucaucgagaauuaaacaga

SEQ ID NO: 406225 - RNA, 19 nt, Artificial Sequence
  Description of Artificial Sequence: Synthetic oligonucleotide
  Sense Strand Starting at position 1115 of SEQ ID NO: 318706
uguuuaauucucgaugaaa

SEQ ID NO: 406226 - RNA, 19 nt, Artificial Sequence
  Description of Artificial Sequence: Synthetic oligonucleotide
  Antisense Strand to SEQ ID NO: 406225
uuucaucgagaauuaaaca

SEQ ID NO: 406227 - RNA, 19 nt, Artificial Sequence
  Description of Artificial Sequence: Synthetic oligonucleotide
  Sense Strand Starting at position 1115 of SEQ ID NO: 318752
gccaaaggagauggucauu

SEQ ID NO: 406228 - RNA, 19 nt, Artificial Sequence
  Description of Artificial Sequence: Synthetic oligonucleotide
  Antisense Strand to SEQ ID NO: 406227
aaugaccaucuccuuuggc

SEQ ID NO: 406229 - RNA, 19 nt, Artificial Sequence
  Description of Artificial Sequence: Synthetic oligonucleotide
  Sense Strand Starting at position 1115 of SEQ ID NO: 318757
aggagauggucauuagcag

SEQ ID NO: 406230 - RNA, 19 nt, Artificial Sequence
  Description of Artificial Sequence: Synthetic oligonucleotide
  Antisense Strand to SEQ ID NO: 406229
cugcuaaugaccaucuccu

SEQ ID NO: 406231 - RNA, 19 nt, Artificial Sequence
  Description of Artificial Sequence: Synthetic oligonucleotide
  Sense Strand Starting at position 1115 of SEQ ID NO: 319059
uugaauaauuuccaaagug

SEQ ID NO: 406232 - RNA, 19 nt, Artificial Sequence
  Description of Artificial Sequence: Synthetic oligonucleotide
  Antisense Strand to SEQ ID NO: 406231
cacuuuggaaauuauucaa

SEQ ID NO: 406233 - RNA, 19 nt, Artificial Sequence
  Description of Artificial Sequence: Synthetic oligonucleotide
  Sense Strand Starting at position 1115 of SEQ ID NO: 319115
ugaggagucauuggucuaa

SEQ ID NO: 406234 - RNA, 19 nt, Artificial Sequence
  Description of Artificial Sequence: Synthetic oligonucleotide
  Antisense Strand to SEQ ID NO: 406233
uuagaccaaugacuccuca

SEQ ID NO: 406235 - RNA, 19 nt, Artificial Sequence
  Description of Artificial Sequence: Synthetic oligonucleotide
  Sense Strand Starting at position 1115 of SEQ ID NO: 319117
aggagucauuggucuaaag

SEQ ID NO: 406236 - RNA, 19 nt, Artificial Sequence
  Description of Artificial Sequence: Synthetic oligonucleotide
  Antisense Strand to SEQ ID NO: 406235
cuuuagaccaaugacuccu

SEQ ID NO: 406237 - RNA, 19 nt, Artificial Sequence
  Description of Artificial Sequence: Synthetic oligonucleotide
  Sense Strand Starting at position 1115 of SEQ ID NO: 319140
aagacuuugcaagggcuaa

SEQ ID NO: 406238 - RNA, 19 nt, Artificial Sequence
  Description of Artificial Sequence: Synthetic oligonucleotide
  Antisense Strand to SEQ ID NO: 406237
uuagcccuugcaaagucuu

SEQ ID NO: 406239 - RNA, 19 nt, Artificial Sequence
  Description of Artificial Sequence: Synthetic oligonucleotide
  Sense Strand Starting at position 1116 of SEQ ID NO: 315285
uuuaucacuguguaagaaa

SEQ ID NO: 406240 - RNA, 19 nt, Artificial Sequence
  Description of Artificial Sequence: Synthetic oligonucleotide
  Antisense Strand to SEQ ID NO: 406239
uuucuuacacagugauaaa

SEQ ID NO: 406241 - RNA, 19 nt, Artificial Sequence
  Description of Artificial Sequence: Synthetic oligonucleotide
  Sense Strand Starting at position 1116 of SEQ ID NO: 315769
auggucauuucugaaugua

SEQ ID NO: 406242 - RNA, 19 nt, Artificial Sequence
  Description of Artificial Sequence: Synthetic oligonucleotide
  Antisense Strand to SEQ ID NO: 406241
uacauucagaaaugaccau

SEQ ID NO: 406243 - RNA, 19 nt, Artificial Sequence
  Description of Artificial Sequence: Synthetic oligonucleotide
  Sense Strand Starting at position 1116 of SEQ ID NO: 315779
cugaauguaccacguguaa

SEQ ID NO: 406244 - RNA, 19 nt, Artificial Sequence
  Description of Artificial Sequence: Synthetic oligonucleotide
  Antisense Strand to SEQ ID NO: 406243
uuacacgugguacauucag

SEQ ID NO: 406245 - RNA, 19 nt, Artificial Sequence
  Description of Artificial Sequence: Synthetic oligonucleotide
  Sense Strand Starting at position 1116 of SEQ ID NO: 315781
gaauguaccacguguaaug

SEQ ID NO: 406246 - RNA, 19 nt, Artificial Sequence
  Description of Artificial Sequence: Synthetic oligonucleotide
  Antisense Strand to SEQ ID NO: 406245
cauuacacgugguacauuc

SEQ ID NO: 406247 - RNA, 19 nt, Artificial Sequence
  Description of Artificial Sequence: Synthetic oligonucleotide
  Sense Strand Starting at position 1116 of SEQ ID NO: 315886
uuccuaaacuaguuuaugu

SEQ ID NO: 406248 - RNA, 19 nt, Artificial Sequence
  Description of Artificial Sequence: Synthetic oligonucleotide
  Antisense Strand to SEQ ID NO: 406247
acauaaacuaguuuaggaa

SEQ ID NO: 406249 - RNA, 19 nt, Artificial Sequence
  Description of Artificial Sequence: Synthetic oligonucleotide
  Sense Strand Starting at position 1116 of SEQ ID NO: 315976
gauacacugcagugaacaa

SEQ ID NO: 406250 - RNA, 19 nt, Artificial Sequence
  Description of Artificial Sequence: Synthetic oligonucleotide
  Antisense Strand to SEQ ID NO: 406249
uuguucacugcaguguauc

SEQ ID NO: 406251 - RNA, 19 nt, Artificial Sequence
  Description of Artificial Sequence: Synthetic oligonucleotide
  Sense Strand Starting at position 1116 of SEQ ID NO: 316008
gugcuaugauucucaauag

SEQ ID NO: 406252 - RNA, 19 nt, Artificial Sequence
  Description of Artificial Sequence: Synthetic oligonucleotide
  Antisense Strand to SEQ ID NO: 406251
cuauugagaaucauagcac

SEQ ID NO: 406253 - RNA, 19 nt, Artificial Sequence
  Description of Artificial Sequence: Synthetic oligonucleotide
  Sense Strand Starting at position 1116 of SEQ ID NO: 316226
uuccaaagguaggagaaau

SEQ ID NO: 406254 - RNA, 19 nt, Artificial Sequence
  Description of Artificial Sequence: Synthetic oligonucleotide
  Antisense Strand to SEQ ID NO: 406253
auuucuccuaccuuuggaa

SEQ ID NO: 406255 - RNA, 19 nt, Artificial Sequence
  Description of Artificial Sequence: Synthetic oligonucleotide
  Sense Strand Starting at position 1116 of SEQ ID NO: 316415
uagaaccgucguuaauagu

SEQ ID NO: 406256 - RNA, 19 nt, Artificial Sequence
  Description of Artificial Sequence: Synthetic oligonucleotide
  Antisense Strand to SEQ ID NO: 406255
acuauuaacgacgguucua

SEQ ID NO: 406257 - RNA, 19 nt, Artificial Sequence
  Description of Artificial Sequence: Synthetic oligonucleotide
  Sense Strand Starting at position 1116 of SEQ ID NO: 316424
cguuaauaguucucaucca

SEQ ID NO: 406258 - RNA, 19 nt, Artificial Sequence
  Description of Artificial Sequence: Synthetic oligonucleotide
  Antisense Strand to SEQ ID NO: 406257
uggaugagaacuauuaacg

SEQ ID NO: 406259 - RNA, 19 nt, Artificial Sequence
  Description of Artificial Sequence: Synthetic oligonucleotide
  Sense Strand Starting at position 1116 of SEQ ID NO: 316459
gccuguuauuaauuaacga

SEQ ID NO: 406260 - RNA, 19 nt, Artificial Sequence
  Description of Artificial Sequence: Synthetic oligonucleotide
  Antisense Strand to SEQ ID NO: 406259
ucguuaauuaauaacaggc

SEQ ID NO: 406261 - RNA, 19 nt, Artificial Sequence
  Description of Artificial Sequence: Synthetic oligonucleotide
  Sense Strand Starting at position 1116 of SEQ ID NO: 316475
cgaauacaaucaucccagu

SEQ ID NO: 406262 - RNA, 19 nt, Artificial Sequence
  Description of Artificial Sequence: Synthetic oligonucleotide
  Antisense Strand to SEQ ID NO: 406261
acugggaugauuguauucg

SEQ ID NO: 406263 - RNA, 19 nt, Artificial Sequence
  Description of Artificial Sequence: Synthetic oligonucleotide
  Sense Strand Starting at position 1116 of SEQ ID NO: 316486
aucccagucguuuagcaau

SEQ ID NO: 406264 - RNA, 19 nt, Artificial Sequence
  Description of Artificial Sequence: Synthetic oligonucleotide
  Antisense Strand to SEQ ID NO: 406263
auugcuaaacgacugggau

SEQ ID NO: 406265 - RNA, 19 nt, Artificial Sequence
  Description of Artificial Sequence: Synthetic oligonucleotide
  Sense Strand Starting at position 1116 of SEQ ID NO: 316536
uugaauacgcucuaaacaa

SEQ ID NO: 406266 - RNA, 19 nt, Artificial Sequence
  Description of Artificial Sequence: Synthetic oligonucleotide
  Antisense Strand to SEQ ID NO: 406265
uuguuuagagcguauucaa

SEQ ID NO: 406267 - RNA, 19 nt, Artificial Sequence
  Description of Artificial Sequence: Synthetic oligonucleotide
  Sense Strand Starting at position 1116 of SEQ ID NO: 316583
ucggucuuuagggaucauu

SEQ ID NO: 406268 - RNA, 19 nt, Artificial Sequence
  Description of Artificial Sequence: Synthetic oligonucleotide
  Antisense Strand to SEQ ID NO: 406267
aaugaucccuaaagaccga

SEQ ID NO: 406269 - RNA, 19 nt, Artificial Sequence
  Description of Artificial Sequence: Synthetic oligonucleotide
  Sense Strand Starting at position 1116 of SEQ ID NO: 316586
gucuuuagggaucauuguu

SEQ ID NO: 406270 - RNA, 19 nt, Artificial Sequence
  Description of Artificial Sequence: Synthetic oligonucleotide
  Antisense Strand to SEQ ID NO: 406269
aacaaugaucccuaaagac

SEQ ID NO: 406271 - RNA, 19 nt, Artificial Sequence
  Description of Artificial Sequence: Synthetic oligonucleotide
  Sense Strand Starting at position 1116 of SEQ ID NO: 317012
cauccuuccgucgauaaac

SEQ ID NO: 406272 - RNA, 19 nt, Artificial Sequence
  Description of Artificial Sequence: Synthetic oligonucleotide
  Antisense Strand to SEQ ID NO: 406271
guuuaucgacggaaggaug

SEQ ID NO: 406273 - RNA, 19 nt, Artificial Sequence
  Description of Artificial Sequence: Synthetic oligonucleotide
  Sense Strand Starting at position 1116 of SEQ ID NO: 317460
ucauuaugcggucaacaac

SEQ ID NO: 406274 - RNA, 19 nt, Artificial Sequence
  Description of Artificial Sequence: Synthetic oligonucleotide
  Antisense Strand to SEQ ID NO: 406273
guuguugaccgcauaauga

SEQ ID NO: 406275 - RNA, 19 nt, Artificial Sequence
  Description of Artificial Sequence: Synthetic oligonucleotide
  Sense Strand Starting at position 1116 of SEQ ID NO: 317532
gcgagaaaugcccaaggga

SEQ ID NO: 406276 - RNA, 19 nt, Artificial Sequence
  Description of Artificial Sequence: Synthetic oligonucleotide
  Antisense Strand to SEQ ID NO: 406275
ucccuugggcauuucucgc

SEQ ID NO: 406277 - RNA, 19 nt, Artificial Sequence
  Description of Artificial Sequence: Synthetic oligonucleotide
  Sense Strand Starting at position 1116 of SEQ ID NO: 317771
uggcucuuucgagaccuca

SEQ ID NO: 406278 - RNA, 19 nt, Artificial Sequence
  Description of Artificial Sequence: Synthetic oligonucleotide
  Antisense Strand to SEQ ID NO: 406277
ugaggucucgaaagagcca

SEQ ID NO: 406279 - RNA, 19 nt, Artificial Sequence
  Description of Artificial Sequence: Synthetic oligonucleotide
  Sense Strand Starting at position 1116 of SEQ ID NO: 317852
ucagaaaguaguugucaga

SEQ ID NO: 406280 - RNA, 19 nt, Artificial Sequence
  Description of Artificial Sequence: Synthetic oligonucleotide
  Antisense Strand to SEQ ID NO: 406279
ucugacaacuacuuucuga

SEQ ID NO: 406281 - RNA, 19 nt, Artificial Sequence
  Description of Artificial Sequence: Synthetic oligonucleotide
  Sense Strand Starting at position 1116 of SEQ ID NO: 317934
ggcguuucuaguuucucau

SEQ ID NO: 406282 - RNA, 19 nt, Artificial Sequence
  Description of Artificial Sequence: Synthetic oligonucleotide
  Antisense Strand to SEQ ID NO: 406281
augagaaacuagaaacgcc

SEQ ID NO: 406283 - RNA, 19 nt, Artificial Sequence
  Description of Artificial Sequence: Synthetic oligonucleotide
  Sense Strand Starting at position 1116 of SEQ ID NO: 317935
gcguuucuaguuucucauu

SEQ ID NO: 406284 - RNA, 19 nt, Artificial Sequence
  Description of Artificial Sequence: Synthetic oligonucleotide
  Antisense Strand to SEQ ID NO: 406283
aaugagaaacuagaaacgc

SEQ ID NO: 406285 - RNA, 19 nt, Artificial Sequence
  Description of Artificial Sequence: Synthetic oligonucleotide
  Sense Strand Starting at position 1116 of SEQ ID NO: 317937
guuucuaguuucucauuua

SEQ ID NO: 406286 - RNA, 19 nt, Artificial Sequence
  Description of Artificial Sequence: Synthetic oligonucleotide
  Antisense Strand to SEQ ID NO: 406285
uaaaugagaaacuagaaac

SEQ ID NO: 406287 - RNA, 19 nt, Artificial Sequence
  Description of Artificial Sequence: Synthetic oligonucleotide
  Sense Strand Starting at position 1116 of SEQ ID NO: 318043
aauacuugaugaguuaaug

SEQ ID NO: 406288 - RNA, 19 nt, Artificial Sequence
  Description of Artificial Sequence: Synthetic oligonucleotide
  Antisense Strand to SEQ ID NO: 406287
cauuaacucaucaaguauu

SEQ ID NO: 406289 - RNA, 19 nt, Artificial Sequence
  Description of Artificial Sequence: Synthetic oligonucleotide
  Sense Strand Starting at position 1116 of SEQ ID NO: 318309
gcuauaaucgcgccacuca

SEQ ID NO: 406290 - RNA, 19 nt, Artificial Sequence
  Description of Artificial Sequence: Synthetic oligonucleotide
  Antisense Strand to SEQ ID NO: 406289
ugaguggcgcgauuauagc

SEQ ID NO: 406291 - RNA, 19 nt, Artificial Sequence
  Description of Artificial Sequence: Synthetic oligonucleotide
  Sense Strand Starting at position 1116 of SEQ ID NO: 318378
aaguaugacuggccauaau

SEQ ID NO: 406292 - RNA, 19 nt, Artificial Sequence
  Description of Artificial Sequence: Synthetic oligonucleotide
  Antisense Strand to SEQ ID NO: 406291
auuauggccagucauacuu

SEQ ID NO: 406293 - RNA, 19 nt, Artificial Sequence
  Description of Artificial Sequence: Synthetic oligonucleotide
  Sense Strand Starting at position 1116 of SEQ ID NO: 318390
ccauaauggaguugugaac

SEQ ID NO: 406294 - RNA, 19 nt, Artificial Sequence
  Description of Artificial Sequence: Synthetic oligonucleotide
  Antisense Strand to SEQ ID NO: 406293
guucacaacuccauuaugg

SEQ ID NO: 406295 - RNA, 19 nt, Artificial Sequence
  Description of Artificial Sequence: Synthetic oligonucleotide
  Sense Strand Starting at position 1116 of SEQ ID NO: 318411
aaugcuauaugaucgcaga

SEQ ID NO: 406296 - RNA, 19 nt, Artificial Sequence
  Description of Artificial Sequence: Synthetic oligonucleotide
  Antisense Strand to SEQ ID NO: 406295
ucugcgaucauauagcauu

SEQ ID NO: 406297 - RNA, 19 nt, Artificial Sequence
  Description of Artificial Sequence: Synthetic oligonucleotide
  Sense Strand Starting at position 1116 of SEQ ID NO: 318438
uaacuaauugcuugugaga

SEQ ID NO: 406298 - RNA, 19 nt, Artificial Sequence
  Description of Artificial Sequence: Synthetic oligonucleotide
  Antisense Strand to SEQ ID NO: 406297
ucucacaagcaauuaguua

SEQ ID NO: 406299 - RNA, 19 nt, Artificial Sequence
  Description of Artificial Sequence: Synthetic oligonucleotide
  Sense Strand Starting at position 1116 of SEQ ID NO: 318460
ugacuaacugcugguaagu

SEQ ID NO: 406300 - RNA, 19 nt, Artificial Sequence
  Description of Artificial Sequence: Synthetic oligonucleotide
  Antisense Strand to SEQ ID NO: 406299
acuuaccagcaguuaguca

SEQ ID NO: 406301 - RNA, 19 nt, Artificial Sequence
  Description of Artificial Sequence: Synthetic oligonucleotide
  Sense Strand Starting at position 1116 of SEQ ID NO: 318469
gcugguaaguuucugagau

SEQ ID NO: 406302 - RNA, 19 nt, Artificial Sequence
  Description of Artificial Sequence: Synthetic oligonucleotide
  Antisense Strand to SEQ ID NO: 406301
aucucagaaacuuaccagc

SEQ ID NO: 406303 - RNA, 19 nt, Artificial Sequence
  Description of Artificial Sequence: Synthetic oligonucleotide
  Sense Strand Starting at position 1116 of SEQ ID NO: 318532
ggcugugucacggacagua

SEQ ID NO: 406304 - RNA, 19 nt, Artificial Sequence
  Description of Artificial Sequence: Synthetic oligonucleotide
  Antisense Strand to SEQ ID NO: 406303
uacuguccgugacacagcc

SEQ ID NO: 406305 - RNA, 19 nt, Artificial Sequence
  Description of Artificial Sequence: Synthetic oligonucleotide
  Sense Strand Starting at position 1116 of SEQ ID NO: 318534
cugugucacggacaguaaa

SEQ ID NO: 406306 - RNA, 19 nt, Artificial Sequence
  Description of Artificial Sequence: Synthetic oligonucleotide
  Antisense Strand to SEQ ID NO: 406305
uuuacuguccgugacacag

SEQ ID NO: 406307 - RNA, 19 nt, Artificial Sequence
  Description of Artificial Sequence: Synthetic oligonucleotide
  Sense Strand Starting at position 1116 of SEQ ID NO: 318568
aaguuaauagaaugugauc

SEQ ID NO: 406308 - RNA, 19 nt, Artificial Sequence
  Description of Artificial Sequence: Synthetic oligonucleotide
  Antisense Strand to SEQ ID NO: 406307
gaucacauucuauuaacuu

SEQ ID NO: 406309 - RNA, 19 nt, Artificial Sequence
  Description of Artificial Sequence: Synthetic oligonucleotide
  Sense Strand Starting at position 1116 of SEQ ID NO: 318858
gagccaaacucgucugaaa

SEQ ID NO: 406310 - RNA, 19 nt, Artificial Sequence
  Description of Artificial Sequence: Synthetic oligonucleotide
  Antisense Strand to SEQ ID NO: 406309
uuucagacgaguuuggcuc

SEQ ID NO: 406311 - RNA, 19 nt, Artificial Sequence
  Description of Artificial Sequence: Synthetic oligonucleotide
  Sense Strand Starting at position 1116 of SEQ ID NO: 318959
aagaguaaguugcugacau

SEQ ID NO: 406312 - RNA, 19 nt, Artificial Sequence
  Description of Artificial Sequence: Synthetic oligonucleotide
  Antisense Strand to SEQ ID NO: 406311
augucagcaacuuacucuu

SEQ ID NO: 406313 - RNA, 19 nt, Artificial Sequence
  Description of Artificial Sequence: Synthetic oligonucleotide
  Sense Strand Starting at position 1116 of SEQ ID NO: 319019
agacaaguauagucuauau

SEQ ID NO: 406314 - RNA, 19 nt, Artificial Sequence
  Description of Artificial Sequence: Synthetic oligonucleotide
  Antisense Strand to SEQ ID NO: 406313
auauagacuauacuugucu

SEQ ID NO: 406315 - RNA, 19 nt, Artificial Sequence
  Description of Artificial Sequence: Synthetic oligonucleotide
  Sense Strand Starting at position 1116 of SEQ ID NO: 319206
ggaacaguuccuuaguccu

SEQ ID NO: 406316 - RNA, 19 nt, Artificial Sequence
  Description of Artificial Sequence: Synthetic oligonucleotide
  Antisense Strand to SEQ ID NO: 406315
aggacuaaggaacuguucc

SEQ ID NO: 406317 - RNA, 19 nt, Artificial Sequence
  Description of Artificial Sequence: Synthetic oligonucleotide
  Sense Strand Starting at position 1116 of SEQ ID NO: 319209
acaguuccuuaguccuuaa

SEQ ID NO: 406318 - RNA, 19 nt, Artificial Sequence
  Description of Artificial Sequence: Synthetic oligonucleotide
  Antisense Strand to SEQ ID NO: 406317
uuaaggacuaaggaacugu

SEQ ID NO: 406319 - RNA, 19 nt, Artificial Sequence
  Description of Artificial Sequence: Synthetic oligonucleotide
  Sense Strand Starting at position 1117 of SEQ ID NO: 315303
guuugugaccuguaccauu

SEQ ID NO: 406320 - RNA, 19 nt, Artificial Sequence
  Description of Artificial Sequence: Synthetic oligonucleotide
  Antisense Strand to SEQ ID NO: 406319
aaugguacaggucacaaac

SEQ ID NO: 406321 - RNA, 19 nt, Artificial Sequence
  Description of Artificial Sequence: Synthetic oligonucleotide
  Sense Strand Starting at position 1117 of SEQ ID NO: 315403
cgggaauccuaucucaaag

SEQ ID NO: 406322 - RNA, 19 nt, Artificial Sequence
  Description of Artificial Sequence: Synthetic oligonucleotide
  Antisense Strand to SEQ ID NO: 406321
cuuugagauaggauucccg

SEQ ID NO: 406323 - RNA, 19 nt, Artificial Sequence
  Description of Artificial Sequence: Synthetic oligonucleotide
  Sense Strand Starting at position 1117 of SEQ ID NO: 316037
gcuaacgcauuucuaauua

SEQ ID NO: 406324 - RNA, 19 nt, Artificial Sequence
  Description of Artificial Sequence: Synthetic oligonucleotide
  Antisense Strand to SEQ ID NO: 406323
uaauuagaaaugcguuagc

SEQ ID NO: 406325 - RNA, 19 nt, Artificial Sequence
  Description of Artificial Sequence: Synthetic oligonucleotide
  Sense Strand Starting at position 1117 of SEQ ID NO: 316348
cuggcagcgcuugcuaauu

SEQ ID NO: 406326 - RNA, 19 nt, Artificial Sequence
  Description of Artificial Sequence: Synthetic oligonucleotide
  Antisense Strand to SEQ ID NO: 406325
aauuagcaagcgcugccag

SEQ ID NO: 406327 - RNA, 19 nt, Artificial Sequence
  Description of Artificial Sequence: Synthetic oligonucleotide
  Sense Strand Starting at position 1117 of SEQ ID NO: 316747
gaaguaagagcgugacaac

SEQ ID NO: 406328 - RNA, 19 nt, Artificial Sequence
  Description of Artificial Sequence: Synthetic oligonucleotide
  Antisense Strand to SEQ ID NO: 406327
guugucacgcucuuacuuc

SEQ ID NO: 406329 - RNA, 19 nt, Artificial Sequence
  Description of Artificial Sequence: Synthetic oligonucleotide
  Sense Strand Starting at position 1117 of SEQ ID NO: 316782
guacuuuaccugcaggaca

SEQ ID NO: 406330 - RNA, 19 nt, Artificial Sequence
  Description of Artificial Sequence: Synthetic oligonucleotide
  Antisense Strand to SEQ ID NO: 406329
uguccugcagguaaaguac

SEQ ID NO: 406331 - RNA, 19 nt, Artificial Sequence
  Description of Artificial Sequence: Synthetic oligonucleotide
  Sense Strand Starting at position 1117 of SEQ ID NO: 317287
agaaguaucgcgggaagag

SEQ ID NO: 406332 - RNA, 19 nt, Artificial Sequence
  Description of Artificial Sequence: Synthetic oligonucleotide
  Antisense Strand to SEQ ID NO: 406331
cucuucccgcgauacuucu

SEQ ID NO: 406333 - RNA, 19 nt, Artificial Sequence
  Description of Artificial Sequence: Synthetic oligonucleotide
  Sense Strand Starting at position 1117 of SEQ ID NO: 317363
gagcaaucgccaccgcuuu

SEQ ID NO: 406334 - RNA, 19 nt, Artificial Sequence
  Description of Artificial Sequence: Synthetic oligonucleotide
  Antisense Strand to SEQ ID NO: 406333
aaagcgguggcgauugcuc

SEQ ID NO: 406335 - RNA, 19 nt, Artificial Sequence
  Description of Artificial Sequence: Synthetic oligonucleotide
  Sense Strand Starting at position 1117 of SEQ ID NO: 317435
ggaaguuguagccaucacu

SEQ ID NO: 406336 - RNA, 19 nt, Artificial Sequence
  Description of Artificial Sequence: Synthetic oligonucleotide
  Antisense Strand to SEQ ID NO: 406335
agugauggcuacaacuucc

SEQ ID NO: 406337 - RNA, 19 nt, Artificial Sequence
  Description of Artificial Sequence: Synthetic oligonucleotide
  Sense Strand Starting at position 1117 of SEQ ID NO: 317611
gauagcuuagucgacaugu

SEQ ID NO: 406338 - RNA, 19 nt, Artificial Sequence
  Description of Artificial Sequence: Synthetic oligonucleotide
  Antisense Strand to SEQ ID NO: 406337
acaugucgacuaagcuauc

SEQ ID NO: 406339 - RNA, 19 nt, Artificial Sequence
  Description of Artificial Sequence: Synthetic oligonucleotide
  Sense Strand Starting at position 1117 of SEQ ID NO: 317613
uagcuuagucgacauguga

SEQ ID NO: 406340 - RNA, 19 nt, Artificial Sequence
  Description of Artificial Sequence: Synthetic oligonucleotide
  Antisense Strand to SEQ ID NO: 406339
ucacaugucgacuaagcua

SEQ ID NO: 406341 - RNA, 19 nt, Artificial Sequence
  Description of Artificial Sequence: Synthetic oligonucleotide
  Sense Strand Starting at position 1117 of SEQ ID NO: 317617
uuagucgacaugugaauag

SEQ ID NO: 406342 - RNA, 19 nt, Artificial Sequence
  Description of Artificial Sequence: Synthetic oligonucleotide
  Antisense Strand to SEQ ID NO: 406341
cuauucacaugucgacuaa

SEQ ID NO: 406343 - RNA, 19 nt, Artificial Sequence
  Description of Artificial Sequence: Synthetic oligonucleotide
  Sense Strand Starting at position 1117 of SEQ ID NO: 317626
augugaauagcgcaauaau

SEQ ID NO: 406344 - RNA, 19 nt, Artificial Sequence
  Description of Artificial Sequence: Synthetic oligonucleotide
  Antisense Strand to SEQ ID NO: 406343
auuauugcgcuauucacau

SEQ ID NO: 406345 - RNA, 19 nt, Artificial Sequence
  Description of Artificial Sequence: Synthetic oligonucleotide
  Sense Strand Starting at position 1117 of SEQ ID NO: 317629
ugaauagcgcaauaaugau

SEQ ID NO: 406346 - RNA, 19 nt, Artificial Sequence
  Description of Artificial Sequence: Synthetic oligonucleotide
  Antisense Strand to SEQ ID NO: 406345
aucauuauugcgcuauuca

SEQ ID NO: 406347 - RNA, 19 nt, Artificial Sequence
  Description of Artificial Sequence: Synthetic oligonucleotide
  Sense Strand Starting at position 1117 of SEQ ID NO: 317661
gguguuacuagugaaaggu

SEQ ID NO: 406348 - RNA, 19 nt, Artificial Sequence
  Description of Artificial Sequence: Synthetic oligonucleotide
  Antisense Strand to SEQ ID NO: 406347
accuuucacuaguaacacc

SEQ ID NO: 406349 - RNA, 19 nt, Artificial Sequence
  Description of Artificial Sequence: Synthetic oligonucleotide
  Sense Strand Starting at position 1117 of SEQ ID NO: 317706
aaaggcucuuuaguggaaa

SEQ ID NO: 406350 - RNA, 19 nt, Artificial Sequence
  Description of Artificial Sequence: Synthetic oligonucleotide
  Antisense Strand to SEQ ID NO: 406349
uuuccacuaaagagccuuu

SEQ ID NO: 406351 - RNA, 19 nt, Artificial Sequence
  Description of Artificial Sequence: Synthetic oligonucleotide
  Sense Strand Starting at position 1117 of SEQ ID NO: 317763
auuaucgaucagcaaauau

SEQ ID NO: 406352 - RNA, 19 nt, Artificial Sequence
  Description of Artificial Sequence: Synthetic oligonucleotide
  Antisense Strand to SEQ ID NO: 406351
auauuugcugaucgauaau

SEQ ID NO: 406353 - RNA, 19 nt, Artificial Sequence
  Description of Artificial Sequence: Synthetic oligonucleotide
  Sense Strand Starting at position 1117 of SEQ ID NO: 317774
gcaaauauucccuaaguag

SEQ ID NO: 406354 - RNA, 19 nt, Artificial Sequence
  Description of Artificial Sequence: Synthetic oligonucleotide
  Antisense Strand to SEQ ID NO: 406353
cuacuuagggaauauuugc

SEQ ID NO: 406355 - RNA, 19 nt, Artificial Sequence
  Description of Artificial Sequence: Synthetic oligonucleotide
  Sense Strand Starting at position 1117 of SEQ ID NO: 317799
uauacauugcccuggguaa

SEQ ID NO: 406356 - RNA, 19 nt, Artificial Sequence
  Description of Artificial Sequence: Synthetic oligonucleotide
  Antisense Strand to SEQ ID NO: 406355
uuacccagggcaauguaua

SEQ ID NO: 406357 - RNA, 19 nt, Artificial Sequence
  Description of Artificial Sequence: Synthetic oligonucleotide
  Sense Strand Starting at position 1117 of SEQ ID NO: 317887
uaaccugaggucuguggau

SEQ ID NO: 406358 - RNA, 19 nt, Artificial Sequence
  Description of Artificial Sequence: Synthetic oligonucleotide
  Antisense Strand to SEQ ID NO: 406357
auccacagaccucagguua

SEQ ID NO: 406359 - RNA, 19 nt, Artificial Sequence
  Description of Artificial Sequence: Synthetic oligonucleotide
  Sense Strand Starting at position 1117 of SEQ ID NO: 317916
gugauugggcuucagaguu

SEQ ID NO: 406360 - RNA, 19 nt, Artificial Sequence
  Description of Artificial Sequence: Synthetic oligonucleotide
  Antisense Strand to SEQ ID NO: 406359
aacucugaagcccaaucac

SEQ ID NO: 406361 - RNA, 19 nt, Artificial Sequence
  Description of Artificial Sequence: Synthetic oligonucleotide
  Sense Strand Starting at position 1117 of SEQ ID NO: 318100
aguacuugacauugagaac

SEQ ID NO: 406362 - RNA, 19 nt, Artificial Sequence
  Description of Artificial Sequence: Synthetic oligonucleotide
  Antisense Strand to SEQ ID NO: 406361
guucucaaugucaaguacu

SEQ ID NO: 406363 - RNA, 19 nt, Artificial Sequence
  Description of Artificial Sequence: Synthetic oligonucleotide
  Sense Strand Starting at position 1117 of SEQ ID NO: 318229
augguucuucccuggaaga

SEQ ID NO: 406364 - RNA, 19 nt, Artificial Sequence
  Description of Artificial Sequence: Synthetic oligonucleotide
  Antisense Strand to SEQ ID NO: 406363
ucuuccagggaagaaccau

SEQ ID NO: 406365 - RNA, 19 nt, Artificial Sequence
  Description of Artificial Sequence: Synthetic oligonucleotide
  Sense Strand Starting at position 1117 of SEQ ID NO: 318230
ugguucuucccuggaagag

SEQ ID NO: 406366 - RNA, 19 nt, Artificial Sequence
  Description of Artificial Sequence: Synthetic oligonucleotide
  Antisense Strand to SEQ ID NO: 406365
cucuuccagggaagaacca

SEQ ID NO: 406367 - RNA, 19 nt, Artificial Sequence
  Description of Artificial Sequence: Synthetic oligonucleotide
  Sense Strand Starting at position 1117 of SEQ ID NO: 318251
ugaagucagguucagugau

SEQ ID NO: 406368 - RNA, 19 nt, Artificial Sequence
  Description of Artificial Sequence: Synthetic oligonucleotide
  Antisense Strand to SEQ ID NO: 406367
aucacugaaccugacuuca

SEQ ID NO: 406369 - RNA, 19 nt, Artificial Sequence
  Description of Artificial Sequence: Synthetic oligonucleotide
  Sense Strand Starting at position 1117 of SEQ ID NO: 318330
gggagacugguguguauug

SEQ ID NO: 406370 - RNA, 19 nt, Artificial Sequence
  Description of Artificial Sequence: Synthetic oligonucleotide
  Antisense Strand to SEQ ID NO: 406369
caauacacaccagucuccc

SEQ ID NO: 406371 - RNA, 19 nt, Artificial Sequence
  Description of Artificial Sequence: Synthetic oligonucleotide
  Sense Strand Starting at position 1117 of SEQ ID NO: 318332
gagacugguguguauugca

SEQ ID NO: 406372 - RNA, 19 nt, Artificial Sequence
  Description of Artificial Sequence: Synthetic oligonucleotide
  Antisense Strand to SEQ ID NO: 406371
ugcaauacacaccagucuc

SEQ ID NO: 406373 - RNA, 19 nt, Artificial Sequence
  Description of Artificial Sequence: Synthetic oligonucleotide
  Sense Strand Starting at position 1117 of SEQ ID NO: 318360
acucaauaucgugauauau

SEQ ID NO: 406374 - RNA, 19 nt, Artificial Sequence
  Description of Artificial Sequence: Synthetic oligonucleotide
  Antisense Strand to SEQ ID NO: 406373
auauaucacgauauugagu

SEQ ID NO: 406375 - RNA, 19 nt, Artificial Sequence
  Description of Artificial Sequence: Synthetic oligonucleotide
  Sense Strand Starting at position 1117 of SEQ ID NO: 318829
gaccaaauugaguggugua

SEQ ID NO: 406376 - RNA, 19 nt, Artificial Sequence
  Description of Artificial Sequence: Synthetic oligonucleotide
  Antisense Strand to SEQ ID NO: 406375
uacaccacucaauuugguc

SEQ ID NO: 406377 - RNA, 19 nt, Artificial Sequence
  Description of Artificial Sequence: Synthetic oligonucleotide
  Sense Strand Starting at position 1117 of SEQ ID NO: 318830
accaaauugagugguguau

SEQ ID NO: 406378 - RNA, 19 nt, Artificial Sequence
  Description of Artificial Sequence: Synthetic oligonucleotide
  Antisense Strand to SEQ ID NO: 406377
auacaccacucaauuuggu

SEQ ID NO: 406379 - RNA, 19 nt, Artificial Sequence
  Description of Artificial Sequence: Synthetic oligonucleotide
  Sense Strand Starting at position 1117 of SEQ ID NO: 318862
gcacaauguaguggaaaga

SEQ ID NO: 406380 - RNA, 19 nt, Artificial Sequence
  Description of Artificial Sequence: Synthetic oligonucleotide
  Antisense Strand to SEQ ID NO: 406379
ucuuuccacuacauugugc

SEQ ID NO: 406381 - RNA, 19 nt, Artificial Sequence
  Description of Artificial Sequence: Synthetic oligonucleotide
  Sense Strand Starting at position 1117 of SEQ ID NO: 318921
agguauaugcuugacaguu

SEQ ID NO: 406382 - RNA, 19 nt, Artificial Sequence
  Description of Artificial Sequence: Synthetic oligonucleotide
  Antisense Strand to SEQ ID NO: 406381
aacugucaagcauauaccu

SEQ ID NO: 406383 - RNA, 19 nt, Artificial Sequence
  Description of Artificial Sequence: Synthetic oligonucleotide
  Sense Strand Starting at position 1117 of SEQ ID NO: 318947
uuugucaaucuugagagua

SEQ ID NO: 406384 - RNA, 19 nt, Artificial Sequence
  Description of Artificial Sequence: Synthetic oligonucleotide
  Antisense Strand to SEQ ID NO: 406383
uacucucaagauugacaaa

SEQ ID NO: 406385 - RNA, 19 nt, Artificial Sequence
  Description of Artificial Sequence: Synthetic oligonucleotide
  Sense Strand Starting at position 1117 of SEQ ID NO: 318998
ucaucauacuguuuaugau

SEQ ID NO: 406386 - RNA, 19 nt, Artificial Sequence
  Description of Artificial Sequence: Synthetic oligonucleotide
  Antisense Strand to SEQ ID NO: 406385
aucauaaacaguaugauga

SEQ ID NO: 406387 - RNA, 19 nt, Artificial Sequence
  Description of Artificial Sequence: Synthetic oligonucleotide
  Sense Strand Starting at position 1117 of SEQ ID NO: 319027
gcacaugcuccauaaggau

SEQ ID NO: 406388 - RNA, 19 nt, Artificial Sequence
  Description of Artificial Sequence: Synthetic oligonucleotide
  Antisense Strand to SEQ ID NO: 406387
auccuuauggagcaugugc

SEQ ID NO: 406389 - RNA, 19 nt, Artificial Sequence
  Description of Artificial Sequence: Synthetic oligonucleotide
  Sense Strand Starting at position 1117 of SEQ ID NO: 319058
uguuuaugacauugaacuu

SEQ ID NO: 406390 - RNA, 19 nt, Artificial Sequence
  Description of Artificial Sequence: Synthetic oligonucleotide
  Antisense Strand to SEQ ID NO: 406389
aaguucaaugucauaaaca

SEQ ID NO: 406391 - RNA, 19 nt, Artificial Sequence
  Description of Artificial Sequence: Synthetic oligonucleotide
  Sense Strand Starting at position 1117 of SEQ ID NO: 319083
guaugcuaaggaugaauaa

SEQ ID NO: 406392 - RNA, 19 nt, Artificial Sequence
  Description of Artificial Sequence: Synthetic oligonucleotide
  Antisense Strand to SEQ ID NO: 406391
uuauucauccuuagcauac

SEQ ID NO: 406393 - RNA, 19 nt, Artificial Sequence
  Description of Artificial Sequence: Synthetic oligonucleotide
  Sense Strand Starting at position 1117 of SEQ ID NO: 319093
gaugaauaaugggauauca

SEQ ID NO: 406394 - RNA, 19 nt, Artificial Sequence
  Description of Artificial Sequence: Synthetic oligonucleotide
  Antisense Strand to SEQ ID NO: 406393
ugauaucccauuauucauc

SEQ ID NO: 406395 - RNA, 19 nt, Artificial Sequence
  Description of Artificial Sequence: Synthetic oligonucleotide
  Sense Strand Starting at position 1117 of SEQ ID NO: 319122
aggguagcuccugaaggau

SEQ ID NO: 406396 - RNA, 19 nt, Artificial Sequence
  Description of Artificial Sequence: Synthetic oligonucleotide
  Antisense Strand to SEQ ID NO: 406395
auccuucaggagcuacccu

SEQ ID NO: 406397 - RNA, 19 nt, Artificial Sequence
  Description of Artificial Sequence: Synthetic oligonucleotide
  Sense Strand Starting at position 1117 of SEQ ID NO: 319149
ccaagucaaggauguuaga

SEQ ID NO: 406398 - RNA, 19 nt, Artificial Sequence
  Description of Artificial Sequence: Synthetic oligonucleotide
  Antisense Strand to SEQ ID NO: 406397
ucuaacauccuugacuugg

SEQ ID NO: 406399 - RNA, 19 nt, Artificial Sequence
  Description of Artificial Sequence: Synthetic oligonucleotide
  Sense Strand Starting at position 1118 of SEQ ID NO: 315258
aggcauacgacuugaguuu

SEQ ID NO: 406400 - RNA, 19 nt, Artificial Sequence
  Description of Artificial Sequence: Synthetic oligonucleotide
  Antisense Strand to SEQ ID NO: 406399
aaacucaagucguaugccu

SEQ ID NO: 406401 - RNA, 19 nt, Artificial Sequence
  Description of Artificial Sequence: Synthetic oligonucleotide
  Sense Strand Starting at position 1118 of SEQ ID NO: 315870
acuugcagucucuaaguca

SEQ ID NO: 406402 - RNA, 19 nt, Artificial Sequence
  Description of Artificial Sequence: Synthetic oligonucleotide
  Antisense Strand to SEQ ID NO: 406401
ugacuuagagacugcaagu

SEQ ID NO: 406403 - RNA, 19 nt, Artificial Sequence
  Description of Artificial Sequence: Synthetic oligonucleotide
  Sense Strand Starting at position 1118 of SEQ ID NO: 315877
gucucuaagucagugaaag

SEQ ID NO: 406404 - RNA, 19 nt, Artificial Sequence
  Description of Artificial Sequence: Synthetic oligonucleotide
  Antisense Strand to SEQ ID NO: 406403
cuuucacugacuuagagac

SEQ ID NO: 406405 - RNA, 19 nt, Artificial Sequence
  Description of Artificial Sequence: Synthetic oligonucleotide
  Sense Strand Starting at position 1118 of SEQ ID NO: 315939
gugcaauuaguucggagaa

SEQ ID NO: 406406 - RNA, 19 nt, Artificial Sequence
  Description of Artificial Sequence: Synthetic oligonucleotide
  Antisense Strand to SEQ ID NO: 406405
uucuccgaacuaauugcac

SEQ ID NO: 406407 - RNA, 19 nt, Artificial Sequence
  Description of Artificial Sequence: Synthetic oligonucleotide
  Sense Strand Starting at position 1118 of SEQ ID NO: 315993
ggauguuauuuaugaaacu

SEQ ID NO: 406408 - RNA, 19 nt, Artificial Sequence
  Description of Artificial Sequence: Synthetic oligonucleotide
  Antisense Strand to SEQ ID NO: 406407
aguuucauaaauaacaucc

SEQ ID NO: 406409 - RNA, 19 nt, Artificial Sequence
  Description of Artificial Sequence: Synthetic oligonucleotide
  Sense Strand Starting at position 1118 of SEQ ID NO: 316395
ucucuuuaacggcaaucua

SEQ ID NO: 406410 - RNA, 19 nt, Artificial Sequence
  Description of Artificial Sequence: Synthetic oligonucleotide
  Antisense Strand to SEQ ID NO: 406409
uagauugccguuaaagaga

SEQ ID NO: 406411 - RNA, 19 nt, Artificial Sequence
  Description of Artificial Sequence: Synthetic oligonucleotide
  Sense Strand Starting at position 1118 of SEQ ID NO: 316454
augcucacauagucauauu

SEQ ID NO: 406412 - RNA, 19 nt, Artificial Sequence
  Description of Artificial Sequence: Synthetic oligonucleotide
  Antisense Strand to SEQ ID NO: 406411
aauaugacuaugugagcau

SEQ ID NO: 406413 - RNA, 19 nt, Artificial Sequence
  Description of Artificial Sequence: Synthetic oligonucleotide
  Sense Strand Starting at position 1118 of SEQ ID NO: 316464
agucauauugauugucucu

SEQ ID NO: 406414 - RNA, 19 nt, Artificial Sequence
  Description of Artificial Sequence: Synthetic oligonucleotide
  Antisense Strand to SEQ ID NO: 406413
agagacaaucaauaugacu

SEQ ID NO: 406415 - RNA, 19 nt, Artificial Sequence
  Description of Artificial Sequence: Synthetic oligonucleotide
  Sense Strand Starting at position 1118 of SEQ ID NO: 316469
uauugauugucucugggaa

SEQ ID NO: 406416 - RNA, 19 nt, Artificial Sequence
  Description of Artificial Sequence: Synthetic oligonucleotide
  Antisense Strand to SEQ ID NO: 406415
uucccagagacaaucaaua

SEQ ID NO: 406417 - RNA, 19 nt, Artificial Sequence
  Description of Artificial Sequence: Synthetic oligonucleotide
  Sense Strand Starting at position 1118 of SEQ ID NO: 316470
auugauugucucugggaaa

SEQ ID NO: 406418 - RNA, 19 nt, Artificial Sequence
  Description of Artificial Sequence: Synthetic oligonucleotide
  Antisense Strand to SEQ ID NO: 406417
uuucccagagacaaucaau

SEQ ID NO: 406419 - RNA, 19 nt, Artificial Sequence
  Description of Artificial Sequence: Synthetic oligonucleotide
  Sense Strand Starting at position 1118 of SEQ ID NO: 316558
guuugugaccuguaccauu

SEQ ID NO: 406420 - RNA, 19 nt, Artificial Sequence
  Description of Artificial Sequence: Synthetic oligonucleotide
  Antisense Strand to SEQ ID NO: 406419
aaugguacaggucacaaac

SEQ ID NO: 406421 - RNA, 19 nt, Artificial Sequence
  Description of Artificial Sequence: Synthetic oligonucleotide
  Sense Strand Starting at position 1118 of SEQ ID NO: 316658
cgggaauccuaucucaaag

SEQ ID NO: 406422 - RNA, 19 nt, Artificial Sequence
  Description of Artificial Sequence: Synthetic oligonucleotide
  Antisense Strand to SEQ ID NO: 406421
cuuugagauaggauucccg

SEQ ID NO: 406423 - RNA, 19 nt, Artificial Sequence
  Description of Artificial Sequence: Synthetic oligonucleotide
  Sense Strand Starting at position 1118 of SEQ ID NO: 317267
cccauaguauaagcguaua

SEQ ID NO: 406424 - RNA, 19 nt, Artificial Sequence
  Description of Artificial Sequence: Synthetic oligonucleotide
  Antisense Strand to SEQ ID NO: 406423
uauacgcuuauacuauggg

SEQ ID NO: 406425 - RNA, 19 nt, Artificial Sequence
  Description of Artificial Sequence: Synthetic oligonucleotide
  Sense Strand Starting at position 1118 of SEQ ID NO: 317292
gcuaacgcauuucuaauua

SEQ ID NO: 406426 - RNA, 19 nt, Artificial Sequence
  Description of Artificial Sequence: Synthetic oligonucleotide
  Antisense Strand to SEQ ID NO: 406425
uaauuagaaaugcguuagc

SEQ ID NO: 406427 - RNA, 19 nt, Artificial Sequence
  Description of Artificial Sequence: Synthetic oligonucleotide
  Sense Strand Starting at position 1118 of SEQ ID NO: 317603
cuggcagcgcuugcuaauu

SEQ ID NO: 406428 - RNA, 19 nt, Artificial Sequence
  Description of Artificial Sequence: Synthetic oligonucleotide
  Antisense Strand to SEQ ID NO: 406427
aauuagcaagcgcugccag

SEQ ID NO: 406429 - RNA, 19 nt, Artificial Sequence
  Description of Artificial Sequence: Synthetic oligonucleotide
  Sense Strand Starting at position 1118 of SEQ ID NO: 317630
gcaagaguuugucucucca

SEQ ID NO: 406430 - RNA, 19 nt, Artificial Sequence
  Description of Artificial Sequence: Synthetic oligonucleotide
  Antisense Strand to SEQ ID NO: 406429
uggagagacaaacucuugc

SEQ ID NO: 406431 - RNA, 19 nt, Artificial Sequence
  Description of Artificial Sequence: Synthetic oligonucleotide
  Sense Strand Starting at position 1118 of SEQ ID NO: 318002
gaaguaagagcgugacaac

SEQ ID NO: 406432 - RNA, 19 nt, Artificial Sequence
  Description of Artificial Sequence: Synthetic oligonucleotide
  Antisense Strand to SEQ ID NO: 406431
guugucacgcucuuacuuc

SEQ ID NO: 406433 - RNA, 19 nt, Artificial Sequence
  Description of Artificial Sequence: Synthetic oligonucleotide
  Sense Strand Starting at position 1118 of SEQ ID NO: 318037
guacuuuaccugcaggaca

SEQ ID NO: 406434 - RNA, 19 nt, Artificial Sequence
  Description of Artificial Sequence: Synthetic oligonucleotide
  Antisense Strand to SEQ ID NO: 406433
uguccugcagguaaaguac

SEQ ID NO: 406435 - RNA, 19 nt, Artificial Sequence
  Description of Artificial Sequence: Synthetic oligonucleotide
  Sense Strand Starting at position 1118 of SEQ ID NO: 318542
agaaguaucgcgggaagag

SEQ ID NO: 406436 - RNA, 19 nt, Artificial Sequence
  Description of Artificial Sequence: Synthetic oligonucleotide
  Antisense Strand to SEQ ID NO: 406435
cucuucccgcgauacuucu

SEQ ID NO: 406437 - RNA, 19 nt, Artificial Sequence
  Description of Artificial Sequence: Synthetic oligonucleotide
  Sense Strand Starting at position 1118 of SEQ ID NO: 318606
ccagguauuugagagcaau

SEQ ID NO: 406438 - RNA, 19 nt, Artificial Sequence
  Description of Artificial Sequence: Synthetic oligonucleotide
  Antisense Strand to SEQ ID NO: 406437
auugcucucaaauaccugg

SEQ ID NO: 406439 - RNA, 19 nt, Artificial Sequence
  Description of Artificial Sequence: Synthetic oligonucleotide
  Sense Strand Starting at position 1118 of SEQ ID NO: 318618
gagcaaucgccaccgcuuu

SEQ ID NO: 406440 - RNA, 19 nt, Artificial Sequence
  Description of Artificial Sequence: Synthetic oligonucleotide
  Antisense Strand to SEQ ID NO: 406439
aaagcgguggcgauugcuc

SEQ ID NO: 406441 - RNA, 19 nt, Artificial Sequence
  Description of Artificial Sequence: Synthetic oligonucleotide
  Sense Strand Starting at position 1118 of SEQ ID NO: 318690
ggaaguuguagccaucacu

SEQ ID NO: 406442 - RNA, 19 nt, Artificial Sequence
  Description of Artificial Sequence: Synthetic oligonucleotide
  Antisense Strand to SEQ ID NO: 406441
agugauggcuacaacuucc

SEQ ID NO: 406443 - RNA, 19 nt, Artificial Sequence
  Description of Artificial Sequence: Synthetic oligonucleotide
  Sense Strand Starting at position 1118 of SEQ ID NO: 318864
gugauagcuuagucgacau

SEQ ID NO: 406444 - RNA, 19 nt, Artificial Sequence
  Description of Artificial Sequence: Synthetic oligonucleotide
  Antisense Strand to SEQ ID NO: 406443
augucgacuaagcuaucac

SEQ ID NO: 406445 - RNA, 19 nt, Artificial Sequence
  Description of Artificial Sequence: Synthetic oligonucleotide
  Sense Strand Starting at position 1118 of SEQ ID NO: 318866
gauagcuuagucgacaugu

SEQ ID NO: 406446 - RNA, 19 nt, Artificial Sequence
  Description of Artificial Sequence: Synthetic oligonucleotide
  Antisense Strand to SEQ ID NO: 406445
acaugucgacuaagcuauc

SEQ ID NO: 406447 - RNA, 19 nt, Artificial Sequence
  Description of Artificial Sequence: Synthetic oligonucleotide
  Sense Strand Starting at position 1118 of SEQ ID NO: 318868
uagcuuagucgacauguga

SEQ ID NO: 406448 - RNA, 19 nt, Artificial Sequence
  Description of Artificial Sequence: Synthetic oligonucleotide
  Antisense Strand to SEQ ID NO: 406447
ucacaugucgacuaagcua

SEQ ID NO: 406449 - RNA, 19 nt, Artificial Sequence
  Description of Artificial Sequence: Synthetic oligonucleotide
  Sense Strand Starting at position 1118 of SEQ ID NO: 318872
uuagucgacaugugaauag

SEQ ID NO: 406450 - RNA, 19 nt, Artificial Sequence
  Description of Artificial Sequence: Synthetic oligonucleotide
  Antisense Strand to SEQ ID NO: 406449
cuauucacaugucgacuaa

SEQ ID NO: 406451 - RNA, 19 nt, Artificial Sequence
  Description of Artificial Sequence: Synthetic oligonucleotide
  Sense Strand Starting at position 1118 of SEQ ID NO: 318881
augugaauagcgcaauaau

SEQ ID NO: 406452 - RNA, 19 nt, Artificial Sequence
  Description of Artificial Sequence: Synthetic oligonucleotide
  Antisense Strand to SEQ ID NO: 406451
auuauugcgcuauucacau

SEQ ID NO: 406453 - RNA, 19 nt, Artificial Sequence
  Description of Artificial Sequence: Synthetic oligonucleotide
  Sense Strand Starting at position 1118 of SEQ ID NO: 318884
ugaauagcgcaauaaugau

SEQ ID NO: 406454 - RNA, 19 nt, Artificial Sequence
  Description of Artificial Sequence: Synthetic oligonucleotide
  Antisense Strand to SEQ ID NO: 406453
aucauuauugcgcuauuca

SEQ ID NO: 406455 - RNA, 19 nt, Artificial Sequence
  Description of Artificial Sequence: Synthetic oligonucleotide
  Sense Strand Starting at position 1118 of SEQ ID NO: 318903
uuucgagaucauugguguu

SEQ ID NO: 406456 - RNA, 19 nt, Artificial Sequence
  Description of Artificial Sequence: Synthetic oligonucleotide
  Antisense Strand to SEQ ID NO: 406455
aacaccaaugaucucgaaa

SEQ ID NO: 406457 - RNA, 19 nt, Artificial Sequence
  Description of Artificial Sequence: Synthetic oligonucleotide
  Sense Strand Starting at position 1118 of SEQ ID NO: 318905
ucgagaucauugguguuac

SEQ ID NO: 406458 - RNA, 19 nt, Artificial Sequence
  Description of Artificial Sequence: Synthetic oligonucleotide
  Antisense Strand to SEQ ID NO: 406457
guaacaccaaugaucucga

SEQ ID NO: 406459 - RNA, 19 nt, Artificial Sequence
  Description of Artificial Sequence: Synthetic oligonucleotide
  Sense Strand Starting at position 1118 of SEQ ID NO: 318916
gguguuacuagugaaaggu

SEQ ID NO: 406460 - RNA, 19 nt, Artificial Sequence
  Description of Artificial Sequence: Synthetic oligonucleotide
  Antisense Strand to SEQ ID NO: 406459
accuuucacuaguaacacc

SEQ ID NO: 406461 - RNA, 19 nt, Artificial Sequence
  Description of Artificial Sequence: Synthetic oligonucleotide
  Sense Strand Starting at position 1118 of SEQ ID NO: 318961
aaaggcucuuuaguggaaa

SEQ ID NO: 406462 - RNA, 19 nt, Artificial Sequence
  Description of Artificial Sequence: Synthetic oligonucleotide
  Antisense Strand to SEQ ID NO: 406461
uuuccacuaaagagccuuu

SEQ ID NO: 406463 - RNA, 19 nt, Artificial Sequence
  Description of Artificial Sequence: Synthetic oligonucleotide
  Sense Strand Starting at position 1118 of SEQ ID NO: 319018
auuaucgaucagcaaauau

SEQ ID NO: 406464 - RNA, 19 nt, Artificial Sequence
  Description of Artificial Sequence: Synthetic oligonucleotide
  Antisense Strand to SEQ ID NO: 406463
auauuugcugaucgauaau

SEQ ID NO: 406465 - RNA, 19 nt, Artificial Sequence
  Description of Artificial Sequence: Synthetic oligonucleotide
  Sense Strand Starting at position 1118 of SEQ ID NO: 319029
gcaaauauucccuaaguag

SEQ ID NO: 406466 - RNA, 19 nt, Artificial Sequence
  Description of Artificial Sequence: Synthetic oligonucleotide
  Antisense Strand to SEQ ID NO: 406465
cuacuuagggaauauuugc

SEQ ID NO: 406467 - RNA, 19 nt, Artificial Sequence
  Description of Artificial Sequence: Synthetic oligonucleotide
  Sense Strand Starting at position 1118 of SEQ ID NO: 319040
cuaaguaguguuuguauac

SEQ ID NO: 406468 - RNA, 19 nt, Artificial Sequence
  Description of Artificial Sequence: Synthetic oligonucleotide
  Antisense Strand to SEQ ID NO: 406467
guauacaaacacuacuuag

SEQ ID NO: 406469 - RNA, 19 nt, Artificial Sequence
  Description of Artificial Sequence: Synthetic oligonucleotide
  Sense Strand Starting at position 1118 of SEQ ID NO: 319041
uaaguaguguuuguauaca

SEQ ID NO: 406470 - RNA, 19 nt, Artificial Sequence
  Description of Artificial Sequence: Synthetic oligonucleotide
  Antisense Strand to SEQ ID NO: 406469
uguauacaaacacuacuua

SEQ ID NO: 406471 - RNA, 19 nt, Artificial Sequence
  Description of Artificial Sequence: Synthetic oligonucleotide
  Sense Strand Starting at position 1118 of SEQ ID NO: 319054
uauacauugcccuggguaa

SEQ ID NO: 406472 - RNA, 19 nt, Artificial Sequence
  Description of Artificial Sequence: Synthetic oligonucleotide
  Antisense Strand to SEQ ID NO: 406471
uuacccagggcaauguaua

SEQ ID NO: 406473 - RNA, 19 nt, Artificial Sequence
  Description of Artificial Sequence: Synthetic oligonucleotide
  Sense Strand Starting at position 1118 of SEQ ID NO: 319142
uaaccugaggucuguggau

SEQ ID NO: 406474 - RNA, 19 nt, Artificial Sequence
  Description of Artificial Sequence: Synthetic oligonucleotide
  Antisense Strand to SEQ ID NO: 406473
auccacagaccucagguua

SEQ ID NO: 406475 - RNA, 19 nt, Artificial Sequence
  Description of Artificial Sequence: Synthetic oligonucleotide
  Sense Strand Starting at position 1118 of SEQ ID NO: 319171
gugauugggcuucagaguu

SEQ ID NO: 406476 - RNA, 19 nt, Artificial Sequence
  Description of Artificial Sequence: Synthetic oligonucleotide
  Antisense Strand to SEQ ID NO: 406475
aacucugaagcccaaucac

SEQ ID NO: 406477 - RNA, 19 nt, Artificial Sequence
  Description of Artificial Sequence: Synthetic oligonucleotide
  Sense Strand Starting at position 1118 of SEQ ID NO: 319189
ucauaacucgccugacauu

SEQ ID NO: 406478 - RNA, 19 nt, Artificial Sequence
  Description of Artificial Sequence: Synthetic oligonucleotide
  Antisense Strand to SEQ ID NO: 406477
aaugucaggcgaguuauga

SEQ ID NO: 406479 - RNA, 19 nt, Artificial Sequence
  Description of Artificial Sequence: Synthetic oligonucleotide
  Sense Strand Starting at position 1119 of SEQ ID NO: 315560
gacuauauugcuuauaggu

SEQ ID NO: 406480 - RNA, 19 nt, Artificial Sequence
  Description of Artificial Sequence: Synthetic oligonucleotide
  Antisense Strand to SEQ ID NO: 406479
accuauaagcaauauaguc

SEQ ID NO: 406481 - RNA, 19 nt, Artificial Sequence
  Description of Artificial Sequence: Synthetic oligonucleotide
  Sense Strand Starting at position 1119 of SEQ ID NO: 315681
gaggccguuccagauaaau

SEQ ID NO: 406482 - RNA, 19 nt, Artificial Sequence
  Description of Artificial Sequence: Synthetic oligonucleotide
  Antisense Strand to SEQ ID NO: 406481
auuuaucuggaacggccuc

SEQ ID NO: 406483 - RNA, 19 nt, Artificial Sequence
  Description of Artificial Sequence: Synthetic oligonucleotide
  Sense Strand Starting at position 1119 of SEQ ID NO: 315790
uugcuugaacuagaaaucu

SEQ ID NO: 406484 - RNA, 19 nt, Artificial Sequence
  Description of Artificial Sequence: Synthetic oligonucleotide
  Antisense Strand to SEQ ID NO: 406483
agauuucuaguucaagcaa

SEQ ID NO: 406485 - RNA, 19 nt, Artificial Sequence
  Description of Artificial Sequence: Synthetic oligonucleotide
  Sense Strand Starting at position 1119 of SEQ ID NO: 315885
ugaguuucucaucaucuuu

SEQ ID NO: 406486 - RNA, 19 nt, Artificial Sequence
  Description of Artificial Sequence: Synthetic oligonucleotide
  Antisense Strand to SEQ ID NO: 406485
aaagaugaugagaaacuca

SEQ ID NO: 406487 - RNA, 19 nt, Artificial Sequence
  Description of Artificial Sequence: Synthetic oligonucleotide
  Sense Strand Starting at position 1119 of SEQ ID NO: 316012
gauuacaaaugguuuaugu

SEQ ID NO: 406488 - RNA, 19 nt, Artificial Sequence
  Description of Artificial Sequence: Synthetic oligonucleotide
  Antisense Strand to SEQ ID NO: 406487
acauaaaccauuuguaauc

SEQ ID NO: 406489 - RNA, 19 nt, Artificial Sequence
  Description of Artificial Sequence: Synthetic oligonucleotide
  Sense Strand Starting at position 1119 of SEQ ID NO: 316014
uuacaaaugguuuauguca

SEQ ID NO: 406490 - RNA, 19 nt, Artificial Sequence
  Description of Artificial Sequence: Synthetic oligonucleotide
  Antisense Strand to SEQ ID NO: 406489
ugacauaaaccauuuguaa

SEQ ID NO: 406491 - RNA, 19 nt, Artificial Sequence
  Description of Artificial Sequence: Synthetic oligonucleotide
  Sense Strand Starting at position 1119 of SEQ ID NO: 316366
cgcauagaccuuuaggaac

SEQ ID NO: 406492 - RNA, 19 nt, Artificial Sequence
  Description of Artificial Sequence: Synthetic oligonucleotide
  Antisense Strand to SEQ ID NO: 406491
guuccuaaaggucuaugcg

SEQ ID NO: 406493 - RNA, 19 nt, Artificial Sequence
  Description of Artificial Sequence: Synthetic oligonucleotide
  Sense Strand Starting at position 1119 of SEQ ID NO: 316492
uuguaaaucuaggauuuag

SEQ ID NO: 406494 - RNA, 19 nt, Artificial Sequence
  Description of Artificial Sequence: Synthetic oligonucleotide
  Antisense Strand to SEQ ID NO: 406493
cuaaauccuagauuuacaa

SEQ ID NO: 406495 - RNA, 19 nt, Artificial Sequence
  Description of Artificial Sequence: Synthetic oligonucleotide
  Sense Strand Starting at position 1119 of SEQ ID NO: 316604
cuguaauagagacggaauu

SEQ ID NO: 406496 - RNA, 19 nt, Artificial Sequence
  Description of Artificial Sequence: Synthetic oligonucleotide
  Antisense Strand to SEQ ID NO: 406495
aauuccgucucuauuacag

SEQ ID NO: 406497 - RNA, 19 nt, Artificial Sequence
  Description of Artificial Sequence: Synthetic oligonucleotide
  Sense Strand Starting at position 1119 of SEQ ID NO: 316929
gcaugucugcaguucuuua

SEQ ID NO: 406498 - RNA, 19 nt, Artificial Sequence
  Description of Artificial Sequence: Synthetic oligonucleotide
  Antisense Strand to SEQ ID NO: 406497
uaaagaacugcagacaugc

SEQ ID NO: 406499 - RNA, 19 nt, Artificial Sequence
  Description of Artificial Sequence: Synthetic oligonucleotide
  Sense Strand Starting at position 1119 of SEQ ID NO: 316936
ugcaguucuuuauuucuau

SEQ ID NO: 406500 - RNA, 19 nt, Artificial Sequence
  Description of Artificial Sequence: Synthetic oligonucleotide
  Antisense Strand to SEQ ID NO: 406499
auagaaauaaagaacugca

SEQ ID NO: 406501 - RNA, 19 nt, Artificial Sequence
  Description of Artificial Sequence: Synthetic oligonucleotide
  Sense Strand Starting at position 1119 of SEQ ID NO: 316937
gcaguucuuuauuucuauu

SEQ ID NO: 406502 - RNA, 19 nt, Artificial Sequence
  Description of Artificial Sequence: Synthetic oligonucleotide
  Antisense Strand to SEQ ID NO: 406501
aauagaaauaaagaacugc

SEQ ID NO: 406503 - RNA, 19 nt, Artificial Sequence
  Description of Artificial Sequence: Synthetic oligonucleotide
  Sense Strand Starting at position 1119 of SEQ ID NO: 317157
gcggucuuccucucagcaa

SEQ ID NO: 406504 - RNA, 19 nt, Artificial Sequence
  Description of Artificial Sequence: Synthetic oligonucleotide
  Antisense Strand to SEQ ID NO: 406503
uugcugagaggaagaccgc

SEQ ID NO: 406505 - RNA, 19 nt, Artificial Sequence
  Description of Artificial Sequence: Synthetic oligonucleotide
  Sense Strand Starting at position 1119 of SEQ ID NO: 317202
ucuacauucugccugaaag

SEQ ID NO: 406506 - RNA, 19 nt, Artificial Sequence
  Description of Artificial Sequence: Synthetic oligonucleotide
  Antisense Strand to SEQ ID NO: 406505
cuuucaggcagaauguaga

SEQ ID NO: 406507 - RNA, 19 nt, Artificial Sequence
  Description of Artificial Sequence: Synthetic oligonucleotide
  Sense Strand Starting at position 1119 of SEQ ID NO: 317203
cuacauucugccugaaagg

SEQ ID NO: 406508 - RNA, 19 nt, Artificial Sequence
  Description of Artificial Sequence: Synthetic oligonucleotide
  Antisense Strand to SEQ ID NO: 406507
ccuuucaggcagaauguag

SEQ ID NO: 406509 - RNA, 19 nt, Artificial Sequence
  Description of Artificial Sequence: Synthetic oligonucleotide
  Sense Strand Starting at position 1119 of SEQ ID NO: 317204
uacauucugccugaaaggu

SEQ ID NO: 406510 - RNA, 19 nt, Artificial Sequence
  Description of Artificial Sequence: Synthetic oligonucleotide
  Antisense Strand to SEQ ID NO: 406509
accuuucaggcagaaugua

SEQ ID NO: 406511 - RNA, 19 nt, Artificial Sequence
  Description of Artificial Sequence: Synthetic oligonucleotide
  Sense Strand Starting at position 1119 of SEQ ID NO: 317213
ccugaaaggucacucagua

SEQ ID NO: 406512 - RNA, 19 nt, Artificial Sequence
  Description of Artificial Sequence: Synthetic oligonucleotide
  Antisense Strand to SEQ ID NO: 406511
uacugagugaccuuucagg

SEQ ID NO: 406513 - RNA, 19 nt, Artificial Sequence
  Description of Artificial Sequence: Synthetic oligonucleotide
  Sense Strand Starting at position 1119 of SEQ ID NO: 317292
acagguguccuggaaugca

SEQ ID NO: 406514 - RNA, 19 nt, Artificial Sequence
  Description of Artificial Sequence: Synthetic oligonucleotide
  Antisense Strand to SEQ ID NO: 406513
ugcauuccaggacaccugu

SEQ ID NO: 406515 - RNA, 19 nt, Artificial Sequence
  Description of Artificial Sequence: Synthetic oligonucleotide
  Sense Strand Starting at position 1119 of SEQ ID NO: 317374
auuaaugacuguguacauu

SEQ ID NO: 406516 - RNA, 19 nt, Artificial Sequence
  Description of Artificial Sequence: Synthetic oligonucleotide
  Antisense Strand to SEQ ID NO: 406515
aauguacacagucauuaau

SEQ ID NO: 406517 - RNA, 19 nt, Artificial Sequence
  Description of Artificial Sequence: Synthetic oligonucleotide
  Sense Strand Starting at position 1119 of SEQ ID NO: 317380
gacuguguacauuauggua

SEQ ID NO: 406518 - RNA, 19 nt, Artificial Sequence
  Description of Artificial Sequence: Synthetic oligonucleotide
  Antisense Strand to SEQ ID NO: 406517
uaccauaauguacacaguc

SEQ ID NO: 406519 - RNA, 19 nt, Artificial Sequence
  Description of Artificial Sequence: Synthetic oligonucleotide
  Sense Strand Starting at position 1119 of SEQ ID NO: 317418
uaacguaacguauaggauu

SEQ ID NO: 406520 - RNA, 19 nt, Artificial Sequence
  Description of Artificial Sequence: Synthetic oligonucleotide
  Antisense Strand to SEQ ID NO: 406519
aauccuauacguuacguua

SEQ ID NO: 406521 - RNA, 19 nt, Artificial Sequence
  Description of Artificial Sequence: Synthetic oligonucleotide
  Sense Strand Starting at position 1119 of SEQ ID NO: 317424
aacguauaggauuaaguuu

SEQ ID NO: 406522 - RNA, 19 nt, Artificial Sequence
  Description of Artificial Sequence: Synthetic oligonucleotide
  Antisense Strand to SEQ ID NO: 406521
aaacuuaauccuauacguu

SEQ ID NO: 406523 - RNA, 19 nt, Artificial Sequence
  Description of Artificial Sequence: Synthetic oligonucleotide
  Sense Strand Starting at position 1119 of SEQ ID NO: 317444
auggaaauauuacugucau

SEQ ID NO: 406524 - RNA, 19 nt, Artificial Sequence
  Description of Artificial Sequence: Synthetic oligonucleotide
  Antisense Strand to SEQ ID NO: 406523
augacaguaauauuuccau

SEQ ID NO: 406525 - RNA, 19 nt, Artificial Sequence
  Description of Artificial Sequence: Synthetic oligonucleotide
  Sense Strand Starting at position 1119 of SEQ ID NO: 318160
cacugaaaucuuggguccu

SEQ ID NO: 406526 - RNA, 19 nt, Artificial Sequence
  Description of Artificial Sequence: Synthetic oligonucleotide
  Antisense Strand to SEQ ID NO: 406525
aggacccaagauuucagug

SEQ ID NO: 406527 - RNA, 19 nt, Artificial Sequence
  Description of Artificial Sequence: Synthetic oligonucleotide
  Sense Strand Starting at position 1119 of SEQ ID NO: 318223
aggucaaggucuuugauua

SEQ ID NO: 406528 - RNA, 19 nt, Artificial Sequence
  Description of Artificial Sequence: Synthetic oligonucleotide
  Antisense Strand to SEQ ID NO: 406527
uaaucaaagaccuugaccu

SEQ ID NO: 406529 - RNA, 19 nt, Artificial Sequence
  Description of Artificial Sequence: Synthetic oligonucleotide
  Sense Strand Starting at position 1119 of SEQ ID NO: 318260
gguguuacgaacuggagaa

SEQ ID NO: 406530 - RNA, 19 nt, Artificial Sequence
  Description of Artificial Sequence: Synthetic oligonucleotide
  Antisense Strand to SEQ ID NO: 406529
uucuccaguucguaacacc

SEQ ID NO: 406531 - RNA, 19 nt, Artificial Sequence
  Description of Artificial Sequence: Synthetic oligonucleotide
  Sense Strand Starting at position 1119 of SEQ ID NO: 318261
guguuacgaacuggagaaa

SEQ ID NO: 406532 - RNA, 19 nt, Artificial Sequence
  Description of Artificial Sequence: Synthetic oligonucleotide
  Antisense Strand to SEQ ID NO: 406531
uuucuccaguucguaacac

SEQ ID NO: 406533 - RNA, 19 nt, Artificial Sequence
  Description of Artificial Sequence: Synthetic oligonucleotide
  Sense Strand Starting at position 1119 of SEQ ID NO: 318273
ggagaaauugugugagcaa

SEQ ID NO: 406534 - RNA, 19 nt, Artificial Sequence
  Description of Artificial Sequence: Synthetic oligonucleotide
  Antisense Strand to SEQ ID NO: 406533
uugcucacacaauuucucc

SEQ ID NO: 406535 - RNA, 19 nt, Artificial Sequence
  Description of Artificial Sequence: Synthetic oligonucleotide
  Sense Strand Starting at position 1119 of SEQ ID NO: 318396
acugguaagagccauguca

SEQ ID NO: 406536 - RNA, 19 nt, Artificial Sequence
  Description of Artificial Sequence: Synthetic oligonucleotide
  Antisense Strand to SEQ ID NO: 406535
ugacauggcucuuaccagu

SEQ ID NO: 406537 - RNA, 19 nt, Artificial Sequence
  Description of Artificial Sequence: Synthetic oligonucleotide
  Sense Strand Starting at position 1119 of SEQ ID NO: 318405
agccaugucacguauuugu

SEQ ID NO: 406538 - RNA, 19 nt, Artificial Sequence
  Description of Artificial Sequence: Synthetic oligonucleotide
  Antisense Strand to SEQ ID NO: 406537
acaaauacgugacauggcu

SEQ ID NO: 406539 - RNA, 19 nt, Artificial Sequence
  Description of Artificial Sequence: Synthetic oligonucleotide
  Sense Strand Starting at position 1119 of SEQ ID NO: 318458
uuuacugagcaucauagau

SEQ ID NO: 406540 - RNA, 19 nt, Artificial Sequence
  Description of Artificial Sequence: Synthetic oligonucleotide
  Antisense Strand to SEQ ID NO: 406539
aucuaugaugcucaguaaa

SEQ ID NO: 406541 - RNA, 19 nt, Artificial Sequence
  Description of Artificial Sequence: Synthetic oligonucleotide
  Sense Strand Starting at position 1119 of SEQ ID NO: 318503
auggaugagcagcacuauu

SEQ ID NO: 406542 - RNA, 19 nt, Artificial Sequence
  Description of Artificial Sequence: Synthetic oligonucleotide
  Antisense Strand to SEQ ID NO: 406541
aauagugcugcucauccau

SEQ ID NO: 406543 - RNA, 19 nt, Artificial Sequence
  Description of Artificial Sequence: Synthetic oligonucleotide
  Sense Strand Starting at position 1119 of SEQ ID NO: 318530
ugguaauauagugauaagu

SEQ ID NO: 406544 - RNA, 19 nt, Artificial Sequence
  Description of Artificial Sequence: Synthetic oligonucleotide
  Antisense Strand to SEQ ID NO: 406543
acuuaucacuauauuacca

SEQ ID NO: 406545 - RNA, 19 nt, Artificial Sequence
  Description of Artificial Sequence: Synthetic oligonucleotide
  Sense Strand Starting at position 1119 of SEQ ID NO: 318541
ugauaaguaaggcgaaauc

SEQ ID NO: 406546 - RNA, 19 nt, Artificial Sequence
  Description of Artificial Sequence: Synthetic oligonucleotide
  Antisense Strand to SEQ ID NO: 406545
gauuucgccuuacuuauca

SEQ ID NO: 406547 - RNA, 19 nt, Artificial Sequence
  Description of Artificial Sequence: Synthetic oligonucleotide
  Sense Strand Starting at position 1119 of SEQ ID NO: 318559
ccuuguccucaaggaacau

SEQ ID NO: 406548 - RNA, 19 nt, Artificial Sequence
  Description of Artificial Sequence: Synthetic oligonucleotide
  Antisense Strand to SEQ ID NO: 406547
auguuccuugaggacaagg

SEQ ID NO: 406549 - RNA, 19 nt, Artificial Sequence
  Description of Artificial Sequence: Synthetic oligonucleotide
  Sense Strand Starting at position 1119 of SEQ ID NO: 318593
gcacauaaggcuuauaaga

SEQ ID NO: 406550 - RNA, 19 nt, Artificial Sequence
  Description of Artificial Sequence: Synthetic oligonucleotide
  Antisense Strand to SEQ ID NO: 406549
ucuuauaagccuuaugugc

SEQ ID NO: 406551 - RNA, 19 nt, Artificial Sequence
  Description of Artificial Sequence: Synthetic oligonucleotide
  Sense Strand Starting at position 1119 of SEQ ID NO: 318872
auaggagaaucgcucaaac

SEQ ID NO: 406552 - RNA, 19 nt, Artificial Sequence
  Description of Artificial Sequence: Synthetic oligonucleotide
  Antisense Strand to SEQ ID NO: 406551
guuugagcgauucuccuau

SEQ ID NO: 406553 - RNA, 19 nt, Artificial Sequence
  Description of Artificial Sequence: Synthetic oligonucleotide
  Sense Strand Starting at position 1119 of SEQ ID NO: 319142
gaucacaugugaguuuaug

SEQ ID NO: 406554 - RNA, 19 nt, Artificial Sequence
  Description of Artificial Sequence: Synthetic oligonucleotide
  Antisense Strand to SEQ ID NO: 406553
cauaaacucacaugugauc

SEQ ID NO: 406555 - RNA, 19 nt, Artificial Sequence
  Description of Artificial Sequence: Synthetic oligonucleotide
  Sense Strand Starting at position 1119 of SEQ ID NO: 319168
ggugauuuaggguggugca

SEQ ID NO: 406556 - RNA, 19 nt, Artificial Sequence
  Description of Artificial Sequence: Synthetic oligonucleotide
  Antisense Strand to SEQ ID NO: 406555
ugcaccacccuaaaucacc

SEQ ID NO: 406557 - RNA, 19 nt, Artificial Sequence
  Description of Artificial Sequence: Synthetic oligonucleotide
  Sense Strand Starting at position 1119 of SEQ ID NO: 319169
gugauuuaggguggugcaa

SEQ ID NO: 406558 - RNA, 19 nt, Artificial Sequence
  Description of Artificial Sequence: Synthetic oligonucleotide
  Antisense Strand to SEQ ID NO: 406557
uugcaccacccuaaaucac

SEQ ID NO: 406559 - RNA, 19 nt, Artificial Sequence
  Description of Artificial Sequence: Synthetic oligonucleotide
  Sense Strand Starting at position 1120 of SEQ ID NO: 315393
ggauuugacuuccaucaua

SEQ ID NO: 406560 - RNA, 19 nt, Artificial Sequence
  Description of Artificial Sequence: Synthetic oligonucleotide
  Antisense Strand to SEQ ID NO: 406559
uaugauggaagucaaaucc

SEQ ID NO: 406561 - RNA, 19 nt, Artificial Sequence
  Description of Artificial Sequence: Synthetic oligonucleotide
  Sense Strand Starting at position 1120 of SEQ ID NO: 315764
ggagccauucuccacaugu

SEQ ID NO: 406562 - RNA, 19 nt, Artificial Sequence
  Description of Artificial Sequence: Synthetic oligonucleotide
  Antisense Strand to SEQ ID NO: 406561
acauguggagaauggcucc

SEQ ID NO: 406563 - RNA, 19 nt, Artificial Sequence
  Description of Artificial Sequence: Synthetic oligonucleotide
  Sense Strand Starting at position 1120 of SEQ ID NO: 315766
agccauucuccacauguua

SEQ ID NO: 406564 - RNA, 19 nt, Artificial Sequence
  Description of Artificial Sequence: Synthetic oligonucleotide
  Antisense Strand to SEQ ID NO: 406563
uaacauguggagaauggcu

SEQ ID NO: 406565 - RNA, 19 nt, Artificial Sequence
  Description of Artificial Sequence: Synthetic oligonucleotide
  Sense Strand Starting at position 1120 of SEQ ID NO: 315800
augacucaauccuugggau

SEQ ID NO: 406566 - RNA, 19 nt, Artificial Sequence
  Description of Artificial Sequence: Synthetic oligonucleotide
  Antisense Strand to SEQ ID NO: 406565
aucccaaggauugagucau

SEQ ID NO: 406567 - RNA, 19 nt, Artificial Sequence
  Description of Artificial Sequence: Synthetic oligonucleotide
  Sense Strand Starting at position 1120 of SEQ ID NO: 315801
ugacucaauccuugggauc

SEQ ID NO: 406568 - RNA, 19 nt, Artificial Sequence
  Description of Artificial Sequence: Synthetic oligonucleotide
  Antisense Strand to SEQ ID NO: 406567
gaucccaaggauugaguca

SEQ ID NO: 406569 - RNA, 19 nt, Artificial Sequence
  Description of Artificial Sequence: Synthetic oligonucleotide
  Sense Strand Starting at position 1120 of SEQ ID NO: 315935
cuaccacugccauggagau

SEQ ID NO: 406570 - RNA, 19 nt, Artificial Sequence
  Description of Artificial Sequence: Synthetic oligonucleotide
  Antisense Strand to SEQ ID NO: 406569
aucuccauggcagugguag

SEQ ID NO: 406571 - RNA, 19 nt, Artificial Sequence
  Description of Artificial Sequence: Synthetic oligonucleotide
  Sense Strand Starting at position 1120 of SEQ ID NO: 316387
cuggccuguccagaguuaa

SEQ ID NO: 406572 - RNA, 19 nt, Artificial Sequence
  Description of Artificial Sequence: Synthetic oligonucleotide
  Antisense Strand to SEQ ID NO: 406571
uuaacucuggacaggccag

SEQ ID NO: 406573 - RNA, 19 nt, Artificial Sequence
  Description of Artificial Sequence: Synthetic oligonucleotide
  Sense Strand Starting at position 1120 of SEQ ID NO: 316398
agaguuaaugcucaguaau

SEQ ID NO: 406574 - RNA, 19 nt, Artificial Sequence
  Description of Artificial Sequence: Synthetic oligonucleotide
  Antisense Strand to SEQ ID NO: 406573
auuacugagcauuaacucu

SEQ ID NO: 406575 - RNA, 19 nt, Artificial Sequence
  Description of Artificial Sequence: Synthetic oligonucleotide
  Sense Strand Starting at position 1120 of SEQ ID NO: 316401
guuaaugcucaguaaugca

SEQ ID NO: 406576 - RNA, 19 nt, Artificial Sequence
  Description of Artificial Sequence: Synthetic oligonucleotide
  Antisense Strand to SEQ ID NO: 406575
ugcauuacugagcauuaac

SEQ ID NO: 406577 - RNA, 19 nt, Artificial Sequence
  Description of Artificial Sequence: Synthetic oligonucleotide
  Sense Strand Starting at position 1120 of SEQ ID NO: 316425
aggcguuaccacuaucuuu

SEQ ID NO: 406578 - RNA, 19 nt, Artificial Sequence
  Description of Artificial Sequence: Synthetic oligonucleotide
  Antisense Strand to SEQ ID NO: 406577
aaagauagugguaacgccu

SEQ ID NO: 406579 - RNA, 19 nt, Artificial Sequence
  Description of Artificial Sequence: Synthetic oligonucleotide
  Sense Strand Starting at position 1120 of SEQ ID NO: 316436
cuaucuuuacagugcugau

SEQ ID NO: 406580 - RNA, 19 nt, Artificial Sequence
  Description of Artificial Sequence: Synthetic oligonucleotide
  Antisense Strand to SEQ ID NO: 406579
aucagcacuguaaagauag

SEQ ID NO: 406581 - RNA, 19 nt, Artificial Sequence
  Description of Artificial Sequence: Synthetic oligonucleotide
  Sense Strand Starting at position 1120 of SEQ ID NO: 316482
gccaaugacuguccuguaa

SEQ ID NO: 406582 - RNA, 19 nt, Artificial Sequence
  Description of Artificial Sequence: Synthetic oligonucleotide
  Antisense Strand to SEQ ID NO: 406581
uuacaggacagucauuggc

SEQ ID NO: 406583 - RNA, 19 nt, Artificial Sequence
  Description of Artificial Sequence: Synthetic oligonucleotide
  Sense Strand Starting at position 1120 of SEQ ID NO: 316486
augacuguccuguaaaggu

SEQ ID NO: 406584 - RNA, 19 nt, Artificial Sequence
  Description of Artificial Sequence: Synthetic oligonucleotide
  Antisense Strand to SEQ ID NO: 406583
accuuuacaggacagucau

SEQ ID NO: 406585 - RNA, 19 nt, Artificial Sequence
  Description of Artificial Sequence: Synthetic oligonucleotide
  Sense Strand Starting at position 1120 of SEQ ID NO: 316496
uguaaagguagugguaauu

SEQ ID NO: 406586 - RNA, 19 nt, Artificial Sequence
  Description of Artificial Sequence: Synthetic oligonucleotide
  Antisense Strand to SEQ ID NO: 406585
aauuaccacuaccuuuaca

SEQ ID NO: 406587 - RNA, 19 nt, Artificial Sequence
  Description of Artificial Sequence: Synthetic oligonucleotide
  Sense Strand Starting at position 1120 of SEQ ID NO: 316502
gguagugguaauuagcaaa

SEQ ID NO: 406588 - RNA, 19 nt, Artificial Sequence
  Description of Artificial Sequence: Synthetic oligonucleotide
  Antisense Strand to SEQ ID NO: 406587
uuugcuaauuaccacuacc

SEQ ID NO: 406589 - RNA, 19 nt, Artificial Sequence
  Description of Artificial Sequence: Synthetic oligonucleotide
  Sense Strand Starting at position 1120 of SEQ ID NO: 316623
gauuguugugagcaagucu

SEQ ID NO: 406590 - RNA, 19 nt, Artificial Sequence
  Description of Artificial Sequence: Synthetic oligonucleotide
  Antisense Strand to SEQ ID NO: 406589
agacuugcucacaacaauc

SEQ ID NO: 406591 - RNA, 19 nt, Artificial Sequence
  Description of Artificial Sequence: Synthetic oligonucleotide
  Sense Strand Starting at position 1120 of SEQ ID NO: 316632
gagcaagucuguuccuuaa

SEQ ID NO: 406592 - RNA, 19 nt, Artificial Sequence
  Description of Artificial Sequence: Synthetic oligonucleotide
  Antisense Strand to SEQ ID NO: 406591
uuaaggaacagacuugcuc

SEQ ID NO: 406593 - RNA, 19 nt, Artificial Sequence
  Description of Artificial Sequence: Synthetic oligonucleotide
  Sense Strand Starting at position 1120 of SEQ ID NO: 316699
ggaagaagcacgugaucuc

SEQ ID NO: 406594 - RNA, 19 nt, Artificial Sequence
  Description of Artificial Sequence: Synthetic oligonucleotide
  Antisense Strand to SEQ ID NO: 406593
gagaucacgugcuucuucc

SEQ ID NO: 406595 - RNA, 19 nt, Artificial Sequence
  Description of Artificial Sequence: Synthetic oligonucleotide
  Sense Strand Starting at position 1120 of SEQ ID NO: 316706
gcacgugaucucgccugua

SEQ ID NO: 406596 - RNA, 19 nt, Artificial Sequence
  Description of Artificial Sequence: Synthetic oligonucleotide
  Antisense Strand to SEQ ID NO: 406595
uacaggcgagaucacgugc

SEQ ID NO: 406597 - RNA, 19 nt, Artificial Sequence
  Description of Artificial Sequence: Synthetic oligonucleotide
  Sense Strand Starting at position 1120 of SEQ ID NO: 316841
cggucugcaaucugagaau

SEQ ID NO: 406598 - RNA, 19 nt, Artificial Sequence
  Description of Artificial Sequence: Synthetic oligonucleotide
  Antisense Strand to SEQ ID NO: 406597
auucucagauugcagaccg

SEQ ID NO: 406599 - RNA, 19 nt, Artificial Sequence
  Description of Artificial Sequence: Synthetic oligonucleotide
  Sense Strand Starting at position 1120 of SEQ ID NO: 316889
ucgugccuuccugaaagga

SEQ ID NO: 406600 - RNA, 19 nt, Artificial Sequence
  Description of Artificial Sequence: Synthetic oligonucleotide
  Antisense Strand to SEQ ID NO: 406599
uccuuucaggaaggcacga

SEQ ID NO: 406601 - RNA, 19 nt, Artificial Sequence
  Description of Artificial Sequence: Synthetic oligonucleotide
  Sense Strand Starting at position 1120 of SEQ ID NO: 317595
augcaaugccuugcguuua

SEQ ID NO: 406602 - RNA, 19 nt, Artificial Sequence
  Description of Artificial Sequence: Synthetic oligonucleotide
  Antisense Strand to SEQ ID NO: 406601
uaaacgcaaggcauugcau

SEQ ID NO: 406603 - RNA, 19 nt, Artificial Sequence
  Description of Artificial Sequence: Synthetic oligonucleotide
  Sense Strand Starting at position 1120 of SEQ ID NO: 317611
uuauuucggagacgugauu

SEQ ID NO: 406604 - RNA, 19 nt, Artificial Sequence
  Description of Artificial Sequence: Synthetic oligonucleotide
  Antisense Strand to SEQ ID NO: 406603
aaucacgucuccgaaauaa

SEQ ID NO: 406605 - RNA, 19 nt, Artificial Sequence
  Description of Artificial Sequence: Synthetic oligonucleotide
  Sense Strand Starting at position 1120 of SEQ ID NO: 317624
gugauuggugccuagacuu

SEQ ID NO: 406606 - RNA, 19 nt, Artificial Sequence
  Description of Artificial Sequence: Synthetic oligonucleotide
  Antisense Strand to SEQ ID NO: 406605
aagucuaggcaccaaucac

SEQ ID NO: 406607 - RNA, 19 nt, Artificial Sequence
  Description of Artificial Sequence: Synthetic oligonucleotide
  Sense Strand Starting at position 1120 of SEQ ID NO: 317653
agaauuugauauggagugu

SEQ ID NO: 406608 - RNA, 19 nt, Artificial Sequence
  Description of Artificial Sequence: Synthetic oligonucleotide
  Antisense Strand to SEQ ID NO: 406607
acacuccauaucaaauucu

SEQ ID NO: 406609 - RNA, 19 nt, Artificial Sequence
  Description of Artificial Sequence: Synthetic oligonucleotide
  Sense Strand Starting at position 1120 of SEQ ID NO: 317657
uuugauauggaguguugaa

SEQ ID NO: 406610 - RNA, 19 nt, Artificial Sequence
  Description of Artificial Sequence: Synthetic oligonucleotide
  Antisense Strand to SEQ ID NO: 406609
uucaacacuccauaucaaa

SEQ ID NO: 406611 - RNA, 19 nt, Artificial Sequence
  Description of Artificial Sequence: Synthetic oligonucleotide
  Sense Strand Starting at position 1120 of SEQ ID NO: 317667
aguguugaaagcugaacuu

SEQ ID NO: 406612 - RNA, 19 nt, Artificial Sequence
  Description of Artificial Sequence: Synthetic oligonucleotide
  Antisense Strand to SEQ ID NO: 406611
aaguucagcuuucaacacu

SEQ ID NO: 406613 - RNA, 19 nt, Artificial Sequence
  Description of Artificial Sequence: Synthetic oligonucleotide
  Sense Strand Starting at position 1120 of SEQ ID NO: 317937
gauaauuuagugcgguaau

SEQ ID NO: 406614 - RNA, 19 nt, Artificial Sequence
  Description of Artificial Sequence: Synthetic oligonucleotide
  Antisense Strand to SEQ ID NO: 406613
auuaccgcacuaaauuauc

SEQ ID NO: 406615 - RNA, 19 nt, Artificial Sequence
  Description of Artificial Sequence: Synthetic oligonucleotide
  Sense Strand Starting at position 1120 of SEQ ID NO: 317949
cgguaauaggaaugaugca

SEQ ID NO: 406616 - RNA, 19 nt, Artificial Sequence
  Description of Artificial Sequence: Synthetic oligonucleotide
  Antisense Strand to SEQ ID NO: 406615
ugcaucauuccuauuaccg

SEQ ID NO: 406617 - RNA, 19 nt, Artificial Sequence
  Description of Artificial Sequence: Synthetic oligonucleotide
  Sense Strand Starting at position 1120 of SEQ ID NO: 317982
ggagcauaguaacugauua

SEQ ID NO: 406618 - RNA, 19 nt, Artificial Sequence
  Description of Artificial Sequence: Synthetic oligonucleotide
  Antisense Strand to SEQ ID NO: 406617
uaaucaguuacuaugcucc

SEQ ID NO: 406619 - RNA, 19 nt, Artificial Sequence
  Description of Artificial Sequence: Synthetic oligonucleotide
  Sense Strand Starting at position 1120 of SEQ ID NO: 318345
cgccgagucugaacgugua

SEQ ID NO: 406620 - RNA, 19 nt, Artificial Sequence
  Description of Artificial Sequence: Synthetic oligonucleotide
  Antisense Strand to SEQ ID NO: 406619
uacacguucagacucggcg

SEQ ID NO: 406621 - RNA, 19 nt, Artificial Sequence
  Description of Artificial Sequence: Synthetic oligonucleotide
  Sense Strand Starting at position 1120 of SEQ ID NO: 318366
guuuauauguagucucuua

SEQ ID NO: 406622 - RNA, 19 nt, Artificial Sequence
  Description of Artificial Sequence: Synthetic oligonucleotide
  Antisense Strand to SEQ ID NO: 406621
uaagagacuacauauaaac

SEQ ID NO: 406623 - RNA, 19 nt, Artificial Sequence
  Description of Artificial Sequence: Synthetic oligonucleotide
  Sense Strand Starting at position 1120 of SEQ ID NO: 318398
gagacuaugccagguagaa

SEQ ID NO: 406624 - RNA, 19 nt, Artificial Sequence
  Description of Artificial Sequence: Synthetic oligonucleotide
  Antisense Strand to SEQ ID NO: 406623
uucuaccuggcauagucuc

SEQ ID NO: 406625 - RNA, 19 nt, Artificial Sequence
  Description of Artificial Sequence: Synthetic oligonucleotide
  Sense Strand Starting at position 1120 of SEQ ID NO: 318414
gaagcagggcucugacuua

SEQ ID NO: 406626 - RNA, 19 nt, Artificial Sequence
  Description of Artificial Sequence: Synthetic oligonucleotide
  Antisense Strand to SEQ ID NO: 406625
uaagucagagcccugcuuc

SEQ ID NO: 406627 - RNA, 19 nt, Artificial Sequence
  Description of Artificial Sequence: Synthetic oligonucleotide
  Sense Strand Starting at position 1120 of SEQ ID NO: 318470
gugcuugcugaagauaacu

SEQ ID NO: 406628 - RNA, 19 nt, Artificial Sequence
  Description of Artificial Sequence: Synthetic oligonucleotide
  Antisense Strand to SEQ ID NO: 406627
aguuaucuucagcaagcac

SEQ ID NO: 406629 - RNA, 19 nt, Artificial Sequence
  Description of Artificial Sequence: Synthetic oligonucleotide
  Sense Strand Starting at position 1120 of SEQ ID NO: 318552
ggagacaacuauuagacaa

SEQ ID NO: 406630 - RNA, 19 nt, Artificial Sequence
  Description of Artificial Sequence: Synthetic oligonucleotide
  Antisense Strand to SEQ ID NO: 406629
uugucuaauaguugucucc

SEQ ID NO: 406631 - RNA, 19 nt, Artificial Sequence
  Description of Artificial Sequence: Synthetic oligonucleotide
  Sense Strand Starting at position 1120 of SEQ ID NO: 318602
augagacgauuuggugaua

SEQ ID NO: 406632 - RNA, 19 nt, Artificial Sequence
  Description of Artificial Sequence: Synthetic oligonucleotide
  Antisense Strand to SEQ ID NO: 406631
uaucaccaaaucgucucau

SEQ ID NO: 406633 - RNA, 19 nt, Artificial Sequence
  Description of Artificial Sequence: Synthetic oligonucleotide
  Sense Strand Starting at position 1120 of SEQ ID NO: 318607
acgauuuggugauauggac

SEQ ID NO: 406634 - RNA, 19 nt, Artificial Sequence
  Description of Artificial Sequence: Synthetic oligonucleotide
  Antisense Strand to SEQ ID NO: 406633
guccauaucaccaaaucgu

SEQ ID NO: 406635 - RNA, 19 nt, Artificial Sequence
  Description of Artificial Sequence: Synthetic oligonucleotide
  Sense Strand Starting at position 1120 of SEQ ID NO: 318949
ggccucaauccuuaccagu

SEQ ID NO: 406636 - RNA, 19 nt, Artificial Sequence
  Description of Artificial Sequence: Synthetic oligonucleotide
  Antisense Strand to SEQ ID NO: 406635
acugguaaggauugaggcc

SEQ ID NO: 406637 - RNA, 19 nt, Artificial Sequence
  Description of Artificial Sequence: Synthetic oligonucleotide
  Sense Strand Starting at position 1120 of SEQ ID NO: 319015
uggaguuucgaauguacac

SEQ ID NO: 406638 - RNA, 19 nt, Artificial Sequence
  Description of Artificial Sequence: Synthetic oligonucleotide
  Antisense Strand to SEQ ID NO: 406637
guguacauucgaaacucca

SEQ ID NO: 406639 - RNA, 19 nt, Artificial Sequence
  Description of Artificial Sequence: Synthetic oligonucleotide
  Sense Strand Starting at position 1121 of SEQ ID NO: 315290
aggauuaugugauuaaauc

SEQ ID NO: 406640 - RNA, 19 nt, Artificial Sequence
  Description of Artificial Sequence: Synthetic oligonucleotide
  Antisense Strand to SEQ ID NO: 406639
gauuuaaucacauaauccu

SEQ ID NO: 406641 - RNA, 19 nt, Artificial Sequence
  Description of Artificial Sequence: Synthetic oligonucleotide
  Sense Strand Starting at position 1121 of SEQ ID NO: 315328
cuauacuucuggucuagaa

SEQ ID NO: 406642 - RNA, 19 nt, Artificial Sequence
  Description of Artificial Sequence: Synthetic oligonucleotide
  Antisense Strand to SEQ ID NO: 406641
uucuagaccagaaguauag

SEQ ID NO: 406643 - RNA, 19 nt, Artificial Sequence
  Description of Artificial Sequence: Synthetic oligonucleotide
  Sense Strand Starting at position 1121 of SEQ ID NO: 315393
uggaucuuacugcaguaaa

SEQ ID NO: 406644 - RNA, 19 nt, Artificial Sequence
  Description of Artificial Sequence: Synthetic oligonucleotide
  Antisense Strand to SEQ ID NO: 406643
uuuacugcaguaagaucca

SEQ ID NO: 406645 - RNA, 19 nt, Artificial Sequence
  Description of Artificial Sequence: Synthetic oligonucleotide
  Sense Strand Starting at position 1121 of SEQ ID NO: 315609
auaugugaccuuggaaaug

SEQ ID NO: 406646 - RNA, 19 nt, Artificial Sequence
  Description of Artificial Sequence: Synthetic oligonucleotide
  Antisense Strand to SEQ ID NO: 406645
cauuuccaaggucacauau

SEQ ID NO: 406647 - RNA, 19 nt, Artificial Sequence
  Description of Artificial Sequence: Synthetic oligonucleotide
  Sense Strand Starting at position 1121 of SEQ ID NO: 315723
gguauuugguguucuuuaa

SEQ ID NO: 406648 - RNA, 19 nt, Artificial Sequence
  Description of Artificial Sequence: Synthetic oligonucleotide
  Antisense Strand to SEQ ID NO: 406647
uuaaagaacaccaaauacc

SEQ ID NO: 406649 - RNA, 19 nt, Artificial Sequence
  Description of Artificial Sequence: Synthetic oligonucleotide
  Sense Strand Starting at position 1121 of SEQ ID NO: 315846
agauuuccuuaagggaauu

SEQ ID NO: 406650 - RNA, 19 nt, Artificial Sequence
  Description of Artificial Sequence: Synthetic oligonucleotide
  Antisense Strand to SEQ ID NO: 406649
aauucccuuaaggaaaucu

SEQ ID NO: 406651 - RNA, 19 nt, Artificial Sequence
  Description of Artificial Sequence: Synthetic oligonucleotide
  Sense Strand Starting at position 1121 of SEQ ID NO: 315946
aguacacugcuguauauau

SEQ ID NO: 406652 - RNA, 19 nt, Artificial Sequence
  Description of Artificial Sequence: Synthetic oligonucleotide
  Antisense Strand to SEQ ID NO: 406651
auauauacagcaguguacu

SEQ ID NO: 406653 - RNA, 19 nt, Artificial Sequence
  Description of Artificial Sequence: Synthetic oligonucleotide
  Sense Strand Starting at position 1121 of SEQ ID NO: 315953
ugcuguauauauucugaua

SEQ ID NO: 406654 - RNA, 19 nt, Artificial Sequence
  Description of Artificial Sequence: Synthetic oligonucleotide
  Antisense Strand to SEQ ID NO: 406653
uaucagaauauauacagca

SEQ ID NO: 406655 - RNA, 19 nt, Artificial Sequence
  Description of Artificial Sequence: Synthetic oligonucleotide
  Sense Strand Starting at position 1121 of SEQ ID NO: 315973
guuaaagacugguuuggga

SEQ ID NO: 406656 - RNA, 19 nt, Artificial Sequence
  Description of Artificial Sequence: Synthetic oligonucleotide
  Antisense Strand to SEQ ID NO: 406655
ucccaaaccagucuuuaac

SEQ ID NO: 406657 - RNA, 19 nt, Artificial Sequence
  Description of Artificial Sequence: Synthetic oligonucleotide
  Sense Strand Starting at position 1121 of SEQ ID NO: 315988
gggacauagugcuccaauc

SEQ ID NO: 406658 - RNA, 19 nt, Artificial Sequence
  Description of Artificial Sequence: Synthetic oligonucleotide
  Antisense Strand to SEQ ID NO: 406657
gauuggagcacuauguccc

SEQ ID NO: 406659 - RNA, 19 nt, Artificial Sequence
  Description of Artificial Sequence: Synthetic oligonucleotide
  Sense Strand Starting at position 1121 of SEQ ID NO: 316045
uaggaacuugguggagauu

SEQ ID NO: 406660 - RNA, 19 nt, Artificial Sequence
  Description of Artificial Sequence: Synthetic oligonucleotide
  Antisense Strand to SEQ ID NO: 406659
aaucuccaccaaguuccua

SEQ ID NO: 406661 - RNA, 19 nt, Artificial Sequence
  Description of Artificial Sequence: Synthetic oligonucleotide
  Sense Strand Starting at position 1121 of SEQ ID NO: 316117
uguuuaaggcauuaaguca

SEQ ID NO: 406662 - RNA, 19 nt, Artificial Sequence
  Description of Artificial Sequence: Synthetic oligonucleotide
  Antisense Strand to SEQ ID NO: 406661
ugacuuaaugccuuaaaca

SEQ ID NO: 406663 - RNA, 19 nt, Artificial Sequence
  Description of Artificial Sequence: Synthetic oligonucleotide
  Sense Strand Starting at position 1121 of SEQ ID NO: 316154
agacuuuaagaaugcacau

SEQ ID NO: 406664 - RNA, 19 nt, Artificial Sequence
  Description of Artificial Sequence: Synthetic oligonucleotide
  Antisense Strand to SEQ ID NO: 406663
augugcauucuuaaagucu

SEQ ID NO: 406665 - RNA, 19 nt, Artificial Sequence
  Description of Artificial Sequence: Synthetic oligonucleotide
  Sense Strand Starting at position 1121 of SEQ ID NO: 316191
uggaaaguaacaugacagu

SEQ ID NO: 406666 - RNA, 19 nt, Artificial Sequence
  Description of Artificial Sequence: Synthetic oligonucleotide
  Antisense Strand to SEQ ID NO: 406665
acugucauguuacuuucca

SEQ ID NO: 406667 - RNA, 19 nt, Artificial Sequence
  Description of Artificial Sequence: Synthetic oligonucleotide
  Sense Strand Starting at position 1121 of SEQ ID NO: 316303
cuguaugcgauccaacagu

SEQ ID NO: 406668 - RNA, 19 nt, Artificial Sequence
  Description of Artificial Sequence: Synthetic oligonucleotide
  Antisense Strand to SEQ ID NO: 406667
acuguuggaucgcauacag

SEQ ID NO: 406669 - RNA, 19 nt, Artificial Sequence
  Description of Artificial Sequence: Synthetic oligonucleotide
  Sense Strand Starting at position 1121 of SEQ ID NO: 317752
cagugcuggccuuaaaggu

SEQ ID NO: 406670 - RNA, 19 nt, Artificial Sequence
  Description of Artificial Sequence: Synthetic oligonucleotide
  Antisense Strand to SEQ ID NO: 406669
accuuuaaggccagcacug

SEQ ID NO: 406671 - RNA, 19 nt, Artificial Sequence
  Description of Artificial Sequence: Synthetic oligonucleotide
  Sense Strand Starting at position 1121 of SEQ ID NO: 317895
cuugaugguucagugguau

SEQ ID NO: 406672 - RNA, 19 nt, Artificial Sequence
  Description of Artificial Sequence: Synthetic oligonucleotide
  Antisense Strand to SEQ ID NO: 406671
auaccacugaaccaucaag

SEQ ID NO: 406673 - RNA, 19 nt, Artificial Sequence
  Description of Artificial Sequence: Synthetic oligonucleotide
  Sense Strand Starting at position 1121 of SEQ ID NO: 317994
ggaagcauggcaugcaaua

SEQ ID NO: 406674 - RNA, 19 nt, Artificial Sequence
  Description of Artificial Sequence: Synthetic oligonucleotide
  Antisense Strand to SEQ ID NO: 406673
uauugcaugccaugcuucc

SEQ ID NO: 406675 - RNA, 19 nt, Artificial Sequence
  Description of Artificial Sequence: Synthetic oligonucleotide
  Sense Strand Starting at position 1121 of SEQ ID NO: 318174
gcaggcuugguugaauuga

SEQ ID NO: 406676 - RNA, 19 nt, Artificial Sequence
  Description of Artificial Sequence: Synthetic oligonucleotide
  Antisense Strand to SEQ ID NO: 406675
ucaauucaaccaagccugc

SEQ ID NO: 406677 - RNA, 19 nt, Artificial Sequence
  Description of Artificial Sequence: Synthetic oligonucleotide
  Sense Strand Starting at position 1121 of SEQ ID NO: 318232
ucuguugaccugcaaaugu

SEQ ID NO: 406678 - RNA, 19 nt, Artificial Sequence
  Description of Artificial Sequence: Synthetic oligonucleotide
  Antisense Strand to SEQ ID NO: 406677
acauuugcaggucaacaga

SEQ ID NO: 406679 - RNA, 19 nt, Artificial Sequence
  Description of Artificial Sequence: Synthetic oligonucleotide
  Sense Strand Starting at position 1121 of SEQ ID NO: 318274
aucaacuuugcaugucuga

SEQ ID NO: 406680 - RNA, 19 nt, Artificial Sequence
  Description of Artificial Sequence: Synthetic oligonucleotide
  Antisense Strand to SEQ ID NO: 406679
ucagacaugcaaaguugau

SEQ ID NO: 406681 - RNA, 19 nt, Artificial Sequence
  Description of Artificial Sequence: Synthetic oligonucleotide
  Sense Strand Starting at position 1121 of SEQ ID NO: 318277
aacuuugcaugucugaaga

SEQ ID NO: 406682 - RNA, 19 nt, Artificial Sequence
  Description of Artificial Sequence: Synthetic oligonucleotide
  Antisense Strand to SEQ ID NO: 406681
ucuucagacaugcaaaguu

SEQ ID NO: 406683 - RNA, 19 nt, Artificial Sequence
  Description of Artificial Sequence: Synthetic oligonucleotide
  Sense Strand Starting at position 1121 of SEQ ID NO: 318314
ggauuguugggaggugcaa

SEQ ID NO: 406684 - RNA, 19 nt, Artificial Sequence
  Description of Artificial Sequence: Synthetic oligonucleotide
  Antisense Strand to SEQ ID NO: 406683
uugcaccucccaacaaucc

SEQ ID NO: 406685 - RNA, 19 nt, Artificial Sequence
  Description of Artificial Sequence: Synthetic oligonucleotide
  Sense Strand Starting at position 1121 of SEQ ID NO: 318333
acaguuugauucuuagggu

SEQ ID NO: 406686 - RNA, 19 nt, Artificial Sequence
  Description of Artificial Sequence: Synthetic oligonucleotide
  Antisense Strand to SEQ ID NO: 406685
acccuaagaaucaaacugu

SEQ ID NO: 406687 - RNA, 19 nt, Artificial Sequence
  Description of Artificial Sequence: Synthetic oligonucleotide
  Sense Strand Starting at position 1121 of SEQ ID NO: 318522
ggaaaucguaacuguagca

SEQ ID NO: 406688 - RNA, 19 nt, Artificial Sequence
  Description of Artificial Sequence: Synthetic oligonucleotide
  Antisense Strand to SEQ ID NO: 406687
ugcuacaguuacgauuucc

SEQ ID NO: 406689 - RNA, 19 nt, Artificial Sequence
  Description of Artificial Sequence: Synthetic oligonucleotide
  Sense Strand Starting at position 1121 of SEQ ID NO: 318648
ggaacucuguagccaacua

SEQ ID NO: 406690 - RNA, 19 nt, Artificial Sequence
  Description of Artificial Sequence: Synthetic oligonucleotide
  Antisense Strand to SEQ ID NO: 406689
uaguuggcuacagaguucc

SEQ ID NO: 406691 - RNA, 19 nt, Artificial Sequence
  Description of Artificial Sequence: Synthetic oligonucleotide
  Sense Strand Starting at position 1121 of SEQ ID NO: 318735
ucuguagucccugaguuau

SEQ ID NO: 406692 - RNA, 19 nt, Artificial Sequence
  Description of Artificial Sequence: Synthetic oligonucleotide
  Antisense Strand to SEQ ID NO: 406691
auaacucagggacuacaga

SEQ ID NO: 406693 - RNA, 19 nt, Artificial Sequence
  Description of Artificial Sequence: Synthetic oligonucleotide
  Sense Strand Starting at position 1121 of SEQ ID NO: 318737
uguagucccugaguuauau

SEQ ID NO: 406694 - RNA, 19 nt, Artificial Sequence
  Description of Artificial Sequence: Synthetic oligonucleotide
  Antisense Strand to SEQ ID NO: 406693
auauaacucagggacuaca

SEQ ID NO: 406695 - RNA, 19 nt, Artificial Sequence
  Description of Artificial Sequence: Synthetic oligonucleotide
  Sense Strand Starting at position 1121 of SEQ ID NO: 318746
ugaguuauaucaguaacua

SEQ ID NO: 406696 - RNA, 19 nt, Artificial Sequence
  Description of Artificial Sequence: Synthetic oligonucleotide
  Antisense Strand to SEQ ID NO: 406695
uaguuacugauauaacuca

SEQ ID NO: 406697 - RNA, 19 nt, Artificial Sequence
  Description of Artificial Sequence: Synthetic oligonucleotide
  Sense Strand Starting at position 1121 of SEQ ID NO: 318911
aaaugaaguuggcugcaau

SEQ ID NO: 406698 - RNA, 19 nt, Artificial Sequence
  Description of Artificial Sequence: Synthetic oligonucleotide
  Antisense Strand to SEQ ID NO: 406697
auugcagccaacuucauuu

SEQ ID NO: 406699 - RNA, 19 nt, Artificial Sequence
  Description of Artificial Sequence: Synthetic oligonucleotide
  Sense Strand Starting at position 1121 of SEQ ID NO: 318912
aaugaaguuggcugcaaua

SEQ ID NO: 406700 - RNA, 19 nt, Artificial Sequence
  Description of Artificial Sequence: Synthetic oligonucleotide
  Antisense Strand to SEQ ID NO: 406699
uauugcagccaacuucauu

SEQ ID NO: 406701 - RNA, 19 nt, Artificial Sequence
  Description of Artificial Sequence: Synthetic oligonucleotide
  Sense Strand Starting at position 1121 of SEQ ID NO: 318914
ugaaguuggcugcaauacu

SEQ ID NO: 406702 - RNA, 19 nt, Artificial Sequence
  Description of Artificial Sequence: Synthetic oligonucleotide
  Antisense Strand to SEQ ID NO: 406701
aguauugcagccaacuuca

SEQ ID NO: 406703 - RNA, 19 nt, Artificial Sequence
  Description of Artificial Sequence: Synthetic oligonucleotide
  Sense Strand Starting at position 1121 of SEQ ID NO: 318923
cugcaauacucuucuagag

SEQ ID NO: 406704 - RNA, 19 nt, Artificial Sequence
  Description of Artificial Sequence: Synthetic oligonucleotide
  Antisense Strand to SEQ ID NO: 406703
cucuagaagaguauugcag

SEQ ID NO: 406705 - RNA, 19 nt, Artificial Sequence
  Description of Artificial Sequence: Synthetic oligonucleotide
  Sense Strand Starting at position 1121 of SEQ ID NO: 319016
gcaagaauaugacccaguu

SEQ ID NO: 406706 - RNA, 19 nt, Artificial Sequence
  Description of Artificial Sequence: Synthetic oligonucleotide
  Antisense Strand to SEQ ID NO: 406705
aacugggucauauucuugc

SEQ ID NO: 406707 - RNA, 19 nt, Artificial Sequence
  Description of Artificial Sequence: Synthetic oligonucleotide
  Sense Strand Starting at position 1121 of SEQ ID NO: 319057
gugacaugauuugauuaug

SEQ ID NO: 406708 - RNA, 19 nt, Artificial Sequence
  Description of Artificial Sequence: Synthetic oligonucleotide
  Antisense Strand to SEQ ID NO: 406707
cauaaucaaaucaugucac

SEQ ID NO: 406709 - RNA, 19 nt, Artificial Sequence
  Description of Artificial Sequence: Synthetic oligonucleotide
  Sense Strand Starting at position 1121 of SEQ ID NO: 319065
auuugauuaugcuucggca

SEQ ID NO: 406710 - RNA, 19 nt, Artificial Sequence
  Description of Artificial Sequence: Synthetic oligonucleotide
  Antisense Strand to SEQ ID NO: 406709
ugccgaagcauaaucaaau

SEQ ID NO: 406711 - RNA, 19 nt, Artificial Sequence
  Description of Artificial Sequence: Synthetic oligonucleotide
  Sense Strand Starting at position 1121 of SEQ ID NO: 319114
aguauuacuuaaguuggaa

SEQ ID NO: 406712 - RNA, 19 nt, Artificial Sequence
  Description of Artificial Sequence: Synthetic oligonucleotide
  Antisense Strand to SEQ ID NO: 406711
uuccaacuuaaguaauacu

SEQ ID NO: 406713 - RNA, 19 nt, Artificial Sequence
  Description of Artificial Sequence: Synthetic oligonucleotide
  Sense Strand Starting at position 1121 of SEQ ID NO: 319134
uuaagcaaaugugcuuaua

SEQ ID NO: 406714 - RNA, 19 nt, Artificial Sequence
  Description of Artificial Sequence: Synthetic oligonucleotide
  Antisense Strand to SEQ ID NO: 406713
uauaagcacauuugcuuaa

SEQ ID NO: 406715 - RNA, 19 nt, Artificial Sequence
  Description of Artificial Sequence: Synthetic oligonucleotide
  Sense Strand Starting at position 1121 of SEQ ID NO: 319137
agcaaaugugcuuauaguu

SEQ ID NO: 406716 - RNA, 19 nt, Artificial Sequence
  Description of Artificial Sequence: Synthetic oligonucleotide
  Antisense Strand to SEQ ID NO: 406715
aacuauaagcacauuugcu

SEQ ID NO: 406717 - RNA, 19 nt, Artificial Sequence
  Description of Artificial Sequence: Synthetic oligonucleotide
  Sense Strand Starting at position 1121 of SEQ ID NO: 319142
augugcuuauaguuaauga

SEQ ID NO: 406718 - RNA, 19 nt, Artificial Sequence
  Description of Artificial Sequence: Synthetic oligonucleotide
  Antisense Strand to SEQ ID NO: 406717
ucauuaacuauaagcacau

SEQ ID NO: 406719 - RNA, 19 nt, Artificial Sequence
  Description of Artificial Sequence: Synthetic oligonucleotide
  Sense Strand Starting at position 1122 of SEQ ID NO: 315242
ugguaaacauucucugaga

SEQ ID NO: 406720 - RNA, 19 nt, Artificial Sequence
  Description of Artificial Sequence: Synthetic oligonucleotide
  Antisense Strand to SEQ ID NO: 406719
ucucagagaauguuuacca

SEQ ID NO: 406721 - RNA, 19 nt, Artificial Sequence
  Description of Artificial Sequence: Synthetic oligonucleotide
  Sense Strand Starting at position 1122 of SEQ ID NO: 315243
gguaaacauucucugagau

SEQ ID NO: 406722 - RNA, 19 nt, Artificial Sequence
  Description of Artificial Sequence: Synthetic oligonucleotide
  Antisense Strand to SEQ ID NO: 406721
aucucagagaauguuuacc

SEQ ID NO: 406723 - RNA, 19 nt, Artificial Sequence
  Description of Artificial Sequence: Synthetic oligonucleotide
  Sense Strand Starting at position 1122 of SEQ ID NO: 315244
guaaacauucucugagauu

SEQ ID NO: 406724 - RNA, 19 nt, Artificial Sequence
  Description of Artificial Sequence: Synthetic oligonucleotide
  Antisense Strand to SEQ ID NO: 406723
aaucucagagaauguuuac

SEQ ID NO: 406725 - RNA, 19 nt, Artificial Sequence
  Description of Artificial Sequence: Synthetic oligonucleotide
  Sense Strand Starting at position 1122 of SEQ ID NO: 315386
ugacuaaguuccuccagac

SEQ ID NO: 406726 - RNA, 19 nt, Artificial Sequence
  Description of Artificial Sequence: Synthetic oligonucleotide
  Antisense Strand to SEQ ID NO: 406725
gucuggaggaacuuaguca

SEQ ID NO: 406727 - RNA, 19 nt, Artificial Sequence
  Description of Artificial Sequence: Synthetic oligonucleotide
  Sense Strand Starting at position 1122 of SEQ ID NO: 315390
uaaguuccuccagacggaa

SEQ ID NO: 406728 - RNA, 19 nt, Artificial Sequence
  Description of Artificial Sequence: Synthetic oligonucleotide
  Antisense Strand to SEQ ID NO: 406727
uuccgucuggaggaacuua

SEQ ID NO: 406729 - RNA, 19 nt, Artificial Sequence
  Description of Artificial Sequence: Synthetic oligonucleotide
  Sense Strand Starting at position 1122 of SEQ ID NO: 315392
aguuccuccagacggaaau

SEQ ID NO: 406730 - RNA, 19 nt, Artificial Sequence
  Description of Artificial Sequence: Synthetic oligonucleotide
  Antisense Strand to SEQ ID NO: 406729
auuuccgucuggaggaacu

SEQ ID NO: 406731 - RNA, 19 nt, Artificial Sequence
  Description of Artificial Sequence: Synthetic oligonucleotide
  Sense Strand Starting at position 1122 of SEQ ID NO: 315421
agaagugaauaccuuccau

SEQ ID NO: 406732 - RNA, 19 nt, Artificial Sequence
  Description of Artificial Sequence: Synthetic oligonucleotide
  Antisense Strand to SEQ ID NO: 406731
auggaagguauucacuucu

SEQ ID NO: 406733 - RNA, 19 nt, Artificial Sequence
  Description of Artificial Sequence: Synthetic oligonucleotide
  Sense Strand Starting at position 1122 of SEQ ID NO: 315469
agcugacuaagguggaaau

SEQ ID NO: 406734 - RNA, 19 nt, Artificial Sequence
  Description of Artificial Sequence: Synthetic oligonucleotide
  Antisense Strand to SEQ ID NO: 406733
auuuccaccuuagucagcu

SEQ ID NO: 406735 - RNA, 19 nt, Artificial Sequence
  Description of Artificial Sequence: Synthetic oligonucleotide
  Sense Strand Starting at position 1122 of SEQ ID NO: 315470
gcugacuaagguggaaauu

SEQ ID NO: 406736 - RNA, 19 nt, Artificial Sequence
  Description of Artificial Sequence: Synthetic oligonucleotide
  Antisense Strand to SEQ ID NO: 406735
aauuuccaccuuagucagc

SEQ ID NO: 406737 - RNA, 19 nt, Artificial Sequence
  Description of Artificial Sequence: Synthetic oligonucleotide
  Sense Strand Starting at position 1122 of SEQ ID NO: 315673
cuaagaaucuggguauuau

SEQ ID NO: 406738 - RNA, 19 nt, Artificial Sequence
  Description of Artificial Sequence: Synthetic oligonucleotide
  Antisense Strand to SEQ ID NO: 406737
auaauacccagauucuuag

SEQ ID NO: 406739 - RNA, 19 nt, Artificial Sequence
  Description of Artificial Sequence: Synthetic oligonucleotide
  Sense Strand Starting at position 1122 of SEQ ID NO: 315684
gguauuaugcugaggugug

SEQ ID NO: 406740 - RNA, 19 nt, Artificial Sequence
  Description of Artificial Sequence: Synthetic oligonucleotide
  Antisense Strand to SEQ ID NO: 406739
cacaccucagcauaauacc

SEQ ID NO: 406741 - RNA, 19 nt, Artificial Sequence
  Description of Artificial Sequence: Synthetic oligonucleotide
  Sense Strand Starting at position 1122 of SEQ ID NO: 315703
ggaugcaugagugacugau

SEQ ID NO: 406742 - RNA, 19 nt, Artificial Sequence
  Description of Artificial Sequence: Synthetic oligonucleotide
  Antisense Strand to SEQ ID NO: 406741
aucagucacucaugcaucc

SEQ ID NO: 406743 - RNA, 19 nt, Artificial Sequence
  Description of Artificial Sequence: Synthetic oligonucleotide
  Sense Strand Starting at position 1122 of SEQ ID NO: 315826
guaauaaccuagucuacag

SEQ ID NO: 406744 - RNA, 19 nt, Artificial Sequence
  Description of Artificial Sequence: Synthetic oligonucleotide
  Antisense Strand to SEQ ID NO: 406743
cuguagacuagguuauuac

SEQ ID NO: 406745 - RNA, 19 nt, Artificial Sequence
  Description of Artificial Sequence: Synthetic oligonucleotide
  Sense Strand Starting at position 1122 of SEQ ID NO: 315860
ucugccugagccuaaugaa

SEQ ID NO: 406746 - RNA, 19 nt, Artificial Sequence
  Description of Artificial Sequence: Synthetic oligonucleotide
  Antisense Strand to SEQ ID NO: 406745
uucauuaggcucaggcaga

SEQ ID NO: 406747 - RNA, 19 nt, Artificial Sequence
  Description of Artificial Sequence: Synthetic oligonucleotide
  Sense Strand Starting at position 1122 of SEQ ID NO: 315870
ccuaaugaaucaguaguga

SEQ ID NO: 406748 - RNA, 19 nt, Artificial Sequence
  Description of Artificial Sequence: Synthetic oligonucleotide
  Antisense Strand to SEQ ID NO: 406747
ucacuacugauucauuagg

SEQ ID NO: 406749 - RNA, 19 nt, Artificial Sequence
  Description of Artificial Sequence: Synthetic oligonucleotide
  Sense Strand Starting at position 1122 of SEQ ID NO: 315914
gaggaaacuuauguguuga

SEQ ID NO: 406750 - RNA, 19 nt, Artificial Sequence
  Description of Artificial Sequence: Synthetic oligonucleotide
  Antisense Strand to SEQ ID NO: 406749
ucaacacauaaguuuccuc

SEQ ID NO: 406751 - RNA, 19 nt, Artificial Sequence
  Description of Artificial Sequence: Synthetic oligonucleotide
  Sense Strand Starting at position 1122 of SEQ ID NO: 315915
aggaaacuuauguguugag

SEQ ID NO: 406752 - RNA, 19 nt, Artificial Sequence
  Description of Artificial Sequence: Synthetic oligonucleotide
  Antisense Strand to SEQ ID NO: 406751
cucaacacauaaguuuccu

SEQ ID NO: 406753 - RNA, 19 nt, Artificial Sequence
  Description of Artificial Sequence: Synthetic oligonucleotide
  Sense Strand Starting at position 1122 of SEQ ID NO: 315935
ccugauguggcagaaauca

SEQ ID NO: 406754 - RNA, 19 nt, Artificial Sequence
  Description of Artificial Sequence: Synthetic oligonucleotide
  Antisense Strand to SEQ ID NO: 406753
ugauuucugccacaucagg

SEQ ID NO: 406755 - RNA, 19 nt, Artificial Sequence
  Description of Artificial Sequence: Synthetic oligonucleotide
  Sense Strand Starting at position 1122 of SEQ ID NO: 315986
guggguggcaccuagagaa

SEQ ID NO: 406756 - RNA, 19 nt, Artificial Sequence
  Description of Artificial Sequence: Synthetic oligonucleotide
  Antisense Strand to SEQ ID NO: 406755
uucucuaggugccacccac

SEQ ID NO: 406757 - RNA, 19 nt, Artificial Sequence
  Description of Artificial Sequence: Synthetic oligonucleotide
  Sense Strand Starting at position 1122 of SEQ ID NO: 316349
gcauuaacuacuugaggga

SEQ ID NO: 406758 - RNA, 19 nt, Artificial Sequence
  Description of Artificial Sequence: Synthetic oligonucleotide
  Antisense Strand to SEQ ID NO: 406757
ucccucaaguaguuaaugc

SEQ ID NO: 406759 - RNA, 19 nt, Artificial Sequence
  Description of Artificial Sequence: Synthetic oligonucleotide
  Sense Strand Starting at position 1122 of SEQ ID NO: 316362
gagggaacuuugucuuuag

SEQ ID NO: 406760 - RNA, 19 nt, Artificial Sequence
  Description of Artificial Sequence: Synthetic oligonucleotide
  Antisense Strand to SEQ ID NO: 406759
cuaaagacaaaguucccuc

SEQ ID NO: 406761 - RNA, 19 nt, Artificial Sequence
  Description of Artificial Sequence: Synthetic oligonucleotide
  Sense Strand Starting at position 1122 of SEQ ID NO: 316552
uggcauguauuucuuucua

SEQ ID NO: 406762 - RNA, 19 nt, Artificial Sequence
  Description of Artificial Sequence: Synthetic oligonucleotide
  Antisense Strand to SEQ ID NO: 406761
uagaaagaaauacaugcca

SEQ ID NO: 406763 - RNA, 19 nt, Artificial Sequence
  Description of Artificial Sequence: Synthetic oligonucleotide
  Sense Strand Starting at position 1122 of SEQ ID NO: 316812
ugcauaauuugagagaaua

SEQ ID NO: 406764 - RNA, 19 nt, Artificial Sequence
  Description of Artificial Sequence: Synthetic oligonucleotide
  Antisense Strand to SEQ ID NO: 406763
uauucucucaaauuaugca

SEQ ID NO: 406765 - RNA, 19 nt, Artificial Sequence
  Description of Artificial Sequence: Synthetic oligonucleotide
  Sense Strand Starting at position 1122 of SEQ ID NO: 316824
gagaauaugcuacacaguu

SEQ ID NO: 406766 - RNA, 19 nt, Artificial Sequence
  Description of Artificial Sequence: Synthetic oligonucleotide
  Antisense Strand to SEQ ID NO: 406765
aacuguguagcauauucuc

SEQ ID NO: 406767 - RNA, 19 nt, Artificial Sequence
  Description of Artificial Sequence: Synthetic oligonucleotide
  Sense Strand Starting at position 1122 of SEQ ID NO: 316837
acaguuaagucaucaccaa

SEQ ID NO: 406768 - RNA, 19 nt, Artificial Sequence
  Description of Artificial Sequence: Synthetic oligonucleotide
  Antisense Strand to SEQ ID NO: 406767
uuggugaugacuuaacugu

SEQ ID NO: 406769 - RNA, 19 nt, Artificial Sequence
  Description of Artificial Sequence: Synthetic oligonucleotide
  Sense Strand Starting at position 1122 of SEQ ID NO: 316978
cggauuaggguagguaaua

SEQ ID NO: 406770 - RNA, 19 nt, Artificial Sequence
  Description of Artificial Sequence: Synthetic oligonucleotide
  Antisense Strand to SEQ ID NO: 406769
uauuaccuacccuaauccg

SEQ ID NO: 406771 - RNA, 19 nt, Artificial Sequence
  Description of Artificial Sequence: Synthetic oligonucleotide
  Sense Strand Starting at position 1122 of SEQ ID NO: 316987
guagguaauaggcaccaaa

SEQ ID NO: 406772 - RNA, 19 nt, Artificial Sequence
  Description of Artificial Sequence: Synthetic oligonucleotide
  Antisense Strand to SEQ ID NO: 406771
uuuggugccuauuaccuac

SEQ ID NO: 406773 - RNA, 19 nt, Artificial Sequence
  Description of Artificial Sequence: Synthetic oligonucleotide
  Sense Strand Starting at position 1122 of SEQ ID NO: 317307
guugcaugucuagaagaac

SEQ ID NO: 406774 - RNA, 19 nt, Artificial Sequence
  Description of Artificial Sequence: Synthetic oligonucleotide
  Antisense Strand to SEQ ID NO: 406773
guucuucuagacaugcaac

SEQ ID NO: 406775 - RNA, 19 nt, Artificial Sequence
  Description of Artificial Sequence: Synthetic oligonucleotide
  Sense Strand Starting at position 1122 of SEQ ID NO: 317310
gcaugucuagaagaacuuu

SEQ ID NO: 406776 - RNA, 19 nt, Artificial Sequence
  Description of Artificial Sequence: Synthetic oligonucleotide
  Antisense Strand to SEQ ID NO: 406775
aaaguucuucuagacaugc

SEQ ID NO: 406777 - RNA, 19 nt, Artificial Sequence
  Description of Artificial Sequence: Synthetic oligonucleotide
  Sense Strand Starting at position 1122 of SEQ ID NO: 317447
ccuggucuuagggaguuua

SEQ ID NO: 406778 - RNA, 19 nt, Artificial Sequence
  Description of Artificial Sequence: Synthetic oligonucleotide
  Antisense Strand to SEQ ID NO: 406777
uaaacucccuaagaccagg

SEQ ID NO: 406779 - RNA, 19 nt, Artificial Sequence
  Description of Artificial Sequence: Synthetic oligonucleotide
  Sense Strand Starting at position 1122 of SEQ ID NO: 317457
gggaguuuagugggaauga

SEQ ID NO: 406780 - RNA, 19 nt, Artificial Sequence
  Description of Artificial Sequence: Synthetic oligonucleotide
  Antisense Strand to SEQ ID NO: 406779
ucauucccacuaaacuccc

SEQ ID NO: 406781 - RNA, 19 nt, Artificial Sequence
  Description of Artificial Sequence: Synthetic oligonucleotide
  Sense Strand Starting at position 1122 of SEQ ID NO: 317532
ggcagaugccaugagauug

SEQ ID NO: 406782 - RNA, 19 nt, Artificial Sequence
  Description of Artificial Sequence: Synthetic oligonucleotide
  Antisense Strand to SEQ ID NO: 406781
caaucucauggcaucugcc

SEQ ID NO: 406783 - RNA, 19 nt, Artificial Sequence
  Description of Artificial Sequence: Synthetic oligonucleotide
  Sense Strand Starting at position 1122 of SEQ ID NO: 317537
augccaugagauugacauc

SEQ ID NO: 406784 - RNA, 19 nt, Artificial Sequence
  Description of Artificial Sequence: Synthetic oligonucleotide
  Antisense Strand to SEQ ID NO: 406783
gaugucaaucucauggcau

SEQ ID NO: 406785 - RNA, 19 nt, Artificial Sequence
  Description of Artificial Sequence: Synthetic oligonucleotide
  Sense Strand Starting at position 1122 of SEQ ID NO: 317585
ggaagugaugcuugaugau

SEQ ID NO: 406786 - RNA, 19 nt, Artificial Sequence
  Description of Artificial Sequence: Synthetic oligonucleotide
  Antisense Strand to SEQ ID NO: 406785
aucaucaagcaucacuucc

SEQ ID NO: 406787 - RNA, 19 nt, Artificial Sequence
  Description of Artificial Sequence: Synthetic oligonucleotide
  Sense Strand Starting at position 1122 of SEQ ID NO: 317598
gaugaugaguagguguuaa

SEQ ID NO: 406788 - RNA, 19 nt, Artificial Sequence
  Description of Artificial Sequence: Synthetic oligonucleotide
  Antisense Strand to SEQ ID NO: 406787
uuaacaccuacucaucauc

SEQ ID NO: 406789 - RNA, 19 nt, Artificial Sequence
  Description of Artificial Sequence: Synthetic oligonucleotide
  Sense Strand Starting at position 1122 of SEQ ID NO: 317927
agugaauaaugguuuagag

SEQ ID NO: 406790 - RNA, 19 nt, Artificial Sequence
  Description of Artificial Sequence: Synthetic oligonucleotide
  Antisense Strand to SEQ ID NO: 406789
cucuaaaccauuauucacu

SEQ ID NO: 406791 - RNA, 19 nt, Artificial Sequence
  Description of Artificial Sequence: Synthetic oligonucleotide
  Sense Strand Starting at position 1122 of SEQ ID NO: 318113
gagcuagaauucucaagag

SEQ ID NO: 406792 - RNA, 19 nt, Artificial Sequence
  Description of Artificial Sequence: Synthetic oligonucleotide
  Antisense Strand to SEQ ID NO: 406791
cucuugagaauucuagcuc

SEQ ID NO: 406793 - RNA, 19 nt, Artificial Sequence
  Description of Artificial Sequence: Synthetic oligonucleotide
  Sense Strand Starting at position 1122 of SEQ ID NO: 318133
agcuaaggauaaucacuau

SEQ ID NO: 406794 - RNA, 19 nt, Artificial Sequence
  Description of Artificial Sequence: Synthetic oligonucleotide
  Antisense Strand to SEQ ID NO: 406793
auagugauuauccuuagcu

SEQ ID NO: 406795 - RNA, 19 nt, Artificial Sequence
  Description of Artificial Sequence: Synthetic oligonucleotide
  Sense Strand Starting at position 1122 of SEQ ID NO: 318338
gggaaaguuugacuggucu

SEQ ID NO: 406796 - RNA, 19 nt, Artificial Sequence
  Description of Artificial Sequence: Synthetic oligonucleotide
  Antisense Strand to SEQ ID NO: 406795
agaccagucaaacuuuccc

SEQ ID NO: 406797 - RNA, 19 nt, Artificial Sequence
  Description of Artificial Sequence: Synthetic oligonucleotide
  Sense Strand Starting at position 1122 of SEQ ID NO: 318492
agagauggcuuccucagaa

SEQ ID NO: 406798 - RNA, 19 nt, Artificial Sequence
  Description of Artificial Sequence: Synthetic oligonucleotide
  Antisense Strand to SEQ ID NO: 406797
uucugaggaagccaucucu

SEQ ID NO: 406799 - RNA, 19 nt, Artificial Sequence
  Description of Artificial Sequence: Synthetic oligonucleotide
  Sense Strand Starting at position 1123 of SEQ ID NO: 315523
cuuauauacccagguaugu

SEQ ID NO: 406800 - RNA, 19 nt, Artificial Sequence
  Description of Artificial Sequence: Synthetic oligonucleotide
  Antisense Strand to SEQ ID NO: 406799
acauaccuggguauauaag

SEQ ID NO: 406801 - RNA, 19 nt, Artificial Sequence
  Description of Artificial Sequence: Synthetic oligonucleotide
  Sense Strand Starting at position 1123 of SEQ ID NO: 315577
cugcuuagcuggucucuaa

SEQ ID NO: 406802 - RNA, 19 nt, Artificial Sequence
  Description of Artificial Sequence: Synthetic oligonucleotide
  Antisense Strand to SEQ ID NO: 406801
uuagagaccagcuaagcag

SEQ ID NO: 406803 - RNA, 19 nt, Artificial Sequence
  Description of Artificial Sequence: Synthetic oligonucleotide
  Sense Strand Starting at position 1123 of SEQ ID NO: 315580
cuuagcuggucucuaaacu

SEQ ID NO: 406804 - RNA, 19 nt, Artificial Sequence
  Description of Artificial Sequence: Synthetic oligonucleotide
  Antisense Strand to SEQ ID NO: 406803
aguuuagagaccagcuaag

SEQ ID NO: 406805 - RNA, 19 nt, Artificial Sequence
  Description of Artificial Sequence: Synthetic oligonucleotide
  Sense Strand Starting at position 1123 of SEQ ID NO: 315581
uuagcuggucucuaaacuu

SEQ ID NO: 406806 - RNA, 19 nt, Artificial Sequence
  Description of Artificial Sequence: Synthetic oligonucleotide
  Antisense Strand to SEQ ID NO: 406805
aaguuuagagaccagcuaa

SEQ ID NO: 406807 - RNA, 19 nt, Artificial Sequence
  Description of Artificial Sequence: Synthetic oligonucleotide
  Sense Strand Starting at position 1123 of SEQ ID NO: 315929
guagcugagggaugagaau

SEQ ID NO: 406808 - RNA, 19 nt, Artificial Sequence
  Description of Artificial Sequence: Synthetic oligonucleotide
  Antisense Strand to SEQ ID NO: 406807
auucucaucccucagcuac

SEQ ID NO: 406809 - RNA, 19 nt, Artificial Sequence
  Description of Artificial Sequence: Synthetic oligonucleotide
  Sense Strand Starting at position 1123 of SEQ ID NO: 316012
ugacaaagacuaugucuca

SEQ ID NO: 406810 - RNA, 19 nt, Artificial Sequence
  Description of Artificial Sequence: Synthetic oligonucleotide
  Antisense Strand to SEQ ID NO: 406809
ugagacauagucuuuguca

SEQ ID NO: 406811 - RNA, 19 nt, Artificial Sequence
  Description of Artificial Sequence: Synthetic oligonucleotide
  Sense Strand Starting at position 1123 of SEQ ID NO: 316148
ggugaagugagcuguguga

SEQ ID NO: 406812 - RNA, 19 nt, Artificial Sequence
  Description of Artificial Sequence: Synthetic oligonucleotide
  Antisense Strand to SEQ ID NO: 406811
ucacacagcucacuucacc

SEQ ID NO: 406813 - RNA, 19 nt, Artificial Sequence
  Description of Artificial Sequence: Synthetic oligonucleotide
  Sense Strand Starting at position 1123 of SEQ ID NO: 316152
aagugagcugugugagcaa

SEQ ID NO: 406814 - RNA, 19 nt, Artificial Sequence
  Description of Artificial Sequence: Synthetic oligonucleotide
  Antisense Strand to SEQ ID NO: 406813
uugcucacacagcucacuu

SEQ ID NO: 406815 - RNA, 19 nt, Artificial Sequence
  Description of Artificial Sequence: Synthetic oligonucleotide
  Sense Strand Starting at position 1123 of SEQ ID NO: 316217
ugcaguuaguuucuuaaag

SEQ ID NO: 406816 - RNA, 19 nt, Artificial Sequence
  Description of Artificial Sequence: Synthetic oligonucleotide
  Antisense Strand to SEQ ID NO: 406815
cuuuaagaaacuaacugca

SEQ ID NO: 406817 - RNA, 19 nt, Artificial Sequence
  Description of Artificial Sequence: Synthetic oligonucleotide
  Sense Strand Starting at position 1123 of SEQ ID NO: 316218
gcaguuaguuucuuaaagg

SEQ ID NO: 406818 - RNA, 19 nt, Artificial Sequence
  Description of Artificial Sequence: Synthetic oligonucleotide
  Antisense Strand to SEQ ID NO: 406817
ccuuuaagaaacuaacugc

SEQ ID NO: 406819 - RNA, 19 nt, Artificial Sequence
  Description of Artificial Sequence: Synthetic oligonucleotide
  Sense Strand Starting at position 1123 of SEQ ID NO: 316219
caguuaguuucuuaaaggu

SEQ ID NO: 406820 - RNA, 19 nt, Artificial Sequence
  Description of Artificial Sequence: Synthetic oligonucleotide
  Antisense Strand to SEQ ID NO: 406819
accuuuaagaaacuaacug

SEQ ID NO: 406821 - RNA, 19 nt, Artificial Sequence
  Description of Artificial Sequence: Synthetic oligonucleotide
  Sense Strand Starting at position 1123 of SEQ ID NO: 316252
gucuacaaaucuugaauug

SEQ ID NO: 406822 - RNA, 19 nt, Artificial Sequence
  Description of Artificial Sequence: Synthetic oligonucleotide
  Antisense Strand to SEQ ID NO: 406821
caauucaagauuuguagac

SEQ ID NO: 406823 - RNA, 19 nt, Artificial Sequence
  Description of Artificial Sequence: Synthetic oligonucleotide
  Sense Strand Starting at position 1123 of SEQ ID NO: 316261
ucuugaauuguauaugcaa

SEQ ID NO: 406824 - RNA, 19 nt, Artificial Sequence
  Description of Artificial Sequence: Synthetic oligonucleotide
  Antisense Strand to SEQ ID NO: 406823
uugcauauacaauucaaga

SEQ ID NO: 406825 - RNA, 19 nt, Artificial Sequence
  Description of Artificial Sequence: Synthetic oligonucleotide
  Sense Strand Starting at position 1123 of SEQ ID NO: 316264
ugaauuguauaugcaaaca

SEQ ID NO: 406826 - RNA, 19 nt, Artificial Sequence
  Description of Artificial Sequence: Synthetic oligonucleotide
  Antisense Strand to SEQ ID NO: 406825
uguuugcauauacaauuca

SEQ ID NO: 406827 - RNA, 19 nt, Artificial Sequence
  Description of Artificial Sequence: Synthetic oligonucleotide
  Sense Strand Starting at position 1123 of SEQ ID NO: 316274
augcaaacacuuuguaaug

SEQ ID NO: 406828 - RNA, 19 nt, Artificial Sequence
  Description of Artificial Sequence: Synthetic oligonucleotide
  Antisense Strand to SEQ ID NO: 406827
cauuacaaaguguuugcau

SEQ ID NO: 406829 - RNA, 19 nt, Artificial Sequence
  Description of Artificial Sequence: Synthetic oligonucleotide
  Sense Strand Starting at position 1123 of SEQ ID NO: 316275
ugcaaacacuuuguaauga

SEQ ID NO: 406830 - RNA, 19 nt, Artificial Sequence
  Description of Artificial Sequence: Synthetic oligonucleotide
  Antisense Strand to SEQ ID NO: 406829
ucauuacaaaguguuugca

SEQ ID NO: 406831 - RNA, 19 nt, Artificial Sequence
  Description of Artificial Sequence: Synthetic oligonucleotide
  Sense Strand Starting at position 1123 of SEQ ID NO: 316276
gcaaacacuuuguaaugaa

SEQ ID NO: 406832 - RNA, 19 nt, Artificial Sequence
  Description of Artificial Sequence: Synthetic oligonucleotide
  Antisense Strand to SEQ ID NO: 406831
uucauuacaaaguguuugc

SEQ ID NO: 406833 - RNA, 19 nt, Artificial Sequence
  Description of Artificial Sequence: Synthetic oligonucleotide
  Sense Strand Starting at position 1123 of SEQ ID NO: 316379
guacauggguuaucaauaa

SEQ ID NO: 406834 - RNA, 19 nt, Artificial Sequence
  Description of Artificial Sequence: Synthetic oligonucleotide
  Antisense Strand to SEQ ID NO: 406833
uuauugauaacccauguac

SEQ ID NO: 406835 - RNA, 19 nt, Artificial Sequence
  Description of Artificial Sequence: Synthetic oligonucleotide
  Sense Strand Starting at position 1123 of SEQ ID NO: 316383
auggguuaucaauaagucu

SEQ ID NO: 406836 - RNA, 19 nt, Artificial Sequence
  Description of Artificial Sequence: Synthetic oligonucleotide
  Antisense Strand to SEQ ID NO: 406835
agacuuauugauaacccau

SEQ ID NO: 406837 - RNA, 19 nt, Artificial Sequence
  Description of Artificial Sequence: Synthetic oligonucleotide
  Sense Strand Starting at position 1123 of SEQ ID NO: 316662
cugaaacaucagcguucuu

SEQ ID NO: 406838 - RNA, 19 nt, Artificial Sequence
  Description of Artificial Sequence: Synthetic oligonucleotide
  Antisense Strand to SEQ ID NO: 406837
aagaacgcugauguuucag

SEQ ID NO: 406839 - RNA, 19 nt, Artificial Sequence
  Description of Artificial Sequence: Synthetic oligonucleotide
  Sense Strand Starting at position 1123 of SEQ ID NO: 317565
aguuauuauugggucuguu

SEQ ID NO: 406840 - RNA, 19 nt, Artificial Sequence
  Description of Artificial Sequence: Synthetic oligonucleotide
  Antisense Strand to SEQ ID NO: 406839
aacagacccaauaauaacu

SEQ ID NO: 406841 - RNA, 19 nt, Artificial Sequence
  Description of Artificial Sequence: Synthetic oligonucleotide
  Sense Strand Starting at position 1123 of SEQ ID NO: 317652
agguaauacuugcaaguuu

SEQ ID NO: 406842 - RNA, 19 nt, Artificial Sequence
  Description of Artificial Sequence: Synthetic oligonucleotide
  Antisense Strand to SEQ ID NO: 406841
aaacuugcaaguauuaccu

SEQ ID NO: 406843 - RNA, 19 nt, Artificial Sequence
  Description of Artificial Sequence: Synthetic oligonucleotide
  Sense Strand Starting at position 1123 of SEQ ID NO: 318045
uguuguaaguguuucauga

SEQ ID NO: 406844 - RNA, 19 nt, Artificial Sequence
  Description of Artificial Sequence: Synthetic oligonucleotide
  Antisense Strand to SEQ ID NO: 406843
ucaugaaacacuuacaaca

SEQ ID NO: 406845 - RNA, 19 nt, Artificial Sequence
  Description of Artificial Sequence: Synthetic oligonucleotide
  Sense Strand Starting at position 1123 of SEQ ID NO: 318067
ccuggagaccucugauaau

SEQ ID NO: 406846 - RNA, 19 nt, Artificial Sequence
  Description of Artificial Sequence: Synthetic oligonucleotide
  Antisense Strand to SEQ ID NO: 406845
auuaucagaggucuccagg

SEQ ID NO: 406847 - RNA, 19 nt, Artificial Sequence
  Description of Artificial Sequence: Synthetic oligonucleotide
  Sense Strand Starting at position 1123 of SEQ ID NO: 318156
augggaaaugcucacuggu

SEQ ID NO: 406848 - RNA, 19 nt, Artificial Sequence
  Description of Artificial Sequence: Synthetic oligonucleotide
  Antisense Strand to SEQ ID NO: 406847
accagugagcauuucccau

SEQ ID NO: 406849 - RNA, 19 nt, Artificial Sequence
  Description of Artificial Sequence: Synthetic oligonucleotide
  Sense Strand Starting at position 1123 of SEQ ID NO: 318165
gcucacuggugguaacaga

SEQ ID NO: 406850 - RNA, 19 nt, Artificial Sequence
  Description of Artificial Sequence: Synthetic oligonucleotide
  Antisense Strand to SEQ ID NO: 406849
ucuguuaccaccagugagc

SEQ ID NO: 406851 - RNA, 19 nt, Artificial Sequence
  Description of Artificial Sequence: Synthetic oligonucleotide
  Sense Strand Starting at position 1123 of SEQ ID NO: 318295
ccuggaaugcuuuaucugu

SEQ ID NO: 406852 - RNA, 19 nt, Artificial Sequence
  Description of Artificial Sequence: Synthetic oligonucleotide
  Antisense Strand to SEQ ID NO: 406851
acagauaaagcauuccagg

SEQ ID NO: 406853 - RNA, 19 nt, Artificial Sequence
  Description of Artificial Sequence: Synthetic oligonucleotide
  Sense Strand Starting at position 1123 of SEQ ID NO: 318302
ugcuuuaucuguccuggga

SEQ ID NO: 406854 - RNA, 19 nt, Artificial Sequence
  Description of Artificial Sequence: Synthetic oligonucleotide
  Antisense Strand to SEQ ID NO: 406853
ucccaggacagauaaagca

SEQ ID NO: 406855 - RNA, 19 nt, Artificial Sequence
  Description of Artificial Sequence: Synthetic oligonucleotide
  Sense Strand Starting at position 1123 of SEQ ID NO: 318305
uuuaucuguccugggagca

SEQ ID NO: 406856 - RNA, 19 nt, Artificial Sequence
  Description of Artificial Sequence: Synthetic oligonucleotide
  Antisense Strand to SEQ ID NO: 406855
ugcucccaggacagauaaa

SEQ ID NO: 406857 - RNA, 19 nt, Artificial Sequence
  Description of Artificial Sequence: Synthetic oligonucleotide
  Sense Strand Starting at position 1123 of SEQ ID NO: 318306
uuaucuguccugggagcaa

SEQ ID NO: 406858 - RNA, 19 nt, Artificial Sequence
  Description of Artificial Sequence: Synthetic oligonucleotide
  Antisense Strand to SEQ ID NO: 406857
uugcucccaggacagauaa

SEQ ID NO: 406859 - RNA, 19 nt, Artificial Sequence
  Description of Artificial Sequence: Synthetic oligonucleotide
  Sense Strand Starting at position 1123 of SEQ ID NO: 318600
ggcggagguugaucucagu

SEQ ID NO: 406860 - RNA, 19 nt, Artificial Sequence
  Description of Artificial Sequence: Synthetic oligonucleotide
  Antisense Strand to SEQ ID NO: 406859
acugagaucaaccuccgcc

SEQ ID NO: 406861 - RNA, 19 nt, Artificial Sequence
  Description of Artificial Sequence: Synthetic oligonucleotide
  Sense Strand Starting at position 1123 of SEQ ID NO: 318701
gcagaauggaucugauggu

SEQ ID NO: 406862 - RNA, 19 nt, Artificial Sequence
  Description of Artificial Sequence: Synthetic oligonucleotide
  Antisense Strand to SEQ ID NO: 406861
accaucagauccauucugc

SEQ ID NO: 406863 - RNA, 19 nt, Artificial Sequence
  Description of Artificial Sequence: Synthetic oligonucleotide
  Sense Strand Starting at position 1123 of SEQ ID NO: 318702
cagaauggaucugaugguu

SEQ ID NO: 406864 - RNA, 19 nt, Artificial Sequence
  Description of Artificial Sequence: Synthetic oligonucleotide
  Antisense Strand to SEQ ID NO: 406863
aaccaucagauccauucug

SEQ ID NO: 406865 - RNA, 19 nt, Artificial Sequence
  Description of Artificial Sequence: Synthetic oligonucleotide
  Sense Strand Starting at position 1123 of SEQ ID NO: 318705
aauggaucugaugguuauu

SEQ ID NO: 406866 - RNA, 19 nt, Artificial Sequence
  Description of Artificial Sequence: Synthetic oligonucleotide
  Antisense Strand to SEQ ID NO: 406865
aauaaccaucagauccauu

SEQ ID NO: 406867 - RNA, 19 nt, Artificial Sequence
  Description of Artificial Sequence: Synthetic oligonucleotide
  Sense Strand Starting at position 1123 of SEQ ID NO: 318747
auacauguuaauuguggga

SEQ ID NO: 406868 - RNA, 19 nt, Artificial Sequence
  Description of Artificial Sequence: Synthetic oligonucleotide
  Antisense Strand to SEQ ID NO: 406867
ucccacaauuaacauguau

SEQ ID NO: 406869 - RNA, 19 nt, Artificial Sequence
  Description of Artificial Sequence: Synthetic oligonucleotide
  Sense Strand Starting at position 1123 of SEQ ID NO: 318749
acauguuaauugugggaaa

SEQ ID NO: 406870 - RNA, 19 nt, Artificial Sequence
  Description of Artificial Sequence: Synthetic oligonucleotide
  Antisense Strand to SEQ ID NO: 406869
uuucccacaauuaacaugu

SEQ ID NO: 406871 - RNA, 19 nt, Artificial Sequence
  Description of Artificial Sequence: Synthetic oligonucleotide
  Sense Strand Starting at position 1123 of SEQ ID NO: 318800
ccacaaguuaagcgugaga

SEQ ID NO: 406872 - RNA, 19 nt, Artificial Sequence
  Description of Artificial Sequence: Synthetic oligonucleotide
  Antisense Strand to SEQ ID NO: 406871
ucucacgcuuaacuugugg

SEQ ID NO: 406873 - RNA, 19 nt, Artificial Sequence
  Description of Artificial Sequence: Synthetic oligonucleotide
  Sense Strand Starting at position 1123 of SEQ ID NO: 318802
acaaguuaagcgugagaaa

SEQ ID NO: 406874 - RNA, 19 nt, Artificial Sequence
  Description of Artificial Sequence: Synthetic oligonucleotide
  Antisense Strand to SEQ ID NO: 406873
uuucucacgcuuaacuugu

SEQ ID NO: 406875 - RNA, 19 nt, Artificial Sequence
  Description of Artificial Sequence: Synthetic oligonucleotide
  Sense Strand Starting at position 1123 of SEQ ID NO: 319039
ggaagaaucgccugaaccu

SEQ ID NO: 406876 - RNA, 19 nt, Artificial Sequence
  Description of Artificial Sequence: Synthetic oligonucleotide
  Antisense Strand to SEQ ID NO: 406875
agguucaggcgauucuucc

SEQ ID NO: 406877 - RNA, 19 nt, Artificial Sequence
  Description of Artificial Sequence: Synthetic oligonucleotide
  Sense Strand Starting at position 1123 of SEQ ID NO: 319070
guugcagugaauugagcaa

SEQ ID NO: 406878 - RNA, 19 nt, Artificial Sequence
  Description of Artificial Sequence: Synthetic oligonucleotide
  Antisense Strand to SEQ ID NO: 406877
uugcucaauucacugcaac

SEQ ID NO: 406879 - RNA, 19 nt, Artificial Sequence
  Description of Artificial Sequence: Synthetic oligonucleotide
  Sense Strand Starting at position 1124 of SEQ ID NO: 317532
uccuuucccgguugugaaa

SEQ ID NO: 406880 - RNA, 19 nt, Artificial Sequence
  Description of Artificial Sequence: Synthetic oligonucleotide
  Antisense Strand to SEQ ID NO: 406879
uuucacaaccgggaaagga

SEQ ID NO: 406881 - RNA, 19 nt, Artificial Sequence
  Description of Artificial Sequence: Synthetic oligonucleotide
  Sense Strand Starting at position 1124 of SEQ ID NO: 317539
ccgguugugaaagagaauu

SEQ ID NO: 406882 - RNA, 19 nt, Artificial Sequence
  Description of Artificial Sequence: Synthetic oligonucleotide
  Antisense Strand to SEQ ID NO: 406881
aauucucuuucacaaccgg

SEQ ID NO: 406883 - RNA, 19 nt, Artificial Sequence
  Description of Artificial Sequence: Synthetic oligonucleotide
  Sense Strand Starting at position 1124 of SEQ ID NO: 317605
gcgagagcuuguguugaua

SEQ ID NO: 406884 - RNA, 19 nt, Artificial Sequence
  Description of Artificial Sequence: Synthetic oligonucleotide
  Antisense Strand to SEQ ID NO: 406883
uaucaacacaagcucucgc

SEQ ID NO: 406885 - RNA, 19 nt, Artificial Sequence
  Description of Artificial Sequence: Synthetic oligonucleotide
  Sense Strand Starting at position 1124 of SEQ ID NO: 317607
gagagcuuguguugauaaa

SEQ ID NO: 406886 - RNA, 19 nt, Artificial Sequence
  Description of Artificial Sequence: Synthetic oligonucleotide
  Antisense Strand to SEQ ID NO: 406885
uuuaucaacacaagcucuc

SEQ ID NO: 406887 - RNA, 19 nt, Artificial Sequence
  Description of Artificial Sequence: Synthetic oligonucleotide
  Sense Strand Starting at position 1124 of SEQ ID NO: 317629
gacagcuuugccgcgaaau

SEQ ID NO: 406888 - RNA, 19 nt, Artificial Sequence
  Description of Artificial Sequence: Synthetic oligonucleotide
  Antisense Strand to SEQ ID NO: 406887
auuucgcggcaaagcuguc

SEQ ID NO: 406889 - RNA, 19 nt, Artificial Sequence
  Description of Artificial Sequence: Synthetic oligonucleotide
  Sense Strand Starting at position 1124 of SEQ ID NO: 317630
acagcuuugccgcgaaaug

SEQ ID NO: 406890 - RNA, 19 nt, Artificial Sequence
  Description of Artificial Sequence: Synthetic oligonucleotide
  Antisense Strand to SEQ ID NO: 406889
cauuucgcggcaaagcugu

SEQ ID NO: 406891 - RNA, 19 nt, Artificial Sequence
  Description of Artificial Sequence: Synthetic oligonucleotide
  Sense Strand Starting at position 1124 of SEQ ID NO: 317671
ugucaaauauccuuggaag

SEQ ID NO: 406892 - RNA, 19 nt, Artificial Sequence
  Description of Artificial Sequence: Synthetic oligonucleotide
  Antisense Strand to SEQ ID NO: 406891
cuuccaaggauauuugaca

SEQ ID NO: 406893 - RNA, 19 nt, Artificial Sequence
  Description of Artificial Sequence: Synthetic oligonucleotide
  Sense Strand Starting at position 1124 of SEQ ID NO: 317672
gucaaauauccuuggaaga

SEQ ID NO: 406894 - RNA, 19 nt, Artificial Sequence
  Description of Artificial Sequence: Synthetic oligonucleotide
  Antisense Strand to SEQ ID NO: 406893
ucuuccaaggauauuugac

SEQ ID NO: 406895 - RNA, 19 nt, Artificial Sequence
  Description of Artificial Sequence: Synthetic oligonucleotide
  Sense Strand Starting at position 1124 of SEQ ID NO: 317765
caguguucucccgggaagc

SEQ ID NO: 406896 - RNA, 19 nt, Artificial Sequence
  Description of Artificial Sequence: Synthetic oligonucleotide
  Antisense Strand to SEQ ID NO: 406895
gcuucccgggagaacacug

SEQ ID NO: 406897 - RNA, 19 nt, Artificial Sequence
  Description of Artificial Sequence: Synthetic oligonucleotide
  Sense Strand Starting at position 1124 of SEQ ID NO: 317901
ugcagagauuucgaacccu

SEQ ID NO: 406898 - RNA, 19 nt, Artificial Sequence
  Description of Artificial Sequence: Synthetic oligonucleotide
  Antisense Strand to SEQ ID NO: 406897
aggguucgaaaucucugca

SEQ ID NO: 406899 - RNA, 19 nt, Artificial Sequence
  Description of Artificial Sequence: Synthetic oligonucleotide
  Sense Strand Starting at position 1124 of SEQ ID NO: 317977
ggcugagauuucuauugca

SEQ ID NO: 406900 - RNA, 19 nt, Artificial Sequence
  Description of Artificial Sequence: Synthetic oligonucleotide
  Antisense Strand to SEQ ID NO: 406899
ugcaauagaaaucucagcc

SEQ ID NO: 406901 - RNA, 19 nt, Artificial Sequence
  Description of Artificial Sequence: Synthetic oligonucleotide
  Sense Strand Starting at position 1124 of SEQ ID NO: 317980
ugagauuucuauugcaguu

SEQ ID NO: 406902 - RNA, 19 nt, Artificial Sequence
  Description of Artificial Sequence: Synthetic oligonucleotide
  Antisense Strand to SEQ ID NO: 406901
aacugcaauagaaaucuca

SEQ ID NO: 406903 - RNA, 19 nt, Artificial Sequence
  Description of Artificial Sequence: Synthetic oligonucleotide
  Sense Strand Starting at position 1124 of SEQ ID NO: 317995
aguucccauuuauguuauu

SEQ ID NO: 406904 - RNA, 19 nt, Artificial Sequence
  Description of Artificial Sequence: Synthetic oligonucleotide
  Antisense Strand to SEQ ID NO: 406903
aauaacauaaaugggaacu

SEQ ID NO: 406905 - RNA, 19 nt, Artificial Sequence
  Description of Artificial Sequence: Synthetic oligonucleotide
  Sense Strand Starting at position 1124 of SEQ ID NO: 318129
gcggagucucacgguguau

SEQ ID NO: 406906 - RNA, 19 nt, Artificial Sequence
  Description of Artificial Sequence: Synthetic oligonucleotide
  Antisense Strand to SEQ ID NO: 406905
auacaccgugagacuccgc

SEQ ID NO: 406907 - RNA, 19 nt, Artificial Sequence
  Description of Artificial Sequence: Synthetic oligonucleotide
  Sense Strand Starting at position 1124 of SEQ ID NO: 318197
cugcgagacucguuucuug

SEQ ID NO: 406908 - RNA, 19 nt, Artificial Sequence
  Description of Artificial Sequence: Synthetic oligonucleotide
  Antisense Strand to SEQ ID NO: 406907
caagaaacgagucucgcag

SEQ ID NO: 406909 - RNA, 19 nt, Artificial Sequence
  Description of Artificial Sequence: Synthetic oligonucleotide
  Sense Strand Starting at position 1124 of SEQ ID NO: 318205
cucguuucuugcgucaaau

SEQ ID NO: 406910 - RNA, 19 nt, Artificial Sequence
  Description of Artificial Sequence: Synthetic oligonucleotide
  Antisense Strand to SEQ ID NO: 406909
auuugacgcaagaaacgag

SEQ ID NO: 406911 - RNA, 19 nt, Artificial Sequence
  Description of Artificial Sequence: Synthetic oligonucleotide
  Sense Strand Starting at position 1124 of SEQ ID NO: 318206
ucguuucuugcgucaaaug

SEQ ID NO: 406912 - RNA, 19 nt, Artificial Sequence
  Description of Artificial Sequence: Synthetic oligonucleotide
  Antisense Strand to SEQ ID NO: 406911
cauuugacgcaagaaacga

SEQ ID NO: 406913 - RNA, 19 nt, Artificial Sequence
  Description of Artificial Sequence: Synthetic oligonucleotide
  Sense Strand Starting at position 1124 of SEQ ID NO: 318207
cguuucuugcgucaaauga

SEQ ID NO: 406914 - RNA, 19 nt, Artificial Sequence
  Description of Artificial Sequence: Synthetic oligonucleotide
  Antisense Strand to SEQ ID NO: 406913
ucauuugacgcaagaaacg

SEQ ID NO: 406915 - RNA, 19 nt, Artificial Sequence
  Description of Artificial Sequence: Synthetic oligonucleotide
  Sense Strand Starting at position 1124 of SEQ ID NO: 318215
gcgucaaaugagcauucuu

SEQ ID NO: 406916 - RNA, 19 nt, Artificial Sequence
  Description of Artificial Sequence: Synthetic oligonucleotide
  Antisense Strand to SEQ ID NO: 406915
aagaaugcucauuugacgc

SEQ ID NO: 406917 - RNA, 19 nt, Artificial Sequence
  Description of Artificial Sequence: Synthetic oligonucleotide
  Sense Strand Starting at position 1124 of SEQ ID NO: 318222
augagcauucuucggguaa

SEQ ID NO: 406918 - RNA, 19 nt, Artificial Sequence
  Description of Artificial Sequence: Synthetic oligonucleotide
  Antisense Strand to SEQ ID NO: 406917
uuacccgaagaaugcucau

SEQ ID NO: 406919 - RNA, 19 nt, Artificial Sequence
  Description of Artificial Sequence: Synthetic oligonucleotide
  Sense Strand Starting at position 1124 of SEQ ID NO: 318226
gcauucuucggguaaagag

SEQ ID NO: 406920 - RNA, 19 nt, Artificial Sequence
  Description of Artificial Sequence: Synthetic oligonucleotide
  Antisense Strand to SEQ ID NO: 406919
cucuuuacccgaagaaugc

SEQ ID NO: 406921 - RNA, 19 nt, Artificial Sequence
  Description of Artificial Sequence: Synthetic oligonucleotide
  Sense Strand Starting at position 1124 of SEQ ID NO: 318273
gcgccuguuuccuuugaau

SEQ ID NO: 406922 - RNA, 19 nt, Artificial Sequence
  Description of Artificial Sequence: Synthetic oligonucleotide
  Antisense Strand to SEQ ID NO: 406921
auucaaaggaaacaggcgc

SEQ ID NO: 406923 - RNA, 19 nt, Artificial Sequence
  Description of Artificial Sequence: Synthetic oligonucleotide
  Sense Strand Starting at position 1124 of SEQ ID NO: 318287
ugaauaauugccugcccga

SEQ ID NO: 406924 - RNA, 19 nt, Artificial Sequence
  Description of Artificial Sequence: Synthetic oligonucleotide
  Antisense Strand to SEQ ID NO: 406923
ucgggcaggcaauuauuca

SEQ ID NO: 406925 - RNA, 19 nt, Artificial Sequence
  Description of Artificial Sequence: Synthetic oligonucleotide
  Sense Strand Starting at position 1124 of SEQ ID NO: 318294
uugccugcccgaugugaaa

SEQ ID NO: 406926 - RNA, 19 nt, Artificial Sequence
  Description of Artificial Sequence: Synthetic oligonucleotide
  Antisense Strand to SEQ ID NO: 406925
uuucacaucgggcaggcaa

SEQ ID NO: 406927 - RNA, 19 nt, Artificial Sequence
  Description of Artificial Sequence: Synthetic oligonucleotide
  Sense Strand Starting at position 1124 of SEQ ID NO: 318371
gcguguguuccaggcuuau

SEQ ID NO: 406928 - RNA, 19 nt, Artificial Sequence
  Description of Artificial Sequence: Synthetic oligonucleotide
  Antisense Strand to SEQ ID NO: 406927
auaagccuggaacacacgc

SEQ ID NO: 406929 - RNA, 19 nt, Artificial Sequence
  Description of Artificial Sequence: Synthetic oligonucleotide
  Sense Strand Starting at position 1124 of SEQ ID NO: 318398
gcaccauucucucuuggga

SEQ ID NO: 406930 - RNA, 19 nt, Artificial Sequence
  Description of Artificial Sequence: Synthetic oligonucleotide
  Antisense Strand to SEQ ID NO: 406929
ucccaagagagaauggugc

SEQ ID NO: 406931 - RNA, 19 nt, Artificial Sequence
  Description of Artificial Sequence: Synthetic oligonucleotide
  Sense Strand Starting at position 1124 of SEQ ID NO: 318501
ggaggaucuuucucuagca

SEQ ID NO: 406932 - RNA, 19 nt, Artificial Sequence
  Description of Artificial Sequence: Synthetic oligonucleotide
  Antisense Strand to SEQ ID NO: 406931
ugcuagagaaagauccucc

SEQ ID NO: 406933 - RNA, 19 nt, Artificial Sequence
  Description of Artificial Sequence: Synthetic oligonucleotide
  Sense Strand Starting at position 1124 of SEQ ID NO: 318502
gaggaucuuucucuagcau

SEQ ID NO: 406934 - RNA, 19 nt, Artificial Sequence
  Description of Artificial Sequence: Synthetic oligonucleotide
  Antisense Strand to SEQ ID NO: 406933
augcuagagaaagauccuc

SEQ ID NO: 406935 - RNA, 19 nt, Artificial Sequence
  Description of Artificial Sequence: Synthetic oligonucleotide
  Sense Strand Starting at position 1124 of SEQ ID NO: 318525
uguaucaaguuugaggaga

SEQ ID NO: 406936 - RNA, 19 nt, Artificial Sequence
  Description of Artificial Sequence: Synthetic oligonucleotide
  Antisense Strand to SEQ ID NO: 406935
ucuccucaaacuugauaca

SEQ ID NO: 406937 - RNA, 19 nt, Artificial Sequence
  Description of Artificial Sequence: Synthetic oligonucleotide
  Sense Strand Starting at position 1124 of SEQ ID NO: 318527
uaucaaguuugaggagaag

SEQ ID NO: 406938 - RNA, 19 nt, Artificial Sequence
  Description of Artificial Sequence: Synthetic oligonucleotide
  Antisense Strand to SEQ ID NO: 406937
cuucuccucaaacuugaua

SEQ ID NO: 406939 - RNA, 19 nt, Artificial Sequence
  Description of Artificial Sequence: Synthetic oligonucleotide
  Sense Strand Starting at position 1124 of SEQ ID NO: 318681
aagugacucugggagugau

SEQ ID NO: 406940 - RNA, 19 nt, Artificial Sequence
  Description of Artificial Sequence: Synthetic oligonucleotide
  Antisense Strand to SEQ ID NO: 406939
aucacucccagagucacuu

SEQ ID NO: 406941 - RNA, 19 nt, Artificial Sequence
  Description of Artificial Sequence: Synthetic oligonucleotide
  Sense Strand Starting at position 1124 of SEQ ID NO: 318691
gggagugaugcuugaugua

SEQ ID NO: 406942 - RNA, 19 nt, Artificial Sequence
  Description of Artificial Sequence: Synthetic oligonucleotide
  Antisense Strand to SEQ ID NO: 406941
uacaucaagcaucacuccc

SEQ ID NO: 406943 - RNA, 19 nt, Artificial Sequence
  Description of Artificial Sequence: Synthetic oligonucleotide
  Sense Strand Starting at position 1124 of SEQ ID NO: 318696
ugaugcuugauguauagga

SEQ ID NO: 406944 - RNA, 19 nt, Artificial Sequence
  Description of Artificial Sequence: Synthetic oligonucleotide
  Antisense Strand to SEQ ID NO: 406943
uccuauacaucaagcauca

SEQ ID NO: 406945 - RNA, 19 nt, Artificial Sequence
  Description of Artificial Sequence: Synthetic oligonucleotide
  Sense Strand Starting at position 1124 of SEQ ID NO: 318698
augcuugauguauaggauu

SEQ ID NO: 406946 - RNA, 19 nt, Artificial Sequence
  Description of Artificial Sequence: Synthetic oligonucleotide
  Antisense Strand to SEQ ID NO: 406945
aauccuauacaucaagcau

SEQ ID NO: 406947 - RNA, 19 nt, Artificial Sequence
  Description of Artificial Sequence: Synthetic oligonucleotide
  Sense Strand Starting at position 1124 of SEQ ID NO: 318853
gacugauccugcgcuugau

SEQ ID NO: 406948 - RNA, 19 nt, Artificial Sequence
  Description of Artificial Sequence: Synthetic oligonucleotide
  Antisense Strand to SEQ ID NO: 406947
aucaagcgcaggaucaguc

SEQ ID NO: 406949 - RNA, 19 nt, Artificial Sequence
  Description of Artificial Sequence: Synthetic oligonucleotide
  Sense Strand Starting at position 1124 of SEQ ID NO: 318865
gcuugauuugcuuagccau

SEQ ID NO: 406950 - RNA, 19 nt, Artificial Sequence
  Description of Artificial Sequence: Synthetic oligonucleotide
  Antisense Strand to SEQ ID NO: 406949
auggcuaagcaaaucaagc

SEQ ID NO: 406951 - RNA, 19 nt, Artificial Sequence
  Description of Artificial Sequence: Synthetic oligonucleotide
  Sense Strand Starting at position 1124 of SEQ ID NO: 318988
gcuuucucugcaggaaguu

SEQ ID NO: 406952 - RNA, 19 nt, Artificial Sequence
  Description of Artificial Sequence: Synthetic oligonucleotide
  Antisense Strand to SEQ ID NO: 406951
aacuuccugcagagaaagc

SEQ ID NO: 406953 - RNA, 19 nt, Artificial Sequence
  Description of Artificial Sequence: Synthetic oligonucleotide
  Sense Strand Starting at position 1124 of SEQ ID NO: 319159
ucuaauucuacugggcgau

SEQ ID NO: 406954 - RNA, 19 nt, Artificial Sequence
  Description of Artificial Sequence: Synthetic oligonucleotide
  Antisense Strand to SEQ ID NO: 406953
aucgcccaguagaauuaga

SEQ ID NO: 406955 - RNA, 19 nt, Artificial Sequence
  Description of Artificial Sequence: Synthetic oligonucleotide
  Sense Strand Starting at position 1124 of SEQ ID NO: 319183
cggcuuugggaaggaauga

SEQ ID NO: 406956 - RNA, 19 nt, Artificial Sequence
  Description of Artificial Sequence: Synthetic oligonucleotide
  Antisense Strand to SEQ ID NO: 406955
ucauuccuucccaaagccg

SEQ ID NO: 406957 - RNA, 19 nt, Artificial Sequence
  Description of Artificial Sequence: Synthetic oligonucleotide
  Sense Strand Starting at position 1124 of SEQ ID NO: 319211
ugauaucugcagcgagauc

SEQ ID NO: 406958 - RNA, 19 nt, Artificial Sequence
  Description of Artificial Sequence: Synthetic oligonucleotide
  Antisense Strand to SEQ ID NO: 406957
gaucucgcugcagauauca

SEQ ID NO: 406959 - RNA, 19 nt, Artificial Sequence
  Description of Artificial Sequence: Synthetic oligonucleotide
  Sense Strand Starting at position 1125 of SEQ ID NO: 317263
auggguuucuagcgaccaa

SEQ ID NO: 406960 - RNA, 19 nt, Artificial Sequence
  Description of Artificial Sequence: Synthetic oligonucleotide
  Antisense Strand to SEQ ID NO: 406959
uuggucgcuagaaacccau

SEQ ID NO: 406961 - RNA, 19 nt, Artificial Sequence
  Description of Artificial Sequence: Synthetic oligonucleotide
  Sense Strand Starting at position 1125 of SEQ ID NO: 317264
uggguuucuagcgaccaau

SEQ ID NO: 406962 - RNA, 19 nt, Artificial Sequence
  Description of Artificial Sequence: Synthetic oligonucleotide
  Antisense Strand to SEQ ID NO: 406961
auuggucgcuagaaaccca

SEQ ID NO: 406963 - RNA, 19 nt, Artificial Sequence
  Description of Artificial Sequence: Synthetic oligonucleotide
  Sense Strand Starting at position 1125 of SEQ ID NO: 317441
cugagaaaccuuuguaucc

SEQ ID NO: 406964 - RNA, 19 nt, Artificial Sequence
  Description of Artificial Sequence: Synthetic oligonucleotide
  Antisense Strand to SEQ ID NO: 406963
ggauacaaagguuucucag

SEQ ID NO: 406965 - RNA, 19 nt, Artificial Sequence
  Description of Artificial Sequence: Synthetic oligonucleotide
  Sense Strand Starting at position 1125 of SEQ ID NO: 317653
ggcuguccaacucguauuu

SEQ ID NO: 406966 - RNA, 19 nt, Artificial Sequence
  Description of Artificial Sequence: Synthetic oligonucleotide
  Antisense Strand to SEQ ID NO: 406965
aaauacgaguuggacagcc

SEQ ID NO: 406967 - RNA, 19 nt, Artificial Sequence
  Description of Artificial Sequence: Synthetic oligonucleotide
  Sense Strand Starting at position 1125 of SEQ ID NO: 317662
acucguauuucuggaaaca

SEQ ID NO: 406968 - RNA, 19 nt, Artificial Sequence
  Description of Artificial Sequence: Synthetic oligonucleotide
  Antisense Strand to SEQ ID NO: 406967
uguuuccagaaauacgagu

SEQ ID NO: 406969 - RNA, 19 nt, Artificial Sequence
  Description of Artificial Sequence: Synthetic oligonucleotide
  Sense Strand Starting at position 1125 of SEQ ID NO: 317693
guuggugugucauuguucu

SEQ ID NO: 406970 - RNA, 19 nt, Artificial Sequence
  Description of Artificial Sequence: Synthetic oligonucleotide
  Antisense Strand to SEQ ID NO: 406969
agaacaaugacacaccaac

SEQ ID NO: 406971 - RNA, 19 nt, Artificial Sequence
  Description of Artificial Sequence: Synthetic oligonucleotide
  Sense Strand Starting at position 1125 of SEQ ID NO: 317701
gucauuguucucccgcuca

SEQ ID NO: 406972 - RNA, 19 nt, Artificial Sequence
  Description of Artificial Sequence: Synthetic oligonucleotide
  Antisense Strand to SEQ ID NO: 406971
ugagcgggagaacaaugac

SEQ ID NO: 406973 - RNA, 19 nt, Artificial Sequence
  Description of Artificial Sequence: Synthetic oligonucleotide
  Sense Strand Starting at position 1125 of SEQ ID NO: 317891
guaacuugcucuguucuua

SEQ ID NO: 406974 - RNA, 19 nt, Artificial Sequence
  Description of Artificial Sequence: Synthetic oligonucleotide
  Antisense Strand to SEQ ID NO: 406973
uaagaacagagcaaguuac

SEQ ID NO: 406975 - RNA, 19 nt, Artificial Sequence
  Description of Artificial Sequence: Synthetic oligonucleotide
  Sense Strand Starting at position 1125 of SEQ ID NO: 317996
agcucuuuggcccaggaaa

SEQ ID NO: 406976 - RNA, 19 nt, Artificial Sequence
  Description of Artificial Sequence: Synthetic oligonucleotide
  Antisense Strand to SEQ ID NO: 406975
uuuccugggccaaagagcu

SEQ ID NO: 406977 - RNA, 19 nt, Artificial Sequence
  Description of Artificial Sequence: Synthetic oligonucleotide
  Sense Strand Starting at position 1125 of SEQ ID NO: 318148
ggucgugcggcuuucaaau

SEQ ID NO: 406978 - RNA, 19 nt, Artificial Sequence
  Description of Artificial Sequence: Synthetic oligonucleotide
  Antisense Strand to SEQ ID NO: 406977
auuugaaagccgcacgacc

SEQ ID NO: 406979 - RNA, 19 nt, Artificial Sequence
  Description of Artificial Sequence: Synthetic oligonucleotide
  Sense Strand Starting at position 1125 of SEQ ID NO: 318347
guagauuuccauuguggug

SEQ ID NO: 406980 - RNA, 19 nt, Artificial Sequence
  Description of Artificial Sequence: Synthetic oligonucleotide
  Antisense Strand to SEQ ID NO: 406979
caccacaauggaaaucuac

SEQ ID NO: 406981 - RNA, 19 nt, Artificial Sequence
  Description of Artificial Sequence: Synthetic oligonucleotide
  Sense Strand Starting at position 1125 of SEQ ID NO: 318603
cucccauugucccgacgua

SEQ ID NO: 406982 - RNA, 19 nt, Artificial Sequence
  Description of Artificial Sequence: Synthetic oligonucleotide
  Antisense Strand to SEQ ID NO: 406981
uacgucgggacaaugggag

SEQ ID NO: 406983 - RNA, 19 nt, Artificial Sequence
  Description of Artificial Sequence: Synthetic oligonucleotide
  Sense Strand Starting at position 1125 of SEQ ID NO: 318604
ucccauugucccgacguaa

SEQ ID NO: 406984 - RNA, 19 nt, Artificial Sequence
  Description of Artificial Sequence: Synthetic oligonucleotide
  Antisense Strand to SEQ ID NO: 406983
uuacgucgggacaauggga

SEQ ID NO: 406985 - RNA, 19 nt, Artificial Sequence
  Description of Artificial Sequence: Synthetic oligonucleotide
  Sense Strand Starting at position 1125 of SEQ ID NO: 318608
auugucccgacguaaagau

SEQ ID NO: 406986 - RNA, 19 nt, Artificial Sequence
  Description of Artificial Sequence: Synthetic oligonucleotide
  Antisense Strand to SEQ ID NO: 406985
aucuuuacgucgggacaau

SEQ ID NO: 406987 - RNA, 19 nt, Artificial Sequence
  Description of Artificial Sequence: Synthetic oligonucleotide
  Sense Strand Starting at position 1125 of SEQ ID NO: 318661
gcagcacguccguuacaaa

SEQ ID NO: 406988 - RNA, 19 nt, Artificial Sequence
  Description of Artificial Sequence: Synthetic oligonucleotide
  Antisense Strand to SEQ ID NO: 406987
uuuguaacggacgugcugc

SEQ ID NO: 406989 - RNA, 19 nt, Artificial Sequence
  Description of Artificial Sequence: Synthetic oligonucleotide
  Sense Strand Starting at position 1125 of SEQ ID NO: 318662
cagcacguccguuacaaau

SEQ ID NO: 406990 - RNA, 19 nt, Artificial Sequence
  Description of Artificial Sequence: Synthetic oligonucleotide
  Antisense Strand to SEQ ID NO: 406989
auuuguaacggacgugcug

SEQ ID NO: 406991 - RNA, 19 nt, Artificial Sequence
  Description of Artificial Sequence: Synthetic oligonucleotide
  Sense Strand Starting at position 1125 of SEQ ID NO: 318720
aacaaagccucgucuaagu

SEQ ID NO: 406992 - RNA, 19 nt, Artificial Sequence
  Description of Artificial Sequence: Synthetic oligonucleotide
  Antisense Strand to SEQ ID NO: 406991
acuuagacgaggcuuuguu

SEQ ID NO: 406993 - RNA, 19 nt, Artificial Sequence
  Description of Artificial Sequence: Synthetic oligonucleotide
  Sense Strand Starting at position 1125 of SEQ ID NO: 318722
caaagccucgucuaaguuu

SEQ ID NO: 406994 - RNA, 19 nt, Artificial Sequence
  Description of Artificial Sequence: Synthetic oligonucleotide
  Antisense Strand to SEQ ID NO: 406993
aaacuuagacgaggcuuug

SEQ ID NO: 406995 - RNA, 19 nt, Artificial Sequence
  Description of Artificial Sequence: Synthetic oligonucleotide
  Sense Strand Starting at position 1125 of SEQ ID NO: 318731
gucuaaguuuccuuccacu

SEQ ID NO: 406996 - RNA, 19 nt, Artificial Sequence
  Description of Artificial Sequence: Synthetic oligonucleotide
  Antisense Strand to SEQ ID NO: 406995
aguggaaggaaacuuagac

SEQ ID NO: 406997 - RNA, 19 nt, Artificial Sequence
  Description of Artificial Sequence: Synthetic oligonucleotide
  Sense Strand Starting at position 1125 of SEQ ID NO: 318756
uugggaucuuuguggcuaa

SEQ ID NO: 406998 - RNA, 19 nt, Artificial Sequence
  Description of Artificial Sequence: Synthetic oligonucleotide
  Antisense Strand to SEQ ID NO: 406997
uuagccacaaagaucccaa

SEQ ID NO: 406999 - RNA, 19 nt, Artificial Sequence
  Description of Artificial Sequence: Synthetic oligonucleotide
  Sense Strand Starting at position 1125 of SEQ ID NO: 318757
ugggaucuuuguggcuaaa

SEQ ID NO: 407000 - RNA, 19 nt, Artificial Sequence
  Description of Artificial Sequence: Synthetic oligonucleotide
  Antisense Strand to SEQ ID NO: 406999
uuuagccacaaagauccca

SEQ ID NO: 407001 - RNA, 19 nt, Artificial Sequence
  Description of Artificial Sequence: Synthetic oligonucleotide
  Sense Strand Starting at position 1125 of SEQ ID NO: 318851
ggcuuaaaccaucaggguu

SEQ ID NO: 407002 - RNA, 19 nt, Artificial Sequence
  Description of Artificial Sequence: Synthetic oligonucleotide
  Antisense Strand to SEQ ID NO: 407001
aacccugaugguuuaagcc

SEQ ID NO: 407003 - RNA, 19 nt, Artificial Sequence
  Description of Artificial Sequence: Synthetic oligonucleotide
  Sense Strand Starting at position 1125 of SEQ ID NO: 319074
cuagccuguuacugucaaa

SEQ ID NO: 407004 - RNA, 19 nt, Artificial Sequence
  Description of Artificial Sequence: Synthetic oligonucleotide
  Antisense Strand to SEQ ID NO: 407003
uuugacaguaacaggcuag

SEQ ID NO: 407005 - RNA, 19 nt, Artificial Sequence
  Description of Artificial Sequence: Synthetic oligonucleotide
  Sense Strand Starting at position 1125 of SEQ ID NO: 319077
gccuguuacugucaaacuc

SEQ ID NO: 407006 - RNA, 19 nt, Artificial Sequence
  Description of Artificial Sequence: Synthetic oligonucleotide
  Antisense Strand to SEQ ID NO: 407005
gaguuugacaguaacaggc

SEQ ID NO: 407007 - RNA, 19 nt, Artificial Sequence
  Description of Artificial Sequence: Synthetic oligonucleotide
  Sense Strand Starting at position 1125 of SEQ ID NO: 319147
ugcagacuuuccuuaaguu

SEQ ID NO: 407008 - RNA, 19 nt, Artificial Sequence
  Description of Artificial Sequence: Synthetic oligonucleotide
  Antisense Strand to SEQ ID NO: 407007
aacuuaaggaaagucugca

SEQ ID NO: 407009 - RNA, 19 nt, Artificial Sequence
  Description of Artificial Sequence: Synthetic oligonucleotide
  Sense Strand Starting at position 1125 of SEQ ID NO: 319148
gcagacuuuccuuaaguua

SEQ ID NO: 407010 - RNA, 19 nt, Artificial Sequence
  Description of Artificial Sequence: Synthetic oligonucleotide
  Antisense Strand to SEQ ID NO: 407009
uaacuuaaggaaagucugc

SEQ ID NO: 407011 - RNA, 19 nt, Artificial Sequence
  Description of Artificial Sequence: Synthetic oligonucleotide
  Sense Strand Starting at position 1126 of SEQ ID NO: 315487
uggaucuagucacaugacu

SEQ ID NO: 407012 - RNA, 19 nt, Artificial Sequence
  Description of Artificial Sequence: Synthetic oligonucleotide
  Antisense Strand to SEQ ID NO: 407011
agucaugugacuagaucca

SEQ ID NO: 407013 - RNA, 19 nt, Artificial Sequence
  Description of Artificial Sequence: Synthetic oligonucleotide
  Sense Strand Starting at position 1126 of SEQ ID NO: 315634
uuacuugauccuuagucca

SEQ ID NO: 407014 - RNA, 19 nt, Artificial Sequence
  Description of Artificial Sequence: Synthetic oligonucleotide
  Antisense Strand to SEQ ID NO: 407013
uggacuaaggaucaaguaa

SEQ ID NO: 407015 - RNA, 19 nt, Artificial Sequence
  Description of Artificial Sequence: Synthetic oligonucleotide
  Sense Strand Starting at position 1126 of SEQ ID NO: 315636
acuugauccuuaguccaga

SEQ ID NO: 407016 - RNA, 19 nt, Artificial Sequence
  Description of Artificial Sequence: Synthetic oligonucleotide
  Antisense Strand to SEQ ID NO: 407015
ucuggacuaaggaucaagu

SEQ ID NO: 407017 - RNA, 19 nt, Artificial Sequence
  Description of Artificial Sequence: Synthetic oligonucleotide
  Sense Strand Starting at position 1126 of SEQ ID NO: 315822
cagguucuuugucuguaaa

SEQ ID NO: 407018 - RNA, 19 nt, Artificial Sequence
  Description of Artificial Sequence: Synthetic oligonucleotide
  Antisense Strand to SEQ ID NO: 407017
uuuacagacaaagaaccug

SEQ ID NO: 407019 - RNA, 19 nt, Artificial Sequence
  Description of Artificial Sequence: Synthetic oligonucleotide
  Sense Strand Starting at position 1126 of SEQ ID NO: 315892
aauucuuagaguggugagu

SEQ ID NO: 407020 - RNA, 19 nt, Artificial Sequence
  Description of Artificial Sequence: Synthetic oligonucleotide
  Antisense Strand to SEQ ID NO: 407019
acucaccacucuaagaauu

SEQ ID NO: 407021 - RNA, 19 nt, Artificial Sequence
  Description of Artificial Sequence: Synthetic oligonucleotide
  Sense Strand Starting at position 1126 of SEQ ID NO: 315898
uagaguggugaguaacaca

SEQ ID NO: 407022 - RNA, 19 nt, Artificial Sequence
  Description of Artificial Sequence: Synthetic oligonucleotide
  Antisense Strand to SEQ ID NO: 407021
uguguuacucaccacucua

SEQ ID NO: 407023 - RNA, 19 nt, Artificial Sequence
  Description of Artificial Sequence: Synthetic oligonucleotide
  Sense Strand Starting at position 1126 of SEQ ID NO: 315919
augagagacugcucacuga

SEQ ID NO: 407024 - RNA, 19 nt, Artificial Sequence
  Description of Artificial Sequence: Synthetic oligonucleotide
  Antisense Strand to SEQ ID NO: 407023
ucagugagcagucucucau

SEQ ID NO: 407025 - RNA, 19 nt, Artificial Sequence
  Description of Artificial Sequence: Synthetic oligonucleotide
  Sense Strand Starting at position 1126 of SEQ ID NO: 315923
gagacugcucacugagagu

SEQ ID NO: 407026 - RNA, 19 nt, Artificial Sequence
  Description of Artificial Sequence: Synthetic oligonucleotide
  Antisense Strand to SEQ ID NO: 407025
acucucagugagcagucuc

SEQ ID NO: 407027 - RNA, 19 nt, Artificial Sequence
  Description of Artificial Sequence: Synthetic oligonucleotide
  Sense Strand Starting at position 1126 of SEQ ID NO: 316013
auuccaaaucuggguauau

SEQ ID NO: 407028 - RNA, 19 nt, Artificial Sequence
  Description of Artificial Sequence: Synthetic oligonucleotide
  Antisense Strand to SEQ ID NO: 407027
auauacccagauuuggaau

SEQ ID NO: 407029 - RNA, 19 nt, Artificial Sequence
  Description of Artificial Sequence: Synthetic oligonucleotide
  Sense Strand Starting at position 1126 of SEQ ID NO: 316014
uuccaaaucuggguauaua

SEQ ID NO: 407030 - RNA, 19 nt, Artificial Sequence
  Description of Artificial Sequence: Synthetic oligonucleotide
  Antisense Strand to SEQ ID NO: 407029
uauauacccagauuuggaa

SEQ ID NO: 407031 - RNA, 19 nt, Artificial Sequence
  Description of Artificial Sequence: Synthetic oligonucleotide
  Sense Strand Starting at position 1126 of SEQ ID NO: 316124
acaaaugucuauugacaga

SEQ ID NO: 407032 - RNA, 19 nt, Artificial Sequence
  Description of Artificial Sequence: Synthetic oligonucleotide
  Antisense Strand to SEQ ID NO: 407031
ucugucaauagacauuugu

SEQ ID NO: 407033 - RNA, 19 nt, Artificial Sequence
  Description of Artificial Sequence: Synthetic oligonucleotide
  Sense Strand Starting at position 1126 of SEQ ID NO: 316203
gaaggaauuucugguugag

SEQ ID NO: 407034 - RNA, 19 nt, Artificial Sequence
  Description of Artificial Sequence: Synthetic oligonucleotide
  Antisense Strand to SEQ ID NO: 407033
cucaaccagaaauuccuuc

SEQ ID NO: 407035 - RNA, 19 nt, Artificial Sequence
  Description of Artificial Sequence: Synthetic oligonucleotide
  Sense Strand Starting at position 1126 of SEQ ID NO: 316215
gguugagugagauggcuca

SEQ ID NO: 407036 - RNA, 19 nt, Artificial Sequence
  Description of Artificial Sequence: Synthetic oligonucleotide
  Antisense Strand to SEQ ID NO: 407035
ugagccaucucacucaacc

SEQ ID NO: 407037 - RNA, 19 nt, Artificial Sequence
  Description of Artificial Sequence: Synthetic oligonucleotide
  Sense Strand Starting at position 1126 of SEQ ID NO: 316410
caugcugauccaugaaagu

SEQ ID NO: 407038 - RNA, 19 nt, Artificial Sequence
  Description of Artificial Sequence: Synthetic oligonucleotide
  Antisense Strand to SEQ ID NO: 407037
acuuucauggaucagcaug

SEQ ID NO: 407039 - RNA, 19 nt, Artificial Sequence
  Description of Artificial Sequence: Synthetic oligonucleotide
  Sense Strand Starting at position 1126 of SEQ ID NO: 316426
aguauuaugcuacaugaga

SEQ ID NO: 407040 - RNA, 19 nt, Artificial Sequence
  Description of Artificial Sequence: Synthetic oligonucleotide
  Antisense Strand to SEQ ID NO: 407039
ucucauguagcauaauacu

SEQ ID NO: 407041 - RNA, 19 nt, Artificial Sequence
  Description of Artificial Sequence: Synthetic oligonucleotide
  Sense Strand Starting at position 1126 of SEQ ID NO: 316564
gguacacaguuucuguuua

SEQ ID NO: 407042 - RNA, 19 nt, Artificial Sequence
  Description of Artificial Sequence: Synthetic oligonucleotide
  Antisense Strand to SEQ ID NO: 407041
uaaacagaaacuguguacc

SEQ ID NO: 407043 - RNA, 19 nt, Artificial Sequence
  Description of Artificial Sequence: Synthetic oligonucleotide
  Sense Strand Starting at position 1126 of SEQ ID NO: 316569
acaguuucuguuuagaaug

SEQ ID NO: 407044 - RNA, 19 nt, Artificial Sequence
  Description of Artificial Sequence: Synthetic oligonucleotide
  Antisense Strand to SEQ ID NO: 407043
cauucuaaacagaaacugu

SEQ ID NO: 407045 - RNA, 19 nt, Artificial Sequence
  Description of Artificial Sequence: Synthetic oligonucleotide
  Sense Strand Starting at position 1126 of SEQ ID NO: 316574
uucuguuuagaaugacaac

SEQ ID NO: 407046 - RNA, 19 nt, Artificial Sequence
  Description of Artificial Sequence: Synthetic oligonucleotide
  Antisense Strand to SEQ ID NO: 407045
guugucauucuaaacagaa

SEQ ID NO: 407047 - RNA, 19 nt, Artificial Sequence
  Description of Artificial Sequence: Synthetic oligonucleotide
  Sense Strand Starting at position 1126 of SEQ ID NO: 316577
uguuuagaaugacaacaaa

SEQ ID NO: 407048 - RNA, 19 nt, Artificial Sequence
  Description of Artificial Sequence: Synthetic oligonucleotide
  Antisense Strand to SEQ ID NO: 407047
uuuguugucauucuaaaca

SEQ ID NO: 407049 - RNA, 19 nt, Artificial Sequence
  Description of Artificial Sequence: Synthetic oligonucleotide
  Sense Strand Starting at position 1126 of SEQ ID NO: 316588
acaacaaaguucuggaaau

SEQ ID NO: 407050 - RNA, 19 nt, Artificial Sequence
  Description of Artificial Sequence: Synthetic oligonucleotide
  Antisense Strand to SEQ ID NO: 407049
auuuccagaacuuuguugu

SEQ ID NO: 407051 - RNA, 19 nt, Artificial Sequence
  Description of Artificial Sequence: Synthetic oligonucleotide
  Sense Strand Starting at position 1126 of SEQ ID NO: 316604
aauggauaaugguaagagu

SEQ ID NO: 407052 - RNA, 19 nt, Artificial Sequence
  Description of Artificial Sequence: Synthetic oligonucleotide
  Antisense Strand to SEQ ID NO: 407051
acucuuaccauuauccauu

SEQ ID NO: 407053 - RNA, 19 nt, Artificial Sequence
  Description of Artificial Sequence: Synthetic oligonucleotide
  Sense Strand Starting at position 1126 of SEQ ID NO: 316615
guaagaguuguacaauaug

SEQ ID NO: 407054 - RNA, 19 nt, Artificial Sequence
  Description of Artificial Sequence: Synthetic oligonucleotide
  Antisense Strand to SEQ ID NO: 407053
cauauuguacaacucuuac

SEQ ID NO: 407055 - RNA, 19 nt, Artificial Sequence
  Description of Artificial Sequence: Synthetic oligonucleotide
  Sense Strand Starting at position 1126 of SEQ ID NO: 316620
aguuguacaauauggugaa

SEQ ID NO: 407056 - RNA, 19 nt, Artificial Sequence
  Description of Artificial Sequence: Synthetic oligonucleotide
  Antisense Strand to SEQ ID NO: 407055
uucaccauauuguacaacu

SEQ ID NO: 407057 - RNA, 19 nt, Artificial Sequence
  Description of Artificial Sequence: Synthetic oligonucleotide
  Sense Strand Starting at position 1126 of SEQ ID NO: 316627
caauauggugaaugugcua

SEQ ID NO: 407058 - RNA, 19 nt, Artificial Sequence
  Description of Artificial Sequence: Synthetic oligonucleotide
  Antisense Strand to SEQ ID NO: 407057
uagcacauucaccauauug

SEQ ID NO: 407059 - RNA, 19 nt, Artificial Sequence
  Description of Artificial Sequence: Synthetic oligonucleotide
  Sense Strand Starting at position 1126 of SEQ ID NO: 316630
uauggugaaugugcuagau

SEQ ID NO: 407060 - RNA, 19 nt, Artificial Sequence
  Description of Artificial Sequence: Synthetic oligonucleotide
  Antisense Strand to SEQ ID NO: 407059
aucuagcacauucaccaua

SEQ ID NO: 407061 - RNA, 19 nt, Artificial Sequence
  Description of Artificial Sequence: Synthetic oligonucleotide
  Sense Strand Starting at position 1126 of SEQ ID NO: 316634
gugaaugugcuagauguca

SEQ ID NO: 407062 - RNA, 19 nt, Artificial Sequence
  Description of Artificial Sequence: Synthetic oligonucleotide
  Antisense Strand to SEQ ID NO: 407061
ugacaucuagcacauucac

SEQ ID NO: 407063 - RNA, 19 nt, Artificial Sequence
  Description of Artificial Sequence: Synthetic oligonucleotide
  Sense Strand Starting at position 1126 of SEQ ID NO: 316642
gcuagaugucacugaacug

SEQ ID NO: 407064 - RNA, 19 nt, Artificial Sequence
  Description of Artificial Sequence: Synthetic oligonucleotide
  Antisense Strand to SEQ ID NO: 407063
caguucagugacaucuagc

SEQ ID NO: 407065 - RNA, 19 nt, Artificial Sequence
  Description of Artificial Sequence: Synthetic oligonucleotide
  Sense Strand Starting at position 1126 of SEQ ID NO: 317319
cauuuaagugcuugcugca

SEQ ID NO: 407066 - RNA, 19 nt, Artificial Sequence
  Description of Artificial Sequence: Synthetic oligonucleotide
  Antisense Strand to SEQ ID NO: 407065
ugcagcaagcacuuaaaug

SEQ ID NO: 407067 - RNA, 19 nt, Artificial Sequence
  Description of Artificial Sequence: Synthetic oligonucleotide
  Sense Strand Starting at position 1126 of SEQ ID NO: 318011
ucaguccuacuuugcagaa

SEQ ID NO: 407068 - RNA, 19 nt, Artificial Sequence
  Description of Artificial Sequence: Synthetic oligonucleotide
  Antisense Strand to SEQ ID NO: 407067
uucugcaaaguaggacuga

SEQ ID NO: 407069 - RNA, 19 nt, Artificial Sequence
  Description of Artificial Sequence: Synthetic oligonucleotide
  Sense Strand Starting at position 1126 of SEQ ID NO: 318030
gaggaaaugugcuuaugga

SEQ ID NO: 407070 - RNA, 19 nt, Artificial Sequence
  Description of Artificial Sequence: Synthetic oligonucleotide
  Antisense Strand to SEQ ID NO: 407069
uccauaagcacauuuccuc

SEQ ID NO: 407071 - RNA, 19 nt, Artificial Sequence
  Description of Artificial Sequence: Synthetic oligonucleotide
  Sense Strand Starting at position 1126 of SEQ ID NO: 318113
gauuaaggagccuggacuu

SEQ ID NO: 407072 - RNA, 19 nt, Artificial Sequence
  Description of Artificial Sequence: Synthetic oligonucleotide
  Antisense Strand to SEQ ID NO: 407071
aaguccaggcuccuuaauc

SEQ ID NO: 407073 - RNA, 19 nt, Artificial Sequence
  Description of Artificial Sequence: Synthetic oligonucleotide
  Sense Strand Starting at position 1126 of SEQ ID NO: 318119
ggagccuggacuuguaauc

SEQ ID NO: 407074 - RNA, 19 nt, Artificial Sequence
  Description of Artificial Sequence: Synthetic oligonucleotide
  Antisense Strand to SEQ ID NO: 407073
gauuacaaguccaggcucc

SEQ ID NO: 407075 - RNA, 19 nt, Artificial Sequence
  Description of Artificial Sequence: Synthetic oligonucleotide
  Sense Strand Starting at position 1126 of SEQ ID NO: 318208
gugacuuaucuuuaggcca

SEQ ID NO: 407076 - RNA, 19 nt, Artificial Sequence
  Description of Artificial Sequence: Synthetic oligonucleotide
  Antisense Strand to SEQ ID NO: 407075
uggccuaaagauaagucac

SEQ ID NO: 407077 - RNA, 19 nt, Artificial Sequence
  Description of Artificial Sequence: Synthetic oligonucleotide
  Sense Strand Starting at position 1126 of SEQ ID NO: 318221
aggccaagcuugucuaaca

SEQ ID NO: 407078 - RNA, 19 nt, Artificial Sequence
  Description of Artificial Sequence: Synthetic oligonucleotide
  Antisense Strand to SEQ ID NO: 407077
uguuagacaagcuuggccu

SEQ ID NO: 407079 - RNA, 19 nt, Artificial Sequence
  Description of Artificial Sequence: Synthetic oligonucleotide
  Sense Strand Starting at position 1126 of SEQ ID NO: 318222
ggccaagcuugucuaacau

SEQ ID NO: 407080 - RNA, 19 nt, Artificial Sequence
  Description of Artificial Sequence: Synthetic oligonucleotide
  Antisense Strand to SEQ ID NO: 407079
auguuagacaagcuuggcc

SEQ ID NO: 407081 - RNA, 19 nt, Artificial Sequence
  Description of Artificial Sequence: Synthetic oligonucleotide
  Sense Strand Starting at position 1126 of SEQ ID NO: 318233
ucuaacauguggcccaaua

SEQ ID NO: 407082 - RNA, 19 nt, Artificial Sequence
  Description of Artificial Sequence: Synthetic oligonucleotide
  Antisense Strand to SEQ ID NO: 407081
uauugggccacauguuaga

SEQ ID NO: 407083 - RNA, 19 nt, Artificial Sequence
  Description of Artificial Sequence: Synthetic oligonucleotide
  Sense Strand Starting at position 1126 of SEQ ID NO: 318424
uuucccugugcuuaugaaa

SEQ ID NO: 407084 - RNA, 19 nt, Artificial Sequence
  Description of Artificial Sequence: Synthetic oligonucleotide
  Antisense Strand to SEQ ID NO: 407083
uuucauaagcacagggaaa

SEQ ID NO: 407085 - RNA, 19 nt, Artificial Sequence
  Description of Artificial Sequence: Synthetic oligonucleotide
  Sense Strand Starting at position 1126 of SEQ ID NO: 318487
aggcauaguuaaguaugau

SEQ ID NO: 407086 - RNA, 19 nt, Artificial Sequence
  Description of Artificial Sequence: Synthetic oligonucleotide
  Antisense Strand to SEQ ID NO: 407085
aucauacuuaacuaugccu

SEQ ID NO: 407087 - RNA, 19 nt, Artificial Sequence
  Description of Artificial Sequence: Synthetic oligonucleotide
  Sense Strand Starting at position 1126 of SEQ ID NO: 318488
ggcauaguuaaguaugauu

SEQ ID NO: 407088 - RNA, 19 nt, Artificial Sequence
  Description of Artificial Sequence: Synthetic oligonucleotide
  Antisense Strand to SEQ ID NO: 407087
aaucauacuuaacuaugcc

SEQ ID NO: 407089 - RNA, 19 nt, Artificial Sequence
  Description of Artificial Sequence: Synthetic oligonucleotide
  Sense Strand Starting at position 1126 of SEQ ID NO: 318493
aguuaaguaugauugcaug

SEQ ID NO: 407090 - RNA, 19 nt, Artificial Sequence
  Description of Artificial Sequence: Synthetic oligonucleotide
  Antisense Strand to SEQ ID NO: 407089
caugcaaucauacuuaacu

SEQ ID NO: 407091 - RNA, 19 nt, Artificial Sequence
  Description of Artificial Sequence: Synthetic oligonucleotide
  Sense Strand Starting at position 1127 of SEQ ID NO: 315318
gcuagacugcuauaauauu

SEQ ID NO: 407092 - RNA, 19 nt, Artificial Sequence
  Description of Artificial Sequence: Synthetic oligonucleotide
  Antisense Strand to SEQ ID NO: 407091
aauauuauagcagucuagc

SEQ ID NO: 407093 - RNA, 19 nt, Artificial Sequence
  Description of Artificial Sequence: Synthetic oligonucleotide
  Sense Strand Starting at position 1127 of SEQ ID NO: 315431
auucuacacuaguugaaag

SEQ ID NO: 407094 - RNA, 19 nt, Artificial Sequence
  Description of Artificial Sequence: Synthetic oligonucleotide
  Antisense Strand to SEQ ID NO: 407093
cuuucaacuaguguagaau

SEQ ID NO: 407095 - RNA, 19 nt, Artificial Sequence
  Description of Artificial Sequence: Synthetic oligonucleotide
  Sense Strand Starting at position 1127 of SEQ ID NO: 315520
guuacuauggccuacaauu

SEQ ID NO: 407096 - RNA, 19 nt, Artificial Sequence
  Description of Artificial Sequence: Synthetic oligonucleotide
  Antisense Strand to SEQ ID NO: 407095
aauuguaggccauaguaac

SEQ ID NO: 407097 - RNA, 19 nt, Artificial Sequence
  Description of Artificial Sequence: Synthetic oligonucleotide
  Sense Strand Starting at position 1127 of SEQ ID NO: 315611
agugaaauucuauguagag

SEQ ID NO: 407098 - RNA, 19 nt, Artificial Sequence
  Description of Artificial Sequence: Synthetic oligonucleotide
  Antisense Strand to SEQ ID NO: 407097
cucuacauagaauuucacu

SEQ ID NO: 407099 - RNA, 19 nt, Artificial Sequence
  Description of Artificial Sequence: Synthetic oligonucleotide
  Sense Strand Starting at position 1127 of SEQ ID NO: 315612
gugaaauucuauguagagg

SEQ ID NO: 407100 - RNA, 19 nt, Artificial Sequence
  Description of Artificial Sequence: Synthetic oligonucleotide
  Antisense Strand to SEQ ID NO: 407099
ccucuacauagaauuucac

SEQ ID NO: 407101 - RNA, 19 nt, Artificial Sequence
  Description of Artificial Sequence: Synthetic oligonucleotide
  Sense Strand Starting at position 1127 of SEQ ID NO: 315617
auucuauguagaggaaugu

SEQ ID NO: 407102 - RNA, 19 nt, Artificial Sequence
  Description of Artificial Sequence: Synthetic oligonucleotide
  Antisense Strand to SEQ ID NO: 407101
acauuccucuacauagaau

SEQ ID NO: 407103 - RNA, 19 nt, Artificial Sequence
  Description of Artificial Sequence: Synthetic oligonucleotide
  Sense Strand Starting at position 1127 of SEQ ID NO: 315626
agaggaauguagcuucagu

SEQ ID NO: 407104 - RNA, 19 nt, Artificial Sequence
  Description of Artificial Sequence: Synthetic oligonucleotide
  Antisense Strand to SEQ ID NO: 407103
acugaagcuacauuccucu

SEQ ID NO: 407105 - RNA, 19 nt, Artificial Sequence
  Description of Artificial Sequence: Synthetic oligonucleotide
  Sense Strand Starting at position 1127 of SEQ ID NO: 315649
gugugucuuaauuagaaag

SEQ ID NO: 407106 - RNA, 19 nt, Artificial Sequence
  Description of Artificial Sequence: Synthetic oligonucleotide
  Antisense Strand to SEQ ID NO: 407105
cuuucuaauuaagacacac

SEQ ID NO: 407107 - RNA, 19 nt, Artificial Sequence
  Description of Artificial Sequence: Synthetic oligonucleotide
  Sense Strand Starting at position 1127 of SEQ ID NO: 315998
aaggauuaacuguggguuu

SEQ ID NO: 407108 - RNA, 19 nt, Artificial Sequence
  Description of Artificial Sequence: Synthetic oligonucleotide
  Antisense Strand to SEQ ID NO: 407107
aaacccacaguuaauccuu

SEQ ID NO: 407109 - RNA, 19 nt, Artificial Sequence
  Description of Artificial Sequence: Synthetic oligonucleotide
  Sense Strand Starting at position 1127 of SEQ ID NO: 316000
ggauuaacuguggguuuau

SEQ ID NO: 407110 - RNA, 19 nt, Artificial Sequence
  Description of Artificial Sequence: Synthetic oligonucleotide
  Antisense Strand to SEQ ID NO: 407109
auaaacccacaguuaaucc

SEQ ID NO: 407111 - RNA, 19 nt, Artificial Sequence
  Description of Artificial Sequence: Synthetic oligonucleotide
  Sense Strand Starting at position 1127 of SEQ ID NO: 316001
gauuaacuguggguuuaug

SEQ ID NO: 407112 - RNA, 19 nt, Artificial Sequence
  Description of Artificial Sequence: Synthetic oligonucleotide
  Antisense Strand to SEQ ID NO: 407111
cauaaacccacaguuaauc

SEQ ID NO: 407113 - RNA, 19 nt, Artificial Sequence
  Description of Artificial Sequence: Synthetic oligonucleotide
  Sense Strand Starting at position 1127 of SEQ ID NO: 316010
uggguuuaugccuggagau

SEQ ID NO: 407114 - RNA, 19 nt, Artificial Sequence
  Description of Artificial Sequence: Synthetic oligonucleotide
  Antisense Strand to SEQ ID NO: 407113
aucuccaggcauaaaccca

SEQ ID NO: 407115 - RNA, 19 nt, Artificial Sequence
  Description of Artificial Sequence: Synthetic oligonucleotide
  Sense Strand Starting at position 1127 of SEQ ID NO: 316011
ggguuuaugccuggagauc

SEQ ID NO: 407116 - RNA, 19 nt, Artificial Sequence
  Description of Artificial Sequence: Synthetic oligonucleotide
  Antisense Strand to SEQ ID NO: 407115
gaucuccaggcauaaaccc

SEQ ID NO: 407117 - RNA, 19 nt, Artificial Sequence
  Description of Artificial Sequence: Synthetic oligonucleotide
  Sense Strand Starting at position 1127 of SEQ ID NO: 316012
gguuuaugccuggagauca

SEQ ID NO: 407118 - RNA, 19 nt, Artificial Sequence
  Description of Artificial Sequence: Synthetic oligonucleotide
  Antisense Strand to SEQ ID NO: 407117
ugaucuccaggcauaaacc

SEQ ID NO: 407119 - RNA, 19 nt, Artificial Sequence
  Description of Artificial Sequence: Synthetic oligonucleotide
  Sense Strand Starting at position 1127 of SEQ ID NO: 316143
aggguaguuucuguuauaa

SEQ ID NO: 407120 - RNA, 19 nt, Artificial Sequence
  Description of Artificial Sequence: Synthetic oligonucleotide
  Antisense Strand to SEQ ID NO: 407119
uuauaacagaaacuacccu

SEQ ID NO: 407121 - RNA, 19 nt, Artificial Sequence
  Description of Artificial Sequence: Synthetic oligonucleotide
  Sense Strand Starting at position 1127 of SEQ ID NO: 316164
cugcuaguacaugaaacuu

SEQ ID NO: 407122 - RNA, 19 nt, Artificial Sequence
  Description of Artificial Sequence: Synthetic oligonucleotide
  Antisense Strand to SEQ ID NO: 407121
aaguuucauguacuagcag

SEQ ID NO: 407123 - RNA, 19 nt, Artificial Sequence
  Description of Artificial Sequence: Synthetic oligonucleotide
  Sense Strand Starting at position 1127 of SEQ ID NO: 316257
gguaaacacuucccugaug

SEQ ID NO: 407124 - RNA, 19 nt, Artificial Sequence
  Description of Artificial Sequence: Synthetic oligonucleotide
  Antisense Strand to SEQ ID NO: 407123
caucagggaaguguuuacc

SEQ ID NO: 407125 - RNA, 19 nt, Artificial Sequence
  Description of Artificial Sequence: Synthetic oligonucleotide
  Sense Strand Starting at position 1127 of SEQ ID NO: 316395
acagcaagguccuuguaaa

SEQ ID NO: 407126 - RNA, 19 nt, Artificial Sequence
  Description of Artificial Sequence: Synthetic oligonucleotide
  Antisense Strand to SEQ ID NO: 407125
uuuacaaggaccuugcugu

SEQ ID NO: 407127 - RNA, 19 nt, Artificial Sequence
  Description of Artificial Sequence: Synthetic oligonucleotide
  Sense Strand Starting at position 1127 of SEQ ID NO: 316498
aaaugaugacauggucuau

SEQ ID NO: 407128 - RNA, 19 nt, Artificial Sequence
  Description of Artificial Sequence: Synthetic oligonucleotide
  Antisense Strand to SEQ ID NO: 407127
auagaccaugucaucauuu

SEQ ID NO: 407129 - RNA, 19 nt, Artificial Sequence
  Description of Artificial Sequence: Synthetic oligonucleotide
  Sense Strand Starting at position 1127 of SEQ ID NO: 316504
ugacauggucuaugucuua

SEQ ID NO: 407130 - RNA, 19 nt, Artificial Sequence
  Description of Artificial Sequence: Synthetic oligonucleotide
  Antisense Strand to SEQ ID NO: 407129
uaagacauagaccauguca

SEQ ID NO: 407131 - RNA, 19 nt, Artificial Sequence
  Description of Artificial Sequence: Synthetic oligonucleotide
  Sense Strand Starting at position 1127 of SEQ ID NO: 316532
uggauuguuucucucccua

SEQ ID NO: 407132 - RNA, 19 nt, Artificial Sequence
  Description of Artificial Sequence: Synthetic oligonucleotide
  Antisense Strand to SEQ ID NO: 407131
uagggagagaaacaaucca

SEQ ID NO: 407133 - RNA, 19 nt, Artificial Sequence
  Description of Artificial Sequence: Synthetic oligonucleotide
  Sense Strand Starting at position 1127 of SEQ ID NO: 316591
aauauuaugcguuaaggag

SEQ ID NO: 407134 - RNA, 19 nt, Artificial Sequence
  Description of Artificial Sequence: Synthetic oligonucleotide
  Antisense Strand to SEQ ID NO: 407133
cuccuuaacgcauaauauu

SEQ ID NO: 407135 - RNA, 19 nt, Artificial Sequence
  Description of Artificial Sequence: Synthetic oligonucleotide
  Sense Strand Starting at position 1127 of SEQ ID NO: 316770
gugggaucuuagucuuuac

SEQ ID NO: 407136 - RNA, 19 nt, Artificial Sequence
  Description of Artificial Sequence: Synthetic oligonucleotide
  Antisense Strand to SEQ ID NO: 407135
guaaagacuaagaucccac

SEQ ID NO: 407137 - RNA, 19 nt, Artificial Sequence
  Description of Artificial Sequence: Synthetic oligonucleotide
  Sense Strand Starting at position 1127 of SEQ ID NO: 316773
ggaucuuagucuuuacuuu

SEQ ID NO: 407138 - RNA, 19 nt, Artificial Sequence
  Description of Artificial Sequence: Synthetic oligonucleotide
  Antisense Strand to SEQ ID NO: 407137
aaaguaaagacuaagaucc

SEQ ID NO: 407139 - RNA, 19 nt, Artificial Sequence
  Description of Artificial Sequence: Synthetic oligonucleotide
  Sense Strand Starting at position 1127 of SEQ ID NO: 316784
uuuacuuucucaccagagu

SEQ ID NO: 407140 - RNA, 19 nt, Artificial Sequence
  Description of Artificial Sequence: Synthetic oligonucleotide
  Antisense Strand to SEQ ID NO: 407139
acucuggugagaaaguaaa

SEQ ID NO: 407141 - RNA, 19 nt, Artificial Sequence
  Description of Artificial Sequence: Synthetic oligonucleotide
  Sense Strand Starting at position 1127 of SEQ ID NO: 316848
ggaacuaccugucuucuaa

SEQ ID NO: 407142 - RNA, 19 nt, Artificial Sequence
  Description of Artificial Sequence: Synthetic oligonucleotide
  Antisense Strand to SEQ ID NO: 407141
uuagaagacagguaguucc

SEQ ID NO: 407143 - RNA, 19 nt, Artificial Sequence
  Description of Artificial Sequence: Synthetic oligonucleotide
  Sense Strand Starting at position 1127 of SEQ ID NO: 317043
ggcagaccugaaugauucu

SEQ ID NO: 407144 - RNA, 19 nt, Artificial Sequence
  Description of Artificial Sequence: Synthetic oligonucleotide
  Antisense Strand to SEQ ID NO: 407143
agaaucauucaggucugcc

SEQ ID NO: 407145 - RNA, 19 nt, Artificial Sequence
  Description of Artificial Sequence: Synthetic oligonucleotide
  Sense Strand Starting at position 1127 of SEQ ID NO: 317285
ugaguugcacuugauguuu

SEQ ID NO: 407146 - RNA, 19 nt, Artificial Sequence
  Description of Artificial Sequence: Synthetic oligonucleotide
  Antisense Strand to SEQ ID NO: 407145
aaacaucaagugcaacuca

SEQ ID NO: 407147 - RNA, 19 nt, Artificial Sequence
  Description of Artificial Sequence: Synthetic oligonucleotide
  Sense Strand Starting at position 1127 of SEQ ID NO: 317460
gcagucucuuuacuaugaa

SEQ ID NO: 407148 - RNA, 19 nt, Artificial Sequence
  Description of Artificial Sequence: Synthetic oligonucleotide
  Antisense Strand to SEQ ID NO: 407147
uucauaguaaagagacugc

SEQ ID NO: 407149 - RNA, 19 nt, Artificial Sequence
  Description of Artificial Sequence: Synthetic oligonucleotide
  Sense Strand Starting at position 1127 of SEQ ID NO: 317463
gucucuuuacuaugaauag

SEQ ID NO: 407150 - RNA, 19 nt, Artificial Sequence
  Description of Artificial Sequence: Synthetic oligonucleotide
  Antisense Strand to SEQ ID NO: 407149
cuauucauaguaaagagac

SEQ ID NO: 407151 - RNA, 19 nt, Artificial Sequence
  Description of Artificial Sequence: Synthetic oligonucleotide
  Sense Strand Starting at position 1127 of SEQ ID NO: 317896
uugugacuuguaugacaaa

SEQ ID NO: 407152 - RNA, 19 nt, Artificial Sequence
  Description of Artificial Sequence: Synthetic oligonucleotide
  Antisense Strand to SEQ ID NO: 407151
uuugucauacaagucacaa

SEQ ID NO: 407153 - RNA, 19 nt, Artificial Sequence
  Description of Artificial Sequence: Synthetic oligonucleotide
  Sense Strand Starting at position 1127 of SEQ ID NO: 318005
caguguguugaauaaauua

SEQ ID NO: 407154 - RNA, 19 nt, Artificial Sequence
  Description of Artificial Sequence: Synthetic oligonucleotide
  Antisense Strand to SEQ ID NO: 407153
uaauuuauucaacacacug

SEQ ID NO: 407155 - RNA, 19 nt, Artificial Sequence
  Description of Artificial Sequence: Synthetic oligonucleotide
  Sense Strand Starting at position 1127 of SEQ ID NO: 318219
gcugccauugauuacagua

SEQ ID NO: 407156 - RNA, 19 nt, Artificial Sequence
  Description of Artificial Sequence: Synthetic oligonucleotide
  Antisense Strand to SEQ ID NO: 407155
uacuguaaucaauggcagc

SEQ ID NO: 407157 - RNA, 19 nt, Artificial Sequence
  Description of Artificial Sequence: Synthetic oligonucleotide
  Sense Strand Starting at position 1127 of SEQ ID NO: 318471
acuaccucucacugaugua

SEQ ID NO: 407158 - RNA, 19 nt, Artificial Sequence
  Description of Artificial Sequence: Synthetic oligonucleotide
  Antisense Strand to SEQ ID NO: 407157
uacaucagugagagguagu

SEQ ID NO: 407159 - RNA, 19 nt, Artificial Sequence
  Description of Artificial Sequence: Synthetic oligonucleotide
  Sense Strand Starting at position 1127 of SEQ ID NO: 318564
uuguaagugccacacaauu

SEQ ID NO: 407160 - RNA, 19 nt, Artificial Sequence
  Description of Artificial Sequence: Synthetic oligonucleotide
  Antisense Strand to SEQ ID NO: 407159
aauuguguggcacuuacaa

SEQ ID NO: 407161 - RNA, 19 nt, Artificial Sequence
  Description of Artificial Sequence: Synthetic oligonucleotide
  Sense Strand Starting at position 1127 of SEQ ID NO: 318634
gucaacucagcggaucauu

SEQ ID NO: 407162 - RNA, 19 nt, Artificial Sequence
  Description of Artificial Sequence: Synthetic oligonucleotide
  Antisense Strand to SEQ ID NO: 407161
aaugauccgcugaguugac

SEQ ID NO: 407163 - RNA, 19 nt, Artificial Sequence
  Description of Artificial Sequence: Synthetic oligonucleotide
  Sense Strand Starting at position 1127 of SEQ ID NO: 318799
gguguuuaucaggaguuca

SEQ ID NO: 407164 - RNA, 19 nt, Artificial Sequence
  Description of Artificial Sequence: Synthetic oligonucleotide
  Antisense Strand to SEQ ID NO: 407163
ugaacuccugauaaacacc

SEQ ID NO: 407165 - RNA, 19 nt, Artificial Sequence
  Description of Artificial Sequence: Synthetic oligonucleotide
  Sense Strand Starting at position 1127 of SEQ ID NO: 318839
uguucuauuugugugcaua

SEQ ID NO: 407166 - RNA, 19 nt, Artificial Sequence
  Description of Artificial Sequence: Synthetic oligonucleotide
  Antisense Strand to SEQ ID NO: 407165
uaugcacacaaauagaaca

SEQ ID NO: 407167 - RNA, 19 nt, Artificial Sequence
  Description of Artificial Sequence: Synthetic oligonucleotide
  Sense Strand Starting at position 1127 of SEQ ID NO: 318982
aucagauugcugggccaua

SEQ ID NO: 407168 - RNA, 19 nt, Artificial Sequence
  Description of Artificial Sequence: Synthetic oligonucleotide
  Antisense Strand to SEQ ID NO: 407167
uauggcccagcaaucugau

SEQ ID NO: 407169 - RNA, 19 nt, Artificial Sequence
  Description of Artificial Sequence: Synthetic oligonucleotide
  Sense Strand Starting at position 1127 of SEQ ID NO: 319076
acaugagauuuccaguuac

SEQ ID NO: 407170 - RNA, 19 nt, Artificial Sequence
  Description of Artificial Sequence: Synthetic oligonucleotide
  Antisense Strand to SEQ ID NO: 407169
guaacuggaaaucucaugu

SEQ ID NO: 407171 - RNA, 19 nt, Artificial Sequence
  Description of Artificial Sequence: Synthetic oligonucleotide
  Sense Strand Starting at position 1128 of SEQ ID NO: 315574
aggcucacugccuauacaa

SEQ ID NO: 407172 - RNA, 19 nt, Artificial Sequence
  Description of Artificial Sequence: Synthetic oligonucleotide
  Antisense Strand to SEQ ID NO: 407171
uuguauaggcagugagccu

SEQ ID NO: 407173 - RNA, 19 nt, Artificial Sequence
  Description of Artificial Sequence: Synthetic oligonucleotide
  Sense Strand Starting at position 1128 of SEQ ID NO: 315930
caacgugagcaccaugaaa

SEQ ID NO: 407174 - RNA, 19 nt, Artificial Sequence
  Description of Artificial Sequence: Synthetic oligonucleotide
  Antisense Strand to SEQ ID NO: 407173
uuucauggugcucacguug

SEQ ID NO: 407175 - RNA, 19 nt, Artificial Sequence
  Description of Artificial Sequence: Synthetic oligonucleotide
  Sense Strand Starting at position 1128 of SEQ ID NO: 315957
uggcuuugaccuuaagauu

SEQ ID NO: 407176 - RNA, 19 nt, Artificial Sequence
  Description of Artificial Sequence: Synthetic oligonucleotide
  Antisense Strand to SEQ ID NO: 407175
aaucuuaaggucaaagcca

SEQ ID NO: 407177 - RNA, 19 nt, Artificial Sequence
  Description of Artificial Sequence: Synthetic oligonucleotide
  Sense Strand Starting at position 1128 of SEQ ID NO: 315969
uaagauuauuagccagagu

SEQ ID NO: 407178 - RNA, 19 nt, Artificial Sequence
  Description of Artificial Sequence: Synthetic oligonucleotide
  Antisense Strand to SEQ ID NO: 407177
acucuggcuaauaaucuua

SEQ ID NO: 407179 - RNA, 19 nt, Artificial Sequence
  Description of Artificial Sequence: Synthetic oligonucleotide
  Sense Strand Starting at position 1128 of SEQ ID NO: 315972
gauuauuagccagaguagc

SEQ ID NO: 407180 - RNA, 19 nt, Artificial Sequence
  Description of Artificial Sequence: Synthetic oligonucleotide
  Antisense Strand to SEQ ID NO: 407179
gcuacucuggcuaauaauc

SEQ ID NO: 407181 - RNA, 19 nt, Artificial Sequence
  Description of Artificial Sequence: Synthetic oligonucleotide
  Sense Strand Starting at position 1128 of SEQ ID NO: 315998
ggaaauaagcuguguccuu

SEQ ID NO: 407182 - RNA, 19 nt, Artificial Sequence
  Description of Artificial Sequence: Synthetic oligonucleotide
  Antisense Strand to SEQ ID NO: 407181
aaggacacagcuuauuucc

SEQ ID NO: 407183 - RNA, 19 nt, Artificial Sequence
  Description of Artificial Sequence: Synthetic oligonucleotide
  Sense Strand Starting at position 1128 of SEQ ID NO: 315999
gaaauaagcuguguccuuu

SEQ ID NO: 407184 - RNA, 19 nt, Artificial Sequence
  Description of Artificial Sequence: Synthetic oligonucleotide
  Antisense Strand to SEQ ID NO: 407183
aaaggacacagcuuauuuc

SEQ ID NO: 407185 - RNA, 19 nt, Artificial Sequence
  Description of Artificial Sequence: Synthetic oligonucleotide
  Sense Strand Starting at position 1128 of SEQ ID NO: 316020
uauaguucgcaccaucuga

SEQ ID NO: 407186 - RNA, 19 nt, Artificial Sequence
  Description of Artificial Sequence: Synthetic oligonucleotide
  Antisense Strand to SEQ ID NO: 407185
ucagauggugcgaacuaua

SEQ ID NO: 407187 - RNA, 19 nt, Artificial Sequence
  Description of Artificial Sequence: Synthetic oligonucleotide
  Sense Strand Starting at position 1128 of SEQ ID NO: 316553
gggccugggcaagauauua

SEQ ID NO: 407188 - RNA, 19 nt, Artificial Sequence
  Description of Artificial Sequence: Synthetic oligonucleotide
  Antisense Strand to SEQ ID NO: 407187
uaauaucuugcccaggccc

SEQ ID NO: 407189 - RNA, 19 nt, Artificial Sequence
  Description of Artificial Sequence: Synthetic oligonucleotide
  Sense Strand Starting at position 1128 of SEQ ID NO: 316622
ggagauucucgcggaguag

SEQ ID NO: 407190 - RNA, 19 nt, Artificial Sequence
  Description of Artificial Sequence: Synthetic oligonucleotide
  Antisense Strand to SEQ ID NO: 407189
cuacuccgcgagaaucucc

SEQ ID NO: 407191 - RNA, 19 nt, Artificial Sequence
  Description of Artificial Sequence: Synthetic oligonucleotide
  Sense Strand Starting at position 1128 of SEQ ID NO: 316623
gagauucucgcggaguaga

SEQ ID NO: 407192 - RNA, 19 nt, Artificial Sequence
  Description of Artificial Sequence: Synthetic oligonucleotide
  Antisense Strand to SEQ ID NO: 407191
ucuacuccgcgagaaucuc

SEQ ID NO: 407193 - RNA, 19 nt, Artificial Sequence
  Description of Artificial Sequence: Synthetic oligonucleotide
  Sense Strand Starting at position 1128 of SEQ ID NO: 317642
ccuacugacccuuggaauu

SEQ ID NO: 407194 - RNA, 19 nt, Artificial Sequence
  Description of Artificial Sequence: Synthetic oligonucleotide
  Antisense Strand to SEQ ID NO: 407193
aauuccaagggucaguagg

SEQ ID NO: 407195 - RNA, 19 nt, Artificial Sequence
  Description of Artificial Sequence: Synthetic oligonucleotide
  Sense Strand Starting at position 1128 of SEQ ID NO: 317736
cucucauccgcguagaaag

SEQ ID NO: 407196 - RNA, 19 nt, Artificial Sequence
  Description of Artificial Sequence: Synthetic oligonucleotide
  Antisense Strand to SEQ ID NO: 407195
cuuucuacgcggaugagag

SEQ ID NO: 407197 - RNA, 19 nt, Artificial Sequence
  Description of Artificial Sequence: Synthetic oligonucleotide
  Sense Strand Starting at position 1128 of SEQ ID NO: 317746
cguagaaagucccucaucu

SEQ ID NO: 407198 - RNA, 19 nt, Artificial Sequence
  Description of Artificial Sequence: Synthetic oligonucleotide
  Antisense Strand to SEQ ID NO: 407197
agaugagggacuuucuacg

SEQ ID NO: 407199 - RNA, 19 nt, Artificial Sequence
  Description of Artificial Sequence: Synthetic oligonucleotide
  Sense Strand Starting at position 1128 of SEQ ID NO: 317881
gcugguguaucucuaaauc

SEQ ID NO: 407200 - RNA, 19 nt, Artificial Sequence
  Description of Artificial Sequence: Synthetic oligonucleotide
  Antisense Strand to SEQ ID NO: 407199
gauuuagagauacaccagc

SEQ ID NO: 407201 - RNA, 19 nt, Artificial Sequence
  Description of Artificial Sequence: Synthetic oligonucleotide
  Sense Strand Starting at position 1128 of SEQ ID NO: 318025
ggccacaaacaguggaauu

SEQ ID NO: 407202 - RNA, 19 nt, Artificial Sequence
  Description of Artificial Sequence: Synthetic oligonucleotide
  Antisense Strand to SEQ ID NO: 407201
aauuccacuguuuguggcc

SEQ ID NO: 407203 - RNA, 19 nt, Artificial Sequence
  Description of Artificial Sequence: Synthetic oligonucleotide
  Sense Strand Starting at position 1128 of SEQ ID NO: 318065
ugggacugcuguccucauu

SEQ ID NO: 407204 - RNA, 19 nt, Artificial Sequence
  Description of Artificial Sequence: Synthetic oligonucleotide
  Antisense Strand to SEQ ID NO: 407203
aaugaggacagcaguccca

SEQ ID NO: 407205 - RNA, 19 nt, Artificial Sequence
  Description of Artificial Sequence: Synthetic oligonucleotide
  Sense Strand Starting at position 1128 of SEQ ID NO: 318112
uuguuugugccagacagca

SEQ ID NO: 407206 - RNA, 19 nt, Artificial Sequence
  Description of Artificial Sequence: Synthetic oligonucleotide
  Antisense Strand to SEQ ID NO: 407205
ugcugucuggcacaaacaa

SEQ ID NO: 407207 - RNA, 19 nt, Artificial Sequence
  Description of Artificial Sequence: Synthetic oligonucleotide
  Sense Strand Starting at position 1128 of SEQ ID NO: 318160
ggcuguugccuuggaagag

SEQ ID NO: 407208 - RNA, 19 nt, Artificial Sequence
  Description of Artificial Sequence: Synthetic oligonucleotide
  Antisense Strand to SEQ ID NO: 407207
cucuuccaaggcaacagcc

SEQ ID NO: 407209 - RNA, 19 nt, Artificial Sequence
  Description of Artificial Sequence: Synthetic oligonucleotide
  Sense Strand Starting at position 1128 of SEQ ID NO: 318202
gccacaucacgccagaaau

SEQ ID NO: 407210 - RNA, 19 nt, Artificial Sequence
  Description of Artificial Sequence: Synthetic oligonucleotide
  Antisense Strand to SEQ ID NO: 407209
auuucuggcgugauguggc

SEQ ID NO: 407211 - RNA, 19 nt, Artificial Sequence
  Description of Artificial Sequence: Synthetic oligonucleotide
  Sense Strand Starting at position 1128 of SEQ ID NO: 318230
cuggauuagcccugggaga

SEQ ID NO: 407212 - RNA, 19 nt, Artificial Sequence
  Description of Artificial Sequence: Synthetic oligonucleotide
  Antisense Strand to SEQ ID NO: 407211
ucucccagggcuaauccag

SEQ ID NO: 407213 - RNA, 19 nt, Artificial Sequence
  Description of Artificial Sequence: Synthetic oligonucleotide
  Sense Strand Starting at position 1128 of SEQ ID NO: 318356
aggagaaaguguuuguaua

SEQ ID NO: 407214 - RNA, 19 nt, Artificial Sequence
  Description of Artificial Sequence: Synthetic oligonucleotide
  Antisense Strand to SEQ ID NO: 407213
uauacaaacacuuucuccu

SEQ ID NO: 407215 - RNA, 19 nt, Artificial Sequence
  Description of Artificial Sequence: Synthetic oligonucleotide
  Sense Strand Starting at position 1128 of SEQ ID NO: 318357
ggagaaaguguuuguauau

SEQ ID NO: 407216 - RNA, 19 nt, Artificial Sequence
  Description of Artificial Sequence: Synthetic oligonucleotide
  Antisense Strand to SEQ ID NO: 407215
auauacaaacacuuucucc

SEQ ID NO: 407217 - RNA, 19 nt, Artificial Sequence
  Description of Artificial Sequence: Synthetic oligonucleotide
  Sense Strand Starting at position 1128 of SEQ ID NO: 318358
gagaaaguguuuguauauc

SEQ ID NO: 407218 - RNA, 19 nt, Artificial Sequence
  Description of Artificial Sequence: Synthetic oligonucleotide
  Antisense Strand to SEQ ID NO: 407217
gauauacaaacacuuucuc

SEQ ID NO: 407219 - RNA, 19 nt, Artificial Sequence
  Description of Artificial Sequence: Synthetic oligonucleotide
  Sense Strand Starting at position 1128 of SEQ ID NO: 318424
ugcagacacguuugacacu

SEQ ID NO: 407220 - RNA, 19 nt, Artificial Sequence
  Description of Artificial Sequence: Synthetic oligonucleotide
  Antisense Strand to SEQ ID NO: 407219
agugucaaacgugucugca

SEQ ID NO: 407221 - RNA, 19 nt, Artificial Sequence
  Description of Artificial Sequence: Synthetic oligonucleotide
  Sense Strand Starting at position 1128 of SEQ ID NO: 318458
ggacucaggacguguagaa

SEQ ID NO: 407222 - RNA, 19 nt, Artificial Sequence
  Description of Artificial Sequence: Synthetic oligonucleotide
  Antisense Strand to SEQ ID NO: 407221
uucuacacguccugagucc

SEQ ID NO: 407223 - RNA, 19 nt, Artificial Sequence
  Description of Artificial Sequence: Synthetic oligonucleotide
  Sense Strand Starting at position 1128 of SEQ ID NO: 318494
gcaagaguuuauuccuguu

SEQ ID NO: 407224 - RNA, 19 nt, Artificial Sequence
  Description of Artificial Sequence: Synthetic oligonucleotide
  Antisense Strand to SEQ ID NO: 407223
aacaggaauaaacucuugc

SEQ ID NO: 407225 - RNA, 19 nt, Artificial Sequence
  Description of Artificial Sequence: Synthetic oligonucleotide
  Sense Strand Starting at position 1128 of SEQ ID NO: 318515
cuucucaugcucuguauuu

SEQ ID NO: 407226 - RNA, 19 nt, Artificial Sequence
  Description of Artificial Sequence: Synthetic oligonucleotide
  Antisense Strand to SEQ ID NO: 407225
aaauacagagcaugagaag

SEQ ID NO: 407227 - RNA, 19 nt, Artificial Sequence
  Description of Artificial Sequence: Synthetic oligonucleotide
  Sense Strand Starting at position 1128 of SEQ ID NO: 318525
ucuguauuucuuggugugu

SEQ ID NO: 407228 - RNA, 19 nt, Artificial Sequence
  Description of Artificial Sequence: Synthetic oligonucleotide
  Antisense Strand to SEQ ID NO: 407227
acacaccaagaaauacaga

SEQ ID NO: 407229 - RNA, 19 nt, Artificial Sequence
  Description of Artificial Sequence: Synthetic oligonucleotide
  Sense Strand Starting at position 1128 of SEQ ID NO: 318526
cuguauuucuugguguguu

SEQ ID NO: 407230 - RNA, 19 nt, Artificial Sequence
  Description of Artificial Sequence: Synthetic oligonucleotide
  Antisense Strand to SEQ ID NO: 407229
aacacaccaagaaauacag

SEQ ID NO: 407231 - RNA, 19 nt, Artificial Sequence
  Description of Artificial Sequence: Synthetic oligonucleotide
  Sense Strand Starting at position 1128 of SEQ ID NO: 318529
uauuucuugguguguuuga

SEQ ID NO: 407232 - RNA, 19 nt, Artificial Sequence
  Description of Artificial Sequence: Synthetic oligonucleotide
  Antisense Strand to SEQ ID NO: 407231
ucaaacacaccaagaaaua

SEQ ID NO: 407233 - RNA, 19 nt, Artificial Sequence
  Description of Artificial Sequence: Synthetic oligonucleotide
  Sense Strand Starting at position 1128 of SEQ ID NO: 318545
ugaagagacuuucuguugu

SEQ ID NO: 407234 - RNA, 19 nt, Artificial Sequence
  Description of Artificial Sequence: Synthetic oligonucleotide
  Antisense Strand to SEQ ID NO: 407233
acaacagaaagucucuuca

SEQ ID NO: 407235 - RNA, 19 nt, Artificial Sequence
  Description of Artificial Sequence: Synthetic oligonucleotide
  Sense Strand Starting at position 1128 of SEQ ID NO: 318547
aagagacuuucuguugugu

SEQ ID NO: 407236 - RNA, 19 nt, Artificial Sequence
  Description of Artificial Sequence: Synthetic oligonucleotide
  Antisense Strand to SEQ ID NO: 407235
acacaacagaaagucucuu

SEQ ID NO: 407237 - RNA, 19 nt, Artificial Sequence
  Description of Artificial Sequence: Synthetic oligonucleotide
  Sense Strand Starting at position 1128 of SEQ ID NO: 318555
uucuguuguguguauaaau

SEQ ID NO: 407238 - RNA, 19 nt, Artificial Sequence
  Description of Artificial Sequence: Synthetic oligonucleotide
  Antisense Strand to SEQ ID NO: 407237
auuuauacacacaacagaa

SEQ ID NO: 407239 - RNA, 19 nt, Artificial Sequence
  Description of Artificial Sequence: Synthetic oligonucleotide
  Sense Strand Starting at position 1128 of SEQ ID NO: 318574
agauauaucucuguguggu

SEQ ID NO: 407240 - RNA, 19 nt, Artificial Sequence
  Description of Artificial Sequence: Synthetic oligonucleotide
  Antisense Strand to SEQ ID NO: 407239
accacacagagauauaucu

SEQ ID NO: 407241 - RNA, 19 nt, Artificial Sequence
  Description of Artificial Sequence: Synthetic oligonucleotide
  Sense Strand Starting at position 1128 of SEQ ID NO: 318575
gauauaucucugugugguc

SEQ ID NO: 407242 - RNA, 19 nt, Artificial Sequence
  Description of Artificial Sequence: Synthetic oligonucleotide
  Antisense Strand to SEQ ID NO: 407241
gaccacacagagauauauc

SEQ ID NO: 407243 - RNA, 19 nt, Artificial Sequence
  Description of Artificial Sequence: Synthetic oligonucleotide
  Sense Strand Starting at position 1128 of SEQ ID NO: 318978
gagggcugacuguaauaug

SEQ ID NO: 407244 - RNA, 19 nt, Artificial Sequence
  Description of Artificial Sequence: Synthetic oligonucleotide
  Antisense Strand to SEQ ID NO: 407243
cauauuacagucagcccuc

SEQ ID NO: 407245 - RNA, 19 nt, Artificial Sequence
  Description of Artificial Sequence: Synthetic oligonucleotide
  Sense Strand Starting at position 1128 of SEQ ID NO: 319081
ccaacuguguugcuaauca

SEQ ID NO: 407246 - RNA, 19 nt, Artificial Sequence
  Description of Artificial Sequence: Synthetic oligonucleotide
  Antisense Strand to SEQ ID NO: 407245
ugauuagcaacacaguugg

SEQ ID NO: 407247 - RNA, 19 nt, Artificial Sequence
  Description of Artificial Sequence: Synthetic oligonucleotide
  Sense Strand Starting at position 1128 of SEQ ID NO: 319085
cuguguugcuaaucaaauu

SEQ ID NO: 407248 - RNA, 19 nt, Artificial Sequence
  Description of Artificial Sequence: Synthetic oligonucleotide
  Antisense Strand to SEQ ID NO: 407247
aauuugauuagcaacacag

SEQ ID NO: 407249 - RNA, 19 nt, Artificial Sequence
  Description of Artificial Sequence: Synthetic oligonucleotide
  Sense Strand Starting at position 1128 of SEQ ID NO: 319205
gcucucuuaccaggaauag

SEQ ID NO: 407250 - RNA, 19 nt, Artificial Sequence
  Description of Artificial Sequence: Synthetic oligonucleotide
  Antisense Strand to SEQ ID NO: 407249
cuauuccugguaagagagc

SEQ ID NO: 407251 - RNA, 19 nt, Artificial Sequence
  Description of Artificial Sequence: Synthetic oligonucleotide
  Sense Strand Starting at position 1129 of SEQ ID NO: 315600
auaacugguugacucgaua

SEQ ID NO: 407252 - RNA, 19 nt, Artificial Sequence
  Description of Artificial Sequence: Synthetic oligonucleotide
  Antisense Strand to SEQ ID NO: 407251
uaucgagucaaccaguuau

SEQ ID NO: 407253 - RNA, 19 nt, Artificial Sequence
  Description of Artificial Sequence: Synthetic oligonucleotide
  Sense Strand Starting at position 1129 of SEQ ID NO: 315603
acugguugacucgauaaau

SEQ ID NO: 407254 - RNA, 19 nt, Artificial Sequence
  Description of Artificial Sequence: Synthetic oligonucleotide
  Antisense Strand to SEQ ID NO: 407253
auuuaucgagucaaccagu

SEQ ID NO: 407255 - RNA, 19 nt, Artificial Sequence
  Description of Artificial Sequence: Synthetic oligonucleotide
  Sense Strand Starting at position 1129 of SEQ ID NO: 315704
cuuagugaaucagauaaca

SEQ ID NO: 407256 - RNA, 19 nt, Artificial Sequence
  Description of Artificial Sequence: Synthetic oligonucleotide
  Antisense Strand to SEQ ID NO: 407255
uguuaucugauucacuaag

SEQ ID NO: 407257 - RNA, 19 nt, Artificial Sequence
  Description of Artificial Sequence: Synthetic oligonucleotide
  Sense Strand Starting at position 1129 of SEQ ID NO: 315944
aguuaagaguuucuaagag

SEQ ID NO: 407258 - RNA, 19 nt, Artificial Sequence
  Description of Artificial Sequence: Synthetic oligonucleotide
  Antisense Strand to SEQ ID NO: 407257
cucuuagaaacucuuaacu

SEQ ID NO: 407259 - RNA, 19 nt, Artificial Sequence
  Description of Artificial Sequence: Synthetic oligonucleotide
  Sense Strand Starting at position 1129 of SEQ ID NO: 316006
aaguaaauucugugugcca

SEQ ID NO: 407260 - RNA, 19 nt, Artificial Sequence
  Description of Artificial Sequence: Synthetic oligonucleotide
  Antisense Strand to SEQ ID NO: 407259
uggcacacagaauuuacuu

SEQ ID NO: 407261 - RNA, 19 nt, Artificial Sequence
  Description of Artificial Sequence: Synthetic oligonucleotide
  Sense Strand Starting at position 1129 of SEQ ID NO: 316007
aguaaauucugugugccau

SEQ ID NO: 407262 - RNA, 19 nt, Artificial Sequence
  Description of Artificial Sequence: Synthetic oligonucleotide
  Antisense Strand to SEQ ID NO: 407261
auggcacacagaauuuacu

SEQ ID NO: 407263 - RNA, 19 nt, Artificial Sequence
  Description of Artificial Sequence: Synthetic oligonucleotide
  Sense Strand Starting at position 1129 of SEQ ID NO: 316009
uaaauucugugugccauga

SEQ ID NO: 407264 - RNA, 19 nt, Artificial Sequence
  Description of Artificial Sequence: Synthetic oligonucleotide
  Antisense Strand to SEQ ID NO: 407263
ucauggcacacagaauuua

SEQ ID NO: 407265 - RNA, 19 nt, Artificial Sequence
  Description of Artificial Sequence: Synthetic oligonucleotide
  Sense Strand Starting at position 1129 of SEQ ID NO: 316087
aaauguuugcacugagagc

SEQ ID NO: 407266 - RNA, 19 nt, Artificial Sequence
  Description of Artificial Sequence: Synthetic oligonucleotide
  Antisense Strand to SEQ ID NO: 407265
gcucucagugcaaacauuu

SEQ ID NO: 407267 - RNA, 19 nt, Artificial Sequence
  Description of Artificial Sequence: Synthetic oligonucleotide
  Sense Strand Starting at position 1129 of SEQ ID NO: 316158
aaaugcauuuacgaagagu

SEQ ID NO: 407268 - RNA, 19 nt, Artificial Sequence
  Description of Artificial Sequence: Synthetic oligonucleotide
  Antisense Strand to SEQ ID NO: 407267
acucuucguaaaugcauuu

SEQ ID NO: 407269 - RNA, 19 nt, Artificial Sequence
  Description of Artificial Sequence: Synthetic oligonucleotide
  Sense Strand Starting at position 1129 of SEQ ID NO: 316166
uuacgaagaguuugagaag

SEQ ID NO: 407270 - RNA, 19 nt, Artificial Sequence
  Description of Artificial Sequence: Synthetic oligonucleotide
  Antisense Strand to SEQ ID NO: 407269
cuucucaaacucuucguaa

SEQ ID NO: 407271 - RNA, 19 nt, Artificial Sequence
  Description of Artificial Sequence: Synthetic oligonucleotide
  Sense Strand Starting at position 1129 of SEQ ID NO: 316214
gugagagguuaaaggaaga

SEQ ID NO: 407272 - RNA, 19 nt, Artificial Sequence
  Description of Artificial Sequence: Synthetic oligonucleotide
  Antisense Strand to SEQ ID NO: 407271
ucuuccuuuaaccucucac

SEQ ID NO: 407273 - RNA, 19 nt, Artificial Sequence
  Description of Artificial Sequence: Synthetic oligonucleotide
  Sense Strand Starting at position 1129 of SEQ ID NO: 316254
ucuugugagccacagcaau

SEQ ID NO: 407274 - RNA, 19 nt, Artificial Sequence
  Description of Artificial Sequence: Synthetic oligonucleotide
  Antisense Strand to SEQ ID NO: 407273
auugcuguggcucacaaga

SEQ ID NO: 407275 - RNA, 19 nt, Artificial Sequence
  Description of Artificial Sequence: Synthetic oligonucleotide
  Sense Strand Starting at position 1129 of SEQ ID NO: 316315
agggauaguuaugacugga

SEQ ID NO: 407276 - RNA, 19 nt, Artificial Sequence
  Description of Artificial Sequence: Synthetic oligonucleotide
  Antisense Strand to SEQ ID NO: 407275
uccagucauaacuaucccu

SEQ ID NO: 407277 - RNA, 19 nt, Artificial Sequence
  Description of Artificial Sequence: Synthetic oligonucleotide
  Sense Strand Starting at position 1129 of SEQ ID NO: 316318
gauaguuaugacuggacuu

SEQ ID NO: 407278 - RNA, 19 nt, Artificial Sequence
  Description of Artificial Sequence: Synthetic oligonucleotide
  Antisense Strand to SEQ ID NO: 407277
aaguccagucauaacuauc

SEQ ID NO: 407279 - RNA, 19 nt, Artificial Sequence
  Description of Artificial Sequence: Synthetic oligonucleotide
  Sense Strand Starting at position 1129 of SEQ ID NO: 316554
uuuccaguguucucucaca

SEQ ID NO: 407280 - RNA, 19 nt, Artificial Sequence
  Description of Artificial Sequence: Synthetic oligonucleotide
  Antisense Strand to SEQ ID NO: 407279
ugugagagaacacuggaaa

SEQ ID NO: 407281 - RNA, 19 nt, Artificial Sequence
  Description of Artificial Sequence: Synthetic oligonucleotide
  Sense Strand Starting at position 1129 of SEQ ID NO: 316766
caaagcacccuggauaguu

SEQ ID NO: 407282 - RNA, 19 nt, Artificial Sequence
  Description of Artificial Sequence: Synthetic oligonucleotide
  Antisense Strand to SEQ ID NO: 407281
aacuauccagggugcuuug

SEQ ID NO: 407283 - RNA, 19 nt, Artificial Sequence
  Description of Artificial Sequence: Synthetic oligonucleotide
  Sense Strand Starting at position 1129 of SEQ ID NO: 316840
auuaccagcucugugcaaa

SEQ ID NO: 407284 - RNA, 19 nt, Artificial Sequence
  Description of Artificial Sequence: Synthetic oligonucleotide
  Antisense Strand to SEQ ID NO: 407283
uuugcacagagcugguaau

SEQ ID NO: 407285 - RNA, 19 nt, Artificial Sequence
  Description of Artificial Sequence: Synthetic oligonucleotide
  Sense Strand Starting at position 1129 of SEQ ID NO: 316975
cgcuuccugaaguaaggau

SEQ ID NO: 407286 - RNA, 19 nt, Artificial Sequence
  Description of Artificial Sequence: Synthetic oligonucleotide
  Antisense Strand to SEQ ID NO: 407285
auccuuacuucaggaagcg

SEQ ID NO: 407287 - RNA, 19 nt, Artificial Sequence
  Description of Artificial Sequence: Synthetic oligonucleotide
  Sense Strand Starting at position 1129 of SEQ ID NO: 317331
gagagagguuccucugcaa

SEQ ID NO: 407288 - RNA, 19 nt, Artificial Sequence
  Description of Artificial Sequence: Synthetic oligonucleotide
  Antisense Strand to SEQ ID NO: 407287
uugcagaggaaccucucuc

SEQ ID NO: 407289 - RNA, 19 nt, Artificial Sequence
  Description of Artificial Sequence: Synthetic oligonucleotide
  Sense Strand Starting at position 1129 of SEQ ID NO: 317334
agagguuccucugcaaggu

SEQ ID NO: 407290 - RNA, 19 nt, Artificial Sequence
  Description of Artificial Sequence: Synthetic oligonucleotide
  Antisense Strand to SEQ ID NO: 407289
accuugcagaggaaccucu

SEQ ID NO: 407291 - RNA, 19 nt, Artificial Sequence
  Description of Artificial Sequence: Synthetic oligonucleotide
  Sense Strand Starting at position 1129 of SEQ ID NO: 317335
gagguuccucugcaagguu

SEQ ID NO: 407292 - RNA, 19 nt, Artificial Sequence
  Description of Artificial Sequence: Synthetic oligonucleotide
  Antisense Strand to SEQ ID NO: 407291
aaccuugcagaggaaccuc

SEQ ID NO: 407293 - RNA, 19 nt, Artificial Sequence
  Description of Artificial Sequence: Synthetic oligonucleotide
  Sense Strand Starting at position 1129 of SEQ ID NO: 317355
agggcaaauuauuaaagaa

SEQ ID NO: 407294 - RNA, 19 nt, Artificial Sequence
  Description of Artificial Sequence: Synthetic oligonucleotide
  Antisense Strand to SEQ ID NO: 407293
uucuuuaauaauuugcccu

SEQ ID NO: 407295 - RNA, 19 nt, Artificial Sequence
  Description of Artificial Sequence: Synthetic oligonucleotide
  Sense Strand Starting at position 1129 of SEQ ID NO: 317735
gaaagauguugcucuccuc

SEQ ID NO: 407296 - RNA, 19 nt, Artificial Sequence
  Description of Artificial Sequence: Synthetic oligonucleotide
  Antisense Strand to SEQ ID NO: 407295
gaggagagcaacaucuuuc

SEQ ID NO: 407297 - RNA, 19 nt, Artificial Sequence
  Description of Artificial Sequence: Synthetic oligonucleotide
  Sense Strand Starting at position 1129 of SEQ ID NO: 317940
ugggaacacgccuguaguu

SEQ ID NO: 407298 - RNA, 19 nt, Artificial Sequence
  Description of Artificial Sequence: Synthetic oligonucleotide
  Antisense Strand to SEQ ID NO: 407297
aacuacaggcguguuccca

SEQ ID NO: 407299 - RNA, 19 nt, Artificial Sequence
  Description of Artificial Sequence: Synthetic oligonucleotide
  Sense Strand Starting at position 1129 of SEQ ID NO: 318117
gcgggagagcuagguucua

SEQ ID NO: 407300 - RNA, 19 nt, Artificial Sequence
  Description of Artificial Sequence: Synthetic oligonucleotide
  Antisense Strand to SEQ ID NO: 407299
uagaaccuagcucucccgc

SEQ ID NO: 407301 - RNA, 19 nt, Artificial Sequence
  Description of Artificial Sequence: Synthetic oligonucleotide
  Sense Strand Starting at position 1129 of SEQ ID NO: 318208
aauuaugacgagugcuaag

SEQ ID NO: 407302 - RNA, 19 nt, Artificial Sequence
  Description of Artificial Sequence: Synthetic oligonucleotide
  Antisense Strand to SEQ ID NO: 407301
cuuagcacucgucauaauu

SEQ ID NO: 407303 - RNA, 19 nt, Artificial Sequence
  Description of Artificial Sequence: Synthetic oligonucleotide
  Sense Strand Starting at position 1129 of SEQ ID NO: 318283
caggaaagcucagacauga

SEQ ID NO: 407304 - RNA, 19 nt, Artificial Sequence
  Description of Artificial Sequence: Synthetic oligonucleotide
  Antisense Strand to SEQ ID NO: 407303
ucaugucugagcuuuccug

SEQ ID NO: 407305 - RNA, 19 nt, Artificial Sequence
  Description of Artificial Sequence: Synthetic oligonucleotide
  Sense Strand Starting at position 1129 of SEQ ID NO: 318319
gggaaagcauuccugcaga

SEQ ID NO: 407306 - RNA, 19 nt, Artificial Sequence
  Description of Artificial Sequence: Synthetic oligonucleotide
  Antisense Strand to SEQ ID NO: 407305
ucugcaggaaugcuuuccc

SEQ ID NO: 407307 - RNA, 19 nt, Artificial Sequence
  Description of Artificial Sequence: Synthetic oligonucleotide
  Sense Strand Starting at position 1129 of SEQ ID NO: 318392
gugucugaaguuuagagaa

SEQ ID NO: 407308 - RNA, 19 nt, Artificial Sequence
  Description of Artificial Sequence: Synthetic oligonucleotide
  Antisense Strand to SEQ ID NO: 407307
uucucuaaacuucagacac

SEQ ID NO: 407309 - RNA, 19 nt, Artificial Sequence
  Description of Artificial Sequence: Synthetic oligonucleotide
  Sense Strand Starting at position 1129 of SEQ ID NO: 318519
gaguuuauuugcucuggua

SEQ ID NO: 407310 - RNA, 19 nt, Artificial Sequence
  Description of Artificial Sequence: Synthetic oligonucleotide
  Antisense Strand to SEQ ID NO: 407309
uaccagagcaaauaaacuc

SEQ ID NO: 407311 - RNA, 19 nt, Artificial Sequence
  Description of Artificial Sequence: Synthetic oligonucleotide
  Sense Strand Starting at position 1129 of SEQ ID NO: 318521
guuuauuugcucugguaag

SEQ ID NO: 407312 - RNA, 19 nt, Artificial Sequence
  Description of Artificial Sequence: Synthetic oligonucleotide
  Antisense Strand to SEQ ID NO: 407311
cuuaccagagcaaauaaac

SEQ ID NO: 407313 - RNA, 19 nt, Artificial Sequence
  Description of Artificial Sequence: Synthetic oligonucleotide
  Sense Strand Starting at position 1129 of SEQ ID NO: 318580
acccauguguggucugcaa

SEQ ID NO: 407314 - RNA, 19 nt, Artificial Sequence
  Description of Artificial Sequence: Synthetic oligonucleotide
  Antisense Strand to SEQ ID NO: 407313
uugcagaccacacaugggu

SEQ ID NO: 407315 - RNA, 19 nt, Artificial Sequence
  Description of Artificial Sequence: Synthetic oligonucleotide
  Sense Strand Starting at position 1129 of SEQ ID NO: 318582
ccauguguggucugcaaau

SEQ ID NO: 407316 - RNA, 19 nt, Artificial Sequence
  Description of Artificial Sequence: Synthetic oligonucleotide
  Antisense Strand to SEQ ID NO: 407315
auuugcagaccacacaugg

SEQ ID NO: 407317 - RNA, 19 nt, Artificial Sequence
  Description of Artificial Sequence: Synthetic oligonucleotide
  Sense Strand Starting at position 1129 of SEQ ID NO: 318584
auguguggucugcaaauac

SEQ ID NO: 407318 - RNA, 19 nt, Artificial Sequence
  Description of Artificial Sequence: Synthetic oligonucleotide
  Antisense Strand to SEQ ID NO: 407317
guauuugcagaccacacau

SEQ ID NO: 407319 - RNA, 19 nt, Artificial Sequence
  Description of Artificial Sequence: Synthetic oligonucleotide
  Sense Strand Starting at position 1129 of SEQ ID NO: 318626
agguacugccuuuaauagu

SEQ ID NO: 407320 - RNA, 19 nt, Artificial Sequence
  Description of Artificial Sequence: Synthetic oligonucleotide
  Antisense Strand to SEQ ID NO: 407319
acuauuaaaggcaguaccu

SEQ ID NO: 407321 - RNA, 19 nt, Artificial Sequence
  Description of Artificial Sequence: Synthetic oligonucleotide
  Sense Strand Starting at position 1129 of SEQ ID NO: 318877
ggaccuuaaagaugcuuga

SEQ ID NO: 407322 - RNA, 19 nt, Artificial Sequence
  Description of Artificial Sequence: Synthetic oligonucleotide
  Antisense Strand to SEQ ID NO: 407321
ucaagcaucuuuaaggucc

SEQ ID NO: 407323 - RNA, 19 nt, Artificial Sequence
  Description of Artificial Sequence: Synthetic oligonucleotide
  Sense Strand Starting at position 1129 of SEQ ID NO: 318880
ccuuaaagaugcuugaaca

SEQ ID NO: 407324 - RNA, 19 nt, Artificial Sequence
  Description of Artificial Sequence: Synthetic oligonucleotide
  Antisense Strand to SEQ ID NO: 407323
uguucaagcaucuuuaagg

SEQ ID NO: 407325 - RNA, 19 nt, Artificial Sequence
  Description of Artificial Sequence: Synthetic oligonucleotide
  Sense Strand Starting at position 1129 of SEQ ID NO: 318881
cuuaaagaugcuugaacau

SEQ ID NO: 407326 - RNA, 19 nt, Artificial Sequence
  Description of Artificial Sequence: Synthetic oligonucleotide
  Antisense Strand to SEQ ID NO: 407325
auguucaagcaucuuuaag

SEQ ID NO: 407327 - RNA, 19 nt, Artificial Sequence
  Description of Artificial Sequence: Synthetic oligonucleotide
  Sense Strand Starting at position 1129 of SEQ ID NO: 319039
agagaacuucccuaagcuc

SEQ ID NO: 407328 - RNA, 19 nt, Artificial Sequence
  Description of Artificial Sequence: Synthetic oligonucleotide
  Antisense Strand to SEQ ID NO: 407327
gagcuuagggaaguucucu

SEQ ID NO: 407329 - RNA, 19 nt, Artificial Sequence
  Description of Artificial Sequence: Synthetic oligonucleotide
  Sense Strand Starting at position 1129 of SEQ ID NO: 319108
ucagaagcucagcauaaga

SEQ ID NO: 407330 - RNA, 19 nt, Artificial Sequence
  Description of Artificial Sequence: Synthetic oligonucleotide
  Antisense Strand to SEQ ID NO: 407329
ucuuaugcugagcuucuga

SEQ ID NO: 407331 - RNA, 19 nt, Artificial Sequence
  Description of Artificial Sequence: Synthetic oligonucleotide
  Sense Strand Starting at position 1130 of SEQ ID NO: 315433
agugguugcagugaucuga

SEQ ID NO: 407332 - RNA, 19 nt, Artificial Sequence
  Description of Artificial Sequence: Synthetic oligonucleotide
  Antisense Strand to SEQ ID NO: 407331
ucagaucacugcaaccacu

SEQ ID NO: 407333 - RNA, 19 nt, Artificial Sequence
  Description of Artificial Sequence: Synthetic oligonucleotide
  Sense Strand Starting at position 1130 of SEQ ID NO: 315830
agguaugaacuaugauauc

SEQ ID NO: 407334 - RNA, 19 nt, Artificial Sequence
  Description of Artificial Sequence: Synthetic oligonucleotide
  Antisense Strand to SEQ ID NO: 407333
gauaucauaguucauaccu

SEQ ID NO: 407335 - RNA, 19 nt, Artificial Sequence
  Description of Artificial Sequence: Synthetic oligonucleotide
  Sense Strand Starting at position 1130 of SEQ ID NO: 315877
gguaccacuccugacacau

SEQ ID NO: 407336 - RNA, 19 nt, Artificial Sequence
  Description of Artificial Sequence: Synthetic oligonucleotide
  Antisense Strand to SEQ ID NO: 407335
augugucaggagugguacc

SEQ ID NO: 407337 - RNA, 19 nt, Artificial Sequence
  Description of Artificial Sequence: Synthetic oligonucleotide
  Sense Strand Starting at position 1130 of SEQ ID NO: 316010
aggcuuuguguuuauuaca

SEQ ID NO: 407338 - RNA, 19 nt, Artificial Sequence
  Description of Artificial Sequence: Synthetic oligonucleotide
  Antisense Strand to SEQ ID NO: 407337
uguaauaaacacaaagccu

SEQ ID NO: 407339 - RNA, 19 nt, Artificial Sequence
  Description of Artificial Sequence: Synthetic oligonucleotide
  Sense Strand Starting at position 1130 of SEQ ID NO: 316018
uguuuauuacagcagaacu

SEQ ID NO: 407340 - RNA, 19 nt, Artificial Sequence
  Description of Artificial Sequence: Synthetic oligonucleotide
  Antisense Strand to SEQ ID NO: 407339
aguucugcuguaauaaaca

SEQ ID NO: 407341 - RNA, 19 nt, Artificial Sequence
  Description of Artificial Sequence: Synthetic oligonucleotide
  Sense Strand Starting at position 1130 of SEQ ID NO: 316038
agauaagauuugcacuaaa

SEQ ID NO: 407342 - RNA, 19 nt, Artificial Sequence
  Description of Artificial Sequence: Synthetic oligonucleotide
  Antisense Strand to SEQ ID NO: 407341
uuuagugcaaaucuuaucu

SEQ ID NO: 407343 - RNA, 19 nt, Artificial Sequence
  Description of Artificial Sequence: Synthetic oligonucleotide
  Sense Strand Starting at position 1130 of SEQ ID NO: 316077
ugguacauggguuagagua

SEQ ID NO: 407344 - RNA, 19 nt, Artificial Sequence
  Description of Artificial Sequence: Synthetic oligonucleotide
  Antisense Strand to SEQ ID NO: 407343
uacucuaacccauguacca

SEQ ID NO: 407345 - RNA, 19 nt, Artificial Sequence
  Description of Artificial Sequence: Synthetic oligonucleotide
  Sense Strand Starting at position 1130 of SEQ ID NO: 316085
ggguuagaguaagucaagu

SEQ ID NO: 407346 - RNA, 19 nt, Artificial Sequence
  Description of Artificial Sequence: Synthetic oligonucleotide
  Antisense Strand to SEQ ID NO: 407345
acuugacuuacucuaaccc

SEQ ID NO: 407347 - RNA, 19 nt, Artificial Sequence
  Description of Artificial Sequence: Synthetic oligonucleotide
  Sense Strand Starting at position 1130 of SEQ ID NO: 316087
guuagaguaagucaaguua

SEQ ID NO: 407348 - RNA, 19 nt, Artificial Sequence
  Description of Artificial Sequence: Synthetic oligonucleotide
  Antisense Strand to SEQ ID NO: 407347
uaacuugacuuacucuaac

SEQ ID NO: 407349 - RNA, 19 nt, Artificial Sequence
  Description of Artificial Sequence: Synthetic oligonucleotide
  Sense Strand Starting at position 1130 of SEQ ID NO: 316176
gucacuguuguggaaaugu

SEQ ID NO: 407350 - RNA, 19 nt, Artificial Sequence
  Description of Artificial Sequence: Synthetic oligonucleotide
  Antisense Strand to SEQ ID NO: 407349
acauuuccacaacagugac

SEQ ID NO: 407351 - RNA, 19 nt, Artificial Sequence
  Description of Artificial Sequence: Synthetic oligonucleotide
  Sense Strand Starting at position 1130 of SEQ ID NO: 316239
gaacuuagucacugguuau

SEQ ID NO: 407352 - RNA, 19 nt, Artificial Sequence
  Description of Artificial Sequence: Synthetic oligonucleotide
  Antisense Strand to SEQ ID NO: 407351
auaaccagugacuaaguuc

SEQ ID NO: 407353 - RNA, 19 nt, Artificial Sequence
  Description of Artificial Sequence: Synthetic oligonucleotide
  Sense Strand Starting at position 1130 of SEQ ID NO: 316270
gagaaauagguuugaggca

SEQ ID NO: 407354 - RNA, 19 nt, Artificial Sequence
  Description of Artificial Sequence: Synthetic oligonucleotide
  Antisense Strand to SEQ ID NO: 407353
ugccucaaaccuauuucuc

SEQ ID NO: 407355 - RNA, 19 nt, Artificial Sequence
  Description of Artificial Sequence: Synthetic oligonucleotide
  Sense Strand Starting at position 1130 of SEQ ID NO: 316323
aagggugauuugcaagaaa

SEQ ID NO: 407356 - RNA, 19 nt, Artificial Sequence
  Description of Artificial Sequence: Synthetic oligonucleotide
  Antisense Strand to SEQ ID NO: 407355
uuucuugcaaaucacccuu

SEQ ID NO: 407357 - RNA, 19 nt, Artificial Sequence
  Description of Artificial Sequence: Synthetic oligonucleotide
  Sense Strand Starting at position 1130 of SEQ ID NO: 316352
uccacuuugguugaguuau

SEQ ID NO: 407358 - RNA, 19 nt, Artificial Sequence
  Description of Artificial Sequence: Synthetic oligonucleotide
  Antisense Strand to SEQ ID NO: 407357
auaacucaaccaaagugga

SEQ ID NO: 407359 - RNA, 19 nt, Artificial Sequence
  Description of Artificial Sequence: Synthetic oligonucleotide
  Sense Strand Starting at position 1130 of SEQ ID NO: 316372
guguguucccgacagagga

SEQ ID NO: 407360 - RNA, 19 nt, Artificial Sequence
  Description of Artificial Sequence: Synthetic oligonucleotide
  Antisense Strand to SEQ ID NO: 407359
uccucugucgggaacacac

SEQ ID NO: 407361 - RNA, 19 nt, Artificial Sequence
  Description of Artificial Sequence: Synthetic oligonucleotide
  Sense Strand Starting at position 1130 of SEQ ID NO: 316578
uuacguaagauaugagagu

SEQ ID NO: 407362 - RNA, 19 nt, Artificial Sequence
  Description of Artificial Sequence: Synthetic oligonucleotide
  Antisense Strand to SEQ ID NO: 407361
acucucauaucuuacguaa

SEQ ID NO: 407363 - RNA, 19 nt, Artificial Sequence
  Description of Artificial Sequence: Synthetic oligonucleotide
  Sense Strand Starting at position 1130 of SEQ ID NO: 316708
guaggaaagaguugcagaa

SEQ ID NO: 407364 - RNA, 19 nt, Artificial Sequence
  Description of Artificial Sequence: Synthetic oligonucleotide
  Antisense Strand to SEQ ID NO: 407363
uucugcaacucuuuccuac

SEQ ID NO: 407365 - RNA, 19 nt, Artificial Sequence
  Description of Artificial Sequence: Synthetic oligonucleotide
  Sense Strand Starting at position 1130 of SEQ ID NO: 316718
guugcagaaaucgaauaga

SEQ ID NO: 407366 - RNA, 19 nt, Artificial Sequence
  Description of Artificial Sequence: Synthetic oligonucleotide
  Antisense Strand to SEQ ID NO: 407365
ucuauucgauuucugcaac

SEQ ID NO: 407367 - RNA, 19 nt, Artificial Sequence
  Description of Artificial Sequence: Synthetic oligonucleotide
  Sense Strand Starting at position 1130 of SEQ ID NO: 316746
uguugaggccuucagagau

SEQ ID NO: 407368 - RNA, 19 nt, Artificial Sequence
  Description of Artificial Sequence: Synthetic oligonucleotide
  Antisense Strand to SEQ ID NO: 407367
aucucugaaggccucaaca

SEQ ID NO: 407369 - RNA, 19 nt, Artificial Sequence
  Description of Artificial Sequence: Synthetic oligonucleotide
  Sense Strand Starting at position 1130 of SEQ ID NO: 316804
cgccauuaaccagaauaau

SEQ ID NO: 407370 - RNA, 19 nt, Artificial Sequence
  Description of Artificial Sequence: Synthetic oligonucleotide
  Antisense Strand to SEQ ID NO: 407369
auuauucugguuaauggcg

SEQ ID NO: 407371 - RNA, 19 nt, Artificial Sequence
  Description of Artificial Sequence: Synthetic oligonucleotide
  Sense Strand Starting at position 1130 of SEQ ID NO: 316813
ccagaauaauaucugaguc

SEQ ID NO: 407372 - RNA, 19 nt, Artificial Sequence
  Description of Artificial Sequence: Synthetic oligonucleotide
  Antisense Strand to SEQ ID NO: 407371
gacucagauauuauucugg

SEQ ID NO: 407373 - RNA, 19 nt, Artificial Sequence
  Description of Artificial Sequence: Synthetic oligonucleotide
  Sense Strand Starting at position 1130 of SEQ ID NO: 316823
aucugagucuacuuccaca

SEQ ID NO: 407374 - RNA, 19 nt, Artificial Sequence
  Description of Artificial Sequence: Synthetic oligonucleotide
  Antisense Strand to SEQ ID NO: 407373
uguggaaguagacucagau

SEQ ID NO: 407375 - RNA, 19 nt, Artificial Sequence
  Description of Artificial Sequence: Synthetic oligonucleotide
  Sense Strand Starting at position 1130 of SEQ ID NO: 316911
agguuuaaauaucuuaggu

SEQ ID NO: 407376 - RNA, 19 nt, Artificial Sequence
  Description of Artificial Sequence: Synthetic oligonucleotide
  Antisense Strand to SEQ ID NO: 407375
accuaagauauuuaaaccu

SEQ ID NO: 407377 - RNA, 19 nt, Artificial Sequence
  Description of Artificial Sequence: Synthetic oligonucleotide
  Sense Strand Starting at position 1130 of SEQ ID NO: 317277
gacaaacaucuaugcgaag

SEQ ID NO: 407378 - RNA, 19 nt, Artificial Sequence
  Description of Artificial Sequence: Synthetic oligonucleotide
  Antisense Strand to SEQ ID NO: 407377
cuucgcauagauguuuguc

SEQ ID NO: 407379 - RNA, 19 nt, Artificial Sequence
  Description of Artificial Sequence: Synthetic oligonucleotide
  Sense Strand Starting at position 1130 of SEQ ID NO: 317278
acaaacaucuaugcgaagu

SEQ ID NO: 407380 - RNA, 19 nt, Artificial Sequence
  Description of Artificial Sequence: Synthetic oligonucleotide
  Antisense Strand to SEQ ID NO: 407379
acuucgcauagauguuugu

SEQ ID NO: 407381 - RNA, 19 nt, Artificial Sequence
  Description of Artificial Sequence: Synthetic oligonucleotide
  Sense Strand Starting at position 1130 of SEQ ID NO: 317367
uuuggaaugaauugugucu

SEQ ID NO: 407382 - RNA, 19 nt, Artificial Sequence
  Description of Artificial Sequence: Synthetic oligonucleotide
  Antisense Strand to SEQ ID NO: 407381
agacacaauucauuccaaa

SEQ ID NO: 407383 - RNA, 19 nt, Artificial Sequence
  Description of Artificial Sequence: Synthetic oligonucleotide
  Sense Strand Starting at position 1130 of SEQ ID NO: 317484
aguaaagaaugcuugccaa

SEQ ID NO: 407384 - RNA, 19 nt, Artificial Sequence
  Description of Artificial Sequence: Synthetic oligonucleotide
  Antisense Strand to SEQ ID NO: 407383
uuggcaagcauucuuuacu

SEQ ID NO: 407385 - RNA, 19 nt, Artificial Sequence
  Description of Artificial Sequence: Synthetic oligonucleotide
  Sense Strand Starting at position 1130 of SEQ ID NO: 317752
uguaaucuucccuaauguu

SEQ ID NO: 407386 - RNA, 19 nt, Artificial Sequence
  Description of Artificial Sequence: Synthetic oligonucleotide
  Antisense Strand to SEQ ID NO: 407385
aacauuagggaagauuaca

SEQ ID NO: 407387 - RNA, 19 nt, Artificial Sequence
  Description of Artificial Sequence: Synthetic oligonucleotide
  Sense Strand Starting at position 1130 of SEQ ID NO: 317778
gguguuaauacuuaguauc

SEQ ID NO: 407388 - RNA, 19 nt, Artificial Sequence
  Description of Artificial Sequence: Synthetic oligonucleotide
  Antisense Strand to SEQ ID NO: 407387
gauacuaaguauuaacacc

SEQ ID NO: 407389 - RNA, 19 nt, Artificial Sequence
  Description of Artificial Sequence: Synthetic oligonucleotide
  Sense Strand Starting at position 1130 of SEQ ID NO: 317780
uguuaauacuuaguaucca

SEQ ID NO: 407390 - RNA, 19 nt, Artificial Sequence
  Description of Artificial Sequence: Synthetic oligonucleotide
  Antisense Strand to SEQ ID NO: 407389
uggauacuaaguauuaaca

SEQ ID NO: 407391 - RNA, 19 nt, Artificial Sequence
  Description of Artificial Sequence: Synthetic oligonucleotide
  Sense Strand Starting at position 1130 of SEQ ID NO: 317840
gcuuacuugcauuauugaa

SEQ ID NO: 407392 - RNA, 19 nt, Artificial Sequence
  Description of Artificial Sequence: Synthetic oligonucleotide
  Antisense Strand to SEQ ID NO: 407391
uucaauaaugcaaguaagc

SEQ ID NO: 407393 - RNA, 19 nt, Artificial Sequence
  Description of Artificial Sequence: Synthetic oligonucleotide
  Sense Strand Starting at position 1130 of SEQ ID NO: 317943
auucuauaucgagguaauu

SEQ ID NO: 407394 - RNA, 19 nt, Artificial Sequence
  Description of Artificial Sequence: Synthetic oligonucleotide
  Antisense Strand to SEQ ID NO: 407393
aauuaccucgauauagaau

SEQ ID NO: 407395 - RNA, 19 nt, Artificial Sequence
  Description of Artificial Sequence: Synthetic oligonucleotide
  Sense Strand Starting at position 1130 of SEQ ID NO: 318134
ggcaaagcuuauuugucuu

SEQ ID NO: 407396 - RNA, 19 nt, Artificial Sequence
  Description of Artificial Sequence: Synthetic oligonucleotide
  Antisense Strand to SEQ ID NO: 407395
aagacaaauaagcuuugcc

SEQ ID NO: 407397 - RNA, 19 nt, Artificial Sequence
  Description of Artificial Sequence: Synthetic oligonucleotide
  Sense Strand Starting at position 1130 of SEQ ID NO: 318175
guagaagagagugagcuuu

SEQ ID NO: 407398 - RNA, 19 nt, Artificial Sequence
  Description of Artificial Sequence: Synthetic oligonucleotide
  Antisense Strand to SEQ ID NO: 407397
aaagcucacucucuucuac

SEQ ID NO: 407399 - RNA, 19 nt, Artificial Sequence
  Description of Artificial Sequence: Synthetic oligonucleotide
  Sense Strand Starting at position 1130 of SEQ ID NO: 318297
uguacuguccaguacuacu

SEQ ID NO: 407400 - RNA, 19 nt, Artificial Sequence
  Description of Artificial Sequence: Synthetic oligonucleotide
  Antisense Strand to SEQ ID NO: 407399
aguaguacuggacaguaca

SEQ ID NO: 407401 - RNA, 19 nt, Artificial Sequence
  Description of Artificial Sequence: Synthetic oligonucleotide
  Sense Strand Starting at position 1130 of SEQ ID NO: 318896
agaaguuauugguuaucau

SEQ ID NO: 407402 - RNA, 19 nt, Artificial Sequence
  Description of Artificial Sequence: Synthetic oligonucleotide
  Antisense Strand to SEQ ID NO: 407401
augauaaccaauaacuucu

SEQ ID NO: 407403 - RNA, 19 nt, Artificial Sequence
  Description of Artificial Sequence: Synthetic oligonucleotide
  Sense Strand Starting at position 1130 of SEQ ID NO: 318897
gaaguuauugguuaucaua

SEQ ID NO: 407404 - RNA, 19 nt, Artificial Sequence
  Description of Artificial Sequence: Synthetic oligonucleotide
  Antisense Strand to SEQ ID NO: 407403
uaugauaaccaauaacuuc

SEQ ID NO: 407405 - RNA, 19 nt, Artificial Sequence
  Description of Artificial Sequence: Synthetic oligonucleotide
  Sense Strand Starting at position 1130 of SEQ ID NO: 318965
cacauaguucugggagguc

SEQ ID NO: 407406 - RNA, 19 nt, Artificial Sequence
  Description of Artificial Sequence: Synthetic oligonucleotide
  Antisense Strand to SEQ ID NO: 407405
gaccucccagaacuaugug

SEQ ID NO: 407407 - RNA, 19 nt, Artificial Sequence
  Description of Artificial Sequence: Synthetic oligonucleotide
  Sense Strand Starting at position 1130 of SEQ ID NO: 319064
uaaauuuggugccugcuua

SEQ ID NO: 407408 - RNA, 19 nt, Artificial Sequence
  Description of Artificial Sequence: Synthetic oligonucleotide
  Antisense Strand to SEQ ID NO: 407407
uaagcaggcaccaaauuua

SEQ ID NO: 407409 - RNA, 19 nt, Artificial Sequence
  Description of Artificial Sequence: Synthetic oligonucleotide
  Sense Strand Starting at position 1130 of SEQ ID NO: 319065
aaauuuggugccugcuuau

SEQ ID NO: 407410 - RNA, 19 nt, Artificial Sequence
  Description of Artificial Sequence: Synthetic oligonucleotide
  Antisense Strand to SEQ ID NO: 407409
auaagcaggcaccaaauuu

SEQ ID NO: 407411 - RNA, 19 nt, Artificial Sequence
  Description of Artificial Sequence: Synthetic oligonucleotide
  Sense Strand Starting at position 1131 of SEQ ID NO: 315363
gguuaugacuacuugcuaa

SEQ ID NO: 407412 - RNA, 19 nt, Artificial Sequence
  Description of Artificial Sequence: Synthetic oligonucleotide
  Antisense Strand to SEQ ID NO: 407411
uuagcaaguagucauaacc

SEQ ID NO: 407413 - RNA, 19 nt, Artificial Sequence
  Description of Artificial Sequence: Synthetic oligonucleotide
  Sense Strand Starting at position 1131 of SEQ ID NO: 315425
uucguauugagguaaggua

SEQ ID NO: 407414 - RNA, 19 nt, Artificial Sequence
  Description of Artificial Sequence: Synthetic oligonucleotide
  Antisense Strand to SEQ ID NO: 407413
uaccuuaccucaauacgaa

SEQ ID NO: 407415 - RNA, 19 nt, Artificial Sequence
  Description of Artificial Sequence: Synthetic oligonucleotide
  Sense Strand Starting at position 1131 of SEQ ID NO: 315433
gagguaagguaucuuguca

SEQ ID NO: 407416 - RNA, 19 nt, Artificial Sequence
  Description of Artificial Sequence: Synthetic oligonucleotide
  Antisense Strand to SEQ ID NO: 407415
ugacaagauaccuuaccuc

SEQ ID NO: 407417 - RNA, 19 nt, Artificial Sequence
  Description of Artificial Sequence: Synthetic oligonucleotide
  Sense Strand Starting at position 1131 of SEQ ID NO: 315437
uaagguaucuugucauaug

SEQ ID NO: 407418 - RNA, 19 nt, Artificial Sequence
  Description of Artificial Sequence: Synthetic oligonucleotide
  Antisense Strand to SEQ ID NO: 407417
cauaugacaagauaccuua

SEQ ID NO: 407419 - RNA, 19 nt, Artificial Sequence
  Description of Artificial Sequence: Synthetic oligonucleotide
  Sense Strand Starting at position 1131 of SEQ ID NO: 315486
guaugaaucgugucuuugc

SEQ ID NO: 407420 - RNA, 19 nt, Artificial Sequence
  Description of Artificial Sequence: Synthetic oligonucleotide
  Antisense Strand to SEQ ID NO: 407419
gcaaagacacgauucauac

SEQ ID NO: 407421 - RNA, 19 nt, Artificial Sequence
  Description of Artificial Sequence: Synthetic oligonucleotide
  Sense Strand Starting at position 1131 of SEQ ID NO: 315494
cgugucuuugcccauuuga

SEQ ID NO: 407422 - RNA, 19 nt, Artificial Sequence
  Description of Artificial Sequence: Synthetic oligonucleotide
  Antisense Strand to SEQ ID NO: 407421
ucaaaugggcaaagacacg

SEQ ID NO: 407423 - RNA, 19 nt, Artificial Sequence
  Description of Artificial Sequence: Synthetic oligonucleotide
  Sense Strand Starting at position 1131 of SEQ ID NO: 315519
guuuguugaccucaggaau

SEQ ID NO: 407424 - RNA, 19 nt, Artificial Sequence
  Description of Artificial Sequence: Synthetic oligonucleotide
  Antisense Strand to SEQ ID NO: 407423
auuccugaggucaacaaac

SEQ ID NO: 407425 - RNA, 19 nt, Artificial Sequence
  Description of Artificial Sequence: Synthetic oligonucleotide
  Sense Strand Starting at position 1131 of SEQ ID NO: 315566
uugugauaggagugguaua

SEQ ID NO: 407426 - RNA, 19 nt, Artificial Sequence
  Description of Artificial Sequence: Synthetic oligonucleotide
  Antisense Strand to SEQ ID NO: 407425
uauaccacuccuaucacaa

SEQ ID NO: 407427 - RNA, 19 nt, Artificial Sequence
  Description of Artificial Sequence: Synthetic oligonucleotide
  Sense Strand Starting at position 1131 of SEQ ID NO: 315567
ugugauaggagugguauau

SEQ ID NO: 407428 - RNA, 19 nt, Artificial Sequence
  Description of Artificial Sequence: Synthetic oligonucleotide
  Antisense Strand to SEQ ID NO: 407427
auauaccacuccuaucaca

SEQ ID NO: 407429 - RNA, 19 nt, Artificial Sequence
  Description of Artificial Sequence: Synthetic oligonucleotide
  Sense Strand Starting at position 1131 of SEQ ID NO: 315571
auaggagugguauauguca

SEQ ID NO: 407430 - RNA, 19 nt, Artificial Sequence
  Description of Artificial Sequence: Synthetic oligonucleotide
  Antisense Strand to SEQ ID NO: 407429
ugacauauaccacuccuau

SEQ ID NO: 407431 - RNA, 19 nt, Artificial Sequence
  Description of Artificial Sequence: Synthetic oligonucleotide
  Sense Strand Starting at position 1131 of SEQ ID NO: 315573
aggagugguauaugucaua

SEQ ID NO: 407432 - RNA, 19 nt, Artificial Sequence
  Description of Artificial Sequence: Synthetic oligonucleotide
  Antisense Strand to SEQ ID NO: 407431
uaugacauauaccacuccu

SEQ ID NO: 407433 - RNA, 19 nt, Artificial Sequence
  Description of Artificial Sequence: Synthetic oligonucleotide
  Sense Strand Starting at position 1131 of SEQ ID NO: 315580
guauaugucauaugugaca

SEQ ID NO: 407434 - RNA, 19 nt, Artificial Sequence
  Description of Artificial Sequence: Synthetic oligonucleotide
  Antisense Strand to SEQ ID NO: 407433
ugucacauaugacauauac

SEQ ID NO: 407435 - RNA, 19 nt, Artificial Sequence
  Description of Artificial Sequence: Synthetic oligonucleotide
  Sense Strand Starting at position 1131 of SEQ ID NO: 315582
auaugucauaugugacagu

SEQ ID NO: 407436 - RNA, 19 nt, Artificial Sequence
  Description of Artificial Sequence: Synthetic oligonucleotide
  Antisense Strand to SEQ ID NO: 407435
acugucacauaugacauau

SEQ ID NO: 407437 - RNA, 19 nt, Artificial Sequence
  Description of Artificial Sequence: Synthetic oligonucleotide
  Sense Strand Starting at position 1131 of SEQ ID NO: 315620
uguuucuggugauuucuuu

SEQ ID NO: 407438 - RNA, 19 nt, Artificial Sequence
  Description of Artificial Sequence: Synthetic oligonucleotide
  Antisense Strand to SEQ ID NO: 407437
aaagaaaucaccagaaaca

SEQ ID NO: 407439 - RNA, 19 nt, Artificial Sequence
  Description of Artificial Sequence: Synthetic oligonucleotide
  Sense Strand Starting at position 1131 of SEQ ID NO: 315703
gagagauauuuggguagaa

SEQ ID NO: 407440 - RNA, 19 nt, Artificial Sequence
  Description of Artificial Sequence: Synthetic oligonucleotide
  Antisense Strand to SEQ ID NO: 407439
uucuacccaaauaucucuc

SEQ ID NO: 407441 - RNA, 19 nt, Artificial Sequence
  Description of Artificial Sequence: Synthetic oligonucleotide
  Sense Strand Starting at position 1131 of SEQ ID NO: 315807
gaggguaugugucucagag

SEQ ID NO: 407442 - RNA, 19 nt, Artificial Sequence
  Description of Artificial Sequence: Synthetic oligonucleotide
  Antisense Strand to SEQ ID NO: 407441
cucugagacacauacccuc

SEQ ID NO: 407443 - RNA, 19 nt, Artificial Sequence
  Description of Artificial Sequence: Synthetic oligonucleotide
  Sense Strand Starting at position 1131 of SEQ ID NO: 315813
augugucucagaggaauau

SEQ ID NO: 407444 - RNA, 19 nt, Artificial Sequence
  Description of Artificial Sequence: Synthetic oligonucleotide
  Antisense Strand to SEQ ID NO: 407443
auauuccucugagacacau

SEQ ID NO: 407445 - RNA, 19 nt, Artificial Sequence
  Description of Artificial Sequence: Synthetic oligonucleotide
  Sense Strand Starting at position 1131 of SEQ ID NO: 315814
ugugucucagaggaauaug

SEQ ID NO: 407446 - RNA, 19 nt, Artificial Sequence
  Description of Artificial Sequence: Synthetic oligonucleotide
  Antisense Strand to SEQ ID NO: 407445
cauauuccucugagacaca

SEQ ID NO: 407447 - RNA, 19 nt, Artificial Sequence
  Description of Artificial Sequence: Synthetic oligonucleotide
  Sense Strand Starting at position 1131 of SEQ ID NO: 315825
ggaauaugcccuuggguaa

SEQ ID NO: 407448 - RNA, 19 nt, Artificial Sequence
  Description of Artificial Sequence: Synthetic oligonucleotide
  Antisense Strand to SEQ ID NO: 407447
uuacccaagggcauauucc

SEQ ID NO: 407449 - RNA, 19 nt, Artificial Sequence
  Description of Artificial Sequence: Synthetic oligonucleotide
  Sense Strand Starting at position 1131 of SEQ ID NO: 315826
gaauaugcccuuggguaaa

SEQ ID NO: 407450 - RNA, 19 nt, Artificial Sequence
  Description of Artificial Sequence: Synthetic oligonucleotide
  Antisense Strand to SEQ ID NO: 407449
uuuacccaagggcauauuc

SEQ ID NO: 407451 - RNA, 19 nt, Artificial Sequence
  Description of Artificial Sequence: Synthetic oligonucleotide
  Sense Strand Starting at position 1131 of SEQ ID NO: 315836
uuggguaaaggauguuuau

SEQ ID NO: 407452 - RNA, 19 nt, Artificial Sequence
  Description of Artificial Sequence: Synthetic oligonucleotide
  Antisense Strand to SEQ ID NO: 407451
auaaacauccuuuacccaa

SEQ ID NO: 407453 - RNA, 19 nt, Artificial Sequence
  Description of Artificial Sequence: Synthetic oligonucleotide
  Sense Strand Starting at position 1131 of SEQ ID NO: 315839
gguaaaggauguuuauauc

SEQ ID NO: 407454 - RNA, 19 nt, Artificial Sequence
  Description of Artificial Sequence: Synthetic oligonucleotide
  Antisense Strand to SEQ ID NO: 407453
gauauaaacauccuuuacc

SEQ ID NO: 407455 - RNA, 19 nt, Artificial Sequence
  Description of Artificial Sequence: Synthetic oligonucleotide
  Sense Strand Starting at position 1131 of SEQ ID NO: 315873
uuacgucuuccagacuuaa

SEQ ID NO: 407456 - RNA, 19 nt, Artificial Sequence
  Description of Artificial Sequence: Synthetic oligonucleotide
  Antisense Strand to SEQ ID NO: 407455
uuaagucuggaagacguaa

SEQ ID NO: 407457 - RNA, 19 nt, Artificial Sequence
  Description of Artificial Sequence: Synthetic oligonucleotide
  Sense Strand Starting at position 1131 of SEQ ID NO: 315949
gggcucagagucugagaga

SEQ ID NO: 407458 - RNA, 19 nt, Artificial Sequence
  Description of Artificial Sequence: Synthetic oligonucleotide
  Antisense Strand to SEQ ID NO: 407457
ucucucagacucugagccc

SEQ ID NO: 407459 - RNA, 19 nt, Artificial Sequence
  Description of Artificial Sequence: Synthetic oligonucleotide
  Sense Strand Starting at position 1131 of SEQ ID NO: 316491
ucaggaauaaacgguaaca

SEQ ID NO: 407460 - RNA, 19 nt, Artificial Sequence
  Description of Artificial Sequence: Synthetic oligonucleotide
  Antisense Strand to SEQ ID NO: 407459
uguuaccguuuauuccuga

SEQ ID NO: 407461 - RNA, 19 nt, Artificial Sequence
  Description of Artificial Sequence: Synthetic oligonucleotide
  Sense Strand Starting at position 1131 of SEQ ID NO: 316529
gcgugacccgugcuuuacu

SEQ ID NO: 407462 - RNA, 19 nt, Artificial Sequence
  Description of Artificial Sequence: Synthetic oligonucleotide
  Antisense Strand to SEQ ID NO: 407461
aguaaagcacgggucacgc

SEQ ID NO: 407463 - RNA, 19 nt, Artificial Sequence
  Description of Artificial Sequence: Synthetic oligonucleotide
  Sense Strand Starting at position 1131 of SEQ ID NO: 316680
cuaacauaugauugagugu

SEQ ID NO: 407464 - RNA, 19 nt, Artificial Sequence
  Description of Artificial Sequence: Synthetic oligonucleotide
  Antisense Strand to SEQ ID NO: 407463
acacucaaucauauguuag

SEQ ID NO: 407465 - RNA, 19 nt, Artificial Sequence
  Description of Artificial Sequence: Synthetic oligonucleotide
  Sense Strand Starting at position 1131 of SEQ ID NO: 317129
gcuggagaguacuuaccau

SEQ ID NO: 407466 - RNA, 19 nt, Artificial Sequence
  Description of Artificial Sequence: Synthetic oligonucleotide
  Antisense Strand to SEQ ID NO: 407465
augguaaguacucuccagc

SEQ ID NO: 407467 - RNA, 19 nt, Artificial Sequence
  Description of Artificial Sequence: Synthetic oligonucleotide
  Sense Strand Starting at position 1131 of SEQ ID NO: 318622
gugcgcauuucaucaagga

SEQ ID NO: 407468 - RNA, 19 nt, Artificial Sequence
  Description of Artificial Sequence: Synthetic oligonucleotide
  Antisense Strand to SEQ ID NO: 407467
uccuugaugaaaugcgcac

SEQ ID NO: 407469 - RNA, 19 nt, Artificial Sequence
  Description of Artificial Sequence: Synthetic oligonucleotide
  Sense Strand Starting at position 1131 of SEQ ID NO: 318730
cugggaauguuuccuagua

SEQ ID NO: 407470 - RNA, 19 nt, Artificial Sequence
  Description of Artificial Sequence: Synthetic oligonucleotide
  Antisense Strand to SEQ ID NO: 407469
uacuaggaaacauucccag

SEQ ID NO: 407471 - RNA, 19 nt, Artificial Sequence
  Description of Artificial Sequence: Synthetic oligonucleotide
  Sense Strand Starting at position 1131 of SEQ ID NO: 318731
ugggaauguuuccuaguaa

SEQ ID NO: 407472 - RNA, 19 nt, Artificial Sequence
  Description of Artificial Sequence: Synthetic oligonucleotide
  Antisense Strand to SEQ ID NO: 407471
uuacuaggaaacauuccca

SEQ ID NO: 407473 - RNA, 19 nt, Artificial Sequence
  Description of Artificial Sequence: Synthetic oligonucleotide
  Sense Strand Starting at position 1131 of SEQ ID NO: 318744
uaguaaaugugucuacaug

SEQ ID NO: 407474 - RNA, 19 nt, Artificial Sequence
  Description of Artificial Sequence: Synthetic oligonucleotide
  Antisense Strand to SEQ ID NO: 407473
cauguagacacauuuacua

SEQ ID NO: 407475 - RNA, 19 nt, Artificial Sequence
  Description of Artificial Sequence: Synthetic oligonucleotide
  Sense Strand Starting at position 1131 of SEQ ID NO: 318745
aguaaaugugucuacauga

SEQ ID NO: 407476 - RNA, 19 nt, Artificial Sequence
  Description of Artificial Sequence: Synthetic oligonucleotide
  Antisense Strand to SEQ ID NO: 407475
ucauguagacacauuuacu

SEQ ID NO: 407477 - RNA, 19 nt, Artificial Sequence
  Description of Artificial Sequence: Synthetic oligonucleotide
  Sense Strand Starting at position 1131 of SEQ ID NO: 318762
gaauuagcuccuggaggca

SEQ ID NO: 407478 - RNA, 19 nt, Artificial Sequence
  Description of Artificial Sequence: Synthetic oligonucleotide
  Antisense Strand to SEQ ID NO: 407477
ugccuccaggagcuaauuc

SEQ ID NO: 407479 - RNA, 19 nt, Artificial Sequence
  Description of Artificial Sequence: Synthetic oligonucleotide
  Sense Strand Starting at position 1131 of SEQ ID NO: 318899
guaucaagagcuugaccuu

SEQ ID NO: 407480 - RNA, 19 nt, Artificial Sequence
  Description of Artificial Sequence: Synthetic oligonucleotide
  Antisense Strand to SEQ ID NO: 407479
aaggucaagcucuugauac

SEQ ID NO: 407481 - RNA, 19 nt, Artificial Sequence
  Description of Artificial Sequence: Synthetic oligonucleotide
  Sense Strand Starting at position 1131 of SEQ ID NO: 318962
ggauuugcauuccagaaag

SEQ ID NO: 407482 - RNA, 19 nt, Artificial Sequence
  Description of Artificial Sequence: Synthetic oligonucleotide
  Antisense Strand to SEQ ID NO: 407481
cuuucuggaaugcaaaucc

SEQ ID NO: 407483 - RNA, 19 nt, Artificial Sequence
  Description of Artificial Sequence: Synthetic oligonucleotide
  Sense Strand Starting at position 1131 of SEQ ID NO: 319033
acuguaauagucuaagcau

SEQ ID NO: 407484 - RNA, 19 nt, Artificial Sequence
  Description of Artificial Sequence: Synthetic oligonucleotide
  Antisense Strand to SEQ ID NO: 407483
augcuuagacuauuacagu

SEQ ID NO: 407485 - RNA, 19 nt, Artificial Sequence
  Description of Artificial Sequence: Synthetic oligonucleotide
  Sense Strand Starting at position 1131 of SEQ ID NO: 319036
guaauagucuaagcauaag

SEQ ID NO: 407486 - RNA, 19 nt, Artificial Sequence
  Description of Artificial Sequence: Synthetic oligonucleotide
  Antisense Strand to SEQ ID NO: 407485
cuuaugcuuagacuauuac

SEQ ID NO: 407487 - RNA, 19 nt, Artificial Sequence
  Description of Artificial Sequence: Synthetic oligonucleotide
  Sense Strand Starting at position 1131 of SEQ ID NO: 319050
auaagaugaugcuuuauga

SEQ ID NO: 407488 - RNA, 19 nt, Artificial Sequence
  Description of Artificial Sequence: Synthetic oligonucleotide
  Antisense Strand to SEQ ID NO: 407487
ucauaaagcaucaucuuau

SEQ ID NO: 407489 - RNA, 19 nt, Artificial Sequence
  Description of Artificial Sequence: Synthetic oligonucleotide
  Sense Strand Starting at position 1131 of SEQ ID NO: 319099
uguguauugacacguauuu

SEQ ID NO: 407490 - RNA, 19 nt, Artificial Sequence
  Description of Artificial Sequence: Synthetic oligonucleotide
  Antisense Strand to SEQ ID NO: 407489
aaauacgugucaauacaca

SEQ ID NO: 407491 - RNA, 19 nt, Artificial Sequence
  Description of Artificial Sequence: Synthetic oligonucleotide
  Sense Strand Starting at position 1132 of SEQ ID NO: 315238
uuuauacuuggugguaaga

SEQ ID NO: 407492 - RNA, 19 nt, Artificial Sequence
  Description of Artificial Sequence: Synthetic oligonucleotide
  Antisense Strand to SEQ ID NO: 407491
ucuuaccaccaaguauaaa

SEQ ID NO: 407493 - RNA, 19 nt, Artificial Sequence
  Description of Artificial Sequence: Synthetic oligonucleotide
  Sense Strand Starting at position 1132 of SEQ ID NO: 315291
gagauagaauugcuguaca

SEQ ID NO: 407494 - RNA, 19 nt, Artificial Sequence
  Description of Artificial Sequence: Synthetic oligonucleotide
  Antisense Strand to SEQ ID NO: 407493
uguacagcaauucuaucuc

SEQ ID NO: 407495 - RNA, 19 nt, Artificial Sequence
  Description of Artificial Sequence: Synthetic oligonucleotide
  Sense Strand Starting at position 1132 of SEQ ID NO: 315294
auagaauugcuguacaauu

SEQ ID NO: 407496 - RNA, 19 nt, Artificial Sequence
  Description of Artificial Sequence: Synthetic oligonucleotide
  Antisense Strand to SEQ ID NO: 407495
aauuguacagcaauucuau

SEQ ID NO: 407497 - RNA, 19 nt, Artificial Sequence
  Description of Artificial Sequence: Synthetic oligonucleotide
  Sense Strand Starting at position 1132 of SEQ ID NO: 315296
agaauugcuguacaauuau

SEQ ID NO: 407498 - RNA, 19 nt, Artificial Sequence
  Description of Artificial Sequence: Synthetic oligonucleotide
  Antisense Strand to SEQ ID NO: 407497
auaauuguacagcaauucu

SEQ ID NO: 407499 - RNA, 19 nt, Artificial Sequence
  Description of Artificial Sequence: Synthetic oligonucleotide
  Sense Strand Starting at position 1132 of SEQ ID NO: 315372
agaguugaggacugguuga

SEQ ID NO: 407500 - RNA, 19 nt, Artificial Sequence
  Description of Artificial Sequence: Synthetic oligonucleotide
  Antisense Strand to SEQ ID NO: 407499
ucaaccaguccucaacucu

SEQ ID NO: 407501 - RNA, 19 nt, Artificial Sequence
  Description of Artificial Sequence: Synthetic oligonucleotide
  Sense Strand Starting at position 1132 of SEQ ID NO: 315429
cgaauucuagaaugaccau

SEQ ID NO: 407502 - RNA, 19 nt, Artificial Sequence
  Description of Artificial Sequence: Synthetic oligonucleotide
  Antisense Strand to SEQ ID NO: 407501
auggucauucuagaauucg

SEQ ID NO: 407503 - RNA, 19 nt, Artificial Sequence
  Description of Artificial Sequence: Synthetic oligonucleotide
  Sense Strand Starting at position 1132 of SEQ ID NO: 315508
ggauaaugagagugacagu

SEQ ID NO: 407504 - RNA, 19 nt, Artificial Sequence
  Description of Artificial Sequence: Synthetic oligonucleotide
  Antisense Strand to SEQ ID NO: 407503
acugucacucucauuaucc

SEQ ID NO: 407505 - RNA, 19 nt, Artificial Sequence
  Description of Artificial Sequence: Synthetic oligonucleotide
  Sense Strand Starting at position 1132 of SEQ ID NO: 315555
ggucuaguuaucuauguac

SEQ ID NO: 407506 - RNA, 19 nt, Artificial Sequence
  Description of Artificial Sequence: Synthetic oligonucleotide
  Antisense Strand to SEQ ID NO: 407505
guacauagauaacuagacc

SEQ ID NO: 407507 - RNA, 19 nt, Artificial Sequence
  Description of Artificial Sequence: Synthetic oligonucleotide
  Sense Strand Starting at position 1132 of SEQ ID NO: 315557
ucuaguuaucuauguacaa

SEQ ID NO: 407508 - RNA, 19 nt, Artificial Sequence
  Description of Artificial Sequence: Synthetic oligonucleotide
  Antisense Strand to SEQ ID NO: 407507
uuguacauagauaacuaga

SEQ ID NO: 407509 - RNA, 19 nt, Artificial Sequence
  Description of Artificial Sequence: Synthetic oligonucleotide
  Sense Strand Starting at position 1132 of SEQ ID NO: 315558
cuaguuaucuauguacaaa

SEQ ID NO: 407510 - RNA, 19 nt, Artificial Sequence
  Description of Artificial Sequence: Synthetic oligonucleotide
  Antisense Strand to SEQ ID NO: 407509
uuuguacauagauaacuag

SEQ ID NO: 407511 - RNA, 19 nt, Artificial Sequence
  Description of Artificial Sequence: Synthetic oligonucleotide
  Sense Strand Starting at position 1132 of SEQ ID NO: 315590
uugagaaagucaccgaaau

SEQ ID NO: 407512 - RNA, 19 nt, Artificial Sequence
  Description of Artificial Sequence: Synthetic oligonucleotide
  Antisense Strand to SEQ ID NO: 407511
auuucggugacuuucucaa

SEQ ID NO: 407513 - RNA, 19 nt, Artificial Sequence
  Description of Artificial Sequence: Synthetic oligonucleotide
  Sense Strand Starting at position 1132 of SEQ ID NO: 315900
augucacuuuaguugaaac

SEQ ID NO: 407514 - RNA, 19 nt, Artificial Sequence
  Description of Artificial Sequence: Synthetic oligonucleotide
  Antisense Strand to SEQ ID NO: 407513
guuucaacuaaagugacau

SEQ ID NO: 407515 - RNA, 19 nt, Artificial Sequence
  Description of Artificial Sequence: Synthetic oligonucleotide
  Sense Strand Starting at position 1132 of SEQ ID NO: 315902
gucacuuuaguugaaacaa

SEQ ID NO: 407516 - RNA, 19 nt, Artificial Sequence
  Description of Artificial Sequence: Synthetic oligonucleotide
  Antisense Strand to SEQ ID NO: 407515
uuguuucaacuaaagugac

SEQ ID NO: 407517 - RNA, 19 nt, Artificial Sequence
  Description of Artificial Sequence: Synthetic oligonucleotide
  Sense Strand Starting at position 1132 of SEQ ID NO: 316027
ggugaagaaguuugguuac

SEQ ID NO: 407518 - RNA, 19 nt, Artificial Sequence
  Description of Artificial Sequence: Synthetic oligonucleotide
  Antisense Strand to SEQ ID NO: 407517
guaaccaaacuucuucacc

SEQ ID NO: 407519 - RNA, 19 nt, Artificial Sequence
  Description of Artificial Sequence: Synthetic oligonucleotide
  Sense Strand Starting at position 1132 of SEQ ID NO: 316029
ugaagaaguuugguuacuu

SEQ ID NO: 407520 - RNA, 19 nt, Artificial Sequence
  Description of Artificial Sequence: Synthetic oligonucleotide
  Antisense Strand to SEQ ID NO: 407519
aaguaaccaaacuucuuca

SEQ ID NO: 407521 - RNA, 19 nt, Artificial Sequence
  Description of Artificial Sequence: Synthetic oligonucleotide
  Sense Strand Starting at position 1132 of SEQ ID NO: 316030
gaagaaguuugguuacuua

SEQ ID NO: 407522 - RNA, 19 nt, Artificial Sequence
  Description of Artificial Sequence: Synthetic oligonucleotide
  Antisense Strand to SEQ ID NO: 407521
uaaguaaccaaacuucuuc

SEQ ID NO: 407523 - RNA, 19 nt, Artificial Sequence
  Description of Artificial Sequence: Synthetic oligonucleotide
  Sense Strand Starting at position 1132 of SEQ ID NO: 316033
gaaguuugguuacuuauaa

SEQ ID NO: 407524 - RNA, 19 nt, Artificial Sequence
  Description of Artificial Sequence: Synthetic oligonucleotide
  Antisense Strand to SEQ ID NO: 407523
uuauaaguaaccaaacuuc

SEQ ID NO: 407525 - RNA, 19 nt, Artificial Sequence
  Description of Artificial Sequence: Synthetic oligonucleotide
  Sense Strand Starting at position 1132 of SEQ ID NO: 316058
acuuaaguaucuuugagaa

SEQ ID NO: 407526 - RNA, 19 nt, Artificial Sequence
  Description of Artificial Sequence: Synthetic oligonucleotide
  Antisense Strand to SEQ ID NO: 407525
uucucaaagauacuuaagu

SEQ ID NO: 407527 - RNA, 19 nt, Artificial Sequence
  Description of Artificial Sequence: Synthetic oligonucleotide
  Sense Strand Starting at position 1132 of SEQ ID NO: 316112
aaauguauuccuuguugga

SEQ ID NO: 407528 - RNA, 19 nt, Artificial Sequence
  Description of Artificial Sequence: Synthetic oligonucleotide
  Antisense Strand to SEQ ID NO: 407527
uccaacaaggaauacauuu

SEQ ID NO: 407529 - RNA, 19 nt, Artificial Sequence
  Description of Artificial Sequence: Synthetic oligonucleotide
  Sense Strand Starting at position 1132 of SEQ ID NO: 316114
auguauuccuuguuggaaa

SEQ ID NO: 407530 - RNA, 19 nt, Artificial Sequence
  Description of Artificial Sequence: Synthetic oligonucleotide
  Antisense Strand to SEQ ID NO: 407529
uuuccaacaaggaauacau

SEQ ID NO: 407531 - RNA, 19 nt, Artificial Sequence
  Description of Artificial Sequence: Synthetic oligonucleotide
  Sense Strand Starting at position 1132 of SEQ ID NO: 316161
uguacuauugccuaaagua

SEQ ID NO: 407532 - RNA, 19 nt, Artificial Sequence
  Description of Artificial Sequence: Synthetic oligonucleotide
  Antisense Strand to SEQ ID NO: 407531
uacuuuaggcaauaguaca

SEQ ID NO: 407533 - RNA, 19 nt, Artificial Sequence
  Description of Artificial Sequence: Synthetic oligonucleotide
  Sense Strand Starting at position 1132 of SEQ ID NO: 316299
ggacuacacgaagguaaau

SEQ ID NO: 407534 - RNA, 19 nt, Artificial Sequence
  Description of Artificial Sequence: Synthetic oligonucleotide
  Antisense Strand to SEQ ID NO: 407533
auuuaccuucguguagucc

SEQ ID NO: 407535 - RNA, 19 nt, Artificial Sequence
  Description of Artificial Sequence: Synthetic oligonucleotide
  Sense Strand Starting at position 1132 of SEQ ID NO: 316377
uuggcuucuacugagugaa

SEQ ID NO: 407536 - RNA, 19 nt, Artificial Sequence
  Description of Artificial Sequence: Synthetic oligonucleotide
  Antisense Strand to SEQ ID NO: 407535
uucacucaguagaagccaa

SEQ ID NO: 407537 - RNA, 19 nt, Artificial Sequence
  Description of Artificial Sequence: Synthetic oligonucleotide
  Sense Strand Starting at position 1132 of SEQ ID NO: 316379
ggcuucuacugagugaaac

SEQ ID NO: 407538 - RNA, 19 nt, Artificial Sequence
  Description of Artificial Sequence: Synthetic oligonucleotide
  Antisense Strand to SEQ ID NO: 407537
guuucacucaguagaagcc

SEQ ID NO: 407539 - RNA, 19 nt, Artificial Sequence
  Description of Artificial Sequence: Synthetic oligonucleotide
  Sense Strand Starting at position 1132 of SEQ ID NO: 316380
gcuucuacugagugaaaca

SEQ ID NO: 407540 - RNA, 19 nt, Artificial Sequence
  Description of Artificial Sequence: Synthetic oligonucleotide
  Antisense Strand to SEQ ID NO: 407539
uguuucacucaguagaagc

SEQ ID NO: 407541 - RNA, 19 nt, Artificial Sequence
  Description of Artificial Sequence: Synthetic oligonucleotide
  Sense Strand Starting at position 1132 of SEQ ID NO: 316400
cuuaguuucccacauagug

SEQ ID NO: 407542 - RNA, 19 nt, Artificial Sequence
  Description of Artificial Sequence: Synthetic oligonucleotide
  Antisense Strand to SEQ ID NO: 407541
cacuaugugggaaacuaag

SEQ ID NO: 407543 - RNA, 19 nt, Artificial Sequence
  Description of Artificial Sequence: Synthetic oligonucleotide
  Sense Strand Starting at position 1132 of SEQ ID NO: 316574
ggaagaugcuuaccuccca

SEQ ID NO: 407544 - RNA, 19 nt, Artificial Sequence
  Description of Artificial Sequence: Synthetic oligonucleotide
  Antisense Strand to SEQ ID NO: 407543
ugggagguaagcaucuucc

SEQ ID NO: 407545 - RNA, 19 nt, Artificial Sequence
  Description of Artificial Sequence: Synthetic oligonucleotide
  Sense Strand Starting at position 1132 of SEQ ID NO: 316749
gcuaauuccggugauuaau

SEQ ID NO: 407546 - RNA, 19 nt, Artificial Sequence
  Description of Artificial Sequence: Synthetic oligonucleotide
  Antisense Strand to SEQ ID NO: 407545
auuaaucaccggaauuagc

SEQ ID NO: 407547 - RNA, 19 nt, Artificial Sequence
  Description of Artificial Sequence: Synthetic oligonucleotide
  Sense Strand Starting at position 1132 of SEQ ID NO: 316751
uaauuccggugauuaauua

SEQ ID NO: 407548 - RNA, 19 nt, Artificial Sequence
  Description of Artificial Sequence: Synthetic oligonucleotide
  Antisense Strand to SEQ ID NO: 407547
uaauuaaucaccggaauua

SEQ ID NO: 407549 - RNA, 19 nt, Artificial Sequence
  Description of Artificial Sequence: Synthetic oligonucleotide
  Sense Strand Starting at position 1132 of SEQ ID NO: 316752
aauuccggugauuaauuau

SEQ ID NO: 407550 - RNA, 19 nt, Artificial Sequence
  Description of Artificial Sequence: Synthetic oligonucleotide
  Antisense Strand to SEQ ID NO: 407549
auaauuaaucaccggaauu

SEQ ID NO: 407551 - RNA, 19 nt, Artificial Sequence
  Description of Artificial Sequence: Synthetic oligonucleotide
  Sense Strand Starting at position 1132 of SEQ ID NO: 316755
uccggugauuaauuauuga

SEQ ID NO: 407552 - RNA, 19 nt, Artificial Sequence
  Description of Artificial Sequence: Synthetic oligonucleotide
  Antisense Strand to SEQ ID NO: 407551
ucaauaauuaaucaccgga

SEQ ID NO: 407553 - RNA, 19 nt, Artificial Sequence
  Description of Artificial Sequence: Synthetic oligonucleotide
  Sense Strand Starting at position 1132 of SEQ ID NO: 316758
ggugauuaauuauugacaa

SEQ ID NO: 407554 - RNA, 19 nt, Artificial Sequence
  Description of Artificial Sequence: Synthetic oligonucleotide
  Antisense Strand to SEQ ID NO: 407553
uugucaauaauuaaucacc

SEQ ID NO: 407555 - RNA, 19 nt, Artificial Sequence
  Description of Artificial Sequence: Synthetic oligonucleotide
  Sense Strand Starting at position 1132 of SEQ ID NO: 317285
gcguuaaagcgcucaggga

SEQ ID NO: 407556 - RNA, 19 nt, Artificial Sequence
  Description of Artificial Sequence: Synthetic oligonucleotide
  Antisense Strand to SEQ ID NO: 407555
ucccugagcgcuuuaacgc

SEQ ID NO: 407557 - RNA, 19 nt, Artificial Sequence
  Description of Artificial Sequence: Synthetic oligonucleotide
  Sense Strand Starting at position 1132 of SEQ ID NO: 317588
cuaggagguuaaucguuaa

SEQ ID NO: 407558 - RNA, 19 nt, Artificial Sequence
  Description of Artificial Sequence: Synthetic oligonucleotide
  Antisense Strand to SEQ ID NO: 407557
uuaacgauuaaccuccuag

SEQ ID NO: 407559 - RNA, 19 nt, Artificial Sequence
  Description of Artificial Sequence: Synthetic oligonucleotide
  Sense Strand Starting at position 1132 of SEQ ID NO: 317670
cucacaagugcagagaauu

SEQ ID NO: 407560 - RNA, 19 nt, Artificial Sequence
  Description of Artificial Sequence: Synthetic oligonucleotide
  Antisense Strand to SEQ ID NO: 407559
aauucucugcacuugugag

SEQ ID NO: 407561 - RNA, 19 nt, Artificial Sequence
  Description of Artificial Sequence: Synthetic oligonucleotide
  Sense Strand Starting at position 1132 of SEQ ID NO: 318109
uuguguuaaagcgcgaauu

SEQ ID NO: 407562 - RNA, 19 nt, Artificial Sequence
  Description of Artificial Sequence: Synthetic oligonucleotide
  Antisense Strand to SEQ ID NO: 407561
aauucgcgcuuuaacacaa

SEQ ID NO: 407563 - RNA, 19 nt, Artificial Sequence
  Description of Artificial Sequence: Synthetic oligonucleotide
  Sense Strand Starting at position 1132 of SEQ ID NO: 318425
ggucacauuccuuaucuuu

SEQ ID NO: 407564 - RNA, 19 nt, Artificial Sequence
  Description of Artificial Sequence: Synthetic oligonucleotide
  Antisense Strand to SEQ ID NO: 407563
aaagauaaggaaugugacc

SEQ ID NO: 407565 - RNA, 19 nt, Artificial Sequence
  Description of Artificial Sequence: Synthetic oligonucleotide
  Sense Strand Starting at position 1132 of SEQ ID NO: 318466
caauauuggcaggguagau

SEQ ID NO: 407566 - RNA, 19 nt, Artificial Sequence
  Description of Artificial Sequence: Synthetic oligonucleotide
  Antisense Strand to SEQ ID NO: 407565
aucuacccugccaauauug

SEQ ID NO: 407567 - RNA, 19 nt, Artificial Sequence
  Description of Artificial Sequence: Synthetic oligonucleotide
  Sense Strand Starting at position 1132 of SEQ ID NO: 318688
uggcaaagguuugugaaau

SEQ ID NO: 407568 - RNA, 19 nt, Artificial Sequence
  Description of Artificial Sequence: Synthetic oligonucleotide
  Antisense Strand to SEQ ID NO: 407567
auuucacaaaccuuugcca

SEQ ID NO: 407569 - RNA, 19 nt, Artificial Sequence
  Description of Artificial Sequence: Synthetic oligonucleotide
  Sense Strand Starting at position 1132 of SEQ ID NO: 318694
agguuugugaaauggauau

SEQ ID NO: 407570 - RNA, 19 nt, Artificial Sequence
  Description of Artificial Sequence: Synthetic oligonucleotide
  Antisense Strand to SEQ ID NO: 407569
auauccauuucacaaaccu

SEQ ID NO: 407571 - RNA, 19 nt, Artificial Sequence
  Description of Artificial Sequence: Synthetic oligonucleotide
  Sense Strand Starting at position 1133 of SEQ ID NO: 315241
ugugcauaaccucaaagau

SEQ ID NO: 407572 - RNA, 19 nt, Artificial Sequence
  Description of Artificial Sequence: Synthetic oligonucleotide
  Antisense Strand to SEQ ID NO: 407571
aucuuugagguuaugcaca

SEQ ID NO: 407573 - RNA, 19 nt, Artificial Sequence
  Description of Artificial Sequence: Synthetic oligonucleotide
  Sense Strand Starting at position 1133 of SEQ ID NO: 315493
cccagucuggccugaauga

SEQ ID NO: 407574 - RNA, 19 nt, Artificial Sequence
  Description of Artificial Sequence: Synthetic oligonucleotide
  Antisense Strand to SEQ ID NO: 407573
ucauucaggccagacuggg

SEQ ID NO: 407575 - RNA, 19 nt, Artificial Sequence
  Description of Artificial Sequence: Synthetic oligonucleotide
  Sense Strand Starting at position 1133 of SEQ ID NO: 315526
cgcauuuagccaugcaauu

SEQ ID NO: 407576 - RNA, 19 nt, Artificial Sequence
  Description of Artificial Sequence: Synthetic oligonucleotide
  Antisense Strand to SEQ ID NO: 407575
aauugcauggcuaaaugcg

SEQ ID NO: 407577 - RNA, 19 nt, Artificial Sequence
  Description of Artificial Sequence: Synthetic oligonucleotide
  Sense Strand Starting at position 1133 of SEQ ID NO: 315589
cggcuucugaaagaaguau

SEQ ID NO: 407578 - RNA, 19 nt, Artificial Sequence
  Description of Artificial Sequence: Synthetic oligonucleotide
  Antisense Strand to SEQ ID NO: 407577
auacuucuuucagaagccg

SEQ ID NO: 407579 - RNA, 19 nt, Artificial Sequence
  Description of Artificial Sequence: Synthetic oligonucleotide
  Sense Strand Starting at position 1133 of SEQ ID NO: 315783
ugcacacugcgagauaaua

SEQ ID NO: 407580 - RNA, 19 nt, Artificial Sequence
  Description of Artificial Sequence: Synthetic oligonucleotide
  Antisense Strand to SEQ ID NO: 407579
uauuaucucgcagugugca

SEQ ID NO: 407581 - RNA, 19 nt, Artificial Sequence
  Description of Artificial Sequence: Synthetic oligonucleotide
  Sense Strand Starting at position 1133 of SEQ ID NO: 315841
ugcauuagucuggaucaau

SEQ ID NO: 407582 - RNA, 19 nt, Artificial Sequence
  Description of Artificial Sequence: Synthetic oligonucleotide
  Antisense Strand to SEQ ID NO: 407581
auugauccagacuaaugca

SEQ ID NO: 407583 - RNA, 19 nt, Artificial Sequence
  Description of Artificial Sequence: Synthetic oligonucleotide
  Sense Strand Starting at position 1133 of SEQ ID NO: 315870
acaguuaauccauggcaac

SEQ ID NO: 407584 - RNA, 19 nt, Artificial Sequence
  Description of Artificial Sequence: Synthetic oligonucleotide
  Antisense Strand to SEQ ID NO: 407583
guugccauggauuaacugu

SEQ ID NO: 407585 - RNA, 19 nt, Artificial Sequence
  Description of Artificial Sequence: Synthetic oligonucleotide
  Sense Strand Starting at position 1133 of SEQ ID NO: 315958
ugaauuccggcccagagaa

SEQ ID NO: 407586 - RNA, 19 nt, Artificial Sequence
  Description of Artificial Sequence: Synthetic oligonucleotide
  Antisense Strand to SEQ ID NO: 407585
uucucugggccggaauuca

SEQ ID NO: 407587 - RNA, 19 nt, Artificial Sequence
  Description of Artificial Sequence: Synthetic oligonucleotide
  Sense Strand Starting at position 1133 of SEQ ID NO: 316248
gcgcuaucugcaguugaaa

SEQ ID NO: 407588 - RNA, 19 nt, Artificial Sequence
  Description of Artificial Sequence: Synthetic oligonucleotide
  Antisense Strand to SEQ ID NO: 407587
uuucaacugcagauagcgc

SEQ ID NO: 407589 - RNA, 19 nt, Artificial Sequence
  Description of Artificial Sequence: Synthetic oligonucleotide
  Sense Strand Starting at position 1133 of SEQ ID NO: 316477
ucuugaacuuaguuugaga

SEQ ID NO: 407590 - RNA, 19 nt, Artificial Sequence
  Description of Artificial Sequence: Synthetic oligonucleotide
  Antisense Strand to SEQ ID NO: 407589
ucucaaacuaaguucaaga

SEQ ID NO: 407591 - RNA, 19 nt, Artificial Sequence
  Description of Artificial Sequence: Synthetic oligonucleotide
  Sense Strand Starting at position 1133 of SEQ ID NO: 316683
ucuuuacuugccgagaaau

SEQ ID NO: 407592 - RNA, 19 nt, Artificial Sequence
  Description of Artificial Sequence: Synthetic oligonucleotide
  Antisense Strand to SEQ ID NO: 407591
auuucucggcaaguaaaga

SEQ ID NO: 407593 - RNA, 19 nt, Artificial Sequence
  Description of Artificial Sequence: Synthetic oligonucleotide
  Sense Strand Starting at position 1133 of SEQ ID NO: 316695
gagaaauggcucuaguagc

SEQ ID NO: 407594 - RNA, 19 nt, Artificial Sequence
  Description of Artificial Sequence: Synthetic oligonucleotide
  Antisense Strand to SEQ ID NO: 407593
gcuacuagagccauuucuc

SEQ ID NO: 407595 - RNA, 19 nt, Artificial Sequence
  Description of Artificial Sequence: Synthetic oligonucleotide
  Sense Strand Starting at position 1133 of SEQ ID NO: 317107
ucugauguccagugaggau

SEQ ID NO: 407596 - RNA, 19 nt, Artificial Sequence
  Description of Artificial Sequence: Synthetic oligonucleotide
  Antisense Strand to SEQ ID NO: 407595
auccucacuggacaucaga

SEQ ID NO: 407597 - RNA, 19 nt, Artificial Sequence
  Description of Artificial Sequence: Synthetic oligonucleotide
  Sense Strand Starting at position 1133 of SEQ ID NO: 317358
aaguaaucggguugguaag

SEQ ID NO: 407598 - RNA, 19 nt, Artificial Sequence
  Description of Artificial Sequence: Synthetic oligonucleotide
  Antisense Strand to SEQ ID NO: 407597
cuuaccaacccgauuacuu

SEQ ID NO: 407599 - RNA, 19 nt, Artificial Sequence
  Description of Artificial Sequence: Synthetic oligonucleotide
  Sense Strand Starting at position 1133 of SEQ ID NO: 317512
gucacucuacugggauagu

SEQ ID NO: 407600 - RNA, 19 nt, Artificial Sequence
  Description of Artificial Sequence: Synthetic oligonucleotide
  Antisense Strand to SEQ ID NO: 407599
acuaucccaguagagugac

SEQ ID NO: 407601 - RNA, 19 nt, Artificial Sequence
  Description of Artificial Sequence: Synthetic oligonucleotide
  Sense Strand Starting at position 1133 of SEQ ID NO: 317597
agacgaugcgaggaguuaa

SEQ ID NO: 407602 - RNA, 19 nt, Artificial Sequence
  Description of Artificial Sequence: Synthetic oligonucleotide
  Antisense Strand to SEQ ID NO: 407601
uuaacuccucgcaucgucu

SEQ ID NO: 407603 - RNA, 19 nt, Artificial Sequence
  Description of Artificial Sequence: Synthetic oligonucleotide
  Sense Strand Starting at position 1133 of SEQ ID NO: 317721
agccucaguuuccuagaua

SEQ ID NO: 407604 - RNA, 19 nt, Artificial Sequence
  Description of Artificial Sequence: Synthetic oligonucleotide
  Antisense Strand to SEQ ID NO: 407603
uaucuaggaaacugaggcu

SEQ ID NO: 407605 - RNA, 19 nt, Artificial Sequence
  Description of Artificial Sequence: Synthetic oligonucleotide
  Sense Strand Starting at position 1133 of SEQ ID NO: 317724
cucaguuuccuagauagua

SEQ ID NO: 407606 - RNA, 19 nt, Artificial Sequence
  Description of Artificial Sequence: Synthetic oligonucleotide
  Antisense Strand to SEQ ID NO: 407605
uacuaucuaggaaacugag

SEQ ID NO: 407607 - RNA, 19 nt, Artificial Sequence
  Description of Artificial Sequence: Synthetic oligonucleotide
  Sense Strand Starting at position 1133 of SEQ ID NO: 317752
cucuuuggaggcuauguua

SEQ ID NO: 407608 - RNA, 19 nt, Artificial Sequence
  Description of Artificial Sequence: Synthetic oligonucleotide
  Antisense Strand to SEQ ID NO: 407607
uaacauagccuccaaagag

SEQ ID NO: 407609 - RNA, 19 nt, Artificial Sequence
  Description of Artificial Sequence: Synthetic oligonucleotide
  Sense Strand Starting at position 1133 of SEQ ID NO: 317796
gaaugcuuacuauaggucu

SEQ ID NO: 407610 - RNA, 19 nt, Artificial Sequence
  Description of Artificial Sequence: Synthetic oligonucleotide
  Antisense Strand to SEQ ID NO: 407609
agaccuauaguaagcauuc

SEQ ID NO: 407611 - RNA, 19 nt, Artificial Sequence
  Description of Artificial Sequence: Synthetic oligonucleotide
  Sense Strand Starting at position 1133 of SEQ ID NO: 317964
aguagaaagcauugugaau

SEQ ID NO: 407612 - RNA, 19 nt, Artificial Sequence
  Description of Artificial Sequence: Synthetic oligonucleotide
  Antisense Strand to SEQ ID NO: 407611
auucacaaugcuuucuacu

SEQ ID NO: 407613 - RNA, 19 nt, Artificial Sequence
  Description of Artificial Sequence: Synthetic oligonucleotide
  Sense Strand Starting at position 1133 of SEQ ID NO: 317993
ggaguuguacgaggcaaga

SEQ ID NO: 407614 - RNA, 19 nt, Artificial Sequence
  Description of Artificial Sequence: Synthetic oligonucleotide
  Antisense Strand to SEQ ID NO: 407613
ucuugccucguacaacucc

SEQ ID NO: 407615 - RNA, 19 nt, Artificial Sequence
  Description of Artificial Sequence: Synthetic oligonucleotide
  Sense Strand Starting at position 1133 of SEQ ID NO: 318285
ggagcagaggcucagauau

SEQ ID NO: 407616 - RNA, 19 nt, Artificial Sequence
  Description of Artificial Sequence: Synthetic oligonucleotide
  Antisense Strand to SEQ ID NO: 407615
auaucugagccucugcucc

SEQ ID NO: 407617 - RNA, 19 nt, Artificial Sequence
  Description of Artificial Sequence: Synthetic oligonucleotide
  Sense Strand Starting at position 1133 of SEQ ID NO: 318354
uccugcauucuacaaggga

SEQ ID NO: 407618 - RNA, 19 nt, Artificial Sequence
  Description of Artificial Sequence: Synthetic oligonucleotide
  Antisense Strand to SEQ ID NO: 407617
ucccuuguagaaugcagga

SEQ ID NO: 407619 - RNA, 19 nt, Artificial Sequence
  Description of Artificial Sequence: Synthetic oligonucleotide
  Sense Strand Starting at position 1133 of SEQ ID NO: 318438
acuaaagagucgcugauca

SEQ ID NO: 407620 - RNA, 19 nt, Artificial Sequence
  Description of Artificial Sequence: Synthetic oligonucleotide
  Antisense Strand to SEQ ID NO: 407619
ugaucagcgacucuuuagu

SEQ ID NO: 407621 - RNA, 19 nt, Artificial Sequence
  Description of Artificial Sequence: Synthetic oligonucleotide
  Sense Strand Starting at position 1133 of SEQ ID NO: 318440
uaaagagucgcugaucacu

SEQ ID NO: 407622 - RNA, 19 nt, Artificial Sequence
  Description of Artificial Sequence: Synthetic oligonucleotide
  Antisense Strand to SEQ ID NO: 407621
agugaucagcgacucuuua

SEQ ID NO: 407623 - RNA, 19 nt, Artificial Sequence
  Description of Artificial Sequence: Synthetic oligonucleotide
  Sense Strand Starting at position 1133 of SEQ ID NO: 318467
auaugcuaagauugucacu

SEQ ID NO: 407624 - RNA, 19 nt, Artificial Sequence
  Description of Artificial Sequence: Synthetic oligonucleotide
  Antisense Strand to SEQ ID NO: 407623
agugacaaucuuagcauau

SEQ ID NO: 407625 - RNA, 19 nt, Artificial Sequence
  Description of Artificial Sequence: Synthetic oligonucleotide
  Sense Strand Starting at position 1133 of SEQ ID NO: 318469
augcuaagauugucacuaa

SEQ ID NO: 407626 - RNA, 19 nt, Artificial Sequence
  Description of Artificial Sequence: Synthetic oligonucleotide
  Antisense Strand to SEQ ID NO: 407625
uuagugacaaucuuagcau

SEQ ID NO: 407627 - RNA, 19 nt, Artificial Sequence
  Description of Artificial Sequence: Synthetic oligonucleotide
  Sense Strand Starting at position 1133 of SEQ ID NO: 318472
cuaagauugucacuaaugu

SEQ ID NO: 407628 - RNA, 19 nt, Artificial Sequence
  Description of Artificial Sequence: Synthetic oligonucleotide
  Antisense Strand to SEQ ID NO: 407627
acauuagugacaaucuuag

SEQ ID NO: 407629 - RNA, 19 nt, Artificial Sequence
  Description of Artificial Sequence: Synthetic oligonucleotide
  Sense Strand Starting at position 1133 of SEQ ID NO: 318473
uaagauugucacuaaugug

SEQ ID NO: 407630 - RNA, 19 nt, Artificial Sequence
  Description of Artificial Sequence: Synthetic oligonucleotide
  Antisense Strand to SEQ ID NO: 407629
cacauuagugacaaucuua

SEQ ID NO: 407631 - RNA, 19 nt, Artificial Sequence
  Description of Artificial Sequence: Synthetic oligonucleotide
  Sense Strand Starting at position 1133 of SEQ ID NO: 318580
auaaaugauucuguuugga

SEQ ID NO: 407632 - RNA, 19 nt, Artificial Sequence
  Description of Artificial Sequence: Synthetic oligonucleotide
  Antisense Strand to SEQ ID NO: 407631
uccaaacagaaucauuuau

SEQ ID NO: 407633 - RNA, 19 nt, Artificial Sequence
  Description of Artificial Sequence: Synthetic oligonucleotide
  Sense Strand Starting at position 1133 of SEQ ID NO: 318582
aaaugauucuguuuggacu

SEQ ID NO: 407634 - RNA, 19 nt, Artificial Sequence
  Description of Artificial Sequence: Synthetic oligonucleotide
  Antisense Strand to SEQ ID NO: 407633
aguccaaacagaaucauuu

SEQ ID NO: 407635 - RNA, 19 nt, Artificial Sequence
  Description of Artificial Sequence: Synthetic oligonucleotide
  Sense Strand Starting at position 1133 of SEQ ID NO: 318708
ggauguucuccuggagcac

SEQ ID NO: 407636 - RNA, 19 nt, Artificial Sequence
  Description of Artificial Sequence: Synthetic oligonucleotide
  Antisense Strand to SEQ ID NO: 407635
gugcuccaggagaacaucc

SEQ ID NO: 407637 - RNA, 19 nt, Artificial Sequence
  Description of Artificial Sequence: Synthetic oligonucleotide
  Sense Strand Starting at position 1133 of SEQ ID NO: 318709
gauguucuccuggagcaca

SEQ ID NO: 407638 - RNA, 19 nt, Artificial Sequence
  Description of Artificial Sequence: Synthetic oligonucleotide
  Antisense Strand to SEQ ID NO: 407637
ugugcuccaggagaacauc

SEQ ID NO: 407639 - RNA, 19 nt, Artificial Sequence
  Description of Artificial Sequence: Synthetic oligonucleotide
  Sense Strand Starting at position 1133 of SEQ ID NO: 318788
agaaguccaacuggugaau

SEQ ID NO: 407640 - RNA, 19 nt, Artificial Sequence
  Description of Artificial Sequence: Synthetic oligonucleotide
  Antisense Strand to SEQ ID NO: 407639
auucaccaguuggacuucu

SEQ ID NO: 407641 - RNA, 19 nt, Artificial Sequence
  Description of Artificial Sequence: Synthetic oligonucleotide
  Sense Strand Starting at position 1133 of SEQ ID NO: 318791
aguccaacuggugaaucau

SEQ ID NO: 407642 - RNA, 19 nt, Artificial Sequence
  Description of Artificial Sequence: Synthetic oligonucleotide
  Antisense Strand to SEQ ID NO: 407641
augauucaccaguuggacu

SEQ ID NO: 407643 - RNA, 19 nt, Artificial Sequence
  Description of Artificial Sequence: Synthetic oligonucleotide
  Sense Strand Starting at position 1133 of SEQ ID NO: 319103
gagccuugagcucaugaga

SEQ ID NO: 407644 - RNA, 19 nt, Artificial Sequence
  Description of Artificial Sequence: Synthetic oligonucleotide
  Antisense Strand to SEQ ID NO: 407643
ucucaugagcucaaggcuc

SEQ ID NO: 407645 - RNA, 19 nt, Artificial Sequence
  Description of Artificial Sequence: Synthetic oligonucleotide
  Sense Strand Starting at position 1133 of SEQ ID NO: 319106
ccuugagcucaugagaacu

SEQ ID NO: 407646 - RNA, 19 nt, Artificial Sequence
  Description of Artificial Sequence: Synthetic oligonucleotide
  Antisense Strand to SEQ ID NO: 407645
aguucucaugagcucaagg

SEQ ID NO: 407647 - RNA, 19 nt, Artificial Sequence
  Description of Artificial Sequence: Synthetic oligonucleotide
  Sense Strand Starting at position 1133 of SEQ ID NO: 319160
guggcaggaacucaguaaa

SEQ ID NO: 407648 - RNA, 19 nt, Artificial Sequence
  Description of Artificial Sequence: Synthetic oligonucleotide
  Antisense Strand to SEQ ID NO: 407647
uuuacugaguuccugccac

SEQ ID NO: 407649 - RNA, 19 nt, Artificial Sequence
  Description of Artificial Sequence: Synthetic oligonucleotide
  Sense Strand Starting at position 1133 of SEQ ID NO: 319163
gcaggaacucaguaaaugu

SEQ ID NO: 407650 - RNA, 19 nt, Artificial Sequence
  Description of Artificial Sequence: Synthetic oligonucleotide
  Antisense Strand to SEQ ID NO: 407649
acauuuacugaguuccugc

SEQ ID NO: 407651 - RNA, 19 nt, Artificial Sequence
  Description of Artificial Sequence: Synthetic oligonucleotide
  Sense Strand Starting at position 1134 of SEQ ID NO: 316352
cauauacagucgugagaaa

SEQ ID NO: 407652 - RNA, 19 nt, Artificial Sequence
  Description of Artificial Sequence: Synthetic oligonucleotide
  Antisense Strand to SEQ ID NO: 407651
uuucucacgacuguauaug

SEQ ID NO: 407653 - RNA, 19 nt, Artificial Sequence
  Description of Artificial Sequence: Synthetic oligonucleotide
  Sense Strand Starting at position 1134 of SEQ ID NO: 316353
auauacagucgugagaaau

SEQ ID NO: 407654 - RNA, 19 nt, Artificial Sequence
  Description of Artificial Sequence: Synthetic oligonucleotide
  Antisense Strand to SEQ ID NO: 407653
auuucucacgacuguauau

SEQ ID NO: 407655 - RNA, 19 nt, Artificial Sequence
  Description of Artificial Sequence: Synthetic oligonucleotide
  Sense Strand Starting at position 1134 of SEQ ID NO: 316386
gaacaaugguuggaauaug

SEQ ID NO: 407656 - RNA, 19 nt, Artificial Sequence
  Description of Artificial Sequence: Synthetic oligonucleotide
  Antisense Strand to SEQ ID NO: 407655
cauauuccaaccauuguuc

SEQ ID NO: 407657 - RNA, 19 nt, Artificial Sequence
  Description of Artificial Sequence: Synthetic oligonucleotide
  Sense Strand Starting at position 1134 of SEQ ID NO: 316417
aaauaugaccaguguggca

SEQ ID NO: 407658 - RNA, 19 nt, Artificial Sequence
  Description of Artificial Sequence: Synthetic oligonucleotide
  Antisense Strand to SEQ ID NO: 407657
ugccacacuggucauauuu

SEQ ID NO: 407659 - RNA, 19 nt, Artificial Sequence
  Description of Artificial Sequence: Synthetic oligonucleotide
  Sense Strand Starting at position 1134 of SEQ ID NO: 316513
agggaaugguuucacggaa

SEQ ID NO: 407660 - RNA, 19 nt, Artificial Sequence
  Description of Artificial Sequence: Synthetic oligonucleotide
  Antisense Strand to SEQ ID NO: 407659
uuccgugaaaccauucccu

SEQ ID NO: 407661 - RNA, 19 nt, Artificial Sequence
  Description of Artificial Sequence: Synthetic oligonucleotide
  Sense Strand Starting at position 1134 of SEQ ID NO: 316601
uuauuagagucucauaagg

SEQ ID NO: 407662 - RNA, 19 nt, Artificial Sequence
  Description of Artificial Sequence: Synthetic oligonucleotide
  Antisense Strand to SEQ ID NO: 407661
ccuuaugagacucuaauaa

SEQ ID NO: 407663 - RNA, 19 nt, Artificial Sequence
  Description of Artificial Sequence: Synthetic oligonucleotide
  Sense Strand Starting at position 1134 of SEQ ID NO: 316647
ggacuccugcucuaacuca

SEQ ID NO: 407664 - RNA, 19 nt, Artificial Sequence
  Description of Artificial Sequence: Synthetic oligonucleotide
  Antisense Strand to SEQ ID NO: 407663
ugaguuagagcaggagucc

SEQ ID NO: 407665 - RNA, 19 nt, Artificial Sequence
  Description of Artificial Sequence: Synthetic oligonucleotide
  Sense Strand Starting at position 1134 of SEQ ID NO: 316665
acuuaauaaacguggaugu

SEQ ID NO: 407666 - RNA, 19 nt, Artificial Sequence
  Description of Artificial Sequence: Synthetic oligonucleotide
  Antisense Strand to SEQ ID NO: 407665
acauccacguuuauuaagu

SEQ ID NO: 407667 - RNA, 19 nt, Artificial Sequence
  Description of Artificial Sequence: Synthetic oligonucleotide
  Sense Strand Starting at position 1134 of SEQ ID NO: 316867
ccuagaacggcucgaugua

SEQ ID NO: 407668 - RNA, 19 nt, Artificial Sequence
  Description of Artificial Sequence: Synthetic oligonucleotide
  Antisense Strand to SEQ ID NO: 407667
uacaucgagccguucuagg

SEQ ID NO: 407669 - RNA, 19 nt, Artificial Sequence
  Description of Artificial Sequence: Synthetic oligonucleotide
  Sense Strand Starting at position 1134 of SEQ ID NO: 316967
ccaguaaucuuccuaaagg

SEQ ID NO: 407670 - RNA, 19 nt, Artificial Sequence
  Description of Artificial Sequence: Synthetic oligonucleotide
  Antisense Strand to SEQ ID NO: 407669
ccuuuaggaagauuacugg

SEQ ID NO: 407671 - RNA, 19 nt, Artificial Sequence
  Description of Artificial Sequence: Synthetic oligonucleotide
  Sense Strand Starting at position 1134 of SEQ ID NO: 316968
caguaaucuuccuaaaggg

SEQ ID NO: 407672 - RNA, 19 nt, Artificial Sequence
  Description of Artificial Sequence: Synthetic oligonucleotide
  Antisense Strand to SEQ ID NO: 407671
cccuuuaggaagauuacug

SEQ ID NO: 407673 - RNA, 19 nt, Artificial Sequence
  Description of Artificial Sequence: Synthetic oligonucleotide
  Sense Strand Starting at position 1134 of SEQ ID NO: 317005
ggccuaauggcgcaaguua

SEQ ID NO: 407674 - RNA, 19 nt, Artificial Sequence
  Description of Artificial Sequence: Synthetic oligonucleotide
  Antisense Strand to SEQ ID NO: 407673
uaacuugcgccauuaggcc

SEQ ID NO: 407675 - RNA, 19 nt, Artificial Sequence
  Description of Artificial Sequence: Synthetic oligonucleotide
  Sense Strand Starting at position 1134 of SEQ ID NO: 317013
ggcgcaaguuauucuuaca

SEQ ID NO: 407676 - RNA, 19 nt, Artificial Sequence
  Description of Artificial Sequence: Synthetic oligonucleotide
  Antisense Strand to SEQ ID NO: 407675
uguaagaauaacuugcgcc

SEQ ID NO: 407677 - RNA, 19 nt, Artificial Sequence
  Description of Artificial Sequence: Synthetic oligonucleotide
  Sense Strand Starting at position 1134 of SEQ ID NO: 317559
cucaaauucuguucgucuu

SEQ ID NO: 407678 - RNA, 19 nt, Artificial Sequence
  Description of Artificial Sequence: Synthetic oligonucleotide
  Antisense Strand to SEQ ID NO: 407677
aagacgaacagaauuugag

SEQ ID NO: 407679 - RNA, 19 nt, Artificial Sequence
  Description of Artificial Sequence: Synthetic oligonucleotide
  Sense Strand Starting at position 1134 of SEQ ID NO: 317599
agauuagcccuuuguucuu

SEQ ID NO: 407680 - RNA, 19 nt, Artificial Sequence
  Description of Artificial Sequence: Synthetic oligonucleotide
  Antisense Strand to SEQ ID NO: 407679
aagaacaaagggcuaaucu

SEQ ID NO: 407681 - RNA, 19 nt, Artificial Sequence
  Description of Artificial Sequence: Synthetic oligonucleotide
  Sense Strand Starting at position 1134 of SEQ ID NO: 317604
agcccuuuguucuuucuua

SEQ ID NO: 407682 - RNA, 19 nt, Artificial Sequence
  Description of Artificial Sequence: Synthetic oligonucleotide
  Antisense Strand to SEQ ID NO: 407681
uaagaaagaacaaagggcu

SEQ ID NO: 407683 - RNA, 19 nt, Artificial Sequence
  Description of Artificial Sequence: Synthetic oligonucleotide
  Sense Strand Starting at position 1134 of SEQ ID NO: 317706
ugcuacuagguuuguggaa

SEQ ID NO: 407684 - RNA, 19 nt, Artificial Sequence
  Description of Artificial Sequence: Synthetic oligonucleotide
  Antisense Strand to SEQ ID NO: 407683
uuccacaaaccuaguagca

SEQ ID NO: 407685 - RNA, 19 nt, Artificial Sequence
  Description of Artificial Sequence: Synthetic oligonucleotide
  Sense Strand Starting at position 1134 of SEQ ID NO: 317707
gcuacuagguuuguggaau

SEQ ID NO: 407686 - RNA, 19 nt, Artificial Sequence
  Description of Artificial Sequence: Synthetic oligonucleotide
  Antisense Strand to SEQ ID NO: 407685
auuccacaaaccuaguagc

SEQ ID NO: 407687 - RNA, 19 nt, Artificial Sequence
  Description of Artificial Sequence: Synthetic oligonucleotide
  Sense Strand Starting at position 1134 of SEQ ID NO: 317708
cuacuagguuuguggaaug

SEQ ID NO: 407688 - RNA, 19 nt, Artificial Sequence
  Description of Artificial Sequence: Synthetic oligonucleotide
  Antisense Strand to SEQ ID NO: 407687
cauuccacaaaccuaguag

SEQ ID NO: 407689 - RNA, 19 nt, Artificial Sequence
  Description of Artificial Sequence: Synthetic oligonucleotide
  Sense Strand Starting at position 1134 of SEQ ID NO: 317713
agguuuguggaauguugga

SEQ ID NO: 407690 - RNA, 19 nt, Artificial Sequence
  Description of Artificial Sequence: Synthetic oligonucleotide
  Antisense Strand to SEQ ID NO: 407689
uccaacauuccacaaaccu

SEQ ID NO: 407691 - RNA, 19 nt, Artificial Sequence
  Description of Artificial Sequence: Synthetic oligonucleotide
  Sense Strand Starting at position 1134 of SEQ ID NO: 317825
uacuuuaaccgguaaguug

SEQ ID NO: 407692 - RNA, 19 nt, Artificial Sequence
  Description of Artificial Sequence: Synthetic oligonucleotide
  Antisense Strand to SEQ ID NO: 407691
caacuuaccgguuaaagua

SEQ ID NO: 407693 - RNA, 19 nt, Artificial Sequence
  Description of Artificial Sequence: Synthetic oligonucleotide
  Sense Strand Starting at position 1134 of SEQ ID NO: 317840
guuggagguccacgagauu

SEQ ID NO: 407694 - RNA, 19 nt, Artificial Sequence
  Description of Artificial Sequence: Synthetic oligonucleotide
  Antisense Strand to SEQ ID NO: 407693
aaucucguggaccuccaac

SEQ ID NO: 407695 - RNA, 19 nt, Artificial Sequence
  Description of Artificial Sequence: Synthetic oligonucleotide
  Sense Strand Starting at position 1134 of SEQ ID NO: 317903
cagugaguagccuaucugu

SEQ ID NO: 407696 - RNA, 19 nt, Artificial Sequence
  Description of Artificial Sequence: Synthetic oligonucleotide
  Antisense Strand to SEQ ID NO: 407695
acagauaggcuacucacug

SEQ ID NO: 407697 - RNA, 19 nt, Artificial Sequence
  Description of Artificial Sequence: Synthetic oligonucleotide
  Sense Strand Starting at position 1134 of SEQ ID NO: 317936
augccagcuuuaucaugua

SEQ ID NO: 407698 - RNA, 19 nt, Artificial Sequence
  Description of Artificial Sequence: Synthetic oligonucleotide
  Antisense Strand to SEQ ID NO: 407697
uacaugauaaagcuggcau

SEQ ID NO: 407699 - RNA, 19 nt, Artificial Sequence
  Description of Artificial Sequence: Synthetic oligonucleotide
  Sense Strand Starting at position 1134 of SEQ ID NO: 318059
auaagcuucguugaauaua

SEQ ID NO: 407700 - RNA, 19 nt, Artificial Sequence
  Description of Artificial Sequence: Synthetic oligonucleotide
  Antisense Strand to SEQ ID NO: 407699
uauauucaacgaagcuuau

SEQ ID NO: 407701 - RNA, 19 nt, Artificial Sequence
  Description of Artificial Sequence: Synthetic oligonucleotide
  Sense Strand Starting at position 1134 of SEQ ID NO: 318170
ccuauacugugguccuuau

SEQ ID NO: 407702 - RNA, 19 nt, Artificial Sequence
  Description of Artificial Sequence: Synthetic oligonucleotide
  Antisense Strand to SEQ ID NO: 407701
auaaggaccacaguauagg

SEQ ID NO: 407703 - RNA, 19 nt, Artificial Sequence
  Description of Artificial Sequence: Synthetic oligonucleotide
  Sense Strand Starting at position 1134 of SEQ ID NO: 318657
uuguuaucucuguauaccu

SEQ ID NO: 407704 - RNA, 19 nt, Artificial Sequence
  Description of Artificial Sequence: Synthetic oligonucleotide
  Antisense Strand to SEQ ID NO: 407703
agguauacagagauaacaa

SEQ ID NO: 407705 - RNA, 19 nt, Artificial Sequence
  Description of Artificial Sequence: Synthetic oligonucleotide
  Sense Strand Starting at position 1134 of SEQ ID NO: 318709
agugaaaucguguaauauu

SEQ ID NO: 407706 - RNA, 19 nt, Artificial Sequence
  Description of Artificial Sequence: Synthetic oligonucleotide
  Antisense Strand to SEQ ID NO: 407705
aauauuacacgauuucacu

SEQ ID NO: 407707 - RNA, 19 nt, Artificial Sequence
  Description of Artificial Sequence: Synthetic oligonucleotide
  Sense Strand Starting at position 1134 of SEQ ID NO: 318784
ggcaaauggcaagauauuc

SEQ ID NO: 407708 - RNA, 19 nt, Artificial Sequence
  Description of Artificial Sequence: Synthetic oligonucleotide
  Antisense Strand to SEQ ID NO: 407707
gaauaucuugccauuugcc

SEQ ID NO: 407709 - RNA, 19 nt, Artificial Sequence
  Description of Artificial Sequence: Synthetic oligonucleotide
  Sense Strand Starting at position 1134 of SEQ ID NO: 318894
ucccuauauuggcugcaau

SEQ ID NO: 407710 - RNA, 19 nt, Artificial Sequence
  Description of Artificial Sequence: Synthetic oligonucleotide
  Antisense Strand to SEQ ID NO: 407709
auugcagccaauauaggga

SEQ ID NO: 407711 - RNA, 19 nt, Artificial Sequence
  Description of Artificial Sequence: Synthetic oligonucleotide
  Sense Strand Starting at position 1134 of SEQ ID NO: 318905
gcugcaaugcugcaaugaa

SEQ ID NO: 407712 - RNA, 19 nt, Artificial Sequence
  Description of Artificial Sequence: Synthetic oligonucleotide
  Antisense Strand to SEQ ID NO: 407711
uucauugcagcauugcagc

SEQ ID NO: 407713 - RNA, 19 nt, Artificial Sequence
  Description of Artificial Sequence: Synthetic oligonucleotide
  Sense Strand Starting at position 1134 of SEQ ID NO: 318991
auuguugggucauauguag

SEQ ID NO: 407714 - RNA, 19 nt, Artificial Sequence
  Description of Artificial Sequence: Synthetic oligonucleotide
  Antisense Strand to SEQ ID NO: 407713
cuacauaugacccaacaau

SEQ ID NO: 407715 - RNA, 19 nt, Artificial Sequence
  Description of Artificial Sequence: Synthetic oligonucleotide
  Sense Strand Starting at position 1134 of SEQ ID NO: 318998
ggucauauguagcccuauu

SEQ ID NO: 407716 - RNA, 19 nt, Artificial Sequence
  Description of Artificial Sequence: Synthetic oligonucleotide
  Antisense Strand to SEQ ID NO: 407715
aauagggcuacauaugacc

SEQ ID NO: 407717 - RNA, 19 nt, Artificial Sequence
  Description of Artificial Sequence: Synthetic oligonucleotide
  Sense Strand Starting at position 1134 of SEQ ID NO: 319056
ggcuguacauucucaccaa

SEQ ID NO: 407718 - RNA, 19 nt, Artificial Sequence
  Description of Artificial Sequence: Synthetic oligonucleotide
  Antisense Strand to SEQ ID NO: 407717
uuggugagaauguacagcc

SEQ ID NO: 407719 - RNA, 19 nt, Artificial Sequence
  Description of Artificial Sequence: Synthetic oligonucleotide
  Sense Strand Starting at position 1134 of SEQ ID NO: 319106
cuuauccacguuuaugauu

SEQ ID NO: 407720 - RNA, 19 nt, Artificial Sequence
  Description of Artificial Sequence: Synthetic oligonucleotide
  Antisense Strand to SEQ ID NO: 407719
aaucauaaacguggauaag

SEQ ID NO: 407721 - RNA, 19 nt, Artificial Sequence
  Description of Artificial Sequence: Synthetic oligonucleotide
  Sense Strand Starting at position 1134 of SEQ ID NO: 319109
auccacguuuaugauuaau

SEQ ID NO: 407722 - RNA, 19 nt, Artificial Sequence
  Description of Artificial Sequence: Synthetic oligonucleotide
  Antisense Strand to SEQ ID NO: 407721
auuaaucauaaacguggau

SEQ ID NO: 407723 - RNA, 19 nt, Artificial Sequence
  Description of Artificial Sequence: Synthetic oligonucleotide
  Sense Strand Starting at position 1134 of SEQ ID NO: 319111
ccacguuuaugauuaauau

SEQ ID NO: 407724 - RNA, 19 nt, Artificial Sequence
  Description of Artificial Sequence: Synthetic oligonucleotide
  Antisense Strand to SEQ ID NO: 407723
auauuaaucauaaacgugg

SEQ ID NO: 407725 - RNA, 19 nt, Artificial Sequence
  Description of Artificial Sequence: Synthetic oligonucleotide
  Sense Strand Starting at position 1134 of SEQ ID NO: 319154
uccuauuauuaucuagugu

SEQ ID NO: 407726 - RNA, 19 nt, Artificial Sequence
  Description of Artificial Sequence: Synthetic oligonucleotide
  Antisense Strand to SEQ ID NO: 407725
acacuagauaauaauagga

SEQ ID NO: 407727 - RNA, 19 nt, Artificial Sequence
  Description of Artificial Sequence: Synthetic oligonucleotide
  Sense Strand Starting at position 1134 of SEQ ID NO: 319161
auuaucuagugucucauaa

SEQ ID NO: 407728 - RNA, 19 nt, Artificial Sequence
  Description of Artificial Sequence: Synthetic oligonucleotide
  Antisense Strand to SEQ ID NO: 407727
uuaugagacacuagauaau

SEQ ID NO: 407729 - RNA, 19 nt, Artificial Sequence
  Description of Artificial Sequence: Synthetic oligonucleotide
  Sense Strand Starting at position 1134 of SEQ ID NO: 319165
ucuagugucucauaauggu

SEQ ID NO: 407730 - RNA, 19 nt, Artificial Sequence
  Description of Artificial Sequence: Synthetic oligonucleotide
  Antisense Strand to SEQ ID NO: 407729
accauuaugagacacuaga

SEQ ID NO: 407731 - RNA, 19 nt, Artificial Sequence
  Description of Artificial Sequence: Synthetic oligonucleotide
  Sense Strand Starting at position 1135 of SEQ ID NO: 315270
uuacccuuggguugagaau

SEQ ID NO: 407732 - RNA, 19 nt, Artificial Sequence
  Description of Artificial Sequence: Synthetic oligonucleotide
  Antisense Strand to SEQ ID NO: 407731
auucucaacccaaggguaa

SEQ ID NO: 407733 - RNA, 19 nt, Artificial Sequence
  Description of Artificial Sequence: Synthetic oligonucleotide
  Sense Strand Starting at position 1135 of SEQ ID NO: 315277
uggguugagaauuacugua

SEQ ID NO: 407734 - RNA, 19 nt, Artificial Sequence
  Description of Artificial Sequence: Synthetic oligonucleotide
  Antisense Strand to SEQ ID NO: 407733
uacaguaauucucaaccca

SEQ ID NO: 407735 - RNA, 19 nt, Artificial Sequence
  Description of Artificial Sequence: Synthetic oligonucleotide
  Sense Strand Starting at position 1135 of SEQ ID NO: 315381
gccagagucagauguaaag

SEQ ID NO: 407736 - RNA, 19 nt, Artificial Sequence
  Description of Artificial Sequence: Synthetic oligonucleotide
  Antisense Strand to SEQ ID NO: 407735
cuuuacaucugacucuggc

SEQ ID NO: 407737 - RNA, 19 nt, Artificial Sequence
  Description of Artificial Sequence: Synthetic oligonucleotide
  Sense Strand Starting at position 1135 of SEQ ID NO: 315853
gggcguaauaccuggacua

SEQ ID NO: 407738 - RNA, 19 nt, Artificial Sequence
  Description of Artificial Sequence: Synthetic oligonucleotide
  Antisense Strand to SEQ ID NO: 407737
uaguccagguauuacgccc

SEQ ID NO: 407739 - RNA, 19 nt, Artificial Sequence
  Description of Artificial Sequence: Synthetic oligonucleotide
  Sense Strand Starting at position 1135 of SEQ ID NO: 315854
ggcguaauaccuggacuag

SEQ ID NO: 407740 - RNA, 19 nt, Artificial Sequence
  Description of Artificial Sequence: Synthetic oligonucleotide
  Antisense Strand to SEQ ID NO: 407739
cuaguccagguauuacgcc

SEQ ID NO: 407741 - RNA, 19 nt, Artificial Sequence
  Description of Artificial Sequence: Synthetic oligonucleotide
  Sense Strand Starting at position 1135 of SEQ ID NO: 315855
gcguaauaccuggacuaga

SEQ ID NO: 407742 - RNA, 19 nt, Artificial Sequence
  Description of Artificial Sequence: Synthetic oligonucleotide
  Antisense Strand to SEQ ID NO: 407741
ucuaguccagguauuacgc

SEQ ID NO: 407743 - RNA, 19 nt, Artificial Sequence
  Description of Artificial Sequence: Synthetic oligonucleotide
  Sense Strand Starting at position 1135 of SEQ ID NO: 315909
uuugguaucuacuuaggga

SEQ ID NO: 407744 - RNA, 19 nt, Artificial Sequence
  Description of Artificial Sequence: Synthetic oligonucleotide
  Antisense Strand to SEQ ID NO: 407743
ucccuaaguagauaccaaa

SEQ ID NO: 407745 - RNA, 19 nt, Artificial Sequence
  Description of Artificial Sequence: Synthetic oligonucleotide
  Sense Strand Starting at position 1135 of SEQ ID NO: 315917
cuacuuagggagugcauua

SEQ ID NO: 407746 - RNA, 19 nt, Artificial Sequence
  Description of Artificial Sequence: Synthetic oligonucleotide
  Antisense Strand to SEQ ID NO: 407745
uaaugcacucccuaaguag

SEQ ID NO: 407747 - RNA, 19 nt, Artificial Sequence
  Description of Artificial Sequence: Synthetic oligonucleotide
  Sense Strand Starting at position 1135 of SEQ ID NO: 315966
acuuguaaauccuuuguuu

SEQ ID NO: 407748 - RNA, 19 nt, Artificial Sequence
  Description of Artificial Sequence: Synthetic oligonucleotide
  Antisense Strand to SEQ ID NO: 407747
aaacaaaggauuuacaagu

SEQ ID NO: 407749 - RNA, 19 nt, Artificial Sequence
  Description of Artificial Sequence: Synthetic oligonucleotide
  Sense Strand Starting at position 1135 of SEQ ID NO: 315968
uuguaaauccuuuguuugu

SEQ ID NO: 407750 - RNA, 19 nt, Artificial Sequence
  Description of Artificial Sequence: Synthetic oligonucleotide
  Antisense Strand to SEQ ID NO: 407749
acaaacaaaggauuuacaa

SEQ ID NO: 407751 - RNA, 19 nt, Artificial Sequence
  Description of Artificial Sequence: Synthetic oligonucleotide
  Sense Strand Starting at position 1135 of SEQ ID NO: 316121
cuaaucuccugagcuuagu

SEQ ID NO: 407752 - RNA, 19 nt, Artificial Sequence
  Description of Artificial Sequence: Synthetic oligonucleotide
  Antisense Strand to SEQ ID NO: 407751
acuaagcucaggagauuag

SEQ ID NO: 407753 - RNA, 19 nt, Artificial Sequence
  Description of Artificial Sequence: Synthetic oligonucleotide
  Sense Strand Starting at position 1135 of SEQ ID NO: 316182
cauagcuuugagugaagga

SEQ ID NO: 407754 - RNA, 19 nt, Artificial Sequence
  Description of Artificial Sequence: Synthetic oligonucleotide
  Antisense Strand to SEQ ID NO: 407753
uccuucacucaaagcuaug

SEQ ID NO: 407755 - RNA, 19 nt, Artificial Sequence
  Description of Artificial Sequence: Synthetic oligonucleotide
  Sense Strand Starting at position 1135 of SEQ ID NO: 316199
gaggcuuugcagugagaau

SEQ ID NO: 407756 - RNA, 19 nt, Artificial Sequence
  Description of Artificial Sequence: Synthetic oligonucleotide
  Antisense Strand to SEQ ID NO: 407755
auucucacugcaaagccuc

SEQ ID NO: 407757 - RNA, 19 nt, Artificial Sequence
  Description of Artificial Sequence: Synthetic oligonucleotide
  Sense Strand Starting at position 1135 of SEQ ID NO: 316200
aggcuuugcagugagaaua

SEQ ID NO: 407758 - RNA, 19 nt, Artificial Sequence
  Description of Artificial Sequence: Synthetic oligonucleotide
  Antisense Strand to SEQ ID NO: 407757
uauucucacugcaaagccu

SEQ ID NO: 407759 - RNA, 19 nt, Artificial Sequence
  Description of Artificial Sequence: Synthetic oligonucleotide
  Sense Strand Starting at position 1135 of SEQ ID NO: 316260
cgcaguguacucguuguau

SEQ ID NO: 407760 - RNA, 19 nt, Artificial Sequence
  Description of Artificial Sequence: Synthetic oligonucleotide
  Antisense Strand to SEQ ID NO: 407759
auacaacgaguacacugcg

SEQ ID NO: 407761 - RNA, 19 nt, Artificial Sequence
  Description of Artificial Sequence: Synthetic oligonucleotide
  Sense Strand Starting at position 1135 of SEQ ID NO: 316271
cguuguauggucuugggca

SEQ ID NO: 407762 - RNA, 19 nt, Artificial Sequence
  Description of Artificial Sequence: Synthetic oligonucleotide
  Antisense Strand to SEQ ID NO: 407761
ugcccaagaccauacaacg

SEQ ID NO: 407763 - RNA, 19 nt, Artificial Sequence
  Description of Artificial Sequence: Synthetic oligonucleotide
  Sense Strand Starting at position 1135 of SEQ ID NO: 316293
uggcaaacucuuugagccu

SEQ ID NO: 407764 - RNA, 19 nt, Artificial Sequence
  Description of Artificial Sequence: Synthetic oligonucleotide
  Antisense Strand to SEQ ID NO: 407763
aggcucaaagaguuugcca

SEQ ID NO: 407765 - RNA, 19 nt, Artificial Sequence
  Description of Artificial Sequence: Synthetic oligonucleotide
  Sense Strand Starting at position 1135 of SEQ ID NO: 316356
caagacucuuaguucgaga

SEQ ID NO: 407766 - RNA, 19 nt, Artificial Sequence
  Description of Artificial Sequence: Synthetic oligonucleotide
  Antisense Strand to SEQ ID NO: 407765
ucucgaacuaagagucuug

SEQ ID NO: 407767 - RNA, 19 nt, Artificial Sequence
  Description of Artificial Sequence: Synthetic oligonucleotide
  Sense Strand Starting at position 1135 of SEQ ID NO: 316358
agacucuuaguucgagaaa

SEQ ID NO: 407768 - RNA, 19 nt, Artificial Sequence
  Description of Artificial Sequence: Synthetic oligonucleotide
  Antisense Strand to SEQ ID NO: 407767
uuucucgaacuaagagucu

SEQ ID NO: 407769 - RNA, 19 nt, Artificial Sequence
  Description of Artificial Sequence: Synthetic oligonucleotide
  Sense Strand Starting at position 1135 of SEQ ID NO: 316361
cucuuaguucgagaaagca

SEQ ID NO: 407770 - RNA, 19 nt, Artificial Sequence
  Description of Artificial Sequence: Synthetic oligonucleotide
  Antisense Strand to SEQ ID NO: 407769
ugcuuucucgaacuaagag

SEQ ID NO: 407771 - RNA, 19 nt, Artificial Sequence
  Description of Artificial Sequence: Synthetic oligonucleotide
  Sense Strand Starting at position 1135 of SEQ ID NO: 316517
gcugaaagaucagagaaag

SEQ ID NO: 407772 - RNA, 19 nt, Artificial Sequence
  Description of Artificial Sequence: Synthetic oligonucleotide
  Antisense Strand to SEQ ID NO: 407771
cuuucucugaucuuucagc

SEQ ID NO: 407773 - RNA, 19 nt, Artificial Sequence
  Description of Artificial Sequence: Synthetic oligonucleotide
  Sense Strand Starting at position 1135 of SEQ ID NO: 316689
ggcgucgcgcuccuguaau

SEQ ID NO: 407774 - RNA, 19 nt, Artificial Sequence
  Description of Artificial Sequence: Synthetic oligonucleotide
  Antisense Strand to SEQ ID NO: 407773
auuacaggagcgcgacgcc

SEQ ID NO: 407775 - RNA, 19 nt, Artificial Sequence
  Description of Artificial Sequence: Synthetic oligonucleotide
  Sense Strand Starting at position 1135 of SEQ ID NO: 316923
ugauuucgugcccaucuca

SEQ ID NO: 407776 - RNA, 19 nt, Artificial Sequence
  Description of Artificial Sequence: Synthetic oligonucleotide
  Antisense Strand to SEQ ID NO: 407775
ugagaugggcacgaaauca

SEQ ID NO: 407777 - RNA, 19 nt, Artificial Sequence
  Description of Artificial Sequence: Synthetic oligonucleotide
  Sense Strand Starting at position 1135 of SEQ ID NO: 317791
gagcaugaacauuggcuau

SEQ ID NO: 407778 - RNA, 19 nt, Artificial Sequence
  Description of Artificial Sequence: Synthetic oligonucleotide
  Antisense Strand to SEQ ID NO: 407777
auagccaauguucaugcuc

SEQ ID NO: 407779 - RNA, 19 nt, Artificial Sequence
  Description of Artificial Sequence: Synthetic oligonucleotide
  Sense Strand Starting at position 1135 of SEQ ID NO: 317797
gaacauuggcuauggcauu

SEQ ID NO: 407780 - RNA, 19 nt, Artificial Sequence
  Description of Artificial Sequence: Synthetic oligonucleotide
  Antisense Strand to SEQ ID NO: 407779
aaugccauagccaauguuc

SEQ ID NO: 407781 - RNA, 19 nt, Artificial Sequence
  Description of Artificial Sequence: Synthetic oligonucleotide
  Sense Strand Starting at position 1135 of SEQ ID NO: 317854
ugguauuagcuuuacucuu

SEQ ID NO: 407782 - RNA, 19 nt, Artificial Sequence
  Description of Artificial Sequence: Synthetic oligonucleotide
  Antisense Strand to SEQ ID NO: 407781
aagaguaaagcuaauacca

SEQ ID NO: 407783 - RNA, 19 nt, Artificial Sequence
  Description of Artificial Sequence: Synthetic oligonucleotide
  Sense Strand Starting at position 1135 of SEQ ID NO: 317861
agcuuuacucuuugcugaa

SEQ ID NO: 407784 - RNA, 19 nt, Artificial Sequence
  Description of Artificial Sequence: Synthetic oligonucleotide
  Antisense Strand to SEQ ID NO: 407783
uucagcaaagaguaaagcu

SEQ ID NO: 407785 - RNA, 19 nt, Artificial Sequence
  Description of Artificial Sequence: Synthetic oligonucleotide
  Sense Strand Starting at position 1135 of SEQ ID NO: 317862
gcuuuacucuuugcugaac

SEQ ID NO: 407786 - RNA, 19 nt, Artificial Sequence
  Description of Artificial Sequence: Synthetic oligonucleotide
  Antisense Strand to SEQ ID NO: 407785
guucagcaaagaguaaagc

SEQ ID NO: 407787 - RNA, 19 nt, Artificial Sequence
  Description of Artificial Sequence: Synthetic oligonucleotide
  Sense Strand Starting at position 1135 of SEQ ID NO: 317868
cucuuugcugaacgagaaa

SEQ ID NO: 407788 - RNA, 19 nt, Artificial Sequence
  Description of Artificial Sequence: Synthetic oligonucleotide
  Antisense Strand to SEQ ID NO: 407787
uuucucguucagcaaagag

SEQ ID NO: 407789 - RNA, 19 nt, Artificial Sequence
  Description of Artificial Sequence: Synthetic oligonucleotide
  Sense Strand Starting at position 1135 of SEQ ID NO: 317898
ccacauagccuggacuuau

SEQ ID NO: 407790 - RNA, 19 nt, Artificial Sequence
  Description of Artificial Sequence: Synthetic oligonucleotide
  Antisense Strand to SEQ ID NO: 407789
auaaguccaggcuaugugg

SEQ ID NO: 407791 - RNA, 19 nt, Artificial Sequence
  Description of Artificial Sequence: Synthetic oligonucleotide
  Sense Strand Starting at position 1135 of SEQ ID NO: 317926
gaauaaugcuuauuagguu

SEQ ID NO: 407792 - RNA, 19 nt, Artificial Sequence
  Description of Artificial Sequence: Synthetic oligonucleotide
  Antisense Strand to SEQ ID NO: 407791
aaccuaauaagcauuauuc

SEQ ID NO: 407793 - RNA, 19 nt, Artificial Sequence
  Description of Artificial Sequence: Synthetic oligonucleotide
  Sense Strand Starting at position 1135 of SEQ ID NO: 318009
gcccaagguuccuuagcaa

SEQ ID NO: 407794 - RNA, 19 nt, Artificial Sequence
  Description of Artificial Sequence: Synthetic oligonucleotide
  Antisense Strand to SEQ ID NO: 407793
uugcuaaggaaccuugggc

SEQ ID NO: 407795 - RNA, 19 nt, Artificial Sequence
  Description of Artificial Sequence: Synthetic oligonucleotide
  Sense Strand Starting at position 1135 of SEQ ID NO: 318109
agguguugugccgcaagau

SEQ ID NO: 407796 - RNA, 19 nt, Artificial Sequence
  Description of Artificial Sequence: Synthetic oligonucleotide
  Antisense Strand to SEQ ID NO: 407795
aucuugcggcacaacaccu

SEQ ID NO: 407797 - RNA, 19 nt, Artificial Sequence
  Description of Artificial Sequence: Synthetic oligonucleotide
  Sense Strand Starting at position 1135 of SEQ ID NO: 318199
uguagucuucuagaccagu

SEQ ID NO: 407798 - RNA, 19 nt, Artificial Sequence
  Description of Artificial Sequence: Synthetic oligonucleotide
  Antisense Strand to SEQ ID NO: 407797
acuggucuagaagacuaca

SEQ ID NO: 407799 - RNA, 19 nt, Artificial Sequence
  Description of Artificial Sequence: Synthetic oligonucleotide
  Sense Strand Starting at position 1135 of SEQ ID NO: 318596
gggagaucuugggaaccua

SEQ ID NO: 407800 - RNA, 19 nt, Artificial Sequence
  Description of Artificial Sequence: Synthetic oligonucleotide
  Antisense Strand to SEQ ID NO: 407799
uagguucccaagaucuccc

SEQ ID NO: 407801 - RNA, 19 nt, Artificial Sequence
  Description of Artificial Sequence: Synthetic oligonucleotide
  Sense Strand Starting at position 1135 of SEQ ID NO: 318695
ugggcuuucucuccacaau

SEQ ID NO: 407802 - RNA, 19 nt, Artificial Sequence
  Description of Artificial Sequence: Synthetic oligonucleotide
  Antisense Strand to SEQ ID NO: 407801
auuguggagagaaagccca

SEQ ID NO: 407803 - RNA, 19 nt, Artificial Sequence
  Description of Artificial Sequence: Synthetic oligonucleotide
  Sense Strand Starting at position 1135 of SEQ ID NO: 318696
gggcuuucucuccacaauc

SEQ ID NO: 407804 - RNA, 19 nt, Artificial Sequence
  Description of Artificial Sequence: Synthetic oligonucleotide
  Antisense Strand to SEQ ID NO: 407803
gauuguggagagaaagccc

SEQ ID NO: 407805 - RNA, 19 nt, Artificial Sequence
  Description of Artificial Sequence: Synthetic oligonucleotide
  Sense Strand Starting at position 1135 of SEQ ID NO: 319081
agagguaaacccggugaga

SEQ ID NO: 407806 - RNA, 19 nt, Artificial Sequence
  Description of Artificial Sequence: Synthetic oligonucleotide
  Antisense Strand to SEQ ID NO: 407805
ucucaccggguuuaccucu

SEQ ID NO: 407807 - RNA, 19 nt, Artificial Sequence
  Description of Artificial Sequence: Synthetic oligonucleotide
  Sense Strand Starting at position 1135 of SEQ ID NO: 319083
agguaaacccggugagaga

SEQ ID NO: 407808 - RNA, 19 nt, Artificial Sequence
  Description of Artificial Sequence: Synthetic oligonucleotide
  Antisense Strand to SEQ ID NO: 407807
ucucucaccggguuuaccu

SEQ ID NO: 407809 - RNA, 19 nt, Artificial Sequence
  Description of Artificial Sequence: Synthetic oligonucleotide
  Sense Strand Starting at position 1135 of SEQ ID NO: 319092
cggugagagaagugaggua

SEQ ID NO: 407810 - RNA, 19 nt, Artificial Sequence
  Description of Artificial Sequence: Synthetic oligonucleotide
  Antisense Strand to SEQ ID NO: 407809
uaccucacuucucucaccg

SEQ ID NO: 407811 - RNA, 19 nt, Artificial Sequence
  Description of Artificial Sequence: Synthetic oligonucleotide
  Sense Strand Starting at position 1136 of SEQ ID NO: 315427
ggguuuguuucucugauga

SEQ ID NO: 407812 - RNA, 19 nt, Artificial Sequence
  Description of Artificial Sequence: Synthetic oligonucleotide
  Antisense Strand to SEQ ID NO: 407811
ucaucagagaaacaaaccc

SEQ ID NO: 407813 - RNA, 19 nt, Artificial Sequence
  Description of Artificial Sequence: Synthetic oligonucleotide
  Sense Strand Starting at position 1136 of SEQ ID NO: 315507
ccgugucagaaugaucauu

SEQ ID NO: 407814 - RNA, 19 nt, Artificial Sequence
  Description of Artificial Sequence: Synthetic oligonucleotide
  Antisense Strand to SEQ ID NO: 407813
aaugaucauucugacacgg

SEQ ID NO: 407815 - RNA, 19 nt, Artificial Sequence
  Description of Artificial Sequence: Synthetic oligonucleotide
  Sense Strand Starting at position 1136 of SEQ ID NO: 315509
gugucagaaugaucauugu

SEQ ID NO: 407816 - RNA, 19 nt, Artificial Sequence
  Description of Artificial Sequence: Synthetic oligonucleotide
  Antisense Strand to SEQ ID NO: 407815
acaaugaucauucugacac

SEQ ID NO: 407817 - RNA, 19 nt, Artificial Sequence
  Description of Artificial Sequence: Synthetic oligonucleotide
  Sense Strand Starting at position 1136 of SEQ ID NO: 315512
ucagaaugaucauugucuc

SEQ ID NO: 407818 - RNA, 19 nt, Artificial Sequence
  Description of Artificial Sequence: Synthetic oligonucleotide
  Antisense Strand to SEQ ID NO: 407817
gagacaaugaucauucuga

SEQ ID NO: 407819 - RNA, 19 nt, Artificial Sequence
  Description of Artificial Sequence: Synthetic oligonucleotide
  Sense Strand Starting at position 1136 of SEQ ID NO: 315518
ugaucauugucucuacuuc

SEQ ID NO: 407820 - RNA, 19 nt, Artificial Sequence
  Description of Artificial Sequence: Synthetic oligonucleotide
  Antisense Strand to SEQ ID NO: 407819
gaaguagagacaaugauca

SEQ ID NO: 407821 - RNA, 19 nt, Artificial Sequence
  Description of Artificial Sequence: Synthetic oligonucleotide
  Sense Strand Starting at position 1136 of SEQ ID NO: 315701
cuuacuugugcuugagaac

SEQ ID NO: 407822 - RNA, 19 nt, Artificial Sequence
  Description of Artificial Sequence: Synthetic oligonucleotide
  Antisense Strand to SEQ ID NO: 407821
guucucaagcacaaguaag

SEQ ID NO: 407823 - RNA, 19 nt, Artificial Sequence
  Description of Artificial Sequence: Synthetic oligonucleotide
  Sense Strand Starting at position 1136 of SEQ ID NO: 315702
uuacuugugcuugagaaca

SEQ ID NO: 407824 - RNA, 19 nt, Artificial Sequence
  Description of Artificial Sequence: Synthetic oligonucleotide
  Antisense Strand to SEQ ID NO: 407823
uguucucaagcacaaguaa

SEQ ID NO: 407825 - RNA, 19 nt, Artificial Sequence
  Description of Artificial Sequence: Synthetic oligonucleotide
  Sense Strand Starting at position 1136 of SEQ ID NO: 315749
ccaaauaugugcuuacuag

SEQ ID NO: 407826 - RNA, 19 nt, Artificial Sequence
  Description of Artificial Sequence: Synthetic oligonucleotide
  Antisense Strand to SEQ ID NO: 407825
cuaguaagcacauauuugg

SEQ ID NO: 407827 - RNA, 19 nt, Artificial Sequence
  Description of Artificial Sequence: Synthetic oligonucleotide
  Sense Strand Starting at position 1136 of SEQ ID NO: 315759
gcuuacuagggucaucaca

SEQ ID NO: 407828 - RNA, 19 nt, Artificial Sequence
  Description of Artificial Sequence: Synthetic oligonucleotide
  Antisense Strand to SEQ ID NO: 407827
ugugaugacccuaguaagc

SEQ ID NO: 407829 - RNA, 19 nt, Artificial Sequence
  Description of Artificial Sequence: Synthetic oligonucleotide
  Sense Strand Starting at position 1136 of SEQ ID NO: 315912
uauagcuaagccugguaaa

SEQ ID NO: 407830 - RNA, 19 nt, Artificial Sequence
  Description of Artificial Sequence: Synthetic oligonucleotide
  Antisense Strand to SEQ ID NO: 407829
uuuaccaggcuuagcuaua

SEQ ID NO: 407831 - RNA, 19 nt, Artificial Sequence
  Description of Artificial Sequence: Synthetic oligonucleotide
  Sense Strand Starting at position 1136 of SEQ ID NO: 315953
auccaauaguaucugagga

SEQ ID NO: 407832 - RNA, 19 nt, Artificial Sequence
  Description of Artificial Sequence: Synthetic oligonucleotide
  Antisense Strand to SEQ ID NO: 407831
uccucagauacuauuggau

SEQ ID NO: 407833 - RNA, 19 nt, Artificial Sequence
  Description of Artificial Sequence: Synthetic oligonucleotide
  Sense Strand Starting at position 1136 of SEQ ID NO: 315982
cgagauaaccaguaacagu

SEQ ID NO: 407834 - RNA, 19 nt, Artificial Sequence
  Description of Artificial Sequence: Synthetic oligonucleotide
  Antisense Strand to SEQ ID NO: 407833
acuguuacugguuaucucg

SEQ ID NO: 407835 - RNA, 19 nt, Artificial Sequence
  Description of Artificial Sequence: Synthetic oligonucleotide
  Sense Strand Starting at position 1136 of SEQ ID NO: 316046
uccuauuacuaguccagau

SEQ ID NO: 407836 - RNA, 19 nt, Artificial Sequence
  Description of Artificial Sequence: Synthetic oligonucleotide
  Antisense Strand to SEQ ID NO: 407835
aucuggacuaguaauagga

SEQ ID NO: 407837 - RNA, 19 nt, Artificial Sequence
  Description of Artificial Sequence: Synthetic oligonucleotide
  Sense Strand Starting at position 1136 of SEQ ID NO: 316247
uccaauuagugagccauca

SEQ ID NO: 407838 - RNA, 19 nt, Artificial Sequence
  Description of Artificial Sequence: Synthetic oligonucleotide
  Antisense Strand to SEQ ID NO: 407837
ugauggcucacuaauugga

SEQ ID NO: 407839 - RNA, 19 nt, Artificial Sequence
  Description of Artificial Sequence: Synthetic oligonucleotide
  Sense Strand Starting at position 1136 of SEQ ID NO: 316596
auggguuucucaccuaacu

SEQ ID NO: 407840 - RNA, 19 nt, Artificial Sequence
  Description of Artificial Sequence: Synthetic oligonucleotide
  Antisense Strand to SEQ ID NO: 407839
aguuaggugagaaacccau

SEQ ID NO: 407841 - RNA, 19 nt, Artificial Sequence
  Description of Artificial Sequence: Synthetic oligonucleotide
  Sense Strand Starting at position 1136 of SEQ ID NO: 316698
gaguuugucuguuuaaaua

SEQ ID NO: 407842 - RNA, 19 nt, Artificial Sequence
  Description of Artificial Sequence: Synthetic oligonucleotide
  Antisense Strand to SEQ ID NO: 407841
uauuuaaacagacaaacuc

SEQ ID NO: 407843 - RNA, 19 nt, Artificial Sequence
  Description of Artificial Sequence: Synthetic oligonucleotide
  Sense Strand Starting at position 1136 of SEQ ID NO: 317026
cgaugaacgcguuuccgaa

SEQ ID NO: 407844 - RNA, 19 nt, Artificial Sequence
  Description of Artificial Sequence: Synthetic oligonucleotide
  Antisense Strand to SEQ ID NO: 407843
uucggaaacgcguucaucg

SEQ ID NO: 407845 - RNA, 19 nt, Artificial Sequence
  Description of Artificial Sequence: Synthetic oligonucleotide
  Sense Strand Starting at position 1136 of SEQ ID NO: 317032
acgcguuuccgaagaagag

SEQ ID NO: 407846 - RNA, 19 nt, Artificial Sequence
  Description of Artificial Sequence: Synthetic oligonucleotide
  Antisense Strand to SEQ ID NO: 407845
cucuucuucggaaacgcgu

SEQ ID NO: 407847 - RNA, 19 nt, Artificial Sequence
  Description of Artificial Sequence: Synthetic oligonucleotide
  Sense Strand Starting at position 1136 of SEQ ID NO: 317054
ggaggacuuggccgagaga

SEQ ID NO: 407848 - RNA, 19 nt, Artificial Sequence
  Description of Artificial Sequence: Synthetic oligonucleotide
  Antisense Strand to SEQ ID NO: 407847
ucucucggccaaguccucc

SEQ ID NO: 407849 - RNA, 19 nt, Artificial Sequence
  Description of Artificial Sequence: Synthetic oligonucleotide
  Sense Strand Starting at position 1136 of SEQ ID NO: 317057
ggacuuggccgagagauug

SEQ ID NO: 407850 - RNA, 19 nt, Artificial Sequence
  Description of Artificial Sequence: Synthetic oligonucleotide
  Antisense Strand to SEQ ID NO: 407849
caaucucucggccaagucc

SEQ ID NO: 407851 - RNA, 19 nt, Artificial Sequence
  Description of Artificial Sequence: Synthetic oligonucleotide
  Sense Strand Starting at position 1136 of SEQ ID NO: 317068
agagauugcggcugaaauc

SEQ ID NO: 407852 - RNA, 19 nt, Artificial Sequence
  Description of Artificial Sequence: Synthetic oligonucleotide
  Antisense Strand to SEQ ID NO: 407851
gauuucagccgcaaucucu

SEQ ID NO: 407853 - RNA, 19 nt, Artificial Sequence
  Description of Artificial Sequence: Synthetic oligonucleotide
  Sense Strand Starting at position 1136 of SEQ ID NO: 317267
ccgguuuggcgaagagcaa

SEQ ID NO: 407854 - RNA, 19 nt, Artificial Sequence
  Description of Artificial Sequence: Synthetic oligonucleotide
  Antisense Strand to SEQ ID NO: 407853
uugcucuucgccaaaccgg

SEQ ID NO: 407855 - RNA, 19 nt, Artificial Sequence
  Description of Artificial Sequence: Synthetic oligonucleotide
  Sense Strand Starting at position 1136 of SEQ ID NO: 317568
gacugaguacguugaagaa

SEQ ID NO: 407856 - RNA, 19 nt, Artificial Sequence
  Description of Artificial Sequence: Synthetic oligonucleotide
  Antisense Strand to SEQ ID NO: 407855
uucuucaacguacucaguc

SEQ ID NO: 407857 - RNA, 19 nt, Artificial Sequence
  Description of Artificial Sequence: Synthetic oligonucleotide
  Sense Strand Starting at position 1136 of SEQ ID NO: 317821
ucaugaucucauugaugaa

SEQ ID NO: 407858 - RNA, 19 nt, Artificial Sequence
  Description of Artificial Sequence: Synthetic oligonucleotide
  Antisense Strand to SEQ ID NO: 407857
uucaucaaugagaucauga

SEQ ID NO: 407859 - RNA, 19 nt, Artificial Sequence
  Description of Artificial Sequence: Synthetic oligonucleotide
  Sense Strand Starting at position 1136 of SEQ ID NO: 317828
cucauugaugaaggcaaua

SEQ ID NO: 407860 - RNA, 19 nt, Artificial Sequence
  Description of Artificial Sequence: Synthetic oligonucleotide
  Antisense Strand to SEQ ID NO: 407859
uauugccuucaucaaugag

SEQ ID NO: 407861 - RNA, 19 nt, Artificial Sequence
  Description of Artificial Sequence: Synthetic oligonucleotide
  Sense Strand Starting at position 1136 of SEQ ID NO: 317991
aaggauuaaguaugucuau

SEQ ID NO: 407862 - RNA, 19 nt, Artificial Sequence
  Description of Artificial Sequence: Synthetic oligonucleotide
  Antisense Strand to SEQ ID NO: 407861
auagacauacuuaauccuu

SEQ ID NO: 407863 - RNA, 19 nt, Artificial Sequence
  Description of Artificial Sequence: Synthetic oligonucleotide
  Sense Strand Starting at position 1136 of SEQ ID NO: 317992
aggauuaaguaugucuauu

SEQ ID NO: 407864 - RNA, 19 nt, Artificial Sequence
  Description of Artificial Sequence: Synthetic oligonucleotide
  Antisense Strand to SEQ ID NO: 407863
aauagacauacuuaauccu

SEQ ID NO: 407865 - RNA, 19 nt, Artificial Sequence
  Description of Artificial Sequence: Synthetic oligonucleotide
  Sense Strand Starting at position 1136 of SEQ ID NO: 318108
cugagaacacucuagugca

SEQ ID NO: 407866 - RNA, 19 nt, Artificial Sequence
  Description of Artificial Sequence: Synthetic oligonucleotide
  Antisense Strand to SEQ ID NO: 407865
ugcacuagaguguucucag

SEQ ID NO: 407867 - RNA, 19 nt, Artificial Sequence
  Description of Artificial Sequence: Synthetic oligonucleotide
  Sense Strand Starting at position 1136 of SEQ ID NO: 318158
uuauuaaccguuugguaga

SEQ ID NO: 407868 - RNA, 19 nt, Artificial Sequence
  Description of Artificial Sequence: Synthetic oligonucleotide
  Antisense Strand to SEQ ID NO: 407867
ucuaccaaacgguuaauaa

SEQ ID NO: 407869 - RNA, 19 nt, Artificial Sequence
  Description of Artificial Sequence: Synthetic oligonucleotide
  Sense Strand Starting at position 1136 of SEQ ID NO: 318160
auuaaccguuugguagaua

SEQ ID NO: 407870 - RNA, 19 nt, Artificial Sequence
  Description of Artificial Sequence: Synthetic oligonucleotide
  Antisense Strand to SEQ ID NO: 407869
uaucuaccaaacgguuaau

SEQ ID NO: 407871 - RNA, 19 nt, Artificial Sequence
  Description of Artificial Sequence: Synthetic oligonucleotide
  Sense Strand Starting at position 1136 of SEQ ID NO: 318163
aaccguuugguagauaucu

SEQ ID NO: 407872 - RNA, 19 nt, Artificial Sequence
  Description of Artificial Sequence: Synthetic oligonucleotide
  Antisense Strand to SEQ ID NO: 407871
agauaucuaccaaacgguu

SEQ ID NO: 407873 - RNA, 19 nt, Artificial Sequence
  Description of Artificial Sequence: Synthetic oligonucleotide
  Sense Strand Starting at position 1136 of SEQ ID NO: 318165
ccguuugguagauaucuuu

SEQ ID NO: 407874 - RNA, 19 nt, Artificial Sequence
  Description of Artificial Sequence: Synthetic oligonucleotide
  Antisense Strand to SEQ ID NO: 407873
aaagauaucuaccaaacgg

SEQ ID NO: 407875 - RNA, 19 nt, Artificial Sequence
  Description of Artificial Sequence: Synthetic oligonucleotide
  Sense Strand Starting at position 1136 of SEQ ID NO: 318168
uuugguagauaucuuucuu

SEQ ID NO: 407876 - RNA, 19 nt, Artificial Sequence
  Description of Artificial Sequence: Synthetic oligonucleotide
  Antisense Strand to SEQ ID NO: 407875
aagaaagauaucuaccaaa

SEQ ID NO: 407877 - RNA, 19 nt, Artificial Sequence
  Description of Artificial Sequence: Synthetic oligonucleotide
  Sense Strand Starting at position 1136 of SEQ ID NO: 318269
gucuauucucuauacaggu

SEQ ID NO: 407878 - RNA, 19 nt, Artificial Sequence
  Description of Artificial Sequence: Synthetic oligonucleotide
  Antisense Strand to SEQ ID NO: 407877
accuguauagagaauagac

SEQ ID NO: 407879 - RNA, 19 nt, Artificial Sequence
  Description of Artificial Sequence: Synthetic oligonucleotide
  Sense Strand Starting at position 1136 of SEQ ID NO: 318283
cagguaccagagugaguuu

SEQ ID NO: 407880 - RNA, 19 nt, Artificial Sequence
  Description of Artificial Sequence: Synthetic oligonucleotide
  Antisense Strand to SEQ ID NO: 407879
aaacucacucugguaccug

SEQ ID NO: 407881 - RNA, 19 nt, Artificial Sequence
  Description of Artificial Sequence: Synthetic oligonucleotide
  Sense Strand Starting at position 1136 of SEQ ID NO: 318341
uccuuaaugccagaaguuu

SEQ ID NO: 407882 - RNA, 19 nt, Artificial Sequence
  Description of Artificial Sequence: Synthetic oligonucleotide
  Antisense Strand to SEQ ID NO: 407881
aaacuucuggcauuaagga

SEQ ID NO: 407883 - RNA, 19 nt, Artificial Sequence
  Description of Artificial Sequence: Synthetic oligonucleotide
  Sense Strand Starting at position 1136 of SEQ ID NO: 318671
uuggaucugucucuauaac

SEQ ID NO: 407884 - RNA, 19 nt, Artificial Sequence
  Description of Artificial Sequence: Synthetic oligonucleotide
  Antisense Strand to SEQ ID NO: 407883
guuauagagacagauccaa

SEQ ID NO: 407885 - RNA, 19 nt, Artificial Sequence
  Description of Artificial Sequence: Synthetic oligonucleotide
  Sense Strand Starting at position 1136 of SEQ ID NO: 318672
uggaucugucucuauaacu

SEQ ID NO: 407886 - RNA, 19 nt, Artificial Sequence
  Description of Artificial Sequence: Synthetic oligonucleotide
  Antisense Strand to SEQ ID NO: 407885
aguuauagagacagaucca

SEQ ID NO: 407887 - RNA, 19 nt, Artificial Sequence
  Description of Artificial Sequence: Synthetic oligonucleotide
  Sense Strand Starting at position 1136 of SEQ ID NO: 319198
guuugaaauguuuagugga

SEQ ID NO: 407888 - RNA, 19 nt, Artificial Sequence
  Description of Artificial Sequence: Synthetic oligonucleotide
  Antisense Strand to SEQ ID NO: 407887
uccacuaaacauuucaaac

SEQ ID NO: 407889 - RNA, 19 nt, Artificial Sequence
  Description of Artificial Sequence: Synthetic oligonucleotide
  Sense Strand Starting at position 1136 of SEQ ID NO: 319200
uugaaauguuuaguggaua

SEQ ID NO: 407890 - RNA, 19 nt, Artificial Sequence
  Description of Artificial Sequence: Synthetic oligonucleotide
  Antisense Strand to SEQ ID NO: 407889
uauccacuaaacauuucaa

SEQ ID NO: 407891 - RNA, 19 nt, Artificial Sequence
  Description of Artificial Sequence: Synthetic oligonucleotide
  Sense Strand Starting at position 1137 of SEQ ID NO: 315372
acauaucaaccugguagau

SEQ ID NO: 407892 - RNA, 19 nt, Artificial Sequence
  Description of Artificial Sequence: Synthetic oligonucleotide
  Antisense Strand to SEQ ID NO: 407891
aucuaccagguugauaugu

SEQ ID NO: 407893 - RNA, 19 nt, Artificial Sequence
  Description of Artificial Sequence: Synthetic oligonucleotide
  Sense Strand Starting at position 1137 of SEQ ID NO: 315381
ccugguagauaguuggauu

SEQ ID NO: 407894 - RNA, 19 nt, Artificial Sequence
  Description of Artificial Sequence: Synthetic oligonucleotide
  Antisense Strand to SEQ ID NO: 407893
aauccaacuaucuaccagg

SEQ ID NO: 407895 - RNA, 19 nt, Artificial Sequence
  Description of Artificial Sequence: Synthetic oligonucleotide
  Sense Strand Starting at position 1137 of SEQ ID NO: 315616
uaaauagauguuugugaac

SEQ ID NO: 407896 - RNA, 19 nt, Artificial Sequence
  Description of Artificial Sequence: Synthetic oligonucleotide
  Antisense Strand to SEQ ID NO: 407895
guucacaaacaucuauuua

SEQ ID NO: 407897 - RNA, 19 nt, Artificial Sequence
  Description of Artificial Sequence: Synthetic oligonucleotide
  Sense Strand Starting at position 1137 of SEQ ID NO: 315622
gauguuugugaacauugga

SEQ ID NO: 407898 - RNA, 19 nt, Artificial Sequence
  Description of Artificial Sequence: Synthetic oligonucleotide
  Antisense Strand to SEQ ID NO: 407897
uccaauguucacaaacauc

SEQ ID NO: 407899 - RNA, 19 nt, Artificial Sequence
  Description of Artificial Sequence: Synthetic oligonucleotide
  Sense Strand Starting at position 1137 of SEQ ID NO: 315637
uggaguaccuaucucaaau

SEQ ID NO: 407900 - RNA, 19 nt, Artificial Sequence
  Description of Artificial Sequence: Synthetic oligonucleotide
  Antisense Strand to SEQ ID NO: 407899
auuugagauagguacucca

SEQ ID NO: 407901 - RNA, 19 nt, Artificial Sequence
  Description of Artificial Sequence: Synthetic oligonucleotide
  Sense Strand Starting at position 1137 of SEQ ID NO: 315791
aagggucucgcugaagacu

SEQ ID NO: 407902 - RNA, 19 nt, Artificial Sequence
  Description of Artificial Sequence: Synthetic oligonucleotide
  Antisense Strand to SEQ ID NO: 407901
agucuucagcgagacccuu

SEQ ID NO: 407903 - RNA, 19 nt, Artificial Sequence
  Description of Artificial Sequence: Synthetic oligonucleotide
  Sense Strand Starting at position 1137 of SEQ ID NO: 315799
cgcugaagacuuggaggau

SEQ ID NO: 407904 - RNA, 19 nt, Artificial Sequence
  Description of Artificial Sequence: Synthetic oligonucleotide
  Antisense Strand to SEQ ID NO: 407903
auccuccaagucuucagcg

SEQ ID NO: 407905 - RNA, 19 nt, Artificial Sequence
  Description of Artificial Sequence: Synthetic oligonucleotide
  Sense Strand Starting at position 1137 of SEQ ID NO: 315848
ggaucagaggucugauaug

SEQ ID NO: 407906 - RNA, 19 nt, Artificial Sequence
  Description of Artificial Sequence: Synthetic oligonucleotide
  Antisense Strand to SEQ ID NO: 407905
cauaucagaccucugaucc

SEQ ID NO: 407907 - RNA, 19 nt, Artificial Sequence
  Description of Artificial Sequence: Synthetic oligonucleotide
  Sense Strand Starting at position 1137 of SEQ ID NO: 315884
aagcuaacaggaugugaaa

SEQ ID NO: 407908 - RNA, 19 nt, Artificial Sequence
  Description of Artificial Sequence: Synthetic oligonucleotide
  Antisense Strand to SEQ ID NO: 407907
uuucacauccuguuagcuu

SEQ ID NO: 407909 - RNA, 19 nt, Artificial Sequence
  Description of Artificial Sequence: Synthetic oligonucleotide
  Sense Strand Starting at position 1137 of SEQ ID NO: 315886
gcuaacaggaugugaaagu

SEQ ID NO: 407910 - RNA, 19 nt, Artificial Sequence
  Description of Artificial Sequence: Synthetic oligonucleotide
  Antisense Strand to SEQ ID NO: 407909
acuuucacauccuguuagc

SEQ ID NO: 407911 - RNA, 19 nt, Artificial Sequence
  Description of Artificial Sequence: Synthetic oligonucleotide
  Sense Strand Starting at position 1137 of SEQ ID NO: 315895
augugaaagucuuccagaa

SEQ ID NO: 407912 - RNA, 19 nt, Artificial Sequence
  Description of Artificial Sequence: Synthetic oligonucleotide
  Antisense Strand to SEQ ID NO: 407911
uucuggaagacuuucacau

SEQ ID NO: 407913 - RNA, 19 nt, Artificial Sequence
  Description of Artificial Sequence: Synthetic oligonucleotide
  Sense Strand Starting at position 1137 of SEQ ID NO: 316014
ugggacagaucuucagguu

SEQ ID NO: 407914 - RNA, 19 nt, Artificial Sequence
  Description of Artificial Sequence: Synthetic oligonucleotide
  Antisense Strand to SEQ ID NO: 407913
aaccugaagaucuguccca

SEQ ID NO: 407915 - RNA, 19 nt, Artificial Sequence
  Description of Artificial Sequence: Synthetic oligonucleotide
  Sense Strand Starting at position 1137 of SEQ ID NO: 316265
uaaggauaguugcuauaau

SEQ ID NO: 407916 - RNA, 19 nt, Artificial Sequence
  Description of Artificial Sequence: Synthetic oligonucleotide
  Antisense Strand to SEQ ID NO: 407915
auuauagcaacuauccuua

SEQ ID NO: 407917 - RNA, 19 nt, Artificial Sequence
  Description of Artificial Sequence: Synthetic oligonucleotide
  Sense Strand Starting at position 1137 of SEQ ID NO: 316468
cgagcuacaaaguagaauu

SEQ ID NO: 407918 - RNA, 19 nt, Artificial Sequence
  Description of Artificial Sequence: Synthetic oligonucleotide
  Antisense Strand to SEQ ID NO: 407917
aauucuacuuuguagcucg

SEQ ID NO: 407919 - RNA, 19 nt, Artificial Sequence
  Description of Artificial Sequence: Synthetic oligonucleotide
  Sense Strand Starting at position 1137 of SEQ ID NO: 316547
acggcguucggucuuuaga

SEQ ID NO: 407920 - RNA, 19 nt, Artificial Sequence
  Description of Artificial Sequence: Synthetic oligonucleotide
  Antisense Strand to SEQ ID NO: 407919
ucuaaagaccgaacgccgu

SEQ ID NO: 407921 - RNA, 19 nt, Artificial Sequence
  Description of Artificial Sequence: Synthetic oligonucleotide
  Sense Strand Starting at position 1137 of SEQ ID NO: 316548
cggcguucggucuuuagau

SEQ ID NO: 407922 - RNA, 19 nt, Artificial Sequence
  Description of Artificial Sequence: Synthetic oligonucleotide
  Antisense Strand to SEQ ID NO: 407921
aucuaaagaccgaacgccg

SEQ ID NO: 407923 - RNA, 19 nt, Artificial Sequence
  Description of Artificial Sequence: Synthetic oligonucleotide
  Sense Strand Starting at position 1137 of SEQ ID NO: 316940
uggagaauccgggagacgu

SEQ ID NO: 407924 - RNA, 19 nt, Artificial Sequence
  Description of Artificial Sequence: Synthetic oligonucleotide
  Antisense Strand to SEQ ID NO: 407923
acgucucccggauucucca

SEQ ID NO: 407925 - RNA, 19 nt, Artificial Sequence
  Description of Artificial Sequence: Synthetic oligonucleotide
  Sense Strand Starting at position 1137 of SEQ ID NO: 316960
gagggagucuccuuaccug

SEQ ID NO: 407926 - RNA, 19 nt, Artificial Sequence
  Description of Artificial Sequence: Synthetic oligonucleotide
  Antisense Strand to SEQ ID NO: 407925
cagguaaggagacucccuc

SEQ ID NO: 407927 - RNA, 19 nt, Artificial Sequence
  Description of Artificial Sequence: Synthetic oligonucleotide
  Sense Strand Starting at position 1137 of SEQ ID NO: 317353
ucuaaaguggcuuacuuaa

SEQ ID NO: 407928 - RNA, 19 nt, Artificial Sequence
  Description of Artificial Sequence: Synthetic oligonucleotide
  Antisense Strand to SEQ ID NO: 407927
uuaaguaagccacuuuaga

SEQ ID NO: 407929 - RNA, 19 nt, Artificial Sequence
  Description of Artificial Sequence: Synthetic oligonucleotide
  Sense Strand Starting at position 1137 of SEQ ID NO: 317855
ugagacuucugaucuaccu

SEQ ID NO: 407930 - RNA, 19 nt, Artificial Sequence
  Description of Artificial Sequence: Synthetic oligonucleotide
  Antisense Strand to SEQ ID NO: 407929
agguagaucagaagucuca

SEQ ID NO: 407931 - RNA, 19 nt, Artificial Sequence
  Description of Artificial Sequence: Synthetic oligonucleotide
  Sense Strand Starting at position 1137 of SEQ ID NO: 317877
uuucuauugugaccauaua

SEQ ID NO: 407932 - RNA, 19 nt, Artificial Sequence
  Description of Artificial Sequence: Synthetic oligonucleotide
  Antisense Strand to SEQ ID NO: 407931
uauauggucacaauagaaa

SEQ ID NO: 407933 - RNA, 19 nt, Artificial Sequence
  Description of Artificial Sequence: Synthetic oligonucleotide
  Sense Strand Starting at position 1137 of SEQ ID NO: 317878
uucuauugugaccauauau

SEQ ID NO: 407934 - RNA, 19 nt, Artificial Sequence
  Description of Artificial Sequence: Synthetic oligonucleotide
  Antisense Strand to SEQ ID NO: 407933
auauauggucacaauagaa

SEQ ID NO: 407935 - RNA, 19 nt, Artificial Sequence
  Description of Artificial Sequence: Synthetic oligonucleotide
  Sense Strand Starting at position 1137 of SEQ ID NO: 317910
uguauauguacgggaggga

SEQ ID NO: 407936 - RNA, 19 nt, Artificial Sequence
  Description of Artificial Sequence: Synthetic oligonucleotide
  Antisense Strand to SEQ ID NO: 407935
ucccucccguacauauaca

SEQ ID NO: 407937 - RNA, 19 nt, Artificial Sequence
  Description of Artificial Sequence: Synthetic oligonucleotide
  Sense Strand Starting at position 1137 of SEQ ID NO: 318028
aucaguaaggcagaguaau

SEQ ID NO: 407938 - RNA, 19 nt, Artificial Sequence
  Description of Artificial Sequence: Synthetic oligonucleotide
  Antisense Strand to SEQ ID NO: 407937
auuacucugccuuacugau

SEQ ID NO: 407939 - RNA, 19 nt, Artificial Sequence
  Description of Artificial Sequence: Synthetic oligonucleotide
  Sense Strand Starting at position 1137 of SEQ ID NO: 318040
gaguaauggucaguaaauu

SEQ ID NO: 407940 - RNA, 19 nt, Artificial Sequence
  Description of Artificial Sequence: Synthetic oligonucleotide
  Antisense Strand to SEQ ID NO: 407939
aauuuacugaccauuacuc

SEQ ID NO: 407941 - RNA, 19 nt, Artificial Sequence
  Description of Artificial Sequence: Synthetic oligonucleotide
  Sense Strand Starting at position 1137 of SEQ ID NO: 318041
aguaauggucaguaaauug

SEQ ID NO: 407942 - RNA, 19 nt, Artificial Sequence
  Description of Artificial Sequence: Synthetic oligonucleotide
  Antisense Strand to SEQ ID NO: 407941
caauuuacugaccauuacu

SEQ ID NO: 407943 - RNA, 19 nt, Artificial Sequence
  Description of Artificial Sequence: Synthetic oligonucleotide
  Sense Strand Starting at position 1137 of SEQ ID NO: 318227
auaugugaccacuauugua

SEQ ID NO: 407944 - RNA, 19 nt, Artificial Sequence
  Description of Artificial Sequence: Synthetic oligonucleotide
  Antisense Strand to SEQ ID NO: 407943
uacaauaguggucacauau

SEQ ID NO: 407945 - RNA, 19 nt, Artificial Sequence
  Description of Artificial Sequence: Synthetic oligonucleotide
  Sense Strand Starting at position 1137 of SEQ ID NO: 318243
guauaucuauauguggaaa

SEQ ID NO: 407946 - RNA, 19 nt, Artificial Sequence
  Description of Artificial Sequence: Synthetic oligonucleotide
  Antisense Strand to SEQ ID NO: 407945
uuuccacauauagauauac

SEQ ID NO: 407947 - RNA, 19 nt, Artificial Sequence
  Description of Artificial Sequence: Synthetic oligonucleotide
  Sense Strand Starting at position 1137 of SEQ ID NO: 318336
cuugaauucugauugaacu

SEQ ID NO: 407948 - RNA, 19 nt, Artificial Sequence
  Description of Artificial Sequence: Synthetic oligonucleotide
  Antisense Strand to SEQ ID NO: 407947
aguucaaucagaauucaag

SEQ ID NO: 407949 - RNA, 19 nt, Artificial Sequence
  Description of Artificial Sequence: Synthetic oligonucleotide
  Sense Strand Starting at position 1137 of SEQ ID NO: 318337
uugaauucugauugaacuc

SEQ ID NO: 407950 - RNA, 19 nt, Artificial Sequence
  Description of Artificial Sequence: Synthetic oligonucleotide
  Antisense Strand to SEQ ID NO: 407949
gaguucaaucagaauucaa

SEQ ID NO: 407951 - RNA, 19 nt, Artificial Sequence
  Description of Artificial Sequence: Synthetic oligonucleotide
  Sense Strand Starting at position 1137 of SEQ ID NO: 318344
cugauugaacucugguuaa

SEQ ID NO: 407952 - RNA, 19 nt, Artificial Sequence
  Description of Artificial Sequence: Synthetic oligonucleotide
  Antisense Strand to SEQ ID NO: 407951
uuaaccagaguucaaucag

SEQ ID NO: 407953 - RNA, 19 nt, Artificial Sequence
  Description of Artificial Sequence: Synthetic oligonucleotide
  Sense Strand Starting at position 1137 of SEQ ID NO: 318347
auugaacucugguuaaaug

SEQ ID NO: 407954 - RNA, 19 nt, Artificial Sequence
  Description of Artificial Sequence: Synthetic oligonucleotide
  Antisense Strand to SEQ ID NO: 407953
cauuuaaccagaguucaau

SEQ ID NO: 407955 - RNA, 19 nt, Artificial Sequence
  Description of Artificial Sequence: Synthetic oligonucleotide
  Sense Strand Starting at position 1137 of SEQ ID NO: 318348
uugaacucugguuaaaugu

SEQ ID NO: 407956 - RNA, 19 nt, Artificial Sequence
  Description of Artificial Sequence: Synthetic oligonucleotide
  Antisense Strand to SEQ ID NO: 407955
acauuuaaccagaguucaa

SEQ ID NO: 407957 - RNA, 19 nt, Artificial Sequence
  Description of Artificial Sequence: Synthetic oligonucleotide
  Sense Strand Starting at position 1137 of SEQ ID NO: 318404
aauaguuccuuacugagga

SEQ ID NO: 407958 - RNA, 19 nt, Artificial Sequence
  Description of Artificial Sequence: Synthetic oligonucleotide
  Antisense Strand to SEQ ID NO: 407957
uccucaguaaggaacuauu

SEQ ID NO: 407959 - RNA, 19 nt, Artificial Sequence
  Description of Artificial Sequence: Synthetic oligonucleotide
  Sense Strand Starting at position 1137 of SEQ ID NO: 318473
aagagcuguuaucuuauga

SEQ ID NO: 407960 - RNA, 19 nt, Artificial Sequence
  Description of Artificial Sequence: Synthetic oligonucleotide
  Antisense Strand to SEQ ID NO: 407959
ucauaagauaacagcucuu

SEQ ID NO: 407961 - RNA, 19 nt, Artificial Sequence
  Description of Artificial Sequence: Synthetic oligonucleotide
  Sense Strand Starting at position 1137 of SEQ ID NO: 318526
gcugcaucucuggaaacca

SEQ ID NO: 407962 - RNA, 19 nt, Artificial Sequence
  Description of Artificial Sequence: Synthetic oligonucleotide
  Antisense Strand to SEQ ID NO: 407961
ugguuuccagagaugcagc

SEQ ID NO: 407963 - RNA, 19 nt, Artificial Sequence
  Description of Artificial Sequence: Synthetic oligonucleotide
  Sense Strand Starting at position 1137 of SEQ ID NO: 318550
agcucauauuagguauuaa

SEQ ID NO: 407964 - RNA, 19 nt, Artificial Sequence
  Description of Artificial Sequence: Synthetic oligonucleotide
  Antisense Strand to SEQ ID NO: 407963
uuaauaccuaauaugagcu

SEQ ID NO: 407965 - RNA, 19 nt, Artificial Sequence
  Description of Artificial Sequence: Synthetic oligonucleotide
  Sense Strand Starting at position 1137 of SEQ ID NO: 318629
uccugaauggcuugaauaa

SEQ ID NO: 407966 - RNA, 19 nt, Artificial Sequence
  Description of Artificial Sequence: Synthetic oligonucleotide
  Antisense Strand to SEQ ID NO: 407965
uuauucaagccauucagga

SEQ ID NO: 407967 - RNA, 19 nt, Artificial Sequence
  Description of Artificial Sequence: Synthetic oligonucleotide
  Sense Strand Starting at position 1137 of SEQ ID NO: 318669
cuuguaauccaaggcaaag

SEQ ID NO: 407968 - RNA, 19 nt, Artificial Sequence
  Description of Artificial Sequence: Synthetic oligonucleotide
  Antisense Strand to SEQ ID NO: 407967
cuuugccuuggauuacaag

SEQ ID NO: 407969 - RNA, 19 nt, Artificial Sequence
  Description of Artificial Sequence: Synthetic oligonucleotide
  Sense Strand Starting at position 1137 of SEQ ID NO: 318784
guuggaguagucuaagaga

SEQ ID NO: 407970 - RNA, 19 nt, Artificial Sequence
  Description of Artificial Sequence: Synthetic oligonucleotide
  Antisense Strand to SEQ ID NO: 407969
ucucuuagacuacuccaac

SEQ ID NO: 407971 - RNA, 19 nt, Artificial Sequence
  Description of Artificial Sequence: Synthetic oligonucleotide
  Sense Strand Starting at position 1138 of SEQ ID NO: 315419
gacucaggguuccuagacu

SEQ ID NO: 407972 - RNA, 19 nt, Artificial Sequence
  Description of Artificial Sequence: Synthetic oligonucleotide
  Antisense Strand to SEQ ID NO: 407971
agucuaggaacccugaguc

SEQ ID NO: 407973 - RNA, 19 nt, Artificial Sequence
  Description of Artificial Sequence: Synthetic oligonucleotide
  Sense Strand Starting at position 1138 of SEQ ID NO: 315426
gguuccuagacuuguaaug

SEQ ID NO: 407974 - RNA, 19 nt, Artificial Sequence
  Description of Artificial Sequence: Synthetic oligonucleotide
  Antisense Strand to SEQ ID NO: 407973
cauuacaagucuaggaacc

SEQ ID NO: 407975 - RNA, 19 nt, Artificial Sequence
  Description of Artificial Sequence: Synthetic oligonucleotide
  Sense Strand Starting at position 1138 of SEQ ID NO: 315563
ccugaucauuucguagagu

SEQ ID NO: 407976 - RNA, 19 nt, Artificial Sequence
  Description of Artificial Sequence: Synthetic oligonucleotide
  Antisense Strand to SEQ ID NO: 407975
acucuacgaaaugaucagg

SEQ ID NO: 407977 - RNA, 19 nt, Artificial Sequence
  Description of Artificial Sequence: Synthetic oligonucleotide
  Sense Strand Starting at position 1138 of SEQ ID NO: 315634
gccaacgaaucuuugauca

SEQ ID NO: 407978 - RNA, 19 nt, Artificial Sequence
  Description of Artificial Sequence: Synthetic oligonucleotide
  Antisense Strand to SEQ ID NO: 407977
ugaucaaagauucguuggc

SEQ ID NO: 407979 - RNA, 19 nt, Artificial Sequence
  Description of Artificial Sequence: Synthetic oligonucleotide
  Sense Strand Starting at position 1138 of SEQ ID NO: 315639
cgaaucuuugaucaauccu

SEQ ID NO: 407980 - RNA, 19 nt, Artificial Sequence
  Description of Artificial Sequence: Synthetic oligonucleotide
  Antisense Strand to SEQ ID NO: 407979
aggauugaucaaagauucg

SEQ ID NO: 407981 - RNA, 19 nt, Artificial Sequence
  Description of Artificial Sequence: Synthetic oligonucleotide
  Sense Strand Starting at position 1138 of SEQ ID NO: 315710
gguuaagugacuugagcaa

SEQ ID NO: 407982 - RNA, 19 nt, Artificial Sequence
  Description of Artificial Sequence: Synthetic oligonucleotide
  Antisense Strand to SEQ ID NO: 407981
uugcucaagucacuuaacc

SEQ ID NO: 407983 - RNA, 19 nt, Artificial Sequence
  Description of Artificial Sequence: Synthetic oligonucleotide
  Sense Strand Starting at position 1138 of SEQ ID NO: 315757
uagguuugaguccagaucu

SEQ ID NO: 407984 - RNA, 19 nt, Artificial Sequence
  Description of Artificial Sequence: Synthetic oligonucleotide
  Antisense Strand to SEQ ID NO: 407983
agaucuggacucaaaccua

SEQ ID NO: 407985 - RNA, 19 nt, Artificial Sequence
  Description of Artificial Sequence: Synthetic oligonucleotide
  Sense Strand Starting at position 1138 of SEQ ID NO: 316023
cuaaguuuaguauagguua

SEQ ID NO: 407986 - RNA, 19 nt, Artificial Sequence
  Description of Artificial Sequence: Synthetic oligonucleotide
  Antisense Strand to SEQ ID NO: 407985
uaaccuauacuaaacuuag

SEQ ID NO: 407987 - RNA, 19 nt, Artificial Sequence
  Description of Artificial Sequence: Synthetic oligonucleotide
  Sense Strand Starting at position 1138 of SEQ ID NO: 316140
caagucuggugacuaugaa

SEQ ID NO: 407988 - RNA, 19 nt, Artificial Sequence
  Description of Artificial Sequence: Synthetic oligonucleotide
  Antisense Strand to SEQ ID NO: 407987
uucauagucaccagacuug

SEQ ID NO: 407989 - RNA, 19 nt, Artificial Sequence
  Description of Artificial Sequence: Synthetic oligonucleotide
  Sense Strand Starting at position 1138 of SEQ ID NO: 316172
cauggaucucucuggauuc

SEQ ID NO: 407990 - RNA, 19 nt, Artificial Sequence
  Description of Artificial Sequence: Synthetic oligonucleotide
  Antisense Strand to SEQ ID NO: 407989
gaauccagagagauccaug

SEQ ID NO: 407991 - RNA, 19 nt, Artificial Sequence
  Description of Artificial Sequence: Synthetic oligonucleotide
  Sense Strand Starting at position 1138 of SEQ ID NO: 316542
uuuaaauagcucugagaau

SEQ ID NO: 407992 - RNA, 19 nt, Artificial Sequence
  Description of Artificial Sequence: Synthetic oligonucleotide
  Antisense Strand to SEQ ID NO: 407991
auucucagagcuauuuaaa

SEQ ID NO: 407993 - RNA, 19 nt, Artificial Sequence
  Description of Artificial Sequence: Synthetic oligonucleotide
  Sense Strand Starting at position 1138 of SEQ ID NO: 316564
uuguauuucugucccggua

SEQ ID NO: 407994 - RNA, 19 nt, Artificial Sequence
  Description of Artificial Sequence: Synthetic oligonucleotide
  Antisense Strand to SEQ ID NO: 407993
uaccgggacagaaauacaa

SEQ ID NO: 407995 - RNA, 19 nt, Artificial Sequence
  Description of Artificial Sequence: Synthetic oligonucleotide
  Sense Strand Starting at position 1138 of SEQ ID NO: 316638
ccguuugcuagagaaagau

SEQ ID NO: 407996 - RNA, 19 nt, Artificial Sequence
  Description of Artificial Sequence: Synthetic oligonucleotide
  Antisense Strand to SEQ ID NO: 407995
aucuuucucuagcaaacgg

SEQ ID NO: 407997 - RNA, 19 nt, Artificial Sequence
  Description of Artificial Sequence: Synthetic oligonucleotide
  Sense Strand Starting at position 1138 of SEQ ID NO: 316677
gaccuuucuguagaguuaa

SEQ ID NO: 407998 - RNA, 19 nt, Artificial Sequence
  Description of Artificial Sequence: Synthetic oligonucleotide
  Antisense Strand to SEQ ID NO: 407997
uuaacucuacagaaagguc

SEQ ID NO: 407999 - RNA, 19 nt, Artificial Sequence
  Description of Artificial Sequence: Synthetic oligonucleotide
  Sense Strand Starting at position 1138 of SEQ ID NO: 316713
auccaauugugauugaaau

SEQ ID NO: 408000 - RNA, 19 nt, Artificial Sequence
  Description of Artificial Sequence: Synthetic oligonucleotide
  Antisense Strand to SEQ ID NO: 407999
auuucaaucacaauuggau

SEQ ID NO: 408001 - RNA, 19 nt, Artificial Sequence
  Description of Artificial Sequence: Synthetic oligonucleotide
  Sense Strand Starting at position 1138 of SEQ ID NO: 316714
uccaauugugauugaaaua

SEQ ID NO: 408002 - RNA, 19 nt, Artificial Sequence
  Description of Artificial Sequence: Synthetic oligonucleotide
  Antisense Strand to SEQ ID NO: 408001
uauuucaaucacaauugga

SEQ ID NO: 408003 - RNA, 19 nt, Artificial Sequence
  Description of Artificial Sequence: Synthetic oligonucleotide
  Sense Strand Starting at position 1138 of SEQ ID NO: 316928
guaggcuuuacacacgaga

SEQ ID NO: 408004 - RNA, 19 nt, Artificial Sequence
  Description of Artificial Sequence: Synthetic oligonucleotide
  Antisense Strand to SEQ ID NO: 408003
ucucguguguaaagccuac

SEQ ID NO: 408005 - RNA, 19 nt, Artificial Sequence
  Description of Artificial Sequence: Synthetic oligonucleotide
  Sense Strand Starting at position 1138 of SEQ ID NO: 317035
agcuacagagcuuauuaga

SEQ ID NO: 408006 - RNA, 19 nt, Artificial Sequence
  Description of Artificial Sequence: Synthetic oligonucleotide
  Antisense Strand to SEQ ID NO: 408005
ucuaauaagcucuguagcu

SEQ ID NO: 408007 - RNA, 19 nt, Artificial Sequence
  Description of Artificial Sequence: Synthetic oligonucleotide
  Sense Strand Starting at position 1138 of SEQ ID NO: 317323
gggaaacaucuauaucguu

SEQ ID NO: 408008 - RNA, 19 nt, Artificial Sequence
  Description of Artificial Sequence: Synthetic oligonucleotide
  Antisense Strand to SEQ ID NO: 408007
aacgauauagauguuuccc

SEQ ID NO: 408009 - RNA, 19 nt, Artificial Sequence
  Description of Artificial Sequence: Synthetic oligonucleotide
  Sense Strand Starting at position 1138 of SEQ ID NO: 317381
gggagcuccucuuccacaa

SEQ ID NO: 408010 - RNA, 19 nt, Artificial Sequence
  Description of Artificial Sequence: Synthetic oligonucleotide
  Antisense Strand to SEQ ID NO: 408009
uuguggaagaggagcuccc

SEQ ID NO: 408011 - RNA, 19 nt, Artificial Sequence
  Description of Artificial Sequence: Synthetic oligonucleotide
  Sense Strand Starting at position 1138 of SEQ ID NO: 317540
gucagagugccugacaacu

SEQ ID NO: 408012 - RNA, 19 nt, Artificial Sequence
  Description of Artificial Sequence: Synthetic oligonucleotide
  Antisense Strand to SEQ ID NO: 408011
aguugucaggcacucugac

SEQ ID NO: 408013 - RNA, 19 nt, Artificial Sequence
  Description of Artificial Sequence: Synthetic oligonucleotide
  Sense Strand Starting at position 1138 of SEQ ID NO: 317690
cucugagaucuugagcauc

SEQ ID NO: 408014 - RNA, 19 nt, Artificial Sequence
  Description of Artificial Sequence: Synthetic oligonucleotide
  Antisense Strand to SEQ ID NO: 408013
gaugcucaagaucucagag

SEQ ID NO: 408015 - RNA, 19 nt, Artificial Sequence
  Description of Artificial Sequence: Synthetic oligonucleotide
  Sense Strand Starting at position 1138 of SEQ ID NO: 317692
cugagaucuugagcaucac

SEQ ID NO: 408016 - RNA, 19 nt, Artificial Sequence
  Description of Artificial Sequence: Synthetic oligonucleotide
  Antisense Strand to SEQ ID NO: 408015
gugaugcucaagaucucag

SEQ ID NO: 408017 - RNA, 19 nt, Artificial Sequence
  Description of Artificial Sequence: Synthetic oligonucleotide
  Sense Strand Starting at position 1138 of SEQ ID NO: 317732
gaaacaaagcugggauugu

SEQ ID NO: 408018 - RNA, 19 nt, Artificial Sequence
  Description of Artificial Sequence: Synthetic oligonucleotide
  Antisense Strand to SEQ ID NO: 408017
acaaucccagcuuuguuuc

SEQ ID NO: 408019 - RNA, 19 nt, Artificial Sequence
  Description of Artificial Sequence: Synthetic oligonucleotide
  Sense Strand Starting at position 1138 of SEQ ID NO: 317848
ugugaaacaucuuuggauu

SEQ ID NO: 408020 - RNA, 19 nt, Artificial Sequence
  Description of Artificial Sequence: Synthetic oligonucleotide
  Antisense Strand to SEQ ID NO: 408019
aauccaaagauguuucaca

SEQ ID NO: 408021 - RNA, 19 nt, Artificial Sequence
  Description of Artificial Sequence: Synthetic oligonucleotide
  Sense Strand Starting at position 1138 of SEQ ID NO: 317851
gaaacaucuuuggauuugu

SEQ ID NO: 408022 - RNA, 19 nt, Artificial Sequence
  Description of Artificial Sequence: Synthetic oligonucleotide
  Antisense Strand to SEQ ID NO: 408021
acaaauccaaagauguuuc

SEQ ID NO: 408023 - RNA, 19 nt, Artificial Sequence
  Description of Artificial Sequence: Synthetic oligonucleotide
  Sense Strand Starting at position 1138 of SEQ ID NO: 317918
accucagcccuuggaagau

SEQ ID NO: 408024 - RNA, 19 nt, Artificial Sequence
  Description of Artificial Sequence: Synthetic oligonucleotide
  Antisense Strand to SEQ ID NO: 408023
aucuuccaagggcugaggu

SEQ ID NO: 408025 - RNA, 19 nt, Artificial Sequence
  Description of Artificial Sequence: Synthetic oligonucleotide
  Sense Strand Starting at position 1138 of SEQ ID NO: 318370
gugacucaguccucacaaa

SEQ ID NO: 408026 - RNA, 19 nt, Artificial Sequence
  Description of Artificial Sequence: Synthetic oligonucleotide
  Antisense Strand to SEQ ID NO: 408025
uuugugaggacugagucac

SEQ ID NO: 408027 - RNA, 19 nt, Artificial Sequence
  Description of Artificial Sequence: Synthetic oligonucleotide
  Sense Strand Starting at position 1138 of SEQ ID NO: 318414
cuggauuucugauacuuga

SEQ ID NO: 408028 - RNA, 19 nt, Artificial Sequence
  Description of Artificial Sequence: Synthetic oligonucleotide
  Antisense Strand to SEQ ID NO: 408027
ucaaguaucagaaauccag

SEQ ID NO: 408029 - RNA, 19 nt, Artificial Sequence
  Description of Artificial Sequence: Synthetic oligonucleotide
  Sense Strand Starting at position 1138 of SEQ ID NO: 318507
gccuuuauacaugaagcaa

SEQ ID NO: 408030 - RNA, 19 nt, Artificial Sequence
  Description of Artificial Sequence: Synthetic oligonucleotide
  Antisense Strand to SEQ ID NO: 408029
uugcuucauguauaaaggc

SEQ ID NO: 408031 - RNA, 19 nt, Artificial Sequence
  Description of Artificial Sequence: Synthetic oligonucleotide
  Sense Strand Starting at position 1138 of SEQ ID NO: 318587
cuuucucugcguguauauu

SEQ ID NO: 408032 - RNA, 19 nt, Artificial Sequence
  Description of Artificial Sequence: Synthetic oligonucleotide
  Antisense Strand to SEQ ID NO: 408031
aauauacacgcagagaaag

SEQ ID NO: 408033 - RNA, 19 nt, Artificial Sequence
  Description of Artificial Sequence: Synthetic oligonucleotide
  Sense Strand Starting at position 1138 of SEQ ID NO: 318588
uuucucugcguguauauuu

SEQ ID NO: 408034 - RNA, 19 nt, Artificial Sequence
  Description of Artificial Sequence: Synthetic oligonucleotide
  Antisense Strand to SEQ ID NO: 408033
aaauauacacgcagagaaa

SEQ ID NO: 408035 - RNA, 19 nt, Artificial Sequence
  Description of Artificial Sequence: Synthetic oligonucleotide
  Sense Strand Starting at position 1138 of SEQ ID NO: 318746
cuauuacaucuugaguacu

SEQ ID NO: 408036 - RNA, 19 nt, Artificial Sequence
  Description of Artificial Sequence: Synthetic oligonucleotide
  Antisense Strand to SEQ ID NO: 408035
aguacucaagauguaauag

SEQ ID NO: 408037 - RNA, 19 nt, Artificial Sequence
  Description of Artificial Sequence: Synthetic oligonucleotide
  Sense Strand Starting at position 1138 of SEQ ID NO: 318748
auuacaucuugaguacuuu

SEQ ID NO: 408038 - RNA, 19 nt, Artificial Sequence
  Description of Artificial Sequence: Synthetic oligonucleotide
  Antisense Strand to SEQ ID NO: 408037
aaaguacucaagauguaau

SEQ ID NO: 408039 - RNA, 19 nt, Artificial Sequence
  Description of Artificial Sequence: Synthetic oligonucleotide
  Sense Strand Starting at position 1138 of SEQ ID NO: 318941
ggaagugcugaucagcaga

SEQ ID NO: 408040 - RNA, 19 nt, Artificial Sequence
  Description of Artificial Sequence: Synthetic oligonucleotide
  Antisense Strand to SEQ ID NO: 408039
ucugcugaucagcacuucc

SEQ ID NO: 408041 - RNA, 19 nt, Artificial Sequence
  Description of Artificial Sequence: Synthetic oligonucleotide
  Sense Strand Starting at position 1138 of SEQ ID NO: 318943
aagugcugaucagcagaaa

SEQ ID NO: 408042 - RNA, 19 nt, Artificial Sequence
  Description of Artificial Sequence: Synthetic oligonucleotide
  Antisense Strand to SEQ ID NO: 408041
uuucugcugaucagcacuu

SEQ ID NO: 408043 - RNA, 19 nt, Artificial Sequence
  Description of Artificial Sequence: Synthetic oligonucleotide
  Sense Strand Starting at position 1138 of SEQ ID NO: 318944
agugcugaucagcagaaau

SEQ ID NO: 408044 - RNA, 19 nt, Artificial Sequence
  Description of Artificial Sequence: Synthetic oligonucleotide
  Antisense Strand to SEQ ID NO: 408043
auuucugcugaucagcacu

SEQ ID NO: 408045 - RNA, 19 nt, Artificial Sequence
  Description of Artificial Sequence: Synthetic oligonucleotide
  Sense Strand Starting at position 1138 of SEQ ID NO: 318946
ugcugaucagcagaaauga

SEQ ID NO: 408046 - RNA, 19 nt, Artificial Sequence
  Description of Artificial Sequence: Synthetic oligonucleotide
  Antisense Strand to SEQ ID NO: 408045
ucauuucugcugaucagca

SEQ ID NO: 408047 - RNA, 19 nt, Artificial Sequence
  Description of Artificial Sequence: Synthetic oligonucleotide
  Sense Strand Starting at position 1138 of SEQ ID NO: 318980
cgcuacuuagaucacauaa

SEQ ID NO: 408048 - RNA, 19 nt, Artificial Sequence
  Description of Artificial Sequence: Synthetic oligonucleotide
  Antisense Strand to SEQ ID NO: 408047
uuaugugaucuaaguagcg

SEQ ID NO: 408049 - RNA, 19 nt, Artificial Sequence
  Description of Artificial Sequence: Synthetic oligonucleotide
  Sense Strand Starting at position 1138 of SEQ ID NO: 319123
gggcaaguaauguacccau

SEQ ID NO: 408050 - RNA, 19 nt, Artificial Sequence
  Description of Artificial Sequence: Synthetic oligonucleotide
  Antisense Strand to SEQ ID NO: 408049
auggguacauuacuugccc

SEQ ID NO: 408051 - RNA, 19 nt, Artificial Sequence
  Description of Artificial Sequence: Synthetic oligonucleotide
  Sense Strand Starting at position 1139 of SEQ ID NO: 315426
acuaacuuacuauguguuu

SEQ ID NO: 408052 - RNA, 19 nt, Artificial Sequence
  Description of Artificial Sequence: Synthetic oligonucleotide
  Antisense Strand to SEQ ID NO: 408051
aaacacauaguaaguuagu

SEQ ID NO: 408053 - RNA, 19 nt, Artificial Sequence
  Description of Artificial Sequence: Synthetic oligonucleotide
  Sense Strand Starting at position 1139 of SEQ ID NO: 315456
ugucauaaucuggauguag

SEQ ID NO: 408054 - RNA, 19 nt, Artificial Sequence
  Description of Artificial Sequence: Synthetic oligonucleotide
  Antisense Strand to SEQ ID NO: 408053
cuacauccagauuaugaca

SEQ ID NO: 408055 - RNA, 19 nt, Artificial Sequence
  Description of Artificial Sequence: Synthetic oligonucleotide
  Sense Strand Starting at position 1139 of SEQ ID NO: 315498
aagcauauuugugucuguu

SEQ ID NO: 408056 - RNA, 19 nt, Artificial Sequence
  Description of Artificial Sequence: Synthetic oligonucleotide
  Antisense Strand to SEQ ID NO: 408055
aacagacacaaauaugcuu

SEQ ID NO: 408057 - RNA, 19 nt, Artificial Sequence
  Description of Artificial Sequence: Synthetic oligonucleotide
  Sense Strand Starting at position 1139 of SEQ ID NO: 315501
cauauuugugucuguuuag

SEQ ID NO: 408058 - RNA, 19 nt, Artificial Sequence
  Description of Artificial Sequence: Synthetic oligonucleotide
  Antisense Strand to SEQ ID NO: 408057
cuaaacagacacaaauaug

SEQ ID NO: 408059 - RNA, 19 nt, Artificial Sequence
  Description of Artificial Sequence: Synthetic oligonucleotide
  Sense Strand Starting at position 1139 of SEQ ID NO: 315502
auauuugugucuguuuagu

SEQ ID NO: 408060 - RNA, 19 nt, Artificial Sequence
  Description of Artificial Sequence: Synthetic oligonucleotide
  Antisense Strand to SEQ ID NO: 408059
acuaaacagacacaaauau

SEQ ID NO: 408061 - RNA, 19 nt, Artificial Sequence
  Description of Artificial Sequence: Synthetic oligonucleotide
  Sense Strand Starting at position 1139 of SEQ ID NO: 315570
gcucuauagacaugugaug

SEQ ID NO: 408062 - RNA, 19 nt, Artificial Sequence
  Description of Artificial Sequence: Synthetic oligonucleotide
  Antisense Strand to SEQ ID NO: 408061
caucacaugucuauagagc

SEQ ID NO: 408063 - RNA, 19 nt, Artificial Sequence
  Description of Artificial Sequence: Synthetic oligonucleotide
  Sense Strand Starting at position 1139 of SEQ ID NO: 315610
auucuuaugcagggacuuu

SEQ ID NO: 408064 - RNA, 19 nt, Artificial Sequence
  Description of Artificial Sequence: Synthetic oligonucleotide
  Antisense Strand to SEQ ID NO: 408063
aaagucccugcauaagaau

SEQ ID NO: 408065 - RNA, 19 nt, Artificial Sequence
  Description of Artificial Sequence: Synthetic oligonucleotide
  Sense Strand Starting at position 1139 of SEQ ID NO: 315621
gggacuuuaucuucccauu

SEQ ID NO: 408066 - RNA, 19 nt, Artificial Sequence
  Description of Artificial Sequence: Synthetic oligonucleotide
  Antisense Strand to SEQ ID NO: 408065
aaugggaagauaaaguccc

SEQ ID NO: 408067 - RNA, 19 nt, Artificial Sequence
  Description of Artificial Sequence: Synthetic oligonucleotide
  Sense Strand Starting at position 1139 of SEQ ID NO: 315669
agauaagcuuuguuccaac

SEQ ID NO: 408068 - RNA, 19 nt, Artificial Sequence
  Description of Artificial Sequence: Synthetic oligonucleotide
  Antisense Strand to SEQ ID NO: 408067
guuggaacaaagcuuaucu

SEQ ID NO: 408069 - RNA, 19 nt, Artificial Sequence
  Description of Artificial Sequence: Synthetic oligonucleotide
  Sense Strand Starting at position 1139 of SEQ ID NO: 315789
gucugagugccacauuaua

SEQ ID NO: 408070 - RNA, 19 nt, Artificial Sequence
  Description of Artificial Sequence: Synthetic oligonucleotide
  Antisense Strand to SEQ ID NO: 408069
uauaauguggcacucagac

SEQ ID NO: 408071 - RNA, 19 nt, Artificial Sequence
  Description of Artificial Sequence: Synthetic oligonucleotide
  Sense Strand Starting at position 1139 of SEQ ID NO: 315840
uggcucaagccuuaaugaa

SEQ ID NO: 408072 - RNA, 19 nt, Artificial Sequence
  Description of Artificial Sequence: Synthetic oligonucleotide
  Antisense Strand to SEQ ID NO: 408071
uucauuaaggcuugagcca

SEQ ID NO: 408073 - RNA, 19 nt, Artificial Sequence
  Description of Artificial Sequence: Synthetic oligonucleotide
  Sense Strand Starting at position 1139 of SEQ ID NO: 315859
ggaugcuucccuggaagcu

SEQ ID NO: 408074 - RNA, 19 nt, Artificial Sequence
  Description of Artificial Sequence: Synthetic oligonucleotide
  Antisense Strand to SEQ ID NO: 408073
agcuuccagggaagcaucc

SEQ ID NO: 408075 - RNA, 19 nt, Artificial Sequence
  Description of Artificial Sequence: Synthetic oligonucleotide
  Sense Strand Starting at position 1139 of SEQ ID NO: 315943
uggccuugacucuggaaga

SEQ ID NO: 408076 - RNA, 19 nt, Artificial Sequence
  Description of Artificial Sequence: Synthetic oligonucleotide
  Antisense Strand to SEQ ID NO: 408075
ucuuccagagucaaggcca

SEQ ID NO: 408077 - RNA, 19 nt, Artificial Sequence
  Description of Artificial Sequence: Synthetic oligonucleotide
  Sense Strand Starting at position 1139 of SEQ ID NO: 316058
uguccucacugggcuagaa

SEQ ID NO: 408078 - RNA, 19 nt, Artificial Sequence
  Description of Artificial Sequence: Synthetic oligonucleotide
  Antisense Strand to SEQ ID NO: 408077
uucuagcccagugaggaca

SEQ ID NO: 408079 - RNA, 19 nt, Artificial Sequence
  Description of Artificial Sequence: Synthetic oligonucleotide
  Sense Strand Starting at position 1139 of SEQ ID NO: 316286
ucuguuuggucacugaaau

SEQ ID NO: 408080 - RNA, 19 nt, Artificial Sequence
  Description of Artificial Sequence: Synthetic oligonucleotide
  Antisense Strand to SEQ ID NO: 408079
auuucagugaccaaacaga

SEQ ID NO: 408081 - RNA, 19 nt, Artificial Sequence
  Description of Artificial Sequence: Synthetic oligonucleotide
  Sense Strand Starting at position 1139 of SEQ ID NO: 316287
cuguuuggucacugaaauu

SEQ ID NO: 408082 - RNA, 19 nt, Artificial Sequence
  Description of Artificial Sequence: Synthetic oligonucleotide
  Antisense Strand to SEQ ID NO: 408081
aauuucagugaccaaacag

SEQ ID NO: 408083 - RNA, 19 nt, Artificial Sequence
  Description of Artificial Sequence: Synthetic oligonucleotide
  Sense Strand Starting at position 1139 of SEQ ID NO: 316404
ugucauaaaugcuucggga

SEQ ID NO: 408084 - RNA, 19 nt, Artificial Sequence
  Description of Artificial Sequence: Synthetic oligonucleotide
  Antisense Strand to SEQ ID NO: 408083
ucccgaagcauuuaugaca

SEQ ID NO: 408085 - RNA, 19 nt, Artificial Sequence
  Description of Artificial Sequence: Synthetic oligonucleotide
  Sense Strand Starting at position 1139 of SEQ ID NO: 316406
ucauaaaugcuucgggauc

SEQ ID NO: 408086 - RNA, 19 nt, Artificial Sequence
  Description of Artificial Sequence: Synthetic oligonucleotide
  Antisense Strand to SEQ ID NO: 408085
gaucccgaagcauuuauga

SEQ ID NO: 408087 - RNA, 19 nt, Artificial Sequence
  Description of Artificial Sequence: Synthetic oligonucleotide
  Sense Strand Starting at position 1139 of SEQ ID NO: 316471
gagggaagccaucauugcu

SEQ ID NO: 408088 - RNA, 19 nt, Artificial Sequence
  Description of Artificial Sequence: Synthetic oligonucleotide
  Antisense Strand to SEQ ID NO: 408087
agcaaugauggcuucccuc

SEQ ID NO: 408089 - RNA, 19 nt, Artificial Sequence
  Description of Artificial Sequence: Synthetic oligonucleotide
  Sense Strand Starting at position 1139 of SEQ ID NO: 316623
cagggcuuccuccaugaca

SEQ ID NO: 408090 - RNA, 19 nt, Artificial Sequence
  Description of Artificial Sequence: Synthetic oligonucleotide
  Antisense Strand to SEQ ID NO: 408089
ugucauggaggaagcccug

SEQ ID NO: 408091 - RNA, 19 nt, Artificial Sequence
  Description of Artificial Sequence: Synthetic oligonucleotide
  Sense Strand Starting at position 1139 of SEQ ID NO: 316625
gggcuuccuccaugacaaa

SEQ ID NO: 408092 - RNA, 19 nt, Artificial Sequence
  Description of Artificial Sequence: Synthetic oligonucleotide
  Antisense Strand to SEQ ID NO: 408091
uuugucauggaggaagccc

SEQ ID NO: 408093 - RNA, 19 nt, Artificial Sequence
  Description of Artificial Sequence: Synthetic oligonucleotide
  Sense Strand Starting at position 1139 of SEQ ID NO: 316626
ggcuuccuccaugacaaau

SEQ ID NO: 408094 - RNA, 19 nt, Artificial Sequence
  Description of Artificial Sequence: Synthetic oligonucleotide
  Antisense Strand to SEQ ID NO: 408093
auuugucauggaggaagcc

SEQ ID NO: 408095 - RNA, 19 nt, Artificial Sequence
  Description of Artificial Sequence: Synthetic oligonucleotide
  Sense Strand Starting at position 1139 of SEQ ID NO: 316760
agcuuugauuccuugcaga

SEQ ID NO: 408096 - RNA, 19 nt, Artificial Sequence
  Description of Artificial Sequence: Synthetic oligonucleotide
  Antisense Strand to SEQ ID NO: 408095
ucugcaaggaaucaaagcu

SEQ ID NO: 408097 - RNA, 19 nt, Artificial Sequence
  Description of Artificial Sequence: Synthetic oligonucleotide
  Sense Strand Starting at position 1139 of SEQ ID NO: 316790
guaccagagcgauaaguaa

SEQ ID NO: 408098 - RNA, 19 nt, Artificial Sequence
  Description of Artificial Sequence: Synthetic oligonucleotide
  Antisense Strand to SEQ ID NO: 408097
uuacuuaucgcucugguac

SEQ ID NO: 408099 - RNA, 19 nt, Artificial Sequence
  Description of Artificial Sequence: Synthetic oligonucleotide
  Sense Strand Starting at position 1139 of SEQ ID NO: 317353
uguugaguccuugauccaa

SEQ ID NO: 408100 - RNA, 19 nt, Artificial Sequence
  Description of Artificial Sequence: Synthetic oligonucleotide
  Antisense Strand to SEQ ID NO: 408099
uuggaucaaggacucaaca

SEQ ID NO: 408101 - RNA, 19 nt, Artificial Sequence
  Description of Artificial Sequence: Synthetic oligonucleotide
  Sense Strand Starting at position 1139 of SEQ ID NO: 317388
ucgggaucucucugaucuu

SEQ ID NO: 408102 - RNA, 19 nt, Artificial Sequence
  Description of Artificial Sequence: Synthetic oligonucleotide
  Antisense Strand to SEQ ID NO: 408101
aagaucagagagaucccga

SEQ ID NO: 408103 - RNA, 19 nt, Artificial Sequence
  Description of Artificial Sequence: Synthetic oligonucleotide
  Sense Strand Starting at position 1139 of SEQ ID NO: 317550
accuuugugucacuaauag

SEQ ID NO: 408104 - RNA, 19 nt, Artificial Sequence
  Description of Artificial Sequence: Synthetic oligonucleotide
  Antisense Strand to SEQ ID NO: 408103
cuauuagugacacaaaggu

SEQ ID NO: 408105 - RNA, 19 nt, Artificial Sequence
  Description of Artificial Sequence: Synthetic oligonucleotide
  Sense Strand Starting at position 1139 of SEQ ID NO: 317611
cccagacugucuucuauuc

SEQ ID NO: 408106 - RNA, 19 nt, Artificial Sequence
  Description of Artificial Sequence: Synthetic oligonucleotide
  Antisense Strand to SEQ ID NO: 408105
gaauagaagacagucuggg

SEQ ID NO: 408107 - RNA, 19 nt, Artificial Sequence
  Description of Artificial Sequence: Synthetic oligonucleotide
  Sense Strand Starting at position 1139 of SEQ ID NO: 317712
cuuagaucugauuaagugu

SEQ ID NO: 408108 - RNA, 19 nt, Artificial Sequence
  Description of Artificial Sequence: Synthetic oligonucleotide
  Antisense Strand to SEQ ID NO: 408107
acacuuaaucagaucuaag

SEQ ID NO: 408109 - RNA, 19 nt, Artificial Sequence
  Description of Artificial Sequence: Synthetic oligonucleotide
  Sense Strand Starting at position 1139 of SEQ ID NO: 318024
ucuccacaggucuauuauu

SEQ ID NO: 408110 - RNA, 19 nt, Artificial Sequence
  Description of Artificial Sequence: Synthetic oligonucleotide
  Antisense Strand to SEQ ID NO: 408109
aauaauagaccuguggaga

SEQ ID NO: 408111 - RNA, 19 nt, Artificial Sequence
  Description of Artificial Sequence: Synthetic oligonucleotide
  Sense Strand Starting at position 1139 of SEQ ID NO: 318045
ggaauauaagcaugugacu

SEQ ID NO: 408112 - RNA, 19 nt, Artificial Sequence
  Description of Artificial Sequence: Synthetic oligonucleotide
  Antisense Strand to SEQ ID NO: 408111
agucacaugcuuauauucc

SEQ ID NO: 408113 - RNA, 19 nt, Artificial Sequence
  Description of Artificial Sequence: Synthetic oligonucleotide
  Sense Strand Starting at position 1139 of SEQ ID NO: 318081
aggccaucucccugggagu

SEQ ID NO: 408114 - RNA, 19 nt, Artificial Sequence
  Description of Artificial Sequence: Synthetic oligonucleotide
  Antisense Strand to SEQ ID NO: 408113
acucccagggagauggccu

SEQ ID NO: 408115 - RNA, 19 nt, Artificial Sequence
  Description of Artificial Sequence: Synthetic oligonucleotide
  Sense Strand Starting at position 1139 of SEQ ID NO: 318281
cauggagauguaugucauc

SEQ ID NO: 408116 - RNA, 19 nt, Artificial Sequence
  Description of Artificial Sequence: Synthetic oligonucleotide
  Antisense Strand to SEQ ID NO: 408115
gaugacauacaucuccaug

SEQ ID NO: 408117 - RNA, 19 nt, Artificial Sequence
  Description of Artificial Sequence: Synthetic oligonucleotide
  Sense Strand Starting at position 1139 of SEQ ID NO: 318286
agauguaugucauccaacu

SEQ ID NO: 408118 - RNA, 19 nt, Artificial Sequence
  Description of Artificial Sequence: Synthetic oligonucleotide
  Antisense Strand to SEQ ID NO: 408117
aguuggaugacauacaucu

SEQ ID NO: 408119 - RNA, 19 nt, Artificial Sequence
  Description of Artificial Sequence: Synthetic oligonucleotide
  Sense Strand Starting at position 1139 of SEQ ID NO: 318315
cauccaucuggcuggacau

SEQ ID NO: 408120 - RNA, 19 nt, Artificial Sequence
  Description of Artificial Sequence: Synthetic oligonucleotide
  Antisense Strand to SEQ ID NO: 408119
auguccagccagauggaug

SEQ ID NO: 408121 - RNA, 19 nt, Artificial Sequence
  Description of Artificial Sequence: Synthetic oligonucleotide
  Sense Strand Starting at position 1139 of SEQ ID NO: 318334
gaagaaggucaauguuaau

SEQ ID NO: 408122 - RNA, 19 nt, Artificial Sequence
  Description of Artificial Sequence: Synthetic oligonucleotide
  Antisense Strand to SEQ ID NO: 408121
auuaacauugaccuucuuc

SEQ ID NO: 408123 - RNA, 19 nt, Artificial Sequence
  Description of Artificial Sequence: Synthetic oligonucleotide
  Sense Strand Starting at position 1139 of SEQ ID NO: 318340
ggucaauguuaaucacaga

SEQ ID NO: 408124 - RNA, 19 nt, Artificial Sequence
  Description of Artificial Sequence: Synthetic oligonucleotide
  Antisense Strand to SEQ ID NO: 408123
ucugugauuaacauugacc

SEQ ID NO: 408125 - RNA, 19 nt, Artificial Sequence
  Description of Artificial Sequence: Synthetic oligonucleotide
  Sense Strand Starting at position 1139 of SEQ ID NO: 318529
cuccaauguccacauguca

SEQ ID NO: 408126 - RNA, 19 nt, Artificial Sequence
  Description of Artificial Sequence: Synthetic oligonucleotide
  Antisense Strand to SEQ ID NO: 408125
ugacauguggacauuggag

SEQ ID NO: 408127 - RNA, 19 nt, Artificial Sequence
  Description of Artificial Sequence: Synthetic oligonucleotide
  Sense Strand Starting at position 1139 of SEQ ID NO: 319111
ccuguugaacuugauacau

SEQ ID NO: 408128 - RNA, 19 nt, Artificial Sequence
  Description of Artificial Sequence: Synthetic oligonucleotide
  Antisense Strand to SEQ ID NO: 408127
auguaucaaguucaacagg

SEQ ID NO: 408129 - RNA, 19 nt, Artificial Sequence
  Description of Artificial Sequence: Synthetic oligonucleotide
  Sense Strand Starting at position 1139 of SEQ ID NO: 319121
uugauacauuuggacucaa

SEQ ID NO: 408130 - RNA, 19 nt, Artificial Sequence
  Description of Artificial Sequence: Synthetic oligonucleotide
  Antisense Strand to SEQ ID NO: 408129
uugaguccaaauguaucaa

SEQ ID NO: 408131 - RNA, 19 nt, Artificial Sequence
  Description of Artificial Sequence: Synthetic oligonucleotide
  Sense Strand Starting at position 1140 of SEQ ID NO: 315248
cugagcagauguucccaaa

SEQ ID NO: 408132 - RNA, 19 nt, Artificial Sequence
  Description of Artificial Sequence: Synthetic oligonucleotide
  Antisense Strand to SEQ ID NO: 408131
uuugggaacaucugcucag

SEQ ID NO: 408133 - RNA, 19 nt, Artificial Sequence
  Description of Artificial Sequence: Synthetic oligonucleotide
  Sense Strand Starting at position 1140 of SEQ ID NO: 315509
gcaaaugggacuuacgacu

SEQ ID NO: 408134 - RNA, 19 nt, Artificial Sequence
  Description of Artificial Sequence: Synthetic oligonucleotide
  Antisense Strand to SEQ ID NO: 408133
agucguaagucccauuugc

SEQ ID NO: 408135 - RNA, 19 nt, Artificial Sequence
  Description of Artificial Sequence: Synthetic oligonucleotide
  Sense Strand Starting at position 1140 of SEQ ID NO: 315524
gacuuuagacucgguguga

SEQ ID NO: 408136 - RNA, 19 nt, Artificial Sequence
  Description of Artificial Sequence: Synthetic oligonucleotide
  Antisense Strand to SEQ ID NO: 408135
ucacaccgagucuaaaguc

SEQ ID NO: 408137 - RNA, 19 nt, Artificial Sequence
  Description of Artificial Sequence: Synthetic oligonucleotide
  Sense Strand Starting at position 1140 of SEQ ID NO: 315525
acuuuagacucggugugau

SEQ ID NO: 408138 - RNA, 19 nt, Artificial Sequence
  Description of Artificial Sequence: Synthetic oligonucleotide
  Antisense Strand to SEQ ID NO: 408137
aucacaccgagucuaaagu

SEQ ID NO: 408139 - RNA, 19 nt, Artificial Sequence
  Description of Artificial Sequence: Synthetic oligonucleotide
  Sense Strand Starting at position 1140 of SEQ ID NO: 315538
ugugauuucugauacacua

SEQ ID NO: 408140 - RNA, 19 nt, Artificial Sequence
  Description of Artificial Sequence: Synthetic oligonucleotide
  Antisense Strand to SEQ ID NO: 408139
uaguguaucagaaaucaca

SEQ ID NO: 408141 - RNA, 19 nt, Artificial Sequence
  Description of Artificial Sequence: Synthetic oligonucleotide
  Sense Strand Starting at position 1140 of SEQ ID NO: 315779
uugagauugccgggaucuc

SEQ ID NO: 408142 - RNA, 19 nt, Artificial Sequence
  Description of Artificial Sequence: Synthetic oligonucleotide
  Antisense Strand to SEQ ID NO: 408141
gagaucccggcaaucucaa

SEQ ID NO: 408143 - RNA, 19 nt, Artificial Sequence
  Description of Artificial Sequence: Synthetic oligonucleotide
  Sense Strand Starting at position 1140 of SEQ ID NO: 317226
gcagaagguuuggucccua

SEQ ID NO: 408144 - RNA, 19 nt, Artificial Sequence
  Description of Artificial Sequence: Synthetic oligonucleotide
  Antisense Strand to SEQ ID NO: 408143
uagggaccaaaccuucugc

SEQ ID NO: 408145 - RNA, 19 nt, Artificial Sequence
  Description of Artificial Sequence: Synthetic oligonucleotide
  Sense Strand Starting at position 1140 of SEQ ID NO: 317231
agguuuggucccuaucaga

SEQ ID NO: 408146 - RNA, 19 nt, Artificial Sequence
  Description of Artificial Sequence: Synthetic oligonucleotide
  Antisense Strand to SEQ ID NO: 408145
ucugauagggaccaaaccu

SEQ ID NO: 408147 - RNA, 19 nt, Artificial Sequence
  Description of Artificial Sequence: Synthetic oligonucleotide
  Sense Strand Starting at position 1140 of SEQ ID NO: 317298
aagggcaaauguguucgua

SEQ ID NO: 408148 - RNA, 19 nt, Artificial Sequence
  Description of Artificial Sequence: Synthetic oligonucleotide
  Antisense Strand to SEQ ID NO: 408147
uacgaacacauuugcccuu

SEQ ID NO: 408149 - RNA, 19 nt, Artificial Sequence
  Description of Artificial Sequence: Synthetic oligonucleotide
  Sense Strand Starting at position 1140 of SEQ ID NO: 317430
cuuggauggcucugaauac

SEQ ID NO: 408150 - RNA, 19 nt, Artificial Sequence
  Description of Artificial Sequence: Synthetic oligonucleotide
  Antisense Strand to SEQ ID NO: 408149
guauucagagccauccaag

SEQ ID NO: 408151 - RNA, 19 nt, Artificial Sequence
  Description of Artificial Sequence: Synthetic oligonucleotide
  Sense Strand Starting at position 1140 of SEQ ID NO: 317451
uuuaaaguguguuugucaa

SEQ ID NO: 408152 - RNA, 19 nt, Artificial Sequence
  Description of Artificial Sequence: Synthetic oligonucleotide
  Antisense Strand to SEQ ID NO: 408151
uugacaaacacacuuuaaa

SEQ ID NO: 408153 - RNA, 19 nt, Artificial Sequence
  Description of Artificial Sequence: Synthetic oligonucleotide
  Sense Strand Starting at position 1140 of SEQ ID NO: 317453
uaaaguguguuugucaaau

SEQ ID NO: 408154 - RNA, 19 nt, Artificial Sequence
  Description of Artificial Sequence: Synthetic oligonucleotide
  Antisense Strand to SEQ ID NO: 408153
auuugacaaacacacuuua

SEQ ID NO: 408155 - RNA, 19 nt, Artificial Sequence
  Description of Artificial Sequence: Synthetic oligonucleotide
  Sense Strand Starting at position 1140 of SEQ ID NO: 317566
cacggacuuggauguaauu

SEQ ID NO: 408156 - RNA, 19 nt, Artificial Sequence
  Description of Artificial Sequence: Synthetic oligonucleotide
  Antisense Strand to SEQ ID NO: 408155
aauuacauccaaguccgug

SEQ ID NO: 408157 - RNA, 19 nt, Artificial Sequence
  Description of Artificial Sequence: Synthetic oligonucleotide
  Sense Strand Starting at position 1140 of SEQ ID NO: 317585
caaaguuggcaauguguca

SEQ ID NO: 408158 - RNA, 19 nt, Artificial Sequence
  Description of Artificial Sequence: Synthetic oligonucleotide
  Antisense Strand to SEQ ID NO: 408157
ugacacauugccaacuuug

SEQ ID NO: 408159 - RNA, 19 nt, Artificial Sequence
  Description of Artificial Sequence: Synthetic oligonucleotide
  Sense Strand Starting at position 1140 of SEQ ID NO: 317923
ucugguauuugucuuaauu

SEQ ID NO: 408160 - RNA, 19 nt, Artificial Sequence
  Description of Artificial Sequence: Synthetic oligonucleotide
  Antisense Strand to SEQ ID NO: 408159
aauuaagacaaauaccaga

SEQ ID NO: 408161 - RNA, 19 nt, Artificial Sequence
  Description of Artificial Sequence: Synthetic oligonucleotide
  Sense Strand Starting at position 1140 of SEQ ID NO: 317950
agcccuaggagguaucauu

SEQ ID NO: 408162 - RNA, 19 nt, Artificial Sequence
  Description of Artificial Sequence: Synthetic oligonucleotide
  Antisense Strand to SEQ ID NO: 408161
aaugauaccuccuagggcu

SEQ ID NO: 408163 - RNA, 19 nt, Artificial Sequence
  Description of Artificial Sequence: Synthetic oligonucleotide
  Sense Strand Starting at position 1140 of SEQ ID NO: 317957
ggagguaucauuuguuguu

SEQ ID NO: 408164 - RNA, 19 nt, Artificial Sequence
  Description of Artificial Sequence: Synthetic oligonucleotide
  Antisense Strand to SEQ ID NO: 408163
aacaacaaaugauaccucc

SEQ ID NO: 408165 - RNA, 19 nt, Artificial Sequence
  Description of Artificial Sequence: Synthetic oligonucleotide
  Sense Strand Starting at position 1140 of SEQ ID NO: 317958
gagguaucauuuguuguuu

SEQ ID NO: 408166 - RNA, 19 nt, Artificial Sequence
  Description of Artificial Sequence: Synthetic oligonucleotide
  Antisense Strand to SEQ ID NO: 408165
aaacaacaaaugauaccuc

SEQ ID NO: 408167 - RNA, 19 nt, Artificial Sequence
  Description of Artificial Sequence: Synthetic oligonucleotide
  Sense Strand Starting at position 1140 of SEQ ID NO: 318341
acagauugccuuugacaua

SEQ ID NO: 408168 - RNA, 19 nt, Artificial Sequence
  Description of Artificial Sequence: Synthetic oligonucleotide
  Antisense Strand to SEQ ID NO: 408167
uaugucaaaggcaaucugu

SEQ ID NO: 408169 - RNA, 19 nt, Artificial Sequence
  Description of Artificial Sequence: Synthetic oligonucleotide
  Sense Strand Starting at position 1140 of SEQ ID NO: 318454
ugagguuuacuuugcucuu

SEQ ID NO: 408170 - RNA, 19 nt, Artificial Sequence
  Description of Artificial Sequence: Synthetic oligonucleotide
  Antisense Strand to SEQ ID NO: 408169
aagagcaaaguaaaccuca

SEQ ID NO: 408171 - RNA, 19 nt, Artificial Sequence
  Description of Artificial Sequence: Synthetic oligonucleotide
  Sense Strand Starting at position 1140 of SEQ ID NO: 318455
gagguuuacuuugcucuuu

SEQ ID NO: 408172 - RNA, 19 nt, Artificial Sequence
  Description of Artificial Sequence: Synthetic oligonucleotide
  Antisense Strand to SEQ ID NO: 408171
aaagagcaaaguaaaccuc

SEQ ID NO: 408173 - RNA, 19 nt, Artificial Sequence
  Description of Artificial Sequence: Synthetic oligonucleotide
  Sense Strand Starting at position 1140 of SEQ ID NO: 318613
ugaggugacguuuguauuu

SEQ ID NO: 408174 - RNA, 19 nt, Artificial Sequence
  Description of Artificial Sequence: Synthetic oligonucleotide
  Antisense Strand to SEQ ID NO: 408173
aaauacaaacgucaccuca

SEQ ID NO: 408175 - RNA, 19 nt, Artificial Sequence
  Description of Artificial Sequence: Synthetic oligonucleotide
  Sense Strand Starting at position 1140 of SEQ ID NO: 318646
gccaguagugacuacuguu

SEQ ID NO: 408176 - RNA, 19 nt, Artificial Sequence
  Description of Artificial Sequence: Synthetic oligonucleotide
  Antisense Strand to SEQ ID NO: 408175
aacaguagucacuacuggc

SEQ ID NO: 408177 - RNA, 19 nt, Artificial Sequence
  Description of Artificial Sequence: Synthetic oligonucleotide
  Sense Strand Starting at position 1140 of SEQ ID NO: 318755
ucagguguaaagugagaua

SEQ ID NO: 408178 - RNA, 19 nt, Artificial Sequence
  Description of Artificial Sequence: Synthetic oligonucleotide
  Antisense Strand to SEQ ID NO: 408177
uaucucacuuuacaccuga

SEQ ID NO: 408179 - RNA, 19 nt, Artificial Sequence
  Description of Artificial Sequence: Synthetic oligonucleotide
  Sense Strand Starting at position 1140 of SEQ ID NO: 318779
gcuagucuugaagggugau

SEQ ID NO: 408180 - RNA, 19 nt, Artificial Sequence
  Description of Artificial Sequence: Synthetic oligonucleotide
  Antisense Strand to SEQ ID NO: 408179
aucacccuucaagacuagc

SEQ ID NO: 408181 - RNA, 19 nt, Artificial Sequence
  Description of Artificial Sequence: Synthetic oligonucleotide
  Sense Strand Starting at position 1140 of SEQ ID NO: 318780
cuagucuugaagggugauu

SEQ ID NO: 408182 - RNA, 19 nt, Artificial Sequence
  Description of Artificial Sequence: Synthetic oligonucleotide
  Antisense Strand to SEQ ID NO: 408181
aaucacccuucaagacuag

SEQ ID NO: 408183 - RNA, 19 nt, Artificial Sequence
  Description of Artificial Sequence: Synthetic oligonucleotide
  Sense Strand Starting at position 1140 of SEQ ID NO: 318782
agucuugaagggugauuag

SEQ ID NO: 408184 - RNA, 19 nt, Artificial Sequence
  Description of Artificial Sequence: Synthetic oligonucleotide
  Antisense Strand to SEQ ID NO: 408183
cuaaucacccuucaagacu

SEQ ID NO: 408185 - RNA, 19 nt, Artificial Sequence
  Description of Artificial Sequence: Synthetic oligonucleotide
  Sense Strand Starting at position 1140 of SEQ ID NO: 318789
aagggugauuaggauuaaa

SEQ ID NO: 408186 - RNA, 19 nt, Artificial Sequence
  Description of Artificial Sequence: Synthetic oligonucleotide
  Antisense Strand to SEQ ID NO: 408185
uuuaauccuaaucacccuu

SEQ ID NO: 408187 - RNA, 19 nt, Artificial Sequence
  Description of Artificial Sequence: Synthetic oligonucleotide
  Sense Strand Starting at position 1140 of SEQ ID NO: 318915
gucauugcccaccaugagu

SEQ ID NO: 408188 - RNA, 19 nt, Artificial Sequence
  Description of Artificial Sequence: Synthetic oligonucleotide
  Antisense Strand to SEQ ID NO: 408187
acucauggugggcaaugac

SEQ ID NO: 408189 - RNA, 19 nt, Artificial Sequence
  Description of Artificial Sequence: Synthetic oligonucleotide
  Sense Strand Starting at position 1140 of SEQ ID NO: 318975
cugcaagccagucauggua

SEQ ID NO: 408190 - RNA, 19 nt, Artificial Sequence
  Description of Artificial Sequence: Synthetic oligonucleotide
  Antisense Strand to SEQ ID NO: 408189
uaccaugacuggcuugcag

SEQ ID NO: 408191 - RNA, 19 nt, Artificial Sequence
  Description of Artificial Sequence: Synthetic oligonucleotide
  Sense Strand Starting at position 1140 of SEQ ID NO: 318978
caagccagucaugguagaa

SEQ ID NO: 408192 - RNA, 19 nt, Artificial Sequence
  Description of Artificial Sequence: Synthetic oligonucleotide
  Antisense Strand to SEQ ID NO: 408191
uucuaccaugacuggcuug

SEQ ID NO: 408193 - RNA, 19 nt, Artificial Sequence
  Description of Artificial Sequence: Synthetic oligonucleotide
  Sense Strand Starting at position 1140 of SEQ ID NO: 319004
aacagagucagguggucua

SEQ ID NO: 408194 - RNA, 19 nt, Artificial Sequence
  Description of Artificial Sequence: Synthetic oligonucleotide
  Antisense Strand to SEQ ID NO: 408193
uagaccaccugacucuguu

SEQ ID NO: 408195 - RNA, 19 nt, Artificial Sequence
  Description of Artificial Sequence: Synthetic oligonucleotide
  Sense Strand Starting at position 1140 of SEQ ID NO: 319035
cuacauuggagcugugacu

SEQ ID NO: 408196 - RNA, 19 nt, Artificial Sequence
  Description of Artificial Sequence: Synthetic oligonucleotide
  Antisense Strand to SEQ ID NO: 408195
agucacagcuccaauguag

SEQ ID NO: 408197 - RNA, 19 nt, Artificial Sequence
  Description of Artificial Sequence: Synthetic oligonucleotide
  Sense Strand Starting at position 1140 of SEQ ID NO: 319091
cugagauaucacugcuaug

SEQ ID NO: 408198 - RNA, 19 nt, Artificial Sequence
  Description of Artificial Sequence: Synthetic oligonucleotide
  Antisense Strand to SEQ ID NO: 408197
cauagcagugauaucucag

SEQ ID NO: 408199 - RNA, 19 nt, Artificial Sequence
  Description of Artificial Sequence: Synthetic oligonucleotide
  Sense Strand Starting at position 1140 of SEQ ID NO: 319105
cuauguaacucucugugau

SEQ ID NO: 408200 - RNA, 19 nt, Artificial Sequence
  Description of Artificial Sequence: Synthetic oligonucleotide
  Antisense Strand to SEQ ID NO: 408199
aucacagagaguuacauag

SEQ ID NO: 408201 - RNA, 19 nt, Artificial Sequence
  Description of Artificial Sequence: Synthetic oligonucleotide
  Sense Strand Starting at position 1140 of SEQ ID NO: 319106
uauguaacucucugugaug

SEQ ID NO: 408202 - RNA, 19 nt, Artificial Sequence
  Description of Artificial Sequence: Synthetic oligonucleotide
  Antisense Strand to SEQ ID NO: 408201
caucacagagaguuacaua

SEQ ID NO: 408203 - RNA, 19 nt, Artificial Sequence
  Description of Artificial Sequence: Synthetic oligonucleotide
  Sense Strand Starting at position 1140 of SEQ ID NO: 319177
auuguaugggcacaugauu

SEQ ID NO: 408204 - RNA, 19 nt, Artificial Sequence
  Description of Artificial Sequence: Synthetic oligonucleotide
  Antisense Strand to SEQ ID NO: 408203
aaucaugugcccauacaau

SEQ ID NO: 408205 - RNA, 19 nt, Artificial Sequence
  Description of Artificial Sequence: Synthetic oligonucleotide
  Sense Strand Starting at position 1140 of SEQ ID NO: 319183
ugggcacaugauugcuauu

SEQ ID NO: 408206 - RNA, 19 nt, Artificial Sequence
  Description of Artificial Sequence: Synthetic oligonucleotide
  Antisense Strand to SEQ ID NO: 408205
aauagcaaucaugugccca

SEQ ID NO: 408207 - RNA, 19 nt, Artificial Sequence
  Description of Artificial Sequence: Synthetic oligonucleotide
  Sense Strand Starting at position 1140 of SEQ ID NO: 319185
ggcacaugauugcuauuau

SEQ ID NO: 408208 - RNA, 19 nt, Artificial Sequence
  Description of Artificial Sequence: Synthetic oligonucleotide
  Antisense Strand to SEQ ID NO: 408207
auaauagcaaucaugugcc

SEQ ID NO: 408209 - RNA, 19 nt, Artificial Sequence
  Description of Artificial Sequence: Synthetic oligonucleotide
  Sense Strand Starting at position 1140 of SEQ ID NO: 319212
uuuauauuccuguggaaac

SEQ ID NO: 408210 - RNA, 19 nt, Artificial Sequence
  Description of Artificial Sequence: Synthetic oligonucleotide
  Antisense Strand to SEQ ID NO: 408209
guuuccacaggaauauaaa

SEQ ID NO: 408211 - RNA, 19 nt, Artificial Sequence
  Description of Artificial Sequence: Synthetic oligonucleotide
  Sense Strand Starting at position 1141 of SEQ ID NO: 315356
gcaaucugggacugagaca

SEQ ID NO: 408212 - RNA, 19 nt, Artificial Sequence
  Description of Artificial Sequence: Synthetic oligonucleotide
  Antisense Strand to SEQ ID NO: 408211
ugucucagucccagauugc

SEQ ID NO: 408213 - RNA, 19 nt, Artificial Sequence
  Description of Artificial Sequence: Synthetic oligonucleotide
  Sense Strand Starting at position 1141 of SEQ ID NO: 315410
gcgacaucacaaggaauga

SEQ ID NO: 408214 - RNA, 19 nt, Artificial Sequence
  Description of Artificial Sequence: Synthetic oligonucleotide
  Antisense Strand to SEQ ID NO: 408213
ucauuccuugugaugucgc

SEQ ID NO: 408215 - RNA, 19 nt, Artificial Sequence
  Description of Artificial Sequence: Synthetic oligonucleotide
  Sense Strand Starting at position 1141 of SEQ ID NO: 315535
caaagacccucuguggaau

SEQ ID NO: 408216 - RNA, 19 nt, Artificial Sequence
  Description of Artificial Sequence: Synthetic oligonucleotide
  Antisense Strand to SEQ ID NO: 408215
auuccacagagggucuuug

SEQ ID NO: 408217 - RNA, 19 nt, Artificial Sequence
  Description of Artificial Sequence: Synthetic oligonucleotide
  Sense Strand Starting at position 1141 of SEQ ID NO: 315536
aaagacccucuguggaauu

SEQ ID NO: 408218 - RNA, 19 nt, Artificial Sequence
  Description of Artificial Sequence: Synthetic oligonucleotide
  Antisense Strand to SEQ ID NO: 408217
aauuccacagagggucuuu

SEQ ID NO: 408219 - RNA, 19 nt, Artificial Sequence
  Description of Artificial Sequence: Synthetic oligonucleotide
  Sense Strand Starting at position 1141 of SEQ ID NO: 315555
uggccuuacucagagacaa

SEQ ID NO: 408220 - RNA, 19 nt, Artificial Sequence
  Description of Artificial Sequence: Synthetic oligonucleotide
  Antisense Strand to SEQ ID NO: 408219
uugucucugaguaaggcca

SEQ ID NO: 408221 - RNA, 19 nt, Artificial Sequence
  Description of Artificial Sequence: Synthetic oligonucleotide
  Sense Strand Starting at position 1141 of SEQ ID NO: 315605
uucgcagaucuugguauga

SEQ ID NO: 408222 - RNA, 19 nt, Artificial Sequence
  Description of Artificial Sequence: Synthetic oligonucleotide
  Antisense Strand to SEQ ID NO: 408221
ucauaccaagaucugcgaa

SEQ ID NO: 408223 - RNA, 19 nt, Artificial Sequence
  Description of Artificial Sequence: Synthetic oligonucleotide
  Sense Strand Starting at position 1141 of SEQ ID NO: 315626
agcguucuuagugaaacaa

SEQ ID NO: 408224 - RNA, 19 nt, Artificial Sequence
  Description of Artificial Sequence: Synthetic oligonucleotide
  Antisense Strand to SEQ ID NO: 408223
uuguuucacuaagaacgcu

SEQ ID NO: 408225 - RNA, 19 nt, Artificial Sequence
  Description of Artificial Sequence: Synthetic oligonucleotide
  Sense Strand Starting at position 1141 of SEQ ID NO: 315673
augucaaaucggcaugcuu

SEQ ID NO: 408226 - RNA, 19 nt, Artificial Sequence
  Description of Artificial Sequence: Synthetic oligonucleotide
  Antisense Strand to SEQ ID NO: 408225
aagcaugccgauuugacau

SEQ ID NO: 408227 - RNA, 19 nt, Artificial Sequence
  Description of Artificial Sequence: Synthetic oligonucleotide
  Sense Strand Starting at position 1141 of SEQ ID NO: 315675
gucaaaucggcaugcuuuc

SEQ ID NO: 408228 - RNA, 19 nt, Artificial Sequence
  Description of Artificial Sequence: Synthetic oligonucleotide
  Antisense Strand to SEQ ID NO: 408227
gaaagcaugccgauuugac

SEQ ID NO: 408229 - RNA, 19 nt, Artificial Sequence
  Description of Artificial Sequence: Synthetic oligonucleotide
  Sense Strand Starting at position 1141 of SEQ ID NO: 315716
cugagcagauguucccaaa

SEQ ID NO: 408230 - RNA, 19 nt, Artificial Sequence
  Description of Artificial Sequence: Synthetic oligonucleotide
  Antisense Strand to SEQ ID NO: 408229
uuugggaacaucugcucag

SEQ ID NO: 408231 - RNA, 19 nt, Artificial Sequence
  Description of Artificial Sequence: Synthetic oligonucleotide
  Sense Strand Starting at position 1141 of SEQ ID NO: 315977
gcaaaugggacuuacgacu

SEQ ID NO: 408232 - RNA, 19 nt, Artificial Sequence
  Description of Artificial Sequence: Synthetic oligonucleotide
  Antisense Strand to SEQ ID NO: 408231
agucguaagucccauuugc

SEQ ID NO: 408233 - RNA, 19 nt, Artificial Sequence
  Description of Artificial Sequence: Synthetic oligonucleotide
  Sense Strand Starting at position 1141 of SEQ ID NO: 315992
gacuuuagacucgguguga

SEQ ID NO: 408234 - RNA, 19 nt, Artificial Sequence
  Description of Artificial Sequence: Synthetic oligonucleotide
  Antisense Strand to SEQ ID NO: 408233
ucacaccgagucuaaaguc

SEQ ID NO: 408235 - RNA, 19 nt, Artificial Sequence
  Description of Artificial Sequence: Synthetic oligonucleotide
  Sense Strand Starting at position 1141 of SEQ ID NO: 315993
acuuuagacucggugugau

SEQ ID NO: 408236 - RNA, 19 nt, Artificial Sequence
  Description of Artificial Sequence: Synthetic oligonucleotide
  Antisense Strand to SEQ ID NO: 408235
aucacaccgagucuaaagu

SEQ ID NO: 408237 - RNA, 19 nt, Artificial Sequence
  Description of Artificial Sequence: Synthetic oligonucleotide
  Sense Strand Starting at position 1141 of SEQ ID NO: 316006
ugugauuucugauacacua

SEQ ID NO: 408238 - RNA, 19 nt, Artificial Sequence
  Description of Artificial Sequence: Synthetic oligonucleotide
  Antisense Strand to SEQ ID NO: 408237
uaguguaucagaaaucaca

SEQ ID NO: 408239 - RNA, 19 nt, Artificial Sequence
  Description of Artificial Sequence: Synthetic oligonucleotide
  Sense Strand Starting at position 1141 of SEQ ID NO: 316247
uugagauugccgggaucuc

SEQ ID NO: 408240 - RNA, 19 nt, Artificial Sequence
  Description of Artificial Sequence: Synthetic oligonucleotide
  Antisense Strand to SEQ ID NO: 408239
gagaucccggcaaucucaa

SEQ ID NO: 408241 - RNA, 19 nt, Artificial Sequence
  Description of Artificial Sequence: Synthetic oligonucleotide
  Sense Strand Starting at position 1141 of SEQ ID NO: 317694
gcagaagguuuggucccua

SEQ ID NO: 408242 - RNA, 19 nt, Artificial Sequence
  Description of Artificial Sequence: Synthetic oligonucleotide
  Antisense Strand to SEQ ID NO: 408241
uagggaccaaaccuucugc

SEQ ID NO: 408243 - RNA, 19 nt, Artificial Sequence
  Description of Artificial Sequence: Synthetic oligonucleotide
  Sense Strand Starting at position 1141 of SEQ ID NO: 317699
agguuuggucccuaucaga

SEQ ID NO: 408244 - RNA, 19 nt, Artificial Sequence
  Description of Artificial Sequence: Synthetic oligonucleotide
  Antisense Strand to SEQ ID NO: 408243
ucugauagggaccaaaccu

SEQ ID NO: 408245 - RNA, 19 nt, Artificial Sequence
  Description of Artificial Sequence: Synthetic oligonucleotide
  Sense Strand Starting at position 1141 of SEQ ID NO: 317766
aagggcaaauguguucgua

SEQ ID NO: 408246 - RNA, 19 nt, Artificial Sequence
  Description of Artificial Sequence: Synthetic oligonucleotide
  Antisense Strand to SEQ ID NO: 408245
uacgaacacauuugcccuu

SEQ ID NO: 408247 - RNA, 19 nt, Artificial Sequence
  Description of Artificial Sequence: Synthetic oligonucleotide
  Sense Strand Starting at position 1141 of SEQ ID NO: 317768
gggcaaauguguucguacu

SEQ ID NO: 408248 - RNA, 19 nt, Artificial Sequence
  Description of Artificial Sequence: Synthetic oligonucleotide
  Antisense Strand to SEQ ID NO: 408247
aguacgaacacauuugccc

SEQ ID NO: 408249 - RNA, 19 nt, Artificial Sequence
  Description of Artificial Sequence: Synthetic oligonucleotide
  Sense Strand Starting at position 1141 of SEQ ID NO: 317879
cguuauuaauguccucuua

SEQ ID NO: 408250 - RNA, 19 nt, Artificial Sequence
  Description of Artificial Sequence: Synthetic oligonucleotide
  Antisense Strand to SEQ ID NO: 408249
uaagaggacauuaauaacg

SEQ ID NO: 408251 - RNA, 19 nt, Artificial Sequence
  Description of Artificial Sequence: Synthetic oligonucleotide
  Sense Strand Starting at position 1141 of SEQ ID NO: 317898
cuuggauggcucugaauac

SEQ ID NO: 408252 - RNA, 19 nt, Artificial Sequence
  Description of Artificial Sequence: Synthetic oligonucleotide
  Antisense Strand to SEQ ID NO: 408251
guauucagagccauccaag

SEQ ID NO: 408253 - RNA, 19 nt, Artificial Sequence
  Description of Artificial Sequence: Synthetic oligonucleotide
  Sense Strand Starting at position 1141 of SEQ ID NO: 317919
uuuaaaguguguuugucaa

SEQ ID NO: 408254 - RNA, 19 nt, Artificial Sequence
  Description of Artificial Sequence: Synthetic oligonucleotide
  Antisense Strand to SEQ ID NO: 408253
uugacaaacacacuuuaaa

SEQ ID NO: 408255 - RNA, 19 nt, Artificial Sequence
  Description of Artificial Sequence: Synthetic oligonucleotide
  Sense Strand Starting at position 1141 of SEQ ID NO: 317921
uaaaguguguuugucaaau

SEQ ID NO: 408256 - RNA, 19 nt, Artificial Sequence
  Description of Artificial Sequence: Synthetic oligonucleotide
  Antisense Strand to SEQ ID NO: 408255
auuugacaaacacacuuua

SEQ ID NO: 408257 - RNA, 19 nt, Artificial Sequence
  Description of Artificial Sequence: Synthetic oligonucleotide
  Sense Strand Starting at position 1141 of SEQ ID NO: 317983
ggcccugagcaguguaauc

SEQ ID NO: 408258 - RNA, 19 nt, Artificial Sequence
  Description of Artificial Sequence: Synthetic oligonucleotide
  Antisense Strand to SEQ ID NO: 408257
gauuacacugcucagggcc

SEQ ID NO: 408259 - RNA, 19 nt, Artificial Sequence
  Description of Artificial Sequence: Synthetic oligonucleotide
  Sense Strand Starting at position 1141 of SEQ ID NO: 318034
cacggacuuggauguaauu

SEQ ID NO: 408260 - RNA, 19 nt, Artificial Sequence
  Description of Artificial Sequence: Synthetic oligonucleotide
  Antisense Strand to SEQ ID NO: 408259
aauuacauccaaguccgug

SEQ ID NO: 408261 - RNA, 19 nt, Artificial Sequence
  Description of Artificial Sequence: Synthetic oligonucleotide
  Sense Strand Starting at position 1141 of SEQ ID NO: 318053
caaaguuggcaauguguca

SEQ ID NO: 408262 - RNA, 19 nt, Artificial Sequence
  Description of Artificial Sequence: Synthetic oligonucleotide
  Antisense Strand to SEQ ID NO: 408261
ugacacauugccaacuuug

SEQ ID NO: 408263 - RNA, 19 nt, Artificial Sequence
  Description of Artificial Sequence: Synthetic oligonucleotide
  Sense Strand Starting at position 1141 of SEQ ID NO: 318379
cugccaaagugcucuggua

SEQ ID NO: 408264 - RNA, 19 nt, Artificial Sequence
  Description of Artificial Sequence: Synthetic oligonucleotide
  Antisense Strand to SEQ ID NO: 408263
uaccagagcacuuuggcag

SEQ ID NO: 408265 - RNA, 19 nt, Artificial Sequence
  Description of Artificial Sequence: Synthetic oligonucleotide
  Sense Strand Starting at position 1141 of SEQ ID NO: 318381
gccaaagugcucugguauu

SEQ ID NO: 408266 - RNA, 19 nt, Artificial Sequence
  Description of Artificial Sequence: Synthetic oligonucleotide
  Antisense Strand to SEQ ID NO: 408265
aauaccagagcacuuuggc

SEQ ID NO: 408267 - RNA, 19 nt, Artificial Sequence
  Description of Artificial Sequence: Synthetic oligonucleotide
  Sense Strand Starting at position 1141 of SEQ ID NO: 318391
ucugguauuugucuuaauu

SEQ ID NO: 408268 - RNA, 19 nt, Artificial Sequence
  Description of Artificial Sequence: Synthetic oligonucleotide
  Antisense Strand to SEQ ID NO: 408267
aauuaagacaaauaccaga

SEQ ID NO: 408269 - RNA, 19 nt, Artificial Sequence
  Description of Artificial Sequence: Synthetic oligonucleotide
  Sense Strand Starting at position 1141 of SEQ ID NO: 318393
ugguauuugucuuaauugu

SEQ ID NO: 408270 - RNA, 19 nt, Artificial Sequence
  Description of Artificial Sequence: Synthetic oligonucleotide
  Antisense Strand to SEQ ID NO: 408269
acaauuaagacaaauacca

SEQ ID NO: 408271 - RNA, 19 nt, Artificial Sequence
  Description of Artificial Sequence: Synthetic oligonucleotide
  Sense Strand Starting at position 1141 of SEQ ID NO: 318418
agcccuaggagguaucauu

SEQ ID NO: 408272 - RNA, 19 nt, Artificial Sequence
  Description of Artificial Sequence: Synthetic oligonucleotide
  Antisense Strand to SEQ ID NO: 408271
aaugauaccuccuagggcu

SEQ ID NO: 408273 - RNA, 19 nt, Artificial Sequence
  Description of Artificial Sequence: Synthetic oligonucleotide
  Sense Strand Starting at position 1141 of SEQ ID NO: 318425
ggagguaucauuuguuguu

SEQ ID NO: 408274 - RNA, 19 nt, Artificial Sequence
  Description of Artificial Sequence: Synthetic oligonucleotide
  Antisense Strand to SEQ ID NO: 408273
aacaacaaaugauaccucc

SEQ ID NO: 408275 - RNA, 19 nt, Artificial Sequence
  Description of Artificial Sequence: Synthetic oligonucleotide
  Sense Strand Starting at position 1141 of SEQ ID NO: 318426
gagguaucauuuguuguuu

SEQ ID NO: 408276 - RNA, 19 nt, Artificial Sequence
  Description of Artificial Sequence: Synthetic oligonucleotide
  Antisense Strand to SEQ ID NO: 408275
aaacaacaaaugauaccuc

SEQ ID NO: 408277 - RNA, 19 nt, Artificial Sequence
  Description of Artificial Sequence: Synthetic oligonucleotide
  Sense Strand Starting at position 1141 of SEQ ID NO: 318809
acagauugccuuugacaua

SEQ ID NO: 408278 - RNA, 19 nt, Artificial Sequence
  Description of Artificial Sequence: Synthetic oligonucleotide
  Antisense Strand to SEQ ID NO: 408277
uaugucaaaggcaaucugu

SEQ ID NO: 408279 - RNA, 19 nt, Artificial Sequence
  Description of Artificial Sequence: Synthetic oligonucleotide
  Sense Strand Starting at position 1141 of SEQ ID NO: 318867
acaucaggauagugaaaga

SEQ ID NO: 408280 - RNA, 19 nt, Artificial Sequence
  Description of Artificial Sequence: Synthetic oligonucleotide
  Antisense Strand to SEQ ID NO: 408279
ucuuucacuauccugaugu

SEQ ID NO: 408281 - RNA, 19 nt, Artificial Sequence
  Description of Artificial Sequence: Synthetic oligonucleotide
  Sense Strand Starting at position 1141 of SEQ ID NO: 318922
ugagguuuacuuugcucuu

SEQ ID NO: 408282 - RNA, 19 nt, Artificial Sequence
  Description of Artificial Sequence: Synthetic oligonucleotide
  Antisense Strand to SEQ ID NO: 408281
aagagcaaaguaaaccuca

SEQ ID NO: 408283 - RNA, 19 nt, Artificial Sequence
  Description of Artificial Sequence: Synthetic oligonucleotide
  Sense Strand Starting at position 1141 of SEQ ID NO: 318923
gagguuuacuuugcucuuu

SEQ ID NO: 408284 - RNA, 19 nt, Artificial Sequence
  Description of Artificial Sequence: Synthetic oligonucleotide
  Antisense Strand to SEQ ID NO: 408283
aaagagcaaaguaaaccuc

SEQ ID NO: 408285 - RNA, 19 nt, Artificial Sequence
  Description of Artificial Sequence: Synthetic oligonucleotide
  Sense Strand Starting at position 1141 of SEQ ID NO: 319081
ugaggugacguuuguauuu

SEQ ID NO: 408286 - RNA, 19 nt, Artificial Sequence
  Description of Artificial Sequence: Synthetic oligonucleotide
  Antisense Strand to SEQ ID NO: 408285
aaauacaaacgucaccuca

SEQ ID NO: 408287 - RNA, 19 nt, Artificial Sequence
  Description of Artificial Sequence: Synthetic oligonucleotide
  Sense Strand Starting at position 1141 of SEQ ID NO: 319083
aggugacguuuguauuuca

SEQ ID NO: 408288 - RNA, 19 nt, Artificial Sequence
  Description of Artificial Sequence: Synthetic oligonucleotide
  Antisense Strand to SEQ ID NO: 408287
ugaaauacaaacgucaccu

SEQ ID NO: 408289 - RNA, 19 nt, Artificial Sequence
  Description of Artificial Sequence: Synthetic oligonucleotide
  Sense Strand Starting at position 1141 of SEQ ID NO: 319114
gccaguagugacuacuguu

SEQ ID NO: 408290 - RNA, 19 nt, Artificial Sequence
  Description of Artificial Sequence: Synthetic oligonucleotide
  Antisense Strand to SEQ ID NO: 408289
aacaguagucacuacuggc

SEQ ID NO: 408291 - RNA, 19 nt, Artificial Sequence
  Description of Artificial Sequence: Synthetic oligonucleotide
  Sense Strand Starting at position 1142 of SEQ ID NO: 315777
aacauaaauccguggugcu

SEQ ID NO: 408292 - RNA, 19 nt, Artificial Sequence
  Description of Artificial Sequence: Synthetic oligonucleotide
  Antisense Strand to SEQ ID NO: 408291
agcaccacggauuuauguu

SEQ ID NO: 408293 - RNA, 19 nt, Artificial Sequence
  Description of Artificial Sequence: Synthetic oligonucleotide
  Sense Strand Starting at position 1142 of SEQ ID NO: 315790
ggugcuuugcaaggagaua

SEQ ID NO: 408294 - RNA, 19 nt, Artificial Sequence
  Description of Artificial Sequence: Synthetic oligonucleotide
  Antisense Strand to SEQ ID NO: 408293
uaucuccuugcaaagcacc

SEQ ID NO: 408295 - RNA, 19 nt, Artificial Sequence
  Description of Artificial Sequence: Synthetic oligonucleotide
  Sense Strand Starting at position 1142 of SEQ ID NO: 315791
gugcuuugcaaggagauaa

SEQ ID NO: 408296 - RNA, 19 nt, Artificial Sequence
  Description of Artificial Sequence: Synthetic oligonucleotide
  Antisense Strand to SEQ ID NO: 408295
uuaucuccuugcaaagcac

SEQ ID NO: 408297 - RNA, 19 nt, Artificial Sequence
  Description of Artificial Sequence: Synthetic oligonucleotide
  Sense Strand Starting at position 1142 of SEQ ID NO: 315872
agauuuaaaucagaugauc

SEQ ID NO: 408298 - RNA, 19 nt, Artificial Sequence
  Description of Artificial Sequence: Synthetic oligonucleotide
  Antisense Strand to SEQ ID NO: 408297
gaucaucugauuuaaaucu

SEQ ID NO: 408299 - RNA, 19 nt, Artificial Sequence
  Description of Artificial Sequence: Synthetic oligonucleotide
  Sense Strand Starting at position 1142 of SEQ ID NO: 315880
aucagaugaucagagaaag

SEQ ID NO: 408300 - RNA, 19 nt, Artificial Sequence
  Description of Artificial Sequence: Synthetic oligonucleotide
  Antisense Strand to SEQ ID NO: 408299
cuuucucugaucaucugau

SEQ ID NO: 408301 - RNA, 19 nt, Artificial Sequence
  Description of Artificial Sequence: Synthetic oligonucleotide
  Sense Strand Starting at position 1142 of SEQ ID NO: 316322
gcagacucugaaggaaauu

SEQ ID NO: 408302 - RNA, 19 nt, Artificial Sequence
  Description of Artificial Sequence: Synthetic oligonucleotide
  Antisense Strand to SEQ ID NO: 408301
aauuuccuucagagucugc

SEQ ID NO: 408303 - RNA, 19 nt, Artificial Sequence
  Description of Artificial Sequence: Synthetic oligonucleotide
  Sense Strand Starting at position 1142 of SEQ ID NO: 316431
aaacgugcaucuccagaga

SEQ ID NO: 408304 - RNA, 19 nt, Artificial Sequence
  Description of Artificial Sequence: Synthetic oligonucleotide
  Antisense Strand to SEQ ID NO: 408303
ucucuggagaugcacguuu

SEQ ID NO: 408305 - RNA, 19 nt, Artificial Sequence
  Description of Artificial Sequence: Synthetic oligonucleotide
  Sense Strand Starting at position 1142 of SEQ ID NO: 316434
cgugcaucuccagagaauc

SEQ ID NO: 408306 - RNA, 19 nt, Artificial Sequence
  Description of Artificial Sequence: Synthetic oligonucleotide
  Antisense Strand to SEQ ID NO: 408305
gauucucuggagaugcacg

SEQ ID NO: 408307 - RNA, 19 nt, Artificial Sequence
  Description of Artificial Sequence: Synthetic oligonucleotide
  Sense Strand Starting at position 1142 of SEQ ID NO: 316521
acccaaaggucugagaaga

SEQ ID NO: 408308 - RNA, 19 nt, Artificial Sequence
  Description of Artificial Sequence: Synthetic oligonucleotide
  Antisense Strand to SEQ ID NO: 408307
ucuucucagaccuuugggu

SEQ ID NO: 408309 - RNA, 19 nt, Artificial Sequence
  Description of Artificial Sequence: Synthetic oligonucleotide
  Sense Strand Starting at position 1142 of SEQ ID NO: 316623
aggcauuccuuccuacuga

SEQ ID NO: 408310 - RNA, 19 nt, Artificial Sequence
  Description of Artificial Sequence: Synthetic oligonucleotide
  Antisense Strand to SEQ ID NO: 408309
ucaguaggaaggaaugccu

SEQ ID NO: 408311 - RNA, 19 nt, Artificial Sequence
  Description of Artificial Sequence: Synthetic oligonucleotide
  Sense Strand Starting at position 1142 of SEQ ID NO: 316675
agcuacuguuagcuaaaga

SEQ ID NO: 408312 - RNA, 19 nt, Artificial Sequence
  Description of Artificial Sequence: Synthetic oligonucleotide
  Antisense Strand to SEQ ID NO: 408311
ucuuuagcuaacaguagcu

SEQ ID NO: 408313 - RNA, 19 nt, Artificial Sequence
  Description of Artificial Sequence: Synthetic oligonucleotide
  Sense Strand Starting at position 1142 of SEQ ID NO: 316705
gcacuuaagacuuguaagg

SEQ ID NO: 408314 - RNA, 19 nt, Artificial Sequence
  Description of Artificial Sequence: Synthetic oligonucleotide
  Antisense Strand to SEQ ID NO: 408313
ccuuacaagucuuaagugc

SEQ ID NO: 408315 - RNA, 19 nt, Artificial Sequence
  Description of Artificial Sequence: Synthetic oligonucleotide
  Sense Strand Starting at position 1142 of SEQ ID NO: 316821
cacagaagaugacuuaugu

SEQ ID NO: 408316 - RNA, 19 nt, Artificial Sequence
  Description of Artificial Sequence: Synthetic oligonucleotide
  Antisense Strand to SEQ ID NO: 408315
acauaagucaucuucugug

SEQ ID NO: 408317 - RNA, 19 nt, Artificial Sequence
  Description of Artificial Sequence: Synthetic oligonucleotide
  Sense Strand Starting at position 1142 of SEQ ID NO: 316830
ugacuuaugugaccauaug

SEQ ID NO: 408318 - RNA, 19 nt, Artificial Sequence
  Description of Artificial Sequence: Synthetic oligonucleotide
  Antisense Strand to SEQ ID NO: 408317
cauauggucacauaaguca

SEQ ID NO: 408319 - RNA, 19 nt, Artificial Sequence
  Description of Artificial Sequence: Synthetic oligonucleotide
  Sense Strand Starting at position 1142 of SEQ ID NO: 316831
gacuuaugugaccauaugu

SEQ ID NO: 408320 - RNA, 19 nt, Artificial Sequence
  Description of Artificial Sequence: Synthetic oligonucleotide
  Antisense Strand to SEQ ID NO: 408319
acauauggucacauaaguc

SEQ ID NO: 408321 - RNA, 19 nt, Artificial Sequence
  Description of Artificial Sequence: Synthetic oligonucleotide
  Sense Strand Starting at position 1142 of SEQ ID NO: 316953
gggcuuaguguccaagaca

SEQ ID NO: 408322 - RNA, 19 nt, Artificial Sequence
  Description of Artificial Sequence: Synthetic oligonucleotide
  Antisense Strand to SEQ ID NO: 408321
ugucuuggacacuaagccc

SEQ ID NO: 408323 - RNA, 19 nt, Artificial Sequence
  Description of Artificial Sequence: Synthetic oligonucleotide
  Sense Strand Starting at position 1142 of SEQ ID NO: 317285
auagaagcuuccuugacgu

SEQ ID NO: 408324 - RNA, 19 nt, Artificial Sequence
  Description of Artificial Sequence: Synthetic oligonucleotide
  Antisense Strand to SEQ ID NO: 408323
acgucaaggaagcuucuau

SEQ ID NO: 408325 - RNA, 19 nt, Artificial Sequence
  Description of Artificial Sequence: Synthetic oligonucleotide
  Sense Strand Starting at position 1142 of SEQ ID NO: 317287
agaagcuuccuugacguca

SEQ ID NO: 408326 - RNA, 19 nt, Artificial Sequence
  Description of Artificial Sequence: Synthetic oligonucleotide
  Antisense Strand to SEQ ID NO: 408325
ugacgucaaggaagcuucu

SEQ ID NO: 408327 - RNA, 19 nt, Artificial Sequence
  Description of Artificial Sequence: Synthetic oligonucleotide
  Sense Strand Starting at position 1142 of SEQ ID NO: 317291
gcuuccuugacgucagcau

SEQ ID NO: 408328 - RNA, 19 nt, Artificial Sequence
  Description of Artificial Sequence: Synthetic oligonucleotide
  Antisense Strand to SEQ ID NO: 408327
augcugacgucaaggaagc

SEQ ID NO: 408329 - RNA, 19 nt, Artificial Sequence
  Description of Artificial Sequence: Synthetic oligonucleotide
  Sense Strand Starting at position 1142 of SEQ ID NO: 317653
gccucaugggaggguugua

SEQ ID NO: 408330 - RNA, 19 nt, Artificial Sequence
  Description of Artificial Sequence: Synthetic oligonucleotide
  Antisense Strand to SEQ ID NO: 408329
uacaacccucccaugaggc

SEQ ID NO: 408331 - RNA, 19 nt, Artificial Sequence
  Description of Artificial Sequence: Synthetic oligonucleotide
  Sense Strand Starting at position 1142 of SEQ ID NO: 317781
gcauucuagcaagacugua

SEQ ID NO: 408332 - RNA, 19 nt, Artificial Sequence
  Description of Artificial Sequence: Synthetic oligonucleotide
  Antisense Strand to SEQ ID NO: 408331
uacagucuugcuagaaugc

SEQ ID NO: 408333 - RNA, 19 nt, Artificial Sequence
  Description of Artificial Sequence: Synthetic oligonucleotide
  Sense Strand Starting at position 1142 of SEQ ID NO: 317845
acacauaguccaggcauga

SEQ ID NO: 408334 - RNA, 19 nt, Artificial Sequence
  Description of Artificial Sequence: Synthetic oligonucleotide
  Antisense Strand to SEQ ID NO: 408333
ucaugccuggacuaugugu

SEQ ID NO: 408335 - RNA, 19 nt, Artificial Sequence
  Description of Artificial Sequence: Synthetic oligonucleotide
  Sense Strand Starting at position 1142 of SEQ ID NO: 318238
uguacugauuuccagauau

SEQ ID NO: 408336 - RNA, 19 nt, Artificial Sequence
  Description of Artificial Sequence: Synthetic oligonucleotide
  Antisense Strand to SEQ ID NO: 408335
auaucuggaaaucaguaca

SEQ ID NO: 408337 - RNA, 19 nt, Artificial Sequence
  Description of Artificial Sequence: Synthetic oligonucleotide
  Sense Strand Starting at position 1142 of SEQ ID NO: 318248
uccagauauccuugccugu

SEQ ID NO: 408338 - RNA, 19 nt, Artificial Sequence
  Description of Artificial Sequence: Synthetic oligonucleotide
  Antisense Strand to SEQ ID NO: 408337
acaggcaaggauaucugga

SEQ ID NO: 408339 - RNA, 19 nt, Artificial Sequence
  Description of Artificial Sequence: Synthetic oligonucleotide
  Sense Strand Starting at position 1142 of SEQ ID NO: 318251
agauauccuugccuguaau

SEQ ID NO: 408340 - RNA, 19 nt, Artificial Sequence
  Description of Artificial Sequence: Synthetic oligonucleotide
  Antisense Strand to SEQ ID NO: 408339
auuacaggcaaggauaucu

SEQ ID NO: 408341 - RNA, 19 nt, Artificial Sequence
  Description of Artificial Sequence: Synthetic oligonucleotide
  Sense Strand Starting at position 1142 of SEQ ID NO: 318252
gauauccuugccuguaaug

SEQ ID NO: 408342 - RNA, 19 nt, Artificial Sequence
  Description of Artificial Sequence: Synthetic oligonucleotide
  Antisense Strand to SEQ ID NO: 408341
cauuacaggcaaggauauc

SEQ ID NO: 408343 - RNA, 19 nt, Artificial Sequence
  Description of Artificial Sequence: Synthetic oligonucleotide
  Sense Strand Starting at position 1142 of SEQ ID NO: 318371
cucauauugccucaggaua

SEQ ID NO: 408344 - RNA, 19 nt, Artificial Sequence
  Description of Artificial Sequence: Synthetic oligonucleotide
  Antisense Strand to SEQ ID NO: 408343
uauccugaggcaauaugag

SEQ ID NO: 408345 - RNA, 19 nt, Artificial Sequence
  Description of Artificial Sequence: Synthetic oligonucleotide
  Sense Strand Starting at position 1142 of SEQ ID NO: 318565
ugauuaagacuuugccgau

SEQ ID NO: 408346 - RNA, 19 nt, Artificial Sequence
  Description of Artificial Sequence: Synthetic oligonucleotide
  Antisense Strand to SEQ ID NO: 408345
aucggcaaagucuuaauca

SEQ ID NO: 408347 - RNA, 19 nt, Artificial Sequence
  Description of Artificial Sequence: Synthetic oligonucleotide
  Sense Strand Starting at position 1142 of SEQ ID NO: 318566
gauuaagacuuugccgaug

SEQ ID NO: 408348 - RNA, 19 nt, Artificial Sequence
  Description of Artificial Sequence: Synthetic oligonucleotide
  Antisense Strand to SEQ ID NO: 408347
caucggcaaagucuuaauc

SEQ ID NO: 408349 - RNA, 19 nt, Artificial Sequence
  Description of Artificial Sequence: Synthetic oligonucleotide
  Sense Strand Starting at position 1142 of SEQ ID NO: 318569
uaagacuuugccgauguau

SEQ ID NO: 408350 - RNA, 19 nt, Artificial Sequence
  Description of Artificial Sequence: Synthetic oligonucleotide
  Antisense Strand to SEQ ID NO: 408349
auacaucggcaaagucuua

SEQ ID NO: 408351 - RNA, 19 nt, Artificial Sequence
  Description of Artificial Sequence: Synthetic oligonucleotide
  Sense Strand Starting at position 1142 of SEQ ID NO: 318602
accggaugcugccuuaaga

SEQ ID NO: 408352 - RNA, 19 nt, Artificial Sequence
  Description of Artificial Sequence: Synthetic oligonucleotide
  Antisense Strand to SEQ ID NO: 408351
ucuuaaggcagcauccggu

SEQ ID NO: 408353 - RNA, 19 nt, Artificial Sequence
  Description of Artificial Sequence: Synthetic oligonucleotide
  Sense Strand Starting at position 1142 of SEQ ID NO: 318638
gcaggucuuauagauguua

SEQ ID NO: 408354 - RNA, 19 nt, Artificial Sequence
  Description of Artificial Sequence: Synthetic oligonucleotide
  Antisense Strand to SEQ ID NO: 408353
uaacaucuauaagaccugc

SEQ ID NO: 408355 - RNA, 19 nt, Artificial Sequence
  Description of Artificial Sequence: Synthetic oligonucleotide
  Sense Strand Starting at position 1142 of SEQ ID NO: 318723
aauugaaacucagagaguu

SEQ ID NO: 408356 - RNA, 19 nt, Artificial Sequence
  Description of Artificial Sequence: Synthetic oligonucleotide
  Antisense Strand to SEQ ID NO: 408355
aacucucugaguuucaauu

SEQ ID NO: 408357 - RNA, 19 nt, Artificial Sequence
  Description of Artificial Sequence: Synthetic oligonucleotide
  Sense Strand Starting at position 1142 of SEQ ID NO: 318737
gaguuuaagucauuugcuc

SEQ ID NO: 408358 - RNA, 19 nt, Artificial Sequence
  Description of Artificial Sequence: Synthetic oligonucleotide
  Antisense Strand to SEQ ID NO: 408357
gagcaaaugacuuaaacuc

SEQ ID NO: 408359 - RNA, 19 nt, Artificial Sequence
  Description of Artificial Sequence: Synthetic oligonucleotide
  Sense Strand Starting at position 1142 of SEQ ID NO: 318754
ucaagaugucacuguaaau

SEQ ID NO: 408360 - RNA, 19 nt, Artificial Sequence
  Description of Artificial Sequence: Synthetic oligonucleotide
  Antisense Strand to SEQ ID NO: 408359
auuuacagugacaucuuga

SEQ ID NO: 408361 - RNA, 19 nt, Artificial Sequence
  Description of Artificial Sequence: Synthetic oligonucleotide
  Sense Strand Starting at position 1142 of SEQ ID NO: 318761
gucacuguaaauggugaaa

SEQ ID NO: 408362 - RNA, 19 nt, Artificial Sequence
  Description of Artificial Sequence: Synthetic oligonucleotide
  Antisense Strand to SEQ ID NO: 408361
uuucaccauuuacagugac

SEQ ID NO: 408363 - RNA, 19 nt, Artificial Sequence
  Description of Artificial Sequence: Synthetic oligonucleotide
  Sense Strand Starting at position 1142 of SEQ ID NO: 319090
cccggcugaccagauuauu

SEQ ID NO: 408364 - RNA, 19 nt, Artificial Sequence
  Description of Artificial Sequence: Synthetic oligonucleotide
  Antisense Strand to SEQ ID NO: 408363
aauaaucuggucagccggg

SEQ ID NO: 408365 - RNA, 19 nt, Artificial Sequence
  Description of Artificial Sequence: Synthetic oligonucleotide
  Sense Strand Starting at position 1142 of SEQ ID NO: 319093
ggcugaccagauuauucua

SEQ ID NO: 408366 - RNA, 19 nt, Artificial Sequence
  Description of Artificial Sequence: Synthetic oligonucleotide
  Antisense Strand to SEQ ID NO: 408365
uagaauaaucuggucagcc

SEQ ID NO: 408367 - RNA, 19 nt, Artificial Sequence
  Description of Artificial Sequence: Synthetic oligonucleotide
  Sense Strand Starting at position 1142 of SEQ ID NO: 319206
aguugcuaaucacuguauu

SEQ ID NO: 408368 - RNA, 19 nt, Artificial Sequence
  Description of Artificial Sequence: Synthetic oligonucleotide
  Antisense Strand to SEQ ID NO: 408367
aauacagugauuagcaacu

SEQ ID NO: 408369 - RNA, 19 nt, Artificial Sequence
  Description of Artificial Sequence: Synthetic oligonucleotide
  Sense Strand Starting at position 1142 of SEQ ID NO: 319209
ugcuaaucacuguauugac

SEQ ID NO: 408370 - RNA, 19 nt, Artificial Sequence
  Description of Artificial Sequence: Synthetic oligonucleotide
  Antisense Strand to SEQ ID NO: 408369
gucaauacagugauuagca

SEQ ID NO: 408371 - RNA, 19 nt, Artificial Sequence
  Description of Artificial Sequence: Synthetic oligonucleotide
  Sense Strand Starting at position 1143 of SEQ ID NO: 315244
gaaggagaguaaggaauua

SEQ ID NO: 408372 - RNA, 19 nt, Artificial Sequence
  Description of Artificial Sequence: Synthetic oligonucleotide
  Antisense Strand to SEQ ID NO: 408371
uaauuccuuacucuccuuc

SEQ ID NO: 408373 - RNA, 19 nt, Artificial Sequence
  Description of Artificial Sequence: Synthetic oligonucleotide
  Sense Strand Starting at position 1143 of SEQ ID NO: 315320
gcagcuuucuauuugaauu

SEQ ID NO: 408374 - RNA, 19 nt, Artificial Sequence
  Description of Artificial Sequence: Synthetic oligonucleotide
  Antisense Strand to SEQ ID NO: 408373
aauucaaauagaaagcugc

SEQ ID NO: 408375 - RNA, 19 nt, Artificial Sequence
  Description of Artificial Sequence: Synthetic oligonucleotide
  Sense Strand Starting at position 1143 of SEQ ID NO: 315484
ccgguuuaaacuuggacaa

SEQ ID NO: 408376 - RNA, 19 nt, Artificial Sequence
  Description of Artificial Sequence: Synthetic oligonucleotide
  Antisense Strand to SEQ ID NO: 408375
uuguccaaguuuaaaccgg

SEQ ID NO: 408377 - RNA, 19 nt, Artificial Sequence
  Description of Artificial Sequence: Synthetic oligonucleotide
  Sense Strand Starting at position 1143 of SEQ ID NO: 315485
cgguuuaaacuuggacaag

SEQ ID NO: 408378 - RNA, 19 nt, Artificial Sequence
  Description of Artificial Sequence: Synthetic oligonucleotide
  Antisense Strand to SEQ ID NO: 408377
cuuguccaaguuuaaaccg

SEQ ID NO: 408379 - RNA, 19 nt, Artificial Sequence
  Description of Artificial Sequence: Synthetic oligonucleotide
  Sense Strand Starting at position 1143 of SEQ ID NO: 315542
ugagaaggcucccuagaug

SEQ ID NO: 408380 - RNA, 19 nt, Artificial Sequence
  Description of Artificial Sequence: Synthetic oligonucleotide
  Antisense Strand to SEQ ID NO: 408379
caucuagggagccuucuca

SEQ ID NO: 408381 - RNA, 19 nt, Artificial Sequence
  Description of Artificial Sequence: Synthetic oligonucleotide
  Sense Strand Starting at position 1143 of SEQ ID NO: 315788
gcugcagaucguguccgau

SEQ ID NO: 408382 - RNA, 19 nt, Artificial Sequence
  Description of Artificial Sequence: Synthetic oligonucleotide
  Antisense Strand to SEQ ID NO: 408381
aucggacacgaucugcagc

SEQ ID NO: 408383 - RNA, 19 nt, Artificial Sequence
  Description of Artificial Sequence: Synthetic oligonucleotide
  Sense Strand Starting at position 1143 of SEQ ID NO: 315821
cugagcugagcauauguaa

SEQ ID NO: 408384 - RNA, 19 nt, Artificial Sequence
  Description of Artificial Sequence: Synthetic oligonucleotide
  Antisense Strand to SEQ ID NO: 408383
uuacauaugcucagcucag

SEQ ID NO: 408385 - RNA, 19 nt, Artificial Sequence
  Description of Artificial Sequence: Synthetic oligonucleotide
  Sense Strand Starting at position 1143 of SEQ ID NO: 315828
gagcauauguaagcaaaga

SEQ ID NO: 408386 - RNA, 19 nt, Artificial Sequence
  Description of Artificial Sequence: Synthetic oligonucleotide
  Antisense Strand to SEQ ID NO: 408385
ucuuugcuuacauaugcuc

SEQ ID NO: 408387 - RNA, 19 nt, Artificial Sequence
  Description of Artificial Sequence: Synthetic oligonucleotide
  Sense Strand Starting at position 1143 of SEQ ID NO: 316059
gggcgacucguacauucuu

SEQ ID NO: 408388 - RNA, 19 nt, Artificial Sequence
  Description of Artificial Sequence: Synthetic oligonucleotide
  Antisense Strand to SEQ ID NO: 408387
aagaauguacgagucgccc

SEQ ID NO: 408389 - RNA, 19 nt, Artificial Sequence
  Description of Artificial Sequence: Synthetic oligonucleotide
  Sense Strand Starting at position 1143 of SEQ ID NO: 316275
ccgacucagccuggaguaa

SEQ ID NO: 408390 - RNA, 19 nt, Artificial Sequence
  Description of Artificial Sequence: Synthetic oligonucleotide
  Antisense Strand to SEQ ID NO: 408389
uuacuccaggcugagucgg

SEQ ID NO: 408391 - RNA, 19 nt, Artificial Sequence
  Description of Artificial Sequence: Synthetic oligonucleotide
  Sense Strand Starting at position 1143 of SEQ ID NO: 316620
ugacggugccguggagaaa

SEQ ID NO: 408392 - RNA, 19 nt, Artificial Sequence
  Description of Artificial Sequence: Synthetic oligonucleotide
  Antisense Strand to SEQ ID NO: 408391
uuucuccacggcaccguca

SEQ ID NO: 408393 - RNA, 19 nt, Artificial Sequence
  Description of Artificial Sequence: Synthetic oligonucleotide
  Sense Strand Starting at position 1143 of SEQ ID NO: 316621
gacggugccguggagaaau

SEQ ID NO: 408394 - RNA, 19 nt, Artificial Sequence
  Description of Artificial Sequence: Synthetic oligonucleotide
  Antisense Strand to SEQ ID NO: 408393
auuucuccacggcaccguc

SEQ ID NO: 408395 - RNA, 19 nt, Artificial Sequence
  Description of Artificial Sequence: Synthetic oligonucleotide
  Sense Strand Starting at position 1143 of SEQ ID NO: 316717
gcccuuuggcccugacaaa

SEQ ID NO: 408396 - RNA, 19 nt, Artificial Sequence
  Description of Artificial Sequence: Synthetic oligonucleotide
  Antisense Strand to SEQ ID NO: 408395
uuugucagggccaaagggc

SEQ ID NO: 408397 - RNA, 19 nt, Artificial Sequence
  Description of Artificial Sequence: Synthetic oligonucleotide
  Sense Strand Starting at position 1143 of SEQ ID NO: 317257
aagcgagucgccuccguau

SEQ ID NO: 408398 - RNA, 19 nt, Artificial Sequence
  Description of Artificial Sequence: Synthetic oligonucleotide
  Antisense Strand to SEQ ID NO: 408397
auacggaggcgacucgcuu

SEQ ID NO: 408399 - RNA, 19 nt, Artificial Sequence
  Description of Artificial Sequence: Synthetic oligonucleotide
  Sense Strand Starting at position 1143 of SEQ ID NO: 317269
uccguaugcaaauagaguu

SEQ ID NO: 408400 - RNA, 19 nt, Artificial Sequence
  Description of Artificial Sequence: Synthetic oligonucleotide
  Antisense Strand to SEQ ID NO: 408399
aacucuauuugcauacgga

SEQ ID NO: 408401 - RNA, 19 nt, Artificial Sequence
  Description of Artificial Sequence: Synthetic oligonucleotide
  Sense Strand Starting at position 1143 of SEQ ID NO: 317609
gaggaagucgcuuaaccuc

SEQ ID NO: 408402 - RNA, 19 nt, Artificial Sequence
  Description of Artificial Sequence: Synthetic oligonucleotide
  Antisense Strand to SEQ ID NO: 408401
gagguuaagcgacuuccuc

SEQ ID NO: 408403 - RNA, 19 nt, Artificial Sequence
  Description of Artificial Sequence: Synthetic oligonucleotide
  Sense Strand Starting at position 1143 of SEQ ID NO: 317617
cgcuuaaccucuccgaaga

SEQ ID NO: 408404 - RNA, 19 nt, Artificial Sequence
  Description of Artificial Sequence: Synthetic oligonucleotide
  Antisense Strand to SEQ ID NO: 408403
ucuucggagagguuaagcg

SEQ ID NO: 408405 - RNA, 19 nt, Artificial Sequence
  Description of Artificial Sequence: Synthetic oligonucleotide
  Sense Strand Starting at position 1143 of SEQ ID NO: 317630
cgaagacucguguugcucu

SEQ ID NO: 408406 - RNA, 19 nt, Artificial Sequence
  Description of Artificial Sequence: Synthetic oligonucleotide
  Antisense Strand to SEQ ID NO: 408405
agagcaacacgagucuucg

SEQ ID NO: 408407 - RNA, 19 nt, Artificial Sequence
  Description of Artificial Sequence: Synthetic oligonucleotide
  Sense Strand Starting at position 1143 of SEQ ID NO: 317640
uguugcucuuaucuagaau

SEQ ID NO: 408408 - RNA, 19 nt, Artificial Sequence
  Description of Artificial Sequence: Synthetic oligonucleotide
  Antisense Strand to SEQ ID NO: 408407
auucuagauaagagcaaca

SEQ ID NO: 408409 - RNA, 19 nt, Artificial Sequence
  Description of Artificial Sequence: Synthetic oligonucleotide
  Sense Strand Starting at position 1143 of SEQ ID NO: 317942
cgauuucccuaagaaagaa

SEQ ID NO: 408410 - RNA, 19 nt, Artificial Sequence
  Description of Artificial Sequence: Synthetic oligonucleotide
  Antisense Strand to SEQ ID NO: 408409
uucuuucuuagggaaaucg

SEQ ID NO: 408411 - RNA, 19 nt, Artificial Sequence
  Description of Artificial Sequence: Synthetic oligonucleotide
  Sense Strand Starting at position 1143 of SEQ ID NO: 318034
gugacuaccagaggcaaua

SEQ ID NO: 408412 - RNA, 19 nt, Artificial Sequence
  Description of Artificial Sequence: Synthetic oligonucleotide
  Antisense Strand to SEQ ID NO: 408411
uauugccucugguagucac

SEQ ID NO: 408413 - RNA, 19 nt, Artificial Sequence
  Description of Artificial Sequence: Synthetic oligonucleotide
  Sense Strand Starting at position 1143 of SEQ ID NO: 318095
cugugugcugggugggaaa

SEQ ID NO: 408414 - RNA, 19 nt, Artificial Sequence
  Description of Artificial Sequence: Synthetic oligonucleotide
  Antisense Strand to SEQ ID NO: 408413
uuucccacccagcacacag

SEQ ID NO: 408415 - RNA, 19 nt, Artificial Sequence
  Description of Artificial Sequence: Synthetic oligonucleotide
  Sense Strand Starting at position 1143 of SEQ ID NO: 318202
agaguucugucuccaaaug

SEQ ID NO: 408416 - RNA, 19 nt, Artificial Sequence
  Description of Artificial Sequence: Synthetic oligonucleotide
  Antisense Strand to SEQ ID NO: 408415
cauuuggagacagaacucu

SEQ ID NO: 408417 - RNA, 19 nt, Artificial Sequence
  Description of Artificial Sequence: Synthetic oligonucleotide
  Sense Strand Starting at position 1143 of SEQ ID NO: 318203
gaguucugucuccaaauga

SEQ ID NO: 408418 - RNA, 19 nt, Artificial Sequence
  Description of Artificial Sequence: Synthetic oligonucleotide
  Antisense Strand to SEQ ID NO: 408417
ucauuuggagacagaacuc

SEQ ID NO: 408419 - RNA, 19 nt, Artificial Sequence
  Description of Artificial Sequence: Synthetic oligonucleotide
  Sense Strand Starting at position 1143 of SEQ ID NO: 318335
cugauacugucauucccuu

SEQ ID NO: 408420 - RNA, 19 nt, Artificial Sequence
  Description of Artificial Sequence: Synthetic oligonucleotide
  Antisense Strand to SEQ ID NO: 408419
aagggaaugacaguaucag

SEQ ID NO: 408421 - RNA, 19 nt, Artificial Sequence
  Description of Artificial Sequence: Synthetic oligonucleotide
  Sense Strand Starting at position 1143 of SEQ ID NO: 318460
gggugaguuccacauccug

SEQ ID NO: 408422 - RNA, 19 nt, Artificial Sequence
  Description of Artificial Sequence: Synthetic oligonucleotide
  Antisense Strand to SEQ ID NO: 408421
caggauguggaacucaccc

SEQ ID NO: 408423 - RNA, 19 nt, Artificial Sequence
  Description of Artificial Sequence: Synthetic oligonucleotide
  Sense Strand Starting at position 1143 of SEQ ID NO: 318541
ugugaaaugaccuacguga

SEQ ID NO: 408424 - RNA, 19 nt, Artificial Sequence
  Description of Artificial Sequence: Synthetic oligonucleotide
  Antisense Strand to SEQ ID NO: 408423
ucacguaggucauuucaca

SEQ ID NO: 408425 - RNA, 19 nt, Artificial Sequence
  Description of Artificial Sequence: Synthetic oligonucleotide
  Sense Strand Starting at position 1143 of SEQ ID NO: 318543
ugaaaugaccuacgugaaa

SEQ ID NO: 408426 - RNA, 19 nt, Artificial Sequence
  Description of Artificial Sequence: Synthetic oligonucleotide
  Antisense Strand to SEQ ID NO: 408425
uuucacguaggucauuuca

SEQ ID NO: 408427 - RNA, 19 nt, Artificial Sequence
  Description of Artificial Sequence: Synthetic oligonucleotide
  Sense Strand Starting at position 1143 of SEQ ID NO: 318554
acgugaaacacguagcuua

SEQ ID NO: 408428 - RNA, 19 nt, Artificial Sequence
  Description of Artificial Sequence: Synthetic oligonucleotide
  Antisense Strand to SEQ ID NO: 408427
uaagcuacguguuucacgu

SEQ ID NO: 408429 - RNA, 19 nt, Artificial Sequence
  Description of Artificial Sequence: Synthetic oligonucleotide
  Sense Strand Starting at position 1143 of SEQ ID NO: 318587
gaaggugcuccugacagua

SEQ ID NO: 408430 - RNA, 19 nt, Artificial Sequence
  Description of Artificial Sequence: Synthetic oligonucleotide
  Antisense Strand to SEQ ID NO: 408429
uacugucaggagcaccuuc

SEQ ID NO: 408431 - RNA, 19 nt, Artificial Sequence
  Description of Artificial Sequence: Synthetic oligonucleotide
  Sense Strand Starting at position 1143 of SEQ ID NO: 318606
aaauguauguaugcgugaa

SEQ ID NO: 408432 - RNA, 19 nt, Artificial Sequence
  Description of Artificial Sequence: Synthetic oligonucleotide
  Antisense Strand to SEQ ID NO: 408431
uucacgcauacauacauuu

SEQ ID NO: 408433 - RNA, 19 nt, Artificial Sequence
  Description of Artificial Sequence: Synthetic oligonucleotide
  Sense Strand Starting at position 1143 of SEQ ID NO: 318610
guauguaugcgugaaugaa

SEQ ID NO: 408434 - RNA, 19 nt, Artificial Sequence
  Description of Artificial Sequence: Synthetic oligonucleotide
  Antisense Strand to SEQ ID NO: 408433
uucauucacgcauacauac

SEQ ID NO: 408435 - RNA, 19 nt, Artificial Sequence
  Description of Artificial Sequence: Synthetic oligonucleotide
  Sense Strand Starting at position 1143 of SEQ ID NO: 318614
guaugcgugaaugaauaga

SEQ ID NO: 408436 - RNA, 19 nt, Artificial Sequence
  Description of Artificial Sequence: Synthetic oligonucleotide
  Antisense Strand to SEQ ID NO: 408435
ucuauucauucacgcauac

SEQ ID NO: 408437 - RNA, 19 nt, Artificial Sequence
  Description of Artificial Sequence: Synthetic oligonucleotide
  Sense Strand Starting at position 1143 of SEQ ID NO: 318747
ugacaugcaucuuuguauu

SEQ ID NO: 408438 - RNA, 19 nt, Artificial Sequence
  Description of Artificial Sequence: Synthetic oligonucleotide
  Antisense Strand to SEQ ID NO: 408437
aauacaaagaugcauguca

SEQ ID NO: 408439 - RNA, 19 nt, Artificial Sequence
  Description of Artificial Sequence: Synthetic oligonucleotide
  Sense Strand Starting at position 1143 of SEQ ID NO: 318838
agcugacaucaauggagau

SEQ ID NO: 408440 - RNA, 19 nt, Artificial Sequence
  Description of Artificial Sequence: Synthetic oligonucleotide
  Antisense Strand to SEQ ID NO: 408439
aucuccauugaugucagcu

SEQ ID NO: 408441 - RNA, 19 nt, Artificial Sequence
  Description of Artificial Sequence: Synthetic oligonucleotide
  Sense Strand Starting at position 1143 of SEQ ID NO: 318839
gcugacaucaauggagaua

SEQ ID NO: 408442 - RNA, 19 nt, Artificial Sequence
  Description of Artificial Sequence: Synthetic oligonucleotide
  Antisense Strand to SEQ ID NO: 408441
uaucuccauugaugucagc

SEQ ID NO: 408443 - RNA, 19 nt, Artificial Sequence
  Description of Artificial Sequence: Synthetic oligonucleotide
  Sense Strand Starting at position 1143 of SEQ ID NO: 318864
gagccugaacugugucagu

SEQ ID NO: 408444 - RNA, 19 nt, Artificial Sequence
  Description of Artificial Sequence: Synthetic oligonucleotide
  Antisense Strand to SEQ ID NO: 408443
acugacacaguucaggcuc

SEQ ID NO: 408445 - RNA, 19 nt, Artificial Sequence
  Description of Artificial Sequence: Synthetic oligonucleotide
  Sense Strand Starting at position 1143 of SEQ ID NO: 318874
ugugucagugacuguaaca

SEQ ID NO: 408446 - RNA, 19 nt, Artificial Sequence
  Description of Artificial Sequence: Synthetic oligonucleotide
  Antisense Strand to SEQ ID NO: 408445
uguuacagucacugacaca

SEQ ID NO: 408447 - RNA, 19 nt, Artificial Sequence
  Description of Artificial Sequence: Synthetic oligonucleotide
  Sense Strand Starting at position 1143 of SEQ ID NO: 318932
ggagaucugacaugguuug

SEQ ID NO: 408448 - RNA, 19 nt, Artificial Sequence
  Description of Artificial Sequence: Synthetic oligonucleotide
  Antisense Strand to SEQ ID NO: 408447
caaaccaugucagaucucc

SEQ ID NO: 408449 - RNA, 19 nt, Artificial Sequence
  Description of Artificial Sequence: Synthetic oligonucleotide
  Sense Strand Starting at position 1143 of SEQ ID NO: 319081
acgggaucugguuguuuga

SEQ ID NO: 408450 - RNA, 19 nt, Artificial Sequence
  Description of Artificial Sequence: Synthetic oligonucleotide
  Antisense Strand to SEQ ID NO: 408449
ucaaacaaccagaucccgu

SEQ ID NO: 408451 - RNA, 19 nt, Artificial Sequence
  Description of Artificial Sequence: Synthetic oligonucleotide
  Sense Strand Starting at position 1144 of SEQ ID NO: 315716
cacguagcuguguuagagu

SEQ ID NO: 408452 - RNA, 19 nt, Artificial Sequence
  Description of Artificial Sequence: Synthetic oligonucleotide
  Antisense Strand to SEQ ID NO: 408451
acucuaacacagcuacgug

SEQ ID NO: 408453 - RNA, 19 nt, Artificial Sequence
  Description of Artificial Sequence: Synthetic oligonucleotide
  Sense Strand Starting at position 1144 of SEQ ID NO: 315775
agccauaggucucugacaa

SEQ ID NO: 408454 - RNA, 19 nt, Artificial Sequence
  Description of Artificial Sequence: Synthetic oligonucleotide
  Antisense Strand to SEQ ID NO: 408453
uugucagagaccuauggcu

SEQ ID NO: 408455 - RNA, 19 nt, Artificial Sequence
  Description of Artificial Sequence: Synthetic oligonucleotide
  Sense Strand Starting at position 1144 of SEQ ID NO: 315776
gccauaggucucugacaag

SEQ ID NO: 408456 - RNA, 19 nt, Artificial Sequence
  Description of Artificial Sequence: Synthetic oligonucleotide
  Antisense Strand to SEQ ID NO: 408455
cuugucagagaccuauggc

SEQ ID NO: 408457 - RNA, 19 nt, Artificial Sequence
  Description of Artificial Sequence: Synthetic oligonucleotide
  Sense Strand Starting at position 1144 of SEQ ID NO: 315779
auaggucucugacaaggaa

SEQ ID NO: 408458 - RNA, 19 nt, Artificial Sequence
  Description of Artificial Sequence: Synthetic oligonucleotide
  Antisense Strand to SEQ ID NO: 408457
uuccuugucagagaccuau

SEQ ID NO: 408459 - RNA, 19 nt, Artificial Sequence
  Description of Artificial Sequence: Synthetic oligonucleotide
  Sense Strand Starting at position 1144 of SEQ ID NO: 315859
ggcggaggccuuugaaauu

SEQ ID NO: 408460 - RNA, 19 nt, Artificial Sequence
  Description of Artificial Sequence: Synthetic oligonucleotide
  Antisense Strand to SEQ ID NO: 408459
aauuucaaaggccuccgcc

SEQ ID NO: 408461 - RNA, 19 nt, Artificial Sequence
  Description of Artificial Sequence: Synthetic oligonucleotide
  Sense Strand Starting at position 1144 of SEQ ID NO: 316086
agagaaagcgccugauggu

SEQ ID NO: 408462 - RNA, 19 nt, Artificial Sequence
  Description of Artificial Sequence: Synthetic oligonucleotide
  Antisense Strand to SEQ ID NO: 408461
accaucaggcgcuuucucu

SEQ ID NO: 408463 - RNA, 19 nt, Artificial Sequence
  Description of Artificial Sequence: Synthetic oligonucleotide
  Sense Strand Starting at position 1144 of SEQ ID NO: 316268
gugggaggcucuuccagaa

SEQ ID NO: 408464 - RNA, 19 nt, Artificial Sequence
  Description of Artificial Sequence: Synthetic oligonucleotide
  Antisense Strand to SEQ ID NO: 408463
uucuggaagagccucccac

SEQ ID NO: 408465 - RNA, 19 nt, Artificial Sequence
  Description of Artificial Sequence: Synthetic oligonucleotide
  Sense Strand Starting at position 1144 of SEQ ID NO: 316434
ggagcauggcuuuagagug

SEQ ID NO: 408466 - RNA, 19 nt, Artificial Sequence
  Description of Artificial Sequence: Synthetic oligonucleotide
  Antisense Strand to SEQ ID NO: 408465
cacucuaaagccaugcucc

SEQ ID NO: 408467 - RNA, 19 nt, Artificial Sequence
  Description of Artificial Sequence: Synthetic oligonucleotide
  Sense Strand Starting at position 1144 of SEQ ID NO: 316439
auggcuuuagagugggaau

SEQ ID NO: 408468 - RNA, 19 nt, Artificial Sequence
  Description of Artificial Sequence: Synthetic oligonucleotide
  Antisense Strand to SEQ ID NO: 408467
auucccacucuaaagccau

SEQ ID NO: 408469 - RNA, 19 nt, Artificial Sequence
  Description of Artificial Sequence: Synthetic oligonucleotide
  Sense Strand Starting at position 1144 of SEQ ID NO: 316519
cgaggcugugaggauucaa

SEQ ID NO: 408470 - RNA, 19 nt, Artificial Sequence
  Description of Artificial Sequence: Synthetic oligonucleotide
  Antisense Strand to SEQ ID NO: 408469
uugaauccucacagccucg

SEQ ID NO: 408471 - RNA, 19 nt, Artificial Sequence
  Description of Artificial Sequence: Synthetic oligonucleotide
  Sense Strand Starting at position 1144 of SEQ ID NO: 316625
gggugagugacucauucug

SEQ ID NO: 408472 - RNA, 19 nt, Artificial Sequence
  Description of Artificial Sequence: Synthetic oligonucleotide
  Antisense Strand to SEQ ID NO: 408471
cagaaugagucacucaccc

SEQ ID NO: 408473 - RNA, 19 nt, Artificial Sequence
  Description of Artificial Sequence: Synthetic oligonucleotide
  Sense Strand Starting at position 1144 of SEQ ID NO: 316627
gugagugacucauucugcu

SEQ ID NO: 408474 - RNA, 19 nt, Artificial Sequence
  Description of Artificial Sequence: Synthetic oligonucleotide
  Antisense Strand to SEQ ID NO: 408473
agcagaaugagucacucac

SEQ ID NO: 408475 - RNA, 19 nt, Artificial Sequence
  Description of Artificial Sequence: Synthetic oligonucleotide
  Sense Strand Starting at position 1144 of SEQ ID NO: 317311
aggauuuccuccugcauau

SEQ ID NO: 408476 - RNA, 19 nt, Artificial Sequence
  Description of Artificial Sequence: Synthetic oligonucleotide
  Antisense Strand to SEQ ID NO: 408475
auaugcaggaggaaauccu

SEQ ID NO: 408477 - RNA, 19 nt, Artificial Sequence
  Description of Artificial Sequence: Synthetic oligonucleotide
  Sense Strand Starting at position 1144 of SEQ ID NO: 317461
ggaccugggcucuaucaga

SEQ ID NO: 408478 - RNA, 19 nt, Artificial Sequence
  Description of Artificial Sequence: Synthetic oligonucleotide
  Antisense Strand to SEQ ID NO: 408477
ucugauagagcccaggucc

SEQ ID NO: 408479 - RNA, 19 nt, Artificial Sequence
  Description of Artificial Sequence: Synthetic oligonucleotide
  Sense Strand Starting at position 1144 of SEQ ID NO: 317474
aucagagguucugaagcaa

SEQ ID NO: 408480 - RNA, 19 nt, Artificial Sequence
  Description of Artificial Sequence: Synthetic oligonucleotide
  Antisense Strand to SEQ ID NO: 408479
uugcuucagaaccucugau

SEQ ID NO: 408481 - RNA, 19 nt, Artificial Sequence
  Description of Artificial Sequence: Synthetic oligonucleotide
  Sense Strand Starting at position 1144 of SEQ ID NO: 317830
gcuggcuggucucucugaa

SEQ ID NO: 408482 - RNA, 19 nt, Artificial Sequence
  Description of Artificial Sequence: Synthetic oligonucleotide
  Antisense Strand to SEQ ID NO: 408481
uucagagagaccagccagc

SEQ ID NO: 408483 - RNA, 19 nt, Artificial Sequence
  Description of Artificial Sequence: Synthetic oligonucleotide
  Sense Strand Starting at position 1144 of SEQ ID NO: 318086
uggaacauuggcuguggaa

SEQ ID NO: 408484 - RNA, 19 nt, Artificial Sequence
  Description of Artificial Sequence: Synthetic oligonucleotide
  Antisense Strand to SEQ ID NO: 408483
uuccacagccaauguucca

SEQ ID NO: 408485 - RNA, 19 nt, Artificial Sequence
  Description of Artificial Sequence: Synthetic oligonucleotide
  Sense Strand Starting at position 1144 of SEQ ID NO: 318088
gaacauuggcuguggaaga

SEQ ID NO: 408486 - RNA, 19 nt, Artificial Sequence
  Description of Artificial Sequence: Synthetic oligonucleotide
  Antisense Strand to SEQ ID NO: 408485
ucuuccacagccaauguuc

SEQ ID NO: 408487 - RNA, 19 nt, Artificial Sequence
  Description of Artificial Sequence: Synthetic oligonucleotide
  Sense Strand Starting at position 1144 of SEQ ID NO: 318111
gggcgcugucuggcugauu

SEQ ID NO: 408488 - RNA, 19 nt, Artificial Sequence
  Description of Artificial Sequence: Synthetic oligonucleotide
  Antisense Strand to SEQ ID NO: 408487
aaucagccagacagcgccc

SEQ ID NO: 408489 - RNA, 19 nt, Artificial Sequence
  Description of Artificial Sequence: Synthetic oligonucleotide
  Sense Strand Starting at position 1144 of SEQ ID NO: 318122
ggcugauucgcacagugga

SEQ ID NO: 408490 - RNA, 19 nt, Artificial Sequence
  Description of Artificial Sequence: Synthetic oligonucleotide
  Antisense Strand to SEQ ID NO: 408489
uccacugugcgaaucagcc

SEQ ID NO: 408491 - RNA, 19 nt, Artificial Sequence
  Description of Artificial Sequence: Synthetic oligonucleotide
  Sense Strand Starting at position 1144 of SEQ ID NO: 318144
ucaauacacgugugcagaa

SEQ ID NO: 408492 - RNA, 19 nt, Artificial Sequence
  Description of Artificial Sequence: Synthetic oligonucleotide
  Antisense Strand to SEQ ID NO: 408491
uucugcacacguguauuga

SEQ ID NO: 408493 - RNA, 19 nt, Artificial Sequence
  Description of Artificial Sequence: Synthetic oligonucleotide
  Sense Strand Starting at position 1144 of SEQ ID NO: 318190
uuaugaucccucuguuacu

SEQ ID NO: 408494 - RNA, 19 nt, Artificial Sequence
  Description of Artificial Sequence: Synthetic oligonucleotide
  Antisense Strand to SEQ ID NO: 408493
aguaacagagggaucauaa

SEQ ID NO: 408495 - RNA, 19 nt, Artificial Sequence
  Description of Artificial Sequence: Synthetic oligonucleotide
  Sense Strand Starting at position 1144 of SEQ ID NO: 318238
gguagcuugucugagguaa

SEQ ID NO: 408496 - RNA, 19 nt, Artificial Sequence
  Description of Artificial Sequence: Synthetic oligonucleotide
  Antisense Strand to SEQ ID NO: 408495
uuaccucagacaagcuacc

SEQ ID NO: 408497 - RNA, 19 nt, Artificial Sequence
  Description of Artificial Sequence: Synthetic oligonucleotide
  Sense Strand Starting at position 1144 of SEQ ID NO: 318240
uagcuugucugagguaauc

SEQ ID NO: 408498 - RNA, 19 nt, Artificial Sequence
  Description of Artificial Sequence: Synthetic oligonucleotide
  Antisense Strand to SEQ ID NO: 408497
gauuaccucagacaagcua

SEQ ID NO: 408499 - RNA, 19 nt, Artificial Sequence
  Description of Artificial Sequence: Synthetic oligonucleotide
  Sense Strand Starting at position 1144 of SEQ ID NO: 318242
gcuugucugagguaaucag

SEQ ID NO: 408500 - RNA, 19 nt, Artificial Sequence
  Description of Artificial Sequence: Synthetic oligonucleotide
  Antisense Strand to SEQ ID NO: 408499
cugauuaccucagacaagc

SEQ ID NO: 408501 - RNA, 19 nt, Artificial Sequence
  Description of Artificial Sequence: Synthetic oligonucleotide
  Sense Strand Starting at position 1144 of SEQ ID NO: 318463
aucuguaaaugcuuuggua

SEQ ID NO: 408502 - RNA, 19 nt, Artificial Sequence
  Description of Artificial Sequence: Synthetic oligonucleotide
  Antisense Strand to SEQ ID NO: 408501
uaccaaagcauuuacagau

SEQ ID NO: 408503 - RNA, 19 nt, Artificial Sequence
  Description of Artificial Sequence: Synthetic oligonucleotide
  Sense Strand Starting at position 1144 of SEQ ID NO: 318465
cuguaaaugcuuugguaaa

SEQ ID NO: 408504 - RNA, 19 nt, Artificial Sequence
  Description of Artificial Sequence: Synthetic oligonucleotide
  Antisense Strand to SEQ ID NO: 408503
uuuaccaaagcauuuacag

SEQ ID NO: 408505 - RNA, 19 nt, Artificial Sequence
  Description of Artificial Sequence: Synthetic oligonucleotide
  Sense Strand Starting at position 1144 of SEQ ID NO: 318466
uguaaaugcuuugguaaag

SEQ ID NO: 408506 - RNA, 19 nt, Artificial Sequence
  Description of Artificial Sequence: Synthetic oligonucleotide
  Antisense Strand to SEQ ID NO: 408505
cuuuaccaaagcauuuaca

SEQ ID NO: 408507 - RNA, 19 nt, Artificial Sequence
  Description of Artificial Sequence: Synthetic oligonucleotide
  Sense Strand Starting at position 1144 of SEQ ID NO: 318558
cugagaucuggcugggaug

SEQ ID NO: 408508 - RNA, 19 nt, Artificial Sequence
  Description of Artificial Sequence: Synthetic oligonucleotide
  Antisense Strand to SEQ ID NO: 408507
caucccagccagaucucag

SEQ ID NO: 408509 - RNA, 19 nt, Artificial Sequence
  Description of Artificial Sequence: Synthetic oligonucleotide
  Sense Strand Starting at position 1144 of SEQ ID NO: 318929
gcccaugagccucauguuu

SEQ ID NO: 408510 - RNA, 19 nt, Artificial Sequence
  Description of Artificial Sequence: Synthetic oligonucleotide
  Antisense Strand to SEQ ID NO: 408509
aaacaugaggcucaugggc

SEQ ID NO: 408511 - RNA, 19 nt, Artificial Sequence
  Description of Artificial Sequence: Synthetic oligonucleotide
  Sense Strand Starting at position 1145 of SEQ ID NO: 315256
gccagauaaauugguggau

SEQ ID NO: 408512 - RNA, 19 nt, Artificial Sequence
  Description of Artificial Sequence: Synthetic oligonucleotide
  Antisense Strand to SEQ ID NO: 408511
auccaccaauuuaucuggc

SEQ ID NO: 408513 - RNA, 19 nt, Artificial Sequence
  Description of Artificial Sequence: Synthetic oligonucleotide
  Sense Strand Starting at position 1145 of SEQ ID NO: 315270
uggauaauuaugggcauua

SEQ ID NO: 408514 - RNA, 19 nt, Artificial Sequence
  Description of Artificial Sequence: Synthetic oligonucleotide
  Antisense Strand to SEQ ID NO: 408513
uaaugcccauaauuaucca

SEQ ID NO: 408515 - RNA, 19 nt, Artificial Sequence
  Description of Artificial Sequence: Synthetic oligonucleotide
  Sense Strand Starting at position 1145 of SEQ ID NO: 315271
ggauaauuaugggcauuac

SEQ ID NO: 408516 - RNA, 19 nt, Artificial Sequence
  Description of Artificial Sequence: Synthetic oligonucleotide
  Antisense Strand to SEQ ID NO: 408515
guaaugcccauaauuaucc

SEQ ID NO: 408517 - RNA, 19 nt, Artificial Sequence
  Description of Artificial Sequence: Synthetic oligonucleotide
  Sense Strand Starting at position 1145 of SEQ ID NO: 315356
gcauuugaaccaugccacu

SEQ ID NO: 408518 - RNA, 19 nt, Artificial Sequence
  Description of Artificial Sequence: Synthetic oligonucleotide
  Antisense Strand to SEQ ID NO: 408517
aguggcaugguucaaaugc

SEQ ID NO: 408519 - RNA, 19 nt, Artificial Sequence
  Description of Artificial Sequence: Synthetic oligonucleotide
  Sense Strand Starting at position 1145 of SEQ ID NO: 315594
auguguauggguuaucaga

SEQ ID NO: 408520 - RNA, 19 nt, Artificial Sequence
  Description of Artificial Sequence: Synthetic oligonucleotide
  Antisense Strand to SEQ ID NO: 408519
ucugauaacccauacacau

SEQ ID NO: 408521 - RNA, 19 nt, Artificial Sequence
  Description of Artificial Sequence: Synthetic oligonucleotide
  Sense Strand Starting at position 1145 of SEQ ID NO: 315614
ugcuuuggaguggaucauu

SEQ ID NO: 408522 - RNA, 19 nt, Artificial Sequence
  Description of Artificial Sequence: Synthetic oligonucleotide
  Antisense Strand to SEQ ID NO: 408521
aaugauccacuccaaagca

SEQ ID NO: 408523 - RNA, 19 nt, Artificial Sequence
  Description of Artificial Sequence: Synthetic oligonucleotide
  Sense Strand Starting at position 1145 of SEQ ID NO: 315622
aguggaucauuugagauga

SEQ ID NO: 408524 - RNA, 19 nt, Artificial Sequence
  Description of Artificial Sequence: Synthetic oligonucleotide
  Antisense Strand to SEQ ID NO: 408523
ucaucucaaaugauccacu

SEQ ID NO: 408525 - RNA, 19 nt, Artificial Sequence
  Description of Artificial Sequence: Synthetic oligonucleotide
  Sense Strand Starting at position 1145 of SEQ ID NO: 315624
uggaucauuugagaugaga

SEQ ID NO: 408526 - RNA, 19 nt, Artificial Sequence
  Description of Artificial Sequence: Synthetic oligonucleotide
  Antisense Strand to SEQ ID NO: 408525
ucucaucucaaaugaucca

SEQ ID NO: 408527 - RNA, 19 nt, Artificial Sequence
  Description of Artificial Sequence: Synthetic oligonucleotide
  Sense Strand Starting at position 1145 of SEQ ID NO: 315683
augauugaguccuuacagu

SEQ ID NO: 408528 - RNA, 19 nt, Artificial Sequence
  Description of Artificial Sequence: Synthetic oligonucleotide
  Antisense Strand to SEQ ID NO: 408527
acuguaaggacucaaucau

SEQ ID NO: 408529 - RNA, 19 nt, Artificial Sequence
  Description of Artificial Sequence: Synthetic oligonucleotide
  Sense Strand Starting at position 1145 of SEQ ID NO: 315737
ucacaaugucucuggaagu

SEQ ID NO: 408530 - RNA, 19 nt, Artificial Sequence
  Description of Artificial Sequence: Synthetic oligonucleotide
  Antisense Strand to SEQ ID NO: 408529
acuuccagagacauuguga

SEQ ID NO: 408531 - RNA, 19 nt, Artificial Sequence
  Description of Artificial Sequence: Synthetic oligonucleotide
  Sense Strand Starting at position 1145 of SEQ ID NO: 315872
gggcuuagauuaccaucau

SEQ ID NO: 408532 - RNA, 19 nt, Artificial Sequence
  Description of Artificial Sequence: Synthetic oligonucleotide
  Antisense Strand to SEQ ID NO: 408531
augaugguaaucuaagccc

SEQ ID NO: 408533 - RNA, 19 nt, Artificial Sequence
  Description of Artificial Sequence: Synthetic oligonucleotide
  Sense Strand Starting at position 1145 of SEQ ID NO: 316000
cagggaugcaugugaagag

SEQ ID NO: 408534 - RNA, 19 nt, Artificial Sequence
  Description of Artificial Sequence: Synthetic oligonucleotide
  Antisense Strand to SEQ ID NO: 408533
cucuucacaugcaucccug

SEQ ID NO: 408535 - RNA, 19 nt, Artificial Sequence
  Description of Artificial Sequence: Synthetic oligonucleotide
  Sense Strand Starting at position 1145 of SEQ ID NO: 316003
ggaugcaugugaagagaga

SEQ ID NO: 408536 - RNA, 19 nt, Artificial Sequence
  Description of Artificial Sequence: Synthetic oligonucleotide
  Antisense Strand to SEQ ID NO: 408535
ucucucuucacaugcaucc

SEQ ID NO: 408537 - RNA, 19 nt, Artificial Sequence
  Description of Artificial Sequence: Synthetic oligonucleotide
  Sense Strand Starting at position 1145 of SEQ ID NO: 316160
ccaggagcucuacacuuaa

SEQ ID NO: 408538 - RNA, 19 nt, Artificial Sequence
  Description of Artificial Sequence: Synthetic oligonucleotide
  Antisense Strand to SEQ ID NO: 408537
uuaaguguagagcuccugg

SEQ ID NO: 408539 - RNA, 19 nt, Artificial Sequence
  Description of Artificial Sequence: Synthetic oligonucleotide
  Sense Strand Starting at position 1145 of SEQ ID NO: 316227
ugaguugccauuuggcauu

SEQ ID NO: 408540 - RNA, 19 nt, Artificial Sequence
  Description of Artificial Sequence: Synthetic oligonucleotide
  Antisense Strand to SEQ ID NO: 408539
aaugccaaauggcaacuca

SEQ ID NO: 408541 - RNA, 19 nt, Artificial Sequence
  Description of Artificial Sequence: Synthetic oligonucleotide
  Sense Strand Starting at position 1145 of SEQ ID NO: 316314
ggaguuucagaggaagugu

SEQ ID NO: 408542 - RNA, 19 nt, Artificial Sequence
  Description of Artificial Sequence: Synthetic oligonucleotide
  Antisense Strand to SEQ ID NO: 408541
acacuuccucugaaacucc

SEQ ID NO: 408543 - RNA, 19 nt, Artificial Sequence
  Description of Artificial Sequence: Synthetic oligonucleotide
  Sense Strand Starting at position 1145 of SEQ ID NO: 316367
uuuguauacguguuagugu

SEQ ID NO: 408544 - RNA, 19 nt, Artificial Sequence
  Description of Artificial Sequence: Synthetic oligonucleotide
  Antisense Strand to SEQ ID NO: 408543
acacuaacacguauacaaa

SEQ ID NO: 408545 - RNA, 19 nt, Artificial Sequence
  Description of Artificial Sequence: Synthetic oligonucleotide
  Sense Strand Starting at position 1145 of SEQ ID NO: 316401
aaguauagguucuuagagu

SEQ ID NO: 408546 - RNA, 19 nt, Artificial Sequence
  Description of Artificial Sequence: Synthetic oligonucleotide
  Antisense Strand to SEQ ID NO: 408545
acucuaagaaccuauacuu

SEQ ID NO: 408547 - RNA, 19 nt, Artificial Sequence
  Description of Artificial Sequence: Synthetic oligonucleotide
  Sense Strand Starting at position 1145 of SEQ ID NO: 316407
agguucuuagaguauuaac

SEQ ID NO: 408548 - RNA, 19 nt, Artificial Sequence
  Description of Artificial Sequence: Synthetic oligonucleotide
  Antisense Strand to SEQ ID NO: 408547
guuaauacucuaagaaccu

SEQ ID NO: 408549 - RNA, 19 nt, Artificial Sequence
  Description of Artificial Sequence: Synthetic oligonucleotide
  Sense Strand Starting at position 1145 of SEQ ID NO: 316540
cucugagacccuugggaua

SEQ ID NO: 408550 - RNA, 19 nt, Artificial Sequence
  Description of Artificial Sequence: Synthetic oligonucleotide
  Antisense Strand to SEQ ID NO: 408549
uaucccaagggucucagag

SEQ ID NO: 408551 - RNA, 19 nt, Artificial Sequence
  Description of Artificial Sequence: Synthetic oligonucleotide
  Sense Strand Starting at position 1145 of SEQ ID NO: 317641
acgaauagugacugagaca

SEQ ID NO: 408552 - RNA, 19 nt, Artificial Sequence
  Description of Artificial Sequence: Synthetic oligonucleotide
  Antisense Strand to SEQ ID NO: 408551
ugucucagucacuauucgu

SEQ ID NO: 408553 - RNA, 19 nt, Artificial Sequence
  Description of Artificial Sequence: Synthetic oligonucleotide
  Sense Strand Starting at position 1145 of SEQ ID NO: 317869
acucuaugcgucuagggau

SEQ ID NO: 408554 - RNA, 19 nt, Artificial Sequence
  Description of Artificial Sequence: Synthetic oligonucleotide
  Antisense Strand to SEQ ID NO: 408553
aucccuagacgcauagagu

SEQ ID NO: 408555 - RNA, 19 nt, Artificial Sequence
  Description of Artificial Sequence: Synthetic oligonucleotide
  Sense Strand Starting at position 1145 of SEQ ID NO: 317876
gcgucuagggauuaucacu

SEQ ID NO: 408556 - RNA, 19 nt, Artificial Sequence
  Description of Artificial Sequence: Synthetic oligonucleotide
  Antisense Strand to SEQ ID NO: 408555
agugauaaucccuagacgc

SEQ ID NO: 408557 - RNA, 19 nt, Artificial Sequence
  Description of Artificial Sequence: Synthetic oligonucleotide
  Sense Strand Starting at position 1145 of SEQ ID NO: 317934
ugaguaauuugcuuuaagu

SEQ ID NO: 408558 - RNA, 19 nt, Artificial Sequence
  Description of Artificial Sequence: Synthetic oligonucleotide
  Antisense Strand to SEQ ID NO: 408557
acuuaaagcaaauuacuca

SEQ ID NO: 408559 - RNA, 19 nt, Artificial Sequence
  Description of Artificial Sequence: Synthetic oligonucleotide
  Sense Strand Starting at position 1145 of SEQ ID NO: 318053
ugaagagcaauuggauguu

SEQ ID NO: 408560 - RNA, 19 nt, Artificial Sequence
  Description of Artificial Sequence: Synthetic oligonucleotide
  Antisense Strand to SEQ ID NO: 408559
aacauccaauugcucuuca

SEQ ID NO: 408561 - RNA, 19 nt, Artificial Sequence
  Description of Artificial Sequence: Synthetic oligonucleotide
  Sense Strand Starting at position 1145 of SEQ ID NO: 318072
gcaguauagcaagaguuga

SEQ ID NO: 408562 - RNA, 19 nt, Artificial Sequence
  Description of Artificial Sequence: Synthetic oligonucleotide
  Antisense Strand to SEQ ID NO: 408561
ucaacucuugcuauacugc

SEQ ID NO: 408563 - RNA, 19 nt, Artificial Sequence
  Description of Artificial Sequence: Synthetic oligonucleotide
  Sense Strand Starting at position 1145 of SEQ ID NO: 318080
gcaagaguugaggacuguu

SEQ ID NO: 408564 - RNA, 19 nt, Artificial Sequence
  Description of Artificial Sequence: Synthetic oligonucleotide
  Antisense Strand to SEQ ID NO: 408563
aacaguccucaacucuugc

SEQ ID NO: 408565 - RNA, 19 nt, Artificial Sequence
  Description of Artificial Sequence: Synthetic oligonucleotide
  Sense Strand Starting at position 1145 of SEQ ID NO: 318316
aaauuagcuguagauguuu

SEQ ID NO: 408566 - RNA, 19 nt, Artificial Sequence
  Description of Artificial Sequence: Synthetic oligonucleotide
  Antisense Strand to SEQ ID NO: 408565
aaacaucuacagcuaauuu

SEQ ID NO: 408567 - RNA, 19 nt, Artificial Sequence
  Description of Artificial Sequence: Synthetic oligonucleotide
  Sense Strand Starting at position 1145 of SEQ ID NO: 318527
cuuuccaucccagauguca

SEQ ID NO: 408568 - RNA, 19 nt, Artificial Sequence
  Description of Artificial Sequence: Synthetic oligonucleotide
  Antisense Strand to SEQ ID NO: 408567
ugacaucugggauggaaag

SEQ ID NO: 408569 - RNA, 19 nt, Artificial Sequence
  Description of Artificial Sequence: Synthetic oligonucleotide
  Sense Strand Starting at position 1145 of SEQ ID NO: 318678
aacacaaugccugaguguu

SEQ ID NO: 408570 - RNA, 19 nt, Artificial Sequence
  Description of Artificial Sequence: Synthetic oligonucleotide
  Antisense Strand to SEQ ID NO: 408569
aacacucaggcauuguguu

SEQ ID NO: 408571 - RNA, 19 nt, Artificial Sequence
  Description of Artificial Sequence: Synthetic oligonucleotide
  Sense Strand Starting at position 1145 of SEQ ID NO: 318688
cugaguguucgauagagac

SEQ ID NO: 408572 - RNA, 19 nt, Artificial Sequence
  Description of Artificial Sequence: Synthetic oligonucleotide
  Antisense Strand to SEQ ID NO: 408571
gucucuaucgaacacucag

SEQ ID NO: 408573 - RNA, 19 nt, Artificial Sequence
  Description of Artificial Sequence: Synthetic oligonucleotide
  Sense Strand Starting at position 1145 of SEQ ID NO: 318690
gaguguucgauagagacag

SEQ ID NO: 408574 - RNA, 19 nt, Artificial Sequence
  Description of Artificial Sequence: Synthetic oligonucleotide
  Antisense Strand to SEQ ID NO: 408573
cugucucuaucgaacacuc

SEQ ID NO: 408575 - RNA, 19 nt, Artificial Sequence
  Description of Artificial Sequence: Synthetic oligonucleotide
  Sense Strand Starting at position 1145 of SEQ ID NO: 318773
gcaucuauucuguaucaga

SEQ ID NO: 408576 - RNA, 19 nt, Artificial Sequence
  Description of Artificial Sequence: Synthetic oligonucleotide
  Antisense Strand to SEQ ID NO: 408575
ucugauacagaauagaugc

SEQ ID NO: 408577 - RNA, 19 nt, Artificial Sequence
  Description of Artificial Sequence: Synthetic oligonucleotide
  Sense Strand Starting at position 1145 of SEQ ID NO: 318932
agacuuugaugagugugua

SEQ ID NO: 408578 - RNA, 19 nt, Artificial Sequence
  Description of Artificial Sequence: Synthetic oligonucleotide
  Antisense Strand to SEQ ID NO: 408577
uacacacucaucaaagucu

SEQ ID NO: 408579 - RNA, 19 nt, Artificial Sequence
  Description of Artificial Sequence: Synthetic oligonucleotide
  Sense Strand Starting at position 1145 of SEQ ID NO: 318936
uuugaugaguguguacaaa

SEQ ID NO: 408580 - RNA, 19 nt, Artificial Sequence
  Description of Artificial Sequence: Synthetic oligonucleotide
  Antisense Strand to SEQ ID NO: 408579
uuuguacacacucaucaaa

SEQ ID NO: 408581 - RNA, 19 nt, Artificial Sequence
  Description of Artificial Sequence: Synthetic oligonucleotide
  Sense Strand Starting at position 1145 of SEQ ID NO: 318950
acaaaugaagccugagcua

SEQ ID NO: 408582 - RNA, 19 nt, Artificial Sequence
  Description of Artificial Sequence: Synthetic oligonucleotide
  Antisense Strand to SEQ ID NO: 408581
uagcucaggcuucauuugu

SEQ ID NO: 408583 - RNA, 19 nt, Artificial Sequence
  Description of Artificial Sequence: Synthetic oligonucleotide
  Sense Strand Starting at position 1145 of SEQ ID NO: 319046
caugucauggcuuagaaca

SEQ ID NO: 408584 - RNA, 19 nt, Artificial Sequence
  Description of Artificial Sequence: Synthetic oligonucleotide
  Antisense Strand to SEQ ID NO: 408583
uguucuaagccaugacaug

SEQ ID NO: 408585 - RNA, 19 nt, Artificial Sequence
  Description of Artificial Sequence: Synthetic oligonucleotide
  Sense Strand Starting at position 1145 of SEQ ID NO: 319149
ucaaguuagcaacaguauu

SEQ ID NO: 408586 - RNA, 19 nt, Artificial Sequence
  Description of Artificial Sequence: Synthetic oligonucleotide
  Antisense Strand to SEQ ID NO: 408585
aauacuguugcuaacuuga

SEQ ID NO: 408587 - RNA, 19 nt, Artificial Sequence
  Description of Artificial Sequence: Synthetic oligonucleotide
  Sense Strand Starting at position 1145 of SEQ ID NO: 319162
aguauuagccaauaguaua

SEQ ID NO: 408588 - RNA, 19 nt, Artificial Sequence
  Description of Artificial Sequence: Synthetic oligonucleotide
  Antisense Strand to SEQ ID NO: 408587
uauacuauuggcuaauacu

SEQ ID NO: 408589 - RNA, 19 nt, Artificial Sequence
  Description of Artificial Sequence: Synthetic oligonucleotide
  Sense Strand Starting at position 1145 of SEQ ID NO: 319187
aauguugucccuugaagga

SEQ ID NO: 408590 - RNA, 19 nt, Artificial Sequence
  Description of Artificial Sequence: Synthetic oligonucleotide
  Antisense Strand to SEQ ID NO: 408589
uccuucaagggacaacauu

SEQ ID NO: 408591 - RNA, 19 nt, Artificial Sequence
  Description of Artificial Sequence: Synthetic oligonucleotide
  Sense Strand Starting at position 1146 of SEQ ID NO: 315384
gccuuaucagaacaucgaa

SEQ ID NO: 408592 - RNA, 19 nt, Artificial Sequence
  Description of Artificial Sequence: Synthetic oligonucleotide
  Antisense Strand to SEQ ID NO: 408591
uucgauguucugauaaggc

SEQ ID NO: 408593 - RNA, 19 nt, Artificial Sequence
  Description of Artificial Sequence: Synthetic oligonucleotide
  Sense Strand Starting at position 1146 of SEQ ID NO: 315460
acugguagaucacuugaau

SEQ ID NO: 408594 - RNA, 19 nt, Artificial Sequence
  Description of Artificial Sequence: Synthetic oligonucleotide
  Antisense Strand to SEQ ID NO: 408593
auucaagugaucuaccagu

SEQ ID NO: 408595 - RNA, 19 nt, Artificial Sequence
  Description of Artificial Sequence: Synthetic oligonucleotide
  Sense Strand Starting at position 1146 of SEQ ID NO: 315482
uuuaguuuacucgaaguac

SEQ ID NO: 408596 - RNA, 19 nt, Artificial Sequence
  Description of Artificial Sequence: Synthetic oligonucleotide
  Antisense Strand to SEQ ID NO: 408595
guacuucgaguaaacuaaa

SEQ ID NO: 408597 - RNA, 19 nt, Artificial Sequence
  Description of Artificial Sequence: Synthetic oligonucleotide
  Sense Strand Starting at position 1146 of SEQ ID NO: 315909
agaugcaagucuuucuagu

SEQ ID NO: 408598 - RNA, 19 nt, Artificial Sequence
  Description of Artificial Sequence: Synthetic oligonucleotide
  Antisense Strand to SEQ ID NO: 408597
acuagaaagacuugcaucu

SEQ ID NO: 408599 - RNA, 19 nt, Artificial Sequence
  Description of Artificial Sequence: Synthetic oligonucleotide
  Sense Strand Starting at position 1146 of SEQ ID NO: 315911
augcaagucuuucuaguca

SEQ ID NO: 408600 - RNA, 19 nt, Artificial Sequence
  Description of Artificial Sequence: Synthetic oligonucleotide
  Antisense Strand to SEQ ID NO: 408599
ugacuagaaagacuugcau

SEQ ID NO: 408601 - RNA, 19 nt, Artificial Sequence
  Description of Artificial Sequence: Synthetic oligonucleotide
  Sense Strand Starting at position 1146 of SEQ ID NO: 316069
gagcacgauucccugcaau

SEQ ID NO: 408602 - RNA, 19 nt, Artificial Sequence
  Description of Artificial Sequence: Synthetic oligonucleotide
  Antisense Strand to SEQ ID NO: 408601
auugcagggaaucgugcuc

SEQ ID NO: 408603 - RNA, 19 nt, Artificial Sequence
  Description of Artificial Sequence: Synthetic oligonucleotide
  Sense Strand Starting at position 1146 of SEQ ID NO: 316111
uuucaaauguggguagaug

SEQ ID NO: 408604 - RNA, 19 nt, Artificial Sequence
  Description of Artificial Sequence: Synthetic oligonucleotide
  Antisense Strand to SEQ ID NO: 408603
caucuacccacauuugaaa

SEQ ID NO: 408605 - RNA, 19 nt, Artificial Sequence
  Description of Artificial Sequence: Synthetic oligonucleotide
  Sense Strand Starting at position 1146 of SEQ ID NO: 316391
uggaaagcccagcauugau

SEQ ID NO: 408606 - RNA, 19 nt, Artificial Sequence
  Description of Artificial Sequence: Synthetic oligonucleotide
  Antisense Strand to SEQ ID NO: 408605
aucaaugcugggcuuucca

SEQ ID NO: 408607 - RNA, 19 nt, Artificial Sequence
  Description of Artificial Sequence: Synthetic oligonucleotide
  Sense Strand Starting at position 1146 of SEQ ID NO: 316504
aaaugaacucguugucaug

SEQ ID NO: 408608 - RNA, 19 nt, Artificial Sequence
  Description of Artificial Sequence: Synthetic oligonucleotide
  Antisense Strand to SEQ ID NO: 408607
caugacaacgaguucauuu

SEQ ID NO: 408609 - RNA, 19 nt, Artificial Sequence
  Description of Artificial Sequence: Synthetic oligonucleotide
  Sense Strand Starting at position 1146 of SEQ ID NO: 317769
ggccucagagcuuagcauu

SEQ ID NO: 408610 - RNA, 19 nt, Artificial Sequence
  Description of Artificial Sequence: Synthetic oligonucleotide
  Antisense Strand to SEQ ID NO: 408609
aaugcuaagcucugaggcc

SEQ ID NO: 408611 - RNA, 19 nt, Artificial Sequence
  Description of Artificial Sequence: Synthetic oligonucleotide
  Sense Strand Starting at position 1146 of SEQ ID NO: 317782
agcauuguauucgcgauuu

SEQ ID NO: 408612 - RNA, 19 nt, Artificial Sequence
  Description of Artificial Sequence: Synthetic oligonucleotide
  Antisense Strand to SEQ ID NO: 408611
aaaucgcgaauacaaugcu

SEQ ID NO: 408613 - RNA, 19 nt, Artificial Sequence
  Description of Artificial Sequence: Synthetic oligonucleotide
  Sense Strand Starting at position 1146 of SEQ ID NO: 317784
cauuguauucgcgauuuac

SEQ ID NO: 408614 - RNA, 19 nt, Artificial Sequence
  Description of Artificial Sequence: Synthetic oligonucleotide
  Antisense Strand to SEQ ID NO: 408613
guaaaucgcgaauacaaug

SEQ ID NO: 408615 - RNA, 19 nt, Artificial Sequence
  Description of Artificial Sequence: Synthetic oligonucleotide
  Sense Strand Starting at position 1146 of SEQ ID NO: 317794
gcgauuuacggcugacaag

SEQ ID NO: 408616 - RNA, 19 nt, Artificial Sequence
  Description of Artificial Sequence: Synthetic oligonucleotide
  Antisense Strand to SEQ ID NO: 408615
cuugucagccguaaaucgc

SEQ ID NO: 408617 - RNA, 19 nt, Artificial Sequence
  Description of Artificial Sequence: Synthetic oligonucleotide
  Sense Strand Starting at position 1146 of SEQ ID NO: 317858
ggacuucccucgccauuaa

SEQ ID NO: 408618 - RNA, 19 nt, Artificial Sequence
  Description of Artificial Sequence: Synthetic oligonucleotide
  Antisense Strand to SEQ ID NO: 408617
uuaauggcgagggaagucc

SEQ ID NO: 408619 - RNA, 19 nt, Artificial Sequence
  Description of Artificial Sequence: Synthetic oligonucleotide
  Sense Strand Starting at position 1146 of SEQ ID NO: 317867
ucgccauuaaucuagacga

SEQ ID NO: 408620 - RNA, 19 nt, Artificial Sequence
  Description of Artificial Sequence: Synthetic oligonucleotide
  Antisense Strand to SEQ ID NO: 408619
ucgucuagauuaauggcga

SEQ ID NO: 408621 - RNA, 19 nt, Artificial Sequence
  Description of Artificial Sequence: Synthetic oligonucleotide
  Sense Strand Starting at position 1146 of SEQ ID NO: 317869
gccauuaaucuagacgaaa

SEQ ID NO: 408622 - RNA, 19 nt, Artificial Sequence
  Description of Artificial Sequence: Synthetic oligonucleotide
  Antisense Strand to SEQ ID NO: 408621
uuucgucuagauuaauggc

SEQ ID NO: 408623 - RNA, 19 nt, Artificial Sequence
  Description of Artificial Sequence: Synthetic oligonucleotide
  Sense Strand Starting at position 1146 of SEQ ID NO: 317902
ggccgauuggcgucauccu

SEQ ID NO: 408624 - RNA, 19 nt, Artificial Sequence
  Description of Artificial Sequence: Synthetic oligonucleotide
  Antisense Strand to SEQ ID NO: 408623
aggaugacgccaaucggcc

SEQ ID NO: 408625 - RNA, 19 nt, Artificial Sequence
  Description of Artificial Sequence: Synthetic oligonucleotide
  Sense Strand Starting at position 1146 of SEQ ID NO: 317943
cguggugucggcuuugcau

SEQ ID NO: 408626 - RNA, 19 nt, Artificial Sequence
  Description of Artificial Sequence: Synthetic oligonucleotide
  Antisense Strand to SEQ ID NO: 408625
augcaaagccgacaccacg

SEQ ID NO: 408627 - RNA, 19 nt, Artificial Sequence
  Description of Artificial Sequence: Synthetic oligonucleotide
  Sense Strand Starting at position 1146 of SEQ ID NO: 317979
uaguuugugagaggagaau

SEQ ID NO: 408628 - RNA, 19 nt, Artificial Sequence
  Description of Artificial Sequence: Synthetic oligonucleotide
  Antisense Strand to SEQ ID NO: 408627
auucuccucucacaaacua

SEQ ID NO: 408629 - RNA, 19 nt, Artificial Sequence
  Description of Artificial Sequence: Synthetic oligonucleotide
  Sense Strand Starting at position 1146 of SEQ ID NO: 318012
aagauagacucagcuguga

SEQ ID NO: 408630 - RNA, 19 nt, Artificial Sequence
  Description of Artificial Sequence: Synthetic oligonucleotide
  Antisense Strand to SEQ ID NO: 408629
ucacagcugagucuaucuu

SEQ ID NO: 408631 - RNA, 19 nt, Artificial Sequence
  Description of Artificial Sequence: Synthetic oligonucleotide
  Sense Strand Starting at position 1146 of SEQ ID NO: 318016
uagacucagcugugaaagu

SEQ ID NO: 408632 - RNA, 19 nt, Artificial Sequence
  Description of Artificial Sequence: Synthetic oligonucleotide
  Antisense Strand to SEQ ID NO: 408631
acuuucacagcugagucua

SEQ ID NO: 408633 - RNA, 19 nt, Artificial Sequence
  Description of Artificial Sequence: Synthetic oligonucleotide
  Sense Strand Starting at position 1146 of SEQ ID NO: 318086
augagaaucuuagccuucu

SEQ ID NO: 408634 - RNA, 19 nt, Artificial Sequence
  Description of Artificial Sequence: Synthetic oligonucleotide
  Antisense Strand to SEQ ID NO: 408633
agaaggcuaagauucucau

SEQ ID NO: 408635 - RNA, 19 nt, Artificial Sequence
  Description of Artificial Sequence: Synthetic oligonucleotide
  Sense Strand Starting at position 1146 of SEQ ID NO: 318087
ugagaaucuuagccuucua

SEQ ID NO: 408636 - RNA, 19 nt, Artificial Sequence
  Description of Artificial Sequence: Synthetic oligonucleotide
  Antisense Strand to SEQ ID NO: 408635
uagaaggcuaagauucuca

SEQ ID NO: 408637 - RNA, 19 nt, Artificial Sequence
  Description of Artificial Sequence: Synthetic oligonucleotide
  Sense Strand Starting at position 1146 of SEQ ID NO: 318320
ucaguauggaaucgcucaa

SEQ ID NO: 408638 - RNA, 19 nt, Artificial Sequence
  Description of Artificial Sequence: Synthetic oligonucleotide
  Antisense Strand to SEQ ID NO: 408637
uugagcgauuccauacuga

SEQ ID NO: 408639 - RNA, 19 nt, Artificial Sequence
  Description of Artificial Sequence: Synthetic oligonucleotide
  Sense Strand Starting at position 1146 of SEQ ID NO: 318358
gccugucuccaguagguua

SEQ ID NO: 408640 - RNA, 19 nt, Artificial Sequence
  Description of Artificial Sequence: Synthetic oligonucleotide
  Antisense Strand to SEQ ID NO: 408639
uaaccuacuggagacaggc

SEQ ID NO: 408641 - RNA, 19 nt, Artificial Sequence
  Description of Artificial Sequence: Synthetic oligonucleotide
  Sense Strand Starting at position 1146 of SEQ ID NO: 318395
cucucaaggguuugcaaga

SEQ ID NO: 408642 - RNA, 19 nt, Artificial Sequence
  Description of Artificial Sequence: Synthetic oligonucleotide
  Antisense Strand to SEQ ID NO: 408641
ucuugcaaacccuugagag

SEQ ID NO: 408643 - RNA, 19 nt, Artificial Sequence
  Description of Artificial Sequence: Synthetic oligonucleotide
  Sense Strand Starting at position 1146 of SEQ ID NO: 318396
ucucaaggguuugcaagau

SEQ ID NO: 408644 - RNA, 19 nt, Artificial Sequence
  Description of Artificial Sequence: Synthetic oligonucleotide
  Antisense Strand to SEQ ID NO: 408643
aucuugcaaacccuugaga

SEQ ID NO: 408645 - RNA, 19 nt, Artificial Sequence
  Description of Artificial Sequence: Synthetic oligonucleotide
  Sense Strand Starting at position 1146 of SEQ ID NO: 318400
aaggguuugcaagaugugu

SEQ ID NO: 408646 - RNA, 19 nt, Artificial Sequence
  Description of Artificial Sequence: Synthetic oligonucleotide
  Antisense Strand to SEQ ID NO: 408645
acacaucuugcaaacccuu

SEQ ID NO: 408647 - RNA, 19 nt, Artificial Sequence
  Description of Artificial Sequence: Synthetic oligonucleotide
  Sense Strand Starting at position 1146 of SEQ ID NO: 318436
agucauaacugaccagauu

SEQ ID NO: 408648 - RNA, 19 nt, Artificial Sequence
  Description of Artificial Sequence: Synthetic oligonucleotide
  Antisense Strand to SEQ ID NO: 408647
aaucuggucaguuaugacu

SEQ ID NO: 408649 - RNA, 19 nt, Artificial Sequence
  Description of Artificial Sequence: Synthetic oligonucleotide
  Sense Strand Starting at position 1146 of SEQ ID NO: 318454
uggauaugaauucgugacu

SEQ ID NO: 408650 - RNA, 19 nt, Artificial Sequence
  Description of Artificial Sequence: Synthetic oligonucleotide
  Antisense Strand to SEQ ID NO: 408649
agucacgaauucauaucca

SEQ ID NO: 408651 - RNA, 19 nt, Artificial Sequence
  Description of Artificial Sequence: Synthetic oligonucleotide
  Sense Strand Starting at position 1146 of SEQ ID NO: 318455
ggauaugaauucgugacug

SEQ ID NO: 408652 - RNA, 19 nt, Artificial Sequence
  Description of Artificial Sequence: Synthetic oligonucleotide
  Antisense Strand to SEQ ID NO: 408651
cagucacgaauucauaucc

SEQ ID NO: 408653 - RNA, 19 nt, Artificial Sequence
  Description of Artificial Sequence: Synthetic oligonucleotide
  Sense Strand Starting at position 1146 of SEQ ID NO: 318459
augaauucgugacuggacu

SEQ ID NO: 408654 - RNA, 19 nt, Artificial Sequence
  Description of Artificial Sequence: Synthetic oligonucleotide
  Antisense Strand to SEQ ID NO: 408653
aguccagucacgaauucau

SEQ ID NO: 408655 - RNA, 19 nt, Artificial Sequence
  Description of Artificial Sequence: Synthetic oligonucleotide
  Sense Strand Starting at position 1146 of SEQ ID NO: 318502
ucuucuaaucucuggcuga

SEQ ID NO: 408656 - RNA, 19 nt, Artificial Sequence
  Description of Artificial Sequence: Synthetic oligonucleotide
  Antisense Strand to SEQ ID NO: 408655
ucagccagagauuagaaga

SEQ ID NO: 408657 - RNA, 19 nt, Artificial Sequence
  Description of Artificial Sequence: Synthetic oligonucleotide
  Sense Strand Starting at position 1146 of SEQ ID NO: 318551
cuuuccauguuguuaaaga

SEQ ID NO: 408658 - RNA, 19 nt, Artificial Sequence
  Description of Artificial Sequence: Synthetic oligonucleotide
  Antisense Strand to SEQ ID NO: 408657
ucuuuaacaacauggaaag

SEQ ID NO: 408659 - RNA, 19 nt, Artificial Sequence
  Description of Artificial Sequence: Synthetic oligonucleotide
  Sense Strand Starting at position 1146 of SEQ ID NO: 318574
agucccaguccauacuaau

SEQ ID NO: 408660 - RNA, 19 nt, Artificial Sequence
  Description of Artificial Sequence: Synthetic oligonucleotide
  Antisense Strand to SEQ ID NO: 408659
auuaguauggacugggacu

SEQ ID NO: 408661 - RNA, 19 nt, Artificial Sequence
  Description of Artificial Sequence: Synthetic oligonucleotide
  Sense Strand Starting at position 1146 of SEQ ID NO: 318616
ggcucagagcuaugggacu

SEQ ID NO: 408662 - RNA, 19 nt, Artificial Sequence
  Description of Artificial Sequence: Synthetic oligonucleotide
  Antisense Strand to SEQ ID NO: 408661
agucccauagcucugagcc

SEQ ID NO: 408663 - RNA, 19 nt, Artificial Sequence
  Description of Artificial Sequence: Synthetic oligonucleotide
  Sense Strand Starting at position 1146 of SEQ ID NO: 318799
uuccuagcgccuuauaaug

SEQ ID NO: 408664 - RNA, 19 nt, Artificial Sequence
  Description of Artificial Sequence: Synthetic oligonucleotide
  Antisense Strand to SEQ ID NO: 408663
cauuauaaggcgcuaggaa

SEQ ID NO: 408665 - RNA, 19 nt, Artificial Sequence
  Description of Artificial Sequence: Synthetic oligonucleotide
  Sense Strand Starting at position 1146 of SEQ ID NO: 318817
guaaauauguucuuaucca

SEQ ID NO: 408666 - RNA, 19 nt, Artificial Sequence
  Description of Artificial Sequence: Synthetic oligonucleotide
  Antisense Strand to SEQ ID NO: 408665
uggauaagaacauauuuac

SEQ ID NO: 408667 - RNA, 19 nt, Artificial Sequence
  Description of Artificial Sequence: Synthetic oligonucleotide
  Sense Strand Starting at position 1146 of SEQ ID NO: 318846
ccuuucuguuucucagaag

SEQ ID NO: 408668 - RNA, 19 nt, Artificial Sequence
  Description of Artificial Sequence: Synthetic oligonucleotide
  Antisense Strand to SEQ ID NO: 408667
cuucugagaaacagaaagg

SEQ ID NO: 408669 - RNA, 19 nt, Artificial Sequence
  Description of Artificial Sequence: Synthetic oligonucleotide
  Sense Strand Starting at position 1146 of SEQ ID NO: 319202
ugauguuacucccuccagu

SEQ ID NO: 408670 - RNA, 19 nt, Artificial Sequence
  Description of Artificial Sequence: Synthetic oligonucleotide
  Antisense Strand to SEQ ID NO: 408669
acuggagggaguaacauca

SEQ ID NO: 408671 - RNA, 19 nt, Artificial Sequence
  Description of Artificial Sequence: Synthetic oligonucleotide
  Sense Strand Starting at position 1147 of SEQ ID NO: 315251
agauuaacucaagguugac

SEQ ID NO: 408672 - RNA, 19 nt, Artificial Sequence
  Description of Artificial Sequence: Synthetic oligonucleotide
  Antisense Strand to SEQ ID NO: 408671
gucaaccuugaguuaaucu

SEQ ID NO: 408673 - RNA, 19 nt, Artificial Sequence
  Description of Artificial Sequence: Synthetic oligonucleotide
  Sense Strand Starting at position 1147 of SEQ ID NO: 315268
acaggucaauaagauaaca

SEQ ID NO: 408674 - RNA, 19 nt, Artificial Sequence
  Description of Artificial Sequence: Synthetic oligonucleotide
  Antisense Strand to SEQ ID NO: 408673
uguuaucuuauugaccugu

SEQ ID NO: 408675 - RNA, 19 nt, Artificial Sequence
  Description of Artificial Sequence: Synthetic oligonucleotide
  Sense Strand Starting at position 1147 of SEQ ID NO: 315410
caauguagugucuaaguua

SEQ ID NO: 408676 - RNA, 19 nt, Artificial Sequence
  Description of Artificial Sequence: Synthetic oligonucleotide
  Antisense Strand to SEQ ID NO: 408675
uaacuuagacacuacauug

SEQ ID NO: 408677 - RNA, 19 nt, Artificial Sequence
  Description of Artificial Sequence: Synthetic oligonucleotide
  Sense Strand Starting at position 1147 of SEQ ID NO: 315427
uagcuaguguuguuaagag

SEQ ID NO: 408678 - RNA, 19 nt, Artificial Sequence
  Description of Artificial Sequence: Synthetic oligonucleotide
  Antisense Strand to SEQ ID NO: 408677
cucuuaacaacacuagcua

SEQ ID NO: 408679 - RNA, 19 nt, Artificial Sequence
  Description of Artificial Sequence: Synthetic oligonucleotide
  Sense Strand Starting at position 1147 of SEQ ID NO: 315489
gugcaacuucgguauuaca

SEQ ID NO: 408680 - RNA, 19 nt, Artificial Sequence
  Description of Artificial Sequence: Synthetic oligonucleotide
  Antisense Strand to SEQ ID NO: 408679
uguaauaccgaaguugcac

SEQ ID NO: 408681 - RNA, 19 nt, Artificial Sequence
  Description of Artificial Sequence: Synthetic oligonucleotide
  Sense Strand Starting at position 1147 of SEQ ID NO: 315592
ucagauacugugcauaaca

SEQ ID NO: 408682 - RNA, 19 nt, Artificial Sequence
  Description of Artificial Sequence: Synthetic oligonucleotide
  Antisense Strand to SEQ ID NO: 408681
uguuaugcacaguaucuga

SEQ ID NO: 408683 - RNA, 19 nt, Artificial Sequence
  Description of Artificial Sequence: Synthetic oligonucleotide
  Sense Strand Starting at position 1147 of SEQ ID NO: 315594
agauacugugcauaacaca

SEQ ID NO: 408684 - RNA, 19 nt, Artificial Sequence
  Description of Artificial Sequence: Synthetic oligonucleotide
  Antisense Strand to SEQ ID NO: 408683
uguguuaugcacaguaucu

SEQ ID NO: 408685 - RNA, 19 nt, Artificial Sequence
  Description of Artificial Sequence: Synthetic oligonucleotide
  Sense Strand Starting at position 1147 of SEQ ID NO: 317514
cggucaaacucgucuuaaa

SEQ ID NO: 408686 - RNA, 19 nt, Artificial Sequence
  Description of Artificial Sequence: Synthetic oligonucleotide
  Antisense Strand to SEQ ID NO: 408685
uuuaagacgaguuugaccg

SEQ ID NO: 408687 - RNA, 19 nt, Artificial Sequence
  Description of Artificial Sequence: Synthetic oligonucleotide
  Sense Strand Starting at position 1147 of SEQ ID NO: 317792
gcgggaauccgagaaugug

SEQ ID NO: 408688 - RNA, 19 nt, Artificial Sequence
  Description of Artificial Sequence: Synthetic oligonucleotide
  Antisense Strand to SEQ ID NO: 408687
cacauucucggauucccgc

SEQ ID NO: 408689 - RNA, 19 nt, Artificial Sequence
  Description of Artificial Sequence: Synthetic oligonucleotide
  Sense Strand Starting at position 1147 of SEQ ID NO: 317800
ccgagaaugugagcaaaga

SEQ ID NO: 408690 - RNA, 19 nt, Artificial Sequence
  Description of Artificial Sequence: Synthetic oligonucleotide
  Antisense Strand to SEQ ID NO: 408689
ucuuugcucacauucucgg

SEQ ID NO: 408691 - RNA, 19 nt, Artificial Sequence
  Description of Artificial Sequence: Synthetic oligonucleotide
  Sense Strand Starting at position 1147 of SEQ ID NO: 317911
uguacuccgaauugcgaaa

SEQ ID NO: 408692 - RNA, 19 nt, Artificial Sequence
  Description of Artificial Sequence: Synthetic oligonucleotide
  Antisense Strand to SEQ ID NO: 408691
uuucgcaauucggaguaca

SEQ ID NO: 408693 - RNA, 19 nt, Artificial Sequence
  Description of Artificial Sequence: Synthetic oligonucleotide
  Sense Strand Starting at position 1147 of SEQ ID NO: 317924
gcgaaaguacuguauguuc

SEQ ID NO: 408694 - RNA, 19 nt, Artificial Sequence
  Description of Artificial Sequence: Synthetic oligonucleotide
  Antisense Strand to SEQ ID NO: 408693
gaacauacaguacuuucgc

SEQ ID NO: 408695 - RNA, 19 nt, Artificial Sequence
  Description of Artificial Sequence: Synthetic oligonucleotide
  Sense Strand Starting at position 1147 of SEQ ID NO: 317983
cauacauuccgucgaguga

SEQ ID NO: 408696 - RNA, 19 nt, Artificial Sequence
  Description of Artificial Sequence: Synthetic oligonucleotide
  Antisense Strand to SEQ ID NO: 408695
ucacucgacggaauguaug

SEQ ID NO: 408697 - RNA, 19 nt, Artificial Sequence
  Description of Artificial Sequence: Synthetic oligonucleotide
  Sense Strand Starting at position 1147 of SEQ ID NO: 317989
uuccgucgagugagugaaa

SEQ ID NO: 408698 - RNA, 19 nt, Artificial Sequence
  Description of Artificial Sequence: Synthetic oligonucleotide
  Antisense Strand to SEQ ID NO: 408697
uuucacucacucgacggaa

SEQ ID NO: 408699 - RNA, 19 nt, Artificial Sequence
  Description of Artificial Sequence: Synthetic oligonucleotide
  Sense Strand Starting at position 1147 of SEQ ID NO: 317992
cgucgagugagugaaacua

SEQ ID NO: 408700 - RNA, 19 nt, Artificial Sequence
  Description of Artificial Sequence: Synthetic oligonucleotide
  Antisense Strand to SEQ ID NO: 408699
uaguuucacucacucgacg

SEQ ID NO: 408701 - RNA, 19 nt, Artificial Sequence
  Description of Artificial Sequence: Synthetic oligonucleotide
  Sense Strand Starting at position 1147 of SEQ ID NO: 318009
uaacuuacccuggacguua

SEQ ID NO: 408702 - RNA, 19 nt, Artificial Sequence
  Description of Artificial Sequence: Synthetic oligonucleotide
  Antisense Strand to SEQ ID NO: 408701
uaacguccaggguaaguua

SEQ ID NO: 408703 - RNA, 19 nt, Artificial Sequence
  Description of Artificial Sequence: Synthetic oligonucleotide
  Sense Strand Starting at position 1147 of SEQ ID NO: 318023
cguuaagcuguuuccaguu

SEQ ID NO: 408704 - RNA, 19 nt, Artificial Sequence
  Description of Artificial Sequence: Synthetic oligonucleotide
  Antisense Strand to SEQ ID NO: 408703
aacuggaaacagcuuaacg

SEQ ID NO: 408705 - RNA, 19 nt, Artificial Sequence
  Description of Artificial Sequence: Synthetic oligonucleotide
  Sense Strand Starting at position 1147 of SEQ ID NO: 318064
gaacgaagguucuugugca

SEQ ID NO: 408706 - RNA, 19 nt, Artificial Sequence
  Description of Artificial Sequence: Synthetic oligonucleotide
  Antisense Strand to SEQ ID NO: 408705
ugcacaagaaccuucguuc

SEQ ID NO: 408707 - RNA, 19 nt, Artificial Sequence
  Description of Artificial Sequence: Synthetic oligonucleotide
  Sense Strand Starting at position 1147 of SEQ ID NO: 318080
gcacgucuaccuuguauuu

SEQ ID NO: 408708 - RNA, 19 nt, Artificial Sequence
  Description of Artificial Sequence: Synthetic oligonucleotide
  Antisense Strand to SEQ ID NO: 408707
aaauacaagguagacgugc

SEQ ID NO: 408709 - RNA, 19 nt, Artificial Sequence
  Description of Artificial Sequence: Synthetic oligonucleotide
  Sense Strand Starting at position 1147 of SEQ ID NO: 318178
gcuuaaacuaagugaggua

SEQ ID NO: 408710 - RNA, 19 nt, Artificial Sequence
  Description of Artificial Sequence: Synthetic oligonucleotide
  Antisense Strand to SEQ ID NO: 408709
uaccucacuuaguuuaagc

SEQ ID NO: 408711 - RNA, 19 nt, Artificial Sequence
  Description of Artificial Sequence: Synthetic oligonucleotide
  Sense Strand Starting at position 1147 of SEQ ID NO: 318251
ggcguaaucggugcucagu

SEQ ID NO: 408712 - RNA, 19 nt, Artificial Sequence
  Description of Artificial Sequence: Synthetic oligonucleotide
  Antisense Strand to SEQ ID NO: 408711
acugagcaccgauuacgcc

SEQ ID NO: 408713 - RNA, 19 nt, Artificial Sequence
  Description of Artificial Sequence: Synthetic oligonucleotide
  Sense Strand Starting at position 1147 of SEQ ID NO: 318252
gcguaaucggugcucagua

SEQ ID NO: 408714 - RNA, 19 nt, Artificial Sequence
  Description of Artificial Sequence: Synthetic oligonucleotide
  Antisense Strand to SEQ ID NO: 408713
uacugagcaccgauuacgc

SEQ ID NO: 408715 - RNA, 19 nt, Artificial Sequence
  Description of Artificial Sequence: Synthetic oligonucleotide
  Sense Strand Starting at position 1147 of SEQ ID NO: 318254
guaaucggugcucaguaaa

SEQ ID NO: 408716 - RNA, 19 nt, Artificial Sequence
  Description of Artificial Sequence: Synthetic oligonucleotide
  Antisense Strand to SEQ ID NO: 408715
uuuacugagcaccgauuac

SEQ ID NO: 408717 - RNA, 19 nt, Artificial Sequence
  Description of Artificial Sequence: Synthetic oligonucleotide
  Sense Strand Starting at position 1147 of SEQ ID NO: 318257
aucggugcucaguaaauac

SEQ ID NO: 408718 - RNA, 19 nt, Artificial Sequence
  Description of Artificial Sequence: Synthetic oligonucleotide
  Antisense Strand to SEQ ID NO: 408717
guauuuacugagcaccgau

SEQ ID NO: 408719 - RNA, 19 nt, Artificial Sequence
  Description of Artificial Sequence: Synthetic oligonucleotide
  Sense Strand Starting at position 1147 of SEQ ID NO: 318327
cuggauauuaaagggcaua

SEQ ID NO: 408720 - RNA, 19 nt, Artificial Sequence
  Description of Artificial Sequence: Synthetic oligonucleotide
  Antisense Strand to SEQ ID NO: 408719
uaugcccuuuaauauccag

SEQ ID NO: 408721 - RNA, 19 nt, Artificial Sequence
  Description of Artificial Sequence: Synthetic oligonucleotide
  Sense Strand Starting at position 1147 of SEQ ID NO: 318328
uggauauuaaagggcauau

SEQ ID NO: 408722 - RNA, 19 nt, Artificial Sequence
  Description of Artificial Sequence: Synthetic oligonucleotide
  Antisense Strand to SEQ ID NO: 408721
auaugcccuuuaauaucca

SEQ ID NO: 408723 - RNA, 19 nt, Artificial Sequence
  Description of Artificial Sequence: Synthetic oligonucleotide
  Sense Strand Starting at position 1147 of SEQ ID NO: 318357
cuauaaaggcccugaauua

SEQ ID NO: 408724 - RNA, 19 nt, Artificial Sequence
  Description of Artificial Sequence: Synthetic oligonucleotide
  Antisense Strand to SEQ ID NO: 408723
uaauucagggccuuuauag

SEQ ID NO: 408725 - RNA, 19 nt, Artificial Sequence
  Description of Artificial Sequence: Synthetic oligonucleotide
  Sense Strand Starting at position 1147 of SEQ ID NO: 318473
ugagguagcuccuugaaag

SEQ ID NO: 408726 - RNA, 19 nt, Artificial Sequence
  Description of Artificial Sequence: Synthetic oligonucleotide
  Antisense Strand to SEQ ID NO: 408725
cuuucaaggagcuaccuca

SEQ ID NO: 408727 - RNA, 19 nt, Artificial Sequence
  Description of Artificial Sequence: Synthetic oligonucleotide
  Sense Strand Starting at position 1147 of SEQ ID NO: 318474
gagguagcuccuugaaagu

SEQ ID NO: 408728 - RNA, 19 nt, Artificial Sequence
  Description of Artificial Sequence: Synthetic oligonucleotide
  Antisense Strand to SEQ ID NO: 408727
acuuucaaggagcuaccuc

SEQ ID NO: 408729 - RNA, 19 nt, Artificial Sequence
  Description of Artificial Sequence: Synthetic oligonucleotide
  Sense Strand Starting at position 1147 of SEQ ID NO: 318536
uuugucuuguuuccuuaaa

SEQ ID NO: 408730 - RNA, 19 nt, Artificial Sequence
  Description of Artificial Sequence: Synthetic oligonucleotide
  Antisense Strand to SEQ ID NO: 408729
uuuaaggaaacaagacaaa

SEQ ID NO: 408731 - RNA, 19 nt, Artificial Sequence
  Description of Artificial Sequence: Synthetic oligonucleotide
  Sense Strand Starting at position 1147 of SEQ ID NO: 318619
acaguuuaauagccgacau

SEQ ID NO: 408732 - RNA, 19 nt, Artificial Sequence
  Description of Artificial Sequence: Synthetic oligonucleotide
  Antisense Strand to SEQ ID NO: 408731
augucggcuauuaaacugu

SEQ ID NO: 408733 - RNA, 19 nt, Artificial Sequence
  Description of Artificial Sequence: Synthetic oligonucleotide
  Sense Strand Starting at position 1147 of SEQ ID NO: 318732
acgguacaugcugaaauga

SEQ ID NO: 408734 - RNA, 19 nt, Artificial Sequence
  Description of Artificial Sequence: Synthetic oligonucleotide
  Antisense Strand to SEQ ID NO: 408733
ucauuucagcauguaccgu

SEQ ID NO: 408735 - RNA, 19 nt, Artificial Sequence
  Description of Artificial Sequence: Synthetic oligonucleotide
  Sense Strand Starting at position 1147 of SEQ ID NO: 318849
auugucuuuguguaucuau

SEQ ID NO: 408736 - RNA, 19 nt, Artificial Sequence
  Description of Artificial Sequence: Synthetic oligonucleotide
  Antisense Strand to SEQ ID NO: 408735
auagauacacaaagacaau

SEQ ID NO: 408737 - RNA, 19 nt, Artificial Sequence
  Description of Artificial Sequence: Synthetic oligonucleotide
  Sense Strand Starting at position 1147 of SEQ ID NO: 318858
guguaucuauucccuagua

SEQ ID NO: 408738 - RNA, 19 nt, Artificial Sequence
  Description of Artificial Sequence: Synthetic oligonucleotide
  Antisense Strand to SEQ ID NO: 408737
uacuagggaauagauacac

SEQ ID NO: 408739 - RNA, 19 nt, Artificial Sequence
  Description of Artificial Sequence: Synthetic oligonucleotide
  Sense Strand Starting at position 1147 of SEQ ID NO: 318859
uguaucuauucccuaguaa

SEQ ID NO: 408740 - RNA, 19 nt, Artificial Sequence
  Description of Artificial Sequence: Synthetic oligonucleotide
  Antisense Strand to SEQ ID NO: 408739
uuacuagggaauagauaca

SEQ ID NO: 408741 - RNA, 19 nt, Artificial Sequence
  Description of Artificial Sequence: Synthetic oligonucleotide
  Sense Strand Starting at position 1147 of SEQ ID NO: 318860
guaucuauucccuaguaag

SEQ ID NO: 408742 - RNA, 19 nt, Artificial Sequence
  Description of Artificial Sequence: Synthetic oligonucleotide
  Antisense Strand to SEQ ID NO: 408741
cuuacuagggaauagauac

SEQ ID NO: 408743 - RNA, 19 nt, Artificial Sequence
  Description of Artificial Sequence: Synthetic oligonucleotide
  Sense Strand Starting at position 1147 of SEQ ID NO: 319025
cucuuaaagucaguuguua

SEQ ID NO: 408744 - RNA, 19 nt, Artificial Sequence
  Description of Artificial Sequence: Synthetic oligonucleotide
  Antisense Strand to SEQ ID NO: 408743
uaacaacugacuuuaagag

SEQ ID NO: 408745 - RNA, 19 nt, Artificial Sequence
  Description of Artificial Sequence: Synthetic oligonucleotide
  Sense Strand Starting at position 1147 of SEQ ID NO: 319072
uuaggaaauuguuaaggaa

SEQ ID NO: 408746 - RNA, 19 nt, Artificial Sequence
  Description of Artificial Sequence: Synthetic oligonucleotide
  Antisense Strand to SEQ ID NO: 408745
uuccuuaacaauuuccuaa

SEQ ID NO: 408747 - RNA, 19 nt, Artificial Sequence
  Description of Artificial Sequence: Synthetic oligonucleotide
  Sense Strand Starting at position 1147 of SEQ ID NO: 319081
uguuaaggaacgugcaaau

SEQ ID NO: 408748 - RNA, 19 nt, Artificial Sequence
  Description of Artificial Sequence: Synthetic oligonucleotide
  Antisense Strand to SEQ ID NO: 408747
auuugcacguuccuuaaca

SEQ ID NO: 408749 - RNA, 19 nt, Artificial Sequence
  Description of Artificial Sequence: Synthetic oligonucleotide
  Sense Strand Starting at position 1147 of SEQ ID NO: 319104
gguagugguaaaggugaaa

SEQ ID NO: 408750 - RNA, 19 nt, Artificial Sequence
  Description of Artificial Sequence: Synthetic oligonucleotide
  Antisense Strand to SEQ ID NO: 408749
uuucaccuuuaccacuacc

SEQ ID NO: 408751 - RNA, 19 nt, Artificial Sequence
  Description of Artificial Sequence: Synthetic oligonucleotide
  Sense Strand Starting at position 1148 of SEQ ID NO: 315299
uugcuuagacuaggugaaa

SEQ ID NO: 408752 - RNA, 19 nt, Artificial Sequence
  Description of Artificial Sequence: Synthetic oligonucleotide
  Antisense Strand to SEQ ID NO: 408751
uuucaccuagucuaagcaa

SEQ ID NO: 408753 - RNA, 19 nt, Artificial Sequence
  Description of Artificial Sequence: Synthetic oligonucleotide
  Sense Strand Starting at position 1148 of SEQ ID NO: 315300
ugcuuagacuaggugaaau

SEQ ID NO: 408754 - RNA, 19 nt, Artificial Sequence
  Description of Artificial Sequence: Synthetic oligonucleotide
  Antisense Strand to SEQ ID NO: 408753
auuucaccuagucuaagca

SEQ ID NO: 408755 - RNA, 19 nt, Artificial Sequence
  Description of Artificial Sequence: Synthetic oligonucleotide
  Sense Strand Starting at position 1148 of SEQ ID NO: 315449
uagcaagaacuguaucugu

SEQ ID NO: 408756 - RNA, 19 nt, Artificial Sequence
  Description of Artificial Sequence: Synthetic oligonucleotide
  Antisense Strand to SEQ ID NO: 408755
acagauacaguucuugcua

SEQ ID NO: 408757 - RNA, 19 nt, Artificial Sequence
  Description of Artificial Sequence: Synthetic oligonucleotide
  Sense Strand Starting at position 1148 of SEQ ID NO: 315528
uggacaacuuguucuggga

SEQ ID NO: 408758 - RNA, 19 nt, Artificial Sequence
  Description of Artificial Sequence: Synthetic oligonucleotide
  Antisense Strand to SEQ ID NO: 408757
ucccagaacaaguugucca

SEQ ID NO: 408759 - RNA, 19 nt, Artificial Sequence
  Description of Artificial Sequence: Synthetic oligonucleotide
  Sense Strand Starting at position 1148 of SEQ ID NO: 315532
caacuuguucugggaaaua

SEQ ID NO: 408760 - RNA, 19 nt, Artificial Sequence
  Description of Artificial Sequence: Synthetic oligonucleotide
  Antisense Strand to SEQ ID NO: 408759
uauuucccagaacaaguug

SEQ ID NO: 408761 - RNA, 19 nt, Artificial Sequence
  Description of Artificial Sequence: Synthetic oligonucleotide
  Sense Strand Starting at position 1148 of SEQ ID NO: 315560
acuggugcgacucaaauaa

SEQ ID NO: 408762 - RNA, 19 nt, Artificial Sequence
  Description of Artificial Sequence: Synthetic oligonucleotide
  Antisense Strand to SEQ ID NO: 408761
uuauuugagucgcaccagu

SEQ ID NO: 408763 - RNA, 19 nt, Artificial Sequence
  Description of Artificial Sequence: Synthetic oligonucleotide
  Sense Strand Starting at position 1148 of SEQ ID NO: 315652
uuagaaauaugcccuggga

SEQ ID NO: 408764 - RNA, 19 nt, Artificial Sequence
  Description of Artificial Sequence: Synthetic oligonucleotide
  Antisense Strand to SEQ ID NO: 408763
ucccagggcauauuucuaa

SEQ ID NO: 408765 - RNA, 19 nt, Artificial Sequence
  Description of Artificial Sequence: Synthetic oligonucleotide
  Sense Strand Starting at position 1148 of SEQ ID NO: 315655
gaaauaugcccugggauag

SEQ ID NO: 408766 - RNA, 19 nt, Artificial Sequence
  Description of Artificial Sequence: Synthetic oligonucleotide
  Antisense Strand to SEQ ID NO: 408765
cuaucccagggcauauuuc

SEQ ID NO: 408767 - RNA, 19 nt, Artificial Sequence
  Description of Artificial Sequence: Synthetic oligonucleotide
  Sense Strand Starting at position 1148 of SEQ ID NO: 315656
aaauaugcccugggauaga

SEQ ID NO: 408768 - RNA, 19 nt, Artificial Sequence
  Description of Artificial Sequence: Synthetic oligonucleotide
  Antisense Strand to SEQ ID NO: 408767
ucuaucccagggcauauuu

SEQ ID NO: 408769 - RNA, 19 nt, Artificial Sequence
  Description of Artificial Sequence: Synthetic oligonucleotide
  Sense Strand Starting at position 1148 of SEQ ID NO: 315666
ugggauagauacuuagugu

SEQ ID NO: 408770 - RNA, 19 nt, Artificial Sequence
  Description of Artificial Sequence: Synthetic oligonucleotide
  Antisense Strand to SEQ ID NO: 408769
acacuaaguaucuauccca

SEQ ID NO: 408771 - RNA, 19 nt, Artificial Sequence
  Description of Artificial Sequence: Synthetic oligonucleotide
  Sense Strand Starting at position 1148 of SEQ ID NO: 315669
gauagauacuuaguguauu

SEQ ID NO: 408772 - RNA, 19 nt, Artificial Sequence
  Description of Artificial Sequence: Synthetic oligonucleotide
  Antisense Strand to SEQ ID NO: 408771
aauacacuaaguaucuauc

SEQ ID NO: 408773 - RNA, 19 nt, Artificial Sequence
  Description of Artificial Sequence: Synthetic oligonucleotide
  Sense Strand Starting at position 1148 of SEQ ID NO: 316385
cguuaaaugguauaacaag

SEQ ID NO: 408774 - RNA, 19 nt, Artificial Sequence
  Description of Artificial Sequence: Synthetic oligonucleotide
  Antisense Strand to SEQ ID NO: 408773
cuuguuauaccauuuaacg

SEQ ID NO: 408775 - RNA, 19 nt, Artificial Sequence
  Description of Artificial Sequence: Synthetic oligonucleotide
  Sense Strand Starting at position 1148 of SEQ ID NO: 316429
uuauaaagguuagugagua

SEQ ID NO: 408776 - RNA, 19 nt, Artificial Sequence
  Description of Artificial Sequence: Synthetic oligonucleotide
  Antisense Strand to SEQ ID NO: 408775
uacucacuaaccuuuauaa

SEQ ID NO: 408777 - RNA, 19 nt, Artificial Sequence
  Description of Artificial Sequence: Synthetic oligonucleotide
  Sense Strand Starting at position 1148 of SEQ ID NO: 316691
acaucugacuuucuaguau

SEQ ID NO: 408778 - RNA, 19 nt, Artificial Sequence
  Description of Artificial Sequence: Synthetic oligonucleotide
  Antisense Strand to SEQ ID NO: 408777
auacuagaaagucagaugu

SEQ ID NO: 408779 - RNA, 19 nt, Artificial Sequence
  Description of Artificial Sequence: Synthetic oligonucleotide
  Sense Strand Starting at position 1148 of SEQ ID NO: 316796
agagcuuuauacccagauc

SEQ ID NO: 408780 - RNA, 19 nt, Artificial Sequence
  Description of Artificial Sequence: Synthetic oligonucleotide
  Antisense Strand to SEQ ID NO: 408779
gaucuggguauaaagcucu

SEQ ID NO: 408781 - RNA, 19 nt, Artificial Sequence
  Description of Artificial Sequence: Synthetic oligonucleotide
  Sense Strand Starting at position 1148 of SEQ ID NO: 316819
ucagcaugucaguaauaua

SEQ ID NO: 408782 - RNA, 19 nt, Artificial Sequence
  Description of Artificial Sequence: Synthetic oligonucleotide
  Antisense Strand to SEQ ID NO: 408781
uauauuacugacaugcuga

SEQ ID NO: 408783 - RNA, 19 nt, Artificial Sequence
  Description of Artificial Sequence: Synthetic oligonucleotide
  Sense Strand Starting at position 1148 of SEQ ID NO: 316824
augucaguaauauauguga

SEQ ID NO: 408784 - RNA, 19 nt, Artificial Sequence
  Description of Artificial Sequence: Synthetic oligonucleotide
  Antisense Strand to SEQ ID NO: 408783
ucacauauauuacugacau

SEQ ID NO: 408785 - RNA, 19 nt, Artificial Sequence
  Description of Artificial Sequence: Synthetic oligonucleotide
  Sense Strand Starting at position 1148 of SEQ ID NO: 316827
ucaguaauauaugugaaca

SEQ ID NO: 408786 - RNA, 19 nt, Artificial Sequence
  Description of Artificial Sequence: Synthetic oligonucleotide
  Antisense Strand to SEQ ID NO: 408785
uguucacauauauuacuga

SEQ ID NO: 408787 - RNA, 19 nt, Artificial Sequence
  Description of Artificial Sequence: Synthetic oligonucleotide
  Sense Strand Starting at position 1148 of SEQ ID NO: 316891
cccucauuauuuguugagu

SEQ ID NO: 408788 - RNA, 19 nt, Artificial Sequence
  Description of Artificial Sequence: Synthetic oligonucleotide
  Antisense Strand to SEQ ID NO: 408787
acucaacaaauaaugaggg

SEQ ID NO: 408789 - RNA, 19 nt, Artificial Sequence
  Description of Artificial Sequence: Synthetic oligonucleotide
  Sense Strand Starting at position 1148 of SEQ ID NO: 316936
gaugucagucuauggauac

SEQ ID NO: 408790 - RNA, 19 nt, Artificial Sequence
  Description of Artificial Sequence: Synthetic oligonucleotide
  Antisense Strand to SEQ ID NO: 408789
guauccauagacugacauc

SEQ ID NO: 408791 - RNA, 19 nt, Artificial Sequence
  Description of Artificial Sequence: Synthetic oligonucleotide
  Sense Strand Starting at position 1148 of SEQ ID NO: 316943
gucuauggauaccucauau

SEQ ID NO: 408792 - RNA, 19 nt, Artificial Sequence
  Description of Artificial Sequence: Synthetic oligonucleotide
  Antisense Strand to SEQ ID NO: 408791
auaugagguauccauagac

SEQ ID NO: 408793 - RNA, 19 nt, Artificial Sequence
  Description of Artificial Sequence: Synthetic oligonucleotide
  Sense Strand Starting at position 1148 of SEQ ID NO: 317036
gaguccugccuuugagaga

SEQ ID NO: 408794 - RNA, 19 nt, Artificial Sequence
  Description of Artificial Sequence: Synthetic oligonucleotide
  Antisense Strand to SEQ ID NO: 408793
ucucucaaaggcaggacuc

SEQ ID NO: 408795 - RNA, 19 nt, Artificial Sequence
  Description of Artificial Sequence: Synthetic oligonucleotide
  Sense Strand Starting at position 1148 of SEQ ID NO: 317175
aagagauaaaguuguacgu

SEQ ID NO: 408796 - RNA, 19 nt, Artificial Sequence
  Description of Artificial Sequence: Synthetic oligonucleotide
  Antisense Strand to SEQ ID NO: 408795
acguacaacuuuaucucuu

SEQ ID NO: 408797 - RNA, 19 nt, Artificial Sequence
  Description of Artificial Sequence: Synthetic oligonucleotide
  Sense Strand Starting at position 1148 of SEQ ID NO: 317262
acgccuauucuuuagauua

SEQ ID NO: 408798 - RNA, 19 nt, Artificial Sequence
  Description of Artificial Sequence: Synthetic oligonucleotide
  Antisense Strand to SEQ ID NO: 408797
uaaucuaaagaauaggcgu

SEQ ID NO: 408799 - RNA, 19 nt, Artificial Sequence
  Description of Artificial Sequence: Synthetic oligonucleotide
  Sense Strand Starting at position 1148 of SEQ ID NO: 317314
acaggaaguccucguuaaa

SEQ ID NO: 408800 - RNA, 19 nt, Artificial Sequence
  Description of Artificial Sequence: Synthetic oligonucleotide
  Antisense Strand to SEQ ID NO: 408799
uuuaacgaggacuuccugu

SEQ ID NO: 408801 - RNA, 19 nt, Artificial Sequence
  Description of Artificial Sequence: Synthetic oligonucleotide
  Sense Strand Starting at position 1148 of SEQ ID NO: 317317
ggaaguccucguuaaacug

SEQ ID NO: 408802 - RNA, 19 nt, Artificial Sequence
  Description of Artificial Sequence: Synthetic oligonucleotide
  Antisense Strand to SEQ ID NO: 408801
caguuuaacgaggacuucc

SEQ ID NO: 408803 - RNA, 19 nt, Artificial Sequence
  Description of Artificial Sequence: Synthetic oligonucleotide
  Sense Strand Starting at position 1148 of SEQ ID NO: 317352
ggcacuggaucugcaaauu

SEQ ID NO: 408804 - RNA, 19 nt, Artificial Sequence
  Description of Artificial Sequence: Synthetic oligonucleotide
  Antisense Strand to SEQ ID NO: 408803
aauuugcagauccagugcc

SEQ ID NO: 408805 - RNA, 19 nt, Artificial Sequence
  Description of Artificial Sequence: Synthetic oligonucleotide
  Sense Strand Starting at position 1148 of SEQ ID NO: 317374
uccuacauuguauauguaa

SEQ ID NO: 408806 - RNA, 19 nt, Artificial Sequence
  Description of Artificial Sequence: Synthetic oligonucleotide
  Antisense Strand to SEQ ID NO: 408805
uuacauauacaauguagga

SEQ ID NO: 408807 - RNA, 19 nt, Artificial Sequence
  Description of Artificial Sequence: Synthetic oligonucleotide
  Sense Strand Starting at position 1148 of SEQ ID NO: 317474
ggaauuaaauaggaaugaa

SEQ ID NO: 408808 - RNA, 19 nt, Artificial Sequence
  Description of Artificial Sequence: Synthetic oligonucleotide
  Antisense Strand to SEQ ID NO: 408807
uucauuccuauuuaauucc

SEQ ID NO: 408809 - RNA, 19 nt, Artificial Sequence
  Description of Artificial Sequence: Synthetic oligonucleotide
  Sense Strand Starting at position 1148 of SEQ ID NO: 317622
aagagcucaugucuguaaa

SEQ ID NO: 408810 - RNA, 19 nt, Artificial Sequence
  Description of Artificial Sequence: Synthetic oligonucleotide
  Antisense Strand to SEQ ID NO: 408809
uuuacagacaugagcucuu

SEQ ID NO: 408811 - RNA, 19 nt, Artificial Sequence
  Description of Artificial Sequence: Synthetic oligonucleotide
  Sense Strand Starting at position 1148 of SEQ ID NO: 317625
agcucaugucuguaaacca

SEQ ID NO: 408812 - RNA, 19 nt, Artificial Sequence
  Description of Artificial Sequence: Synthetic oligonucleotide
  Antisense Strand to SEQ ID NO: 408811
ugguuuacagacaugagcu

SEQ ID NO: 408813 - RNA, 19 nt, Artificial Sequence
  Description of Artificial Sequence: Synthetic oligonucleotide
  Sense Strand Starting at position 1148 of SEQ ID NO: 317728
guuauccagcaauauaugu

SEQ ID NO: 408814 - RNA, 19 nt, Artificial Sequence
  Description of Artificial Sequence: Synthetic oligonucleotide
  Antisense Strand to SEQ ID NO: 408813
acauauauugcuggauaac

SEQ ID NO: 408815 - RNA, 19 nt, Artificial Sequence
  Description of Artificial Sequence: Synthetic oligonucleotide
  Sense Strand Starting at position 1148 of SEQ ID NO: 317867
cuaccugacuuguuacuau

SEQ ID NO: 408816 - RNA, 19 nt, Artificial Sequence
  Description of Artificial Sequence: Synthetic oligonucleotide
  Antisense Strand to SEQ ID NO: 408815
auaguaacaagucagguag

SEQ ID NO: 408817 - RNA, 19 nt, Artificial Sequence
  Description of Artificial Sequence: Synthetic oligonucleotide
  Sense Strand Starting at position 1148 of SEQ ID NO: 317901
aggaaauugcuguaucuau

SEQ ID NO: 408818 - RNA, 19 nt, Artificial Sequence
  Description of Artificial Sequence: Synthetic oligonucleotide
  Antisense Strand to SEQ ID NO: 408817
auagauacagcaauuuccu

SEQ ID NO: 408819 - RNA, 19 nt, Artificial Sequence
  Description of Artificial Sequence: Synthetic oligonucleotide
  Sense Strand Starting at position 1148 of SEQ ID NO: 318298
guucuacuuccuggaaucu

SEQ ID NO: 408820 - RNA, 19 nt, Artificial Sequence
  Description of Artificial Sequence: Synthetic oligonucleotide
  Antisense Strand to SEQ ID NO: 408819
agauuccaggaaguagaac

SEQ ID NO: 408821 - RNA, 19 nt, Artificial Sequence
  Description of Artificial Sequence: Synthetic oligonucleotide
  Sense Strand Starting at position 1148 of SEQ ID NO: 318408
cguagaacuggcugaauaa

SEQ ID NO: 408822 - RNA, 19 nt, Artificial Sequence
  Description of Artificial Sequence: Synthetic oligonucleotide
  Antisense Strand to SEQ ID NO: 408821
uuauucagccaguucuacg

SEQ ID NO: 408823 - RNA, 19 nt, Artificial Sequence
  Description of Artificial Sequence: Synthetic oligonucleotide
  Sense Strand Starting at position 1148 of SEQ ID NO: 318529
aagcaugcugcagaagaau

SEQ ID NO: 408824 - RNA, 19 nt, Artificial Sequence
  Description of Artificial Sequence: Synthetic oligonucleotide
  Antisense Strand to SEQ ID NO: 408823
auucuucugcagcaugcuu

SEQ ID NO: 408825 - RNA, 19 nt, Artificial Sequence
  Description of Artificial Sequence: Synthetic oligonucleotide
  Sense Strand Starting at position 1148 of SEQ ID NO: 318624
agucaauagcauugaauau

SEQ ID NO: 408826 - RNA, 19 nt, Artificial Sequence
  Description of Artificial Sequence: Synthetic oligonucleotide
  Antisense Strand to SEQ ID NO: 408825
auauucaaugcuauugacu

SEQ ID NO: 408827 - RNA, 19 nt, Artificial Sequence
  Description of Artificial Sequence: Synthetic oligonucleotide
  Sense Strand Starting at position 1148 of SEQ ID NO: 318651
cccaaauuaugguccuuga

SEQ ID NO: 408828 - RNA, 19 nt, Artificial Sequence
  Description of Artificial Sequence: Synthetic oligonucleotide
  Antisense Strand to SEQ ID NO: 408827
ucaaggaccauaauuuggg

SEQ ID NO: 408829 - RNA, 19 nt, Artificial Sequence
  Description of Artificial Sequence: Synthetic oligonucleotide
  Sense Strand Starting at position 1148 of SEQ ID NO: 319147
acguccagccgauauaaau

SEQ ID NO: 408830 - RNA, 19 nt, Artificial Sequence
  Description of Artificial Sequence: Synthetic oligonucleotide
  Antisense Strand to SEQ ID NO: 408829
auuuauaucggcuggacgu

SEQ ID NO: 408831 - RNA, 19 nt, Artificial Sequence
  Description of Artificial Sequence: Synthetic oligonucleotide
  Sense Strand Starting at position 1149 of SEQ ID NO: 315461
ugugcucauuucccacuua

SEQ ID NO: 408832 - RNA, 19 nt, Artificial Sequence
  Description of Artificial Sequence: Synthetic oligonucleotide
  Antisense Strand to SEQ ID NO: 408831
uaagugggaaaugagcaca

SEQ ID NO: 408833 - RNA, 19 nt, Artificial Sequence
  Description of Artificial Sequence: Synthetic oligonucleotide
  Sense Strand Starting at position 1149 of SEQ ID NO: 315614
guuuccuuacaacaguaua

SEQ ID NO: 408834 - RNA, 19 nt, Artificial Sequence
  Description of Artificial Sequence: Synthetic oligonucleotide
  Antisense Strand to SEQ ID NO: 408833
uauacuguuguaaggaaac

SEQ ID NO: 408835 - RNA, 19 nt, Artificial Sequence
  Description of Artificial Sequence: Synthetic oligonucleotide
  Sense Strand Starting at position 1149 of SEQ ID NO: 315918
gcaauuagaccuugguaaa

SEQ ID NO: 408836 - RNA, 19 nt, Artificial Sequence
  Description of Artificial Sequence: Synthetic oligonucleotide
  Antisense Strand to SEQ ID NO: 408835
uuuaccaaggucuaauugc

SEQ ID NO: 408837 - RNA, 19 nt, Artificial Sequence
  Description of Artificial Sequence: Synthetic oligonucleotide
  Sense Strand Starting at position 1149 of SEQ ID NO: 316194
cgucauuagcauuauauca

SEQ ID NO: 408838 - RNA, 19 nt, Artificial Sequence
  Description of Artificial Sequence: Synthetic oligonucleotide
  Antisense Strand to SEQ ID NO: 408837
ugauauaaugcuaaugacg

SEQ ID NO: 408839 - RNA, 19 nt, Artificial Sequence
  Description of Artificial Sequence: Synthetic oligonucleotide
  Sense Strand Starting at position 1149 of SEQ ID NO: 316274
ggacuuuccuucuucgaaa

SEQ ID NO: 408840 - RNA, 19 nt, Artificial Sequence
  Description of Artificial Sequence: Synthetic oligonucleotide
  Antisense Strand to SEQ ID NO: 408839
uuucgaagaaggaaagucc

SEQ ID NO: 408841 - RNA, 19 nt, Artificial Sequence
  Description of Artificial Sequence: Synthetic oligonucleotide
  Sense Strand Starting at position 1149 of SEQ ID NO: 316339
gccgguauuuacucugcca

SEQ ID NO: 408842 - RNA, 19 nt, Artificial Sequence
  Description of Artificial Sequence: Synthetic oligonucleotide
  Antisense Strand to SEQ ID NO: 408841
uggcagaguaaauaccggc

SEQ ID NO: 408843 - RNA, 19 nt, Artificial Sequence
  Description of Artificial Sequence: Synthetic oligonucleotide
  Sense Strand Starting at position 1149 of SEQ ID NO: 316342
gguauuuacucugccacca

SEQ ID NO: 408844 - RNA, 19 nt, Artificial Sequence
  Description of Artificial Sequence: Synthetic oligonucleotide
  Antisense Strand to SEQ ID NO: 408843
ugguggcagaguaaauacc

SEQ ID NO: 408845 - RNA, 19 nt, Artificial Sequence
  Description of Artificial Sequence: Synthetic oligonucleotide
  Sense Strand Starting at position 1149 of SEQ ID NO: 317066
gucccagagggaugacuau

SEQ ID NO: 408846 - RNA, 19 nt, Artificial Sequence
  Description of Artificial Sequence: Synthetic oligonucleotide
  Antisense Strand to SEQ ID NO: 408845
auagucaucccucugggac

SEQ ID NO: 408847 - RNA, 19 nt, Artificial Sequence
  Description of Artificial Sequence: Synthetic oligonucleotide
  Sense Strand Starting at position 1149 of SEQ ID NO: 317081
cuaucugacccaggacuua

SEQ ID NO: 408848 - RNA, 19 nt, Artificial Sequence
  Description of Artificial Sequence: Synthetic oligonucleotide
  Antisense Strand to SEQ ID NO: 408847
uaaguccugggucagauag

SEQ ID NO: 408849 - RNA, 19 nt, Artificial Sequence
  Description of Artificial Sequence: Synthetic oligonucleotide
  Sense Strand Starting at position 1149 of SEQ ID NO: 317432
gcagaagaaaucuguggau

SEQ ID NO: 408850 - RNA, 19 nt, Artificial Sequence
  Description of Artificial Sequence: Synthetic oligonucleotide
  Antisense Strand to SEQ ID NO: 408849
auccacagauuucuucugc

SEQ ID NO: 408851 - RNA, 19 nt, Artificial Sequence
  Description of Artificial Sequence: Synthetic oligonucleotide
  Sense Strand Starting at position 1149 of SEQ ID NO: 317458
agguaaagccaaugacagu

SEQ ID NO: 408852 - RNA, 19 nt, Artificial Sequence
  Description of Artificial Sequence: Synthetic oligonucleotide
  Antisense Strand to SEQ ID NO: 408851
acugucauuggcuuuaccu

SEQ ID NO: 408853 - RNA, 19 nt, Artificial Sequence
  Description of Artificial Sequence: Synthetic oligonucleotide
  Sense Strand Starting at position 1149 of SEQ ID NO: 317491
uagagaaguaggugaggua

SEQ ID NO: 408854 - RNA, 19 nt, Artificial Sequence
  Description of Artificial Sequence: Synthetic oligonucleotide
  Antisense Strand to SEQ ID NO: 408853
uaccucaccuacuucucua

SEQ ID NO: 408855 - RNA, 19 nt, Artificial Sequence
  Description of Artificial Sequence: Synthetic oligonucleotide
  Sense Strand Starting at position 1149 of SEQ ID NO: 317577
uguugaaggacucaagugu

SEQ ID NO: 408856 - RNA, 19 nt, Artificial Sequence
  Description of Artificial Sequence: Synthetic oligonucleotide
  Antisense Strand to SEQ ID NO: 408855
acacuugaguccuucaaca

SEQ ID NO: 408857 - RNA, 19 nt, Artificial Sequence
  Description of Artificial Sequence: Synthetic oligonucleotide
  Sense Strand Starting at position 1149 of SEQ ID NO: 317583
aggacucaagugugaauca

SEQ ID NO: 408858 - RNA, 19 nt, Artificial Sequence
  Description of Artificial Sequence: Synthetic oligonucleotide
  Antisense Strand to SEQ ID NO: 408857
ugauucacacuugaguccu

SEQ ID NO: 408859 - RNA, 19 nt, Artificial Sequence
  Description of Artificial Sequence: Synthetic oligonucleotide
  Sense Strand Starting at position 1149 of SEQ ID NO: 317826
ccaauaauggcuuaauggu

SEQ ID NO: 408860 - RNA, 19 nt, Artificial Sequence
  Description of Artificial Sequence: Synthetic oligonucleotide
  Antisense Strand to SEQ ID NO: 408859
accauuaagccauuauugg

SEQ ID NO: 408861 - RNA, 19 nt, Artificial Sequence
  Description of Artificial Sequence: Synthetic oligonucleotide
  Sense Strand Starting at position 1149 of SEQ ID NO: 317847
guaucugccaaggagaauu

SEQ ID NO: 408862 - RNA, 19 nt, Artificial Sequence
  Description of Artificial Sequence: Synthetic oligonucleotide
  Antisense Strand to SEQ ID NO: 408861
aauucuccuuggcagauac

SEQ ID NO: 408863 - RNA, 19 nt, Artificial Sequence
  Description of Artificial Sequence: Synthetic oligonucleotide
  Sense Strand Starting at position 1149 of SEQ ID NO: 317908
ggaauugauugcuuaccuu

SEQ ID NO: 408864 - RNA, 19 nt, Artificial Sequence
  Description of Artificial Sequence: Synthetic oligonucleotide
  Antisense Strand to SEQ ID NO: 408863
aagguaagcaaucaauucc

SEQ ID NO: 408865 - RNA, 19 nt, Artificial Sequence
  Description of Artificial Sequence: Synthetic oligonucleotide
  Sense Strand Starting at position 1149 of SEQ ID NO: 318010
cucuguaaaccguaucaag

SEQ ID NO: 408866 - RNA, 19 nt, Artificial Sequence
  Description of Artificial Sequence: Synthetic oligonucleotide
  Antisense Strand to SEQ ID NO: 408865
cuugauacgguuuacagag

SEQ ID NO: 408867 - RNA, 19 nt, Artificial Sequence
  Description of Artificial Sequence: Synthetic oligonucleotide
  Sense Strand Starting at position 1149 of SEQ ID NO: 318038
uaagcuauuucugugaguc

SEQ ID NO: 408868 - RNA, 19 nt, Artificial Sequence
  Description of Artificial Sequence: Synthetic oligonucleotide
  Antisense Strand to SEQ ID NO: 408867
gacucacagaaauagcuua

SEQ ID NO: 408869 - RNA, 19 nt, Artificial Sequence
  Description of Artificial Sequence: Synthetic oligonucleotide
  Sense Strand Starting at position 1149 of SEQ ID NO: 318039
aagcuauuucugugaguca

SEQ ID NO: 408870 - RNA, 19 nt, Artificial Sequence
  Description of Artificial Sequence: Synthetic oligonucleotide
  Antisense Strand to SEQ ID NO: 408869
ugacucacagaaauagcuu

SEQ ID NO: 408871 - RNA, 19 nt, Artificial Sequence
  Description of Artificial Sequence: Synthetic oligonucleotide
  Sense Strand Starting at position 1149 of SEQ ID NO: 318138
ugcuauugacuucgggaaa

SEQ ID NO: 408872 - RNA, 19 nt, Artificial Sequence
  Description of Artificial Sequence: Synthetic oligonucleotide
  Antisense Strand to SEQ ID NO: 408871
uuucccgaagucaauagca

SEQ ID NO: 408873 - RNA, 19 nt, Artificial Sequence
  Description of Artificial Sequence: Synthetic oligonucleotide
  Sense Strand Starting at position 1149 of SEQ ID NO: 318481
uugaaucuuucuguccuga

SEQ ID NO: 408874 - RNA, 19 nt, Artificial Sequence
  Description of Artificial Sequence: Synthetic oligonucleotide
  Antisense Strand to SEQ ID NO: 408873
ucaggacagaaagauucaa

SEQ ID NO: 408875 - RNA, 19 nt, Artificial Sequence
  Description of Artificial Sequence: Synthetic oligonucleotide
  Sense Strand Starting at position 1149 of SEQ ID NO: 318489
uucuguccugaaugacuau

SEQ ID NO: 408876 - RNA, 19 nt, Artificial Sequence
  Description of Artificial Sequence: Synthetic oligonucleotide
  Antisense Strand to SEQ ID NO: 408875
auagucauucaggacagaa

SEQ ID NO: 408877 - RNA, 19 nt, Artificial Sequence
  Description of Artificial Sequence: Synthetic oligonucleotide
  Sense Strand Starting at position 1149 of SEQ ID NO: 318660
uucugaagaguugguuuau

SEQ ID NO: 408878 - RNA, 19 nt, Artificial Sequence
  Description of Artificial Sequence: Synthetic oligonucleotide
  Antisense Strand to SEQ ID NO: 408877
auaaaccaacucuucagaa

SEQ ID NO: 408879 - RNA, 19 nt, Artificial Sequence
  Description of Artificial Sequence: Synthetic oligonucleotide
  Sense Strand Starting at position 1149 of SEQ ID NO: 318661
ucugaagaguugguuuauu

SEQ ID NO: 408880 - RNA, 19 nt, Artificial Sequence
  Description of Artificial Sequence: Synthetic oligonucleotide
  Antisense Strand to SEQ ID NO: 408879
aauaaaccaacucuucaga

SEQ ID NO: 408881 - RNA, 19 nt, Artificial Sequence
  Description of Artificial Sequence: Synthetic oligonucleotide
  Sense Strand Starting at position 1149 of SEQ ID NO: 318693
aaagauauaugaguuggua

SEQ ID NO: 408882 - RNA, 19 nt, Artificial Sequence
  Description of Artificial Sequence: Synthetic oligonucleotide
  Antisense Strand to SEQ ID NO: 408881
uaccaacucauauaucuuu

SEQ ID NO: 408883 - RNA, 19 nt, Artificial Sequence
  Description of Artificial Sequence: Synthetic oligonucleotide
  Sense Strand Starting at position 1149 of SEQ ID NO: 318701
augaguugguacccaauua

SEQ ID NO: 408884 - RNA, 19 nt, Artificial Sequence
  Description of Artificial Sequence: Synthetic oligonucleotide
  Antisense Strand to SEQ ID NO: 408883
uaauuggguaccaacucau

SEQ ID NO: 408885 - RNA, 19 nt, Artificial Sequence
  Description of Artificial Sequence: Synthetic oligonucleotide
  Sense Strand Starting at position 1149 of SEQ ID NO: 318748
gguggaaauaagugauaug

SEQ ID NO: 408886 - RNA, 19 nt, Artificial Sequence
  Description of Artificial Sequence: Synthetic oligonucleotide
  Antisense Strand to SEQ ID NO: 408885
cauaucacuuauuuccacc

SEQ ID NO: 408887 - RNA, 19 nt, Artificial Sequence
  Description of Artificial Sequence: Synthetic oligonucleotide
  Sense Strand Starting at position 1149 of SEQ ID NO: 318749
guggaaauaagugauaugu

SEQ ID NO: 408888 - RNA, 19 nt, Artificial Sequence
  Description of Artificial Sequence: Synthetic oligonucleotide
  Antisense Strand to SEQ ID NO: 408887
acauaucacuuauuuccac

SEQ ID NO: 408889 - RNA, 19 nt, Artificial Sequence
  Description of Artificial Sequence: Synthetic oligonucleotide
  Sense Strand Starting at position 1149 of SEQ ID NO: 318757
aagugauaugucugacaca

SEQ ID NO: 408890 - RNA, 19 nt, Artificial Sequence
  Description of Artificial Sequence: Synthetic oligonucleotide
  Antisense Strand to SEQ ID NO: 408889
ugugucagacauaucacuu

SEQ ID NO: 408891 - RNA, 19 nt, Artificial Sequence
  Description of Artificial Sequence: Synthetic oligonucleotide
  Sense Strand Starting at position 1149 of SEQ ID NO: 318804
uguauugggucccuaacaa

SEQ ID NO: 408892 - RNA, 19 nt, Artificial Sequence
  Description of Artificial Sequence: Synthetic oligonucleotide
  Antisense Strand to SEQ ID NO: 408891
uuguuagggacccaauaca

SEQ ID NO: 408893 - RNA, 19 nt, Artificial Sequence
  Description of Artificial Sequence: Synthetic oligonucleotide
  Sense Strand Starting at position 1149 of SEQ ID NO: 318887
aaguauggacgcuaguuaa

SEQ ID NO: 408894 - RNA, 19 nt, Artificial Sequence
  Description of Artificial Sequence: Synthetic oligonucleotide
  Antisense Strand to SEQ ID NO: 408893
uuaacuagcguccauacuu

SEQ ID NO: 408895 - RNA, 19 nt, Artificial Sequence
  Description of Artificial Sequence: Synthetic oligonucleotide
  Sense Strand Starting at position 1149 of SEQ ID NO: 318895
acgcuaguuaaggauaaag

SEQ ID NO: 408896 - RNA, 19 nt, Artificial Sequence
  Description of Artificial Sequence: Synthetic oligonucleotide
  Antisense Strand to SEQ ID NO: 408895
cuuuauccuuaacuagcgu

SEQ ID NO: 408897 - RNA, 19 nt, Artificial Sequence
  Description of Artificial Sequence: Synthetic oligonucleotide
  Sense Strand Starting at position 1149 of SEQ ID NO: 318906
ggauaaagaguuugcuuuc

SEQ ID NO: 408898 - RNA, 19 nt, Artificial Sequence
  Description of Artificial Sequence: Synthetic oligonucleotide
  Antisense Strand to SEQ ID NO: 408897
gaaagcaaacucuuuaucc

SEQ ID NO: 408899 - RNA, 19 nt, Artificial Sequence
  Description of Artificial Sequence: Synthetic oligonucleotide
  Sense Strand Starting at position 1149 of SEQ ID NO: 318974
auaauaaaguggcugaguu

SEQ ID NO: 408900 - RNA, 19 nt, Artificial Sequence
  Description of Artificial Sequence: Synthetic oligonucleotide
  Antisense Strand to SEQ ID NO: 408899
aacucagccacuuuauuau

SEQ ID NO: 408901 - RNA, 19 nt, Artificial Sequence
  Description of Artificial Sequence: Synthetic oligonucleotide
  Sense Strand Starting at position 1149 of SEQ ID NO: 318975
uaauaaaguggcugaguuu

SEQ ID NO: 408902 - RNA, 19 nt, Artificial Sequence
  Description of Artificial Sequence: Synthetic oligonucleotide
  Antisense Strand to SEQ ID NO: 408901
aaacucagccacuuuauua

SEQ ID NO: 408903 - RNA, 19 nt, Artificial Sequence
  Description of Artificial Sequence: Synthetic oligonucleotide
  Sense Strand Starting at position 1149 of SEQ ID NO: 319081
agcaaagugagauguaaug

SEQ ID NO: 408904 - RNA, 19 nt, Artificial Sequence
  Description of Artificial Sequence: Synthetic oligonucleotide
  Antisense Strand to SEQ ID NO: 408903
cauuacaucucacuuugcu

SEQ ID NO: 408905 - RNA, 19 nt, Artificial Sequence
  Description of Artificial Sequence: Synthetic oligonucleotide
  Sense Strand Starting at position 1149 of SEQ ID NO: 319090
agauguaauguuugcaaac

SEQ ID NO: 408906 - RNA, 19 nt, Artificial Sequence
  Description of Artificial Sequence: Synthetic oligonucleotide
  Antisense Strand to SEQ ID NO: 408905
guuugcaaacauuacaucu

SEQ ID NO: 408907 - RNA, 19 nt, Artificial Sequence
  Description of Artificial Sequence: Synthetic oligonucleotide
  Sense Strand Starting at position 1149 of SEQ ID NO: 319091
gauguaauguuugcaaaca

SEQ ID NO: 408908 - RNA, 19 nt, Artificial Sequence
  Description of Artificial Sequence: Synthetic oligonucleotide
  Antisense Strand to SEQ ID NO: 408907
uguuugcaaacauuacauc

SEQ ID NO: 408909 - RNA, 19 nt, Artificial Sequence
  Description of Artificial Sequence: Synthetic oligonucleotide
  Sense Strand Starting at position 1149 of SEQ ID NO: 319152
acuaaaugauggucuuuau

SEQ ID NO: 408910 - RNA, 19 nt, Artificial Sequence
  Description of Artificial Sequence: Synthetic oligonucleotide
  Antisense Strand to SEQ ID NO: 408909
auaaagaccaucauuuagu

SEQ ID NO: 408911 - RNA, 19 nt, Artificial Sequence
  Description of Artificial Sequence: Synthetic oligonucleotide
  Sense Strand Starting at position 1150 of SEQ ID NO: 315256
uuacuacuggcaugcagau

SEQ ID NO: 408912 - RNA, 19 nt, Artificial Sequence
  Description of Artificial Sequence: Synthetic oligonucleotide
  Antisense Strand to SEQ ID NO: 408911
aucugcaugccaguaguaa

SEQ ID NO: 408913 - RNA, 19 nt, Artificial Sequence
  Description of Artificial Sequence: Synthetic oligonucleotide
  Sense Strand Starting at position 1150 of SEQ ID NO: 315269
gcagauuaauuugcauguu

SEQ ID NO: 408914 - RNA, 19 nt, Artificial Sequence
  Description of Artificial Sequence: Synthetic oligonucleotide
  Antisense Strand to SEQ ID NO: 408913
aacaugcaaauuaaucugc

SEQ ID NO: 408915 - RNA, 19 nt, Artificial Sequence
  Description of Artificial Sequence: Synthetic oligonucleotide
  Sense Strand Starting at position 1150 of SEQ ID NO: 315357
guaagccuuuacucuggaa

SEQ ID NO: 408916 - RNA, 19 nt, Artificial Sequence
  Description of Artificial Sequence: Synthetic oligonucleotide
  Antisense Strand to SEQ ID NO: 408915
uuccagaguaaaggcuuac

SEQ ID NO: 408917 - RNA, 19 nt, Artificial Sequence
  Description of Artificial Sequence: Synthetic oligonucleotide
  Sense Strand Starting at position 1150 of SEQ ID NO: 315387
cucacuguaucguugaaua

SEQ ID NO: 408918 - RNA, 19 nt, Artificial Sequence
  Description of Artificial Sequence: Synthetic oligonucleotide
  Antisense Strand to SEQ ID NO: 408917
uauucaacgauacagugag

SEQ ID NO: 408919 - RNA, 19 nt, Artificial Sequence
  Description of Artificial Sequence: Synthetic oligonucleotide
  Sense Strand Starting at position 1150 of SEQ ID NO: 315389
cacuguaucguugaauaug

SEQ ID NO: 408920 - RNA, 19 nt, Artificial Sequence
  Description of Artificial Sequence: Synthetic oligonucleotide
  Antisense Strand to SEQ ID NO: 408919
cauauucaacgauacagug

SEQ ID NO: 408921 - RNA, 19 nt, Artificial Sequence
  Description of Artificial Sequence: Synthetic oligonucleotide
  Sense Strand Starting at position 1150 of SEQ ID NO: 315392
uguaucguugaauauguca

SEQ ID NO: 408922 - RNA, 19 nt, Artificial Sequence
  Description of Artificial Sequence: Synthetic oligonucleotide
  Antisense Strand to SEQ ID NO: 408921
ugacauauucaacgauaca

SEQ ID NO: 408923 - RNA, 19 nt, Artificial Sequence
  Description of Artificial Sequence: Synthetic oligonucleotide
  Sense Strand Starting at position 1150 of SEQ ID NO: 315399
uugaauaugucauugaacu

SEQ ID NO: 408924 - RNA, 19 nt, Artificial Sequence
  Description of Artificial Sequence: Synthetic oligonucleotide
  Antisense Strand to SEQ ID NO: 408923
aguucaaugacauauucaa

SEQ ID NO: 408925 - RNA, 19 nt, Artificial Sequence
  Description of Artificial Sequence: Synthetic oligonucleotide
  Sense Strand Starting at position 1150 of SEQ ID NO: 315400
ugaauaugucauugaacuu

SEQ ID NO: 408926 - RNA, 19 nt, Artificial Sequence
  Description of Artificial Sequence: Synthetic oligonucleotide
  Antisense Strand to SEQ ID NO: 408925
aaguucaaugacauauuca

SEQ ID NO: 408927 - RNA, 19 nt, Artificial Sequence
  Description of Artificial Sequence: Synthetic oligonucleotide
  Sense Strand Starting at position 1150 of SEQ ID NO: 315458
uggacuaaaugauugcuaa

SEQ ID NO: 408928 - RNA, 19 nt, Artificial Sequence
  Description of Artificial Sequence: Synthetic oligonucleotide
  Antisense Strand to SEQ ID NO: 408927
uuagcaaucauuuagucca

SEQ ID NO: 408929 - RNA, 19 nt, Artificial Sequence
  Description of Artificial Sequence: Synthetic oligonucleotide
  Sense Strand Starting at position 1150 of SEQ ID NO: 315459
ggacuaaaugauugcuaau

SEQ ID NO: 408930 - RNA, 19 nt, Artificial Sequence
  Description of Artificial Sequence: Synthetic oligonucleotide
  Antisense Strand to SEQ ID NO: 408929
auuagcaaucauuuagucc

SEQ ID NO: 408931 - RNA, 19 nt, Artificial Sequence
  Description of Artificial Sequence: Synthetic oligonucleotide
  Sense Strand Starting at position 1150 of SEQ ID NO: 315461
acuaaaugauugcuaaugu

SEQ ID NO: 408932 - RNA, 19 nt, Artificial Sequence
  Description of Artificial Sequence: Synthetic oligonucleotide
  Antisense Strand to SEQ ID NO: 408931
acauuagcaaucauuuagu

SEQ ID NO: 408933 - RNA, 19 nt, Artificial Sequence
  Description of Artificial Sequence: Synthetic oligonucleotide
  Sense Strand Starting at position 1150 of SEQ ID NO: 315483
uuuccaguucuuggacacu

SEQ ID NO: 408934 - RNA, 19 nt, Artificial Sequence
  Description of Artificial Sequence: Synthetic oligonucleotide
  Antisense Strand to SEQ ID NO: 408933
aguguccaagaacuggaaa

SEQ ID NO: 408935 - RNA, 19 nt, Artificial Sequence
  Description of Artificial Sequence: Synthetic oligonucleotide
  Sense Strand Starting at position 1150 of SEQ ID NO: 315500
cuguguaccuuucuaucuu

SEQ ID NO: 408936 - RNA, 19 nt, Artificial Sequence
  Description of Artificial Sequence: Synthetic oligonucleotide
  Antisense Strand to SEQ ID NO: 408935
aagauagaaagguacacag

SEQ ID NO: 408937 - RNA, 19 nt, Artificial Sequence
  Description of Artificial Sequence: Synthetic oligonucleotide
  Sense Strand Starting at position 1150 of SEQ ID NO: 315686
gccucuuauuucuugguua

SEQ ID NO: 408938 - RNA, 19 nt, Artificial Sequence
  Description of Artificial Sequence: Synthetic oligonucleotide
  Antisense Strand to SEQ ID NO: 408937
uaaccaagaaauaagaggc

SEQ ID NO: 408939 - RNA, 19 nt, Artificial Sequence
  Description of Artificial Sequence: Synthetic oligonucleotide
  Sense Strand Starting at position 1150 of SEQ ID NO: 315747
ucaguuucucuguacaauu

SEQ ID NO: 408940 - RNA, 19 nt, Artificial Sequence
  Description of Artificial Sequence: Synthetic oligonucleotide
  Antisense Strand to SEQ ID NO: 408939
aauuguacagagaaacuga

SEQ ID NO: 408941 - RNA, 19 nt, Artificial Sequence
  Description of Artificial Sequence: Synthetic oligonucleotide
  Sense Strand Starting at position 1150 of SEQ ID NO: 315905
uuacaacaguuauuaguga

SEQ ID NO: 408942 - RNA, 19 nt, Artificial Sequence
  Description of Artificial Sequence: Synthetic oligonucleotide
  Antisense Strand to SEQ ID NO: 408941
ucacuaauaacuguuguaa

SEQ ID NO: 408943 - RNA, 19 nt, Artificial Sequence
  Description of Artificial Sequence: Synthetic oligonucleotide
  Sense Strand Starting at position 1150 of SEQ ID NO: 316185
uuguaugagugauaauuug

SEQ ID NO: 408944 - RNA, 19 nt, Artificial Sequence
  Description of Artificial Sequence: Synthetic oligonucleotide
  Antisense Strand to SEQ ID NO: 408943
caaauuaucacucauacaa

SEQ ID NO: 408945 - RNA, 19 nt, Artificial Sequence
  Description of Artificial Sequence: Synthetic oligonucleotide
  Sense Strand Starting at position 1150 of SEQ ID NO: 316193
gugauaauuugccucucau

SEQ ID NO: 408946 - RNA, 19 nt, Artificial Sequence
  Description of Artificial Sequence: Synthetic oligonucleotide
  Antisense Strand to SEQ ID NO: 408945
augagaggcaaauuaucac

SEQ ID NO: 408947 - RNA, 19 nt, Artificial Sequence
  Description of Artificial Sequence: Synthetic oligonucleotide
  Sense Strand Starting at position 1150 of SEQ ID NO: 316225
ggaaauaggcaaggucauu

SEQ ID NO: 408948 - RNA, 19 nt, Artificial Sequence
  Description of Artificial Sequence: Synthetic oligonucleotide
  Antisense Strand to SEQ ID NO: 408947
aaugaccuugccuauuucc

SEQ ID NO: 408949 - RNA, 19 nt, Artificial Sequence
  Description of Artificial Sequence: Synthetic oligonucleotide
  Sense Strand Starting at position 1150 of SEQ ID NO: 316315
caguucagugguugaguga

SEQ ID NO: 408950 - RNA, 19 nt, Artificial Sequence
  Description of Artificial Sequence: Synthetic oligonucleotide
  Antisense Strand to SEQ ID NO: 408949
ucacucaaccacugaacug

SEQ ID NO: 408951 - RNA, 19 nt, Artificial Sequence
  Description of Artificial Sequence: Synthetic oligonucleotide
  Sense Strand Starting at position 1150 of SEQ ID NO: 316316
aguucagugguugagugau

SEQ ID NO: 408952 - RNA, 19 nt, Artificial Sequence
  Description of Artificial Sequence: Synthetic oligonucleotide
  Antisense Strand to SEQ ID NO: 408951
aucacucaaccacugaacu

SEQ ID NO: 408953 - RNA, 19 nt, Artificial Sequence
  Description of Artificial Sequence: Synthetic oligonucleotide
  Sense Strand Starting at position 1150 of SEQ ID NO: 316318
uucagugguugagugauuu

SEQ ID NO: 408954 - RNA, 19 nt, Artificial Sequence
  Description of Artificial Sequence: Synthetic oligonucleotide
  Antisense Strand to SEQ ID NO: 408953
aaaucacucaaccacugaa

SEQ ID NO: 408955 - RNA, 19 nt, Artificial Sequence
  Description of Artificial Sequence: Synthetic oligonucleotide
  Sense Strand Starting at position 1150 of SEQ ID NO: 316322
gugguugagugauuucuac

SEQ ID NO: 408956 - RNA, 19 nt, Artificial Sequence
  Description of Artificial Sequence: Synthetic oligonucleotide
  Antisense Strand to SEQ ID NO: 408955
guagaaaucacucaaccac

SEQ ID NO: 408957 - RNA, 19 nt, Artificial Sequence
  Description of Artificial Sequence: Synthetic oligonucleotide
  Sense Strand Starting at position 1150 of SEQ ID NO: 316326
uugagugauuucuacaaga

SEQ ID NO: 408958 - RNA, 19 nt, Artificial Sequence
  Description of Artificial Sequence: Synthetic oligonucleotide
  Antisense Strand to SEQ ID NO: 408957
ucuuguagaaaucacucaa

SEQ ID NO: 408959 - RNA, 19 nt, Artificial Sequence
  Description of Artificial Sequence: Synthetic oligonucleotide
  Sense Strand Starting at position 1150 of SEQ ID NO: 316395
uugccaucugcagaaggua

SEQ ID NO: 408960 - RNA, 19 nt, Artificial Sequence
  Description of Artificial Sequence: Synthetic oligonucleotide
  Antisense Strand to SEQ ID NO: 408959
uaccuucugcagauggcaa

SEQ ID NO: 408961 - RNA, 19 nt, Artificial Sequence
  Description of Artificial Sequence: Synthetic oligonucleotide
  Sense Strand Starting at position 1150 of SEQ ID NO: 316558
ggagaaagaucguuuccca

SEQ ID NO: 408962 - RNA, 19 nt, Artificial Sequence
  Description of Artificial Sequence: Synthetic oligonucleotide
  Antisense Strand to SEQ ID NO: 408961
ugggaaacgaucuuucucc

SEQ ID NO: 408963 - RNA, 19 nt, Artificial Sequence
  Description of Artificial Sequence: Synthetic oligonucleotide
  Sense Strand Starting at position 1150 of SEQ ID NO: 316669
guuccuaguugggcugaaa

SEQ ID NO: 408964 - RNA, 19 nt, Artificial Sequence
  Description of Artificial Sequence: Synthetic oligonucleotide
  Antisense Strand to SEQ ID NO: 408963
uuucagcccaacuaggaac

SEQ ID NO: 408965 - RNA, 19 nt, Artificial Sequence
  Description of Artificial Sequence: Synthetic oligonucleotide
  Sense Strand Starting at position 1150 of SEQ ID NO: 316688
cggguuuccaggcauguuu

SEQ ID NO: 408966 - RNA, 19 nt, Artificial Sequence
  Description of Artificial Sequence: Synthetic oligonucleotide
  Antisense Strand to SEQ ID NO: 408965
aaacaugccuggaaacccg

SEQ ID NO: 408967 - RNA, 19 nt, Artificial Sequence
  Description of Artificial Sequence: Synthetic oligonucleotide
  Sense Strand Starting at position 1150 of SEQ ID NO: 316690
gguuuccaggcauguuuau

SEQ ID NO: 408968 - RNA, 19 nt, Artificial Sequence
  Description of Artificial Sequence: Synthetic oligonucleotide
  Antisense Strand to SEQ ID NO: 408967
auaaacaugccuggaaacc

SEQ ID NO: 408969 - RNA, 19 nt, Artificial Sequence
  Description of Artificial Sequence: Synthetic oligonucleotide
  Sense Strand Starting at position 1150 of SEQ ID NO: 316730
ggguuagugccagaaguuu

SEQ ID NO: 408970 - RNA, 19 nt, Artificial Sequence
  Description of Artificial Sequence: Synthetic oligonucleotide
  Antisense Strand to SEQ ID NO: 408969
aaacuucuggcacuaaccc

SEQ ID NO: 408971 - RNA, 19 nt, Artificial Sequence
  Description of Artificial Sequence: Synthetic oligonucleotide
  Sense Strand Starting at position 1150 of SEQ ID NO: 316754
gcagaauuaguagagcuga

SEQ ID NO: 408972 - RNA, 19 nt, Artificial Sequence
  Description of Artificial Sequence: Synthetic oligonucleotide
  Antisense Strand to SEQ ID NO: 408971
ucagcucuacuaauucugc

SEQ ID NO: 408973 - RNA, 19 nt, Artificial Sequence
  Description of Artificial Sequence: Synthetic oligonucleotide
  Sense Strand Starting at position 1150 of SEQ ID NO: 316888
gugcguugggucgcucaua

SEQ ID NO: 408974 - RNA, 19 nt, Artificial Sequence
  Description of Artificial Sequence: Synthetic oligonucleotide
  Antisense Strand to SEQ ID NO: 408973
uaugagcgacccaacgcac

SEQ ID NO: 408975 - RNA, 19 nt, Artificial Sequence
  Description of Artificial Sequence: Synthetic oligonucleotide
  Sense Strand Starting at position 1150 of SEQ ID NO: 317758
cccuuaaggaguugugggu

SEQ ID NO: 408976 - RNA, 19 nt, Artificial Sequence
  Description of Artificial Sequence: Synthetic oligonucleotide
  Antisense Strand to SEQ ID NO: 408975
acccacaacuccuuaaggg

SEQ ID NO: 408977 - RNA, 19 nt, Artificial Sequence
  Description of Artificial Sequence: Synthetic oligonucleotide
  Sense Strand Starting at position 1150 of SEQ ID NO: 317762
uaaggaguuguggguguuu

SEQ ID NO: 408978 - RNA, 19 nt, Artificial Sequence
  Description of Artificial Sequence: Synthetic oligonucleotide
  Antisense Strand to SEQ ID NO: 408977
aaacacccacaacuccuua

SEQ ID NO: 408979 - RNA, 19 nt, Artificial Sequence
  Description of Artificial Sequence: Synthetic oligonucleotide
  Sense Strand Starting at position 1150 of SEQ ID NO: 318454
cuucgagggcuguaacacu

SEQ ID NO: 408980 - RNA, 19 nt, Artificial Sequence
  Description of Artificial Sequence: Synthetic oligonucleotide
  Antisense Strand to SEQ ID NO: 408979
aguguuacagcccucgaag

SEQ ID NO: 408981 - RNA, 19 nt, Artificial Sequence
  Description of Artificial Sequence: Synthetic oligonucleotide
  Sense Strand Starting at position 1150 of SEQ ID NO: 318719
ggaagucagcgagacgauu

SEQ ID NO: 408982 - RNA, 19 nt, Artificial Sequence
  Description of Artificial Sequence: Synthetic oligonucleotide
  Antisense Strand to SEQ ID NO: 408981
aaucgucucgcugacuucc

SEQ ID NO: 408983 - RNA, 19 nt, Artificial Sequence
  Description of Artificial Sequence: Synthetic oligonucleotide
  Sense Strand Starting at position 1150 of SEQ ID NO: 318721
aagucagcgagacgauuaa

SEQ ID NO: 408984 - RNA, 19 nt, Artificial Sequence
  Description of Artificial Sequence: Synthetic oligonucleotide
  Antisense Strand to SEQ ID NO: 408983
uuaaucgucucgcugacuu

SEQ ID NO: 408985 - RNA, 19 nt, Artificial Sequence
  Description of Artificial Sequence: Synthetic oligonucleotide
  Sense Strand Starting at position 1150 of SEQ ID NO: 318725
cagcgagacgauuaagaac

SEQ ID NO: 408986 - RNA, 19 nt, Artificial Sequence
  Description of Artificial Sequence: Synthetic oligonucleotide
  Antisense Strand to SEQ ID NO: 408985
guucuuaaucgucucgcug

SEQ ID NO: 408987 - RNA, 19 nt, Artificial Sequence
  Description of Artificial Sequence: Synthetic oligonucleotide
  Sense Strand Starting at position 1150 of SEQ ID NO: 318795
caguaaucagagugauaaa

SEQ ID NO: 408988 - RNA, 19 nt, Artificial Sequence
  Description of Artificial Sequence: Synthetic oligonucleotide
  Antisense Strand to SEQ ID NO: 408987
uuuaucacucugauuacug

SEQ ID NO: 408989 - RNA, 19 nt, Artificial Sequence
  Description of Artificial Sequence: Synthetic oligonucleotide
  Sense Strand Starting at position 1150 of SEQ ID NO: 318875
aaguuuauuuggccacagu

SEQ ID NO: 408990 - RNA, 19 nt, Artificial Sequence
  Description of Artificial Sequence: Synthetic oligonucleotide
  Antisense Strand to SEQ ID NO: 408989
acuguggccaaauaaacuu

SEQ ID NO: 408991 - RNA, 19 nt, Artificial Sequence
  Description of Artificial Sequence: Synthetic oligonucleotide
  Sense Strand Starting at position 1151 of SEQ ID NO: 315404
aaauaugagcugugcaaua

SEQ ID NO: 408992 - RNA, 19 nt, Artificial Sequence
  Description of Artificial Sequence: Synthetic oligonucleotide
  Antisense Strand to SEQ ID NO: 408991
uauugcacagcucauauuu

SEQ ID NO: 408993 - RNA, 19 nt, Artificial Sequence
  Description of Artificial Sequence: Synthetic oligonucleotide
  Sense Strand Starting at position 1151 of SEQ ID NO: 315490
uuuauaguuggguauguuu

SEQ ID NO: 408994 - RNA, 19 nt, Artificial Sequence
  Description of Artificial Sequence: Synthetic oligonucleotide
  Antisense Strand to SEQ ID NO: 408993
aaacauacccaacuauaaa

SEQ ID NO: 408995 - RNA, 19 nt, Artificial Sequence
  Description of Artificial Sequence: Synthetic oligonucleotide
  Sense Strand Starting at position 1151 of SEQ ID NO: 315508
uuuaguguggcaucgcaau

SEQ ID NO: 408996 - RNA, 19 nt, Artificial Sequence
  Description of Artificial Sequence: Synthetic oligonucleotide
  Antisense Strand to SEQ ID NO: 408995
auugcgaugccacacuaaa

SEQ ID NO: 408997 - RNA, 19 nt, Artificial Sequence
  Description of Artificial Sequence: Synthetic oligonucleotide
  Sense Strand Starting at position 1151 of SEQ ID NO: 315625
guggcuauauucuuaauuu

SEQ ID NO: 408998 - RNA, 19 nt, Artificial Sequence
  Description of Artificial Sequence: Synthetic oligonucleotide
  Antisense Strand to SEQ ID NO: 408997
aaauuaagaauauagccac

SEQ ID NO: 408999 - RNA, 19 nt, Artificial Sequence
  Description of Artificial Sequence: Synthetic oligonucleotide
  Sense Strand Starting at position 1151 of SEQ ID NO: 315674
guaacugauuuggaugaau

SEQ ID NO: 409000 - RNA, 19 nt, Artificial Sequence
  Description of Artificial Sequence: Synthetic oligonucleotide
  Antisense Strand to SEQ ID NO: 408999
auucauccaaaucaguuac

SEQ ID NO: 409001 - RNA, 19 nt, Artificial Sequence
  Description of Artificial Sequence: Synthetic oligonucleotide
  Sense Strand Starting at position 1151 of SEQ ID NO: 315730
gugaaaucuuuaguuucca

SEQ ID NO: 409002 - RNA, 19 nt, Artificial Sequence
  Description of Artificial Sequence: Synthetic oligonucleotide
  Antisense Strand to SEQ ID NO: 409001
uggaaacuaaagauuucac

SEQ ID NO: 409003 - RNA, 19 nt, Artificial Sequence
  Description of Artificial Sequence: Synthetic oligonucleotide
  Sense Strand Starting at position 1151 of SEQ ID NO: 315769
cuguuagaauuauugaacu

SEQ ID NO: 409004 - RNA, 19 nt, Artificial Sequence
  Description of Artificial Sequence: Synthetic oligonucleotide
  Antisense Strand to SEQ ID NO: 409003
aguucaauaauucuaacag

SEQ ID NO: 409005 - RNA, 19 nt, Artificial Sequence
  Description of Artificial Sequence: Synthetic oligonucleotide
  Sense Strand Starting at position 1151 of SEQ ID NO: 316007
aaggcaaauuuacauggua

SEQ ID NO: 409006 - RNA, 19 nt, Artificial Sequence
  Description of Artificial Sequence: Synthetic oligonucleotide
  Antisense Strand to SEQ ID NO: 409005
uaccauguaaauuugccuu

SEQ ID NO: 409007 - RNA, 19 nt, Artificial Sequence
  Description of Artificial Sequence: Synthetic oligonucleotide
  Sense Strand Starting at position 1151 of SEQ ID NO: 316188
ggcacaaauuguguauuaa

SEQ ID NO: 409008 - RNA, 19 nt, Artificial Sequence
  Description of Artificial Sequence: Synthetic oligonucleotide
  Antisense Strand to SEQ ID NO: 409007
uuaauacacaauuugugcc

SEQ ID NO: 409009 - RNA, 19 nt, Artificial Sequence
  Description of Artificial Sequence: Synthetic oligonucleotide
  Sense Strand Starting at position 1151 of SEQ ID NO: 316189
gcacaaauuguguauuaac

SEQ ID NO: 409010 - RNA, 19 nt, Artificial Sequence
  Description of Artificial Sequence: Synthetic oligonucleotide
  Antisense Strand to SEQ ID NO: 409009
guuaauacacaauuugugc

SEQ ID NO: 409011 - RNA, 19 nt, Artificial Sequence
  Description of Artificial Sequence: Synthetic oligonucleotide
  Sense Strand Starting at position 1151 of SEQ ID NO: 316249
guagaauagaaaugguuuc

SEQ ID NO: 409012 - RNA, 19 nt, Artificial Sequence
  Description of Artificial Sequence: Synthetic oligonucleotide
  Antisense Strand to SEQ ID NO: 409011
gaaaccauuucuauucuac

SEQ ID NO: 409013 - RNA, 19 nt, Artificial Sequence
  Description of Artificial Sequence: Synthetic oligonucleotide
  Sense Strand Starting at position 1151 of SEQ ID NO: 316893
ugaaauauaaguuguugag

SEQ ID NO: 409014 - RNA, 19 nt, Artificial Sequence
  Description of Artificial Sequence: Synthetic oligonucleotide
  Antisense Strand to SEQ ID NO: 409013
cucaacaacuuauauuuca

SEQ ID NO: 409015 - RNA, 19 nt, Artificial Sequence
  Description of Artificial Sequence: Synthetic oligonucleotide
  Sense Strand Starting at position 1151 of SEQ ID NO: 316897
auauaaguuguugagaugu

SEQ ID NO: 409016 - RNA, 19 nt, Artificial Sequence
  Description of Artificial Sequence: Synthetic oligonucleotide
  Antisense Strand to SEQ ID NO: 409015
acaucucaacaacuuauau

SEQ ID NO: 409017 - RNA, 19 nt, Artificial Sequence
  Description of Artificial Sequence: Synthetic oligonucleotide
  Sense Strand Starting at position 1151 of SEQ ID NO: 317089
accuuaauugcucacaggu

SEQ ID NO: 409018 - RNA, 19 nt, Artificial Sequence
  Description of Artificial Sequence: Synthetic oligonucleotide
  Antisense Strand to SEQ ID NO: 409017
accugugagcaauuaaggu

SEQ ID NO: 409019 - RNA, 19 nt, Artificial Sequence
  Description of Artificial Sequence: Synthetic oligonucleotide
  Sense Strand Starting at position 1151 of SEQ ID NO: 317252
uggacaugguuauuacagu

SEQ ID NO: 409020 - RNA, 19 nt, Artificial Sequence
  Description of Artificial Sequence: Synthetic oligonucleotide
  Antisense Strand to SEQ ID NO: 409019
acuguaauaaccaugucca

SEQ ID NO: 409021 - RNA, 19 nt, Artificial Sequence
  Description of Artificial Sequence: Synthetic oligonucleotide
  Sense Strand Starting at position 1151 of SEQ ID NO: 317298
uccugcagccaagauuaau

SEQ ID NO: 409022 - RNA, 19 nt, Artificial Sequence
  Description of Artificial Sequence: Synthetic oligonucleotide
  Antisense Strand to SEQ ID NO: 409021
auuaaucuuggcugcagga

SEQ ID NO: 409023 - RNA, 19 nt, Artificial Sequence
  Description of Artificial Sequence: Synthetic oligonucleotide
  Sense Strand Starting at position 1151 of SEQ ID NO: 317301
ugcagccaagauuaauaau

SEQ ID NO: 409024 - RNA, 19 nt, Artificial Sequence
  Description of Artificial Sequence: Synthetic oligonucleotide
  Antisense Strand to SEQ ID NO: 409023
auuauuaaucuuggcugca

SEQ ID NO: 409025 - RNA, 19 nt, Artificial Sequence
  Description of Artificial Sequence: Synthetic oligonucleotide
  Sense Strand Starting at position 1151 of SEQ ID NO: 317359
gucagagauguucaugcag

SEQ ID NO: 409026 - RNA, 19 nt, Artificial Sequence
  Description of Artificial Sequence: Synthetic oligonucleotide
  Antisense Strand to SEQ ID NO: 409025
cugcaugaacaucucugac

SEQ ID NO: 409027 - RNA, 19 nt, Artificial Sequence
  Description of Artificial Sequence: Synthetic oligonucleotide
  Sense Strand Starting at position 1151 of SEQ ID NO: 317437
uuugcaauugaaugacaaa

SEQ ID NO: 409028 - RNA, 19 nt, Artificial Sequence
  Description of Artificial Sequence: Synthetic oligonucleotide
  Antisense Strand to SEQ ID NO: 409027
uuugucauucaauugcaaa

SEQ ID NO: 409029 - RNA, 19 nt, Artificial Sequence
  Description of Artificial Sequence: Synthetic oligonucleotide
  Sense Strand Starting at position 1151 of SEQ ID NO: 317599
gguaaauacugcuuauauu

SEQ ID NO: 409030 - RNA, 19 nt, Artificial Sequence
  Description of Artificial Sequence: Synthetic oligonucleotide
  Antisense Strand to SEQ ID NO: 409029
aauauaagcaguauuuacc

SEQ ID NO: 409031 - RNA, 19 nt, Artificial Sequence
  Description of Artificial Sequence: Synthetic oligonucleotide
  Sense Strand Starting at position 1151 of SEQ ID NO: 317600
guaaauacugcuuauauug

SEQ ID NO: 409032 - RNA, 19 nt, Artificial Sequence
  Description of Artificial Sequence: Synthetic oligonucleotide
  Antisense Strand to SEQ ID NO: 409031
caauauaagcaguauuuac

SEQ ID NO: 409033 - RNA, 19 nt, Artificial Sequence
  Description of Artificial Sequence: Synthetic oligonucleotide
  Sense Strand Starting at position 1151 of SEQ ID NO: 317666
uagugaauucuguauugag

SEQ ID NO: 409034 - RNA, 19 nt, Artificial Sequence
  Description of Artificial Sequence: Synthetic oligonucleotide
  Antisense Strand to SEQ ID NO: 409033
cucaauacagaauucacua

SEQ ID NO: 409035 - RNA, 19 nt, Artificial Sequence
  Description of Artificial Sequence: Synthetic oligonucleotide
  Sense Strand Starting at position 1151 of SEQ ID NO: 317859
aucagauagcuagggauua

SEQ ID NO: 409036 - RNA, 19 nt, Artificial Sequence
  Description of Artificial Sequence: Synthetic oligonucleotide
  Antisense Strand to SEQ ID NO: 409035
uaaucccuagcuaucugau

SEQ ID NO: 409037 - RNA, 19 nt, Artificial Sequence
  Description of Artificial Sequence: Synthetic oligonucleotide
  Sense Strand Starting at position 1151 of SEQ ID NO: 317902
accuuaauagauggcaauu

SEQ ID NO: 409038 - RNA, 19 nt, Artificial Sequence
  Description of Artificial Sequence: Synthetic oligonucleotide
  Antisense Strand to SEQ ID NO: 409037
aauugccaucuauuaaggu

SEQ ID NO: 409039 - RNA, 19 nt, Artificial Sequence
  Description of Artificial Sequence: Synthetic oligonucleotide
  Sense Strand Starting at position 1151 of SEQ ID NO: 317904
cuuaauagauggcaauuua

SEQ ID NO: 409040 - RNA, 19 nt, Artificial Sequence
  Description of Artificial Sequence: Synthetic oligonucleotide
  Antisense Strand to SEQ ID NO: 409039
uaaauugccaucuauuaag

SEQ ID NO: 409041 - RNA, 19 nt, Artificial Sequence
  Description of Artificial Sequence: Synthetic oligonucleotide
  Sense Strand Starting at position 1151 of SEQ ID NO: 318005
gcauuauauuagguuuaga

SEQ ID NO: 409042 - RNA, 19 nt, Artificial Sequence
  Description of Artificial Sequence: Synthetic oligonucleotide
  Antisense Strand to SEQ ID NO: 409041
ucuaaaccuaauauaaugc

SEQ ID NO: 409043 - RNA, 19 nt, Artificial Sequence
  Description of Artificial Sequence: Synthetic oligonucleotide
  Sense Strand Starting at position 1151 of SEQ ID NO: 318036
cucagucuucuugauguga

SEQ ID NO: 409044 - RNA, 19 nt, Artificial Sequence
  Description of Artificial Sequence: Synthetic oligonucleotide
  Antisense Strand to SEQ ID NO: 409043
ucacaucaagaagacugag

SEQ ID NO: 409045 - RNA, 19 nt, Artificial Sequence
  Description of Artificial Sequence: Synthetic oligonucleotide
  Sense Strand Starting at position 1151 of SEQ ID NO: 318049
augugaagcauagggauua

SEQ ID NO: 409046 - RNA, 19 nt, Artificial Sequence
  Description of Artificial Sequence: Synthetic oligonucleotide
  Antisense Strand to SEQ ID NO: 409045
uaaucccuaugcuucacau

SEQ ID NO: 409047 - RNA, 19 nt, Artificial Sequence
  Description of Artificial Sequence: Synthetic oligonucleotide
  Sense Strand Starting at position 1151 of SEQ ID NO: 318113
aaugcuauguaaguugaau

SEQ ID NO: 409048 - RNA, 19 nt, Artificial Sequence
  Description of Artificial Sequence: Synthetic oligonucleotide
  Antisense Strand to SEQ ID NO: 409047
auucaacuuacauagcauu

SEQ ID NO: 409049 - RNA, 19 nt, Artificial Sequence
  Description of Artificial Sequence: Synthetic oligonucleotide
  Sense Strand Starting at position 1151 of SEQ ID NO: 318129
aauauugaguuagcaauga

SEQ ID NO: 409050 - RNA, 19 nt, Artificial Sequence
  Description of Artificial Sequence: Synthetic oligonucleotide
  Antisense Strand to SEQ ID NO: 409049
ucauugcuaacucaauauu

SEQ ID NO: 409051 - RNA, 19 nt, Artificial Sequence
  Description of Artificial Sequence: Synthetic oligonucleotide
  Sense Strand Starting at position 1151 of SEQ ID NO: 318446
gcaucaaaugcauauagua

SEQ ID NO: 409052 - RNA, 19 nt, Artificial Sequence
  Description of Artificial Sequence: Synthetic oligonucleotide
  Antisense Strand to SEQ ID NO: 409051
uacuauaugcauuugaugc

SEQ ID NO: 409053 - RNA, 19 nt, Artificial Sequence
  Description of Artificial Sequence: Synthetic oligonucleotide
  Sense Strand Starting at position 1151 of SEQ ID NO: 318459
auaguaauccucugagguu

SEQ ID NO: 409054 - RNA, 19 nt, Artificial Sequence
  Description of Artificial Sequence: Synthetic oligonucleotide
  Antisense Strand to SEQ ID NO: 409053
aaccucagaggauuacuau

SEQ ID NO: 409055 - RNA, 19 nt, Artificial Sequence
  Description of Artificial Sequence: Synthetic oligonucleotide
  Sense Strand Starting at position 1151 of SEQ ID NO: 318542
cuuucucaagauugcagaa

SEQ ID NO: 409056 - RNA, 19 nt, Artificial Sequence
  Description of Artificial Sequence: Synthetic oligonucleotide
  Antisense Strand to SEQ ID NO: 409055
uucugcaaucuugagaaag

SEQ ID NO: 409057 - RNA, 19 nt, Artificial Sequence
  Description of Artificial Sequence: Synthetic oligonucleotide
  Sense Strand Starting at position 1151 of SEQ ID NO: 318623
auucuugacugccuacaga

SEQ ID NO: 409058 - RNA, 19 nt, Artificial Sequence
  Description of Artificial Sequence: Synthetic oligonucleotide
  Antisense Strand to SEQ ID NO: 409057
ucuguaggcagucaagaau

SEQ ID NO: 409059 - RNA, 19 nt, Artificial Sequence
  Description of Artificial Sequence: Synthetic oligonucleotide
  Sense Strand Starting at position 1151 of SEQ ID NO: 318626
cuugacugccuacagaauu

SEQ ID NO: 409060 - RNA, 19 nt, Artificial Sequence
  Description of Artificial Sequence: Synthetic oligonucleotide
  Antisense Strand to SEQ ID NO: 409059
aauucuguaggcagucaag

SEQ ID NO: 409061 - RNA, 19 nt, Artificial Sequence
  Description of Artificial Sequence: Synthetic oligonucleotide
  Sense Strand Starting at position 1151 of SEQ ID NO: 318796
augccaggcuuguuaauuu

SEQ ID NO: 409062 - RNA, 19 nt, Artificial Sequence
  Description of Artificial Sequence: Synthetic oligonucleotide
  Antisense Strand to SEQ ID NO: 409061
aaauuaacaagccuggcau

SEQ ID NO: 409063 - RNA, 19 nt, Artificial Sequence
  Description of Artificial Sequence: Synthetic oligonucleotide
  Sense Strand Starting at position 1151 of SEQ ID NO: 319033
acacgucaucuagacugua

SEQ ID NO: 409064 - RNA, 19 nt, Artificial Sequence
  Description of Artificial Sequence: Synthetic oligonucleotide
  Antisense Strand to SEQ ID NO: 409063
uacagucuagaugacgugu

SEQ ID NO: 409065 - RNA, 19 nt, Artificial Sequence
  Description of Artificial Sequence: Synthetic oligonucleotide
  Sense Strand Starting at position 1151 of SEQ ID NO: 319113
gagauacuagaguguuacu

SEQ ID NO: 409066 - RNA, 19 nt, Artificial Sequence
  Description of Artificial Sequence: Synthetic oligonucleotide
  Antisense Strand to SEQ ID NO: 409065
aguaacacucuaguaucuc

SEQ ID NO: 409067 - RNA, 19 nt, Artificial Sequence
  Description of Artificial Sequence: Synthetic oligonucleotide
  Sense Strand Starting at position 1151 of SEQ ID NO: 319118
acuagaguguuacugggaa

SEQ ID NO: 409068 - RNA, 19 nt, Artificial Sequence
  Description of Artificial Sequence: Synthetic oligonucleotide
  Antisense Strand to SEQ ID NO: 409067
uucccaguaacacucuagu

SEQ ID NO: 409069 - RNA, 19 nt, Artificial Sequence
  Description of Artificial Sequence: Synthetic oligonucleotide
  Sense Strand Starting at position 1151 of SEQ ID NO: 319120
uagaguguuacugggaaag

SEQ ID NO: 409070 - RNA, 19 nt, Artificial Sequence
  Description of Artificial Sequence: Synthetic oligonucleotide
  Antisense Strand to SEQ ID NO: 409069
cuuucccaguaacacucua

SEQ ID NO: 409071 - RNA, 19 nt, Artificial Sequence
  Description of Artificial Sequence: Synthetic oligonucleotide
  Sense Strand Starting at position 1152 of SEQ ID NO: 315484
gcaaguuagagaggaauua

SEQ ID NO: 409072 - RNA, 19 nt, Artificial Sequence
  Description of Artificial Sequence: Synthetic oligonucleotide
  Antisense Strand to SEQ ID NO: 409071
uaauuccucucuaacuugc

SEQ ID NO: 409073 - RNA, 19 nt, Artificial Sequence
  Description of Artificial Sequence: Synthetic oligonucleotide
  Sense Strand Starting at position 1152 of SEQ ID NO: 315641
augagaagcccagguauca

SEQ ID NO: 409074 - RNA, 19 nt, Artificial Sequence
  Description of Artificial Sequence: Synthetic oligonucleotide
  Antisense Strand to SEQ ID NO: 409073
ugauaccugggcuucucau

SEQ ID NO: 409075 - RNA, 19 nt, Artificial Sequence
  Description of Artificial Sequence: Synthetic oligonucleotide
  Sense Strand Starting at position 1152 of SEQ ID NO: 315873
uccuaaauauuggucagga

SEQ ID NO: 409076 - RNA, 19 nt, Artificial Sequence
  Description of Artificial Sequence: Synthetic oligonucleotide
  Antisense Strand to SEQ ID NO: 409075
uccugaccaauauuuagga

SEQ ID NO: 409077 - RNA, 19 nt, Artificial Sequence
  Description of Artificial Sequence: Synthetic oligonucleotide
  Sense Strand Starting at position 1152 of SEQ ID NO: 315874
ccuaaauauuggucaggau

SEQ ID NO: 409078 - RNA, 19 nt, Artificial Sequence
  Description of Artificial Sequence: Synthetic oligonucleotide
  Antisense Strand to SEQ ID NO: 409077
auccugaccaauauuuagg

SEQ ID NO: 409079 - RNA, 19 nt, Artificial Sequence
  Description of Artificial Sequence: Synthetic oligonucleotide
  Sense Strand Starting at position 1152 of SEQ ID NO: 315923
aaaggauagugucugcuaa

SEQ ID NO: 409080 - RNA, 19 nt, Artificial Sequence
  Description of Artificial Sequence: Synthetic oligonucleotide
  Antisense Strand to SEQ ID NO: 409079
uuagcagacacuauccuuu

SEQ ID NO: 409081 - RNA, 19 nt, Artificial Sequence
  Description of Artificial Sequence: Synthetic oligonucleotide
  Sense Strand Starting at position 1152 of SEQ ID NO: 315924
aaggauagugucugcuaag

SEQ ID NO: 409082 - RNA, 19 nt, Artificial Sequence
  Description of Artificial Sequence: Synthetic oligonucleotide
  Antisense Strand to SEQ ID NO: 409081
cuuagcagacacuauccuu

SEQ ID NO: 409083 - RNA, 19 nt, Artificial Sequence
  Description of Artificial Sequence: Synthetic oligonucleotide
  Sense Strand Starting at position 1152 of SEQ ID NO: 315930
agugucugcuaaguaaaca

SEQ ID NO: 409084 - RNA, 19 nt, Artificial Sequence
  Description of Artificial Sequence: Synthetic oligonucleotide
  Antisense Strand to SEQ ID NO: 409083
uguuuacuuagcagacacu

SEQ ID NO: 409085 - RNA, 19 nt, Artificial Sequence
  Description of Artificial Sequence: Synthetic oligonucleotide
  Sense Strand Starting at position 1152 of SEQ ID NO: 315984
ccuuuagacccauaaguug

SEQ ID NO: 409086 - RNA, 19 nt, Artificial Sequence
  Description of Artificial Sequence: Synthetic oligonucleotide
  Antisense Strand to SEQ ID NO: 409085
caacuuaugggucuaaagg

SEQ ID NO: 409087 - RNA, 19 nt, Artificial Sequence
  Description of Artificial Sequence: Synthetic oligonucleotide
  Sense Strand Starting at position 1152 of SEQ ID NO: 315992
cccauaaguuguuucgaca

SEQ ID NO: 409088 - RNA, 19 nt, Artificial Sequence
  Description of Artificial Sequence: Synthetic oligonucleotide
  Antisense Strand to SEQ ID NO: 409087
ugucgaaacaacuuauggg

SEQ ID NO: 409089 - RNA, 19 nt, Artificial Sequence
  Description of Artificial Sequence: Synthetic oligonucleotide
  Sense Strand Starting at position 1152 of SEQ ID NO: 316520
cagaguguacucgaggaga

SEQ ID NO: 409090 - RNA, 19 nt, Artificial Sequence
  Description of Artificial Sequence: Synthetic oligonucleotide
  Antisense Strand to SEQ ID NO: 409089
ucuccucgaguacacucug

SEQ ID NO: 409091 - RNA, 19 nt, Artificial Sequence
  Description of Artificial Sequence: Synthetic oligonucleotide
  Sense Strand Starting at position 1152 of SEQ ID NO: 316522
gaguguacucgaggagacu

SEQ ID NO: 409092 - RNA, 19 nt, Artificial Sequence
  Description of Artificial Sequence: Synthetic oligonucleotide
  Antisense Strand to SEQ ID NO: 409091
agucuccucgaguacacuc

SEQ ID NO: 409093 - RNA, 19 nt, Artificial Sequence
  Description of Artificial Sequence: Synthetic oligonucleotide
  Sense Strand Starting at position 1152 of SEQ ID NO: 316523
aguguacucgaggagacua

SEQ ID NO: 409094 - RNA, 19 nt, Artificial Sequence
  Description of Artificial Sequence: Synthetic oligonucleotide
  Antisense Strand to SEQ ID NO: 409093
uagucuccucgaguacacu

SEQ ID NO: 409095 - RNA, 19 nt, Artificial Sequence
  Description of Artificial Sequence: Synthetic oligonucleotide
  Sense Strand Starting at position 1152 of SEQ ID NO: 316742
ggucaauuaaauggagucu

SEQ ID NO: 409096 - RNA, 19 nt, Artificial Sequence
  Description of Artificial Sequence: Synthetic oligonucleotide
  Antisense Strand to SEQ ID NO: 409095
agacuccauuuaauugacc

SEQ ID NO: 409097 - RNA, 19 nt, Artificial Sequence
  Description of Artificial Sequence: Synthetic oligonucleotide
  Sense Strand Starting at position 1152 of SEQ ID NO: 317277
cgaagugaccaggagaguu

SEQ ID NO: 409098 - RNA, 19 nt, Artificial Sequence
  Description of Artificial Sequence: Synthetic oligonucleotide
  Antisense Strand to SEQ ID NO: 409097
aacucuccuggucacuucg

SEQ ID NO: 409099 - RNA, 19 nt, Artificial Sequence
  Description of Artificial Sequence: Synthetic oligonucleotide
  Sense Strand Starting at position 1152 of SEQ ID NO: 317441
gucaaauuugcugggcauu

SEQ ID NO: 409100 - RNA, 19 nt, Artificial Sequence
  Description of Artificial Sequence: Synthetic oligonucleotide
  Antisense Strand to SEQ ID NO: 409099
aaugcccagcaaauuugac

SEQ ID NO: 409101 - RNA, 19 nt, Artificial Sequence
  Description of Artificial Sequence: Synthetic oligonucleotide
  Sense Strand Starting at position 1152 of SEQ ID NO: 317455
gcauuugguaagugccaga

SEQ ID NO: 409102 - RNA, 19 nt, Artificial Sequence
  Description of Artificial Sequence: Synthetic oligonucleotide
  Antisense Strand to SEQ ID NO: 409101
ucuggcacuuaccaaaugc

SEQ ID NO: 409103 - RNA, 19 nt, Artificial Sequence
  Description of Artificial Sequence: Synthetic oligonucleotide
  Sense Strand Starting at position 1152 of SEQ ID NO: 317460
ugguaagugccagaguacu

SEQ ID NO: 409104 - RNA, 19 nt, Artificial Sequence
  Description of Artificial Sequence: Synthetic oligonucleotide
  Antisense Strand to SEQ ID NO: 409103
aguacucuggcacuuacca

SEQ ID NO: 409105 - RNA, 19 nt, Artificial Sequence
  Description of Artificial Sequence: Synthetic oligonucleotide
  Sense Strand Starting at position 1152 of SEQ ID NO: 317468
gccagaguacuaugcuaag

SEQ ID NO: 409106 - RNA, 19 nt, Artificial Sequence
  Description of Artificial Sequence: Synthetic oligonucleotide
  Antisense Strand to SEQ ID NO: 409105
cuuagcauaguacucuggc

SEQ ID NO: 409107 - RNA, 19 nt, Artificial Sequence
  Description of Artificial Sequence: Synthetic oligonucleotide
  Sense Strand Starting at position 1152 of SEQ ID NO: 317528
caguaauggcgcgcuugua

SEQ ID NO: 409108 - RNA, 19 nt, Artificial Sequence
  Description of Artificial Sequence: Synthetic oligonucleotide
  Antisense Strand to SEQ ID NO: 409107
uacaagcgcgccauuacug

SEQ ID NO: 409109 - RNA, 19 nt, Artificial Sequence
  Description of Artificial Sequence: Synthetic oligonucleotide
  Sense Strand Starting at position 1152 of SEQ ID NO: 317733
ucacaagcucuccagauga

SEQ ID NO: 409110 - RNA, 19 nt, Artificial Sequence
  Description of Artificial Sequence: Synthetic oligonucleotide
  Antisense Strand to SEQ ID NO: 409109
ucaucuggagagcuuguga

SEQ ID NO: 409111 - RNA, 19 nt, Artificial Sequence
  Description of Artificial Sequence: Synthetic oligonucleotide
  Sense Strand Starting at position 1152 of SEQ ID NO: 317785
ucuacaguuccguaaucga

SEQ ID NO: 409112 - RNA, 19 nt, Artificial Sequence
  Description of Artificial Sequence: Synthetic oligonucleotide
  Antisense Strand to SEQ ID NO: 409111
ucgauuacggaacuguaga

SEQ ID NO: 409113 - RNA, 19 nt, Artificial Sequence
  Description of Artificial Sequence: Synthetic oligonucleotide
  Sense Strand Starting at position 1152 of SEQ ID NO: 317788
acaguuccguaaucgaaca

SEQ ID NO: 409114 - RNA, 19 nt, Artificial Sequence
  Description of Artificial Sequence: Synthetic oligonucleotide
  Antisense Strand to SEQ ID NO: 409113
uguucgauuacggaacugu

SEQ ID NO: 409115 - RNA, 19 nt, Artificial Sequence
  Description of Artificial Sequence: Synthetic oligonucleotide
  Sense Strand Starting at position 1152 of SEQ ID NO: 317790
aguuccguaaucgaacaaa

SEQ ID NO: 409116 - RNA, 19 nt, Artificial Sequence
  Description of Artificial Sequence: Synthetic oligonucleotide
  Antisense Strand to SEQ ID NO: 409115
uuuguucgauuacggaacu

SEQ ID NO: 409117 - RNA, 19 nt, Artificial Sequence
  Description of Artificial Sequence: Synthetic oligonucleotide
  Sense Strand Starting at position 1152 of SEQ ID NO: 317837
aggagaaacuuacagauua

SEQ ID NO: 409118 - RNA, 19 nt, Artificial Sequence
  Description of Artificial Sequence: Synthetic oligonucleotide
  Antisense Strand to SEQ ID NO: 409117
uaaucuguaaguuucuccu

SEQ ID NO: 409119 - RNA, 19 nt, Artificial Sequence
  Description of Artificial Sequence: Synthetic oligonucleotide
  Sense Strand Starting at position 1152 of SEQ ID NO: 318334
gaguaauaaugguauuugu

SEQ ID NO: 409120 - RNA, 19 nt, Artificial Sequence
  Description of Artificial Sequence: Synthetic oligonucleotide
  Antisense Strand to SEQ ID NO: 409119
acaaauaccauuauuacuc

SEQ ID NO: 409121 - RNA, 19 nt, Artificial Sequence
  Description of Artificial Sequence: Synthetic oligonucleotide
  Sense Strand Starting at position 1152 of SEQ ID NO: 318343
ugguauuuguggcuauauu

SEQ ID NO: 409122 - RNA, 19 nt, Artificial Sequence
  Description of Artificial Sequence: Synthetic oligonucleotide
  Antisense Strand to SEQ ID NO: 409121
aauauagccacaaauacca

SEQ ID NO: 409123 - RNA, 19 nt, Artificial Sequence
  Description of Artificial Sequence: Synthetic oligonucleotide
  Sense Strand Starting at position 1152 of SEQ ID NO: 318492
guaaucagggucuggcuaa

SEQ ID NO: 409124 - RNA, 19 nt, Artificial Sequence
  Description of Artificial Sequence: Synthetic oligonucleotide
  Antisense Strand to SEQ ID NO: 409123
uuagccagacccugauuac

SEQ ID NO: 409125 - RNA, 19 nt, Artificial Sequence
  Description of Artificial Sequence: Synthetic oligonucleotide
  Sense Strand Starting at position 1152 of SEQ ID NO: 318530
augaguugauaacugucau

SEQ ID NO: 409126 - RNA, 19 nt, Artificial Sequence
  Description of Artificial Sequence: Synthetic oligonucleotide
  Antisense Strand to SEQ ID NO: 409125
augacaguuaucaacucau

SEQ ID NO: 409127 - RNA, 19 nt, Artificial Sequence
  Description of Artificial Sequence: Synthetic oligonucleotide
  Sense Strand Starting at position 1152 of SEQ ID NO: 318571
uguuuauugcacuauucua

SEQ ID NO: 409128 - RNA, 19 nt, Artificial Sequence
  Description of Artificial Sequence: Synthetic oligonucleotide
  Antisense Strand to SEQ ID NO: 409127
uagaauagugcaauaaaca

SEQ ID NO: 409129 - RNA, 19 nt, Artificial Sequence
  Description of Artificial Sequence: Synthetic oligonucleotide
  Sense Strand Starting at position 1152 of SEQ ID NO: 318589
aauguagcaucuguuugaa

SEQ ID NO: 409130 - RNA, 19 nt, Artificial Sequence
  Description of Artificial Sequence: Synthetic oligonucleotide
  Antisense Strand to SEQ ID NO: 409129
uucaaacagaugcuacauu

SEQ ID NO: 409131 - RNA, 19 nt, Artificial Sequence
  Description of Artificial Sequence: Synthetic oligonucleotide
  Sense Strand Starting at position 1152 of SEQ ID NO: 318592
guagcaucuguuugaauuu

SEQ ID NO: 409132 - RNA, 19 nt, Artificial Sequence
  Description of Artificial Sequence: Synthetic oligonucleotide
  Antisense Strand to SEQ ID NO: 409131
aaauucaaacagaugcuac

SEQ ID NO: 409133 - RNA, 19 nt, Artificial Sequence
  Description of Artificial Sequence: Synthetic oligonucleotide
  Sense Strand Starting at position 1152 of SEQ ID NO: 319000
accacuuggcaagaaaugu

SEQ ID NO: 409134 - RNA, 19 nt, Artificial Sequence
  Description of Artificial Sequence: Synthetic oligonucleotide
  Antisense Strand to SEQ ID NO: 409133
acauuucuugccaaguggu

SEQ ID NO: 409135 - RNA, 19 nt, Artificial Sequence
  Description of Artificial Sequence: Synthetic oligonucleotide
  Sense Strand Starting at position 1152 of SEQ ID NO: 319057
aggucaaugccuuaaccaa

SEQ ID NO: 409136 - RNA, 19 nt, Artificial Sequence
  Description of Artificial Sequence: Synthetic oligonucleotide
  Antisense Strand to SEQ ID NO: 409135
uugguuaaggcauugaccu

SEQ ID NO: 409137 - RNA, 19 nt, Artificial Sequence
  Description of Artificial Sequence: Synthetic oligonucleotide
  Sense Strand Starting at position 1152 of SEQ ID NO: 319064
ugccuuaaccaagguugua

SEQ ID NO: 409138 - RNA, 19 nt, Artificial Sequence
  Description of Artificial Sequence: Synthetic oligonucleotide
  Antisense Strand to SEQ ID NO: 409137
uacaaccuugguuaaggca

SEQ ID NO: 409139 - RNA, 19 nt, Artificial Sequence
  Description of Artificial Sequence: Synthetic oligonucleotide
  Sense Strand Starting at position 1152 of SEQ ID NO: 319076
gguuguauguauuuacugu

SEQ ID NO: 409140 - RNA, 19 nt, Artificial Sequence
  Description of Artificial Sequence: Synthetic oligonucleotide
  Antisense Strand to SEQ ID NO: 409139
acaguaaauacauacaacc

SEQ ID NO: 409141 - RNA, 19 nt, Artificial Sequence
  Description of Artificial Sequence: Synthetic oligonucleotide
  Sense Strand Starting at position 1152 of SEQ ID NO: 319082
auguauuuacugugcauaa

SEQ ID NO: 409142 - RNA, 19 nt, Artificial Sequence
  Description of Artificial Sequence: Synthetic oligonucleotide
  Antisense Strand to SEQ ID NO: 409141
uuaugcacaguaaauacau

SEQ ID NO: 409143 - RNA, 19 nt, Artificial Sequence
  Description of Artificial Sequence: Synthetic oligonucleotide
  Sense Strand Starting at position 1152 of SEQ ID NO: 319083
uguauuuacugugcauaau

SEQ ID NO: 409144 - RNA, 19 nt, Artificial Sequence
  Description of Artificial Sequence: Synthetic oligonucleotide
  Antisense Strand to SEQ ID NO: 409143
auuaugcacaguaaauaca

SEQ ID NO: 409145 - RNA, 19 nt, Artificial Sequence
  Description of Artificial Sequence: Synthetic oligonucleotide
  Sense Strand Starting at position 1152 of SEQ ID NO: 319112
ggucuaggucaacgguaau

SEQ ID NO: 409146 - RNA, 19 nt, Artificial Sequence
  Description of Artificial Sequence: Synthetic oligonucleotide
  Antisense Strand to SEQ ID NO: 409145
auuaccguugaccuagacc

SEQ ID NO: 409147 - RNA, 19 nt, Artificial Sequence
  Description of Artificial Sequence: Synthetic oligonucleotide
  Sense Strand Starting at position 1152 of SEQ ID NO: 319115
cuaggucaacgguaaucuu

SEQ ID NO: 409148 - RNA, 19 nt, Artificial Sequence
  Description of Artificial Sequence: Synthetic oligonucleotide
  Antisense Strand to SEQ ID NO: 409147
aagauuaccguugaccuag

SEQ ID NO: 409149 - RNA, 19 nt, Artificial Sequence
  Description of Artificial Sequence: Synthetic oligonucleotide
  Sense Strand Starting at position 1152 of SEQ ID NO: 319173
gucagcugcgcuucagaga

SEQ ID NO: 409150 - RNA, 19 nt, Artificial Sequence
  Description of Artificial Sequence: Synthetic oligonucleotide
  Antisense Strand to SEQ ID NO: 409149
ucucugaagcgcagcugac

SEQ ID NO: 409151 - RNA, 19 nt, Artificial Sequence
  Description of Artificial Sequence: Synthetic oligonucleotide
  Sense Strand Starting at position 1153 of SEQ ID NO: 315743
acucaauaucguuggcuaa

SEQ ID NO: 409152 - RNA, 19 nt, Artificial Sequence
  Description of Artificial Sequence: Synthetic oligonucleotide
  Antisense Strand to SEQ ID NO: 409151
uuagccaacgauauugagu

SEQ ID NO: 409153 - RNA, 19 nt, Artificial Sequence
  Description of Artificial Sequence: Synthetic oligonucleotide
  Sense Strand Starting at position 1153 of SEQ ID NO: 315744
cucaauaucguuggcuaaa

SEQ ID NO: 409154 - RNA, 19 nt, Artificial Sequence
  Description of Artificial Sequence: Synthetic oligonucleotide
  Antisense Strand to SEQ ID NO: 409153
uuuagccaacgauauugag

SEQ ID NO: 409155 - RNA, 19 nt, Artificial Sequence
  Description of Artificial Sequence: Synthetic oligonucleotide
  Sense Strand Starting at position 1153 of SEQ ID NO: 315745
ucaauaucguuggcuaaac

SEQ ID NO: 409156 - RNA, 19 nt, Artificial Sequence
  Description of Artificial Sequence: Synthetic oligonucleotide
  Antisense Strand to SEQ ID NO: 409155
guuuagccaacgauauuga

SEQ ID NO: 409157 - RNA, 19 nt, Artificial Sequence
  Description of Artificial Sequence: Synthetic oligonucleotide
  Sense Strand Starting at position 1153 of SEQ ID NO: 315746
caauaucguuggcuaaaca

SEQ ID NO: 409158 - RNA, 19 nt, Artificial Sequence
  Description of Artificial Sequence: Synthetic oligonucleotide
  Antisense Strand to SEQ ID NO: 409157
uguuuagccaacgauauug

SEQ ID NO: 409159 - RNA, 19 nt, Artificial Sequence
  Description of Artificial Sequence: Synthetic oligonucleotide
  Sense Strand Starting at position 1153 of SEQ ID NO: 315825
cagucuaauucguccuaag

SEQ ID NO: 409160 - RNA, 19 nt, Artificial Sequence
  Description of Artificial Sequence: Synthetic oligonucleotide
  Antisense Strand to SEQ ID NO: 409159
cuuaggacgaauuagacug

SEQ ID NO: 409161 - RNA, 19 nt, Artificial Sequence
  Description of Artificial Sequence: Synthetic oligonucleotide
  Sense Strand Starting at position 1153 of SEQ ID NO: 315850
cuaccucaugggugugaga

SEQ ID NO: 409162 - RNA, 19 nt, Artificial Sequence
  Description of Artificial Sequence: Synthetic oligonucleotide
  Antisense Strand to SEQ ID NO: 409161
ucucacacccaugagguag

SEQ ID NO: 409163 - RNA, 19 nt, Artificial Sequence
  Description of Artificial Sequence: Synthetic oligonucleotide
  Sense Strand Starting at position 1153 of SEQ ID NO: 315852
accucaugggugugagaac

SEQ ID NO: 409164 - RNA, 19 nt, Artificial Sequence
  Description of Artificial Sequence: Synthetic oligonucleotide
  Antisense Strand to SEQ ID NO: 409163
guucucacacccaugaggu

SEQ ID NO: 409165 - RNA, 19 nt, Artificial Sequence
  Description of Artificial Sequence: Synthetic oligonucleotide
  Sense Strand Starting at position 1153 of SEQ ID NO: 315865
gagaacugcuggcuuuaag

SEQ ID NO: 409166 - RNA, 19 nt, Artificial Sequence
  Description of Artificial Sequence: Synthetic oligonucleotide
  Antisense Strand to SEQ ID NO: 409165
cuuaaagccagcaguucuc

SEQ ID NO: 409167 - RNA, 19 nt, Artificial Sequence
  Description of Artificial Sequence: Synthetic oligonucleotide
  Sense Strand Starting at position 1153 of SEQ ID NO: 316056
guggaucaauucucagaga

SEQ ID NO: 409168 - RNA, 19 nt, Artificial Sequence
  Description of Artificial Sequence: Synthetic oligonucleotide
  Antisense Strand to SEQ ID NO: 409167
ucucugagaauugauccac

SEQ ID NO: 409169 - RNA, 19 nt, Artificial Sequence
  Description of Artificial Sequence: Synthetic oligonucleotide
  Sense Strand Starting at position 1153 of SEQ ID NO: 316140
gguacuuugcuuuaucauu

SEQ ID NO: 409170 - RNA, 19 nt, Artificial Sequence
  Description of Artificial Sequence: Synthetic oligonucleotide
  Antisense Strand to SEQ ID NO: 409169
aaugauaaagcaaaguacc

SEQ ID NO: 409171 - RNA, 19 nt, Artificial Sequence
  Description of Artificial Sequence: Synthetic oligonucleotide
  Sense Strand Starting at position 1153 of SEQ ID NO: 316331
auuaauagacguugagaaa

SEQ ID NO: 409172 - RNA, 19 nt, Artificial Sequence
  Description of Artificial Sequence: Synthetic oligonucleotide
  Antisense Strand to SEQ ID NO: 409171
uuucucaacgucuauuaau

SEQ ID NO: 409173 - RNA, 19 nt, Artificial Sequence
  Description of Artificial Sequence: Synthetic oligonucleotide
  Sense Strand Starting at position 1153 of SEQ ID NO: 316393
gggcaccuuagaggugauu

SEQ ID NO: 409174 - RNA, 19 nt, Artificial Sequence
  Description of Artificial Sequence: Synthetic oligonucleotide
  Antisense Strand to SEQ ID NO: 409173
aaucaccucuaaggugccc

SEQ ID NO: 409175 - RNA, 19 nt, Artificial Sequence
  Description of Artificial Sequence: Synthetic oligonucleotide
  Sense Strand Starting at position 1153 of SEQ ID NO: 316414
auucgagcuuucuuggaga

SEQ ID NO: 409176 - RNA, 19 nt, Artificial Sequence
  Description of Artificial Sequence: Synthetic oligonucleotide
  Antisense Strand to SEQ ID NO: 409175
ucuccaagaaagcucgaau

SEQ ID NO: 409177 - RNA, 19 nt, Artificial Sequence
  Description of Artificial Sequence: Synthetic oligonucleotide
  Sense Strand Starting at position 1153 of SEQ ID NO: 316419
agcuuucuuggagaccuua

SEQ ID NO: 409178 - RNA, 19 nt, Artificial Sequence
  Description of Artificial Sequence: Synthetic oligonucleotide
  Antisense Strand to SEQ ID NO: 409177
uaaggucuccaagaaagcu

SEQ ID NO: 409179 - RNA, 19 nt, Artificial Sequence
  Description of Artificial Sequence: Synthetic oligonucleotide
  Sense Strand Starting at position 1153 of SEQ ID NO: 317095
cuggaaaccucggugccaa

SEQ ID NO: 409180 - RNA, 19 nt, Artificial Sequence
  Description of Artificial Sequence: Synthetic oligonucleotide
  Antisense Strand to SEQ ID NO: 409179
uuggcaccgagguuuccag

SEQ ID NO: 409181 - RNA, 19 nt, Artificial Sequence
  Description of Artificial Sequence: Synthetic oligonucleotide
  Sense Strand Starting at position 1153 of SEQ ID NO: 317096
uggaaaccucggugccaaa

SEQ ID NO: 409182 - RNA, 19 nt, Artificial Sequence
  Description of Artificial Sequence: Synthetic oligonucleotide
  Antisense Strand to SEQ ID NO: 409181
uuuggcaccgagguuucca

SEQ ID NO: 409183 - RNA, 19 nt, Artificial Sequence
  Description of Artificial Sequence: Synthetic oligonucleotide
  Sense Strand Starting at position 1153 of SEQ ID NO: 317282
uuagacaacgagugucuaa

SEQ ID NO: 409184 - RNA, 19 nt, Artificial Sequence
  Description of Artificial Sequence: Synthetic oligonucleotide
  Antisense Strand to SEQ ID NO: 409183
uuagacacucguugucuaa

SEQ ID NO: 409185 - RNA, 19 nt, Artificial Sequence
  Description of Artificial Sequence: Synthetic oligonucleotide
  Sense Strand Starting at position 1153 of SEQ ID NO: 317420
gugugaaacgcauggaaua

SEQ ID NO: 409186 - RNA, 19 nt, Artificial Sequence
  Description of Artificial Sequence: Synthetic oligonucleotide
  Antisense Strand to SEQ ID NO: 409185
uauuccaugcguuucacac

SEQ ID NO: 409187 - RNA, 19 nt, Artificial Sequence
  Description of Artificial Sequence: Synthetic oligonucleotide
  Sense Strand Starting at position 1153 of SEQ ID NO: 317466
guuugagagucacugagga

SEQ ID NO: 409188 - RNA, 19 nt, Artificial Sequence
  Description of Artificial Sequence: Synthetic oligonucleotide
  Antisense Strand to SEQ ID NO: 409187
uccucagugacucucaaac

SEQ ID NO: 409189 - RNA, 19 nt, Artificial Sequence
  Description of Artificial Sequence: Synthetic oligonucleotide
  Sense Strand Starting at position 1153 of SEQ ID NO: 317525
guacgcuaguauuucucaa

SEQ ID NO: 409190 - RNA, 19 nt, Artificial Sequence
  Description of Artificial Sequence: Synthetic oligonucleotide
  Antisense Strand to SEQ ID NO: 409189
uugagaaauacuagcguac

SEQ ID NO: 409191 - RNA, 19 nt, Artificial Sequence
  Description of Artificial Sequence: Synthetic oligonucleotide
  Sense Strand Starting at position 1153 of SEQ ID NO: 317529
gcuaguauuucucaaggag

SEQ ID NO: 409192 - RNA, 19 nt, Artificial Sequence
  Description of Artificial Sequence: Synthetic oligonucleotide
  Antisense Strand to SEQ ID NO: 409191
cuccuugagaaauacuagc

SEQ ID NO: 409193 - RNA, 19 nt, Artificial Sequence
  Description of Artificial Sequence: Synthetic oligonucleotide
  Sense Strand Starting at position 1153 of SEQ ID NO: 317562
gugagauugucaccauuau

SEQ ID NO: 409194 - RNA, 19 nt, Artificial Sequence
  Description of Artificial Sequence: Synthetic oligonucleotide
  Antisense Strand to SEQ ID NO: 409193
auaauggugacaaucucac

SEQ ID NO: 409195 - RNA, 19 nt, Artificial Sequence
  Description of Artificial Sequence: Synthetic oligonucleotide
  Sense Strand Starting at position 1153 of SEQ ID NO: 317563
ugagauugucaccauuauc

SEQ ID NO: 409196 - RNA, 19 nt, Artificial Sequence
  Description of Artificial Sequence: Synthetic oligonucleotide
  Antisense Strand to SEQ ID NO: 409195
gauaauggugacaaucuca

SEQ ID NO: 409197 - RNA, 19 nt, Artificial Sequence
  Description of Artificial Sequence: Synthetic oligonucleotide
  Sense Strand Starting at position 1153 of SEQ ID NO: 317611
cucgaaagggucugagauu

SEQ ID NO: 409198 - RNA, 19 nt, Artificial Sequence
  Description of Artificial Sequence: Synthetic oligonucleotide
  Antisense Strand to SEQ ID NO: 409197
aaucucagacccuuucgag

SEQ ID NO: 409199 - RNA, 19 nt, Artificial Sequence
  Description of Artificial Sequence: Synthetic oligonucleotide
  Sense Strand Starting at position 1153 of SEQ ID NO: 317666
aaguuaaagugucccaaug

SEQ ID NO: 409200 - RNA, 19 nt, Artificial Sequence
  Description of Artificial Sequence: Synthetic oligonucleotide
  Antisense Strand to SEQ ID NO: 409199
cauugggacacuuuaacuu

SEQ ID NO: 409201 - RNA, 19 nt, Artificial Sequence
  Description of Artificial Sequence: Synthetic oligonucleotide
  Sense Strand Starting at position 1153 of SEQ ID NO: 317809
agaucaguauuguuauaac

SEQ ID NO: 409202 - RNA, 19 nt, Artificial Sequence
  Description of Artificial Sequence: Synthetic oligonucleotide
  Antisense Strand to SEQ ID NO: 409201
guuauaacaauacugaucu

SEQ ID NO: 409203 - RNA, 19 nt, Artificial Sequence
  Description of Artificial Sequence: Synthetic oligonucleotide
  Sense Strand Starting at position 1153 of SEQ ID NO: 317865
uuuauauugauguaugggu

SEQ ID NO: 409204 - RNA, 19 nt, Artificial Sequence
  Description of Artificial Sequence: Synthetic oligonucleotide
  Antisense Strand to SEQ ID NO: 409203
acccauacaucaauauaaa

SEQ ID NO: 409205 - RNA, 19 nt, Artificial Sequence
  Description of Artificial Sequence: Synthetic oligonucleotide
  Sense Strand Starting at position 1153 of SEQ ID NO: 317867
uauauugauguauggguca

SEQ ID NO: 409206 - RNA, 19 nt, Artificial Sequence
  Description of Artificial Sequence: Synthetic oligonucleotide
  Antisense Strand to SEQ ID NO: 409205
ugacccauacaucaauaua

SEQ ID NO: 409207 - RNA, 19 nt, Artificial Sequence
  Description of Artificial Sequence: Synthetic oligonucleotide
  Sense Strand Starting at position 1153 of SEQ ID NO: 317870
auugauguaugggucaaca

SEQ ID NO: 409208 - RNA, 19 nt, Artificial Sequence
  Description of Artificial Sequence: Synthetic oligonucleotide
  Antisense Strand to SEQ ID NO: 409207
uguugacccauacaucaau

SEQ ID NO: 409209 - RNA, 19 nt, Artificial Sequence
  Description of Artificial Sequence: Synthetic oligonucleotide
  Sense Strand Starting at position 1153 of SEQ ID NO: 317890
acaucuauugagugcccau

SEQ ID NO: 409210 - RNA, 19 nt, Artificial Sequence
  Description of Artificial Sequence: Synthetic oligonucleotide
  Antisense Strand to SEQ ID NO: 409209
augggcacucaauagaugu

SEQ ID NO: 409211 - RNA, 19 nt, Artificial Sequence
  Description of Artificial Sequence: Synthetic oligonucleotide
  Sense Strand Starting at position 1153 of SEQ ID NO: 317893
ucuauugagugcccauaca

SEQ ID NO: 409212 - RNA, 19 nt, Artificial Sequence
  Description of Artificial Sequence: Synthetic oligonucleotide
  Antisense Strand to SEQ ID NO: 409211
uguaugggcacucaauaga

SEQ ID NO: 409213 - RNA, 19 nt, Artificial Sequence
  Description of Artificial Sequence: Synthetic oligonucleotide
  Sense Strand Starting at position 1153 of SEQ ID NO: 318017
ggcagaugauuauccucau

SEQ ID NO: 409214 - RNA, 19 nt, Artificial Sequence
  Description of Artificial Sequence: Synthetic oligonucleotide
  Antisense Strand to SEQ ID NO: 409213
augaggauaaucaucugcc

SEQ ID NO: 409215 - RNA, 19 nt, Artificial Sequence
  Description of Artificial Sequence: Synthetic oligonucleotide
  Sense Strand Starting at position 1153 of SEQ ID NO: 318018
gcagaugauuauccucauu

SEQ ID NO: 409216 - RNA, 19 nt, Artificial Sequence
  Description of Artificial Sequence: Synthetic oligonucleotide
  Antisense Strand to SEQ ID NO: 409215
aaugaggauaaucaucugc

SEQ ID NO: 409217 - RNA, 19 nt, Artificial Sequence
  Description of Artificial Sequence: Synthetic oligonucleotide
  Sense Strand Starting at position 1153 of SEQ ID NO: 318141
gcauuaauuguugaaaugu

SEQ ID NO: 409218 - RNA, 19 nt, Artificial Sequence
  Description of Artificial Sequence: Synthetic oligonucleotide
  Antisense Strand to SEQ ID NO: 409217
acauuucaacaauuaaugc

SEQ ID NO: 409219 - RNA, 19 nt, Artificial Sequence
  Description of Artificial Sequence: Synthetic oligonucleotide
  Sense Strand Starting at position 1153 of SEQ ID NO: 318419
guuaaugcagugagguguu

SEQ ID NO: 409220 - RNA, 19 nt, Artificial Sequence
  Description of Artificial Sequence: Synthetic oligonucleotide
  Antisense Strand to SEQ ID NO: 409219
aacaccucacugcauuaac

SEQ ID NO: 409221 - RNA, 19 nt, Artificial Sequence
  Description of Artificial Sequence: Synthetic oligonucleotide
  Sense Strand Starting at position 1153 of SEQ ID NO: 318422
aaugcagugagguguuaaa

SEQ ID NO: 409222 - RNA, 19 nt, Artificial Sequence
  Description of Artificial Sequence: Synthetic oligonucleotide
  Antisense Strand to SEQ ID NO: 409221
uuuaacaccucacugcauu

SEQ ID NO: 409223 - RNA, 19 nt, Artificial Sequence
  Description of Artificial Sequence: Synthetic oligonucleotide
  Sense Strand Starting at position 1153 of SEQ ID NO: 318944
gagcuuugccuaggaacau

SEQ ID NO: 409224 - RNA, 19 nt, Artificial Sequence
  Description of Artificial Sequence: Synthetic oligonucleotide
  Antisense Strand to SEQ ID NO: 409223
auguuccuaggcaaagcuc

SEQ ID NO: 409225 - RNA, 19 nt, Artificial Sequence
  Description of Artificial Sequence: Synthetic oligonucleotide
  Sense Strand Starting at position 1153 of SEQ ID NO: 319068
cuguaaggguaauugguau

SEQ ID NO: 409226 - RNA, 19 nt, Artificial Sequence
  Description of Artificial Sequence: Synthetic oligonucleotide
  Antisense Strand to SEQ ID NO: 409225
auaccaauuacccuuacag

SEQ ID NO: 409227 - RNA, 19 nt, Artificial Sequence
  Description of Artificial Sequence: Synthetic oligonucleotide
  Sense Strand Starting at position 1153 of SEQ ID NO: 319081
ugguaugguugcuuuagaa

SEQ ID NO: 409228 - RNA, 19 nt, Artificial Sequence
  Description of Artificial Sequence: Synthetic oligonucleotide
  Antisense Strand to SEQ ID NO: 409227
uucuaaagcaaccauacca

SEQ ID NO: 409229 - RNA, 19 nt, Artificial Sequence
  Description of Artificial Sequence: Synthetic oligonucleotide
  Sense Strand Starting at position 1153 of SEQ ID NO: 319119
acauauaccugccuuagga

SEQ ID NO: 409230 - RNA, 19 nt, Artificial Sequence
  Description of Artificial Sequence: Synthetic oligonucleotide
  Antisense Strand to SEQ ID NO: 409229
uccuaaggcagguauaugu

SEQ ID NO: 409231 - RNA, 19 nt, Artificial Sequence
  Description of Artificial Sequence: Synthetic oligonucleotide
  Sense Strand Starting at position 1154 of SEQ ID NO: 315265
cuuugucauuuccuggcaa

SEQ ID NO: 409232 - RNA, 19 nt, Artificial Sequence
  Description of Artificial Sequence: Synthetic oligonucleotide
  Antisense Strand to SEQ ID NO: 409231
uugccaggaaaugacaaag

SEQ ID NO: 409233 - RNA, 19 nt, Artificial Sequence
  Description of Artificial Sequence: Synthetic oligonucleotide
  Sense Strand Starting at position 1154 of SEQ ID NO: 315506
gagaaauagcucugugguc

SEQ ID NO: 409234 - RNA, 19 nt, Artificial Sequence
  Description of Artificial Sequence: Synthetic oligonucleotide
  Antisense Strand to SEQ ID NO: 409233
gaccacagagcuauuucuc

SEQ ID NO: 409235 - RNA, 19 nt, Artificial Sequence
  Description of Artificial Sequence: Synthetic oligonucleotide
  Sense Strand Starting at position 1154 of SEQ ID NO: 315507
agaaauagcucuguggucu

SEQ ID NO: 409236 - RNA, 19 nt, Artificial Sequence
  Description of Artificial Sequence: Synthetic oligonucleotide
  Antisense Strand to SEQ ID NO: 409235
agaccacagagcuauuucu

SEQ ID NO: 409237 - RNA, 19 nt, Artificial Sequence
  Description of Artificial Sequence: Synthetic oligonucleotide
  Sense Strand Starting at position 1154 of SEQ ID NO: 315610
gcucacauuccuggagaaa

SEQ ID NO: 409238 - RNA, 19 nt, Artificial Sequence
  Description of Artificial Sequence: Synthetic oligonucleotide
  Antisense Strand to SEQ ID NO: 409237
uuucuccaggaaugugagc

SEQ ID NO: 409239 - RNA, 19 nt, Artificial Sequence
  Description of Artificial Sequence: Synthetic oligonucleotide
  Sense Strand Starting at position 1154 of SEQ ID NO: 315691
cccaccauucccuagguua

SEQ ID NO: 409240 - RNA, 19 nt, Artificial Sequence
  Description of Artificial Sequence: Synthetic oligonucleotide
  Antisense Strand to SEQ ID NO: 409239
uaaccuagggaaugguggg

SEQ ID NO: 409241 - RNA, 19 nt, Artificial Sequence
  Description of Artificial Sequence: Synthetic oligonucleotide
  Sense Strand Starting at position 1154 of SEQ ID NO: 315784
ucaccauucuaaguuggaa

SEQ ID NO: 409242 - RNA, 19 nt, Artificial Sequence
  Description of Artificial Sequence: Synthetic oligonucleotide
  Antisense Strand to SEQ ID NO: 409241
uuccaacuuagaaugguga

SEQ ID NO: 409243 - RNA, 19 nt, Artificial Sequence
  Description of Artificial Sequence: Synthetic oligonucleotide
  Sense Strand Starting at position 1154 of SEQ ID NO: 315787
ccauucuaaguuggaaaca

SEQ ID NO: 409244 - RNA, 19 nt, Artificial Sequence
  Description of Artificial Sequence: Synthetic oligonucleotide
  Antisense Strand to SEQ ID NO: 409243
uguuuccaacuuagaaugg

SEQ ID NO: 409245 - RNA, 19 nt, Artificial Sequence
  Description of Artificial Sequence: Synthetic oligonucleotide
  Sense Strand Starting at position 1154 of SEQ ID NO: 316119
gccacuacaugugugauuu

SEQ ID NO: 409246 - RNA, 19 nt, Artificial Sequence
  Description of Artificial Sequence: Synthetic oligonucleotide
  Antisense Strand to SEQ ID NO: 409245
aaaucacacauguaguggc

SEQ ID NO: 409247 - RNA, 19 nt, Artificial Sequence
  Description of Artificial Sequence: Synthetic oligonucleotide
  Sense Strand Starting at position 1154 of SEQ ID NO: 316146
ugaugucaauacuugauau

SEQ ID NO: 409248 - RNA, 19 nt, Artificial Sequence
  Description of Artificial Sequence: Synthetic oligonucleotide
  Antisense Strand to SEQ ID NO: 409247
auaucaaguauugacauca

SEQ ID NO: 409249 - RNA, 19 nt, Artificial Sequence
  Description of Artificial Sequence: Synthetic oligonucleotide
  Sense Strand Starting at position 1154 of SEQ ID NO: 316323
uuaugugucuaagcuaaca

SEQ ID NO: 409250 - RNA, 19 nt, Artificial Sequence
  Description of Artificial Sequence: Synthetic oligonucleotide
  Antisense Strand to SEQ ID NO: 409249
uguuagcuuagacacauaa

SEQ ID NO: 409251 - RNA, 19 nt, Artificial Sequence
  Description of Artificial Sequence: Synthetic oligonucleotide
  Sense Strand Starting at position 1154 of SEQ ID NO: 316388
uuuccuguugcauaaagua

SEQ ID NO: 409252 - RNA, 19 nt, Artificial Sequence
  Description of Artificial Sequence: Synthetic oligonucleotide
  Antisense Strand to SEQ ID NO: 409251
uacuuuaugcaacaggaaa

SEQ ID NO: 409253 - RNA, 19 nt, Artificial Sequence
  Description of Artificial Sequence: Synthetic oligonucleotide
  Sense Strand Starting at position 1154 of SEQ ID NO: 317723
agggaauaauccgcuguua

SEQ ID NO: 409254 - RNA, 19 nt, Artificial Sequence
  Description of Artificial Sequence: Synthetic oligonucleotide
  Antisense Strand to SEQ ID NO: 409253
uaacagcggauuauucccu

SEQ ID NO: 409255 - RNA, 19 nt, Artificial Sequence
  Description of Artificial Sequence: Synthetic oligonucleotide
  Sense Strand Starting at position 1154 of SEQ ID NO: 317725
ggaauaauccgcuguuacu

SEQ ID NO: 409256 - RNA, 19 nt, Artificial Sequence
  Description of Artificial Sequence: Synthetic oligonucleotide
  Antisense Strand to SEQ ID NO: 409255
aguaacagcggauuauucc

SEQ ID NO: 409257 - RNA, 19 nt, Artificial Sequence
  Description of Artificial Sequence: Synthetic oligonucleotide
  Sense Strand Starting at position 1154 of SEQ ID NO: 317913
cuacucugucauggaagga

SEQ ID NO: 409258 - RNA, 19 nt, Artificial Sequence
  Description of Artificial Sequence: Synthetic oligonucleotide
  Antisense Strand to SEQ ID NO: 409257
uccuuccaugacagaguag

SEQ ID NO: 409259 - RNA, 19 nt, Artificial Sequence
  Description of Artificial Sequence: Synthetic oligonucleotide
  Sense Strand Starting at position 1154 of SEQ ID NO: 317998
cucacugaccagugagaga

SEQ ID NO: 409260 - RNA, 19 nt, Artificial Sequence
  Description of Artificial Sequence: Synthetic oligonucleotide
  Antisense Strand to SEQ ID NO: 409259
ucucucacuggucagugag

SEQ ID NO: 409261 - RNA, 19 nt, Artificial Sequence
  Description of Artificial Sequence: Synthetic oligonucleotide
  Sense Strand Starting at position 1154 of SEQ ID NO: 318183
ccuugaccucugugaagac

SEQ ID NO: 409262 - RNA, 19 nt, Artificial Sequence
  Description of Artificial Sequence: Synthetic oligonucleotide
  Antisense Strand to SEQ ID NO: 409261
gucuucacagaggucaagg

SEQ ID NO: 409263 - RNA, 19 nt, Artificial Sequence
  Description of Artificial Sequence: Synthetic oligonucleotide
  Sense Strand Starting at position 1154 of SEQ ID NO: 318235
uaaaucuugcgugacucuu

SEQ ID NO: 409264 - RNA, 19 nt, Artificial Sequence
  Description of Artificial Sequence: Synthetic oligonucleotide
  Antisense Strand to SEQ ID NO: 409263
aagagucacgcaagauuua

SEQ ID NO: 409265 - RNA, 19 nt, Artificial Sequence
  Description of Artificial Sequence: Synthetic oligonucleotide
  Sense Strand Starting at position 1154 of SEQ ID NO: 318318
gcagauaggcuuuacagca

SEQ ID NO: 409266 - RNA, 19 nt, Artificial Sequence
  Description of Artificial Sequence: Synthetic oligonucleotide
  Antisense Strand to SEQ ID NO: 409265
ugcuguaaagccuaucugc

SEQ ID NO: 409267 - RNA, 19 nt, Artificial Sequence
  Description of Artificial Sequence: Synthetic oligonucleotide
  Sense Strand Starting at position 1154 of SEQ ID NO: 318347
ggugauaugugacccugga

SEQ ID NO: 409268 - RNA, 19 nt, Artificial Sequence
  Description of Artificial Sequence: Synthetic oligonucleotide
  Antisense Strand to SEQ ID NO: 409267
uccagggucacauaucacc

SEQ ID NO: 409269 - RNA, 19 nt, Artificial Sequence
  Description of Artificial Sequence: Synthetic oligonucleotide
  Sense Strand Starting at position 1154 of SEQ ID NO: 318351
auaugugacccuggaucaa

SEQ ID NO: 409270 - RNA, 19 nt, Artificial Sequence
  Description of Artificial Sequence: Synthetic oligonucleotide
  Antisense Strand to SEQ ID NO: 409269
uugauccagggucacauau

SEQ ID NO: 409271 - RNA, 19 nt, Artificial Sequence
  Description of Artificial Sequence: Synthetic oligonucleotide
  Sense Strand Starting at position 1154 of SEQ ID NO: 318420
uuuccagaguuguuacaug

SEQ ID NO: 409272 - RNA, 19 nt, Artificial Sequence
  Description of Artificial Sequence: Synthetic oligonucleotide
  Antisense Strand to SEQ ID NO: 409271
cauguaacaacucuggaaa

SEQ ID NO: 409273 - RNA, 19 nt, Artificial Sequence
  Description of Artificial Sequence: Synthetic oligonucleotide
  Sense Strand Starting at position 1154 of SEQ ID NO: 318425
agaguuguuacauggagua

SEQ ID NO: 409274 - RNA, 19 nt, Artificial Sequence
  Description of Artificial Sequence: Synthetic oligonucleotide
  Antisense Strand to SEQ ID NO: 409273
uacuccauguaacaacucu

SEQ ID NO: 409275 - RNA, 19 nt, Artificial Sequence
  Description of Artificial Sequence: Synthetic oligonucleotide
  Sense Strand Starting at position 1154 of SEQ ID NO: 318427
aguuguuacauggaguaaa

SEQ ID NO: 409276 - RNA, 19 nt, Artificial Sequence
  Description of Artificial Sequence: Synthetic oligonucleotide
  Antisense Strand to SEQ ID NO: 409275
uuuacuccauguaacaacu

SEQ ID NO: 409277 - RNA, 19 nt, Artificial Sequence
  Description of Artificial Sequence: Synthetic oligonucleotide
  Sense Strand Starting at position 1154 of SEQ ID NO: 318477
agcaguagguauuccagua

SEQ ID NO: 409278 - RNA, 19 nt, Artificial Sequence
  Description of Artificial Sequence: Synthetic oligonucleotide
  Antisense Strand to SEQ ID NO: 409277
uacuggaauaccuacugcu

SEQ ID NO: 409279 - RNA, 19 nt, Artificial Sequence
  Description of Artificial Sequence: Synthetic oligonucleotide
  Sense Strand Starting at position 1154 of SEQ ID NO: 318482
uagguauuccaguagugau

SEQ ID NO: 409280 - RNA, 19 nt, Artificial Sequence
  Description of Artificial Sequence: Synthetic oligonucleotide
  Antisense Strand to SEQ ID NO: 409279
aucacuacuggaauaccua

SEQ ID NO: 409281 - RNA, 19 nt, Artificial Sequence
  Description of Artificial Sequence: Synthetic oligonucleotide
  Sense Strand Starting at position 1154 of SEQ ID NO: 318492
aguagugaugccugaauuc

SEQ ID NO: 409282 - RNA, 19 nt, Artificial Sequence
  Description of Artificial Sequence: Synthetic oligonucleotide
  Antisense Strand to SEQ ID NO: 409281
gaauucaggcaucacuacu

SEQ ID NO: 409283 - RNA, 19 nt, Artificial Sequence
  Description of Artificial Sequence: Synthetic oligonucleotide
  Sense Strand Starting at position 1154 of SEQ ID NO: 318519
auugguucucaguaaguau

SEQ ID NO: 409284 - RNA, 19 nt, Artificial Sequence
  Description of Artificial Sequence: Synthetic oligonucleotide
  Antisense Strand to SEQ ID NO: 409283
auacuuacugagaaccaau

SEQ ID NO: 409285 - RNA, 19 nt, Artificial Sequence
  Description of Artificial Sequence: Synthetic oligonucleotide
  Sense Strand Starting at position 1154 of SEQ ID NO: 318557
cagggaguggcuugucacu

SEQ ID NO: 409286 - RNA, 19 nt, Artificial Sequence
  Description of Artificial Sequence: Synthetic oligonucleotide
  Antisense Strand to SEQ ID NO: 409285
agugacaagccacucccug

SEQ ID NO: 409287 - RNA, 19 nt, Artificial Sequence
  Description of Artificial Sequence: Synthetic oligonucleotide
  Sense Strand Starting at position 1154 of SEQ ID NO: 318559
gggaguggcuugucacuaa

SEQ ID NO: 409288 - RNA, 19 nt, Artificial Sequence
  Description of Artificial Sequence: Synthetic oligonucleotide
  Antisense Strand to SEQ ID NO: 409287
uuagugacaagccacuccc

SEQ ID NO: 409289 - RNA, 19 nt, Artificial Sequence
  Description of Artificial Sequence: Synthetic oligonucleotide
  Sense Strand Starting at position 1154 of SEQ ID NO: 318587
gcaguucuugcuuccugua

SEQ ID NO: 409290 - RNA, 19 nt, Artificial Sequence
  Description of Artificial Sequence: Synthetic oligonucleotide
  Antisense Strand to SEQ ID NO: 409289
uacaggaagcaagaacugc

SEQ ID NO: 409291 - RNA, 19 nt, Artificial Sequence
  Description of Artificial Sequence: Synthetic oligonucleotide
  Sense Strand Starting at position 1154 of SEQ ID NO: 318659
ggugcuaucagagaagucu

SEQ ID NO: 409292 - RNA, 19 nt, Artificial Sequence
  Description of Artificial Sequence: Synthetic oligonucleotide
  Antisense Strand to SEQ ID NO: 409291
agacuucucugauagcacc

SEQ ID NO: 409293 - RNA, 19 nt, Artificial Sequence
  Description of Artificial Sequence: Synthetic oligonucleotide
  Sense Strand Starting at position 1154 of SEQ ID NO: 318749
gcugaaaugaaugggaagu

SEQ ID NO: 409294 - RNA, 19 nt, Artificial Sequence
  Description of Artificial Sequence: Synthetic oligonucleotide
  Antisense Strand to SEQ ID NO: 409293
acuucccauucauuucagc

SEQ ID NO: 409295 - RNA, 19 nt, Artificial Sequence
  Description of Artificial Sequence: Synthetic oligonucleotide
  Sense Strand Starting at position 1154 of SEQ ID NO: 318836
cacauaagaugugagaaau

SEQ ID NO: 409296 - RNA, 19 nt, Artificial Sequence
  Description of Artificial Sequence: Synthetic oligonucleotide
  Antisense Strand to SEQ ID NO: 409295
auuucucacaucuuaugug

SEQ ID NO: 409297 - RNA, 19 nt, Artificial Sequence
  Description of Artificial Sequence: Synthetic oligonucleotide
  Sense Strand Starting at position 1154 of SEQ ID NO: 318842
agaugugagaaaugcuauc

SEQ ID NO: 409298 - RNA, 19 nt, Artificial Sequence
  Description of Artificial Sequence: Synthetic oligonucleotide
  Antisense Strand to SEQ ID NO: 409297
gauagcauuucucacaucu

SEQ ID NO: 409299 - RNA, 19 nt, Artificial Sequence
  Description of Artificial Sequence: Synthetic oligonucleotide
  Sense Strand Starting at position 1154 of SEQ ID NO: 318906
ucauucugccucugagacu

SEQ ID NO: 409300 - RNA, 19 nt, Artificial Sequence
  Description of Artificial Sequence: Synthetic oligonucleotide
  Antisense Strand to SEQ ID NO: 409299
agucucagaggcagaauga

SEQ ID NO: 409301 - RNA, 19 nt, Artificial Sequence
  Description of Artificial Sequence: Synthetic oligonucleotide
  Sense Strand Starting at position 1154 of SEQ ID NO: 318963
ucuugaggcagcuauguuu

SEQ ID NO: 409302 - RNA, 19 nt, Artificial Sequence
  Description of Artificial Sequence: Synthetic oligonucleotide
  Antisense Strand to SEQ ID NO: 409301
aaacauagcugccucaaga

SEQ ID NO: 409303 - RNA, 19 nt, Artificial Sequence
  Description of Artificial Sequence: Synthetic oligonucleotide
  Sense Strand Starting at position 1154 of SEQ ID NO: 319031
uggagaagguauguaaguu

SEQ ID NO: 409304 - RNA, 19 nt, Artificial Sequence
  Description of Artificial Sequence: Synthetic oligonucleotide
  Antisense Strand to SEQ ID NO: 409303
aacuuacauaccuucucca

SEQ ID NO: 409305 - RNA, 19 nt, Artificial Sequence
  Description of Artificial Sequence: Synthetic oligonucleotide
  Sense Strand Starting at position 1154 of SEQ ID NO: 319047
guugaugguuccuccagga

SEQ ID NO: 409306 - RNA, 19 nt, Artificial Sequence
  Description of Artificial Sequence: Synthetic oligonucleotide
  Antisense Strand to SEQ ID NO: 409305
uccuggaggaaccaucaac

SEQ ID NO: 409307 - RNA, 19 nt, Artificial Sequence
  Description of Artificial Sequence: Synthetic oligonucleotide
  Sense Strand Starting at position 1154 of SEQ ID NO: 319152
auauucuggugacuagaau

SEQ ID NO: 409308 - RNA, 19 nt, Artificial Sequence
  Description of Artificial Sequence: Synthetic oligonucleotide
  Antisense Strand to SEQ ID NO: 409307
auucuagucaccagaauau

SEQ ID NO: 409309 - RNA, 19 nt, Artificial Sequence
  Description of Artificial Sequence: Synthetic oligonucleotide
  Sense Strand Starting at position 1154 of SEQ ID NO: 319160
gugacuagaauguaagcuu

SEQ ID NO: 409310 - RNA, 19 nt, Artificial Sequence
  Description of Artificial Sequence: Synthetic oligonucleotide
  Antisense Strand to SEQ ID NO: 409309
aagcuuacauucuagucac

SEQ ID NO: 409311 - RNA, 19 nt, Artificial Sequence
  Description of Artificial Sequence: Synthetic oligonucleotide
  Sense Strand Starting at position 1155 of SEQ ID NO: 315270
ugguguguacacgaacuaa

SEQ ID NO: 409312 - RNA, 19 nt, Artificial Sequence
  Description of Artificial Sequence: Synthetic oligonucleotide
  Antisense Strand to SEQ ID NO: 409311
uuaguucguguacacacca

SEQ ID NO: 409313 - RNA, 19 nt, Artificial Sequence
  Description of Artificial Sequence: Synthetic oligonucleotide
  Sense Strand Starting at position 1155 of SEQ ID NO: 315339
gaugucagcucuuugaacu

SEQ ID NO: 409314 - RNA, 19 nt, Artificial Sequence
  Description of Artificial Sequence: Synthetic oligonucleotide
  Antisense Strand to SEQ ID NO: 409313
aguucaaagagcugacauc

SEQ ID NO: 409315 - RNA, 19 nt, Artificial Sequence
  Description of Artificial Sequence: Synthetic oligonucleotide
  Sense Strand Starting at position 1155 of SEQ ID NO: 315425
ggaaauauuuauugaaugg

SEQ ID NO: 409316 - RNA, 19 nt, Artificial Sequence
  Description of Artificial Sequence: Synthetic oligonucleotide
  Antisense Strand to SEQ ID NO: 409315
ccauucaauaaauauuucc

SEQ ID NO: 409317 - RNA, 19 nt, Artificial Sequence
  Description of Artificial Sequence: Synthetic oligonucleotide
  Sense Strand Starting at position 1155 of SEQ ID NO: 315451
aaugaaugcgggcagaauu

SEQ ID NO: 409318 - RNA, 19 nt, Artificial Sequence
  Description of Artificial Sequence: Synthetic oligonucleotide
  Antisense Strand to SEQ ID NO: 409317
aauucugcccgcauucauu

SEQ ID NO: 409319 - RNA, 19 nt, Artificial Sequence
  Description of Artificial Sequence: Synthetic oligonucleotide
  Sense Strand Starting at position 1155 of SEQ ID NO: 315490
uuuccagaacugugaggau

SEQ ID NO: 409320 - RNA, 19 nt, Artificial Sequence
  Description of Artificial Sequence: Synthetic oligonucleotide
  Antisense Strand to SEQ ID NO: 409319
auccucacaguucuggaaa

SEQ ID NO: 409321 - RNA, 19 nt, Artificial Sequence
  Description of Artificial Sequence: Synthetic oligonucleotide
  Sense Strand Starting at position 1155 of SEQ ID NO: 315515
cuuguuuaacuugacugua

SEQ ID NO: 409322 - RNA, 19 nt, Artificial Sequence
  Description of Artificial Sequence: Synthetic oligonucleotide
  Antisense Strand to SEQ ID NO: 409321
uacagucaaguuaaacaag

SEQ ID NO: 409323 - RNA, 19 nt, Artificial Sequence
  Description of Artificial Sequence: Synthetic oligonucleotide
  Sense Strand Starting at position 1155 of SEQ ID NO: 315517
uguuuaacuugacuguaag

SEQ ID NO: 409324 - RNA, 19 nt, Artificial Sequence
  Description of Artificial Sequence: Synthetic oligonucleotide
  Antisense Strand to SEQ ID NO: 409323
cuuacagucaaguuaaaca

SEQ ID NO: 409325 - RNA, 19 nt, Artificial Sequence
  Description of Artificial Sequence: Synthetic oligonucleotide
  Sense Strand Starting at position 1155 of SEQ ID NO: 315596
ugguguaugcaauauugau

SEQ ID NO: 409326 - RNA, 19 nt, Artificial Sequence
  Description of Artificial Sequence: Synthetic oligonucleotide
  Antisense Strand to SEQ ID NO: 409325
aucaauauugcauacacca

SEQ ID NO: 409327 - RNA, 19 nt, Artificial Sequence
  Description of Artificial Sequence: Synthetic oligonucleotide
  Sense Strand Starting at position 1155 of SEQ ID NO: 315669
agaucauccguguaaacaa

SEQ ID NO: 409328 - RNA, 19 nt, Artificial Sequence
  Description of Artificial Sequence: Synthetic oligonucleotide
  Antisense Strand to SEQ ID NO: 409327
uuguuuacacggaugaucu

SEQ ID NO: 409329 - RNA, 19 nt, Artificial Sequence
  Description of Artificial Sequence: Synthetic oligonucleotide
  Sense Strand Starting at position 1155 of SEQ ID NO: 315679
uguaaacaaucaucacagu

SEQ ID NO: 409330 - RNA, 19 nt, Artificial Sequence
  Description of Artificial Sequence: Synthetic oligonucleotide
  Antisense Strand to SEQ ID NO: 409329
acugugaugauuguuuaca

SEQ ID NO: 409331 - RNA, 19 nt, Artificial Sequence
  Description of Artificial Sequence: Synthetic oligonucleotide
  Sense Strand Starting at position 1155 of SEQ ID NO: 315714
gauauaagcccuuggagcu

SEQ ID NO: 409332 - RNA, 19 nt, Artificial Sequence
  Description of Artificial Sequence: Synthetic oligonucleotide
  Antisense Strand to SEQ ID NO: 409331
agcuccaagggcuuauauc

SEQ ID NO: 409333 - RNA, 19 nt, Artificial Sequence
  Description of Artificial Sequence: Synthetic oligonucleotide
  Sense Strand Starting at position 1155 of SEQ ID NO: 315715
auauaagcccuuggagcua

SEQ ID NO: 409334 - RNA, 19 nt, Artificial Sequence
  Description of Artificial Sequence: Synthetic oligonucleotide
  Antisense Strand to SEQ ID NO: 409333
uagcuccaagggcuuauau

SEQ ID NO: 409335 - RNA, 19 nt, Artificial Sequence
  Description of Artificial Sequence: Synthetic oligonucleotide
  Sense Strand Starting at position 1155 of SEQ ID NO: 315874
acgugugaccugcagauuu

SEQ ID NO: 409336 - RNA, 19 nt, Artificial Sequence
  Description of Artificial Sequence: Synthetic oligonucleotide
  Antisense Strand to SEQ ID NO: 409335
aaaucugcaggucacacgu

SEQ ID NO: 409337 - RNA, 19 nt, Artificial Sequence
  Description of Artificial Sequence: Synthetic oligonucleotide
  Sense Strand Starting at position 1155 of SEQ ID NO: 316042
agcccagucgcugaagaaa

SEQ ID NO: 409338 - RNA, 19 nt, Artificial Sequence
  Description of Artificial Sequence: Synthetic oligonucleotide
  Antisense Strand to SEQ ID NO: 409337
uuucuucagcgacugggcu

SEQ ID NO: 409339 - RNA, 19 nt, Artificial Sequence
  Description of Artificial Sequence: Synthetic oligonucleotide
  Sense Strand Starting at position 1155 of SEQ ID NO: 316053
ugaagaaagccauggcaaa

SEQ ID NO: 409340 - RNA, 19 nt, Artificial Sequence
  Description of Artificial Sequence: Synthetic oligonucleotide
  Antisense Strand to SEQ ID NO: 409339
uuugccauggcuuucuuca

SEQ ID NO: 409341 - RNA, 19 nt, Artificial Sequence
  Description of Artificial Sequence: Synthetic oligonucleotide
  Sense Strand Starting at position 1155 of SEQ ID NO: 316080
ugggcucuucuggguauaa

SEQ ID NO: 409342 - RNA, 19 nt, Artificial Sequence
  Description of Artificial Sequence: Synthetic oligonucleotide
  Antisense Strand to SEQ ID NO: 409341
uuauacccagaagagccca

SEQ ID NO: 409343 - RNA, 19 nt, Artificial Sequence
  Description of Artificial Sequence: Synthetic oligonucleotide
  Sense Strand Starting at position 1155 of SEQ ID NO: 316081
gggcucuucuggguauaau

SEQ ID NO: 409344 - RNA, 19 nt, Artificial Sequence
  Description of Artificial Sequence: Synthetic oligonucleotide
  Antisense Strand to SEQ ID NO: 409343
auuauacccagaagagccc

SEQ ID NO: 409345 - RNA, 19 nt, Artificial Sequence
  Description of Artificial Sequence: Synthetic oligonucleotide
  Sense Strand Starting at position 1155 of SEQ ID NO: 316082
ggcucuucuggguauaauc

SEQ ID NO: 409346 - RNA, 19 nt, Artificial Sequence
  Description of Artificial Sequence: Synthetic oligonucleotide
  Antisense Strand to SEQ ID NO: 409345
gauuauacccagaagagcc

SEQ ID NO: 409347 - RNA, 19 nt, Artificial Sequence
  Description of Artificial Sequence: Synthetic oligonucleotide
  Sense Strand Starting at position 1155 of SEQ ID NO: 316180
uuauaacagucuguaauag

SEQ ID NO: 409348 - RNA, 19 nt, Artificial Sequence
  Description of Artificial Sequence: Synthetic oligonucleotide
  Antisense Strand to SEQ ID NO: 409347
cuauuacagacuguuauaa

SEQ ID NO: 409349 - RNA, 19 nt, Artificial Sequence
  Description of Artificial Sequence: Synthetic oligonucleotide
  Sense Strand Starting at position 1155 of SEQ ID NO: 316488
ugagacgacacuugucuaa

SEQ ID NO: 409350 - RNA, 19 nt, Artificial Sequence
  Description of Artificial Sequence: Synthetic oligonucleotide
  Antisense Strand to SEQ ID NO: 409349
uuagacaagugucgucuca

SEQ ID NO: 409351 - RNA, 19 nt, Artificial Sequence
  Description of Artificial Sequence: Synthetic oligonucleotide
  Sense Strand Starting at position 1155 of SEQ ID NO: 317343
gggaaacuuugggucuguu

SEQ ID NO: 409352 - RNA, 19 nt, Artificial Sequence
  Description of Artificial Sequence: Synthetic oligonucleotide
  Antisense Strand to SEQ ID NO: 409351
aacagacccaaaguuuccc

SEQ ID NO: 409353 - RNA, 19 nt, Artificial Sequence
  Description of Artificial Sequence: Synthetic oligonucleotide
  Sense Strand Starting at position 1155 of SEQ ID NO: 317451
accugagacaucuguguga

SEQ ID NO: 409354 - RNA, 19 nt, Artificial Sequence
  Description of Artificial Sequence: Synthetic oligonucleotide
  Antisense Strand to SEQ ID NO: 409353
ucacacagaugucucaggu

SEQ ID NO: 409355 - RNA, 19 nt, Artificial Sequence
  Description of Artificial Sequence: Synthetic oligonucleotide
  Sense Strand Starting at position 1155 of SEQ ID NO: 317454
ugagacaucugugugaguu

SEQ ID NO: 409356 - RNA, 19 nt, Artificial Sequence
  Description of Artificial Sequence: Synthetic oligonucleotide
  Antisense Strand to SEQ ID NO: 409355
aacucacacagaugucuca

SEQ ID NO: 409357 - RNA, 19 nt, Artificial Sequence
  Description of Artificial Sequence: Synthetic oligonucleotide
  Sense Strand Starting at position 1155 of SEQ ID NO: 317468
gaguucugaugacuuccaa

SEQ ID NO: 409358 - RNA, 19 nt, Artificial Sequence
  Description of Artificial Sequence: Synthetic oligonucleotide
  Antisense Strand to SEQ ID NO: 409357
uuggaagucaucagaacuc

SEQ ID NO: 409359 - RNA, 19 nt, Artificial Sequence
  Description of Artificial Sequence: Synthetic oligonucleotide
  Sense Strand Starting at position 1155 of SEQ ID NO: 317628
caggauaagcauugucacu

SEQ ID NO: 409360 - RNA, 19 nt, Artificial Sequence
  Description of Artificial Sequence: Synthetic oligonucleotide
  Antisense Strand to SEQ ID NO: 409359
agugacaaugcuuauccug

SEQ ID NO: 409361 - RNA, 19 nt, Artificial Sequence
  Description of Artificial Sequence: Synthetic oligonucleotide
  Sense Strand Starting at position 1155 of SEQ ID NO: 317630
ggauaagcauugucacuuc

SEQ ID NO: 409362 - RNA, 19 nt, Artificial Sequence
  Description of Artificial Sequence: Synthetic oligonucleotide
  Antisense Strand to SEQ ID NO: 409361
gaagugacaaugcuuaucc

SEQ ID NO: 409363 - RNA, 19 nt, Artificial Sequence
  Description of Artificial Sequence: Synthetic oligonucleotide
  Sense Strand Starting at position 1155 of SEQ ID NO: 317817
auuaaucuugaauguggga

SEQ ID NO: 409364 - RNA, 19 nt, Artificial Sequence
  Description of Artificial Sequence: Synthetic oligonucleotide
  Antisense Strand to SEQ ID NO: 409363
ucccacauucaagauuaau

SEQ ID NO: 409365 - RNA, 19 nt, Artificial Sequence
  Description of Artificial Sequence: Synthetic oligonucleotide
  Sense Strand Starting at position 1155 of SEQ ID NO: 317911
gaaugaaauuuagguaccu

SEQ ID NO: 409366 - RNA, 19 nt, Artificial Sequence
  Description of Artificial Sequence: Synthetic oligonucleotide
  Antisense Strand to SEQ ID NO: 409365
agguaccuaaauuucauuc

SEQ ID NO: 409367 - RNA, 19 nt, Artificial Sequence
  Description of Artificial Sequence: Synthetic oligonucleotide
  Sense Strand Starting at position 1155 of SEQ ID NO: 318046
ucuugaaacuuagugaaag

SEQ ID NO: 409368 - RNA, 19 nt, Artificial Sequence
  Description of Artificial Sequence: Synthetic oligonucleotide
  Antisense Strand to SEQ ID NO: 409367
cuuucacuaaguuucaaga

SEQ ID NO: 409369 - RNA, 19 nt, Artificial Sequence
  Description of Artificial Sequence: Synthetic oligonucleotide
  Sense Strand Starting at position 1155 of SEQ ID NO: 318052
aacuuagugaaaggugguu

SEQ ID NO: 409370 - RNA, 19 nt, Artificial Sequence
  Description of Artificial Sequence: Synthetic oligonucleotide
  Antisense Strand to SEQ ID NO: 409369
aaccaccuuucacuaaguu

SEQ ID NO: 409371 - RNA, 19 nt, Artificial Sequence
  Description of Artificial Sequence: Synthetic oligonucleotide
  Sense Strand Starting at position 1155 of SEQ ID NO: 318082
cucuuagugggcuaaucuu

SEQ ID NO: 409372 - RNA, 19 nt, Artificial Sequence
  Description of Artificial Sequence: Synthetic oligonucleotide
  Antisense Strand to SEQ ID NO: 409371
aagauuagcccacuaagag

SEQ ID NO: 409373 - RNA, 19 nt, Artificial Sequence
  Description of Artificial Sequence: Synthetic oligonucleotide
  Sense Strand Starting at position 1155 of SEQ ID NO: 318090
gggcuaaucuugcugaaua

SEQ ID NO: 409374 - RNA, 19 nt, Artificial Sequence
  Description of Artificial Sequence: Synthetic oligonucleotide
  Antisense Strand to SEQ ID NO: 409373
uauucagcaagauuagccc

SEQ ID NO: 409375 - RNA, 19 nt, Artificial Sequence
  Description of Artificial Sequence: Synthetic oligonucleotide
  Sense Strand Starting at position 1155 of SEQ ID NO: 318092
gcuaaucuugcugaauaua

SEQ ID NO: 409376 - RNA, 19 nt, Artificial Sequence
  Description of Artificial Sequence: Synthetic oligonucleotide
  Antisense Strand to SEQ ID NO: 409375
uauauucagcaagauuagc

SEQ ID NO: 409377 - RNA, 19 nt, Artificial Sequence
  Description of Artificial Sequence: Synthetic oligonucleotide
  Sense Strand Starting at position 1155 of SEQ ID NO: 318131
acaagugaguucuuucuau

SEQ ID NO: 409378 - RNA, 19 nt, Artificial Sequence
  Description of Artificial Sequence: Synthetic oligonucleotide
  Antisense Strand to SEQ ID NO: 409377
auagaaagaacucacuugu

SEQ ID NO: 409379 - RNA, 19 nt, Artificial Sequence
  Description of Artificial Sequence: Synthetic oligonucleotide
  Sense Strand Starting at position 1155 of SEQ ID NO: 318140
uucuuucuaugagcugaaa

SEQ ID NO: 409380 - RNA, 19 nt, Artificial Sequence
  Description of Artificial Sequence: Synthetic oligonucleotide
  Antisense Strand to SEQ ID NO: 409379
uuucagcucauagaaagaa

SEQ ID NO: 409381 - RNA, 19 nt, Artificial Sequence
  Description of Artificial Sequence: Synthetic oligonucleotide
  Sense Strand Starting at position 1155 of SEQ ID NO: 318412
acaucaaguagugauaugu

SEQ ID NO: 409382 - RNA, 19 nt, Artificial Sequence
  Description of Artificial Sequence: Synthetic oligonucleotide
  Antisense Strand to SEQ ID NO: 409381
acauaucacuacuugaugu

SEQ ID NO: 409383 - RNA, 19 nt, Artificial Sequence
  Description of Artificial Sequence: Synthetic oligonucleotide
  Sense Strand Starting at position 1155 of SEQ ID NO: 318495
aguccaucuguuuacuaua

SEQ ID NO: 409384 - RNA, 19 nt, Artificial Sequence
  Description of Artificial Sequence: Synthetic oligonucleotide
  Antisense Strand to SEQ ID NO: 409383
uauaguaaacagauggacu

SEQ ID NO: 409385 - RNA, 19 nt, Artificial Sequence
  Description of Artificial Sequence: Synthetic oligonucleotide
  Sense Strand Starting at position 1155 of SEQ ID NO: 318690
acuagaaauuuagagagua

SEQ ID NO: 409386 - RNA, 19 nt, Artificial Sequence
  Description of Artificial Sequence: Synthetic oligonucleotide
  Antisense Strand to SEQ ID NO: 409385
uacucucuaaauuucuagu

SEQ ID NO: 409387 - RNA, 19 nt, Artificial Sequence
  Description of Artificial Sequence: Synthetic oligonucleotide
  Sense Strand Starting at position 1155 of SEQ ID NO: 318864
aucaauuacuuagugugua

SEQ ID NO: 409388 - RNA, 19 nt, Artificial Sequence
  Description of Artificial Sequence: Synthetic oligonucleotide
  Antisense Strand to SEQ ID NO: 409387
uacacacuaaguaauugau

SEQ ID NO: 409389 - RNA, 19 nt, Artificial Sequence
  Description of Artificial Sequence: Synthetic oligonucleotide
  Sense Strand Starting at position 1155 of SEQ ID NO: 318892
guauguauaugaucuuaug

SEQ ID NO: 409390 - RNA, 19 nt, Artificial Sequence
  Description of Artificial Sequence: Synthetic oligonucleotide
  Antisense Strand to SEQ ID NO: 409389
cauaagaucauauacauac

SEQ ID NO: 409391 - RNA, 19 nt, Artificial Sequence
  Description of Artificial Sequence: Synthetic oligonucleotide
  Sense Strand Starting at position 1156 of SEQ ID NO: 315277
uuccaugcuggugaguuua

SEQ ID NO: 409392 - RNA, 19 nt, Artificial Sequence
  Description of Artificial Sequence: Synthetic oligonucleotide
  Antisense Strand to SEQ ID NO: 409391
uaaacucaccagcauggaa

SEQ ID NO: 409393 - RNA, 19 nt, Artificial Sequence
  Description of Artificial Sequence: Synthetic oligonucleotide
  Sense Strand Starting at position 1156 of SEQ ID NO: 315288
ugaguuuacuuagcaguaa

SEQ ID NO: 409394 - RNA, 19 nt, Artificial Sequence
  Description of Artificial Sequence: Synthetic oligonucleotide
  Antisense Strand to SEQ ID NO: 409393
uuacugcuaaguaaacuca

SEQ ID NO: 409395 - RNA, 19 nt, Artificial Sequence
  Description of Artificial Sequence: Synthetic oligonucleotide
  Sense Strand Starting at position 1156 of SEQ ID NO: 315399
agguuugucgucuaagacu

SEQ ID NO: 409396 - RNA, 19 nt, Artificial Sequence
  Description of Artificial Sequence: Synthetic oligonucleotide
  Antisense Strand to SEQ ID NO: 409395
agucuuagacgacaaaccu

SEQ ID NO: 409397 - RNA, 19 nt, Artificial Sequence
  Description of Artificial Sequence: Synthetic oligonucleotide
  Sense Strand Starting at position 1156 of SEQ ID NO: 315432
gcuuauugggaccaguaac

SEQ ID NO: 409398 - RNA, 19 nt, Artificial Sequence
  Description of Artificial Sequence: Synthetic oligonucleotide
  Antisense Strand to SEQ ID NO: 409397
guuacuggucccaauaagc

SEQ ID NO: 409399 - RNA, 19 nt, Artificial Sequence
  Description of Artificial Sequence: Synthetic oligonucleotide
  Sense Strand Starting at position 1156 of SEQ ID NO: 315598
aguagauaugaagguuagu

SEQ ID NO: 409400 - RNA, 19 nt, Artificial Sequence
  Description of Artificial Sequence: Synthetic oligonucleotide
  Antisense Strand to SEQ ID NO: 409399
acuaaccuucauaucuacu

SEQ ID NO: 409401 - RNA, 19 nt, Artificial Sequence
  Description of Artificial Sequence: Synthetic oligonucleotide
  Sense Strand Starting at position 1156 of SEQ ID NO: 315703
gcccuaggccugcaugaua

SEQ ID NO: 409402 - RNA, 19 nt, Artificial Sequence
  Description of Artificial Sequence: Synthetic oligonucleotide
  Antisense Strand to SEQ ID NO: 409401
uaucaugcaggccuagggc

SEQ ID NO: 409403 - RNA, 19 nt, Artificial Sequence
  Description of Artificial Sequence: Synthetic oligonucleotide
  Sense Strand Starting at position 1156 of SEQ ID NO: 315760
gucagaccucgucuugcuu

SEQ ID NO: 409404 - RNA, 19 nt, Artificial Sequence
  Description of Artificial Sequence: Synthetic oligonucleotide
  Antisense Strand to SEQ ID NO: 409403
aagcaagacgaggucugac

SEQ ID NO: 409405 - RNA, 19 nt, Artificial Sequence
  Description of Artificial Sequence: Synthetic oligonucleotide
  Sense Strand Starting at position 1156 of SEQ ID NO: 315891
aucaguuuguuuccauuaa

SEQ ID NO: 409406 - RNA, 19 nt, Artificial Sequence
  Description of Artificial Sequence: Synthetic oligonucleotide
  Antisense Strand to SEQ ID NO: 409405
uuaauggaaacaaacugau

SEQ ID NO: 409407 - RNA, 19 nt, Artificial Sequence
  Description of Artificial Sequence: Synthetic oligonucleotide
  Sense Strand Starting at position 1156 of SEQ ID NO: 315895
guuuguuuccauuaaagca

SEQ ID NO: 409408 - RNA, 19 nt, Artificial Sequence
  Description of Artificial Sequence: Synthetic oligonucleotide
  Antisense Strand to SEQ ID NO: 409407
ugcuuuaauggaaacaaac

SEQ ID NO: 409409 - RNA, 19 nt, Artificial Sequence
  Description of Artificial Sequence: Synthetic oligonucleotide
  Sense Strand Starting at position 1156 of SEQ ID NO: 316414
guauauggaguuuaaguaa

SEQ ID NO: 409410 - RNA, 19 nt, Artificial Sequence
  Description of Artificial Sequence: Synthetic oligonucleotide
  Antisense Strand to SEQ ID NO: 409409
uuacuuaaacuccauauac

SEQ ID NO: 409411 - RNA, 19 nt, Artificial Sequence
  Description of Artificial Sequence: Synthetic oligonucleotide
  Sense Strand Starting at position 1156 of SEQ ID NO: 316436
ucacucugacacugaugaa

SEQ ID NO: 409412 - RNA, 19 nt, Artificial Sequence
  Description of Artificial Sequence: Synthetic oligonucleotide
  Antisense Strand to SEQ ID NO: 409411
uucaucagugucagaguga

SEQ ID NO: 409413 - RNA, 19 nt, Artificial Sequence
  Description of Artificial Sequence: Synthetic oligonucleotide
  Sense Strand Starting at position 1156 of SEQ ID NO: 316656
acagccucuuugguuuaaa

SEQ ID NO: 409414 - RNA, 19 nt, Artificial Sequence
  Description of Artificial Sequence: Synthetic oligonucleotide
  Antisense Strand to SEQ ID NO: 409413
uuuaaaccaaagaggcugu

SEQ ID NO: 409415 - RNA, 19 nt, Artificial Sequence
  Description of Artificial Sequence: Synthetic oligonucleotide
  Sense Strand Starting at position 1156 of SEQ ID NO: 316659
gccucuuugguuuaaacau

SEQ ID NO: 409416 - RNA, 19 nt, Artificial Sequence
  Description of Artificial Sequence: Synthetic oligonucleotide
  Antisense Strand to SEQ ID NO: 409415
auguuuaaaccaaagaggc

SEQ ID NO: 409417 - RNA, 19 nt, Artificial Sequence
  Description of Artificial Sequence: Synthetic oligonucleotide
  Sense Strand Starting at position 1156 of SEQ ID NO: 316710
agagauuauuacuagagac

SEQ ID NO: 409418 - RNA, 19 nt, Artificial Sequence
  Description of Artificial Sequence: Synthetic oligonucleotide
  Antisense Strand to SEQ ID NO: 409417
gucucuaguaauaaucucu

SEQ ID NO: 409419 - RNA, 19 nt, Artificial Sequence
  Description of Artificial Sequence: Synthetic oligonucleotide
  Sense Strand Starting at position 1156 of SEQ ID NO: 316815
gcuguaaaucaagauagcu

SEQ ID NO: 409420 - RNA, 19 nt, Artificial Sequence
  Description of Artificial Sequence: Synthetic oligonucleotide
  Antisense Strand to SEQ ID NO: 409419
agcuaucuugauuuacagc

SEQ ID NO: 409421 - RNA, 19 nt, Artificial Sequence
  Description of Artificial Sequence: Synthetic oligonucleotide
  Sense Strand Starting at position 1156 of SEQ ID NO: 316823
ucaagauagcuguaaacuu

SEQ ID NO: 409422 - RNA, 19 nt, Artificial Sequence
  Description of Artificial Sequence: Synthetic oligonucleotide
  Antisense Strand to SEQ ID NO: 409421
aaguuuacagcuaucuuga

SEQ ID NO: 409423 - RNA, 19 nt, Artificial Sequence
  Description of Artificial Sequence: Synthetic oligonucleotide
  Sense Strand Starting at position 1156 of SEQ ID NO: 316833
uguaaacuuaccggagcaa

SEQ ID NO: 409424 - RNA, 19 nt, Artificial Sequence
  Description of Artificial Sequence: Synthetic oligonucleotide
  Antisense Strand to SEQ ID NO: 409423
uugcuccgguaaguuuaca

SEQ ID NO: 409425 - RNA, 19 nt, Artificial Sequence
  Description of Artificial Sequence: Synthetic oligonucleotide
  Sense Strand Starting at position 1156 of SEQ ID NO: 316834
guaaacuuaccggagcaaa

SEQ ID NO: 409426 - RNA, 19 nt, Artificial Sequence
  Description of Artificial Sequence: Synthetic oligonucleotide
  Antisense Strand to SEQ ID NO: 409425
uuugcuccgguaaguuuac

SEQ ID NO: 409427 - RNA, 19 nt, Artificial Sequence
  Description of Artificial Sequence: Synthetic oligonucleotide
  Sense Strand Starting at position 1156 of SEQ ID NO: 317401
cgaauagauuugcauagau

SEQ ID NO: 409428 - RNA, 19 nt, Artificial Sequence
  Description of Artificial Sequence: Synthetic oligonucleotide
  Antisense Strand to SEQ ID NO: 409427
aucuaugcaaaucuauucg

SEQ ID NO: 409429 - RNA, 19 nt, Artificial Sequence
  Description of Artificial Sequence: Synthetic oligonucleotide
  Sense Strand Starting at position 1156 of SEQ ID NO: 317411
ugcauagauuaaguaaaug

SEQ ID NO: 409430 - RNA, 19 nt, Artificial Sequence
  Description of Artificial Sequence: Synthetic oligonucleotide
  Antisense Strand to SEQ ID NO: 409429
cauuuacuuaaucuaugca

SEQ ID NO: 409431 - RNA, 19 nt, Artificial Sequence
  Description of Artificial Sequence: Synthetic oligonucleotide
  Sense Strand Starting at position 1156 of SEQ ID NO: 317507
cucguacacuguccauaaa

SEQ ID NO: 409432 - RNA, 19 nt, Artificial Sequence
  Description of Artificial Sequence: Synthetic oligonucleotide
  Antisense Strand to SEQ ID NO: 409431
uuuauggacaguguacgag

SEQ ID NO: 409433 - RNA, 19 nt, Artificial Sequence
  Description of Artificial Sequence: Synthetic oligonucleotide
  Sense Strand Starting at position 1156 of SEQ ID NO: 317508
ucguacacuguccauaaau

SEQ ID NO: 409434 - RNA, 19 nt, Artificial Sequence
  Description of Artificial Sequence: Synthetic oligonucleotide
  Antisense Strand to SEQ ID NO: 409433
auuuauggacaguguacga

SEQ ID NO: 409435 - RNA, 19 nt, Artificial Sequence
  Description of Artificial Sequence: Synthetic oligonucleotide
  Sense Strand Starting at position 1156 of SEQ ID NO: 317615
acaggaguguuacuuaaag

SEQ ID NO: 409436 - RNA, 19 nt, Artificial Sequence
  Description of Artificial Sequence: Synthetic oligonucleotide
  Antisense Strand to SEQ ID NO: 409435
cuuuaaguaacacuccugu

SEQ ID NO: 409437 - RNA, 19 nt, Artificial Sequence
  Description of Artificial Sequence: Synthetic oligonucleotide
  Sense Strand Starting at position 1156 of SEQ ID NO: 317674
gcuuaagugcgacauggau

SEQ ID NO: 409438 - RNA, 19 nt, Artificial Sequence
  Description of Artificial Sequence: Synthetic oligonucleotide
  Antisense Strand to SEQ ID NO: 409437
auccaugucgcacuuaagc

SEQ ID NO: 409439 - RNA, 19 nt, Artificial Sequence
  Description of Artificial Sequence: Synthetic oligonucleotide
  Sense Strand Starting at position 1156 of SEQ ID NO: 317726
ggaguucagcucgacuacu

SEQ ID NO: 409440 - RNA, 19 nt, Artificial Sequence
  Description of Artificial Sequence: Synthetic oligonucleotide
  Antisense Strand to SEQ ID NO: 409439
aguagucgagcugaacucc

SEQ ID NO: 409441 - RNA, 19 nt, Artificial Sequence
  Description of Artificial Sequence: Synthetic oligonucleotide
  Sense Strand Starting at position 1156 of SEQ ID NO: 317795
uguaucaaauucuuggaga

SEQ ID NO: 409442 - RNA, 19 nt, Artificial Sequence
  Description of Artificial Sequence: Synthetic oligonucleotide
  Antisense Strand to SEQ ID NO: 409441
ucuccaagaauuugauaca

SEQ ID NO: 409443 - RNA, 19 nt, Artificial Sequence
  Description of Artificial Sequence: Synthetic oligonucleotide
  Sense Strand Starting at position 1156 of SEQ ID NO: 317824
ggugacauguucucacacu

SEQ ID NO: 409444 - RNA, 19 nt, Artificial Sequence
  Description of Artificial Sequence: Synthetic oligonucleotide
  Antisense Strand to SEQ ID NO: 409443
agugugagaacaugucacc

SEQ ID NO: 409445 - RNA, 19 nt, Artificial Sequence
  Description of Artificial Sequence: Synthetic oligonucleotide
  Sense Strand Starting at position 1156 of SEQ ID NO: 318006
uuuggaguuguccaaaguc

SEQ ID NO: 409446 - RNA, 19 nt, Artificial Sequence
  Description of Artificial Sequence: Synthetic oligonucleotide
  Antisense Strand to SEQ ID NO: 409445
gacuuuggacaacuccaaa

SEQ ID NO: 409447 - RNA, 19 nt, Artificial Sequence
  Description of Artificial Sequence: Synthetic oligonucleotide
  Sense Strand Starting at position 1156 of SEQ ID NO: 318217
aguaacaacuugguggaua

SEQ ID NO: 409448 - RNA, 19 nt, Artificial Sequence
  Description of Artificial Sequence: Synthetic oligonucleotide
  Antisense Strand to SEQ ID NO: 409447
uauccaccaaguuguuacu

SEQ ID NO: 409449 - RNA, 19 nt, Artificial Sequence
  Description of Artificial Sequence: Synthetic oligonucleotide
  Sense Strand Starting at position 1156 of SEQ ID NO: 318374
acacuuaugccucauagag

SEQ ID NO: 409450 - RNA, 19 nt, Artificial Sequence
  Description of Artificial Sequence: Synthetic oligonucleotide
  Antisense Strand to SEQ ID NO: 409449
cucuaugaggcauaagugu

SEQ ID NO: 409451 - RNA, 19 nt, Artificial Sequence
  Description of Artificial Sequence: Synthetic oligonucleotide
  Sense Strand Starting at position 1156 of SEQ ID NO: 318748
gcauuuaagugagcacuca

SEQ ID NO: 409452 - RNA, 19 nt, Artificial Sequence
  Description of Artificial Sequence: Synthetic oligonucleotide
  Antisense Strand to SEQ ID NO: 409451
ugagugcucacuuaaaugc

SEQ ID NO: 409453 - RNA, 19 nt, Artificial Sequence
  Description of Artificial Sequence: Synthetic oligonucleotide
  Sense Strand Starting at position 1156 of SEQ ID NO: 318756
gugagcacucaguaaacau

SEQ ID NO: 409454 - RNA, 19 nt, Artificial Sequence
  Description of Artificial Sequence: Synthetic oligonucleotide
  Antisense Strand to SEQ ID NO: 409453
auguuuacugagugcucac

SEQ ID NO: 409455 - RNA, 19 nt, Artificial Sequence
  Description of Artificial Sequence: Synthetic oligonucleotide
  Sense Strand Starting at position 1156 of SEQ ID NO: 318914
guagaaccauacuuaauug

SEQ ID NO: 409456 - RNA, 19 nt, Artificial Sequence
  Description of Artificial Sequence: Synthetic oligonucleotide
  Antisense Strand to SEQ ID NO: 409455
caauuaaguaugguucuac

SEQ ID NO: 409457 - RNA, 19 nt, Artificial Sequence
  Description of Artificial Sequence: Synthetic oligonucleotide
  Sense Strand Starting at position 1156 of SEQ ID NO: 318946
cccagugaguaauucucau

SEQ ID NO: 409458 - RNA, 19 nt, Artificial Sequence
  Description of Artificial Sequence: Synthetic oligonucleotide
  Antisense Strand to SEQ ID NO: 409457
augagaauuacucacuggg

SEQ ID NO: 409459 - RNA, 19 nt, Artificial Sequence
  Description of Artificial Sequence: Synthetic oligonucleotide
  Sense Strand Starting at position 1156 of SEQ ID NO: 318952
gaguaauucucauuggcuc

SEQ ID NO: 409460 - RNA, 19 nt, Artificial Sequence
  Description of Artificial Sequence: Synthetic oligonucleotide
  Antisense Strand to SEQ ID NO: 409459
gagccaaugagaauuacuc

SEQ ID NO: 409461 - RNA, 19 nt, Artificial Sequence
  Description of Artificial Sequence: Synthetic oligonucleotide
  Sense Strand Starting at position 1156 of SEQ ID NO: 318959
ucucauuggcucugaauau

SEQ ID NO: 409462 - RNA, 19 nt, Artificial Sequence
  Description of Artificial Sequence: Synthetic oligonucleotide
  Antisense Strand to SEQ ID NO: 409461
auauucagagccaaugaga

SEQ ID NO: 409463 - RNA, 19 nt, Artificial Sequence
  Description of Artificial Sequence: Synthetic oligonucleotide
  Sense Strand Starting at position 1156 of SEQ ID NO: 319060
gccagauacuauucuaugu

SEQ ID NO: 409464 - RNA, 19 nt, Artificial Sequence
  Description of Artificial Sequence: Synthetic oligonucleotide
  Antisense Strand to SEQ ID NO: 409463
acauagaauaguaucuggc

SEQ ID NO: 409465 - RNA, 19 nt, Artificial Sequence
  Description of Artificial Sequence: Synthetic oligonucleotide
  Sense Strand Starting at position 1156 of SEQ ID NO: 319064
gauacuauucuaugugggu

SEQ ID NO: 409466 - RNA, 19 nt, Artificial Sequence
  Description of Artificial Sequence: Synthetic oligonucleotide
  Antisense Strand to SEQ ID NO: 409465
acccacauagaauaguauc

SEQ ID NO: 409467 - RNA, 19 nt, Artificial Sequence
  Description of Artificial Sequence: Synthetic oligonucleotide
  Sense Strand Starting at position 1156 of SEQ ID NO: 319197
cagagucaauaccugguaa

SEQ ID NO: 409468 - RNA, 19 nt, Artificial Sequence
  Description of Artificial Sequence: Synthetic oligonucleotide
  Antisense Strand to SEQ ID NO: 409467
uuaccagguauugacucug

SEQ ID NO: 409469 - RNA, 19 nt, Artificial Sequence
  Description of Artificial Sequence: Synthetic oligonucleotide
  Sense Strand Starting at position 1156 of SEQ ID NO: 319199
gagucaauaccugguaaag

SEQ ID NO: 409470 - RNA, 19 nt, Artificial Sequence
  Description of Artificial Sequence: Synthetic oligonucleotide
  Antisense Strand to SEQ ID NO: 409469
cuuuaccagguauugacuc

SEQ ID NO: 409471 - RNA, 19 nt, Artificial Sequence
  Description of Artificial Sequence: Synthetic oligonucleotide
  Sense Strand Starting at position 1157 of SEQ ID NO: 315308
gaggaucaugcauauucuu

SEQ ID NO: 409472 - RNA, 19 nt, Artificial Sequence
  Description of Artificial Sequence: Synthetic oligonucleotide
  Antisense Strand to SEQ ID NO: 409471
aagaauaugcaugauccuc

SEQ ID NO: 409473 - RNA, 19 nt, Artificial Sequence
  Description of Artificial Sequence: Synthetic oligonucleotide
  Sense Strand Starting at position 1157 of SEQ ID NO: 315429
ucccauaacuuguugcagu

SEQ ID NO: 409474 - RNA, 19 nt, Artificial Sequence
  Description of Artificial Sequence: Synthetic oligonucleotide
  Antisense Strand to SEQ ID NO: 409473
acugcaacaaguuauggga

SEQ ID NO: 409475 - RNA, 19 nt, Artificial Sequence
  Description of Artificial Sequence: Synthetic oligonucleotide
  Sense Strand Starting at position 1157 of SEQ ID NO: 315474
ggguuaucaccuggguuuc

SEQ ID NO: 409476 - RNA, 19 nt, Artificial Sequence
  Description of Artificial Sequence: Synthetic oligonucleotide
  Antisense Strand to SEQ ID NO: 409475
gaaacccaggugauaaccc

SEQ ID NO: 409477 - RNA, 19 nt, Artificial Sequence
  Description of Artificial Sequence: Synthetic oligonucleotide
  Sense Strand Starting at position 1157 of SEQ ID NO: 315642
cagacuugaagucguggaa

SEQ ID NO: 409478 - RNA, 19 nt, Artificial Sequence
  Description of Artificial Sequence: Synthetic oligonucleotide
  Antisense Strand to SEQ ID NO: 409477
uuccacgacuucaagucug

SEQ ID NO: 409479 - RNA, 19 nt, Artificial Sequence
  Description of Artificial Sequence: Synthetic oligonucleotide
  Sense Strand Starting at position 1157 of SEQ ID NO: 315683
ucacucauggcccaggaua

SEQ ID NO: 409480 - RNA, 19 nt, Artificial Sequence
  Description of Artificial Sequence: Synthetic oligonucleotide
  Antisense Strand to SEQ ID NO: 409479
uauccugggccaugaguga

SEQ ID NO: 409481 - RNA, 19 nt, Artificial Sequence
  Description of Artificial Sequence: Synthetic oligonucleotide
  Sense Strand Starting at position 1157 of SEQ ID NO: 315730
gggccauugaugggagaca

SEQ ID NO: 409482 - RNA, 19 nt, Artificial Sequence
  Description of Artificial Sequence: Synthetic oligonucleotide
  Antisense Strand to SEQ ID NO: 409481
ugucucccaucaauggccc

SEQ ID NO: 409483 - RNA, 19 nt, Artificial Sequence
  Description of Artificial Sequence: Synthetic oligonucleotide
  Sense Strand Starting at position 1157 of SEQ ID NO: 315858
gcacuuaacuggguaccaa

SEQ ID NO: 409484 - RNA, 19 nt, Artificial Sequence
  Description of Artificial Sequence: Synthetic oligonucleotide
  Antisense Strand to SEQ ID NO: 409483
uugguacccaguuaagugc

SEQ ID NO: 409485 - RNA, 19 nt, Artificial Sequence
  Description of Artificial Sequence: Synthetic oligonucleotide
  Sense Strand Starting at position 1157 of SEQ ID NO: 315883
ugcagagcacuuuaucagu

SEQ ID NO: 409486 - RNA, 19 nt, Artificial Sequence
  Description of Artificial Sequence: Synthetic oligonucleotide
  Antisense Strand to SEQ ID NO: 409485
acugauaaagugcucugca

SEQ ID NO: 409487 - RNA, 19 nt, Artificial Sequence
  Description of Artificial Sequence: Synthetic oligonucleotide
  Sense Strand Starting at position 1157 of SEQ ID NO: 315939
ggaccauugugaucucguu

SEQ ID NO: 409488 - RNA, 19 nt, Artificial Sequence
  Description of Artificial Sequence: Synthetic oligonucleotide
  Antisense Strand to SEQ ID NO: 409487
aacgagaucacaauggucc

SEQ ID NO: 409489 - RNA, 19 nt, Artificial Sequence
  Description of Artificial Sequence: Synthetic oligonucleotide
  Sense Strand Starting at position 1157 of SEQ ID NO: 316002
cuaugcuuccaagaugcaa

SEQ ID NO: 409490 - RNA, 19 nt, Artificial Sequence
  Description of Artificial Sequence: Synthetic oligonucleotide
  Antisense Strand to SEQ ID NO: 409489
uugcaucuuggaagcauag

SEQ ID NO: 409491 - RNA, 19 nt, Artificial Sequence
  Description of Artificial Sequence: Synthetic oligonucleotide
  Sense Strand Starting at position 1157 of SEQ ID NO: 316128
cugcuaagacuuugaguuc

SEQ ID NO: 409492 - RNA, 19 nt, Artificial Sequence
  Description of Artificial Sequence: Synthetic oligonucleotide
  Antisense Strand to SEQ ID NO: 409491
gaacucaaagucuuagcag

SEQ ID NO: 409493 - RNA, 19 nt, Artificial Sequence
  Description of Artificial Sequence: Synthetic oligonucleotide
  Sense Strand Starting at position 1157 of SEQ ID NO: 316131
cuaagacuuugaguuccaa

SEQ ID NO: 409494 - RNA, 19 nt, Artificial Sequence
  Description of Artificial Sequence: Synthetic oligonucleotide
  Antisense Strand to SEQ ID NO: 409493
uuggaacucaaagucuuag

SEQ ID NO: 409495 - RNA, 19 nt, Artificial Sequence
  Description of Artificial Sequence: Synthetic oligonucleotide
  Sense Strand Starting at position 1157 of SEQ ID NO: 316162
uaccauguucucugggacu

SEQ ID NO: 409496 - RNA, 19 nt, Artificial Sequence
  Description of Artificial Sequence: Synthetic oligonucleotide
  Antisense Strand to SEQ ID NO: 409495
agucccagagaacauggua

SEQ ID NO: 409497 - RNA, 19 nt, Artificial Sequence
  Description of Artificial Sequence: Synthetic oligonucleotide
  Sense Strand Starting at position 1157 of SEQ ID NO: 316164
ccauguucucugggacucu

SEQ ID NO: 409498 - RNA, 19 nt, Artificial Sequence
  Description of Artificial Sequence: Synthetic oligonucleotide
  Antisense Strand to SEQ ID NO: 409497
agagucccagagaacaugg

SEQ ID NO: 409499 - RNA, 19 nt, Artificial Sequence
  Description of Artificial Sequence: Synthetic oligonucleotide
  Sense Strand Starting at position 1157 of SEQ ID NO: 316218
uucucuagucacuaacagu

SEQ ID NO: 409500 - RNA, 19 nt, Artificial Sequence
  Description of Artificial Sequence: Synthetic oligonucleotide
  Antisense Strand to SEQ ID NO: 409499
acuguuagugacuagagaa

SEQ ID NO: 409501 - RNA, 19 nt, Artificial Sequence
  Description of Artificial Sequence: Synthetic oligonucleotide
  Sense Strand Starting at position 1157 of SEQ ID NO: 316224
agucacuaacagugguuua

SEQ ID NO: 409502 - RNA, 19 nt, Artificial Sequence
  Description of Artificial Sequence: Synthetic oligonucleotide
  Antisense Strand to SEQ ID NO: 409501
uaaaccacuguuagugacu

SEQ ID NO: 409503 - RNA, 19 nt, Artificial Sequence
  Description of Artificial Sequence: Synthetic oligonucleotide
  Sense Strand Starting at position 1157 of SEQ ID NO: 316227
cacuaacagugguuuagaa

SEQ ID NO: 409504 - RNA, 19 nt, Artificial Sequence
  Description of Artificial Sequence: Synthetic oligonucleotide
  Antisense Strand to SEQ ID NO: 409503
uucuaaaccacuguuagug

SEQ ID NO: 409505 - RNA, 19 nt, Artificial Sequence
  Description of Artificial Sequence: Synthetic oligonucleotide
  Sense Strand Starting at position 1157 of SEQ ID NO: 316311
cccugaacauguuauuuga

SEQ ID NO: 409506 - RNA, 19 nt, Artificial Sequence
  Description of Artificial Sequence: Synthetic oligonucleotide
  Antisense Strand to SEQ ID NO: 409505
ucaaauaacauguucaggg

SEQ ID NO: 409507 - RNA, 19 nt, Artificial Sequence
  Description of Artificial Sequence: Synthetic oligonucleotide
  Sense Strand Starting at position 1157 of SEQ ID NO: 316371
aaagaagucucggucuguu

SEQ ID NO: 409508 - RNA, 19 nt, Artificial Sequence
  Description of Artificial Sequence: Synthetic oligonucleotide
  Antisense Strand to SEQ ID NO: 409507
aacagaccgagacuucuuu

SEQ ID NO: 409509 - RNA, 19 nt, Artificial Sequence
  Description of Artificial Sequence: Synthetic oligonucleotide
  Sense Strand Starting at position 1157 of SEQ ID NO: 316463
aagagaugaugcccgucaa

SEQ ID NO: 409510 - RNA, 19 nt, Artificial Sequence
  Description of Artificial Sequence: Synthetic oligonucleotide
  Antisense Strand to SEQ ID NO: 409509
uugacgggcaucaucucuu

SEQ ID NO: 409511 - RNA, 19 nt, Artificial Sequence
  Description of Artificial Sequence: Synthetic oligonucleotide
  Sense Strand Starting at position 1157 of SEQ ID NO: 316464
agagaugaugcccgucaag

SEQ ID NO: 409512 - RNA, 19 nt, Artificial Sequence
  Description of Artificial Sequence: Synthetic oligonucleotide
  Antisense Strand to SEQ ID NO: 409511
cuugacgggcaucaucucu

SEQ ID NO: 409513 - RNA, 19 nt, Artificial Sequence
  Description of Artificial Sequence: Synthetic oligonucleotide
  Sense Strand Starting at position 1157 of SEQ ID NO: 317596
uuuccugagcccuguagga

SEQ ID NO: 409514 - RNA, 19 nt, Artificial Sequence
  Description of Artificial Sequence: Synthetic oligonucleotide
  Antisense Strand to SEQ ID NO: 409513
uccuacagggcucaggaaa

SEQ ID NO: 409515 - RNA, 19 nt, Artificial Sequence
  Description of Artificial Sequence: Synthetic oligonucleotide
  Sense Strand Starting at position 1157 of SEQ ID NO: 317645
gagcauuucgaggguacgu

SEQ ID NO: 409516 - RNA, 19 nt, Artificial Sequence
  Description of Artificial Sequence: Synthetic oligonucleotide
  Antisense Strand to SEQ ID NO: 409515
acguacccucgaaaugcuc

SEQ ID NO: 409517 - RNA, 19 nt, Artificial Sequence
  Description of Artificial Sequence: Synthetic oligonucleotide
  Sense Strand Starting at position 1157 of SEQ ID NO: 317658
guacguagucggccucuua

SEQ ID NO: 409518 - RNA, 19 nt, Artificial Sequence
  Description of Artificial Sequence: Synthetic oligonucleotide
  Antisense Strand to SEQ ID NO: 409517
uaagaggccgacuacguac

SEQ ID NO: 409519 - RNA, 19 nt, Artificial Sequence
  Description of Artificial Sequence: Synthetic oligonucleotide
  Sense Strand Starting at position 1157 of SEQ ID NO: 317867
ggcccuuccuggucagaac

SEQ ID NO: 409520 - RNA, 19 nt, Artificial Sequence
  Description of Artificial Sequence: Synthetic oligonucleotide
  Antisense Strand to SEQ ID NO: 409519
guucugaccaggaagggcc

SEQ ID NO: 409521 - RNA, 19 nt, Artificial Sequence
  Description of Artificial Sequence: Synthetic oligonucleotide
  Sense Strand Starting at position 1157 of SEQ ID NO: 317895
ucagccuuaguguauguua

SEQ ID NO: 409522 - RNA, 19 nt, Artificial Sequence
  Description of Artificial Sequence: Synthetic oligonucleotide
  Antisense Strand to SEQ ID NO: 409521
uaacauacacuaaggcuga

SEQ ID NO: 409523 - RNA, 19 nt, Artificial Sequence
  Description of Artificial Sequence: Synthetic oligonucleotide
  Sense Strand Starting at position 1157 of SEQ ID NO: 318005
gugggcauuccugggaguu

SEQ ID NO: 409524 - RNA, 19 nt, Artificial Sequence
  Description of Artificial Sequence: Synthetic oligonucleotide
  Antisense Strand to SEQ ID NO: 409523
aacucccaggaaugcccac

SEQ ID NO: 409525 - RNA, 19 nt, Artificial Sequence
  Description of Artificial Sequence: Synthetic oligonucleotide
  Sense Strand Starting at position 1157 of SEQ ID NO: 318006
ugggcauuccugggaguug

SEQ ID NO: 409526 - RNA, 19 nt, Artificial Sequence
  Description of Artificial Sequence: Synthetic oligonucleotide
  Antisense Strand to SEQ ID NO: 409525
caacucccaggaaugccca

SEQ ID NO: 409527 - RNA, 19 nt, Artificial Sequence
  Description of Artificial Sequence: Synthetic oligonucleotide
  Sense Strand Starting at position 1157 of SEQ ID NO: 318023
ugugacuuuggaugaccau

SEQ ID NO: 409528 - RNA, 19 nt, Artificial Sequence
  Description of Artificial Sequence: Synthetic oligonucleotide
  Antisense Strand to SEQ ID NO: 409527
auggucauccaaagucaca

SEQ ID NO: 409529 - RNA, 19 nt, Artificial Sequence
  Description of Artificial Sequence: Synthetic oligonucleotide
  Sense Strand Starting at position 1157 of SEQ ID NO: 318145
caagguuugccuggauauc

SEQ ID NO: 409530 - RNA, 19 nt, Artificial Sequence
  Description of Artificial Sequence: Synthetic oligonucleotide
  Antisense Strand to SEQ ID NO: 409529
gauauccaggcaaaccuug

SEQ ID NO: 409531 - RNA, 19 nt, Artificial Sequence
  Description of Artificial Sequence: Synthetic oligonucleotide
  Sense Strand Starting at position 1157 of SEQ ID NO: 318146
aagguuugccuggauaucu

SEQ ID NO: 409532 - RNA, 19 nt, Artificial Sequence
  Description of Artificial Sequence: Synthetic oligonucleotide
  Antisense Strand to SEQ ID NO: 409531
agauauccaggcaaaccuu

SEQ ID NO: 409533 - RNA, 19 nt, Artificial Sequence
  Description of Artificial Sequence: Synthetic oligonucleotide
  Sense Strand Starting at position 1157 of SEQ ID NO: 318416
guuuacuuucuauaacugu

SEQ ID NO: 409534 - RNA, 19 nt, Artificial Sequence
  Description of Artificial Sequence: Synthetic oligonucleotide
  Antisense Strand to SEQ ID NO: 409533
acaguuauagaaaguaaac

SEQ ID NO: 409535 - RNA, 19 nt, Artificial Sequence
  Description of Artificial Sequence: Synthetic oligonucleotide
  Sense Strand Starting at position 1157 of SEQ ID NO: 318916
aagucaaguuguguaacca

SEQ ID NO: 409536 - RNA, 19 nt, Artificial Sequence
  Description of Artificial Sequence: Synthetic oligonucleotide
  Antisense Strand to SEQ ID NO: 409535
ugguuacacaacuugacuu

SEQ ID NO: 409537 - RNA, 19 nt, Artificial Sequence
  Description of Artificial Sequence: Synthetic oligonucleotide
  Sense Strand Starting at position 1157 of SEQ ID NO: 318994
uguaaucaguccucuccuu

SEQ ID NO: 409538 - RNA, 19 nt, Artificial Sequence
  Description of Artificial Sequence: Synthetic oligonucleotide
  Antisense Strand to SEQ ID NO: 409537
aaggagaggacugauuaca

SEQ ID NO: 409539 - RNA, 19 nt, Artificial Sequence
  Description of Artificial Sequence: Synthetic oligonucleotide
  Sense Strand Starting at position 1157 of SEQ ID NO: 319078
uggaauucuuuaguaugca

SEQ ID NO: 409540 - RNA, 19 nt, Artificial Sequence
  Description of Artificial Sequence: Synthetic oligonucleotide
  Antisense Strand to SEQ ID NO: 409539
ugcauacuaaagaauucca

SEQ ID NO: 409541 - RNA, 19 nt, Artificial Sequence
  Description of Artificial Sequence: Synthetic oligonucleotide
  Sense Strand Starting at position 1157 of SEQ ID NO: 319104
aaguguggcuucuuaccau

SEQ ID NO: 409542 - RNA, 19 nt, Artificial Sequence
  Description of Artificial Sequence: Synthetic oligonucleotide
  Antisense Strand to SEQ ID NO: 409541
augguaagaagccacacuu

SEQ ID NO: 409543 - RNA, 19 nt, Artificial Sequence
  Description of Artificial Sequence: Synthetic oligonucleotide
  Sense Strand Starting at position 1157 of SEQ ID NO: 319107
uguggcuucuuaccauaau

SEQ ID NO: 409544 - RNA, 19 nt, Artificial Sequence
  Description of Artificial Sequence: Synthetic oligonucleotide
  Antisense Strand to SEQ ID NO: 409543
auuaugguaagaagccaca

SEQ ID NO: 409545 - RNA, 19 nt, Artificial Sequence
  Description of Artificial Sequence: Synthetic oligonucleotide
  Sense Strand Starting at position 1157 of SEQ ID NO: 319132
gagagucaaccauguugug

SEQ ID NO: 409546 - RNA, 19 nt, Artificial Sequence
  Description of Artificial Sequence: Synthetic oligonucleotide
  Antisense Strand to SEQ ID NO: 409545
cacaacaugguugacucuc

SEQ ID NO: 409547 - RNA, 19 nt, Artificial Sequence
  Description of Artificial Sequence: Synthetic oligonucleotide
  Sense Strand Starting at position 1157 of SEQ ID NO: 319139
aaccauguuguguguauca

SEQ ID NO: 409548 - RNA, 19 nt, Artificial Sequence
  Description of Artificial Sequence: Synthetic oligonucleotide
  Antisense Strand to SEQ ID NO: 409547
ugauacacacaacaugguu

SEQ ID NO: 409549 - RNA, 19 nt, Artificial Sequence
  Description of Artificial Sequence: Synthetic oligonucleotide
  Sense Strand Starting at position 1157 of SEQ ID NO: 319206
accacaguucguuggaagu

SEQ ID NO: 409550 - RNA, 19 nt, Artificial Sequence
  Description of Artificial Sequence: Synthetic oligonucleotide
  Antisense Strand to SEQ ID NO: 409549
acuuccaacgaacuguggu

SEQ ID NO: 409551 - RNA, 19 nt, Artificial Sequence
  Description of Artificial Sequence: Synthetic oligonucleotide
  Sense Strand Starting at position 1158 of SEQ ID NO: 315409
ugcuccuuacuacagagau

SEQ ID NO: 409552 - RNA, 19 nt, Artificial Sequence
  Description of Artificial Sequence: Synthetic oligonucleotide
  Antisense Strand to SEQ ID NO: 409551
aucucuguaguaaggagca

SEQ ID NO: 409553 - RNA, 19 nt, Artificial Sequence
  Description of Artificial Sequence: Synthetic oligonucleotide
  Sense Strand Starting at position 1158 of SEQ ID NO: 315421
cagagauuccuguagccug

SEQ ID NO: 409554 - RNA, 19 nt, Artificial Sequence
  Description of Artificial Sequence: Synthetic oligonucleotide
  Antisense Strand to SEQ ID NO: 409553
caggcuacaggaaucucug

SEQ ID NO: 409555 - RNA, 19 nt, Artificial Sequence
  Description of Artificial Sequence: Synthetic oligonucleotide
  Sense Strand Starting at position 1158 of SEQ ID NO: 315509
aaugaugugacgugaugag

SEQ ID NO: 409556 - RNA, 19 nt, Artificial Sequence
  Description of Artificial Sequence: Synthetic oligonucleotide
  Antisense Strand to SEQ ID NO: 409555
cucaucacgucacaucauu

SEQ ID NO: 409557 - RNA, 19 nt, Artificial Sequence
  Description of Artificial Sequence: Synthetic oligonucleotide
  Sense Strand Starting at position 1158 of SEQ ID NO: 315518
acgugaugaggacgugauu

SEQ ID NO: 409558 - RNA, 19 nt, Artificial Sequence
  Description of Artificial Sequence: Synthetic oligonucleotide
  Antisense Strand to SEQ ID NO: 409557
aaucacguccucaucacgu

SEQ ID NO: 409559 - RNA, 19 nt, Artificial Sequence
  Description of Artificial Sequence: Synthetic oligonucleotide
  Sense Strand Starting at position 1158 of SEQ ID NO: 315521
ugaugaggacgugauucua

SEQ ID NO: 409560 - RNA, 19 nt, Artificial Sequence
  Description of Artificial Sequence: Synthetic oligonucleotide
  Antisense Strand to SEQ ID NO: 409559
uagaaucacguccucauca

SEQ ID NO: 409561 - RNA, 19 nt, Artificial Sequence
  Description of Artificial Sequence: Synthetic oligonucleotide
  Sense Strand Starting at position 1158 of SEQ ID NO: 315576
guuggcagagcucaaauga

SEQ ID NO: 409562 - RNA, 19 nt, Artificial Sequence
  Description of Artificial Sequence: Synthetic oligonucleotide
  Antisense Strand to SEQ ID NO: 409561
ucauuugagcucugccaac

SEQ ID NO: 409563 - RNA, 19 nt, Artificial Sequence
  Description of Artificial Sequence: Synthetic oligonucleotide
  Sense Strand Starting at position 1158 of SEQ ID NO: 315751
uuggauagcaguuauguaa

SEQ ID NO: 409564 - RNA, 19 nt, Artificial Sequence
  Description of Artificial Sequence: Synthetic oligonucleotide
  Antisense Strand to SEQ ID NO: 409563
uuacauaacugcuauccaa

SEQ ID NO: 409565 - RNA, 19 nt, Artificial Sequence
  Description of Artificial Sequence: Synthetic oligonucleotide
  Sense Strand Starting at position 1158 of SEQ ID NO: 315755
auagcaguuauguaacagu

SEQ ID NO: 409566 - RNA, 19 nt, Artificial Sequence
  Description of Artificial Sequence: Synthetic oligonucleotide
  Antisense Strand to SEQ ID NO: 409565
acuguuacauaacugcuau

SEQ ID NO: 409567 - RNA, 19 nt, Artificial Sequence
  Description of Artificial Sequence: Synthetic oligonucleotide
  Sense Strand Starting at position 1158 of SEQ ID NO: 315791
aaaggaugggcuuguuuga

SEQ ID NO: 409568 - RNA, 19 nt, Artificial Sequence
  Description of Artificial Sequence: Synthetic oligonucleotide
  Antisense Strand to SEQ ID NO: 409567
ucaaacaagcccauccuuu

SEQ ID NO: 409569 - RNA, 19 nt, Artificial Sequence
  Description of Artificial Sequence: Synthetic oligonucleotide
  Sense Strand Starting at position 1158 of SEQ ID NO: 315800
gcuuguuugaaucacagag

SEQ ID NO: 409570 - RNA, 19 nt, Artificial Sequence
  Description of Artificial Sequence: Synthetic oligonucleotide
  Antisense Strand to SEQ ID NO: 409569
cucugugauucaaacaagc

SEQ ID NO: 409571 - RNA, 19 nt, Artificial Sequence
  Description of Artificial Sequence: Synthetic oligonucleotide
  Sense Strand Starting at position 1158 of SEQ ID NO: 315856
uggucagaaaugcaguuaa

SEQ ID NO: 409572 - RNA, 19 nt, Artificial Sequence
  Description of Artificial Sequence: Synthetic oligonucleotide
  Antisense Strand to SEQ ID NO: 409571
uuaacugcauuucugacca

SEQ ID NO: 409573 - RNA, 19 nt, Artificial Sequence
  Description of Artificial Sequence: Synthetic oligonucleotide
  Sense Strand Starting at position 1158 of SEQ ID NO: 316180
ccaagcuagcuagggaaua

SEQ ID NO: 409574 - RNA, 19 nt, Artificial Sequence
  Description of Artificial Sequence: Synthetic oligonucleotide
  Antisense Strand to SEQ ID NO: 409573
uauucccuagcuagcuugg

SEQ ID NO: 409575 - RNA, 19 nt, Artificial Sequence
  Description of Artificial Sequence: Synthetic oligonucleotide
  Sense Strand Starting at position 1158 of SEQ ID NO: 317276
uguccaucugucgggaaua

SEQ ID NO: 409576 - RNA, 19 nt, Artificial Sequence
  Description of Artificial Sequence: Synthetic oligonucleotide
  Antisense Strand to SEQ ID NO: 409575
uauucccgacagauggaca

SEQ ID NO: 409577 - RNA, 19 nt, Artificial Sequence
  Description of Artificial Sequence: Synthetic oligonucleotide
  Sense Strand Starting at position 1158 of SEQ ID NO: 317440
ugacuuauucaagggaggu

SEQ ID NO: 409578 - RNA, 19 nt, Artificial Sequence
  Description of Artificial Sequence: Synthetic oligonucleotide
  Antisense Strand to SEQ ID NO: 409577
accucccuugaauaaguca

SEQ ID NO: 409579 - RNA, 19 nt, Artificial Sequence
  Description of Artificial Sequence: Synthetic oligonucleotide
  Sense Strand Starting at position 1158 of SEQ ID NO: 317924
accgacauauugucagaag

SEQ ID NO: 409580 - RNA, 19 nt, Artificial Sequence
  Description of Artificial Sequence: Synthetic oligonucleotide
  Antisense Strand to SEQ ID NO: 409579
cuucugacaauaugucggu

SEQ ID NO: 409581 - RNA, 19 nt, Artificial Sequence
  Description of Artificial Sequence: Synthetic oligonucleotide
  Sense Strand Starting at position 1158 of SEQ ID NO: 318065
guggguaaagauugagucu

SEQ ID NO: 409582 - RNA, 19 nt, Artificial Sequence
  Description of Artificial Sequence: Synthetic oligonucleotide
  Antisense Strand to SEQ ID NO: 409581
agacucaaucuuuacccac

SEQ ID NO: 409583 - RNA, 19 nt, Artificial Sequence
  Description of Artificial Sequence: Synthetic oligonucleotide
  Sense Strand Starting at position 1158 of SEQ ID NO: 318068
gguaaagauugagucucau

SEQ ID NO: 409584 - RNA, 19 nt, Artificial Sequence
  Description of Artificial Sequence: Synthetic oligonucleotide
  Antisense Strand to SEQ ID NO: 409583
augagacucaaucuuuacc

SEQ ID NO: 409585 - RNA, 19 nt, Artificial Sequence
  Description of Artificial Sequence: Synthetic oligonucleotide
  Sense Strand Starting at position 1158 of SEQ ID NO: 318074
gauugagucucauuggugu

SEQ ID NO: 409586 - RNA, 19 nt, Artificial Sequence
  Description of Artificial Sequence: Synthetic oligonucleotide
  Antisense Strand to SEQ ID NO: 409585
acaccaaugagacucaauc

SEQ ID NO: 409587 - RNA, 19 nt, Artificial Sequence
  Description of Artificial Sequence: Synthetic oligonucleotide
  Sense Strand Starting at position 1158 of SEQ ID NO: 318080
gucucauugguguugugua

SEQ ID NO: 409588 - RNA, 19 nt, Artificial Sequence
  Description of Artificial Sequence: Synthetic oligonucleotide
  Antisense Strand to SEQ ID NO: 409587
uacacaacaccaaugagac

SEQ ID NO: 409589 - RNA, 19 nt, Artificial Sequence
  Description of Artificial Sequence: Synthetic oligonucleotide
  Sense Strand Starting at position 1158 of SEQ ID NO: 318269
aaagcaauucuggguacau

SEQ ID NO: 409590 - RNA, 19 nt, Artificial Sequence
  Description of Artificial Sequence: Synthetic oligonucleotide
  Antisense Strand to SEQ ID NO: 409589
auguacccagaauugcuuu

SEQ ID NO: 409591 - RNA, 19 nt, Artificial Sequence
  Description of Artificial Sequence: Synthetic oligonucleotide
  Sense Strand Starting at position 1158 of SEQ ID NO: 318270
aagcaauucuggguacaug

SEQ ID NO: 409592 - RNA, 19 nt, Artificial Sequence
  Description of Artificial Sequence: Synthetic oligonucleotide
  Antisense Strand to SEQ ID NO: 409591
cauguacccagaauugcuu

SEQ ID NO: 409593 - RNA, 19 nt, Artificial Sequence
  Description of Artificial Sequence: Synthetic oligonucleotide
  Sense Strand Starting at position 1158 of SEQ ID NO: 318286
augggaugaugaucuuugu

SEQ ID NO: 409594 - RNA, 19 nt, Artificial Sequence
  Description of Artificial Sequence: Synthetic oligonucleotide
  Antisense Strand to SEQ ID NO: 409593
acaaagaucaucaucccau

SEQ ID NO: 409595 - RNA, 19 nt, Artificial Sequence
  Description of Artificial Sequence: Synthetic oligonucleotide
  Sense Strand Starting at position 1158 of SEQ ID NO: 318296
gaucuuugucccuguggga

SEQ ID NO: 409596 - RNA, 19 nt, Artificial Sequence
  Description of Artificial Sequence: Synthetic oligonucleotide
  Antisense Strand to SEQ ID NO: 409595
ucccacagggacaaagauc

SEQ ID NO: 409597 - RNA, 19 nt, Artificial Sequence
  Description of Artificial Sequence: Synthetic oligonucleotide
  Sense Strand Starting at position 1158 of SEQ ID NO: 318300
uuugucccugugggaaauu

SEQ ID NO: 409598 - RNA, 19 nt, Artificial Sequence
  Description of Artificial Sequence: Synthetic oligonucleotide
  Antisense Strand to SEQ ID NO: 409597
aauuucccacagggacaaa

SEQ ID NO: 409599 - RNA, 19 nt, Artificial Sequence
  Description of Artificial Sequence: Synthetic oligonucleotide
  Sense Strand Starting at position 1158 of SEQ ID NO: 318382
ggcugaugccuggacuaau

SEQ ID NO: 409600 - RNA, 19 nt, Artificial Sequence
  Description of Artificial Sequence: Synthetic oligonucleotide
  Antisense Strand to SEQ ID NO: 409599
auuaguccaggcaucagcc

SEQ ID NO: 409601 - RNA, 19 nt, Artificial Sequence
  Description of Artificial Sequence: Synthetic oligonucleotide
  Sense Strand Starting at position 1158 of SEQ ID NO: 318417
aggagauaugugggugguu

SEQ ID NO: 409602 - RNA, 19 nt, Artificial Sequence
  Description of Artificial Sequence: Synthetic oligonucleotide
  Antisense Strand to SEQ ID NO: 409601
aaccacccacauaucuccu

SEQ ID NO: 409603 - RNA, 19 nt, Artificial Sequence
  Description of Artificial Sequence: Synthetic oligonucleotide
  Sense Strand Starting at position 1158 of SEQ ID NO: 318418
ggagauaugugggugguuu

SEQ ID NO: 409604 - RNA, 19 nt, Artificial Sequence
  Description of Artificial Sequence: Synthetic oligonucleotide
  Antisense Strand to SEQ ID NO: 409603
aaaccacccacauaucucc

SEQ ID NO: 409605 - RNA, 19 nt, Artificial Sequence
  Description of Artificial Sequence: Synthetic oligonucleotide
  Sense Strand Starting at position 1158 of SEQ ID NO: 318419
gagauaugugggugguuug

SEQ ID NO: 409606 - RNA, 19 nt, Artificial Sequence
  Description of Artificial Sequence: Synthetic oligonucleotide
  Antisense Strand to SEQ ID NO: 409605
caaaccacccacauaucuc

SEQ ID NO: 409607 - RNA, 19 nt, Artificial Sequence
  Description of Artificial Sequence: Synthetic oligonucleotide
  Sense Strand Starting at position 1158 of SEQ ID NO: 318474
ggcagacaguccucugaaa

SEQ ID NO: 409608 - RNA, 19 nt, Artificial Sequence
  Description of Artificial Sequence: Synthetic oligonucleotide
  Antisense Strand to SEQ ID NO: 409607
uuucagaggacugucugcc

SEQ ID NO: 409609 - RNA, 19 nt, Artificial Sequence
  Description of Artificial Sequence: Synthetic oligonucleotide
  Sense Strand Starting at position 1158 of SEQ ID NO: 318570
gcugcauggaaucaucagu

SEQ ID NO: 409610 - RNA, 19 nt, Artificial Sequence
  Description of Artificial Sequence: Synthetic oligonucleotide
  Antisense Strand to SEQ ID NO: 409609
acugaugauuccaugcagc

SEQ ID NO: 409611 - RNA, 19 nt, Artificial Sequence
  Description of Artificial Sequence: Synthetic oligonucleotide
  Sense Strand Starting at position 1158 of SEQ ID NO: 318644
gagcuuagagcagggaaau

SEQ ID NO: 409612 - RNA, 19 nt, Artificial Sequence
  Description of Artificial Sequence: Synthetic oligonucleotide
  Antisense Strand to SEQ ID NO: 409611
auuucccugcucuaagcuc

SEQ ID NO: 409613 - RNA, 19 nt, Artificial Sequence
  Description of Artificial Sequence: Synthetic oligonucleotide
  Sense Strand Starting at position 1158 of SEQ ID NO: 318645
agcuuagagcagggaaauu

SEQ ID NO: 409614 - RNA, 19 nt, Artificial Sequence
  Description of Artificial Sequence: Synthetic oligonucleotide
  Antisense Strand to SEQ ID NO: 409613
aauuucccugcucuaagcu

SEQ ID NO: 409615 - RNA, 19 nt, Artificial Sequence
  Description of Artificial Sequence: Synthetic oligonucleotide
  Sense Strand Starting at position 1158 of SEQ ID NO: 318654
cagggaaauugacagaaga

SEQ ID NO: 409616 - RNA, 19 nt, Artificial Sequence
  Description of Artificial Sequence: Synthetic oligonucleotide
  Antisense Strand to SEQ ID NO: 409615
ucuucugucaauuucccug

SEQ ID NO: 409617 - RNA, 19 nt, Artificial Sequence
  Description of Artificial Sequence: Synthetic oligonucleotide
  Sense Strand Starting at position 1158 of SEQ ID NO: 318678
ggaagucaucauugguauc

SEQ ID NO: 409618 - RNA, 19 nt, Artificial Sequence
  Description of Artificial Sequence: Synthetic oligonucleotide
  Antisense Strand to SEQ ID NO: 409617
gauaccaaugaugacuucc

SEQ ID NO: 409619 - RNA, 19 nt, Artificial Sequence
  Description of Artificial Sequence: Synthetic oligonucleotide
  Sense Strand Starting at position 1158 of SEQ ID NO: 318795
ggaaguuguugguuugaua

SEQ ID NO: 409620 - RNA, 19 nt, Artificial Sequence
  Description of Artificial Sequence: Synthetic oligonucleotide
  Antisense Strand to SEQ ID NO: 409619
uaucaaaccaacaacuucc

SEQ ID NO: 409621 - RNA, 19 nt, Artificial Sequence
  Description of Artificial Sequence: Synthetic oligonucleotide
  Sense Strand Starting at position 1158 of SEQ ID NO: 318802
guugguuugauaugcaaag

SEQ ID NO: 409622 - RNA, 19 nt, Artificial Sequence
  Description of Artificial Sequence: Synthetic oligonucleotide
  Antisense Strand to SEQ ID NO: 409621
cuuugcauaucaaaccaac

SEQ ID NO: 409623 - RNA, 19 nt, Artificial Sequence
  Description of Artificial Sequence: Synthetic oligonucleotide
  Sense Strand Starting at position 1158 of SEQ ID NO: 318804
ugguuugauaugcaaagcu

SEQ ID NO: 409624 - RNA, 19 nt, Artificial Sequence
  Description of Artificial Sequence: Synthetic oligonucleotide
  Antisense Strand to SEQ ID NO: 409623
agcuuugcauaucaaacca

SEQ ID NO: 409625 - RNA, 19 nt, Artificial Sequence
  Description of Artificial Sequence: Synthetic oligonucleotide
  Sense Strand Starting at position 1158 of SEQ ID NO: 318811
auaugcaaagcuugaaaca

SEQ ID NO: 409626 - RNA, 19 nt, Artificial Sequence
  Description of Artificial Sequence: Synthetic oligonucleotide
  Antisense Strand to SEQ ID NO: 409625
uguuucaagcuuugcauau

SEQ ID NO: 409627 - RNA, 19 nt, Artificial Sequence
  Description of Artificial Sequence: Synthetic oligonucleotide
  Sense Strand Starting at position 1158 of SEQ ID NO: 318840
uguacauuugcuugacuuu

SEQ ID NO: 409628 - RNA, 19 nt, Artificial Sequence
  Description of Artificial Sequence: Synthetic oligonucleotide
  Antisense Strand to SEQ ID NO: 409627
aaagucaagcaaauguaca

SEQ ID NO: 409629 - RNA, 19 nt, Artificial Sequence
  Description of Artificial Sequence: Synthetic oligonucleotide
  Sense Strand Starting at position 1158 of SEQ ID NO: 319092
uuacuaagugccuacuagu

SEQ ID NO: 409630 - RNA, 19 nt, Artificial Sequence
  Description of Artificial Sequence: Synthetic oligonucleotide
  Antisense Strand to SEQ ID NO: 409629
acuaguaggcacuuaguaa

SEQ ID NO: 409631 - RNA, 19 nt, Artificial Sequence
  Description of Artificial Sequence: Synthetic oligonucleotide
  Sense Strand Starting at position 1159 of SEQ ID NO: 315442
cuguuuaccuucccauaga

SEQ ID NO: 409632 - RNA, 19 nt, Artificial Sequence
  Description of Artificial Sequence: Synthetic oligonucleotide
  Antisense Strand to SEQ ID NO: 409631
ucuaugggaagguaaacag

SEQ ID NO: 409633 - RNA, 19 nt, Artificial Sequence
  Description of Artificial Sequence: Synthetic oligonucleotide
  Sense Strand Starting at position 1159 of SEQ ID NO: 315649
aucaauguuucccuuugua

SEQ ID NO: 409634 - RNA, 19 nt, Artificial Sequence
  Description of Artificial Sequence: Synthetic oligonucleotide
  Antisense Strand to SEQ ID NO: 409633
uacaaagggaaacauugau

SEQ ID NO: 409635 - RNA, 19 nt, Artificial Sequence
  Description of Artificial Sequence: Synthetic oligonucleotide
  Sense Strand Starting at position 1159 of SEQ ID NO: 315653
auguuucccuuuguauuua

SEQ ID NO: 409636 - RNA, 19 nt, Artificial Sequence
  Description of Artificial Sequence: Synthetic oligonucleotide
  Antisense Strand to SEQ ID NO: 409635
uaaauacaaagggaaacau

SEQ ID NO: 409637 - RNA, 19 nt, Artificial Sequence
  Description of Artificial Sequence: Synthetic oligonucleotide
  Sense Strand Starting at position 1159 of SEQ ID NO: 315830
ugcuccuuacuacagagau

SEQ ID NO: 409638 - RNA, 19 nt, Artificial Sequence
  Description of Artificial Sequence: Synthetic oligonucleotide
  Antisense Strand to SEQ ID NO: 409637
aucucuguaguaaggagca

SEQ ID NO: 409639 - RNA, 19 nt, Artificial Sequence
  Description of Artificial Sequence: Synthetic oligonucleotide
  Sense Strand Starting at position 1159 of SEQ ID NO: 315842
cagagauuccuguagccug

SEQ ID NO: 409640 - RNA, 19 nt, Artificial Sequence
  Description of Artificial Sequence: Synthetic oligonucleotide
  Antisense Strand to SEQ ID NO: 409639
caggcuacaggaaucucug

SEQ ID NO: 409641 - RNA, 19 nt, Artificial Sequence
  Description of Artificial Sequence: Synthetic oligonucleotide
  Sense Strand Starting at position 1159 of SEQ ID NO: 315930
aaugaugugacgugaugag

SEQ ID NO: 409642 - RNA, 19 nt, Artificial Sequence
  Description of Artificial Sequence: Synthetic oligonucleotide
  Antisense Strand to SEQ ID NO: 409641
cucaucacgucacaucauu

SEQ ID NO: 409643 - RNA, 19 nt, Artificial Sequence
  Description of Artificial Sequence: Synthetic oligonucleotide
  Sense Strand Starting at position 1159 of SEQ ID NO: 315939
acgugaugaggacgugauu

SEQ ID NO: 409644 - RNA, 19 nt, Artificial Sequence
  Description of Artificial Sequence: Synthetic oligonucleotide
  Antisense Strand to SEQ ID NO: 409643
aaucacguccucaucacgu

SEQ ID NO: 409645 - RNA, 19 nt, Artificial Sequence
  Description of Artificial Sequence: Synthetic oligonucleotide
  Sense Strand Starting at position 1159 of SEQ ID NO: 315942
ugaugaggacgugauucua

SEQ ID NO: 409646 - RNA, 19 nt, Artificial Sequence
  Description of Artificial Sequence: Synthetic oligonucleotide
  Antisense Strand to SEQ ID NO: 409645
uagaaucacguccucauca

SEQ ID NO: 409647 - RNA, 19 nt, Artificial Sequence
  Description of Artificial Sequence: Synthetic oligonucleotide
  Sense Strand Starting at position 1159 of SEQ ID NO: 315997
guuggcagagcucaaauga

SEQ ID NO: 409648 - RNA, 19 nt, Artificial Sequence
  Description of Artificial Sequence: Synthetic oligonucleotide
  Antisense Strand to SEQ ID NO: 409647
ucauuugagcucugccaac

SEQ ID NO: 409649 - RNA, 19 nt, Artificial Sequence
  Description of Artificial Sequence: Synthetic oligonucleotide
  Sense Strand Starting at position 1159 of SEQ ID NO: 316172
uuggauagcaguuauguaa

SEQ ID NO: 409650 - RNA, 19 nt, Artificial Sequence
  Description of Artificial Sequence: Synthetic oligonucleotide
  Antisense Strand to SEQ ID NO: 409649
uuacauaacugcuauccaa

SEQ ID NO: 409651 - RNA, 19 nt, Artificial Sequence
  Description of Artificial Sequence: Synthetic oligonucleotide
  Sense Strand Starting at position 1159 of SEQ ID NO: 316176
auagcaguuauguaacagu

SEQ ID NO: 409652 - RNA, 19 nt, Artificial Sequence
  Description of Artificial Sequence: Synthetic oligonucleotide
  Antisense Strand to SEQ ID NO: 409651
acuguuacauaacugcuau

SEQ ID NO: 409653 - RNA, 19 nt, Artificial Sequence
  Description of Artificial Sequence: Synthetic oligonucleotide
  Sense Strand Starting at position 1159 of SEQ ID NO: 316212
aaaggaugggcuuguuuga

SEQ ID NO: 409654 - RNA, 19 nt, Artificial Sequence
  Description of Artificial Sequence: Synthetic oligonucleotide
  Antisense Strand to SEQ ID NO: 409653
ucaaacaagcccauccuuu

SEQ ID NO: 409655 - RNA, 19 nt, Artificial Sequence
  Description of Artificial Sequence: Synthetic oligonucleotide
  Sense Strand Starting at position 1159 of SEQ ID NO: 316221
gcuuguuugaaucacagag

SEQ ID NO: 409656 - RNA, 19 nt, Artificial Sequence
  Description of Artificial Sequence: Synthetic oligonucleotide
  Antisense Strand to SEQ ID NO: 409655
cucugugauucaaacaagc

SEQ ID NO: 409657 - RNA, 19 nt, Artificial Sequence
  Description of Artificial Sequence: Synthetic oligonucleotide
  Sense Strand Starting at position 1159 of SEQ ID NO: 316277
uggucagaaaugcaguuaa

SEQ ID NO: 409658 - RNA, 19 nt, Artificial Sequence
  Description of Artificial Sequence: Synthetic oligonucleotide
  Antisense Strand to SEQ ID NO: 409657
uuaacugcauuucugacca

SEQ ID NO: 409659 - RNA, 19 nt, Artificial Sequence
  Description of Artificial Sequence: Synthetic oligonucleotide
  Sense Strand Starting at position 1159 of SEQ ID NO: 316601
ccaagcuagcuagggaaua

SEQ ID NO: 409660 - RNA, 19 nt, Artificial Sequence
  Description of Artificial Sequence: Synthetic oligonucleotide
  Antisense Strand to SEQ ID NO: 409659
uauucccuagcuagcuugg

SEQ ID NO: 409661 - RNA, 19 nt, Artificial Sequence
  Description of Artificial Sequence: Synthetic oligonucleotide
  Sense Strand Starting at position 1159 of SEQ ID NO: 317697
uguccaucugucgggaaua

SEQ ID NO: 409662 - RNA, 19 nt, Artificial Sequence
  Description of Artificial Sequence: Synthetic oligonucleotide
  Antisense Strand to SEQ ID NO: 409661
uauucccgacagauggaca

SEQ ID NO: 409663 - RNA, 19 nt, Artificial Sequence
  Description of Artificial Sequence: Synthetic oligonucleotide
  Sense Strand Starting at position 1159 of SEQ ID NO: 317861
ugacuuauucaagggaggu

SEQ ID NO: 409664 - RNA, 19 nt, Artificial Sequence
  Description of Artificial Sequence: Synthetic oligonucleotide
  Antisense Strand to SEQ ID NO: 409663
accucccuugaauaaguca

SEQ ID NO: 409665 - RNA, 19 nt, Artificial Sequence
  Description of Artificial Sequence: Synthetic oligonucleotide
  Sense Strand Starting at position 1159 of SEQ ID NO: 318345
accgacauauugucagaag

SEQ ID NO: 409666 - RNA, 19 nt, Artificial Sequence
  Description of Artificial Sequence: Synthetic oligonucleotide
  Antisense Strand to SEQ ID NO: 409665
cuucugacaauaugucggu

SEQ ID NO: 409667 - RNA, 19 nt, Artificial Sequence
  Description of Artificial Sequence: Synthetic oligonucleotide
  Sense Strand Starting at position 1159 of SEQ ID NO: 318486
guggguaaagauugagucu

SEQ ID NO: 409668 - RNA, 19 nt, Artificial Sequence
  Description of Artificial Sequence: Synthetic oligonucleotide
  Antisense Strand to SEQ ID NO: 409667
agacucaaucuuuacccac

SEQ ID NO: 409669 - RNA, 19 nt, Artificial Sequence
  Description of Artificial Sequence: Synthetic oligonucleotide
  Sense Strand Starting at position 1159 of SEQ ID NO: 318489
gguaaagauugagucucau

SEQ ID NO: 409670 - RNA, 19 nt, Artificial Sequence
  Description of Artificial Sequence: Synthetic oligonucleotide
  Antisense Strand to SEQ ID NO: 409669
augagacucaaucuuuacc

SEQ ID NO: 409671 - RNA, 19 nt, Artificial Sequence
  Description of Artificial Sequence: Synthetic oligonucleotide
  Sense Strand Starting at position 1159 of SEQ ID NO: 318495
gauugagucucauuggugu

SEQ ID NO: 409672 - RNA, 19 nt, Artificial Sequence
  Description of Artificial Sequence: Synthetic oligonucleotide
  Antisense Strand to SEQ ID NO: 409671
acaccaaugagacucaauc

SEQ ID NO: 409673 - RNA, 19 nt, Artificial Sequence
  Description of Artificial Sequence: Synthetic oligonucleotide
  Sense Strand Starting at position 1159 of SEQ ID NO: 318501
gucucauugguguugugua

SEQ ID NO: 409674 - RNA, 19 nt, Artificial Sequence
  Description of Artificial Sequence: Synthetic oligonucleotide
  Antisense Strand to SEQ ID NO: 409673
uacacaacaccaaugagac

SEQ ID NO: 409675 - RNA, 19 nt, Artificial Sequence
  Description of Artificial Sequence: Synthetic oligonucleotide
  Sense Strand Starting at position 1159 of SEQ ID NO: 318506
auugguguuguguaauucu

SEQ ID NO: 409676 - RNA, 19 nt, Artificial Sequence
  Description of Artificial Sequence: Synthetic oligonucleotide
  Antisense Strand to SEQ ID NO: 409675
agaauuacacaacaccaau

SEQ ID NO: 409677 - RNA, 19 nt, Artificial Sequence
  Description of Artificial Sequence: Synthetic oligonucleotide
  Sense Strand Starting at position 1159 of SEQ ID NO: 318690
aaagcaauucuggguacau

SEQ ID NO: 409678 - RNA, 19 nt, Artificial Sequence
  Description of Artificial Sequence: Synthetic oligonucleotide
  Antisense Strand to SEQ ID NO: 409677
auguacccagaauugcuuu

SEQ ID NO: 409679 - RNA, 19 nt, Artificial Sequence
  Description of Artificial Sequence: Synthetic oligonucleotide
  Sense Strand Starting at position 1159 of SEQ ID NO: 318691
aagcaauucuggguacaug

SEQ ID NO: 409680 - RNA, 19 nt, Artificial Sequence
  Description of Artificial Sequence: Synthetic oligonucleotide
  Antisense Strand to SEQ ID NO: 409679
cauguacccagaauugcuu

SEQ ID NO: 409681 - RNA, 19 nt, Artificial Sequence
  Description of Artificial Sequence: Synthetic oligonucleotide
  Sense Strand Starting at position 1159 of SEQ ID NO: 318707
augggaugaugaucuuugu

SEQ ID NO: 409682 - RNA, 19 nt, Artificial Sequence
  Description of Artificial Sequence: Synthetic oligonucleotide
  Antisense Strand to SEQ ID NO: 409681
acaaagaucaucaucccau

SEQ ID NO: 409683 - RNA, 19 nt, Artificial Sequence
  Description of Artificial Sequence: Synthetic oligonucleotide
  Sense Strand Starting at position 1159 of SEQ ID NO: 318713
ugaugaucuuugucccugu

SEQ ID NO: 409684 - RNA, 19 nt, Artificial Sequence
  Description of Artificial Sequence: Synthetic oligonucleotide
  Antisense Strand to SEQ ID NO: 409683
acagggacaaagaucauca

SEQ ID NO: 409685 - RNA, 19 nt, Artificial Sequence
  Description of Artificial Sequence: Synthetic oligonucleotide
  Sense Strand Starting at position 1159 of SEQ ID NO: 318717
gaucuuugucccuguggga

SEQ ID NO: 409686 - RNA, 19 nt, Artificial Sequence
  Description of Artificial Sequence: Synthetic oligonucleotide
  Antisense Strand to SEQ ID NO: 409685
ucccacagggacaaagauc

SEQ ID NO: 409687 - RNA, 19 nt, Artificial Sequence
  Description of Artificial Sequence: Synthetic oligonucleotide
  Sense Strand Starting at position 1159 of SEQ ID NO: 318721
uuugucccugugggaaauu

SEQ ID NO: 409688 - RNA, 19 nt, Artificial Sequence
  Description of Artificial Sequence: Synthetic oligonucleotide
  Antisense Strand to SEQ ID NO: 409687
aauuucccacagggacaaa

SEQ ID NO: 409689 - RNA, 19 nt, Artificial Sequence
  Description of Artificial Sequence: Synthetic oligonucleotide
  Sense Strand Starting at position 1159 of SEQ ID NO: 318803
ggcugaugccuggacuaau

SEQ ID NO: 409690 - RNA, 19 nt, Artificial Sequence
  Description of Artificial Sequence: Synthetic oligonucleotide
  Antisense Strand to SEQ ID NO: 409689
auuaguccaggcaucagcc

SEQ ID NO: 409691 - RNA, 19 nt, Artificial Sequence
  Description of Artificial Sequence: Synthetic oligonucleotide
  Sense Strand Starting at position 1159 of SEQ ID NO: 318838
aggagauaugugggugguu

SEQ ID NO: 409692 - RNA, 19 nt, Artificial Sequence
  Description of Artificial Sequence: Synthetic oligonucleotide
  Antisense Strand to SEQ ID NO: 409691
aaccacccacauaucuccu

SEQ ID NO: 409693 - RNA, 19 nt, Artificial Sequence
  Description of Artificial Sequence: Synthetic oligonucleotide
  Sense Strand Starting at position 1159 of SEQ ID NO: 318839
ggagauaugugggugguuu

SEQ ID NO: 409694 - RNA, 19 nt, Artificial Sequence
  Description of Artificial Sequence: Synthetic oligonucleotide
  Antisense Strand to SEQ ID NO: 409693
aaaccacccacauaucucc

SEQ ID NO: 409695 - RNA, 19 nt, Artificial Sequence
  Description of Artificial Sequence: Synthetic oligonucleotide
  Sense Strand Starting at position 1159 of SEQ ID NO: 318840
gagauaugugggugguuug

SEQ ID NO: 409696 - RNA, 19 nt, Artificial Sequence
  Description of Artificial Sequence: Synthetic oligonucleotide
  Antisense Strand to SEQ ID NO: 409695
caaaccacccacauaucuc

SEQ ID NO: 409697 - RNA, 19 nt, Artificial Sequence
  Description of Artificial Sequence: Synthetic oligonucleotide
  Sense Strand Starting at position 1159 of SEQ ID NO: 318895
ggcagacaguccucugaaa

SEQ ID NO: 409698 - RNA, 19 nt, Artificial Sequence
  Description of Artificial Sequence: Synthetic oligonucleotide
  Antisense Strand to SEQ ID NO: 409697
uuucagaggacugucugcc

SEQ ID NO: 409699 - RNA, 19 nt, Artificial Sequence
  Description of Artificial Sequence: Synthetic oligonucleotide
  Sense Strand Starting at position 1159 of SEQ ID NO: 318991
gcugcauggaaucaucagu

SEQ ID NO: 409700 - RNA, 19 nt, Artificial Sequence
  Description of Artificial Sequence: Synthetic oligonucleotide
  Antisense Strand to SEQ ID NO: 409699
acugaugauuccaugcagc

SEQ ID NO: 409701 - RNA, 19 nt, Artificial Sequence
  Description of Artificial Sequence: Synthetic oligonucleotide
  Sense Strand Starting at position 1159 of SEQ ID NO: 319065
gagcuuagagcagggaaau

SEQ ID NO: 409702 - RNA, 19 nt, Artificial Sequence
  Description of Artificial Sequence: Synthetic oligonucleotide
  Antisense Strand to SEQ ID NO: 409701
auuucccugcucuaagcuc

SEQ ID NO: 409703 - RNA, 19 nt, Artificial Sequence
  Description of Artificial Sequence: Synthetic oligonucleotide
  Sense Strand Starting at position 1159 of SEQ ID NO: 319066
agcuuagagcagggaaauu

SEQ ID NO: 409704 - RNA, 19 nt, Artificial Sequence
  Description of Artificial Sequence: Synthetic oligonucleotide
  Antisense Strand to SEQ ID NO: 409703
aauuucccugcucuaagcu

SEQ ID NO: 409705 - RNA, 19 nt, Artificial Sequence
  Description of Artificial Sequence: Synthetic oligonucleotide
  Sense Strand Starting at position 1159 of SEQ ID NO: 319075
cagggaaauugacagaaga

SEQ ID NO: 409706 - RNA, 19 nt, Artificial Sequence
  Description of Artificial Sequence: Synthetic oligonucleotide
  Antisense Strand to SEQ ID NO: 409705
ucuucugucaauuucccug

SEQ ID NO: 409707 - RNA, 19 nt, Artificial Sequence
  Description of Artificial Sequence: Synthetic oligonucleotide
  Sense Strand Starting at position 1159 of SEQ ID NO: 319099
ggaagucaucauugguauc

SEQ ID NO: 409708 - RNA, 19 nt, Artificial Sequence
  Description of Artificial Sequence: Synthetic oligonucleotide
  Antisense Strand to SEQ ID NO: 409707
gauaccaaugaugacuucc

SEQ ID NO: 409709 - RNA, 19 nt, Artificial Sequence
  Description of Artificial Sequence: Synthetic oligonucleotide
  Sense Strand Starting at position 1159 of SEQ ID NO: 319216
ggaaguuguugguuugaua

SEQ ID NO: 409710 - RNA, 19 nt, Artificial Sequence
  Description of Artificial Sequence: Synthetic oligonucleotide
  Antisense Strand to SEQ ID NO: 409709
uaucaaaccaacaacuucc

SEQ ID NO: 409711 - RNA, 19 nt, Artificial Sequence
  Description of Artificial Sequence: Synthetic oligonucleotide
  Sense Strand Starting at position 1160 of SEQ ID NO: 315263
ugacaaaucugagucuuga

SEQ ID NO: 409712 - RNA, 19 nt, Artificial Sequence
  Description of Artificial Sequence: Synthetic oligonucleotide
  Antisense Strand to SEQ ID NO: 409711
ucaagacucagauuuguca

SEQ ID NO: 409713 - RNA, 19 nt, Artificial Sequence
  Description of Artificial Sequence: Synthetic oligonucleotide
  Sense Strand Starting at position 1160 of SEQ ID NO: 315354
aggaaagugcucuguggau

SEQ ID NO: 409714 - RNA, 19 nt, Artificial Sequence
  Description of Artificial Sequence: Synthetic oligonucleotide
  Antisense Strand to SEQ ID NO: 409713
auccacagagcacuuuccu

SEQ ID NO: 409715 - RNA, 19 nt, Artificial Sequence
  Description of Artificial Sequence: Synthetic oligonucleotide
  Sense Strand Starting at position 1160 of SEQ ID NO: 315356
gaaagugcucuguggauau

SEQ ID NO: 409716 - RNA, 19 nt, Artificial Sequence
  Description of Artificial Sequence: Synthetic oligonucleotide
  Antisense Strand to SEQ ID NO: 409715
auauccacagagcacuuuc

SEQ ID NO: 409717 - RNA, 19 nt, Artificial Sequence
  Description of Artificial Sequence: Synthetic oligonucleotide
  Sense Strand Starting at position 1160 of SEQ ID NO: 315377
gagccagcauguucuggaa

SEQ ID NO: 409718 - RNA, 19 nt, Artificial Sequence
  Description of Artificial Sequence: Synthetic oligonucleotide
  Antisense Strand to SEQ ID NO: 409717
uuccagaacaugcuggcuc

SEQ ID NO: 409719 - RNA, 19 nt, Artificial Sequence
  Description of Artificial Sequence: Synthetic oligonucleotide
  Sense Strand Starting at position 1160 of SEQ ID NO: 315392
ggaagcugccgucagauau

SEQ ID NO: 409720 - RNA, 19 nt, Artificial Sequence
  Description of Artificial Sequence: Synthetic oligonucleotide
  Antisense Strand to SEQ ID NO: 409719
auaucugacggcagcuucc

SEQ ID NO: 409721 - RNA, 19 nt, Artificial Sequence
  Description of Artificial Sequence: Synthetic oligonucleotide
  Sense Strand Starting at position 1160 of SEQ ID NO: 315398
ugccgucagauaugacuga

SEQ ID NO: 409722 - RNA, 19 nt, Artificial Sequence
  Description of Artificial Sequence: Synthetic oligonucleotide
  Antisense Strand to SEQ ID NO: 409721
ucagucauaucugacggca

SEQ ID NO: 409723 - RNA, 19 nt, Artificial Sequence
  Description of Artificial Sequence: Synthetic oligonucleotide
  Sense Strand Starting at position 1160 of SEQ ID NO: 315612
gugagaaagauguaggugu

SEQ ID NO: 409724 - RNA, 19 nt, Artificial Sequence
  Description of Artificial Sequence: Synthetic oligonucleotide
  Antisense Strand to SEQ ID NO: 409723
acaccuacaucuuucucac

SEQ ID NO: 409725 - RNA, 19 nt, Artificial Sequence
  Description of Artificial Sequence: Synthetic oligonucleotide
  Sense Strand Starting at position 1160 of SEQ ID NO: 315616
gaaagauguagguguugga

SEQ ID NO: 409726 - RNA, 19 nt, Artificial Sequence
  Description of Artificial Sequence: Synthetic oligonucleotide
  Antisense Strand to SEQ ID NO: 409725
uccaacaccuacaucuuuc

SEQ ID NO: 409727 - RNA, 19 nt, Artificial Sequence
  Description of Artificial Sequence: Synthetic oligonucleotide
  Sense Strand Starting at position 1160 of SEQ ID NO: 315626
gguguuggaaucuacaacu

SEQ ID NO: 409728 - RNA, 19 nt, Artificial Sequence
  Description of Artificial Sequence: Synthetic oligonucleotide
  Antisense Strand to SEQ ID NO: 409727
aguuguagauuccaacacc

SEQ ID NO: 409729 - RNA, 19 nt, Artificial Sequence
  Description of Artificial Sequence: Synthetic oligonucleotide
  Sense Strand Starting at position 1160 of SEQ ID NO: 315704
cagggaauuccaggucuau

SEQ ID NO: 409730 - RNA, 19 nt, Artificial Sequence
  Description of Artificial Sequence: Synthetic oligonucleotide
  Antisense Strand to SEQ ID NO: 409729
auagaccuggaauucccug

SEQ ID NO: 409731 - RNA, 19 nt, Artificial Sequence
  Description of Artificial Sequence: Synthetic oligonucleotide
  Sense Strand Starting at position 1160 of SEQ ID NO: 315959
auaguaguguaagugggaa

SEQ ID NO: 409732 - RNA, 19 nt, Artificial Sequence
  Description of Artificial Sequence: Synthetic oligonucleotide
  Antisense Strand to SEQ ID NO: 409731
uucccacuuacacuacuau

SEQ ID NO: 409733 - RNA, 19 nt, Artificial Sequence
  Description of Artificial Sequence: Synthetic oligonucleotide
  Sense Strand Starting at position 1160 of SEQ ID NO: 316029
gcaggauguuaaucagaag

SEQ ID NO: 409734 - RNA, 19 nt, Artificial Sequence
  Description of Artificial Sequence: Synthetic oligonucleotide
  Antisense Strand to SEQ ID NO: 409733
cuucugauuaacauccugc

SEQ ID NO: 409735 - RNA, 19 nt, Artificial Sequence
  Description of Artificial Sequence: Synthetic oligonucleotide
  Sense Strand Starting at position 1160 of SEQ ID NO: 316183
caaacagaccguuguuaaa

SEQ ID NO: 409736 - RNA, 19 nt, Artificial Sequence
  Description of Artificial Sequence: Synthetic oligonucleotide
  Antisense Strand to SEQ ID NO: 409735
uuuaacaacggucuguuug

SEQ ID NO: 409737 - RNA, 19 nt, Artificial Sequence
  Description of Artificial Sequence: Synthetic oligonucleotide
  Sense Strand Starting at position 1160 of SEQ ID NO: 316291
cgccaacuuccugaaguca

SEQ ID NO: 409738 - RNA, 19 nt, Artificial Sequence
  Description of Artificial Sequence: Synthetic oligonucleotide
  Antisense Strand to SEQ ID NO: 409737
ugacuucaggaaguuggcg

SEQ ID NO: 409739 - RNA, 19 nt, Artificial Sequence
  Description of Artificial Sequence: Synthetic oligonucleotide
  Sense Strand Starting at position 1160 of SEQ ID NO: 316383
cugggacguuucuuaaauu

SEQ ID NO: 409740 - RNA, 19 nt, Artificial Sequence
  Description of Artificial Sequence: Synthetic oligonucleotide
  Antisense Strand to SEQ ID NO: 409739
aauuuaagaaacgucccag

SEQ ID NO: 409741 - RNA, 19 nt, Artificial Sequence
  Description of Artificial Sequence: Synthetic oligonucleotide
  Sense Strand Starting at position 1160 of SEQ ID NO: 316498
cgauguccagccgacuaaa

SEQ ID NO: 409742 - RNA, 19 nt, Artificial Sequence
  Description of Artificial Sequence: Synthetic oligonucleotide
  Antisense Strand to SEQ ID NO: 409741
uuuagucggcuggacaucg

SEQ ID NO: 409743 - RNA, 19 nt, Artificial Sequence
  Description of Artificial Sequence: Synthetic oligonucleotide
  Sense Strand Starting at position 1160 of SEQ ID NO: 316612
ccacguggauuccuaagua

SEQ ID NO: 409744 - RNA, 19 nt, Artificial Sequence
  Description of Artificial Sequence: Synthetic oligonucleotide
  Antisense Strand to SEQ ID NO: 409743
uacuuaggaauccacgugg

SEQ ID NO: 409745 - RNA, 19 nt, Artificial Sequence
  Description of Artificial Sequence: Synthetic oligonucleotide
  Sense Strand Starting at position 1160 of SEQ ID NO: 316616
guggauuccuaaguauccu

SEQ ID NO: 409746 - RNA, 19 nt, Artificial Sequence
  Description of Artificial Sequence: Synthetic oligonucleotide
  Antisense Strand to SEQ ID NO: 409745
aggauacuuaggaauccac

SEQ ID NO: 409747 - RNA, 19 nt, Artificial Sequence
  Description of Artificial Sequence: Synthetic oligonucleotide
  Sense Strand Starting at position 1160 of SEQ ID NO: 317025
ggcgguuuagggugggaaa

SEQ ID NO: 409748 - RNA, 19 nt, Artificial Sequence
  Description of Artificial Sequence: Synthetic oligonucleotide
  Antisense Strand to SEQ ID NO: 409747
uuucccacccuaaaccgcc

SEQ ID NO: 409749 - RNA, 19 nt, Artificial Sequence
  Description of Artificial Sequence: Synthetic oligonucleotide
  Sense Strand Starting at position 1160 of SEQ ID NO: 317330
uagguugcgacuuggacaa

SEQ ID NO: 409750 - RNA, 19 nt, Artificial Sequence
  Description of Artificial Sequence: Synthetic oligonucleotide
  Antisense Strand to SEQ ID NO: 409749
uuguccaagucgcaaccua

SEQ ID NO: 409751 - RNA, 19 nt, Artificial Sequence
  Description of Artificial Sequence: Synthetic oligonucleotide
  Sense Strand Starting at position 1160 of SEQ ID NO: 317424
cgguuuaaagaaugacuau

SEQ ID NO: 409752 - RNA, 19 nt, Artificial Sequence
  Description of Artificial Sequence: Synthetic oligonucleotide
  Antisense Strand to SEQ ID NO: 409751
auagucauucuuuaaaccg

SEQ ID NO: 409753 - RNA, 19 nt, Artificial Sequence
  Description of Artificial Sequence: Synthetic oligonucleotide
  Sense Strand Starting at position 1160 of SEQ ID NO: 317509
ugaaauggacaguguagua

SEQ ID NO: 409754 - RNA, 19 nt, Artificial Sequence
  Description of Artificial Sequence: Synthetic oligonucleotide
  Antisense Strand to SEQ ID NO: 409753
uacuacacuguccauuuca

SEQ ID NO: 409755 - RNA, 19 nt, Artificial Sequence
  Description of Artificial Sequence: Synthetic oligonucleotide
  Sense Strand Starting at position 1160 of SEQ ID NO: 317579
auugcagauuucgaagauu

SEQ ID NO: 409756 - RNA, 19 nt, Artificial Sequence
  Description of Artificial Sequence: Synthetic oligonucleotide
  Antisense Strand to SEQ ID NO: 409755
aaucuucgaaaucugcaau

SEQ ID NO: 409757 - RNA, 19 nt, Artificial Sequence
  Description of Artificial Sequence: Synthetic oligonucleotide
  Sense Strand Starting at position 1160 of SEQ ID NO: 317640
agagaauaccaccgucaag

SEQ ID NO: 409758 - RNA, 19 nt, Artificial Sequence
  Description of Artificial Sequence: Synthetic oligonucleotide
  Antisense Strand to SEQ ID NO: 409757
cuugacggugguauucucu

SEQ ID NO: 409759 - RNA, 19 nt, Artificial Sequence
  Description of Artificial Sequence: Synthetic oligonucleotide
  Sense Strand Starting at position 1160 of SEQ ID NO: 317643
gaauaccaccgucaagauu

SEQ ID NO: 409760 - RNA, 19 nt, Artificial Sequence
  Description of Artificial Sequence: Synthetic oligonucleotide
  Antisense Strand to SEQ ID NO: 409759
aaucuugacggugguauuc

SEQ ID NO: 409761 - RNA, 19 nt, Artificial Sequence
  Description of Artificial Sequence: Synthetic oligonucleotide
  Sense Strand Starting at position 1160 of SEQ ID NO: 317720
cacagacguucucugauac

SEQ ID NO: 409762 - RNA, 19 nt, Artificial Sequence
  Description of Artificial Sequence: Synthetic oligonucleotide
  Antisense Strand to SEQ ID NO: 409761
guaucagagaacgucugug

SEQ ID NO: 409763 - RNA, 19 nt, Artificial Sequence
  Description of Artificial Sequence: Synthetic oligonucleotide
  Sense Strand Starting at position 1160 of SEQ ID NO: 317721
acagacguucucugauacu

SEQ ID NO: 409764 - RNA, 19 nt, Artificial Sequence
  Description of Artificial Sequence: Synthetic oligonucleotide
  Antisense Strand to SEQ ID NO: 409763
aguaucagagaacgucugu

SEQ ID NO: 409765 - RNA, 19 nt, Artificial Sequence
  Description of Artificial Sequence: Synthetic oligonucleotide
  Sense Strand Starting at position 1160 of SEQ ID NO: 317918
guuugacuuccaggacaga

SEQ ID NO: 409766 - RNA, 19 nt, Artificial Sequence
  Description of Artificial Sequence: Synthetic oligonucleotide
  Antisense Strand to SEQ ID NO: 409765
ucuguccuggaagucaaac

SEQ ID NO: 409767 - RNA, 19 nt, Artificial Sequence
  Description of Artificial Sequence: Synthetic oligonucleotide
  Sense Strand Starting at position 1160 of SEQ ID NO: 318015
ucagguaauguugacacau

SEQ ID NO: 409768 - RNA, 19 nt, Artificial Sequence
  Description of Artificial Sequence: Synthetic oligonucleotide
  Antisense Strand to SEQ ID NO: 409767
augugucaacauuaccuga

SEQ ID NO: 409769 - RNA, 19 nt, Artificial Sequence
  Description of Artificial Sequence: Synthetic oligonucleotide
  Sense Strand Starting at position 1160 of SEQ ID NO: 318017
agguaauguugacacauuu

SEQ ID NO: 409770 - RNA, 19 nt, Artificial Sequence
  Description of Artificial Sequence: Synthetic oligonucleotide
  Antisense Strand to SEQ ID NO: 409769
aaaugugucaacauuaccu

SEQ ID NO: 409771 - RNA, 19 nt, Artificial Sequence
  Description of Artificial Sequence: Synthetic oligonucleotide
  Sense Strand Starting at position 1160 of SEQ ID NO: 318120
gagguaaagccaggugaua

SEQ ID NO: 409772 - RNA, 19 nt, Artificial Sequence
  Description of Artificial Sequence: Synthetic oligonucleotide
  Antisense Strand to SEQ ID NO: 409771
uaucaccuggcuuuaccuc

SEQ ID NO: 409773 - RNA, 19 nt, Artificial Sequence
  Description of Artificial Sequence: Synthetic oligonucleotide
  Sense Strand Starting at position 1160 of SEQ ID NO: 318257
acauguuagccugaauugu

SEQ ID NO: 409774 - RNA, 19 nt, Artificial Sequence
  Description of Artificial Sequence: Synthetic oligonucleotide
  Antisense Strand to SEQ ID NO: 409773
acaauucaggcuaacaugu

SEQ ID NO: 409775 - RNA, 19 nt, Artificial Sequence
  Description of Artificial Sequence: Synthetic oligonucleotide
  Sense Strand Starting at position 1160 of SEQ ID NO: 318285
auuagacaguuguuaucau

SEQ ID NO: 409776 - RNA, 19 nt, Artificial Sequence
  Description of Artificial Sequence: Synthetic oligonucleotide
  Antisense Strand to SEQ ID NO: 409775
augauaacaacugucuaau

SEQ ID NO: 409777 - RNA, 19 nt, Artificial Sequence
  Description of Artificial Sequence: Synthetic oligonucleotide
  Sense Strand Starting at position 1160 of SEQ ID NO: 318488
agaguagaauuuggguaau

SEQ ID NO: 409778 - RNA, 19 nt, Artificial Sequence
  Description of Artificial Sequence: Synthetic oligonucleotide
  Antisense Strand to SEQ ID NO: 409777
auuacccaaauucuacucu

SEQ ID NO: 409779 - RNA, 19 nt, Artificial Sequence
  Description of Artificial Sequence: Synthetic oligonucleotide
  Sense Strand Starting at position 1160 of SEQ ID NO: 318953
ucucgaaauccugaccucu

SEQ ID NO: 409780 - RNA, 19 nt, Artificial Sequence
  Description of Artificial Sequence: Synthetic oligonucleotide
  Antisense Strand to SEQ ID NO: 409779
agaggucaggauuucgaga

SEQ ID NO: 409781 - RNA, 19 nt, Artificial Sequence
  Description of Artificial Sequence: Synthetic oligonucleotide
  Sense Strand Starting at position 1160 of SEQ ID NO: 319076
ugaggcagguucucuaaga

SEQ ID NO: 409782 - RNA, 19 nt, Artificial Sequence
  Description of Artificial Sequence: Synthetic oligonucleotide
  Antisense Strand to SEQ ID NO: 409781
ucuuagagaaccugccuca

SEQ ID NO: 409783 - RNA, 19 nt, Artificial Sequence
  Description of Artificial Sequence: Synthetic oligonucleotide
  Sense Strand Starting at position 1160 of SEQ ID NO: 319077
gaggcagguucucuaagau

SEQ ID NO: 409784 - RNA, 19 nt, Artificial Sequence
  Description of Artificial Sequence: Synthetic oligonucleotide
  Antisense Strand to SEQ ID NO: 409783
aucuuagagaaccugccuc

SEQ ID NO: 409785 - RNA, 19 nt, Artificial Sequence
  Description of Artificial Sequence: Synthetic oligonucleotide
  Sense Strand Starting at position 1160 of SEQ ID NO: 319083
gguucucuaagaugaugau

SEQ ID NO: 409786 - RNA, 19 nt, Artificial Sequence
  Description of Artificial Sequence: Synthetic oligonucleotide
  Antisense Strand to SEQ ID NO: 409785
aucaucaucuuagagaacc

SEQ ID NO: 409787 - RNA, 19 nt, Artificial Sequence
  Description of Artificial Sequence: Synthetic oligonucleotide
  Sense Strand Starting at position 1160 of SEQ ID NO: 319136
agcaguaaauguuccaaag

SEQ ID NO: 409788 - RNA, 19 nt, Artificial Sequence
  Description of Artificial Sequence: Synthetic oligonucleotide
  Antisense Strand to SEQ ID NO: 409787
cuuuggaacauuuacugcu

SEQ ID NO: 409789 - RNA, 19 nt, Artificial Sequence
  Description of Artificial Sequence: Synthetic oligonucleotide
  Sense Strand Starting at position 1160 of SEQ ID NO: 319216
ggucuuuaccaccauguuu

SEQ ID NO: 409790 - RNA, 19 nt, Artificial Sequence
  Description of Artificial Sequence: Synthetic oligonucleotide
  Antisense Strand to SEQ ID NO: 409789
aaacauggugguaaagacc

SEQ ID NO: 409791 - RNA, 19 nt, Artificial Sequence
  Description of Artificial Sequence: Synthetic oligonucleotide
  Sense Strand Starting at position 1161 of SEQ ID NO: 315269
ggcagaacuucucacuucu

SEQ ID NO: 409792 - RNA, 19 nt, Artificial Sequence
  Description of Artificial Sequence: Synthetic oligonucleotide
  Antisense Strand to SEQ ID NO: 409791
agaagugagaaguucugcc

SEQ ID NO: 409793 - RNA, 19 nt, Artificial Sequence
  Description of Artificial Sequence: Synthetic oligonucleotide
  Sense Strand Starting at position 1161 of SEQ ID NO: 315417
agccuugauugaguagaug

SEQ ID NO: 409794 - RNA, 19 nt, Artificial Sequence
  Description of Artificial Sequence: Synthetic oligonucleotide
  Antisense Strand to SEQ ID NO: 409793
caucuacucaaucaaggcu

SEQ ID NO: 409795 - RNA, 19 nt, Artificial Sequence
  Description of Artificial Sequence: Synthetic oligonucleotide
  Sense Strand Starting at position 1161 of SEQ ID NO: 315425
uugaguagaugagcgaaau

SEQ ID NO: 409796 - RNA, 19 nt, Artificial Sequence
  Description of Artificial Sequence: Synthetic oligonucleotide
  Antisense Strand to SEQ ID NO: 409795
auuucgcucaucuacucaa

SEQ ID NO: 409797 - RNA, 19 nt, Artificial Sequence
  Description of Artificial Sequence: Synthetic oligonucleotide
  Sense Strand Starting at position 1161 of SEQ ID NO: 315431
agaugagcgaaauguaucu

SEQ ID NO: 409798 - RNA, 19 nt, Artificial Sequence
  Description of Artificial Sequence: Synthetic oligonucleotide
  Antisense Strand to SEQ ID NO: 409797
agauacauuucgcucaucu

SEQ ID NO: 409799 - RNA, 19 nt, Artificial Sequence
  Description of Artificial Sequence: Synthetic oligonucleotide
  Sense Strand Starting at position 1161 of SEQ ID NO: 315436
agcgaaauguaucuucucu

SEQ ID NO: 409800 - RNA, 19 nt, Artificial Sequence
  Description of Artificial Sequence: Synthetic oligonucleotide
  Antisense Strand to SEQ ID NO: 409799
agagaagauacauuucgcu

SEQ ID NO: 409801 - RNA, 19 nt, Artificial Sequence
  Description of Artificial Sequence: Synthetic oligonucleotide
  Sense Strand Starting at position 1161 of SEQ ID NO: 315438
cgaaauguaucuucucugu

SEQ ID NO: 409802 - RNA, 19 nt, Artificial Sequence
  Description of Artificial Sequence: Synthetic oligonucleotide
  Antisense Strand to SEQ ID NO: 409801
acagagaagauacauuucg

SEQ ID NO: 409803 - RNA, 19 nt, Artificial Sequence
  Description of Artificial Sequence: Synthetic oligonucleotide
  Sense Strand Starting at position 1161 of SEQ ID NO: 315442
auguaucuucucugugaag

SEQ ID NO: 409804 - RNA, 19 nt, Artificial Sequence
  Description of Artificial Sequence: Synthetic oligonucleotide
  Antisense Strand to SEQ ID NO: 409803
cuucacagagaagauacau

SEQ ID NO: 409805 - RNA, 19 nt, Artificial Sequence
  Description of Artificial Sequence: Synthetic oligonucleotide
  Sense Strand Starting at position 1161 of SEQ ID NO: 315462
acuccuuggucugcucaaa

SEQ ID NO: 409806 - RNA, 19 nt, Artificial Sequence
  Description of Artificial Sequence: Synthetic oligonucleotide
  Antisense Strand to SEQ ID NO: 409805
uuugagcagaccaaggagu

SEQ ID NO: 409807 - RNA, 19 nt, Artificial Sequence
  Description of Artificial Sequence: Synthetic oligonucleotide
  Sense Strand Starting at position 1161 of SEQ ID NO: 315473
ugcucaaaguacuuaugaa

SEQ ID NO: 409808 - RNA, 19 nt, Artificial Sequence
  Description of Artificial Sequence: Synthetic oligonucleotide
  Antisense Strand to SEQ ID NO: 409807
uucauaaguacuuugagca

SEQ ID NO: 409809 - RNA, 19 nt, Artificial Sequence
  Description of Artificial Sequence: Synthetic oligonucleotide
  Sense Strand Starting at position 1161 of SEQ ID NO: 315500
gcauguuuccauuagggaa

SEQ ID NO: 409810 - RNA, 19 nt, Artificial Sequence
  Description of Artificial Sequence: Synthetic oligonucleotide
  Antisense Strand to SEQ ID NO: 409809
uucccuaauggaaacaugc

SEQ ID NO: 409811 - RNA, 19 nt, Artificial Sequence
  Description of Artificial Sequence: Synthetic oligonucleotide
  Sense Strand Starting at position 1161 of SEQ ID NO: 315502
auguuuccauuagggaauu

SEQ ID NO: 409812 - RNA, 19 nt, Artificial Sequence
  Description of Artificial Sequence: Synthetic oligonucleotide
  Antisense Strand to SEQ ID NO: 409811
aauucccuaauggaaacau

SEQ ID NO: 409813 - RNA, 19 nt, Artificial Sequence
  Description of Artificial Sequence: Synthetic oligonucleotide
  Sense Strand Starting at position 1161 of SEQ ID NO: 315503
uguuuccauuagggaauua

SEQ ID NO: 409814 - RNA, 19 nt, Artificial Sequence
  Description of Artificial Sequence: Synthetic oligonucleotide
  Antisense Strand to SEQ ID NO: 409813
uaauucccuaauggaaaca

SEQ ID NO: 409815 - RNA, 19 nt, Artificial Sequence
  Description of Artificial Sequence: Synthetic oligonucleotide
  Sense Strand Starting at position 1161 of SEQ ID NO: 315632
aauucuugguucugugauu

SEQ ID NO: 409816 - RNA, 19 nt, Artificial Sequence
  Description of Artificial Sequence: Synthetic oligonucleotide
  Antisense Strand to SEQ ID NO: 409815
aaucacagaaccaagaauu

SEQ ID NO: 409817 - RNA, 19 nt, Artificial Sequence
  Description of Artificial Sequence: Synthetic oligonucleotide
  Sense Strand Starting at position 1161 of SEQ ID NO: 315637
uugguucugugauucagag

SEQ ID NO: 409818 - RNA, 19 nt, Artificial Sequence
  Description of Artificial Sequence: Synthetic oligonucleotide
  Antisense Strand to SEQ ID NO: 409817
cucugaaucacagaaccaa

SEQ ID NO: 409819 - RNA, 19 nt, Artificial Sequence
  Description of Artificial Sequence: Synthetic oligonucleotide
  Sense Strand Starting at position 1161 of SEQ ID NO: 315641
uucugugauucagaguggu

SEQ ID NO: 409820 - RNA, 19 nt, Artificial Sequence
  Description of Artificial Sequence: Synthetic oligonucleotide
  Antisense Strand to SEQ ID NO: 409819
accacucugaaucacagaa

SEQ ID NO: 409821 - RNA, 19 nt, Artificial Sequence
  Description of Artificial Sequence: Synthetic oligonucleotide
  Sense Strand Starting at position 1161 of SEQ ID NO: 315736
cuucuacugcagugauucu

SEQ ID NO: 409822 - RNA, 19 nt, Artificial Sequence
  Description of Artificial Sequence: Synthetic oligonucleotide
  Antisense Strand to SEQ ID NO: 409821
agaaucacugcaguagaag

SEQ ID NO: 409823 - RNA, 19 nt, Artificial Sequence
  Description of Artificial Sequence: Synthetic oligonucleotide
  Sense Strand Starting at position 1161 of SEQ ID NO: 315831
aaaucaguuucucuggagu

SEQ ID NO: 409824 - RNA, 19 nt, Artificial Sequence
  Description of Artificial Sequence: Synthetic oligonucleotide
  Antisense Strand to SEQ ID NO: 409823
acuccagagaaacugauuu

SEQ ID NO: 409825 - RNA, 19 nt, Artificial Sequence
  Description of Artificial Sequence: Synthetic oligonucleotide
  Sense Strand Starting at position 1161 of SEQ ID NO: 315833
aucaguuucucuggaguag

SEQ ID NO: 409826 - RNA, 19 nt, Artificial Sequence
  Description of Artificial Sequence: Synthetic oligonucleotide
  Antisense Strand to SEQ ID NO: 409825
cuacuccagagaaacugau

SEQ ID NO: 409827 - RNA, 19 nt, Artificial Sequence
  Description of Artificial Sequence: Synthetic oligonucleotide
  Sense Strand Starting at position 1161 of SEQ ID NO: 315952
acugcuaggucuucgaguu

SEQ ID NO: 409828 - RNA, 19 nt, Artificial Sequence
  Description of Artificial Sequence: Synthetic oligonucleotide
  Antisense Strand to SEQ ID NO: 409827
aacucgaagaccuagcagu

SEQ ID NO: 409829 - RNA, 19 nt, Artificial Sequence
  Description of Artificial Sequence: Synthetic oligonucleotide
  Sense Strand Starting at position 1161 of SEQ ID NO: 315953
cugcuaggucuucgaguuu

SEQ ID NO: 409830 - RNA, 19 nt, Artificial Sequence
  Description of Artificial Sequence: Synthetic oligonucleotide
  Antisense Strand to SEQ ID NO: 409829
aaacucgaagaccuagcag

SEQ ID NO: 409831 - RNA, 19 nt, Artificial Sequence
  Description of Artificial Sequence: Synthetic oligonucleotide
  Sense Strand Starting at position 1161 of SEQ ID NO: 316026
guagucuccuuccaccaaa

SEQ ID NO: 409832 - RNA, 19 nt, Artificial Sequence
  Description of Artificial Sequence: Synthetic oligonucleotide
  Antisense Strand to SEQ ID NO: 409831
uuugguggaaggagacuac

SEQ ID NO: 409833 - RNA, 19 nt, Artificial Sequence
  Description of Artificial Sequence: Synthetic oligonucleotide
  Sense Strand Starting at position 1161 of SEQ ID NO: 317396
gcucguccauuggucagaa

SEQ ID NO: 409834 - RNA, 19 nt, Artificial Sequence
  Description of Artificial Sequence: Synthetic oligonucleotide
  Antisense Strand to SEQ ID NO: 409833
uucugaccaauggacgagc

SEQ ID NO: 409835 - RNA, 19 nt, Artificial Sequence
  Description of Artificial Sequence: Synthetic oligonucleotide
  Sense Strand Starting at position 1161 of SEQ ID NO: 317400
guccauuggucagaagcca

SEQ ID NO: 409836 - RNA, 19 nt, Artificial Sequence
  Description of Artificial Sequence: Synthetic oligonucleotide
  Antisense Strand to SEQ ID NO: 409835
uggcuucugaccaauggac

SEQ ID NO: 409837 - RNA, 19 nt, Artificial Sequence
  Description of Artificial Sequence: Synthetic oligonucleotide
  Sense Strand Starting at position 1161 of SEQ ID NO: 317723
gaacuauccgccuggugaa

SEQ ID NO: 409838 - RNA, 19 nt, Artificial Sequence
  Description of Artificial Sequence: Synthetic oligonucleotide
  Antisense Strand to SEQ ID NO: 409837
uucaccaggcggauaguuc

SEQ ID NO: 409839 - RNA, 19 nt, Artificial Sequence
  Description of Artificial Sequence: Synthetic oligonucleotide
  Sense Strand Starting at position 1161 of SEQ ID NO: 317724
aacuauccgccuggugaaa

SEQ ID NO: 409840 - RNA, 19 nt, Artificial Sequence
  Description of Artificial Sequence: Synthetic oligonucleotide
  Antisense Strand to SEQ ID NO: 409839
uuucaccaggcggauaguu

SEQ ID NO: 409841 - RNA, 19 nt, Artificial Sequence
  Description of Artificial Sequence: Synthetic oligonucleotide
  Sense Strand Starting at position 1161 of SEQ ID NO: 317894
gcgugaugccagcuacuca

SEQ ID NO: 409842 - RNA, 19 nt, Artificial Sequence
  Description of Artificial Sequence: Synthetic oligonucleotide
  Antisense Strand to SEQ ID NO: 409841
ugaguagcuggcaucacgc

SEQ ID NO: 409843 - RNA, 19 nt, Artificial Sequence
  Description of Artificial Sequence: Synthetic oligonucleotide
  Sense Strand Starting at position 1161 of SEQ ID NO: 318071
augacaaagggcugauauu

SEQ ID NO: 409844 - RNA, 19 nt, Artificial Sequence
  Description of Artificial Sequence: Synthetic oligonucleotide
  Antisense Strand to SEQ ID NO: 409843
aauaucagcccuuugucau

SEQ ID NO: 409845 - RNA, 19 nt, Artificial Sequence
  Description of Artificial Sequence: Synthetic oligonucleotide
  Sense Strand Starting at position 1161 of SEQ ID NO: 318078
agggcugauauucgaugua

SEQ ID NO: 409846 - RNA, 19 nt, Artificial Sequence
  Description of Artificial Sequence: Synthetic oligonucleotide
  Antisense Strand to SEQ ID NO: 409845
uacaucgaauaucagcccu

SEQ ID NO: 409847 - RNA, 19 nt, Artificial Sequence
  Description of Artificial Sequence: Synthetic oligonucleotide
  Sense Strand Starting at position 1161 of SEQ ID NO: 318083
ugauauucgauguagcaau

SEQ ID NO: 409848 - RNA, 19 nt, Artificial Sequence
  Description of Artificial Sequence: Synthetic oligonucleotide
  Antisense Strand to SEQ ID NO: 409847
auugcuacaucgaauauca

SEQ ID NO: 409849 - RNA, 19 nt, Artificial Sequence
  Description of Artificial Sequence: Synthetic oligonucleotide
  Sense Strand Starting at position 1161 of SEQ ID NO: 318125
uaguauuaagacuggcaaa

SEQ ID NO: 409850 - RNA, 19 nt, Artificial Sequence
  Description of Artificial Sequence: Synthetic oligonucleotide
  Antisense Strand to SEQ ID NO: 409849
uuugccagucuuaauacua

SEQ ID NO: 409851 - RNA, 19 nt, Artificial Sequence
  Description of Artificial Sequence: Synthetic oligonucleotide
  Sense Strand Starting at position 1161 of SEQ ID NO: 318126
aguauuaagacuggcaaag

SEQ ID NO: 409852 - RNA, 19 nt, Artificial Sequence
  Description of Artificial Sequence: Synthetic oligonucleotide
  Antisense Strand to SEQ ID NO: 409851
cuuugccagucuuaauacu

SEQ ID NO: 409853 - RNA, 19 nt, Artificial Sequence
  Description of Artificial Sequence: Synthetic oligonucleotide
  Sense Strand Starting at position 1161 of SEQ ID NO: 318250
gaaauccugucucuaguga

SEQ ID NO: 409854 - RNA, 19 nt, Artificial Sequence
  Description of Artificial Sequence: Synthetic oligonucleotide
  Antisense Strand to SEQ ID NO: 409853
ucacuagagacaggauuuc

SEQ ID NO: 409855 - RNA, 19 nt, Artificial Sequence
  Description of Artificial Sequence: Synthetic oligonucleotide
  Sense Strand Starting at position 1161 of SEQ ID NO: 318254
uccugucucuagugaaaca

SEQ ID NO: 409856 - RNA, 19 nt, Artificial Sequence
  Description of Artificial Sequence: Synthetic oligonucleotide
  Antisense Strand to SEQ ID NO: 409855
uguuucacuagagacagga

SEQ ID NO: 409857 - RNA, 19 nt, Artificial Sequence
  Description of Artificial Sequence: Synthetic oligonucleotide
  Sense Strand Starting at position 1161 of SEQ ID NO: 318479
augaaacgcuccuaaauau

SEQ ID NO: 409858 - RNA, 19 nt, Artificial Sequence
  Description of Artificial Sequence: Synthetic oligonucleotide
  Antisense Strand to SEQ ID NO: 409857
auauuuaggagcguuucau

SEQ ID NO: 409859 - RNA, 19 nt, Artificial Sequence
  Description of Artificial Sequence: Synthetic oligonucleotide
  Sense Strand Starting at position 1161 of SEQ ID NO: 318877
acucguuagauuggcaaua

SEQ ID NO: 409860 - RNA, 19 nt, Artificial Sequence
  Description of Artificial Sequence: Synthetic oligonucleotide
  Antisense Strand to SEQ ID NO: 409859
uauugccaaucuaacgagu

SEQ ID NO: 409861 - RNA, 19 nt, Artificial Sequence
  Description of Artificial Sequence: Synthetic oligonucleotide
  Sense Strand Starting at position 1161 of SEQ ID NO: 318878
cucguuagauuggcaauaa

SEQ ID NO: 409862 - RNA, 19 nt, Artificial Sequence
  Description of Artificial Sequence: Synthetic oligonucleotide
  Antisense Strand to SEQ ID NO: 409861
uuauugccaaucuaacgag

SEQ ID NO: 409863 - RNA, 19 nt, Artificial Sequence
  Description of Artificial Sequence: Synthetic oligonucleotide
  Sense Strand Starting at position 1161 of SEQ ID NO: 318879
ucguuagauuggcaauaau

SEQ ID NO: 409864 - RNA, 19 nt, Artificial Sequence
  Description of Artificial Sequence: Synthetic oligonucleotide
  Antisense Strand to SEQ ID NO: 409863
auuauugccaaucuaacga

SEQ ID NO: 409865 - RNA, 19 nt, Artificial Sequence
  Description of Artificial Sequence: Synthetic oligonucleotide
  Sense Strand Starting at position 1162 of SEQ ID NO: 315786
cucguaacacuuugaauca

SEQ ID NO: 409866 - RNA, 19 nt, Artificial Sequence
  Description of Artificial Sequence: Synthetic oligonucleotide
  Antisense Strand to SEQ ID NO: 409865
ugauucaaaguguuacgag

SEQ ID NO: 409867 - RNA, 19 nt, Artificial Sequence
  Description of Artificial Sequence: Synthetic oligonucleotide
  Sense Strand Starting at position 1162 of SEQ ID NO: 315887
ucuagaucaccaugaaguu

SEQ ID NO: 409868 - RNA, 19 nt, Artificial Sequence
  Description of Artificial Sequence: Synthetic oligonucleotide
  Antisense Strand to SEQ ID NO: 409867
aacuucauggugaucuaga

SEQ ID NO: 409869 - RNA, 19 nt, Artificial Sequence
  Description of Artificial Sequence: Synthetic oligonucleotide
  Sense Strand Starting at position 1162 of SEQ ID NO: 316025
gggauuaaagucgaugucu

SEQ ID NO: 409870 - RNA, 19 nt, Artificial Sequence
  Description of Artificial Sequence: Synthetic oligonucleotide
  Antisense Strand to SEQ ID NO: 409869
agacaucgacuuuaauccc

SEQ ID NO: 409871 - RNA, 19 nt, Artificial Sequence
  Description of Artificial Sequence: Synthetic oligonucleotide
  Sense Strand Starting at position 1162 of SEQ ID NO: 316030
uaaagucgaugucuaucaa

SEQ ID NO: 409872 - RNA, 19 nt, Artificial Sequence
  Description of Artificial Sequence: Synthetic oligonucleotide
  Antisense Strand to SEQ ID NO: 409871
uugauagacaucgacuuua

SEQ ID NO: 409873 - RNA, 19 nt, Artificial Sequence
  Description of Artificial Sequence: Synthetic oligonucleotide
  Sense Strand Starting at position 1162 of SEQ ID NO: 316031
aaagucgaugucuaucaau

SEQ ID NO: 409874 - RNA, 19 nt, Artificial Sequence
  Description of Artificial Sequence: Synthetic oligonucleotide
  Antisense Strand to SEQ ID NO: 409873
auugauagacaucgacuuu

SEQ ID NO: 409875 - RNA, 19 nt, Artificial Sequence
  Description of Artificial Sequence: Synthetic oligonucleotide
  Sense Strand Starting at position 1162 of SEQ ID NO: 316044
aucaauguccuguauuauu

SEQ ID NO: 409876 - RNA, 19 nt, Artificial Sequence
  Description of Artificial Sequence: Synthetic oligonucleotide
  Antisense Strand to SEQ ID NO: 409875
aauaauacaggacauugau

SEQ ID NO: 409877 - RNA, 19 nt, Artificial Sequence
  Description of Artificial Sequence: Synthetic oligonucleotide
  Sense Strand Starting at position 1162 of SEQ ID NO: 316159
uagacaagccucuaaaggu

SEQ ID NO: 409878 - RNA, 19 nt, Artificial Sequence
  Description of Artificial Sequence: Synthetic oligonucleotide
  Antisense Strand to SEQ ID NO: 409877
accuuuagaggcuugucua

SEQ ID NO: 409879 - RNA, 19 nt, Artificial Sequence
  Description of Artificial Sequence: Synthetic oligonucleotide
  Sense Strand Starting at position 1162 of SEQ ID NO: 316240
guagaagccuuucccaaag

SEQ ID NO: 409880 - RNA, 19 nt, Artificial Sequence
  Description of Artificial Sequence: Synthetic oligonucleotide
  Antisense Strand to SEQ ID NO: 409879
cuuugggaaaggcuucuac

SEQ ID NO: 409881 - RNA, 19 nt, Artificial Sequence
  Description of Artificial Sequence: Synthetic oligonucleotide
  Sense Strand Starting at position 1162 of SEQ ID NO: 316268
gggugagcaguuuaccaaa

SEQ ID NO: 409882 - RNA, 19 nt, Artificial Sequence
  Description of Artificial Sequence: Synthetic oligonucleotide
  Antisense Strand to SEQ ID NO: 409881
uuugguaaacugcucaccc

SEQ ID NO: 409883 - RNA, 19 nt, Artificial Sequence
  Description of Artificial Sequence: Synthetic oligonucleotide
  Sense Strand Starting at position 1162 of SEQ ID NO: 316315
ccgaguauaaaucagguaa

SEQ ID NO: 409884 - RNA, 19 nt, Artificial Sequence
  Description of Artificial Sequence: Synthetic oligonucleotide
  Antisense Strand to SEQ ID NO: 409883
uuaccugauuuauacucgg

SEQ ID NO: 409885 - RNA, 19 nt, Artificial Sequence
  Description of Artificial Sequence: Synthetic oligonucleotide
  Sense Strand Starting at position 1162 of SEQ ID NO: 316376
gcauccaaagcucagaaau

SEQ ID NO: 409886 - RNA, 19 nt, Artificial Sequence
  Description of Artificial Sequence: Synthetic oligonucleotide
  Antisense Strand to SEQ ID NO: 409885
auuucugagcuuuggaugc

SEQ ID NO: 409887 - RNA, 19 nt, Artificial Sequence
  Description of Artificial Sequence: Synthetic oligonucleotide
  Sense Strand Starting at position 1162 of SEQ ID NO: 316388
cagaaaucgagcugugaga

SEQ ID NO: 409888 - RNA, 19 nt, Artificial Sequence
  Description of Artificial Sequence: Synthetic oligonucleotide
  Antisense Strand to SEQ ID NO: 409887
ucucacagcucgauuucug

SEQ ID NO: 409889 - RNA, 19 nt, Artificial Sequence
  Description of Artificial Sequence: Synthetic oligonucleotide
  Sense Strand Starting at position 1162 of SEQ ID NO: 316390
gaaaucgagcugugagaaa

SEQ ID NO: 409890 - RNA, 19 nt, Artificial Sequence
  Description of Artificial Sequence: Synthetic oligonucleotide
  Antisense Strand to SEQ ID NO: 409889
uuucucacagcucgauuuc

SEQ ID NO: 409891 - RNA, 19 nt, Artificial Sequence
  Description of Artificial Sequence: Synthetic oligonucleotide
  Sense Strand Starting at position 1162 of SEQ ID NO: 316426
agaugacuugcgugaagga

SEQ ID NO: 409892 - RNA, 19 nt, Artificial Sequence
  Description of Artificial Sequence: Synthetic oligonucleotide
  Antisense Strand to SEQ ID NO: 409891
uccuucacgcaagucaucu

SEQ ID NO: 409893 - RNA, 19 nt, Artificial Sequence
  Description of Artificial Sequence: Synthetic oligonucleotide
  Sense Strand Starting at position 1162 of SEQ ID NO: 316520
agggauucuccucggguca

SEQ ID NO: 409894 - RNA, 19 nt, Artificial Sequence
  Description of Artificial Sequence: Synthetic oligonucleotide
  Antisense Strand to SEQ ID NO: 409893
ugacccgaggagaaucccu

SEQ ID NO: 409895 - RNA, 19 nt, Artificial Sequence
  Description of Artificial Sequence: Synthetic oligonucleotide
  Sense Strand Starting at position 1162 of SEQ ID NO: 316521
gggauucuccucgggucaa

SEQ ID NO: 409896 - RNA, 19 nt, Artificial Sequence
  Description of Artificial Sequence: Synthetic oligonucleotide
  Antisense Strand to SEQ ID NO: 409895
uugacccgaggagaauccc

SEQ ID NO: 409897 - RNA, 19 nt, Artificial Sequence
  Description of Artificial Sequence: Synthetic oligonucleotide
  Sense Strand Starting at position 1162 of SEQ ID NO: 317382
uccagcuuggcgucgaaau

SEQ ID NO: 409898 - RNA, 19 nt, Artificial Sequence
  Description of Artificial Sequence: Synthetic oligonucleotide
  Antisense Strand to SEQ ID NO: 409897
auuucgacgccaagcugga

SEQ ID NO: 409899 - RNA, 19 nt, Artificial Sequence
  Description of Artificial Sequence: Synthetic oligonucleotide
  Sense Strand Starting at position 1162 of SEQ ID NO: 317389
uggcgucgaaauuaacaaa

SEQ ID NO: 409900 - RNA, 19 nt, Artificial Sequence
  Description of Artificial Sequence: Synthetic oligonucleotide
  Antisense Strand to SEQ ID NO: 409899
uuuguuaauuucgacgcca

SEQ ID NO: 409901 - RNA, 19 nt, Artificial Sequence
  Description of Artificial Sequence: Synthetic oligonucleotide
  Sense Strand Starting at position 1162 of SEQ ID NO: 317691
uuccuaacagucuggaaga

SEQ ID NO: 409902 - RNA, 19 nt, Artificial Sequence
  Description of Artificial Sequence: Synthetic oligonucleotide
  Antisense Strand to SEQ ID NO: 409901
ucuuccagacuguuaggaa

SEQ ID NO: 409903 - RNA, 19 nt, Artificial Sequence
  Description of Artificial Sequence: Synthetic oligonucleotide
  Sense Strand Starting at position 1162 of SEQ ID NO: 317904
gaaguagaacugcauguaa

SEQ ID NO: 409904 - RNA, 19 nt, Artificial Sequence
  Description of Artificial Sequence: Synthetic oligonucleotide
  Antisense Strand to SEQ ID NO: 409903
uuacaugcaguucuacuuc

SEQ ID NO: 409905 - RNA, 19 nt, Artificial Sequence
  Description of Artificial Sequence: Synthetic oligonucleotide
  Sense Strand Starting at position 1162 of SEQ ID NO: 317906
aguagaacugcauguaaca

SEQ ID NO: 409906 - RNA, 19 nt, Artificial Sequence
  Description of Artificial Sequence: Synthetic oligonucleotide
  Antisense Strand to SEQ ID NO: 409905
uguuacaugcaguucuacu

SEQ ID NO: 409907 - RNA, 19 nt, Artificial Sequence
  Description of Artificial Sequence: Synthetic oligonucleotide
  Sense Strand Starting at position 1162 of SEQ ID NO: 317997
ucauuuauaguugguguuu

SEQ ID NO: 409908 - RNA, 19 nt, Artificial Sequence
  Description of Artificial Sequence: Synthetic oligonucleotide
  Antisense Strand to SEQ ID NO: 409907
aaacaccaacuauaaauga

SEQ ID NO: 409909 - RNA, 19 nt, Artificial Sequence
  Description of Artificial Sequence: Synthetic oligonucleotide
  Sense Strand Starting at position 1162 of SEQ ID NO: 317998
cauuuauaguugguguuua

SEQ ID NO: 409910 - RNA, 19 nt, Artificial Sequence
  Description of Artificial Sequence: Synthetic oligonucleotide
  Antisense Strand to SEQ ID NO: 409909
uaaacaccaacuauaaaug

SEQ ID NO: 409911 - RNA, 19 nt, Artificial Sequence
  Description of Artificial Sequence: Synthetic oligonucleotide
  Sense Strand Starting at position 1162 of SEQ ID NO: 318170
gccaguguucuuuauagag

SEQ ID NO: 409912 - RNA, 19 nt, Artificial Sequence
  Description of Artificial Sequence: Synthetic oligonucleotide
  Antisense Strand to SEQ ID NO: 409911
cucuauaaagaacacuggc

SEQ ID NO: 409913 - RNA, 19 nt, Artificial Sequence
  Description of Artificial Sequence: Synthetic oligonucleotide
  Sense Strand Starting at position 1162 of SEQ ID NO: 318174
guguucuuuauagagucua

SEQ ID NO: 409914 - RNA, 19 nt, Artificial Sequence
  Description of Artificial Sequence: Synthetic oligonucleotide
  Antisense Strand to SEQ ID NO: 409913
uagacucuauaaagaacac

SEQ ID NO: 409915 - RNA, 19 nt, Artificial Sequence
  Description of Artificial Sequence: Synthetic oligonucleotide
  Sense Strand Starting at position 1162 of SEQ ID NO: 318179
cuuuauagagucuauacuu

SEQ ID NO: 409916 - RNA, 19 nt, Artificial Sequence
  Description of Artificial Sequence: Synthetic oligonucleotide
  Antisense Strand to SEQ ID NO: 409915
aaguauagacucuauaaag

SEQ ID NO: 409917 - RNA, 19 nt, Artificial Sequence
  Description of Artificial Sequence: Synthetic oligonucleotide
  Sense Strand Starting at position 1162 of SEQ ID NO: 318184
uagagucuauacuuaggua

SEQ ID NO: 409918 - RNA, 19 nt, Artificial Sequence
  Description of Artificial Sequence: Synthetic oligonucleotide
  Antisense Strand to SEQ ID NO: 409917
uaccuaaguauagacucua

SEQ ID NO: 409919 - RNA, 19 nt, Artificial Sequence
  Description of Artificial Sequence: Synthetic oligonucleotide
  Sense Strand Starting at position 1162 of SEQ ID NO: 318188
gucuauacuuagguaucua

SEQ ID NO: 409920 - RNA, 19 nt, Artificial Sequence
  Description of Artificial Sequence: Synthetic oligonucleotide
  Antisense Strand to SEQ ID NO: 409919
uagauaccuaaguauagac

SEQ ID NO: 409921 - RNA, 19 nt, Artificial Sequence
  Description of Artificial Sequence: Synthetic oligonucleotide
  Sense Strand Starting at position 1162 of SEQ ID NO: 318313
aauacagaucugcauggua

SEQ ID NO: 409922 - RNA, 19 nt, Artificial Sequence
  Description of Artificial Sequence: Synthetic oligonucleotide
  Antisense Strand to SEQ ID NO: 409921
uaccaugcagaucuguauu

SEQ ID NO: 409923 - RNA, 19 nt, Artificial Sequence
  Description of Artificial Sequence: Synthetic oligonucleotide
  Sense Strand Starting at position 1162 of SEQ ID NO: 318413
guagaugcccucuaucaaa

SEQ ID NO: 409924 - RNA, 19 nt, Artificial Sequence
  Description of Artificial Sequence: Synthetic oligonucleotide
  Antisense Strand to SEQ ID NO: 409923
uuugauagagggcaucuac

SEQ ID NO: 409925 - RNA, 19 nt, Artificial Sequence
  Description of Artificial Sequence: Synthetic oligonucleotide
  Sense Strand Starting at position 1162 of SEQ ID NO: 318445
gugaaucuaggucacauua

SEQ ID NO: 409926 - RNA, 19 nt, Artificial Sequence
  Description of Artificial Sequence: Synthetic oligonucleotide
  Antisense Strand to SEQ ID NO: 409925
uaaugugaccuagauucac

SEQ ID NO: 409927 - RNA, 19 nt, Artificial Sequence
  Description of Artificial Sequence: Synthetic oligonucleotide
  Sense Strand Starting at position 1162 of SEQ ID NO: 318591
agaagauucuaguccucaa

SEQ ID NO: 409928 - RNA, 19 nt, Artificial Sequence
  Description of Artificial Sequence: Synthetic oligonucleotide
  Antisense Strand to SEQ ID NO: 409927
uugaggacuagaaucuucu

SEQ ID NO: 409929 - RNA, 19 nt, Artificial Sequence
  Description of Artificial Sequence: Synthetic oligonucleotide
  Sense Strand Starting at position 1162 of SEQ ID NO: 318746
uucuauguucuuuaaugga

SEQ ID NO: 409930 - RNA, 19 nt, Artificial Sequence
  Description of Artificial Sequence: Synthetic oligonucleotide
  Antisense Strand to SEQ ID NO: 409929
uccauuaaagaacauagaa

SEQ ID NO: 409931 - RNA, 19 nt, Artificial Sequence
  Description of Artificial Sequence: Synthetic oligonucleotide
  Sense Strand Starting at position 1162 of SEQ ID NO: 318821
agaagaacucugugcuuga

SEQ ID NO: 409932 - RNA, 19 nt, Artificial Sequence
  Description of Artificial Sequence: Synthetic oligonucleotide
  Antisense Strand to SEQ ID NO: 409931
ucaagcacagaguucuucu

SEQ ID NO: 409933 - RNA, 19 nt, Artificial Sequence
  Description of Artificial Sequence: Synthetic oligonucleotide
  Sense Strand Starting at position 1162 of SEQ ID NO: 318822
gaagaacucugugcuugau

SEQ ID NO: 409934 - RNA, 19 nt, Artificial Sequence
  Description of Artificial Sequence: Synthetic oligonucleotide
  Antisense Strand to SEQ ID NO: 409933
aucaagcacagaguucuuc

SEQ ID NO: 409935 - RNA, 19 nt, Artificial Sequence
  Description of Artificial Sequence: Synthetic oligonucleotide
  Sense Strand Starting at position 1162 of SEQ ID NO: 318825
gaacucugugcuugauuuc

SEQ ID NO: 409936 - RNA, 19 nt, Artificial Sequence
  Description of Artificial Sequence: Synthetic oligonucleotide
  Antisense Strand to SEQ ID NO: 409935
gaaaucaagcacagaguuc

SEQ ID NO: 409937 - RNA, 19 nt, Artificial Sequence
  Description of Artificial Sequence: Synthetic oligonucleotide
  Sense Strand Starting at position 1162 of SEQ ID NO: 318870
ucuuaauaauuugggaaca

SEQ ID NO: 409938 - RNA, 19 nt, Artificial Sequence
  Description of Artificial Sequence: Synthetic oligonucleotide
  Antisense Strand to SEQ ID NO: 409937
uguucccaaauuauuaaga

SEQ ID NO: 409939 - RNA, 19 nt, Artificial Sequence
  Description of Artificial Sequence: Synthetic oligonucleotide
  Sense Strand Starting at position 1162 of SEQ ID NO: 318871
cuuaauaauuugggaacaa

SEQ ID NO: 409940 - RNA, 19 nt, Artificial Sequence
  Description of Artificial Sequence: Synthetic oligonucleotide
  Antisense Strand to SEQ ID NO: 409939
uuguucccaaauuauuaag

SEQ ID NO: 409941 - RNA, 19 nt, Artificial Sequence
  Description of Artificial Sequence: Synthetic oligonucleotide
  Sense Strand Starting at position 1162 of SEQ ID NO: 318959
cuuagugauguauaaccca

SEQ ID NO: 409942 - RNA, 19 nt, Artificial Sequence
  Description of Artificial Sequence: Synthetic oligonucleotide
  Antisense Strand to SEQ ID NO: 409941
uggguuauacaucacuaag

SEQ ID NO: 409943 - RNA, 19 nt, Artificial Sequence
  Description of Artificial Sequence: Synthetic oligonucleotide
  Sense Strand Starting at position 1162 of SEQ ID NO: 319003
uguuuagcgauagugucuu

SEQ ID NO: 409944 - RNA, 19 nt, Artificial Sequence
  Description of Artificial Sequence: Synthetic oligonucleotide
  Antisense Strand to SEQ ID NO: 409943
aagacacuaucgcuaaaca

SEQ ID NO: 409945 - RNA, 19 nt, Artificial Sequence
  Description of Artificial Sequence: Synthetic oligonucleotide
  Sense Strand Starting at position 1163 of SEQ ID NO: 316814
gucucaucaucugauacag

SEQ ID NO: 409946 - RNA, 19 nt, Artificial Sequence
  Description of Artificial Sequence: Synthetic oligonucleotide
  Antisense Strand to SEQ ID NO: 409945
cuguaucagaugaugagac

SEQ ID NO: 409947 - RNA, 19 nt, Artificial Sequence
  Description of Artificial Sequence: Synthetic oligonucleotide
  Sense Strand Starting at position 1163 of SEQ ID NO: 316989
cacagaguauugugggauu

SEQ ID NO: 409948 - RNA, 19 nt, Artificial Sequence
  Description of Artificial Sequence: Synthetic oligonucleotide
  Antisense Strand to SEQ ID NO: 409947
aaucccacaauacucugug

SEQ ID NO: 409949 - RNA, 19 nt, Artificial Sequence
  Description of Artificial Sequence: Synthetic oligonucleotide
  Sense Strand Starting at position 1163 of SEQ ID NO: 316991
cagaguauugugggauuaa

SEQ ID NO: 409950 - RNA, 19 nt, Artificial Sequence
  Description of Artificial Sequence: Synthetic oligonucleotide
  Antisense Strand to SEQ ID NO: 409949
uuaaucccacaauacucug

SEQ ID NO: 409951 - RNA, 19 nt, Artificial Sequence
  Description of Artificial Sequence: Synthetic oligonucleotide
  Sense Strand Starting at position 1163 of SEQ ID NO: 316992
agaguauugugggauuaaa

SEQ ID NO: 409952 - RNA, 19 nt, Artificial Sequence
  Description of Artificial Sequence: Synthetic oligonucleotide
  Antisense Strand to SEQ ID NO: 409951
uuuaaucccacaauacucu

SEQ ID NO: 409953 - RNA, 19 nt, Artificial Sequence
  Description of Artificial Sequence: Synthetic oligonucleotide
  Sense Strand Starting at position 1163 of SEQ ID NO: 317011
ggaguacugugucaaggga

SEQ ID NO: 409954 - RNA, 19 nt, Artificial Sequence
  Description of Artificial Sequence: Synthetic oligonucleotide
  Antisense Strand to SEQ ID NO: 409953
ucccuugacacaguacucc

SEQ ID NO: 409955 - RNA, 19 nt, Artificial Sequence
  Description of Artificial Sequence: Synthetic oligonucleotide
  Sense Strand Starting at position 1163 of SEQ ID NO: 317056
cucaucuauucuggugaca

SEQ ID NO: 409956 - RNA, 19 nt, Artificial Sequence
  Description of Artificial Sequence: Synthetic oligonucleotide
  Antisense Strand to SEQ ID NO: 409955
ugucaccagaauagaugag

SEQ ID NO: 409957 - RNA, 19 nt, Artificial Sequence
  Description of Artificial Sequence: Synthetic oligonucleotide
  Sense Strand Starting at position 1163 of SEQ ID NO: 317079
ggcugacaguaucuacuuu

SEQ ID NO: 409958 - RNA, 19 nt, Artificial Sequence
  Description of Artificial Sequence: Synthetic oligonucleotide
  Antisense Strand to SEQ ID NO: 409957
aaaguagauacugucagcc

SEQ ID NO: 409959 - RNA, 19 nt, Artificial Sequence
  Description of Artificial Sequence: Synthetic oligonucleotide
  Sense Strand Starting at position 1163 of SEQ ID NO: 317213
guccacuuauggugacuca

SEQ ID NO: 409960 - RNA, 19 nt, Artificial Sequence
  Description of Artificial Sequence: Synthetic oligonucleotide
  Antisense Strand to SEQ ID NO: 409959
ugagucaccauaaguggac

SEQ ID NO: 409961 - RNA, 19 nt, Artificial Sequence
  Description of Artificial Sequence: Synthetic oligonucleotide
  Sense Strand Starting at position 1163 of SEQ ID NO: 317214
uccacuuauggugacucaa

SEQ ID NO: 409962 - RNA, 19 nt, Artificial Sequence
  Description of Artificial Sequence: Synthetic oligonucleotide
  Antisense Strand to SEQ ID NO: 409961
uugagucaccauaagugga

SEQ ID NO: 409963 - RNA, 19 nt, Artificial Sequence
  Description of Artificial Sequence: Synthetic oligonucleotide
  Sense Strand Starting at position 1163 of SEQ ID NO: 317251
acacuagaguucuggcaag

SEQ ID NO: 409964 - RNA, 19 nt, Artificial Sequence
  Description of Artificial Sequence: Synthetic oligonucleotide
  Antisense Strand to SEQ ID NO: 409963
cuugccagaacucuagugu

SEQ ID NO: 409965 - RNA, 19 nt, Artificial Sequence
  Description of Artificial Sequence: Synthetic oligonucleotide
  Sense Strand Starting at position 1163 of SEQ ID NO: 317263
uggcaagcuauguguucua

SEQ ID NO: 409966 - RNA, 19 nt, Artificial Sequence
  Description of Artificial Sequence: Synthetic oligonucleotide
  Antisense Strand to SEQ ID NO: 409965
uagaacacauagcuugcca

SEQ ID NO: 409967 - RNA, 19 nt, Artificial Sequence
  Description of Artificial Sequence: Synthetic oligonucleotide
  Sense Strand Starting at position 1163 of SEQ ID NO: 317266
caagcuauguguucuaaag

SEQ ID NO: 409968 - RNA, 19 nt, Artificial Sequence
  Description of Artificial Sequence: Synthetic oligonucleotide
  Antisense Strand to SEQ ID NO: 409967
cuuuagaacacauagcuug

SEQ ID NO: 409969 - RNA, 19 nt, Artificial Sequence
  Description of Artificial Sequence: Synthetic oligonucleotide
  Sense Strand Starting at position 1163 of SEQ ID NO: 318133
gugguaaucccucaaagau

SEQ ID NO: 409970 - RNA, 19 nt, Artificial Sequence
  Description of Artificial Sequence: Synthetic oligonucleotide
  Antisense Strand to SEQ ID NO: 409969
aucuuugagggauuaccac

SEQ ID NO: 409971 - RNA, 19 nt, Artificial Sequence
  Description of Artificial Sequence: Synthetic oligonucleotide
  Sense Strand Starting at position 1163 of SEQ ID NO: 318490
acgagaucacuuggacaua

SEQ ID NO: 409972 - RNA, 19 nt, Artificial Sequence
  Description of Artificial Sequence: Synthetic oligonucleotide
  Antisense Strand to SEQ ID NO: 409971
uauguccaagugaucucgu

SEQ ID NO: 409973 - RNA, 19 nt, Artificial Sequence
  Description of Artificial Sequence: Synthetic oligonucleotide
  Sense Strand Starting at position 1163 of SEQ ID NO: 318491
cgagaucacuuggacauaa

SEQ ID NO: 409974 - RNA, 19 nt, Artificial Sequence
  Description of Artificial Sequence: Synthetic oligonucleotide
  Antisense Strand to SEQ ID NO: 409973
uuauguccaagugaucucg

SEQ ID NO: 409975 - RNA, 19 nt, Artificial Sequence
  Description of Artificial Sequence: Synthetic oligonucleotide
  Sense Strand Starting at position 1163 of SEQ ID NO: 318887
ccaaauaaauaaucguuga

SEQ ID NO: 409976 - RNA, 19 nt, Artificial Sequence
  Description of Artificial Sequence: Synthetic oligonucleotide
  Antisense Strand to SEQ ID NO: 409975
ucaacgauuauuuauuugg

SEQ ID NO: 409977 - RNA, 19 nt, Artificial Sequence
  Description of Artificial Sequence: Synthetic oligonucleotide
  Sense Strand Starting at position 1163 of SEQ ID NO: 318966
aguaaagaugcagguauau

SEQ ID NO: 409978 - RNA, 19 nt, Artificial Sequence
  Description of Artificial Sequence: Synthetic oligonucleotide
  Antisense Strand to SEQ ID NO: 409977
auauaccugcaucuuuacu

SEQ ID NO: 409979 - RNA, 19 nt, Artificial Sequence
  Description of Artificial Sequence: Synthetic oligonucleotide
  Sense Strand Starting at position 1163 of SEQ ID NO: 318975
gcagguauauaugugggua

SEQ ID NO: 409980 - RNA, 19 nt, Artificial Sequence
  Description of Artificial Sequence: Synthetic oligonucleotide
  Antisense Strand to SEQ ID NO: 409979
uacccacauauauaccugc

SEQ ID NO: 409981 - RNA, 19 nt, Artificial Sequence
  Description of Artificial Sequence: Synthetic oligonucleotide
  Sense Strand Starting at position 1163 of SEQ ID NO: 318976
cagguauauauguggguaa

SEQ ID NO: 409982 - RNA, 19 nt, Artificial Sequence
  Description of Artificial Sequence: Synthetic oligonucleotide
  Antisense Strand to SEQ ID NO: 409981
uuacccacauauauaccug

SEQ ID NO: 409983 - RNA, 19 nt, Artificial Sequence
  Description of Artificial Sequence: Synthetic oligonucleotide
  Sense Strand Starting at position 1163 of SEQ ID NO: 318977
agguauauauguggguaau

SEQ ID NO: 409984 - RNA, 19 nt, Artificial Sequence
  Description of Artificial Sequence: Synthetic oligonucleotide
  Antisense Strand to SEQ ID NO: 409983
auuacccacauauauaccu

SEQ ID NO: 409985 - RNA, 19 nt, Artificial Sequence
  Description of Artificial Sequence: Synthetic oligonucleotide
  Sense Strand Starting at position 1163 of SEQ ID NO: 318978
gguauauauguggguaauu

SEQ ID NO: 409986 - RNA, 19 nt, Artificial Sequence
  Description of Artificial Sequence: Synthetic oligonucleotide
  Antisense Strand to SEQ ID NO: 409985
aauuacccacauauauacc

SEQ ID NO: 409987 - RNA, 19 nt, Artificial Sequence
  Description of Artificial Sequence: Synthetic oligonucleotide
  Sense Strand Starting at position 1163 of SEQ ID NO: 318979
guauauauguggguaauuc

SEQ ID NO: 409988 - RNA, 19 nt, Artificial Sequence
  Description of Artificial Sequence: Synthetic oligonucleotide
  Antisense Strand to SEQ ID NO: 409987
gaauuacccacauauauac

SEQ ID NO: 409989 - RNA, 19 nt, Artificial Sequence
  Description of Artificial Sequence: Synthetic oligonucleotide
  Sense Strand Starting at position 1163 of SEQ ID NO: 318983
auauguggguaauuccuua

SEQ ID NO: 409990 - RNA, 19 nt, Artificial Sequence
  Description of Artificial Sequence: Synthetic oligonucleotide
  Antisense Strand to SEQ ID NO: 409989
uaaggaauuacccacauau

SEQ ID NO: 409991 - RNA, 19 nt, Artificial Sequence
  Description of Artificial Sequence: Synthetic oligonucleotide
  Sense Strand Starting at position 1163 of SEQ ID NO: 318987
guggguaauuccuuaacag

SEQ ID NO: 409992 - RNA, 19 nt, Artificial Sequence
  Description of Artificial Sequence: Synthetic oligonucleotide
  Antisense Strand to SEQ ID NO: 409991
cuguuaaggaauuacccac

SEQ ID NO: 409993 - RNA, 19 nt, Artificial Sequence
  Description of Artificial Sequence: Synthetic oligonucleotide
  Sense Strand Starting at position 1163 of SEQ ID NO: 318988
uggguaauuccuuaacagu

SEQ ID NO: 409994 - RNA, 19 nt, Artificial Sequence
  Description of Artificial Sequence: Synthetic oligonucleotide
  Antisense Strand to SEQ ID NO: 409993
acuguuaaggaauuaccca

SEQ ID NO: 409995 - RNA, 19 nt, Artificial Sequence
  Description of Artificial Sequence: Synthetic oligonucleotide
  Sense Strand Starting at position 1163 of SEQ ID NO: 318991
guaauuccuuaacaguuua

SEQ ID NO: 409996 - RNA, 19 nt, Artificial Sequence
  Description of Artificial Sequence: Synthetic oligonucleotide
  Antisense Strand to SEQ ID NO: 409995
uaaacuguuaaggaauuac

SEQ ID NO: 409997 - RNA, 19 nt, Artificial Sequence
  Description of Artificial Sequence: Synthetic oligonucleotide
  Sense Strand Starting at position 1163 of SEQ ID NO: 319192
guagaaauauacugucccu

SEQ ID NO: 409998 - RNA, 19 nt, Artificial Sequence
  Description of Artificial Sequence: Synthetic oligonucleotide
  Antisense Strand to SEQ ID NO: 409997
agggacaguauauuucuac

SEQ ID NO: 409999 - RNA, 19 nt, Artificial Sequence
  Description of Artificial Sequence: Synthetic oligonucleotide
  Sense Strand Starting at position 1164 of SEQ ID NO: 315303
gagauuuguuguuacacug

SEQ ID NO: 410000 - RNA, 19 nt, Artificial Sequence
  Description of Artificial Sequence: Synthetic oligonucleotide
  Antisense Strand to SEQ ID NO: 409999
caguguaacaacaaaucuc

SEQ ID NO: 410001 - RNA, 19 nt, Artificial Sequence
  Description of Artificial Sequence: Synthetic oligonucleotide
  Sense Strand Starting at position 1164 of SEQ ID NO: 315383
ggcccucuccgucaaauga

SEQ ID NO: 410002 - RNA, 19 nt, Artificial Sequence
  Description of Artificial Sequence: Synthetic oligonucleotide
  Antisense Strand to SEQ ID NO: 410001
ucauuugacggagagggcc

SEQ ID NO: 410003 - RNA, 19 nt, Artificial Sequence
  Description of Artificial Sequence: Synthetic oligonucleotide
  Sense Strand Starting at position 1164 of SEQ ID NO: 315509
uacccauguugagagaaau

SEQ ID NO: 410004 - RNA, 19 nt, Artificial Sequence
  Description of Artificial Sequence: Synthetic oligonucleotide
  Antisense Strand to SEQ ID NO: 410003
auuucucucaacaugggua

SEQ ID NO: 410005 - RNA, 19 nt, Artificial Sequence
  Description of Artificial Sequence: Synthetic oligonucleotide
  Sense Strand Starting at position 1164 of SEQ ID NO: 315515
uguugagagaaaugucuca

SEQ ID NO: 410006 - RNA, 19 nt, Artificial Sequence
  Description of Artificial Sequence: Synthetic oligonucleotide
  Antisense Strand to SEQ ID NO: 410005
ugagacauuucucucaaca

SEQ ID NO: 410007 - RNA, 19 nt, Artificial Sequence
  Description of Artificial Sequence: Synthetic oligonucleotide
  Sense Strand Starting at position 1164 of SEQ ID NO: 315520
agagaaaugucucaggauc

SEQ ID NO: 410008 - RNA, 19 nt, Artificial Sequence
  Description of Artificial Sequence: Synthetic oligonucleotide
  Antisense Strand to SEQ ID NO: 410007
gauccugagacauuucucu

SEQ ID NO: 410009 - RNA, 19 nt, Artificial Sequence
  Description of Artificial Sequence: Synthetic oligonucleotide
  Sense Strand Starting at position 1164 of SEQ ID NO: 315585
agcuuucaguggucugaga

SEQ ID NO: 410010 - RNA, 19 nt, Artificial Sequence
  Description of Artificial Sequence: Synthetic oligonucleotide
  Antisense Strand to SEQ ID NO: 410009
ucucagaccacugaaagcu

SEQ ID NO: 410011 - RNA, 19 nt, Artificial Sequence
  Description of Artificial Sequence: Synthetic oligonucleotide
  Sense Strand Starting at position 1164 of SEQ ID NO: 315745
cguccucauuggccaaaua

SEQ ID NO: 410012 - RNA, 19 nt, Artificial Sequence
  Description of Artificial Sequence: Synthetic oligonucleotide
  Antisense Strand to SEQ ID NO: 410011
uauuuggccaaugaggacg

SEQ ID NO: 410013 - RNA, 19 nt, Artificial Sequence
  Description of Artificial Sequence: Synthetic oligonucleotide
  Sense Strand Starting at position 1164 of SEQ ID NO: 315746
guccucauuggccaaauaa

SEQ ID NO: 410014 - RNA, 19 nt, Artificial Sequence
  Description of Artificial Sequence: Synthetic oligonucleotide
  Antisense Strand to SEQ ID NO: 410013
uuauuuggccaaugaggac

SEQ ID NO: 410015 - RNA, 19 nt, Artificial Sequence
  Description of Artificial Sequence: Synthetic oligonucleotide
  Sense Strand Starting at position 1164 of SEQ ID NO: 315793
ccuaaagguuaggauaaca

SEQ ID NO: 410016 - RNA, 19 nt, Artificial Sequence
  Description of Artificial Sequence: Synthetic oligonucleotide
  Antisense Strand to SEQ ID NO: 410015
uguuauccuaaccuuuagg

SEQ ID NO: 410017 - RNA, 19 nt, Artificial Sequence
  Description of Artificial Sequence: Synthetic oligonucleotide
  Sense Strand Starting at position 1164 of SEQ ID NO: 315917
ugacuacugguccagugaa

SEQ ID NO: 410018 - RNA, 19 nt, Artificial Sequence
  Description of Artificial Sequence: Synthetic oligonucleotide
  Antisense Strand to SEQ ID NO: 410017
uucacuggaccaguaguca

SEQ ID NO: 410019 - RNA, 19 nt, Artificial Sequence
  Description of Artificial Sequence: Synthetic oligonucleotide
  Sense Strand Starting at position 1164 of SEQ ID NO: 316563
ggagaaguguuugaaacca

SEQ ID NO: 410020 - RNA, 19 nt, Artificial Sequence
  Description of Artificial Sequence: Synthetic oligonucleotide
  Antisense Strand to SEQ ID NO: 410019
ugguuucaaacacuucucc

SEQ ID NO: 410021 - RNA, 19 nt, Artificial Sequence
  Description of Artificial Sequence: Synthetic oligonucleotide
  Sense Strand Starting at position 1164 of SEQ ID NO: 316677
agucaaguuccguaaagca

SEQ ID NO: 410022 - RNA, 19 nt, Artificial Sequence
  Description of Artificial Sequence: Synthetic oligonucleotide
  Antisense Strand to SEQ ID NO: 410021
ugcuuuacggaacuugacu

SEQ ID NO: 410023 - RNA, 19 nt, Artificial Sequence
  Description of Artificial Sequence: Synthetic oligonucleotide
  Sense Strand Starting at position 1164 of SEQ ID NO: 316738
ugucauaaauaucaaagga

SEQ ID NO: 410024 - RNA, 19 nt, Artificial Sequence
  Description of Artificial Sequence: Synthetic oligonucleotide
  Antisense Strand to SEQ ID NO: 410023
uccuuugauauuuaugaca

SEQ ID NO: 410025 - RNA, 19 nt, Artificial Sequence
  Description of Artificial Sequence: Synthetic oligonucleotide
  Sense Strand Starting at position 1164 of SEQ ID NO: 316824
ugcucagucaguuggagua

SEQ ID NO: 410026 - RNA, 19 nt, Artificial Sequence
  Description of Artificial Sequence: Synthetic oligonucleotide
  Antisense Strand to SEQ ID NO: 410025
uacuccaacugacugagca

SEQ ID NO: 410027 - RNA, 19 nt, Artificial Sequence
  Description of Artificial Sequence: Synthetic oligonucleotide
  Sense Strand Starting at position 1164 of SEQ ID NO: 316888
guguuaugaaguuaugugu

SEQ ID NO: 410028 - RNA, 19 nt, Artificial Sequence
  Description of Artificial Sequence: Synthetic oligonucleotide
  Antisense Strand to SEQ ID NO: 410027
acacauaacuucauaacac

SEQ ID NO: 410029 - RNA, 19 nt, Artificial Sequence
  Description of Artificial Sequence: Synthetic oligonucleotide
  Sense Strand Starting at position 1164 of SEQ ID NO: 316895
gaaguuaugugugacauuu

SEQ ID NO: 410030 - RNA, 19 nt, Artificial Sequence
  Description of Artificial Sequence: Synthetic oligonucleotide
  Antisense Strand to SEQ ID NO: 410029
aaaugucacacauaacuuc

SEQ ID NO: 410031 - RNA, 19 nt, Artificial Sequence
  Description of Artificial Sequence: Synthetic oligonucleotide
  Sense Strand Starting at position 1164 of SEQ ID NO: 316903
gugugacauuucuaaacuu

SEQ ID NO: 410032 - RNA, 19 nt, Artificial Sequence
  Description of Artificial Sequence: Synthetic oligonucleotide
  Antisense Strand to SEQ ID NO: 410031
aaguuuagaaaugucacac

SEQ ID NO: 410033 - RNA, 19 nt, Artificial Sequence
  Description of Artificial Sequence: Synthetic oligonucleotide
  Sense Strand Starting at position 1164 of SEQ ID NO: 317222
aggugaugcagucaccaua

SEQ ID NO: 410034 - RNA, 19 nt, Artificial Sequence
  Description of Artificial Sequence: Synthetic oligonucleotide
  Antisense Strand to SEQ ID NO: 410033
uauggugacugcaucaccu

SEQ ID NO: 410035 - RNA, 19 nt, Artificial Sequence
  Description of Artificial Sequence: Synthetic oligonucleotide
  Sense Strand Starting at position 1164 of SEQ ID NO: 317309
ucugaaagcuuucucaguu

SEQ ID NO: 410036 - RNA, 19 nt, Artificial Sequence
  Description of Artificial Sequence: Synthetic oligonucleotide
  Antisense Strand to SEQ ID NO: 410035
aacugagaaagcuuucaga

SEQ ID NO: 410037 - RNA, 19 nt, Artificial Sequence
  Description of Artificial Sequence: Synthetic oligonucleotide
  Sense Strand Starting at position 1164 of SEQ ID NO: 317310
cugaaagcuuucucaguuc

SEQ ID NO: 410038 - RNA, 19 nt, Artificial Sequence
  Description of Artificial Sequence: Synthetic oligonucleotide
  Antisense Strand to SEQ ID NO: 410037
gaacugagaaagcuuucag

SEQ ID NO: 410039 - RNA, 19 nt, Artificial Sequence
  Description of Artificial Sequence: Synthetic oligonucleotide
  Sense Strand Starting at position 1164 of SEQ ID NO: 317458
aagauagucccuuguccag

SEQ ID NO: 410040 - RNA, 19 nt, Artificial Sequence
  Description of Artificial Sequence: Synthetic oligonucleotide
  Antisense Strand to SEQ ID NO: 410039
cuggacaagggacuaucuu

SEQ ID NO: 410041 - RNA, 19 nt, Artificial Sequence
  Description of Artificial Sequence: Synthetic oligonucleotide
  Sense Strand Starting at position 1164 of SEQ ID NO: 317477
cugcacauguuaucagaaa

SEQ ID NO: 410042 - RNA, 19 nt, Artificial Sequence
  Description of Artificial Sequence: Synthetic oligonucleotide
  Antisense Strand to SEQ ID NO: 410041
uuucugauaacaugugcag

SEQ ID NO: 410043 - RNA, 19 nt, Artificial Sequence
  Description of Artificial Sequence: Synthetic oligonucleotide
  Sense Strand Starting at position 1164 of SEQ ID NO: 317512
gcaccauaggccuacugaa

SEQ ID NO: 410044 - RNA, 19 nt, Artificial Sequence
  Description of Artificial Sequence: Synthetic oligonucleotide
  Antisense Strand to SEQ ID NO: 410043
uucaguaggccuauggugc

SEQ ID NO: 410045 - RNA, 19 nt, Artificial Sequence
  Description of Artificial Sequence: Synthetic oligonucleotide
  Sense Strand Starting at position 1164 of SEQ ID NO: 317574
cacauuaagguuugagugu

SEQ ID NO: 410046 - RNA, 19 nt, Artificial Sequence
  Description of Artificial Sequence: Synthetic oligonucleotide
  Antisense Strand to SEQ ID NO: 410045
acacucaaaccuuaaugug

SEQ ID NO: 410047 - RNA, 19 nt, Artificial Sequence
  Description of Artificial Sequence: Synthetic oligonucleotide
  Sense Strand Starting at position 1164 of SEQ ID NO: 317581
agguuugaguguucuguga

SEQ ID NO: 410048 - RNA, 19 nt, Artificial Sequence
  Description of Artificial Sequence: Synthetic oligonucleotide
  Antisense Strand to SEQ ID NO: 410047
ucacagaacacucaaaccu

SEQ ID NO: 410049 - RNA, 19 nt, Artificial Sequence
  Description of Artificial Sequence: Synthetic oligonucleotide
  Sense Strand Starting at position 1164 of SEQ ID NO: 317585
uugaguguucugugauacu

SEQ ID NO: 410050 - RNA, 19 nt, Artificial Sequence
  Description of Artificial Sequence: Synthetic oligonucleotide
  Antisense Strand to SEQ ID NO: 410049
aguaucacagaacacucaa

SEQ ID NO: 410051 - RNA, 19 nt, Artificial Sequence
  Description of Artificial Sequence: Synthetic oligonucleotide
  Sense Strand Starting at position 1164 of SEQ ID NO: 317774
ugcuuccugcuuuaaguau

SEQ ID NO: 410052 - RNA, 19 nt, Artificial Sequence
  Description of Artificial Sequence: Synthetic oligonucleotide
  Antisense Strand to SEQ ID NO: 410051
auacuuaaagcaggaagca

SEQ ID NO: 410053 - RNA, 19 nt, Artificial Sequence
  Description of Artificial Sequence: Synthetic oligonucleotide
  Sense Strand Starting at position 1164 of SEQ ID NO: 317828
aaagaauuaccgggucuag

SEQ ID NO: 410054 - RNA, 19 nt, Artificial Sequence
  Description of Artificial Sequence: Synthetic oligonucleotide
  Antisense Strand to SEQ ID NO: 410053
cuagacccgguaauucuuu

SEQ ID NO: 410055 - RNA, 19 nt, Artificial Sequence
  Description of Artificial Sequence: Synthetic oligonucleotide
  Sense Strand Starting at position 1164 of SEQ ID NO: 317861
cugguccaaacgugugaaa

SEQ ID NO: 410056 - RNA, 19 nt, Artificial Sequence
  Description of Artificial Sequence: Synthetic oligonucleotide
  Antisense Strand to SEQ ID NO: 410055
uuucacacguuuggaccag

SEQ ID NO: 410057 - RNA, 19 nt, Artificial Sequence
  Description of Artificial Sequence: Synthetic oligonucleotide
  Sense Strand Starting at position 1164 of SEQ ID NO: 317872
gugugaaaccugcauguua

SEQ ID NO: 410058 - RNA, 19 nt, Artificial Sequence
  Description of Artificial Sequence: Synthetic oligonucleotide
  Antisense Strand to SEQ ID NO: 410057
uaacaugcagguuucacac

SEQ ID NO: 410059 - RNA, 19 nt, Artificial Sequence
  Description of Artificial Sequence: Synthetic oligonucleotide
  Sense Strand Starting at position 1164 of SEQ ID NO: 317874
gugaaaccugcauguuaaa

SEQ ID NO: 410060 - RNA, 19 nt, Artificial Sequence
  Description of Artificial Sequence: Synthetic oligonucleotide
  Antisense Strand to SEQ ID NO: 410059
uuuaacaugcagguuucac

SEQ ID NO: 410061 - RNA, 19 nt, Artificial Sequence
  Description of Artificial Sequence: Synthetic oligonucleotide
  Sense Strand Starting at position 1164 of SEQ ID NO: 318014
guaacugguaucgaacaaa

SEQ ID NO: 410062 - RNA, 19 nt, Artificial Sequence
  Description of Artificial Sequence: Synthetic oligonucleotide
  Antisense Strand to SEQ ID NO: 410061
uuuguucgauaccaguuac

SEQ ID NO: 410063 - RNA, 19 nt, Artificial Sequence
  Description of Artificial Sequence: Synthetic oligonucleotide
  Sense Strand Starting at position 1164 of SEQ ID NO: 318017
acugguaucgaacaaauuc

SEQ ID NO: 410064 - RNA, 19 nt, Artificial Sequence
  Description of Artificial Sequence: Synthetic oligonucleotide
  Antisense Strand to SEQ ID NO: 410063
gaauuuguucgauaccagu

SEQ ID NO: 410065 - RNA, 19 nt, Artificial Sequence
  Description of Artificial Sequence: Synthetic oligonucleotide
  Sense Strand Starting at position 1164 of SEQ ID NO: 318159
ugcucuuauccugaaagac

SEQ ID NO: 410066 - RNA, 19 nt, Artificial Sequence
  Description of Artificial Sequence: Synthetic oligonucleotide
  Antisense Strand to SEQ ID NO: 410065
gucuuucaggauaagagca

SEQ ID NO: 410067 - RNA, 19 nt, Artificial Sequence
  Description of Artificial Sequence: Synthetic oligonucleotide
  Sense Strand Starting at position 1164 of SEQ ID NO: 318182
guuucuuacgugugaauaa

SEQ ID NO: 410068 - RNA, 19 nt, Artificial Sequence
  Description of Artificial Sequence: Synthetic oligonucleotide
  Antisense Strand to SEQ ID NO: 410067
uuauucacacguaagaaac

SEQ ID NO: 410069 - RNA, 19 nt, Artificial Sequence
  Description of Artificial Sequence: Synthetic oligonucleotide
  Sense Strand Starting at position 1164 of SEQ ID NO: 318254
aggcuucucucuucuaaag

SEQ ID NO: 410070 - RNA, 19 nt, Artificial Sequence
  Description of Artificial Sequence: Synthetic oligonucleotide
  Antisense Strand to SEQ ID NO: 410069
cuuuagaagagagaagccu

SEQ ID NO: 410071 - RNA, 19 nt, Artificial Sequence
  Description of Artificial Sequence: Synthetic oligonucleotide
  Sense Strand Starting at position 1164 of SEQ ID NO: 318266
ucuaaagacuauuaagguu

SEQ ID NO: 410072 - RNA, 19 nt, Artificial Sequence
  Description of Artificial Sequence: Synthetic oligonucleotide
  Antisense Strand to SEQ ID NO: 410071
aaccuuaauagucuuuaga

SEQ ID NO: 410073 - RNA, 19 nt, Artificial Sequence
  Description of Artificial Sequence: Synthetic oligonucleotide
  Sense Strand Starting at position 1164 of SEQ ID NO: 318273
acuauuaagguuugaggau

SEQ ID NO: 410074 - RNA, 19 nt, Artificial Sequence
  Description of Artificial Sequence: Synthetic oligonucleotide
  Antisense Strand to SEQ ID NO: 410073
auccucaaaccuuaauagu

SEQ ID NO: 410075 - RNA, 19 nt, Artificial Sequence
  Description of Artificial Sequence: Synthetic oligonucleotide
  Sense Strand Starting at position 1164 of SEQ ID NO: 318352
auggaaauuuacuaaguag

SEQ ID NO: 410076 - RNA, 19 nt, Artificial Sequence
  Description of Artificial Sequence: Synthetic oligonucleotide
  Antisense Strand to SEQ ID NO: 410075
cuacuuaguaaauuuccau

SEQ ID NO: 410077 - RNA, 19 nt, Artificial Sequence
  Description of Artificial Sequence: Synthetic oligonucleotide
  Sense Strand Starting at position 1164 of SEQ ID NO: 319198
cagagcucuccuuggcuga

SEQ ID NO: 410078 - RNA, 19 nt, Artificial Sequence
  Description of Artificial Sequence: Synthetic oligonucleotide
  Antisense Strand to SEQ ID NO: 410077
ucagccaaggagagcucug

SEQ ID NO: 410079 - RNA, 19 nt, Artificial Sequence
  Description of Artificial Sequence: Synthetic oligonucleotide
  Sense Strand Starting at position 1165 of SEQ ID NO: 315264
ggcauuucaguguguaagu

SEQ ID NO: 410080 - RNA, 19 nt, Artificial Sequence
  Description of Artificial Sequence: Synthetic oligonucleotide
  Antisense Strand to SEQ ID NO: 410079
acuuacacacugaaaugcc

SEQ ID NO: 410081 - RNA, 19 nt, Artificial Sequence
  Description of Artificial Sequence: Synthetic oligonucleotide
  Sense Strand Starting at position 1165 of SEQ ID NO: 315665
uugauuaauuggucaggga

SEQ ID NO: 410082 - RNA, 19 nt, Artificial Sequence
  Description of Artificial Sequence: Synthetic oligonucleotide
  Antisense Strand to SEQ ID NO: 410081
ucccugaccaauuaaucaa

SEQ ID NO: 410083 - RNA, 19 nt, Artificial Sequence
  Description of Artificial Sequence: Synthetic oligonucleotide
  Sense Strand Starting at position 1165 of SEQ ID NO: 315669
uuaauuggucagggaaagu

SEQ ID NO: 410084 - RNA, 19 nt, Artificial Sequence
  Description of Artificial Sequence: Synthetic oligonucleotide
  Antisense Strand to SEQ ID NO: 410083
acuuucccugaccaauuaa

SEQ ID NO: 410085 - RNA, 19 nt, Artificial Sequence
  Description of Artificial Sequence: Synthetic oligonucleotide
  Sense Strand Starting at position 1165 of SEQ ID NO: 315678
cagggaaaguccucccuga

SEQ ID NO: 410086 - RNA, 19 nt, Artificial Sequence
  Description of Artificial Sequence: Synthetic oligonucleotide
  Antisense Strand to SEQ ID NO: 410085
ucagggaggacuuucccug

SEQ ID NO: 410087 - RNA, 19 nt, Artificial Sequence
  Description of Artificial Sequence: Synthetic oligonucleotide
  Sense Strand Starting at position 1165 of SEQ ID NO: 315682
gaaaguccucccugaggug

SEQ ID NO: 410088 - RNA, 19 nt, Artificial Sequence
  Description of Artificial Sequence: Synthetic oligonucleotide
  Antisense Strand to SEQ ID NO: 410087
caccucagggaggacuuuc

SEQ ID NO: 410089 - RNA, 19 nt, Artificial Sequence
  Description of Artificial Sequence: Synthetic oligonucleotide
  Sense Strand Starting at position 1165 of SEQ ID NO: 315712
gcugauauaugaguuaaag

SEQ ID NO: 410090 - RNA, 19 nt, Artificial Sequence
  Description of Artificial Sequence: Synthetic oligonucleotide
  Antisense Strand to SEQ ID NO: 410089
cuuuaacucauauaucagc

SEQ ID NO: 410091 - RNA, 19 nt, Artificial Sequence
  Description of Artificial Sequence: Synthetic oligonucleotide
  Sense Strand Starting at position 1165 of SEQ ID NO: 315757
gggagaguacaguguuuca

SEQ ID NO: 410092 - RNA, 19 nt, Artificial Sequence
  Description of Artificial Sequence: Synthetic oligonucleotide
  Antisense Strand to SEQ ID NO: 410091
ugaaacacuguacucuccc

SEQ ID NO: 410093 - RNA, 19 nt, Artificial Sequence
  Description of Artificial Sequence: Synthetic oligonucleotide
  Sense Strand Starting at position 1165 of SEQ ID NO: 315814
augagcucgguguauacaa

SEQ ID NO: 410094 - RNA, 19 nt, Artificial Sequence
  Description of Artificial Sequence: Synthetic oligonucleotide
  Antisense Strand to SEQ ID NO: 410093
uuguauacaccgagcucau

SEQ ID NO: 410095 - RNA, 19 nt, Artificial Sequence
  Description of Artificial Sequence: Synthetic oligonucleotide
  Sense Strand Starting at position 1165 of SEQ ID NO: 315871
ggaguauaauagguuuaca

SEQ ID NO: 410096 - RNA, 19 nt, Artificial Sequence
  Description of Artificial Sequence: Synthetic oligonucleotide
  Antisense Strand to SEQ ID NO: 410095
uguaaaccuauuauacucc

SEQ ID NO: 410097 - RNA, 19 nt, Artificial Sequence
  Description of Artificial Sequence: Synthetic oligonucleotide
  Sense Strand Starting at position 1165 of SEQ ID NO: 315893
cauaaacggcuuuguaaac

SEQ ID NO: 410098 - RNA, 19 nt, Artificial Sequence
  Description of Artificial Sequence: Synthetic oligonucleotide
  Antisense Strand to SEQ ID NO: 410097
guuuacaaagccguuuaug

SEQ ID NO: 410099 - RNA, 19 nt, Artificial Sequence
  Description of Artificial Sequence: Synthetic oligonucleotide
  Sense Strand Starting at position 1165 of SEQ ID NO: 315905
uguaaacuagcauggaguu

SEQ ID NO: 410100 - RNA, 19 nt, Artificial Sequence
  Description of Artificial Sequence: Synthetic oligonucleotide
  Antisense Strand to SEQ ID NO: 410099
aacuccaugcuaguuuaca

SEQ ID NO: 410101 - RNA, 19 nt, Artificial Sequence
  Description of Artificial Sequence: Synthetic oligonucleotide
  Sense Strand Starting at position 1165 of SEQ ID NO: 315911
cuagcauggaguugggauu

SEQ ID NO: 410102 - RNA, 19 nt, Artificial Sequence
  Description of Artificial Sequence: Synthetic oligonucleotide
  Antisense Strand to SEQ ID NO: 410101
aaucccaacuccaugcuag

SEQ ID NO: 410103 - RNA, 19 nt, Artificial Sequence
  Description of Artificial Sequence: Synthetic oligonucleotide
  Sense Strand Starting at position 1165 of SEQ ID NO: 315930
uuauucuaagugcaaauga

SEQ ID NO: 410104 - RNA, 19 nt, Artificial Sequence
  Description of Artificial Sequence: Synthetic oligonucleotide
  Antisense Strand to SEQ ID NO: 410103
ucauuugcacuuagaauaa

SEQ ID NO: 410105 - RNA, 19 nt, Artificial Sequence
  Description of Artificial Sequence: Synthetic oligonucleotide
  Sense Strand Starting at position 1165 of SEQ ID NO: 316475
uagugaacagauugaagua

SEQ ID NO: 410106 - RNA, 19 nt, Artificial Sequence
  Description of Artificial Sequence: Synthetic oligonucleotide
  Antisense Strand to SEQ ID NO: 410105
uacuucaaucuguucacua

SEQ ID NO: 410107 - RNA, 19 nt, Artificial Sequence
  Description of Artificial Sequence: Synthetic oligonucleotide
  Sense Strand Starting at position 1165 of SEQ ID NO: 316487
ugaaguauaguucagaggu

SEQ ID NO: 410108 - RNA, 19 nt, Artificial Sequence
  Description of Artificial Sequence: Synthetic oligonucleotide
  Antisense Strand to SEQ ID NO: 410107
accucugaacuauacuuca

SEQ ID NO: 410109 - RNA, 19 nt, Artificial Sequence
  Description of Artificial Sequence: Synthetic oligonucleotide
  Sense Strand Starting at position 1165 of SEQ ID NO: 316513
uggauagcuuaugcaugaa

SEQ ID NO: 410110 - RNA, 19 nt, Artificial Sequence
  Description of Artificial Sequence: Synthetic oligonucleotide
  Antisense Strand to SEQ ID NO: 410109
uucaugcauaagcuaucca

SEQ ID NO: 410111 - RNA, 19 nt, Artificial Sequence
  Description of Artificial Sequence: Synthetic oligonucleotide
  Sense Strand Starting at position 1165 of SEQ ID NO: 316549
gagcuuuguccugaucaac

SEQ ID NO: 410112 - RNA, 19 nt, Artificial Sequence
  Description of Artificial Sequence: Synthetic oligonucleotide
  Antisense Strand to SEQ ID NO: 410111
guugaucaggacaaagcuc

SEQ ID NO: 410113 - RNA, 19 nt, Artificial Sequence
  Description of Artificial Sequence: Synthetic oligonucleotide
  Sense Strand Starting at position 1165 of SEQ ID NO: 316626
cugcuugaaccguaauaau

SEQ ID NO: 410114 - RNA, 19 nt, Artificial Sequence
  Description of Artificial Sequence: Synthetic oligonucleotide
  Antisense Strand to SEQ ID NO: 410113
auuauuacgguucaagcag

SEQ ID NO: 410115 - RNA, 19 nt, Artificial Sequence
  Description of Artificial Sequence: Synthetic oligonucleotide
  Sense Strand Starting at position 1165 of SEQ ID NO: 316652
acucguugccugcuuacua

SEQ ID NO: 410116 - RNA, 19 nt, Artificial Sequence
  Description of Artificial Sequence: Synthetic oligonucleotide
  Antisense Strand to SEQ ID NO: 410115
uaguaagcaggcaacgagu

SEQ ID NO: 410117 - RNA, 19 nt, Artificial Sequence
  Description of Artificial Sequence: Synthetic oligonucleotide
  Sense Strand Starting at position 1165 of SEQ ID NO: 316666
uacuauacgcccgaugauu

SEQ ID NO: 410118 - RNA, 19 nt, Artificial Sequence
  Description of Artificial Sequence: Synthetic oligonucleotide
  Antisense Strand to SEQ ID NO: 410117
aaucaucgggcguauagua

SEQ ID NO: 410119 - RNA, 19 nt, Artificial Sequence
  Description of Artificial Sequence: Synthetic oligonucleotide
  Sense Strand Starting at position 1165 of SEQ ID NO: 316668
cuauacgcccgaugauuua

SEQ ID NO: 410120 - RNA, 19 nt, Artificial Sequence
  Description of Artificial Sequence: Synthetic oligonucleotide
  Antisense Strand to SEQ ID NO: 410119
uaaaucaucgggcguauag

SEQ ID NO: 410121 - RNA, 19 nt, Artificial Sequence
  Description of Artificial Sequence: Synthetic oligonucleotide
  Sense Strand Starting at position 1165 of SEQ ID NO: 316726
aagugcuuugccucaguuu

SEQ ID NO: 410122 - RNA, 19 nt, Artificial Sequence
  Description of Artificial Sequence: Synthetic oligonucleotide
  Antisense Strand to SEQ ID NO: 410121
aaacugaggcaaagcacuu

SEQ ID NO: 410123 - RNA, 19 nt, Artificial Sequence
  Description of Artificial Sequence: Synthetic oligonucleotide
  Sense Strand Starting at position 1165 of SEQ ID NO: 316852
uagccuuuccgagacaguu

SEQ ID NO: 410124 - RNA, 19 nt, Artificial Sequence
  Description of Artificial Sequence: Synthetic oligonucleotide
  Antisense Strand to SEQ ID NO: 410123
aacugucucggaaaggcua

SEQ ID NO: 410125 - RNA, 19 nt, Artificial Sequence
  Description of Artificial Sequence: Synthetic oligonucleotide
  Sense Strand Starting at position 1165 of SEQ ID NO: 316875
uauggaguugcuuggagaa

SEQ ID NO: 410126 - RNA, 19 nt, Artificial Sequence
  Description of Artificial Sequence: Synthetic oligonucleotide
  Antisense Strand to SEQ ID NO: 410125
uucuccaagcaacuccaua

SEQ ID NO: 410127 - RNA, 19 nt, Artificial Sequence
  Description of Artificial Sequence: Synthetic oligonucleotide
  Sense Strand Starting at position 1165 of SEQ ID NO: 316928
uacaccugucguggaauaa

SEQ ID NO: 410128 - RNA, 19 nt, Artificial Sequence
  Description of Artificial Sequence: Synthetic oligonucleotide
  Antisense Strand to SEQ ID NO: 410127
uuauuccacgacaggugua

SEQ ID NO: 410129 - RNA, 19 nt, Artificial Sequence
  Description of Artificial Sequence: Synthetic oligonucleotide
  Sense Strand Starting at position 1165 of SEQ ID NO: 316929
acaccugucguggaauaac

SEQ ID NO: 410130 - RNA, 19 nt, Artificial Sequence
  Description of Artificial Sequence: Synthetic oligonucleotide
  Antisense Strand to SEQ ID NO: 410129
guuauuccacgacaggugu

SEQ ID NO: 410131 - RNA, 19 nt, Artificial Sequence
  Description of Artificial Sequence: Synthetic oligonucleotide
  Sense Strand Starting at position 1165 of SEQ ID NO: 317019
gggcuuguagcacagagaa

SEQ ID NO: 410132 - RNA, 19 nt, Artificial Sequence
  Description of Artificial Sequence: Synthetic oligonucleotide
  Antisense Strand to SEQ ID NO: 410131
uucucugugcuacaagccc

SEQ ID NO: 410133 - RNA, 19 nt, Artificial Sequence
  Description of Artificial Sequence: Synthetic oligonucleotide
  Sense Strand Starting at position 1165 of SEQ ID NO: 317069
gaggaagcuccugauuggu

SEQ ID NO: 410134 - RNA, 19 nt, Artificial Sequence
  Description of Artificial Sequence: Synthetic oligonucleotide
  Antisense Strand to SEQ ID NO: 410133
accaaucaggagcuuccuc

SEQ ID NO: 410135 - RNA, 19 nt, Artificial Sequence
  Description of Artificial Sequence: Synthetic oligonucleotide
  Sense Strand Starting at position 1165 of SEQ ID NO: 317074
agcuccugauugguggaaa

SEQ ID NO: 410136 - RNA, 19 nt, Artificial Sequence
  Description of Artificial Sequence: Synthetic oligonucleotide
  Antisense Strand to SEQ ID NO: 410135
uuuccaccaaucaggagcu

SEQ ID NO: 410137 - RNA, 19 nt, Artificial Sequence
  Description of Artificial Sequence: Synthetic oligonucleotide
  Sense Strand Starting at position 1165 of SEQ ID NO: 317077
uccugauugguggaaaguc

SEQ ID NO: 410138 - RNA, 19 nt, Artificial Sequence
  Description of Artificial Sequence: Synthetic oligonucleotide
  Antisense Strand to SEQ ID NO: 410137
gacuuuccaccaaucagga

SEQ ID NO: 410139 - RNA, 19 nt, Artificial Sequence
  Description of Artificial Sequence: Synthetic oligonucleotide
  Sense Strand Starting at position 1165 of SEQ ID NO: 317240
gcuucuaauuggucaagag

SEQ ID NO: 410140 - RNA, 19 nt, Artificial Sequence
  Description of Artificial Sequence: Synthetic oligonucleotide
  Antisense Strand to SEQ ID NO: 410139
cucuugaccaauuagaagc

SEQ ID NO: 410141 - RNA, 19 nt, Artificial Sequence
  Description of Artificial Sequence: Synthetic oligonucleotide
  Sense Strand Starting at position 1165 of SEQ ID NO: 318055
gggauggacguuuguuuga

SEQ ID NO: 410142 - RNA, 19 nt, Artificial Sequence
  Description of Artificial Sequence: Synthetic oligonucleotide
  Antisense Strand to SEQ ID NO: 410141
ucaaacaaacguccauccc

SEQ ID NO: 410143 - RNA, 19 nt, Artificial Sequence
  Description of Artificial Sequence: Synthetic oligonucleotide
  Sense Strand Starting at position 1165 of SEQ ID NO: 318062
acguuuguuugaucaaaga

SEQ ID NO: 410144 - RNA, 19 nt, Artificial Sequence
  Description of Artificial Sequence: Synthetic oligonucleotide
  Antisense Strand to SEQ ID NO: 410143
ucuuugaucaaacaaacgu

SEQ ID NO: 410145 - RNA, 19 nt, Artificial Sequence
  Description of Artificial Sequence: Synthetic oligonucleotide
  Sense Strand Starting at position 1165 of SEQ ID NO: 318257
ccagcuucuugagcuauuu

SEQ ID NO: 410146 - RNA, 19 nt, Artificial Sequence
  Description of Artificial Sequence: Synthetic oligonucleotide
  Antisense Strand to SEQ ID NO: 410145
aaauagcucaagaagcugg

SEQ ID NO: 410147 - RNA, 19 nt, Artificial Sequence
  Description of Artificial Sequence: Synthetic oligonucleotide
  Sense Strand Starting at position 1165 of SEQ ID NO: 318364
auccuuugagaguguuauu

SEQ ID NO: 410148 - RNA, 19 nt, Artificial Sequence
  Description of Artificial Sequence: Synthetic oligonucleotide
  Antisense Strand to SEQ ID NO: 410147
aauaacacucucaaaggau

SEQ ID NO: 410149 - RNA, 19 nt, Artificial Sequence
  Description of Artificial Sequence: Synthetic oligonucleotide
  Sense Strand Starting at position 1165 of SEQ ID NO: 318452
augguuauugccuaaagau

SEQ ID NO: 410150 - RNA, 19 nt, Artificial Sequence
  Description of Artificial Sequence: Synthetic oligonucleotide
  Antisense Strand to SEQ ID NO: 410149
aucuuuaggcaauaaccau

SEQ ID NO: 410151 - RNA, 19 nt, Artificial Sequence
  Description of Artificial Sequence: Synthetic oligonucleotide
  Sense Strand Starting at position 1165 of SEQ ID NO: 318560
agaaguauauagccucuua

SEQ ID NO: 410152 - RNA, 19 nt, Artificial Sequence
  Description of Artificial Sequence: Synthetic oligonucleotide
  Antisense Strand to SEQ ID NO: 410151
uaagaggcuauauacuucu

SEQ ID NO: 410153 - RNA, 19 nt, Artificial Sequence
  Description of Artificial Sequence: Synthetic oligonucleotide
  Sense Strand Starting at position 1165 of SEQ ID NO: 318739
uguaacauguaacucuuua

SEQ ID NO: 410154 - RNA, 19 nt, Artificial Sequence
  Description of Artificial Sequence: Synthetic oligonucleotide
  Antisense Strand to SEQ ID NO: 410153
uaaagaguuacauguuaca

SEQ ID NO: 410155 - RNA, 19 nt, Artificial Sequence
  Description of Artificial Sequence: Synthetic oligonucleotide
  Sense Strand Starting at position 1165 of SEQ ID NO: 318774
cucuacuucccagacgaga

SEQ ID NO: 410156 - RNA, 19 nt, Artificial Sequence
  Description of Artificial Sequence: Synthetic oligonucleotide
  Antisense Strand to SEQ ID NO: 410155
ucucgucugggaaguagag

SEQ ID NO: 410157 - RNA, 19 nt, Artificial Sequence
  Description of Artificial Sequence: Synthetic oligonucleotide
  Sense Strand Starting at position 1165 of SEQ ID NO: 318957
agugauaaaguacgaauaa

SEQ ID NO: 410158 - RNA, 19 nt, Artificial Sequence
  Description of Artificial Sequence: Synthetic oligonucleotide
  Antisense Strand to SEQ ID NO: 410157
uuauucguacuuuaucacu

SEQ ID NO: 410159 - RNA, 19 nt, Artificial Sequence
  Description of Artificial Sequence: Synthetic oligonucleotide
  Sense Strand Starting at position 1166 of SEQ ID NO: 315584
uugucacaaguguaaauaa

SEQ ID NO: 410160 - RNA, 19 nt, Artificial Sequence
  Description of Artificial Sequence: Synthetic oligonucleotide
  Antisense Strand to SEQ ID NO: 410159
uuauuuacacuugugacaa

SEQ ID NO: 410161 - RNA, 19 nt, Artificial Sequence
  Description of Artificial Sequence: Synthetic oligonucleotide
  Sense Strand Starting at position 1166 of SEQ ID NO: 315710
ugugaaauauauccuuguu

SEQ ID NO: 410162 - RNA, 19 nt, Artificial Sequence
  Description of Artificial Sequence: Synthetic oligonucleotide
  Antisense Strand to SEQ ID NO: 410161
aacaaggauauauuucaca

SEQ ID NO: 410163 - RNA, 19 nt, Artificial Sequence
  Description of Artificial Sequence: Synthetic oligonucleotide
  Sense Strand Starting at position 1166 of SEQ ID NO: 315890
ugcauuugauucuaagaaa

SEQ ID NO: 410164 - RNA, 19 nt, Artificial Sequence
  Description of Artificial Sequence: Synthetic oligonucleotide
  Antisense Strand to SEQ ID NO: 410163
uuucuuagaaucaaaugca

SEQ ID NO: 410165 - RNA, 19 nt, Artificial Sequence
  Description of Artificial Sequence: Synthetic oligonucleotide
  Sense Strand Starting at position 1166 of SEQ ID NO: 316231
ugccucucucgagaaucau

SEQ ID NO: 410166 - RNA, 19 nt, Artificial Sequence
  Description of Artificial Sequence: Synthetic oligonucleotide
  Antisense Strand to SEQ ID NO: 410165
augauucucgagagaggca

SEQ ID NO: 410167 - RNA, 19 nt, Artificial Sequence
  Description of Artificial Sequence: Synthetic oligonucleotide
  Sense Strand Starting at position 1166 of SEQ ID NO: 316242
agaaucaucuguucggaaa

SEQ ID NO: 410168 - RNA, 19 nt, Artificial Sequence
  Description of Artificial Sequence: Synthetic oligonucleotide
  Antisense Strand to SEQ ID NO: 410167
uuuccgaacagaugauucu

SEQ ID NO: 410169 - RNA, 19 nt, Artificial Sequence
  Description of Artificial Sequence: Synthetic oligonucleotide
  Sense Strand Starting at position 1166 of SEQ ID NO: 316296
agguaucaugcucaugauu

SEQ ID NO: 410170 - RNA, 19 nt, Artificial Sequence
  Description of Artificial Sequence: Synthetic oligonucleotide
  Antisense Strand to SEQ ID NO: 410169
aaucaugagcaugauaccu

SEQ ID NO: 410171 - RNA, 19 nt, Artificial Sequence
  Description of Artificial Sequence: Synthetic oligonucleotide
  Sense Strand Starting at position 1166 of SEQ ID NO: 316444
cuggcacagcucuagauua

SEQ ID NO: 410172 - RNA, 19 nt, Artificial Sequence
  Description of Artificial Sequence: Synthetic oligonucleotide
  Antisense Strand to SEQ ID NO: 410171
uaaucuagagcugugccag

SEQ ID NO: 410173 - RNA, 19 nt, Artificial Sequence
  Description of Artificial Sequence: Synthetic oligonucleotide
  Sense Strand Starting at position 1166 of SEQ ID NO: 316467
ucaggucugacuugagaac

SEQ ID NO: 410174 - RNA, 19 nt, Artificial Sequence
  Description of Artificial Sequence: Synthetic oligonucleotide
  Antisense Strand to SEQ ID NO: 410173
guucucaagucagaccuga

SEQ ID NO: 410175 - RNA, 19 nt, Artificial Sequence
  Description of Artificial Sequence: Synthetic oligonucleotide
  Sense Strand Starting at position 1166 of SEQ ID NO: 316476
acuugagaacugcauuacu

SEQ ID NO: 410176 - RNA, 19 nt, Artificial Sequence
  Description of Artificial Sequence: Synthetic oligonucleotide
  Antisense Strand to SEQ ID NO: 410175
aguaaugcaguucucaagu

SEQ ID NO: 410177 - RNA, 19 nt, Artificial Sequence
  Description of Artificial Sequence: Synthetic oligonucleotide
  Sense Strand Starting at position 1166 of SEQ ID NO: 316493
cuauaaauguacucuagga

SEQ ID NO: 410178 - RNA, 19 nt, Artificial Sequence
  Description of Artificial Sequence: Synthetic oligonucleotide
  Antisense Strand to SEQ ID NO: 410177
uccuagaguacauuuauag

SEQ ID NO: 410179 - RNA, 19 nt, Artificial Sequence
  Description of Artificial Sequence: Synthetic oligonucleotide
  Sense Strand Starting at position 1166 of SEQ ID NO: 316794
agaugagcccuccauucua

SEQ ID NO: 410180 - RNA, 19 nt, Artificial Sequence
  Description of Artificial Sequence: Synthetic oligonucleotide
  Antisense Strand to SEQ ID NO: 410179
uagaauggagggcucaucu

SEQ ID NO: 410181 - RNA, 19 nt, Artificial Sequence
  Description of Artificial Sequence: Synthetic oligonucleotide
  Sense Strand Starting at position 1166 of SEQ ID NO: 316805
ccauucuaacuccgagaau

SEQ ID NO: 410182 - RNA, 19 nt, Artificial Sequence
  Description of Artificial Sequence: Synthetic oligonucleotide
  Antisense Strand to SEQ ID NO: 410181
auucucggaguuagaaugg

SEQ ID NO: 410183 - RNA, 19 nt, Artificial Sequence
  Description of Artificial Sequence: Synthetic oligonucleotide
  Sense Strand Starting at position 1166 of SEQ ID NO: 316808
uucuaacuccgagaaucga

SEQ ID NO: 410184 - RNA, 19 nt, Artificial Sequence
  Description of Artificial Sequence: Synthetic oligonucleotide
  Antisense Strand to SEQ ID NO: 410183
ucgauucucggaguuagaa

SEQ ID NO: 410185 - RNA, 19 nt, Artificial Sequence
  Description of Artificial Sequence: Synthetic oligonucleotide
  Sense Strand Starting at position 1166 of SEQ ID NO: 316828
agggcucaauccguaaaca

SEQ ID NO: 410186 - RNA, 19 nt, Artificial Sequence
  Description of Artificial Sequence: Synthetic oligonucleotide
  Antisense Strand to SEQ ID NO: 410185
uguuuacggauugagcccu

SEQ ID NO: 410187 - RNA, 19 nt, Artificial Sequence
  Description of Artificial Sequence: Synthetic oligonucleotide
  Sense Strand Starting at position 1166 of SEQ ID NO: 316829
gggcucaauccguaaacaa

SEQ ID NO: 410188 - RNA, 19 nt, Artificial Sequence
  Description of Artificial Sequence: Synthetic oligonucleotide
  Antisense Strand to SEQ ID NO: 410187
uuguuuacggauugagccc

SEQ ID NO: 410189 - RNA, 19 nt, Artificial Sequence
  Description of Artificial Sequence: Synthetic oligonucleotide
  Sense Strand Starting at position 1166 of SEQ ID NO: 316871
ggcggugcccugagguuaa

SEQ ID NO: 410190 - RNA, 19 nt, Artificial Sequence
  Description of Artificial Sequence: Synthetic oligonucleotide
  Antisense Strand to SEQ ID NO: 410189
uuaaccucagggcaccgcc

SEQ ID NO: 410191 - RNA, 19 nt, Artificial Sequence
  Description of Artificial Sequence: Synthetic oligonucleotide
  Sense Strand Starting at position 1166 of SEQ ID NO: 317320
gcggcucaagcgucugaga

SEQ ID NO: 410192 - RNA, 19 nt, Artificial Sequence
  Description of Artificial Sequence: Synthetic oligonucleotide
  Antisense Strand to SEQ ID NO: 410191
ucucagacgcuugagccgc

SEQ ID NO: 410193 - RNA, 19 nt, Artificial Sequence
  Description of Artificial Sequence: Synthetic oligonucleotide
  Sense Strand Starting at position 1166 of SEQ ID NO: 317435
cuuucuguugcuccgcaua

SEQ ID NO: 410194 - RNA, 19 nt, Artificial Sequence
  Description of Artificial Sequence: Synthetic oligonucleotide
  Antisense Strand to SEQ ID NO: 410193
uaugcggagcaacagaaag

SEQ ID NO: 410195 - RNA, 19 nt, Artificial Sequence
  Description of Artificial Sequence: Synthetic oligonucleotide
  Sense Strand Starting at position 1166 of SEQ ID NO: 317450
cauaacuguggucagcuaa

SEQ ID NO: 410196 - RNA, 19 nt, Artificial Sequence
  Description of Artificial Sequence: Synthetic oligonucleotide
  Antisense Strand to SEQ ID NO: 410195
uuagcugaccacaguuaug

SEQ ID NO: 410197 - RNA, 19 nt, Artificial Sequence
  Description of Artificial Sequence: Synthetic oligonucleotide
  Sense Strand Starting at position 1166 of SEQ ID NO: 317576
uuauguguauuuccuaagu

SEQ ID NO: 410198 - RNA, 19 nt, Artificial Sequence
  Description of Artificial Sequence: Synthetic oligonucleotide
  Antisense Strand to SEQ ID NO: 410197
acuuaggaaauacacauaa

SEQ ID NO: 410199 - RNA, 19 nt, Artificial Sequence
  Description of Artificial Sequence: Synthetic oligonucleotide
  Sense Strand Starting at position 1166 of SEQ ID NO: 317587
uccuaagucuugucaagag

SEQ ID NO: 410200 - RNA, 19 nt, Artificial Sequence
  Description of Artificial Sequence: Synthetic oligonucleotide
  Antisense Strand to SEQ ID NO: 410199
cucuugacaagacuuagga

SEQ ID NO: 410201 - RNA, 19 nt, Artificial Sequence
  Description of Artificial Sequence: Synthetic oligonucleotide
  Sense Strand Starting at position 1166 of SEQ ID NO: 317599
ucaagagcccuuuaaguac

SEQ ID NO: 410202 - RNA, 19 nt, Artificial Sequence
  Description of Artificial Sequence: Synthetic oligonucleotide
  Antisense Strand to SEQ ID NO: 410201
guacuuaaagggcucuuga

SEQ ID NO: 410203 - RNA, 19 nt, Artificial Sequence
  Description of Artificial Sequence: Synthetic oligonucleotide
  Sense Strand Starting at position 1166 of SEQ ID NO: 317901
ccucucuaggugugauaga

SEQ ID NO: 410204 - RNA, 19 nt, Artificial Sequence
  Description of Artificial Sequence: Synthetic oligonucleotide
  Antisense Strand to SEQ ID NO: 410203
ucuaucacaccuagagagg

SEQ ID NO: 410205 - RNA, 19 nt, Artificial Sequence
  Description of Artificial Sequence: Synthetic oligonucleotide
  Sense Strand Starting at position 1166 of SEQ ID NO: 317910
gugugauagauacaaaggu

SEQ ID NO: 410206 - RNA, 19 nt, Artificial Sequence
  Description of Artificial Sequence: Synthetic oligonucleotide
  Antisense Strand to SEQ ID NO: 410205
accuuuguaucuaucacac

SEQ ID NO: 410207 - RNA, 19 nt, Artificial Sequence
  Description of Artificial Sequence: Synthetic oligonucleotide
  Sense Strand Starting at position 1166 of SEQ ID NO: 317983
cuggguaucuuccugaaag

SEQ ID NO: 410208 - RNA, 19 nt, Artificial Sequence
  Description of Artificial Sequence: Synthetic oligonucleotide
  Antisense Strand to SEQ ID NO: 410207
cuuucaggaagauacccag

SEQ ID NO: 410209 - RNA, 19 nt, Artificial Sequence
  Description of Artificial Sequence: Synthetic oligonucleotide
  Sense Strand Starting at position 1166 of SEQ ID NO: 317985
ggguaucuuccugaaagca

SEQ ID NO: 410210 - RNA, 19 nt, Artificial Sequence
  Description of Artificial Sequence: Synthetic oligonucleotide
  Antisense Strand to SEQ ID NO: 410209
ugcuuucaggaagauaccc

SEQ ID NO: 410211 - RNA, 19 nt, Artificial Sequence
  Description of Artificial Sequence: Synthetic oligonucleotide
  Sense Strand Starting at position 1166 of SEQ ID NO: 318018
acacauaccuggguuagga

SEQ ID NO: 410212 - RNA, 19 nt, Artificial Sequence
  Description of Artificial Sequence: Synthetic oligonucleotide
  Antisense Strand to SEQ ID NO: 410211
uccuaacccagguaugugu

SEQ ID NO: 410213 - RNA, 19 nt, Artificial Sequence
  Description of Artificial Sequence: Synthetic oligonucleotide
  Sense Strand Starting at position 1166 of SEQ ID NO: 318107
agugguacgcacuagaaug

SEQ ID NO: 410214 - RNA, 19 nt, Artificial Sequence
  Description of Artificial Sequence: Synthetic oligonucleotide
  Antisense Strand to SEQ ID NO: 410213
cauucuagugcguaccacu

SEQ ID NO: 410215 - RNA, 19 nt, Artificial Sequence
  Description of Artificial Sequence: Synthetic oligonucleotide
  Sense Strand Starting at position 1166 of SEQ ID NO: 318158
uuucuuggaguguauaaca

SEQ ID NO: 410216 - RNA, 19 nt, Artificial Sequence
  Description of Artificial Sequence: Synthetic oligonucleotide
  Antisense Strand to SEQ ID NO: 410215
uguuauacacuccaagaaa

SEQ ID NO: 410217 - RNA, 19 nt, Artificial Sequence
  Description of Artificial Sequence: Synthetic oligonucleotide
  Sense Strand Starting at position 1166 of SEQ ID NO: 318453
ggcauuucaguguguaagu

SEQ ID NO: 410218 - RNA, 19 nt, Artificial Sequence
  Description of Artificial Sequence: Synthetic oligonucleotide
  Antisense Strand to SEQ ID NO: 410217
acuuacacacugaaaugcc

SEQ ID NO: 410219 - RNA, 19 nt, Artificial Sequence
  Description of Artificial Sequence: Synthetic oligonucleotide
  Sense Strand Starting at position 1166 of SEQ ID NO: 318854
uugauuaauuggucaggga

SEQ ID NO: 410220 - RNA, 19 nt, Artificial Sequence
  Description of Artificial Sequence: Synthetic oligonucleotide
  Antisense Strand to SEQ ID NO: 410219
ucccugaccaauuaaucaa

SEQ ID NO: 410221 - RNA, 19 nt, Artificial Sequence
  Description of Artificial Sequence: Synthetic oligonucleotide
  Sense Strand Starting at position 1166 of SEQ ID NO: 318858
uuaauuggucagggaaagu

SEQ ID NO: 410222 - RNA, 19 nt, Artificial Sequence
  Description of Artificial Sequence: Synthetic oligonucleotide
  Antisense Strand to SEQ ID NO: 410221
acuuucccugaccaauuaa

SEQ ID NO: 410223 - RNA, 19 nt, Artificial Sequence
  Description of Artificial Sequence: Synthetic oligonucleotide
  Sense Strand Starting at position 1166 of SEQ ID NO: 318867
cagggaaaguccucccuga

SEQ ID NO: 410224 - RNA, 19 nt, Artificial Sequence
  Description of Artificial Sequence: Synthetic oligonucleotide
  Antisense Strand to SEQ ID NO: 410223
ucagggaggacuuucccug

SEQ ID NO: 410225 - RNA, 19 nt, Artificial Sequence
  Description of Artificial Sequence: Synthetic oligonucleotide
  Sense Strand Starting at position 1166 of SEQ ID NO: 318871
gaaaguccucccugaggug

SEQ ID NO: 410226 - RNA, 19 nt, Artificial Sequence
  Description of Artificial Sequence: Synthetic oligonucleotide
  Antisense Strand to SEQ ID NO: 410225
caccucagggaggacuuuc

SEQ ID NO: 410227 - RNA, 19 nt, Artificial Sequence
  Description of Artificial Sequence: Synthetic oligonucleotide
  Sense Strand Starting at position 1166 of SEQ ID NO: 318901
gcugauauaugaguuaaag

SEQ ID NO: 410228 - RNA, 19 nt, Artificial Sequence
  Description of Artificial Sequence: Synthetic oligonucleotide
  Antisense Strand to SEQ ID NO: 410227
cuuuaacucauauaucagc

SEQ ID NO: 410229 - RNA, 19 nt, Artificial Sequence
  Description of Artificial Sequence: Synthetic oligonucleotide
  Sense Strand Starting at position 1166 of SEQ ID NO: 318946
gggagaguacaguguuuca

SEQ ID NO: 410230 - RNA, 19 nt, Artificial Sequence
  Description of Artificial Sequence: Synthetic oligonucleotide
  Antisense Strand to SEQ ID NO: 410229
ugaaacacuguacucuccc

SEQ ID NO: 410231 - RNA, 19 nt, Artificial Sequence
  Description of Artificial Sequence: Synthetic oligonucleotide
  Sense Strand Starting at position 1166 of SEQ ID NO: 319003
augagcucgguguauacaa

SEQ ID NO: 410232 - RNA, 19 nt, Artificial Sequence
  Description of Artificial Sequence: Synthetic oligonucleotide
  Antisense Strand to SEQ ID NO: 410231
uuguauacaccgagcucau

SEQ ID NO: 410233 - RNA, 19 nt, Artificial Sequence
  Description of Artificial Sequence: Synthetic oligonucleotide
  Sense Strand Starting at position 1166 of SEQ ID NO: 319060
ggaguauaauagguuuaca

SEQ ID NO: 410234 - RNA, 19 nt, Artificial Sequence
  Description of Artificial Sequence: Synthetic oligonucleotide
  Antisense Strand to SEQ ID NO: 410233
uguaaaccuauuauacucc

SEQ ID NO: 410235 - RNA, 19 nt, Artificial Sequence
  Description of Artificial Sequence: Synthetic oligonucleotide
  Sense Strand Starting at position 1166 of SEQ ID NO: 319100
cuagcauggaguugggauu

SEQ ID NO: 410236 - RNA, 19 nt, Artificial Sequence
  Description of Artificial Sequence: Synthetic oligonucleotide
  Antisense Strand to SEQ ID NO: 410235
aaucccaacuccaugcuag

SEQ ID NO: 410237 - RNA, 19 nt, Artificial Sequence
  Description of Artificial Sequence: Synthetic oligonucleotide
  Sense Strand Starting at position 1166 of SEQ ID NO: 319119
uuauucuaagugcaaauga

SEQ ID NO: 410238 - RNA, 19 nt, Artificial Sequence
  Description of Artificial Sequence: Synthetic oligonucleotide
  Antisense Strand to SEQ ID NO: 410237
ucauuugcacuuagaauaa

SEQ ID NO: 410239 - RNA, 19 nt, Artificial Sequence
  Description of Artificial Sequence: Synthetic oligonucleotide
  Sense Strand Starting at position 1167 of SEQ ID NO: 315315
ucaacuauuugggaagcuu

SEQ ID NO: 410240 - RNA, 19 nt, Artificial Sequence
  Description of Artificial Sequence: Synthetic oligonucleotide
  Antisense Strand to SEQ ID NO: 410239
aagcuucccaaauaguuga

SEQ ID NO: 410241 - RNA, 19 nt, Artificial Sequence
  Description of Artificial Sequence: Synthetic oligonucleotide
  Sense Strand Starting at position 1167 of SEQ ID NO: 315323
uugggaagcuugccaucaa

SEQ ID NO: 410242 - RNA, 19 nt, Artificial Sequence
  Description of Artificial Sequence: Synthetic oligonucleotide
  Antisense Strand to SEQ ID NO: 410241
uugauggcaagcuucccaa

SEQ ID NO: 410243 - RNA, 19 nt, Artificial Sequence
  Description of Artificial Sequence: Synthetic oligonucleotide
  Sense Strand Starting at position 1167 of SEQ ID NO: 315441
ccaggaagucggcauuacu

SEQ ID NO: 410244 - RNA, 19 nt, Artificial Sequence
  Description of Artificial Sequence: Synthetic oligonucleotide
  Antisense Strand to SEQ ID NO: 410243
aguaaugccgacuuccugg

SEQ ID NO: 410245 - RNA, 19 nt, Artificial Sequence
  Description of Artificial Sequence: Synthetic oligonucleotide
  Sense Strand Starting at position 1167 of SEQ ID NO: 315444
ggaagucggcauuacuaaa

SEQ ID NO: 410246 - RNA, 19 nt, Artificial Sequence
  Description of Artificial Sequence: Synthetic oligonucleotide
  Antisense Strand to SEQ ID NO: 410245
uuuaguaaugccgacuucc

SEQ ID NO: 410247 - RNA, 19 nt, Artificial Sequence
  Description of Artificial Sequence: Synthetic oligonucleotide
  Sense Strand Starting at position 1167 of SEQ ID NO: 315604
ccacgagggccuuauuauc

SEQ ID NO: 410248 - RNA, 19 nt, Artificial Sequence
  Description of Artificial Sequence: Synthetic oligonucleotide
  Antisense Strand to SEQ ID NO: 410247
gauaauaaggcccucgugg

SEQ ID NO: 410249 - RNA, 19 nt, Artificial Sequence
  Description of Artificial Sequence: Synthetic oligonucleotide
  Sense Strand Starting at position 1167 of SEQ ID NO: 315610
gggccuuauuauccaaacu

SEQ ID NO: 410250 - RNA, 19 nt, Artificial Sequence
  Description of Artificial Sequence: Synthetic oligonucleotide
  Antisense Strand to SEQ ID NO: 410249
aguuuggauaauaaggccc

SEQ ID NO: 410251 - RNA, 19 nt, Artificial Sequence
  Description of Artificial Sequence: Synthetic oligonucleotide
  Sense Strand Starting at position 1167 of SEQ ID NO: 315757
uuaacaagcuuguuuagau

SEQ ID NO: 410252 - RNA, 19 nt, Artificial Sequence
  Description of Artificial Sequence: Synthetic oligonucleotide
  Antisense Strand to SEQ ID NO: 410251
aucuaaacaagcuuguuaa

SEQ ID NO: 410253 - RNA, 19 nt, Artificial Sequence
  Description of Artificial Sequence: Synthetic oligonucleotide
  Sense Strand Starting at position 1167 of SEQ ID NO: 315764
gcuuguuuagaucagcaua

SEQ ID NO: 410254 - RNA, 19 nt, Artificial Sequence
  Description of Artificial Sequence: Synthetic oligonucleotide
  Antisense Strand to SEQ ID NO: 410253
uaugcugaucuaaacaagc

SEQ ID NO: 410255 - RNA, 19 nt, Artificial Sequence
  Description of Artificial Sequence: Synthetic oligonucleotide
  Sense Strand Starting at position 1167 of SEQ ID NO: 315812
auaguaaacuuuccuaagu

SEQ ID NO: 410256 - RNA, 19 nt, Artificial Sequence
  Description of Artificial Sequence: Synthetic oligonucleotide
  Antisense Strand to SEQ ID NO: 410255
acuuaggaaaguuuacuau

SEQ ID NO: 410257 - RNA, 19 nt, Artificial Sequence
  Description of Artificial Sequence: Synthetic oligonucleotide
  Sense Strand Starting at position 1167 of SEQ ID NO: 315873
gccugcacaguccaagauu

SEQ ID NO: 410258 - RNA, 19 nt, Artificial Sequence
  Description of Artificial Sequence: Synthetic oligonucleotide
  Antisense Strand to SEQ ID NO: 410257
aaucuuggacugugcaggc

SEQ ID NO: 410259 - RNA, 19 nt, Artificial Sequence
  Description of Artificial Sequence: Synthetic oligonucleotide
  Sense Strand Starting at position 1167 of SEQ ID NO: 316080
ugcgaagugaugccuguuu

SEQ ID NO: 410260 - RNA, 19 nt, Artificial Sequence
  Description of Artificial Sequence: Synthetic oligonucleotide
  Antisense Strand to SEQ ID NO: 410259
aaacaggcaucacuucgca

SEQ ID NO: 410261 - RNA, 19 nt, Artificial Sequence
  Description of Artificial Sequence: Synthetic oligonucleotide
  Sense Strand Starting at position 1167 of SEQ ID NO: 316213
aauuaaaucgguugcaaag

SEQ ID NO: 410262 - RNA, 19 nt, Artificial Sequence
  Description of Artificial Sequence: Synthetic oligonucleotide
  Antisense Strand to SEQ ID NO: 410261
cuuugcaaccgauuuaauu

SEQ ID NO: 410263 - RNA, 19 nt, Artificial Sequence
  Description of Artificial Sequence: Synthetic oligonucleotide
  Sense Strand Starting at position 1167 of SEQ ID NO: 316317
ggaagcuggcaauaacuuu

SEQ ID NO: 410264 - RNA, 19 nt, Artificial Sequence
  Description of Artificial Sequence: Synthetic oligonucleotide
  Antisense Strand to SEQ ID NO: 410263
aaaguuauugccagcuucc

SEQ ID NO: 410265 - RNA, 19 nt, Artificial Sequence
  Description of Artificial Sequence: Synthetic oligonucleotide
  Sense Strand Starting at position 1167 of SEQ ID NO: 316323
uggcaauaacuuugccaau

SEQ ID NO: 410266 - RNA, 19 nt, Artificial Sequence
  Description of Artificial Sequence: Synthetic oligonucleotide
  Antisense Strand to SEQ ID NO: 410265
auuggcaaaguuauugcca

SEQ ID NO: 410267 - RNA, 19 nt, Artificial Sequence
  Description of Artificial Sequence: Synthetic oligonucleotide
  Sense Strand Starting at position 1167 of SEQ ID NO: 316324
ggcaauaacuuugccaauu

SEQ ID NO: 410268 - RNA, 19 nt, Artificial Sequence
  Description of Artificial Sequence: Synthetic oligonucleotide
  Antisense Strand to SEQ ID NO: 410267
aauuggcaaaguuauugcc

SEQ ID NO: 410269 - RNA, 19 nt, Artificial Sequence
  Description of Artificial Sequence: Synthetic oligonucleotide
  Sense Strand Starting at position 1167 of SEQ ID NO: 316662
caugauggcuccuugauuc

SEQ ID NO: 410270 - RNA, 19 nt, Artificial Sequence
  Description of Artificial Sequence: Synthetic oligonucleotide
  Antisense Strand to SEQ ID NO: 410269
gaaucaaggagccaucaug

SEQ ID NO: 410271 - RNA, 19 nt, Artificial Sequence
  Description of Artificial Sequence: Synthetic oligonucleotide
  Sense Strand Starting at position 1167 of SEQ ID NO: 316689
gcaaauccuuuccugaaag

SEQ ID NO: 410272 - RNA, 19 nt, Artificial Sequence
  Description of Artificial Sequence: Synthetic oligonucleotide
  Antisense Strand to SEQ ID NO: 410271
cuuucaggaaaggauuugc

SEQ ID NO: 410273 - RNA, 19 nt, Artificial Sequence
  Description of Artificial Sequence: Synthetic oligonucleotide
  Sense Strand Starting at position 1167 of SEQ ID NO: 317427
gcuguuacuaagggaaaga

SEQ ID NO: 410274 - RNA, 19 nt, Artificial Sequence
  Description of Artificial Sequence: Synthetic oligonucleotide
  Antisense Strand to SEQ ID NO: 410273
ucuuucccuuaguaacagc

SEQ ID NO: 410275 - RNA, 19 nt, Artificial Sequence
  Description of Artificial Sequence: Synthetic oligonucleotide
  Sense Strand Starting at position 1167 of SEQ ID NO: 318090
ugcguaaauacauaugguu

SEQ ID NO: 410276 - RNA, 19 nt, Artificial Sequence
  Description of Artificial Sequence: Synthetic oligonucleotide
  Antisense Strand to SEQ ID NO: 410275
aaccauauguauuuacgca

SEQ ID NO: 410277 - RNA, 19 nt, Artificial Sequence
  Description of Artificial Sequence: Synthetic oligonucleotide
  Sense Strand Starting at position 1167 of SEQ ID NO: 318098
uacauaugguucuccgaag

SEQ ID NO: 410278 - RNA, 19 nt, Artificial Sequence
  Description of Artificial Sequence: Synthetic oligonucleotide
  Antisense Strand to SEQ ID NO: 410277
cuucggagaaccauaugua

SEQ ID NO: 410279 - RNA, 19 nt, Artificial Sequence
  Description of Artificial Sequence: Synthetic oligonucleotide
  Sense Strand Starting at position 1167 of SEQ ID NO: 318122
cuggaaaggugcuuuaucu

SEQ ID NO: 410280 - RNA, 19 nt, Artificial Sequence
  Description of Artificial Sequence: Synthetic oligonucleotide
  Antisense Strand to SEQ ID NO: 410279
agauaaagcaccuuuccag

SEQ ID NO: 410281 - RNA, 19 nt, Artificial Sequence
  Description of Artificial Sequence: Synthetic oligonucleotide
  Sense Strand Starting at position 1167 of SEQ ID NO: 318126
aaaggugcuuuaucuguaa

SEQ ID NO: 410282 - RNA, 19 nt, Artificial Sequence
  Description of Artificial Sequence: Synthetic oligonucleotide
  Antisense Strand to SEQ ID NO: 410281
uuacagauaaagcaccuuu

SEQ ID NO: 410283 - RNA, 19 nt, Artificial Sequence
  Description of Artificial Sequence: Synthetic oligonucleotide
  Sense Strand Starting at position 1167 of SEQ ID NO: 318130
gugcuuuaucuguaauaag

SEQ ID NO: 410284 - RNA, 19 nt, Artificial Sequence
  Description of Artificial Sequence: Synthetic oligonucleotide
  Antisense Strand to SEQ ID NO: 410283
cuuauuacagauaaagcac

SEQ ID NO: 410285 - RNA, 19 nt, Artificial Sequence
  Description of Artificial Sequence: Synthetic oligonucleotide
  Sense Strand Starting at position 1167 of SEQ ID NO: 318253
ccaaauguacugugaauca

SEQ ID NO: 410286 - RNA, 19 nt, Artificial Sequence
  Description of Artificial Sequence: Synthetic oligonucleotide
  Antisense Strand to SEQ ID NO: 410285
ugauucacaguacauuugg

SEQ ID NO: 410287 - RNA, 19 nt, Artificial Sequence
  Description of Artificial Sequence: Synthetic oligonucleotide
  Sense Strand Starting at position 1167 of SEQ ID NO: 318310
aaagguuugcucgaucagu

SEQ ID NO: 410288 - RNA, 19 nt, Artificial Sequence
  Description of Artificial Sequence: Synthetic oligonucleotide
  Antisense Strand to SEQ ID NO: 410287
acugaucgagcaaaccuuu

SEQ ID NO: 410289 - RNA, 19 nt, Artificial Sequence
  Description of Artificial Sequence: Synthetic oligonucleotide
  Sense Strand Starting at position 1167 of SEQ ID NO: 318399
aguagaaguuuauccacuu

SEQ ID NO: 410290 - RNA, 19 nt, Artificial Sequence
  Description of Artificial Sequence: Synthetic oligonucleotide
  Antisense Strand to SEQ ID NO: 410289
aaguggauaaacuucuacu

SEQ ID NO: 410291 - RNA, 19 nt, Artificial Sequence
  Description of Artificial Sequence: Synthetic oligonucleotide
  Sense Strand Starting at position 1167 of SEQ ID NO: 318400
guagaaguuuauccacuuu

SEQ ID NO: 410292 - RNA, 19 nt, Artificial Sequence
  Description of Artificial Sequence: Synthetic oligonucleotide
  Antisense Strand to SEQ ID NO: 410291
aaaguggauaaacuucuac

SEQ ID NO: 410293 - RNA, 19 nt, Artificial Sequence
  Description of Artificial Sequence: Synthetic oligonucleotide
  Sense Strand Starting at position 1167 of SEQ ID NO: 318463
guauaacuuagaugaguga

SEQ ID NO: 410294 - RNA, 19 nt, Artificial Sequence
  Description of Artificial Sequence: Synthetic oligonucleotide
  Antisense Strand to SEQ ID NO: 410293
ucacucaucuaaguuauac

SEQ ID NO: 410295 - RNA, 19 nt, Artificial Sequence
  Description of Artificial Sequence: Synthetic oligonucleotide
  Sense Strand Starting at position 1167 of SEQ ID NO: 318556
gugguaaucuuucuaagac

SEQ ID NO: 410296 - RNA, 19 nt, Artificial Sequence
  Description of Artificial Sequence: Synthetic oligonucleotide
  Antisense Strand to SEQ ID NO: 410295
gucuuagaaagauuaccac

SEQ ID NO: 410297 - RNA, 19 nt, Artificial Sequence
  Description of Artificial Sequence: Synthetic oligonucleotide
  Sense Strand Starting at position 1167 of SEQ ID NO: 318609
uuuguauaagcucaggacu

SEQ ID NO: 410298 - RNA, 19 nt, Artificial Sequence
  Description of Artificial Sequence: Synthetic oligonucleotide
  Antisense Strand to SEQ ID NO: 410297
aguccugagcuuauacaaa

SEQ ID NO: 410299 - RNA, 19 nt, Artificial Sequence
  Description of Artificial Sequence: Synthetic oligonucleotide
  Sense Strand Starting at position 1167 of SEQ ID NO: 318675
uguuauuucgcuuauuacu

SEQ ID NO: 410300 - RNA, 19 nt, Artificial Sequence
  Description of Artificial Sequence: Synthetic oligonucleotide
  Antisense Strand to SEQ ID NO: 410299
aguaauaagcgaaauaaca

SEQ ID NO: 410301 - RNA, 19 nt, Artificial Sequence
  Description of Artificial Sequence: Synthetic oligonucleotide
  Sense Strand Starting at position 1167 of SEQ ID NO: 318719
agcuuucuuaaaggugaag

SEQ ID NO: 410302 - RNA, 19 nt, Artificial Sequence
  Description of Artificial Sequence: Synthetic oligonucleotide
  Antisense Strand to SEQ ID NO: 410301
cuucaccuuuaagaaagcu

SEQ ID NO: 410303 - RNA, 19 nt, Artificial Sequence
  Description of Artificial Sequence: Synthetic oligonucleotide
  Sense Strand Starting at position 1167 of SEQ ID NO: 318776
agauguagugaucacuuua

SEQ ID NO: 410304 - RNA, 19 nt, Artificial Sequence
  Description of Artificial Sequence: Synthetic oligonucleotide
  Antisense Strand to SEQ ID NO: 410303
uaaagugaucacuacaucu

SEQ ID NO: 410305 - RNA, 19 nt, Artificial Sequence
  Description of Artificial Sequence: Synthetic oligonucleotide
  Sense Strand Starting at position 1167 of SEQ ID NO: 318906
gacuccugguggccuaaua

SEQ ID NO: 410306 - RNA, 19 nt, Artificial Sequence
  Description of Artificial Sequence: Synthetic oligonucleotide
  Antisense Strand to SEQ ID NO: 410305
uauuaggccaccaggaguc

SEQ ID NO: 410307 - RNA, 19 nt, Artificial Sequence
  Description of Artificial Sequence: Synthetic oligonucleotide
  Sense Strand Starting at position 1167 of SEQ ID NO: 318930
aguaauuagacaggugcuu

SEQ ID NO: 410308 - RNA, 19 nt, Artificial Sequence
  Description of Artificial Sequence: Synthetic oligonucleotide
  Antisense Strand to SEQ ID NO: 410307
aagcaccugucuaauuacu

SEQ ID NO: 410309 - RNA, 19 nt, Artificial Sequence
  Description of Artificial Sequence: Synthetic oligonucleotide
  Sense Strand Starting at position 1167 of SEQ ID NO: 319006
gaggccuuuccugaaugac

SEQ ID NO: 410310 - RNA, 19 nt, Artificial Sequence
  Description of Artificial Sequence: Synthetic oligonucleotide
  Antisense Strand to SEQ ID NO: 410309
gucauucaggaaaggccuc

SEQ ID NO: 410311 - RNA, 19 nt, Artificial Sequence
  Description of Artificial Sequence: Synthetic oligonucleotide
  Sense Strand Starting at position 1167 of SEQ ID NO: 319009
gccuuuccugaaugaccua

SEQ ID NO: 410312 - RNA, 19 nt, Artificial Sequence
  Description of Artificial Sequence: Synthetic oligonucleotide
  Antisense Strand to SEQ ID NO: 410311
uaggucauucaggaaaggc

SEQ ID NO: 410313 - RNA, 19 nt, Artificial Sequence
  Description of Artificial Sequence: Synthetic oligonucleotide
  Sense Strand Starting at position 1167 of SEQ ID NO: 319170
aaugucacccgaugggaau

SEQ ID NO: 410314 - RNA, 19 nt, Artificial Sequence
  Description of Artificial Sequence: Synthetic oligonucleotide
  Antisense Strand to SEQ ID NO: 410313
auucccaucgggugacauu

SEQ ID NO: 410315 - RNA, 19 nt, Artificial Sequence
  Description of Artificial Sequence: Synthetic oligonucleotide
  Sense Strand Starting at position 1167 of SEQ ID NO: 319171
augucacccgaugggaauu

SEQ ID NO: 410316 - RNA, 19 nt, Artificial Sequence
  Description of Artificial Sequence: Synthetic oligonucleotide
  Antisense Strand to SEQ ID NO: 410315
aauucccaucgggugacau

SEQ ID NO: 410317 - RNA, 19 nt, Artificial Sequence
  Description of Artificial Sequence: Synthetic oligonucleotide
  Sense Strand Starting at position 1167 of SEQ ID NO: 319188
uuuagauaacugcagguuu

SEQ ID NO: 410318 - RNA, 19 nt, Artificial Sequence
  Description of Artificial Sequence: Synthetic oligonucleotide
  Antisense Strand to SEQ ID NO: 410317
aaaccugcaguuaucuaaa

SEQ ID NO: 410319 - RNA, 19 nt, Artificial Sequence
  Description of Artificial Sequence: Synthetic oligonucleotide
  Sense Strand Starting at position 1168 of SEQ ID NO: 315281
cccagaucuuggguuaguc

SEQ ID NO: 410320 - RNA, 19 nt, Artificial Sequence
  Description of Artificial Sequence: Synthetic oligonucleotide
  Antisense Strand to SEQ ID NO: 410319
gacuaacccaagaucuggg

SEQ ID NO: 410321 - RNA, 19 nt, Artificial Sequence
  Description of Artificial Sequence: Synthetic oligonucleotide
  Sense Strand Starting at position 1168 of SEQ ID NO: 315379
gccugauaacuggaauguc

SEQ ID NO: 410322 - RNA, 19 nt, Artificial Sequence
  Description of Artificial Sequence: Synthetic oligonucleotide
  Antisense Strand to SEQ ID NO: 410321
gacauuccaguuaucaggc

SEQ ID NO: 410323 - RNA, 19 nt, Artificial Sequence
  Description of Artificial Sequence: Synthetic oligonucleotide
  Sense Strand Starting at position 1168 of SEQ ID NO: 315382
ugauaacuggaaugucaau

SEQ ID NO: 410324 - RNA, 19 nt, Artificial Sequence
  Description of Artificial Sequence: Synthetic oligonucleotide
  Antisense Strand to SEQ ID NO: 410323
auugacauuccaguuauca

SEQ ID NO: 410325 - RNA, 19 nt, Artificial Sequence
  Description of Artificial Sequence: Synthetic oligonucleotide
  Sense Strand Starting at position 1168 of SEQ ID NO: 315414
uugagauuauaacugcuaa

SEQ ID NO: 410326 - RNA, 19 nt, Artificial Sequence
  Description of Artificial Sequence: Synthetic oligonucleotide
  Antisense Strand to SEQ ID NO: 410325
uuagcaguuauaaucucaa

SEQ ID NO: 410327 - RNA, 19 nt, Artificial Sequence
  Description of Artificial Sequence: Synthetic oligonucleotide
  Sense Strand Starting at position 1168 of SEQ ID NO: 315497
uuacuaucagcugacugaa

SEQ ID NO: 410328 - RNA, 19 nt, Artificial Sequence
  Description of Artificial Sequence: Synthetic oligonucleotide
  Antisense Strand to SEQ ID NO: 410327
uucagucagcugauaguaa

SEQ ID NO: 410329 - RNA, 19 nt, Artificial Sequence
  Description of Artificial Sequence: Synthetic oligonucleotide
  Sense Strand Starting at position 1168 of SEQ ID NO: 315967
ucaggaaggucuucucuaa

SEQ ID NO: 410330 - RNA, 19 nt, Artificial Sequence
  Description of Artificial Sequence: Synthetic oligonucleotide
  Antisense Strand to SEQ ID NO: 410329
uuagagaagaccuuccuga

SEQ ID NO: 410331 - RNA, 19 nt, Artificial Sequence
  Description of Artificial Sequence: Synthetic oligonucleotide
  Sense Strand Starting at position 1168 of SEQ ID NO: 316078
cagugauauuaguuucugu

SEQ ID NO: 410332 - RNA, 19 nt, Artificial Sequence
  Description of Artificial Sequence: Synthetic oligonucleotide
  Antisense Strand to SEQ ID NO: 410331
acagaaacuaauaucacug

SEQ ID NO: 410333 - RNA, 19 nt, Artificial Sequence
  Description of Artificial Sequence: Synthetic oligonucleotide
  Sense Strand Starting at position 1168 of SEQ ID NO: 316130
aucuguucuaagugaggca

SEQ ID NO: 410334 - RNA, 19 nt, Artificial Sequence
  Description of Artificial Sequence: Synthetic oligonucleotide
  Antisense Strand to SEQ ID NO: 410333
ugccucacuuagaacagau

SEQ ID NO: 410335 - RNA, 19 nt, Artificial Sequence
  Description of Artificial Sequence: Synthetic oligonucleotide
  Sense Strand Starting at position 1168 of SEQ ID NO: 316168
aaccaaauuugguggaaag

SEQ ID NO: 410336 - RNA, 19 nt, Artificial Sequence
  Description of Artificial Sequence: Synthetic oligonucleotide
  Antisense Strand to SEQ ID NO: 410335
cuuuccaccaaauuugguu

SEQ ID NO: 410337 - RNA, 19 nt, Artificial Sequence
  Description of Artificial Sequence: Synthetic oligonucleotide
  Sense Strand Starting at position 1168 of SEQ ID NO: 316291
aggauugagcuuugaccau

SEQ ID NO: 410338 - RNA, 19 nt, Artificial Sequence
  Description of Artificial Sequence: Synthetic oligonucleotide
  Antisense Strand to SEQ ID NO: 410337
auggucaaagcucaauccu

SEQ ID NO: 410339 - RNA, 19 nt, Artificial Sequence
  Description of Artificial Sequence: Synthetic oligonucleotide
  Sense Strand Starting at position 1168 of SEQ ID NO: 316380
ugacuucccuuagugacua

SEQ ID NO: 410340 - RNA, 19 nt, Artificial Sequence
  Description of Artificial Sequence: Synthetic oligonucleotide
  Antisense Strand to SEQ ID NO: 410339
uagucacuaagggaaguca

SEQ ID NO: 410341 - RNA, 19 nt, Artificial Sequence
  Description of Artificial Sequence: Synthetic oligonucleotide
  Sense Strand Starting at position 1168 of SEQ ID NO: 316414
gaaagcaguuuguuauauc

SEQ ID NO: 410342 - RNA, 19 nt, Artificial Sequence
  Description of Artificial Sequence: Synthetic oligonucleotide
  Antisense Strand to SEQ ID NO: 410341
gauauaacaaacugcuuuc

SEQ ID NO: 410343 - RNA, 19 nt, Artificial Sequence
  Description of Artificial Sequence: Synthetic oligonucleotide
  Sense Strand Starting at position 1168 of SEQ ID NO: 316570
uucuaaaucucgcuauaug

SEQ ID NO: 410344 - RNA, 19 nt, Artificial Sequence
  Description of Artificial Sequence: Synthetic oligonucleotide
  Antisense Strand to SEQ ID NO: 410343
cauauagcgagauuuagaa

SEQ ID NO: 410345 - RNA, 19 nt, Artificial Sequence
  Description of Artificial Sequence: Synthetic oligonucleotide
  Sense Strand Starting at position 1168 of SEQ ID NO: 316571
ucuaaaucucgcuauauga

SEQ ID NO: 410346 - RNA, 19 nt, Artificial Sequence
  Description of Artificial Sequence: Synthetic oligonucleotide
  Antisense Strand to SEQ ID NO: 410345
ucauauagcgagauuuaga

SEQ ID NO: 410347 - RNA, 19 nt, Artificial Sequence
  Description of Artificial Sequence: Synthetic oligonucleotide
  Sense Strand Starting at position 1168 of SEQ ID NO: 316599
cguaacaauuucccguaaa

SEQ ID NO: 410348 - RNA, 19 nt, Artificial Sequence
  Description of Artificial Sequence: Synthetic oligonucleotide
  Antisense Strand to SEQ ID NO: 410347
uuuacgggaaauuguuacg

SEQ ID NO: 410349 - RNA, 19 nt, Artificial Sequence
  Description of Artificial Sequence: Synthetic oligonucleotide
  Sense Strand Starting at position 1168 of SEQ ID NO: 316656
accuaaaucgucuuugcgu

SEQ ID NO: 410350 - RNA, 19 nt, Artificial Sequence
  Description of Artificial Sequence: Synthetic oligonucleotide
  Antisense Strand to SEQ ID NO: 410349
acgcaaagacgauuuaggu

SEQ ID NO: 410351 - RNA, 19 nt, Artificial Sequence
  Description of Artificial Sequence: Synthetic oligonucleotide
  Sense Strand Starting at position 1168 of SEQ ID NO: 316662
aucgucuuugcguucucau

SEQ ID NO: 410352 - RNA, 19 nt, Artificial Sequence
  Description of Artificial Sequence: Synthetic oligonucleotide
  Antisense Strand to SEQ ID NO: 410351
augagaacgcaaagacgau

SEQ ID NO: 410353 - RNA, 19 nt, Artificial Sequence
  Description of Artificial Sequence: Synthetic oligonucleotide
  Sense Strand Starting at position 1168 of SEQ ID NO: 316663
ucgucuuugcguucucauu

SEQ ID NO: 410354 - RNA, 19 nt, Artificial Sequence
  Description of Artificial Sequence: Synthetic oligonucleotide
  Antisense Strand to SEQ ID NO: 410353
aaugagaacgcaaagacga

SEQ ID NO: 410355 - RNA, 19 nt, Artificial Sequence
  Description of Artificial Sequence: Synthetic oligonucleotide
  Sense Strand Starting at position 1168 of SEQ ID NO: 317653
gaacaagucucaguggaga

SEQ ID NO: 410356 - RNA, 19 nt, Artificial Sequence
  Description of Artificial Sequence: Synthetic oligonucleotide
  Antisense Strand to SEQ ID NO: 410355
ucuccacugagacuuguuc

SEQ ID NO: 410357 - RNA, 19 nt, Artificial Sequence
  Description of Artificial Sequence: Synthetic oligonucleotide
  Sense Strand Starting at position 1168 of SEQ ID NO: 317812
cccagucagcaugaaaguu

SEQ ID NO: 410358 - RNA, 19 nt, Artificial Sequence
  Description of Artificial Sequence: Synthetic oligonucleotide
  Antisense Strand to SEQ ID NO: 410357
aacuuucaugcugacuggg

SEQ ID NO: 410359 - RNA, 19 nt, Artificial Sequence
  Description of Artificial Sequence: Synthetic oligonucleotide
  Sense Strand Starting at position 1168 of SEQ ID NO: 317953
ggcagaaacuccuuaccug

SEQ ID NO: 410360 - RNA, 19 nt, Artificial Sequence
  Description of Artificial Sequence: Synthetic oligonucleotide
  Antisense Strand to SEQ ID NO: 410359
cagguaaggaguuucugcc

SEQ ID NO: 410361 - RNA, 19 nt, Artificial Sequence
  Description of Artificial Sequence: Synthetic oligonucleotide
  Sense Strand Starting at position 1168 of SEQ ID NO: 317954
gcagaaacuccuuaccuga

SEQ ID NO: 410362 - RNA, 19 nt, Artificial Sequence
  Description of Artificial Sequence: Synthetic oligonucleotide
  Antisense Strand to SEQ ID NO: 410361
ucagguaaggaguuucugc

SEQ ID NO: 410363 - RNA, 19 nt, Artificial Sequence
  Description of Artificial Sequence: Synthetic oligonucleotide
  Sense Strand Starting at position 1168 of SEQ ID NO: 318188
ggaguuacauaugccacua

SEQ ID NO: 410364 - RNA, 19 nt, Artificial Sequence
  Description of Artificial Sequence: Synthetic oligonucleotide
  Antisense Strand to SEQ ID NO: 410363
uaguggcauauguaacucc

SEQ ID NO: 410365 - RNA, 19 nt, Artificial Sequence
  Description of Artificial Sequence: Synthetic oligonucleotide
  Sense Strand Starting at position 1168 of SEQ ID NO: 318206
aguacaaaguccucagaaa

SEQ ID NO: 410366 - RNA, 19 nt, Artificial Sequence
  Description of Artificial Sequence: Synthetic oligonucleotide
  Antisense Strand to SEQ ID NO: 410365
uuucugaggacuuuguacu

SEQ ID NO: 410367 - RNA, 19 nt, Artificial Sequence
  Description of Artificial Sequence: Synthetic oligonucleotide
  Sense Strand Starting at position 1168 of SEQ ID NO: 318260
aacggagauuugggaacaa

SEQ ID NO: 410368 - RNA, 19 nt, Artificial Sequence
  Description of Artificial Sequence: Synthetic oligonucleotide
  Antisense Strand to SEQ ID NO: 410367
uuguucccaaaucuccguu

SEQ ID NO: 410369 - RNA, 19 nt, Artificial Sequence
  Description of Artificial Sequence: Synthetic oligonucleotide
  Sense Strand Starting at position 1168 of SEQ ID NO: 318302
uugucugaacuuuggcaaa

SEQ ID NO: 410370 - RNA, 19 nt, Artificial Sequence
  Description of Artificial Sequence: Synthetic oligonucleotide
  Antisense Strand to SEQ ID NO: 410369
uuugccaaaguucagacaa

SEQ ID NO: 410371 - RNA, 19 nt, Artificial Sequence
  Description of Artificial Sequence: Synthetic oligonucleotide
  Sense Strand Starting at position 1168 of SEQ ID NO: 318410
acacauuugugguauuaac

SEQ ID NO: 410372 - RNA, 19 nt, Artificial Sequence
  Description of Artificial Sequence: Synthetic oligonucleotide
  Antisense Strand to SEQ ID NO: 410371
guuaauaccacaaaugugu

SEQ ID NO: 410373 - RNA, 19 nt, Artificial Sequence
  Description of Artificial Sequence: Synthetic oligonucleotide
  Sense Strand Starting at position 1168 of SEQ ID NO: 318433
ugcuguucccacgaagaaa

SEQ ID NO: 410374 - RNA, 19 nt, Artificial Sequence
  Description of Artificial Sequence: Synthetic oligonucleotide
  Antisense Strand to SEQ ID NO: 410373
uuucuucgugggaacagca

SEQ ID NO: 410375 - RNA, 19 nt, Artificial Sequence
  Description of Artificial Sequence: Synthetic oligonucleotide
  Sense Strand Starting at position 1168 of SEQ ID NO: 318457
acggucuuuagcucgaguu

SEQ ID NO: 410376 - RNA, 19 nt, Artificial Sequence
  Description of Artificial Sequence: Synthetic oligonucleotide
  Antisense Strand to SEQ ID NO: 410375
aacucgagcuaaagaccgu

SEQ ID NO: 410377 - RNA, 19 nt, Artificial Sequence
  Description of Artificial Sequence: Synthetic oligonucleotide
  Sense Strand Starting at position 1168 of SEQ ID NO: 318470
cgaguuugggcagacgaaa

SEQ ID NO: 410378 - RNA, 19 nt, Artificial Sequence
  Description of Artificial Sequence: Synthetic oligonucleotide
  Antisense Strand to SEQ ID NO: 410377
uuucgucugcccaaacucg

SEQ ID NO: 410379 - RNA, 19 nt, Artificial Sequence
  Description of Artificial Sequence: Synthetic oligonucleotide
  Sense Strand Starting at position 1168 of SEQ ID NO: 318604
uuauaacauguuuguugga

SEQ ID NO: 410380 - RNA, 19 nt, Artificial Sequence
  Description of Artificial Sequence: Synthetic oligonucleotide
  Antisense Strand to SEQ ID NO: 410379
uccaacaaacauguuauaa

SEQ ID NO: 410381 - RNA, 19 nt, Artificial Sequence
  Description of Artificial Sequence: Synthetic oligonucleotide
  Sense Strand Starting at position 1168 of SEQ ID NO: 318605
uauaacauguuuguuggaa

SEQ ID NO: 410382 - RNA, 19 nt, Artificial Sequence
  Description of Artificial Sequence: Synthetic oligonucleotide
  Antisense Strand to SEQ ID NO: 410381
uuccaacaaacauguuaua

SEQ ID NO: 410383 - RNA, 19 nt, Artificial Sequence
  Description of Artificial Sequence: Synthetic oligonucleotide
  Sense Strand Starting at position 1168 of SEQ ID NO: 318606
auaacauguuuguuggaag

SEQ ID NO: 410384 - RNA, 19 nt, Artificial Sequence
  Description of Artificial Sequence: Synthetic oligonucleotide
  Antisense Strand to SEQ ID NO: 410383
cuuccaacaaacauguuau

SEQ ID NO: 410385 - RNA, 19 nt, Artificial Sequence
  Description of Artificial Sequence: Synthetic oligonucleotide
  Sense Strand Starting at position 1168 of SEQ ID NO: 318650
ucuaaauuaugagagauca

SEQ ID NO: 410386 - RNA, 19 nt, Artificial Sequence
  Description of Artificial Sequence: Synthetic oligonucleotide
  Antisense Strand to SEQ ID NO: 410385
ugaucucucauaauuuaga

SEQ ID NO: 410387 - RNA, 19 nt, Artificial Sequence
  Description of Artificial Sequence: Synthetic oligonucleotide
  Sense Strand Starting at position 1168 of SEQ ID NO: 318731
agauuuagauccugaaagc

SEQ ID NO: 410388 - RNA, 19 nt, Artificial Sequence
  Description of Artificial Sequence: Synthetic oligonucleotide
  Antisense Strand to SEQ ID NO: 410387
gcuuucaggaucuaaaucu

SEQ ID NO: 410389 - RNA, 19 nt, Artificial Sequence
  Description of Artificial Sequence: Synthetic oligonucleotide
  Sense Strand Starting at position 1168 of SEQ ID NO: 319115
ugaucaagccucugaaaug

SEQ ID NO: 410390 - RNA, 19 nt, Artificial Sequence
  Description of Artificial Sequence: Synthetic oligonucleotide
  Antisense Strand to SEQ ID NO: 410389
cauuucagaggcuugauca

SEQ ID NO: 410391 - RNA, 19 nt, Artificial Sequence
  Description of Artificial Sequence: Synthetic oligonucleotide
  Sense Strand Starting at position 1168 of SEQ ID NO: 319136
agucauccauccucuagau

SEQ ID NO: 410392 - RNA, 19 nt, Artificial Sequence
  Description of Artificial Sequence: Synthetic oligonucleotide
  Antisense Strand to SEQ ID NO: 410391
aucuagaggauggaugacu

SEQ ID NO: 410393 - RNA, 19 nt, Artificial Sequence
  Description of Artificial Sequence: Synthetic oligonucleotide
  Sense Strand Starting at position 1168 of SEQ ID NO: 319185
uuuccaucucuguggauga

SEQ ID NO: 410394 - RNA, 19 nt, Artificial Sequence
  Description of Artificial Sequence: Synthetic oligonucleotide
  Antisense Strand to SEQ ID NO: 410393
ucauccacagagauggaaa

SEQ ID NO: 410395 - RNA, 19 nt, Artificial Sequence
  Description of Artificial Sequence: Synthetic oligonucleotide
  Sense Strand Starting at position 1168 of SEQ ID NO: 319198
ggaugaucccagggcaaau

SEQ ID NO: 410396 - RNA, 19 nt, Artificial Sequence
  Description of Artificial Sequence: Synthetic oligonucleotide
  Antisense Strand to SEQ ID NO: 410395
auuugcccugggaucaucc

SEQ ID NO: 410397 - RNA, 19 nt, Artificial Sequence
  Description of Artificial Sequence: Synthetic oligonucleotide
  Sense Strand Starting at position 1168 of SEQ ID NO: 319216
ucugauuguggcugaacaa

SEQ ID NO: 410398 - RNA, 19 nt, Artificial Sequence
  Description of Artificial Sequence: Synthetic oligonucleotide
  Antisense Strand to SEQ ID NO: 410397
uuguucagccacaaucaga

SEQ ID NO: 410399 - RNA, 19 nt, Artificial Sequence
  Description of Artificial Sequence: Synthetic oligonucleotide
  Sense Strand Starting at position 1169 of SEQ ID NO: 315368
ugcacugucuuaucacacu

SEQ ID NO: 410400 - RNA, 19 nt, Artificial Sequence
  Description of Artificial Sequence: Synthetic oligonucleotide
  Antisense Strand to SEQ ID NO: 410399
agugugauaagacagugca

SEQ ID NO: 410401 - RNA, 19 nt, Artificial Sequence
  Description of Artificial Sequence: Synthetic oligonucleotide
  Sense Strand Starting at position 1169 of SEQ ID NO: 315634
ucaggaaggucuucucuaa

SEQ ID NO: 410402 - RNA, 19 nt, Artificial Sequence
  Description of Artificial Sequence: Synthetic oligonucleotide
  Antisense Strand to SEQ ID NO: 410401
uuagagaagaccuuccuga

SEQ ID NO: 410403 - RNA, 19 nt, Artificial Sequence
  Description of Artificial Sequence: Synthetic oligonucleotide
  Sense Strand Starting at position 1169 of SEQ ID NO: 315745
cagugauauuaguuucugu

SEQ ID NO: 410404 - RNA, 19 nt, Artificial Sequence
  Description of Artificial Sequence: Synthetic oligonucleotide
  Antisense Strand to SEQ ID NO: 410403
acagaaacuaauaucacug

SEQ ID NO: 410405 - RNA, 19 nt, Artificial Sequence
  Description of Artificial Sequence: Synthetic oligonucleotide
  Sense Strand Starting at position 1169 of SEQ ID NO: 315797
aucuguucuaagugaggca

SEQ ID NO: 410406 - RNA, 19 nt, Artificial Sequence
  Description of Artificial Sequence: Synthetic oligonucleotide
  Antisense Strand to SEQ ID NO: 410405
ugccucacuuagaacagau

SEQ ID NO: 410407 - RNA, 19 nt, Artificial Sequence
  Description of Artificial Sequence: Synthetic oligonucleotide
  Sense Strand Starting at position 1169 of SEQ ID NO: 315835
aaccaaauuugguggaaag

SEQ ID NO: 410408 - RNA, 19 nt, Artificial Sequence
  Description of Artificial Sequence: Synthetic oligonucleotide
  Antisense Strand to SEQ ID NO: 410407
cuuuccaccaaauuugguu

SEQ ID NO: 410409 - RNA, 19 nt, Artificial Sequence
  Description of Artificial Sequence: Synthetic oligonucleotide
  Sense Strand Starting at position 1169 of SEQ ID NO: 315958
aggauugagcuuugaccau

SEQ ID NO: 410410 - RNA, 19 nt, Artificial Sequence
  Description of Artificial Sequence: Synthetic oligonucleotide
  Antisense Strand to SEQ ID NO: 410409
auggucaaagcucaauccu

SEQ ID NO: 410411 - RNA, 19 nt, Artificial Sequence
  Description of Artificial Sequence: Synthetic oligonucleotide
  Sense Strand Starting at position 1169 of SEQ ID NO: 316047
ugacuucccuuagugacua

SEQ ID NO: 410412 - RNA, 19 nt, Artificial Sequence
  Description of Artificial Sequence: Synthetic oligonucleotide
  Antisense Strand to SEQ ID NO: 410411
uagucacuaagggaaguca

SEQ ID NO: 410413 - RNA, 19 nt, Artificial Sequence
  Description of Artificial Sequence: Synthetic oligonucleotide
  Sense Strand Starting at position 1169 of SEQ ID NO: 316081
gaaagcaguuuguuauauc

SEQ ID NO: 410414 - RNA, 19 nt, Artificial Sequence
  Description of Artificial Sequence: Synthetic oligonucleotide
  Antisense Strand to SEQ ID NO: 410413
gauauaacaaacugcuuuc

SEQ ID NO: 410415 - RNA, 19 nt, Artificial Sequence
  Description of Artificial Sequence: Synthetic oligonucleotide
  Sense Strand Starting at position 1169 of SEQ ID NO: 316237
uucuaaaucucgcuauaug

SEQ ID NO: 410416 - RNA, 19 nt, Artificial Sequence
  Description of Artificial Sequence: Synthetic oligonucleotide
  Antisense Strand to SEQ ID NO: 410415
cauauagcgagauuuagaa

SEQ ID NO: 410417 - RNA, 19 nt, Artificial Sequence
  Description of Artificial Sequence: Synthetic oligonucleotide
  Sense Strand Starting at position 1169 of SEQ ID NO: 316238
ucuaaaucucgcuauauga

SEQ ID NO: 410418 - RNA, 19 nt, Artificial Sequence
  Description of Artificial Sequence: Synthetic oligonucleotide
  Antisense Strand to SEQ ID NO: 410417
ucauauagcgagauuuaga

SEQ ID NO: 410419 - RNA, 19 nt, Artificial Sequence
  Description of Artificial Sequence: Synthetic oligonucleotide
  Sense Strand Starting at position 1169 of SEQ ID NO: 316266
cguaacaauuucccguaaa

SEQ ID NO: 410420 - RNA, 19 nt, Artificial Sequence
  Description of Artificial Sequence: Synthetic oligonucleotide
  Antisense Strand to SEQ ID NO: 410419
uuuacgggaaauuguuacg

SEQ ID NO: 410421 - RNA, 19 nt, Artificial Sequence
  Description of Artificial Sequence: Synthetic oligonucleotide
  Sense Strand Starting at position 1169 of SEQ ID NO: 316323
accuaaaucgucuuugcgu

SEQ ID NO: 410422 - RNA, 19 nt, Artificial Sequence
  Description of Artificial Sequence: Synthetic oligonucleotide
  Antisense Strand to SEQ ID NO: 410421
acgcaaagacgauuuaggu

SEQ ID NO: 410423 - RNA, 19 nt, Artificial Sequence
  Description of Artificial Sequence: Synthetic oligonucleotide
  Sense Strand Starting at position 1169 of SEQ ID NO: 316329
aucgucuuugcguucucau

SEQ ID NO: 410424 - RNA, 19 nt, Artificial Sequence
  Description of Artificial Sequence: Synthetic oligonucleotide
  Antisense Strand to SEQ ID NO: 410423
augagaacgcaaagacgau

SEQ ID NO: 410425 - RNA, 19 nt, Artificial Sequence
  Description of Artificial Sequence: Synthetic oligonucleotide
  Sense Strand Starting at position 1169 of SEQ ID NO: 316330
ucgucuuugcguucucauu

SEQ ID NO: 410426 - RNA, 19 nt, Artificial Sequence
  Description of Artificial Sequence: Synthetic oligonucleotide
  Antisense Strand to SEQ ID NO: 410425
aaugagaacgcaaagacga

SEQ ID NO: 410427 - RNA, 19 nt, Artificial Sequence
  Description of Artificial Sequence: Synthetic oligonucleotide
  Sense Strand Starting at position 1169 of SEQ ID NO: 317320
gaacaagucucaguggaga

SEQ ID NO: 410428 - RNA, 19 nt, Artificial Sequence
  Description of Artificial Sequence: Synthetic oligonucleotide
  Antisense Strand to SEQ ID NO: 410427
ucuccacugagacuuguuc

SEQ ID NO: 410429 - RNA, 19 nt, Artificial Sequence
  Description of Artificial Sequence: Synthetic oligonucleotide
  Sense Strand Starting at position 1169 of SEQ ID NO: 317479
cccagucagcaugaaaguu

SEQ ID NO: 410430 - RNA, 19 nt, Artificial Sequence
  Description of Artificial Sequence: Synthetic oligonucleotide
  Antisense Strand to SEQ ID NO: 410429
aacuuucaugcugacuggg

SEQ ID NO: 410431 - RNA, 19 nt, Artificial Sequence
  Description of Artificial Sequence: Synthetic oligonucleotide
  Sense Strand Starting at position 1169 of SEQ ID NO: 317620
ggcagaaacuccuuaccug

SEQ ID NO: 410432 - RNA, 19 nt, Artificial Sequence
  Description of Artificial Sequence: Synthetic oligonucleotide
  Antisense Strand to SEQ ID NO: 410431
cagguaaggaguuucugcc

SEQ ID NO: 410433 - RNA, 19 nt, Artificial Sequence
  Description of Artificial Sequence: Synthetic oligonucleotide
  Sense Strand Starting at position 1169 of SEQ ID NO: 317621
gcagaaacuccuuaccuga

SEQ ID NO: 410434 - RNA, 19 nt, Artificial Sequence
  Description of Artificial Sequence: Synthetic oligonucleotide
  Antisense Strand to SEQ ID NO: 410433
ucagguaaggaguuucugc

SEQ ID NO: 410435 - RNA, 19 nt, Artificial Sequence
  Description of Artificial Sequence: Synthetic oligonucleotide
  Sense Strand Starting at position 1169 of SEQ ID NO: 317855
ggaguuacauaugccacua

SEQ ID NO: 410436 - RNA, 19 nt, Artificial Sequence
  Description of Artificial Sequence: Synthetic oligonucleotide
  Antisense Strand to SEQ ID NO: 410435
uaguggcauauguaacucc

SEQ ID NO: 410437 - RNA, 19 nt, Artificial Sequence
  Description of Artificial Sequence: Synthetic oligonucleotide
  Sense Strand Starting at position 1169 of SEQ ID NO: 317873
aguacaaaguccucagaaa

SEQ ID NO: 410438 - RNA, 19 nt, Artificial Sequence
  Description of Artificial Sequence: Synthetic oligonucleotide
  Antisense Strand to SEQ ID NO: 410437
uuucugaggacuuuguacu

SEQ ID NO: 410439 - RNA, 19 nt, Artificial Sequence
  Description of Artificial Sequence: Synthetic oligonucleotide
  Sense Strand Starting at position 1169 of SEQ ID NO: 317927
aacggagauuugggaacaa

SEQ ID NO: 410440 - RNA, 19 nt, Artificial Sequence
  Description of Artificial Sequence: Synthetic oligonucleotide
  Antisense Strand to SEQ ID NO: 410439
uuguucccaaaucuccguu

SEQ ID NO: 410441 - RNA, 19 nt, Artificial Sequence
  Description of Artificial Sequence: Synthetic oligonucleotide
  Sense Strand Starting at position 1169 of SEQ ID NO: 317969
uugucugaacuuuggcaaa

SEQ ID NO: 410442 - RNA, 19 nt, Artificial Sequence
  Description of Artificial Sequence: Synthetic oligonucleotide
  Antisense Strand to SEQ ID NO: 410441
uuugccaaaguucagacaa

SEQ ID NO: 410443 - RNA, 19 nt, Artificial Sequence
  Description of Artificial Sequence: Synthetic oligonucleotide
  Sense Strand Starting at position 1169 of SEQ ID NO: 318077
acacauuugugguauuaac

SEQ ID NO: 410444 - RNA, 19 nt, Artificial Sequence
  Description of Artificial Sequence: Synthetic oligonucleotide
  Antisense Strand to SEQ ID NO: 410443
guuaauaccacaaaugugu

SEQ ID NO: 410445 - RNA, 19 nt, Artificial Sequence
  Description of Artificial Sequence: Synthetic oligonucleotide
  Sense Strand Starting at position 1169 of SEQ ID NO: 318100
ugcuguucccacgaagaaa

SEQ ID NO: 410446 - RNA, 19 nt, Artificial Sequence
  Description of Artificial Sequence: Synthetic oligonucleotide
  Antisense Strand to SEQ ID NO: 410445
uuucuucgugggaacagca

SEQ ID NO: 410447 - RNA, 19 nt, Artificial Sequence
  Description of Artificial Sequence: Synthetic oligonucleotide
  Sense Strand Starting at position 1169 of SEQ ID NO: 318124
acggucuuuagcucgaguu

SEQ ID NO: 410448 - RNA, 19 nt, Artificial Sequence
  Description of Artificial Sequence: Synthetic oligonucleotide
  Antisense Strand to SEQ ID NO: 410447
aacucgagcuaaagaccgu

SEQ ID NO: 410449 - RNA, 19 nt, Artificial Sequence
  Description of Artificial Sequence: Synthetic oligonucleotide
  Sense Strand Starting at position 1169 of SEQ ID NO: 318137
cgaguuugggcagacgaaa

SEQ ID NO: 410450 - RNA, 19 nt, Artificial Sequence
  Description of Artificial Sequence: Synthetic oligonucleotide
  Antisense Strand to SEQ ID NO: 410449
uuucgucugcccaaacucg

SEQ ID NO: 410451 - RNA, 19 nt, Artificial Sequence
  Description of Artificial Sequence: Synthetic oligonucleotide
  Sense Strand Starting at position 1169 of SEQ ID NO: 318271
uuauaacauguuuguugga

SEQ ID NO: 410452 - RNA, 19 nt, Artificial Sequence
  Description of Artificial Sequence: Synthetic oligonucleotide
  Antisense Strand to SEQ ID NO: 410451
uccaacaaacauguuauaa

SEQ ID NO: 410453 - RNA, 19 nt, Artificial Sequence
  Description of Artificial Sequence: Synthetic oligonucleotide
  Sense Strand Starting at position 1169 of SEQ ID NO: 318272
uauaacauguuuguuggaa

SEQ ID NO: 410454 - RNA, 19 nt, Artificial Sequence
  Description of Artificial Sequence: Synthetic oligonucleotide
  Antisense Strand to SEQ ID NO: 410453
uuccaacaaacauguuaua

SEQ ID NO: 410455 - RNA, 19 nt, Artificial Sequence
  Description of Artificial Sequence: Synthetic oligonucleotide
  Sense Strand Starting at position 1169 of SEQ ID NO: 318273
auaacauguuuguuggaag

SEQ ID NO: 410456 - RNA, 19 nt, Artificial Sequence
  Description of Artificial Sequence: Synthetic oligonucleotide
  Antisense Strand to SEQ ID NO: 410455
cuuccaacaaacauguuau

SEQ ID NO: 410457 - RNA, 19 nt, Artificial Sequence
  Description of Artificial Sequence: Synthetic oligonucleotide
  Sense Strand Starting at position 1169 of SEQ ID NO: 318317
ucuaaauuaugagagauca

SEQ ID NO: 410458 - RNA, 19 nt, Artificial Sequence
  Description of Artificial Sequence: Synthetic oligonucleotide
  Antisense Strand to SEQ ID NO: 410457
ugaucucucauaauuuaga

SEQ ID NO: 410459 - RNA, 19 nt, Artificial Sequence
  Description of Artificial Sequence: Synthetic oligonucleotide
  Sense Strand Starting at position 1169 of SEQ ID NO: 318398
agauuuagauccugaaagc

SEQ ID NO: 410460 - RNA, 19 nt, Artificial Sequence
  Description of Artificial Sequence: Synthetic oligonucleotide
  Antisense Strand to SEQ ID NO: 410459
gcuuucaggaucuaaaucu

SEQ ID NO: 410461 - RNA, 19 nt, Artificial Sequence
  Description of Artificial Sequence: Synthetic oligonucleotide
  Sense Strand Starting at position 1169 of SEQ ID NO: 318782
ugaucaagccucugaaaug

SEQ ID NO: 410462 - RNA, 19 nt, Artificial Sequence
  Description of Artificial Sequence: Synthetic oligonucleotide
  Antisense Strand to SEQ ID NO: 410461
cauuucagaggcuugauca

SEQ ID NO: 410463 - RNA, 19 nt, Artificial Sequence
  Description of Artificial Sequence: Synthetic oligonucleotide
  Sense Strand Starting at position 1169 of SEQ ID NO: 318803
agucauccauccucuagau

SEQ ID NO: 410464 - RNA, 19 nt, Artificial Sequence
  Description of Artificial Sequence: Synthetic oligonucleotide
  Antisense Strand to SEQ ID NO: 410463
aucuagaggauggaugacu

SEQ ID NO: 410465 - RNA, 19 nt, Artificial Sequence
  Description of Artificial Sequence: Synthetic oligonucleotide
  Sense Strand Starting at position 1169 of SEQ ID NO: 318852
uuuccaucucuguggauga

SEQ ID NO: 410466 - RNA, 19 nt, Artificial Sequence
  Description of Artificial Sequence: Synthetic oligonucleotide
  Antisense Strand to SEQ ID NO: 410465
ucauccacagagauggaaa

SEQ ID NO: 410467 - RNA, 19 nt, Artificial Sequence
  Description of Artificial Sequence: Synthetic oligonucleotide
  Sense Strand Starting at position 1169 of SEQ ID NO: 318865
ggaugaucccagggcaaau

SEQ ID NO: 410468 - RNA, 19 nt, Artificial Sequence
  Description of Artificial Sequence: Synthetic oligonucleotide
  Antisense Strand to SEQ ID NO: 410467
auuugcccugggaucaucc

SEQ ID NO: 410469 - RNA, 19 nt, Artificial Sequence
  Description of Artificial Sequence: Synthetic oligonucleotide
  Sense Strand Starting at position 1169 of SEQ ID NO: 318883
ucugauuguggcugaacaa

SEQ ID NO: 410470 - RNA, 19 nt, Artificial Sequence
  Description of Artificial Sequence: Synthetic oligonucleotide
  Antisense Strand to SEQ ID NO: 410469
uuguucagccacaaucaga

SEQ ID NO: 410471 - RNA, 19 nt, Artificial Sequence
  Description of Artificial Sequence: Synthetic oligonucleotide
  Sense Strand Starting at position 1169 of SEQ ID NO: 318926
cgggacaguuauucagcuu

SEQ ID NO: 410472 - RNA, 19 nt, Artificial Sequence
  Description of Artificial Sequence: Synthetic oligonucleotide
  Antisense Strand to SEQ ID NO: 410471
aagcugaauaacugucccg

SEQ ID NO: 410473 - RNA, 19 nt, Artificial Sequence
  Description of Artificial Sequence: Synthetic oligonucleotide
  Sense Strand Starting at position 1169 of SEQ ID NO: 319048
augaaaggcuauuccuuua

SEQ ID NO: 410474 - RNA, 19 nt, Artificial Sequence
  Description of Artificial Sequence: Synthetic oligonucleotide
  Antisense Strand to SEQ ID NO: 410473
uaaaggaauagccuuucau

SEQ ID NO: 410475 - RNA, 19 nt, Artificial Sequence
  Description of Artificial Sequence: Synthetic oligonucleotide
  Sense Strand Starting at position 1169 of SEQ ID NO: 319205
guauguggaugacuuacua

SEQ ID NO: 410476 - RNA, 19 nt, Artificial Sequence
  Description of Artificial Sequence: Synthetic oligonucleotide
  Antisense Strand to SEQ ID NO: 410475
uaguaagucauccacauac

SEQ ID NO: 410477 - RNA, 19 nt, Artificial Sequence
  Description of Artificial Sequence: Synthetic oligonucleotide
  Sense Strand Starting at position 1169 of SEQ ID NO: 319209
guggaugacuuacuaaucu

SEQ ID NO: 410478 - RNA, 19 nt, Artificial Sequence
  Description of Artificial Sequence: Synthetic oligonucleotide
  Antisense Strand to SEQ ID NO: 410477
agauuaguaagucauccac

SEQ ID NO: 410479 - RNA, 19 nt, Artificial Sequence
  Description of Artificial Sequence: Synthetic oligonucleotide
  Sense Strand Starting at position 1170 of SEQ ID NO: 315480
uggccucuucucuaagaca

SEQ ID NO: 410480 - RNA, 19 nt, Artificial Sequence
  Description of Artificial Sequence: Synthetic oligonucleotide
  Antisense Strand to SEQ ID NO: 410479
ugucuuagagaagaggcca

SEQ ID NO: 410481 - RNA, 19 nt, Artificial Sequence
  Description of Artificial Sequence: Synthetic oligonucleotide
  Sense Strand Starting at position 1170 of SEQ ID NO: 315768
gcauuugaucucggcuuag

SEQ ID NO: 410482 - RNA, 19 nt, Artificial Sequence
  Description of Artificial Sequence: Synthetic oligonucleotide
  Antisense Strand to SEQ ID NO: 410481
cuaagccgagaucaaaugc

SEQ ID NO: 410483 - RNA, 19 nt, Artificial Sequence
  Description of Artificial Sequence: Synthetic oligonucleotide
  Sense Strand Starting at position 1170 of SEQ ID NO: 315937
agauuaucugaaugaaugc

SEQ ID NO: 410484 - RNA, 19 nt, Artificial Sequence
  Description of Artificial Sequence: Synthetic oligonucleotide
  Antisense Strand to SEQ ID NO: 410483
gcauucauucagauaaucu

SEQ ID NO: 410485 - RNA, 19 nt, Artificial Sequence
  Description of Artificial Sequence: Synthetic oligonucleotide
  Sense Strand Starting at position 1170 of SEQ ID NO: 315944
cugaaugaaugcccugauu

SEQ ID NO: 410486 - RNA, 19 nt, Artificial Sequence
  Description of Artificial Sequence: Synthetic oligonucleotide
  Antisense Strand to SEQ ID NO: 410485
aaucagggcauucauucag

SEQ ID NO: 410487 - RNA, 19 nt, Artificial Sequence
  Description of Artificial Sequence: Synthetic oligonucleotide
  Sense Strand Starting at position 1170 of SEQ ID NO: 315946
gaaugaaugcccugauuag

SEQ ID NO: 410488 - RNA, 19 nt, Artificial Sequence
  Description of Artificial Sequence: Synthetic oligonucleotide
  Antisense Strand to SEQ ID NO: 410487
cuaaucagggcauucauuc

SEQ ID NO: 410489 - RNA, 19 nt, Artificial Sequence
  Description of Artificial Sequence: Synthetic oligonucleotide
  Sense Strand Starting at position 1170 of SEQ ID NO: 315947
aaugaaugcccugauuagu

SEQ ID NO: 410490 - RNA, 19 nt, Artificial Sequence
  Description of Artificial Sequence: Synthetic oligonucleotide
  Antisense Strand to SEQ ID NO: 410489
acuaaucagggcauucauu

SEQ ID NO: 410491 - RNA, 19 nt, Artificial Sequence
  Description of Artificial Sequence: Synthetic oligonucleotide
  Sense Strand Starting at position 1170 of SEQ ID NO: 316005
ggucaaugugcucaggaca

SEQ ID NO: 410492 - RNA, 19 nt, Artificial Sequence
  Description of Artificial Sequence: Synthetic oligonucleotide
  Antisense Strand to SEQ ID NO: 410491
uguccugagcacauugacc

SEQ ID NO: 410493 - RNA, 19 nt, Artificial Sequence
  Description of Artificial Sequence: Synthetic oligonucleotide
  Sense Strand Starting at position 1170 of SEQ ID NO: 316130
ugcugaacagcaugaugau

SEQ ID NO: 410494 - RNA, 19 nt, Artificial Sequence
  Description of Artificial Sequence: Synthetic oligonucleotide
  Antisense Strand to SEQ ID NO: 410493
aucaucaugcuguucagca

SEQ ID NO: 410495 - RNA, 19 nt, Artificial Sequence
  Description of Artificial Sequence: Synthetic oligonucleotide
  Sense Strand Starting at position 1170 of SEQ ID NO: 316237
gggcuuaaagccugagaac

SEQ ID NO: 410496 - RNA, 19 nt, Artificial Sequence
  Description of Artificial Sequence: Synthetic oligonucleotide
  Antisense Strand to SEQ ID NO: 410495
guucucaggcuuuaagccc

SEQ ID NO: 410497 - RNA, 19 nt, Artificial Sequence
  Description of Artificial Sequence: Synthetic oligonucleotide
  Sense Strand Starting at position 1170 of SEQ ID NO: 316238
ggcuuaaagccugagaacu

SEQ ID NO: 410498 - RNA, 19 nt, Artificial Sequence
  Description of Artificial Sequence: Synthetic oligonucleotide
  Antisense Strand to SEQ ID NO: 410497
aguucucaggcuuuaagcc

SEQ ID NO: 410499 - RNA, 19 nt, Artificial Sequence
  Description of Artificial Sequence: Synthetic oligonucleotide
  Sense Strand Starting at position 1170 of SEQ ID NO: 316275
acaggaguguccuuggaau

SEQ ID NO: 410500 - RNA, 19 nt, Artificial Sequence
  Description of Artificial Sequence: Synthetic oligonucleotide
  Antisense Strand to SEQ ID NO: 410499
auuccaaggacacuccugu

SEQ ID NO: 410501 - RNA, 19 nt, Artificial Sequence
  Description of Artificial Sequence: Synthetic oligonucleotide
  Sense Strand Starting at position 1170 of SEQ ID NO: 316427
ugggaaucugagcaggcau

SEQ ID NO: 410502 - RNA, 19 nt, Artificial Sequence
  Description of Artificial Sequence: Synthetic oligonucleotide
  Antisense Strand to SEQ ID NO: 410501
augccugcucagauuccca

SEQ ID NO: 410503 - RNA, 19 nt, Artificial Sequence
  Description of Artificial Sequence: Synthetic oligonucleotide
  Sense Strand Starting at position 1170 of SEQ ID NO: 316459
guuagagaccacugguauu

SEQ ID NO: 410504 - RNA, 19 nt, Artificial Sequence
  Description of Artificial Sequence: Synthetic oligonucleotide
  Antisense Strand to SEQ ID NO: 410503
aauaccaguggucucuaac

SEQ ID NO: 410505 - RNA, 19 nt, Artificial Sequence
  Description of Artificial Sequence: Synthetic oligonucleotide
  Sense Strand Starting at position 1170 of SEQ ID NO: 317220
gagugacuccgggaguaca

SEQ ID NO: 410506 - RNA, 19 nt, Artificial Sequence
  Description of Artificial Sequence: Synthetic oligonucleotide
  Antisense Strand to SEQ ID NO: 410505
uguacucccggagucacuc

SEQ ID NO: 410507 - RNA, 19 nt, Artificial Sequence
  Description of Artificial Sequence: Synthetic oligonucleotide
  Sense Strand Starting at position 1170 of SEQ ID NO: 317335
gcuccugagcaauagugga

SEQ ID NO: 410508 - RNA, 19 nt, Artificial Sequence
  Description of Artificial Sequence: Synthetic oligonucleotide
  Antisense Strand to SEQ ID NO: 410507
uccacuauugcucaggagc

SEQ ID NO: 410509 - RNA, 19 nt, Artificial Sequence
  Description of Artificial Sequence: Synthetic oligonucleotide
  Sense Strand Starting at position 1170 of SEQ ID NO: 318003
cguggcugucggaguugaa

SEQ ID NO: 410510 - RNA, 19 nt, Artificial Sequence
  Description of Artificial Sequence: Synthetic oligonucleotide
  Antisense Strand to SEQ ID NO: 410509
uucaacuccgacagccacg

SEQ ID NO: 410511 - RNA, 19 nt, Artificial Sequence
  Description of Artificial Sequence: Synthetic oligonucleotide
  Sense Strand Starting at position 1170 of SEQ ID NO: 318059
uacguuuaacgagaaacga

SEQ ID NO: 410512 - RNA, 19 nt, Artificial Sequence
  Description of Artificial Sequence: Synthetic oligonucleotide
  Antisense Strand to SEQ ID NO: 410511
ucguuucucguuaaacgua

SEQ ID NO: 410513 - RNA, 19 nt, Artificial Sequence
  Description of Artificial Sequence: Synthetic oligonucleotide
  Sense Strand Starting at position 1170 of SEQ ID NO: 318134
aaugcagacuuguuggaga

SEQ ID NO: 410514 - RNA, 19 nt, Artificial Sequence
  Description of Artificial Sequence: Synthetic oligonucleotide
  Antisense Strand to SEQ ID NO: 410513
ucuccaacaagucugcauu

SEQ ID NO: 410515 - RNA, 19 nt, Artificial Sequence
  Description of Artificial Sequence: Synthetic oligonucleotide
  Sense Strand Starting at position 1170 of SEQ ID NO: 318315
ugauuuaagcgauguugca

SEQ ID NO: 410516 - RNA, 19 nt, Artificial Sequence
  Description of Artificial Sequence: Synthetic oligonucleotide
  Antisense Strand to SEQ ID NO: 410515
ugcaacaucgcuuaaauca

SEQ ID NO: 410517 - RNA, 19 nt, Artificial Sequence
  Description of Artificial Sequence: Synthetic oligonucleotide
  Sense Strand Starting at position 1170 of SEQ ID NO: 318358
gucgaagucgcuguauuga

SEQ ID NO: 410518 - RNA, 19 nt, Artificial Sequence
  Description of Artificial Sequence: Synthetic oligonucleotide
  Antisense Strand to SEQ ID NO: 410517
ucaauacagcgacuucgac

SEQ ID NO: 410519 - RNA, 19 nt, Artificial Sequence
  Description of Artificial Sequence: Synthetic oligonucleotide
  Sense Strand Starting at position 1170 of SEQ ID NO: 318366
cgcuguauugauuaggaau

SEQ ID NO: 410520 - RNA, 19 nt, Artificial Sequence
  Description of Artificial Sequence: Synthetic oligonucleotide
  Antisense Strand to SEQ ID NO: 410519
auuccuaaucaauacagcg

SEQ ID NO: 410521 - RNA, 19 nt, Artificial Sequence
  Description of Artificial Sequence: Synthetic oligonucleotide
  Sense Strand Starting at position 1170 of SEQ ID NO: 318402
cuuaguuacugauuggauc

SEQ ID NO: 410522 - RNA, 19 nt, Artificial Sequence
  Description of Artificial Sequence: Synthetic oligonucleotide
  Antisense Strand to SEQ ID NO: 410521
gauccaaucaguaacuaag

SEQ ID NO: 410523 - RNA, 19 nt, Artificial Sequence
  Description of Artificial Sequence: Synthetic oligonucleotide
  Sense Strand Starting at position 1170 of SEQ ID NO: 318443
ugaauagcgcuauucgcau

SEQ ID NO: 410524 - RNA, 19 nt, Artificial Sequence
  Description of Artificial Sequence: Synthetic oligonucleotide
  Antisense Strand to SEQ ID NO: 410523
augcgaauagcgcuauuca

SEQ ID NO: 410525 - RNA, 19 nt, Artificial Sequence
  Description of Artificial Sequence: Synthetic oligonucleotide
  Sense Strand Starting at position 1170 of SEQ ID NO: 318449
gcgcuauucgcauccaagu

SEQ ID NO: 410526 - RNA, 19 nt, Artificial Sequence
  Description of Artificial Sequence: Synthetic oligonucleotide
  Antisense Strand to SEQ ID NO: 410525
acuuggaugcgaauagcgc

SEQ ID NO: 410527 - RNA, 19 nt, Artificial Sequence
  Description of Artificial Sequence: Synthetic oligonucleotide
  Sense Strand Starting at position 1170 of SEQ ID NO: 318450
cgcuauucgcauccaaguu

SEQ ID NO: 410528 - RNA, 19 nt, Artificial Sequence
  Description of Artificial Sequence: Synthetic oligonucleotide
  Antisense Strand to SEQ ID NO: 410527
aacuuggaugcgaauagcg

SEQ ID NO: 410529 - RNA, 19 nt, Artificial Sequence
  Description of Artificial Sequence: Synthetic oligonucleotide
  Sense Strand Starting at position 1170 of SEQ ID NO: 318597
ugguucugucuugaagaaa

SEQ ID NO: 410530 - RNA, 19 nt, Artificial Sequence
  Description of Artificial Sequence: Synthetic oligonucleotide
  Antisense Strand to SEQ ID NO: 410529
uuucuucaagacagaacca

SEQ ID NO: 410531 - RNA, 19 nt, Artificial Sequence
  Description of Artificial Sequence: Synthetic oligonucleotide
  Sense Strand Starting at position 1170 of SEQ ID NO: 318624
cguuucuugcaggugugua

SEQ ID NO: 410532 - RNA, 19 nt, Artificial Sequence
  Description of Artificial Sequence: Synthetic oligonucleotide
  Antisense Strand to SEQ ID NO: 410531
uacacaccugcaagaaacg

SEQ ID NO: 410533 - RNA, 19 nt, Artificial Sequence
  Description of Artificial Sequence: Synthetic oligonucleotide
  Sense Strand Starting at position 1170 of SEQ ID NO: 318659
ugccuuucugaaggagaaa

SEQ ID NO: 410534 - RNA, 19 nt, Artificial Sequence
  Description of Artificial Sequence: Synthetic oligonucleotide
  Antisense Strand to SEQ ID NO: 410533
uuucuccuucagaaaggca

SEQ ID NO: 410535 - RNA, 19 nt, Artificial Sequence
  Description of Artificial Sequence: Synthetic oligonucleotide
  Sense Strand Starting at position 1170 of SEQ ID NO: 318713
guuguauguggagagaauu

SEQ ID NO: 410536 - RNA, 19 nt, Artificial Sequence
  Description of Artificial Sequence: Synthetic oligonucleotide
  Antisense Strand to SEQ ID NO: 410535
aauucucuccacauacaac

SEQ ID NO: 410537 - RNA, 19 nt, Artificial Sequence
  Description of Artificial Sequence: Synthetic oligonucleotide
  Sense Strand Starting at position 1170 of SEQ ID NO: 318743
uaguaucacccagaugugu

SEQ ID NO: 410538 - RNA, 19 nt, Artificial Sequence
  Description of Artificial Sequence: Synthetic oligonucleotide
  Antisense Strand to SEQ ID NO: 410537
acacaucugggugauacua

SEQ ID NO: 410539 - RNA, 19 nt, Artificial Sequence
  Description of Artificial Sequence: Synthetic oligonucleotide
  Sense Strand Starting at position 1170 of SEQ ID NO: 318776
ggaugauugucaccuuaga

SEQ ID NO: 410540 - RNA, 19 nt, Artificial Sequence
  Description of Artificial Sequence: Synthetic oligonucleotide
  Antisense Strand to SEQ ID NO: 410539
ucuaaggugacaaucaucc

SEQ ID NO: 410541 - RNA, 19 nt, Artificial Sequence
  Description of Artificial Sequence: Synthetic oligonucleotide
  Sense Strand Starting at position 1170 of SEQ ID NO: 318789
cuuagauguggcuagauug

SEQ ID NO: 410542 - RNA, 19 nt, Artificial Sequence
  Description of Artificial Sequence: Synthetic oligonucleotide
  Antisense Strand to SEQ ID NO: 410541
caaucuagccacaucuaag

SEQ ID NO: 410543 - RNA, 19 nt, Artificial Sequence
  Description of Artificial Sequence: Synthetic oligonucleotide
  Sense Strand Starting at position 1170 of SEQ ID NO: 318799
gcuagauuggcggagauac

SEQ ID NO: 410544 - RNA, 19 nt, Artificial Sequence
  Description of Artificial Sequence: Synthetic oligonucleotide
  Antisense Strand to SEQ ID NO: 410543
guaucuccgccaaucuagc

SEQ ID NO: 410545 - RNA, 19 nt, Artificial Sequence
  Description of Artificial Sequence: Synthetic oligonucleotide
  Sense Strand Starting at position 1170 of SEQ ID NO: 318897
cuggauaacuugucuuaau

SEQ ID NO: 410546 - RNA, 19 nt, Artificial Sequence
  Description of Artificial Sequence: Synthetic oligonucleotide
  Antisense Strand to SEQ ID NO: 410545
auuaagacaaguuauccag

SEQ ID NO: 410547 - RNA, 19 nt, Artificial Sequence
  Description of Artificial Sequence: Synthetic oligonucleotide
  Sense Strand Starting at position 1170 of SEQ ID NO: 318898
uggauaacuugucuuaauu

SEQ ID NO: 410548 - RNA, 19 nt, Artificial Sequence
  Description of Artificial Sequence: Synthetic oligonucleotide
  Antisense Strand to SEQ ID NO: 410547
aauuaagacaaguuaucca

SEQ ID NO: 410549 - RNA, 19 nt, Artificial Sequence
  Description of Artificial Sequence: Synthetic oligonucleotide
  Sense Strand Starting at position 1170 of SEQ ID NO: 318979
cuugguuugaguuaaaguc

SEQ ID NO: 410550 - RNA, 19 nt, Artificial Sequence
  Description of Artificial Sequence: Synthetic oligonucleotide
  Antisense Strand to SEQ ID NO: 410549
gacuuuaacucaaaccaag

SEQ ID NO: 410551 - RNA, 19 nt, Artificial Sequence
  Description of Artificial Sequence: Synthetic oligonucleotide
  Sense Strand Starting at position 1170 of SEQ ID NO: 319000
gugcuagauuuauccucuc

SEQ ID NO: 410552 - RNA, 19 nt, Artificial Sequence
  Description of Artificial Sequence: Synthetic oligonucleotide
  Antisense Strand to SEQ ID NO: 410551
gagaggauaaaucuagcac

SEQ ID NO: 410553 - RNA, 19 nt, Artificial Sequence
  Description of Artificial Sequence: Synthetic oligonucleotide
  Sense Strand Starting at position 1170 of SEQ ID NO: 319032
aucuguguuggagggaaga

SEQ ID NO: 410554 - RNA, 19 nt, Artificial Sequence
  Description of Artificial Sequence: Synthetic oligonucleotide
  Antisense Strand to SEQ ID NO: 410553
ucuucccuccaacacagau

SEQ ID NO: 410555 - RNA, 19 nt, Artificial Sequence
  Description of Artificial Sequence: Synthetic oligonucleotide
  Sense Strand Starting at position 1170 of SEQ ID NO: 319058
aggaauacuguguaguucu

SEQ ID NO: 410556 - RNA, 19 nt, Artificial Sequence
  Description of Artificial Sequence: Synthetic oligonucleotide
  Antisense Strand to SEQ ID NO: 410555
agaacuacacaguauuccu

SEQ ID NO: 410557 - RNA, 19 nt, Artificial Sequence
  Description of Artificial Sequence: Synthetic oligonucleotide
  Sense Strand Starting at position 1170 of SEQ ID NO: 319180
cuaucuagucaggagcaga

SEQ ID NO: 410558 - RNA, 19 nt, Artificial Sequence
  Description of Artificial Sequence: Synthetic oligonucleotide
  Antisense Strand to SEQ ID NO: 410557
ucugcuccugacuagauag

SEQ ID NO: 410559 - RNA, 19 nt, Artificial Sequence
  Description of Artificial Sequence: Synthetic oligonucleotide
  Sense Strand Starting at position 1171 of SEQ ID NO: 315255
ugucauuaguaccacuuaa

SEQ ID NO: 410560 - RNA, 19 nt, Artificial Sequence
  Description of Artificial Sequence: Synthetic oligonucleotide
  Antisense Strand to SEQ ID NO: 410559
uuaagugguacuaaugaca

SEQ ID NO: 410561 - RNA, 19 nt, Artificial Sequence
  Description of Artificial Sequence: Synthetic oligonucleotide
  Sense Strand Starting at position 1171 of SEQ ID NO: 315387
gcuccauaugaauguuuau

SEQ ID NO: 410562 - RNA, 19 nt, Artificial Sequence
  Description of Artificial Sequence: Synthetic oligonucleotide
  Antisense Strand to SEQ ID NO: 410561
auaaacauucauauggagc

SEQ ID NO: 410563 - RNA, 19 nt, Artificial Sequence
  Description of Artificial Sequence: Synthetic oligonucleotide
  Sense Strand Starting at position 1171 of SEQ ID NO: 315390
ccauaugaauguuuauuag

SEQ ID NO: 410564 - RNA, 19 nt, Artificial Sequence
  Description of Artificial Sequence: Synthetic oligonucleotide
  Antisense Strand to SEQ ID NO: 410563
cuaauaaacauucauaugg

SEQ ID NO: 410565 - RNA, 19 nt, Artificial Sequence
  Description of Artificial Sequence: Synthetic oligonucleotide
  Sense Strand Starting at position 1171 of SEQ ID NO: 315393
uaugaauguuuauuaggca

SEQ ID NO: 410566 - RNA, 19 nt, Artificial Sequence
  Description of Artificial Sequence: Synthetic oligonucleotide
  Antisense Strand to SEQ ID NO: 410565
ugccuaauaaacauucaua

SEQ ID NO: 410567 - RNA, 19 nt, Artificial Sequence
  Description of Artificial Sequence: Synthetic oligonucleotide
  Sense Strand Starting at position 1171 of SEQ ID NO: 315394
augaauguuuauuaggcaa

SEQ ID NO: 410568 - RNA, 19 nt, Artificial Sequence
  Description of Artificial Sequence: Synthetic oligonucleotide
  Antisense Strand to SEQ ID NO: 410567
uugccuaauaaacauucau

SEQ ID NO: 410569 - RNA, 19 nt, Artificial Sequence
  Description of Artificial Sequence: Synthetic oligonucleotide
  Sense Strand Starting at position 1171 of SEQ ID NO: 315575
caagauaacugaggguauc

SEQ ID NO: 410570 - RNA, 19 nt, Artificial Sequence
  Description of Artificial Sequence: Synthetic oligonucleotide
  Antisense Strand to SEQ ID NO: 410569
gauacccucaguuaucuug

SEQ ID NO: 410571 - RNA, 19 nt, Artificial Sequence
  Description of Artificial Sequence: Synthetic oligonucleotide
  Sense Strand Starting at position 1171 of SEQ ID NO: 315587
ggguaucuuucucuguguu

SEQ ID NO: 410572 - RNA, 19 nt, Artificial Sequence
  Description of Artificial Sequence: Synthetic oligonucleotide
  Antisense Strand to SEQ ID NO: 410571
aacacagagaaagauaccc

SEQ ID NO: 410573 - RNA, 19 nt, Artificial Sequence
  Description of Artificial Sequence: Synthetic oligonucleotide
  Sense Strand Starting at position 1171 of SEQ ID NO: 315630
guaugaaauuuguaucacu

SEQ ID NO: 410574 - RNA, 19 nt, Artificial Sequence
  Description of Artificial Sequence: Synthetic oligonucleotide
  Antisense Strand to SEQ ID NO: 410573
agugauacaaauuucauac

SEQ ID NO: 410575 - RNA, 19 nt, Artificial Sequence
  Description of Artificial Sequence: Synthetic oligonucleotide
  Sense Strand Starting at position 1171 of SEQ ID NO: 316183
gcccgugagccugacauuu

SEQ ID NO: 410576 - RNA, 19 nt, Artificial Sequence
  Description of Artificial Sequence: Synthetic oligonucleotide
  Antisense Strand to SEQ ID NO: 410575
aaaugucaggcucacgggc

SEQ ID NO: 410577 - RNA, 19 nt, Artificial Sequence
  Description of Artificial Sequence: Synthetic oligonucleotide
  Sense Strand Starting at position 1171 of SEQ ID NO: 316239
uguaaaguuagugaucuua

SEQ ID NO: 410578 - RNA, 19 nt, Artificial Sequence
  Description of Artificial Sequence: Synthetic oligonucleotide
  Antisense Strand to SEQ ID NO: 410577
uaagaucacuaacuuuaca

SEQ ID NO: 410579 - RNA, 19 nt, Artificial Sequence
  Description of Artificial Sequence: Synthetic oligonucleotide
  Sense Strand Starting at position 1171 of SEQ ID NO: 316255
uuacaaaccuagcugagua

SEQ ID NO: 410580 - RNA, 19 nt, Artificial Sequence
  Description of Artificial Sequence: Synthetic oligonucleotide
  Antisense Strand to SEQ ID NO: 410579
uacucagcuagguuuguaa

SEQ ID NO: 410581 - RNA, 19 nt, Artificial Sequence
  Description of Artificial Sequence: Synthetic oligonucleotide
  Sense Strand Starting at position 1171 of SEQ ID NO: 316387
gcccgugagccugauauuu

SEQ ID NO: 410582 - RNA, 19 nt, Artificial Sequence
  Description of Artificial Sequence: Synthetic oligonucleotide
  Antisense Strand to SEQ ID NO: 410581
aaauaucaggcucacgggc

SEQ ID NO: 410583 - RNA, 19 nt, Artificial Sequence
  Description of Artificial Sequence: Synthetic oligonucleotide
  Sense Strand Starting at position 1171 of SEQ ID NO: 316437
uguguaaaguuagugaucu

SEQ ID NO: 410584 - RNA, 19 nt, Artificial Sequence
  Description of Artificial Sequence: Synthetic oligonucleotide
  Antisense Strand to SEQ ID NO: 410583
agaucacuaacuuuacaca

SEQ ID NO: 410585 - RNA, 19 nt, Artificial Sequence
  Description of Artificial Sequence: Synthetic oligonucleotide
  Sense Strand Starting at position 1171 of SEQ ID NO: 316439
uguaaaguuagugaucuca

SEQ ID NO: 410586 - RNA, 19 nt, Artificial Sequence
  Description of Artificial Sequence: Synthetic oligonucleotide
  Antisense Strand to SEQ ID NO: 410585
ugagaucacuaacuuuaca

SEQ ID NO: 410587 - RNA, 19 nt, Artificial Sequence
  Description of Artificial Sequence: Synthetic oligonucleotide
  Sense Strand Starting at position 1171 of SEQ ID NO: 316486
gcccgugagccuuaauccu

SEQ ID NO: 410588 - RNA, 19 nt, Artificial Sequence
  Description of Artificial Sequence: Synthetic oligonucleotide
  Antisense Strand to SEQ ID NO: 410587
aggauuaaggcucacgggc

SEQ ID NO: 410589 - RNA, 19 nt, Artificial Sequence
  Description of Artificial Sequence: Synthetic oligonucleotide
  Sense Strand Starting at position 1171 of SEQ ID NO: 316655
guggcuuccugccucuauu

SEQ ID NO: 410590 - RNA, 19 nt, Artificial Sequence
  Description of Artificial Sequence: Synthetic oligonucleotide
  Antisense Strand to SEQ ID NO: 410589
aauagaggcaggaagccac

SEQ ID NO: 410591 - RNA, 19 nt, Artificial Sequence
  Description of Artificial Sequence: Synthetic oligonucleotide
  Sense Strand Starting at position 1171 of SEQ ID NO: 316703
gcggguuucccagggccaa

SEQ ID NO: 410592 - RNA, 19 nt, Artificial Sequence
  Description of Artificial Sequence: Synthetic oligonucleotide
  Antisense Strand to SEQ ID NO: 410591
uuggcccugggaaacccgc

SEQ ID NO: 410593 - RNA, 19 nt, Artificial Sequence
  Description of Artificial Sequence: Synthetic oligonucleotide
  Sense Strand Starting at position 1171 of SEQ ID NO: 317000
gcagaauauagguguucuc

SEQ ID NO: 410594 - RNA, 19 nt, Artificial Sequence
  Description of Artificial Sequence: Synthetic oligonucleotide
  Antisense Strand to SEQ ID NO: 410593
gagaacaccuauauucugc

SEQ ID NO: 410595 - RNA, 19 nt, Artificial Sequence
  Description of Artificial Sequence: Synthetic oligonucleotide
  Sense Strand Starting at position 1171 of SEQ ID NO: 317113
ggcguagcucgcgaugaag

SEQ ID NO: 410596 - RNA, 19 nt, Artificial Sequence
  Description of Artificial Sequence: Synthetic oligonucleotide
  Antisense Strand to SEQ ID NO: 410595
cuucaucgcgagcuacgcc

SEQ ID NO: 410597 - RNA, 19 nt, Artificial Sequence
  Description of Artificial Sequence: Synthetic oligonucleotide
  Sense Strand Starting at position 1171 of SEQ ID NO: 318039
aggcgugagccaucguacu

SEQ ID NO: 410598 - RNA, 19 nt, Artificial Sequence
  Description of Artificial Sequence: Synthetic oligonucleotide
  Antisense Strand to SEQ ID NO: 410597
aguacgauggcucacgccu

SEQ ID NO: 410599 - RNA, 19 nt, Artificial Sequence
  Description of Artificial Sequence: Synthetic oligonucleotide
  Sense Strand Starting at position 1171 of SEQ ID NO: 318041
gcgugagccaucguacucu

SEQ ID NO: 410600 - RNA, 19 nt, Artificial Sequence
  Description of Artificial Sequence: Synthetic oligonucleotide
  Antisense Strand to SEQ ID NO: 410599
agaguacgauggcucacgc

SEQ ID NO: 410601 - RNA, 19 nt, Artificial Sequence
  Description of Artificial Sequence: Synthetic oligonucleotide
  Sense Strand Starting at position 1171 of SEQ ID NO: 318060
gccgcauucccugcuuaua

SEQ ID NO: 410602 - RNA, 19 nt, Artificial Sequence
  Description of Artificial Sequence: Synthetic oligonucleotide
  Antisense Strand to SEQ ID NO: 410601
uauaagcagggaaugcggc

SEQ ID NO: 410603 - RNA, 19 nt, Artificial Sequence
  Description of Artificial Sequence: Synthetic oligonucleotide
  Sense Strand Starting at position 1171 of SEQ ID NO: 318166
gccuguaaucccuguuuac

SEQ ID NO: 410604 - RNA, 19 nt, Artificial Sequence
  Description of Artificial Sequence: Synthetic oligonucleotide
  Antisense Strand to SEQ ID NO: 410603
guaaacagggauuacaggc

SEQ ID NO: 410605 - RNA, 19 nt, Artificial Sequence
  Description of Artificial Sequence: Synthetic oligonucleotide
  Sense Strand Starting at position 1171 of SEQ ID NO: 318525
uuucgaaucgcugucaugu

SEQ ID NO: 410606 - RNA, 19 nt, Artificial Sequence
  Description of Artificial Sequence: Synthetic oligonucleotide
  Antisense Strand to SEQ ID NO: 410605
acaugacagcgauucgaaa

SEQ ID NO: 410607 - RNA, 19 nt, Artificial Sequence
  Description of Artificial Sequence: Synthetic oligonucleotide
  Sense Strand Starting at position 1171 of SEQ ID NO: 318526
uucgaaucgcugucauguu

SEQ ID NO: 410608 - RNA, 19 nt, Artificial Sequence
  Description of Artificial Sequence: Synthetic oligonucleotide
  Antisense Strand to SEQ ID NO: 410607
aacaugacagcgauucgaa

SEQ ID NO: 410609 - RNA, 19 nt, Artificial Sequence
  Description of Artificial Sequence: Synthetic oligonucleotide
  Sense Strand Starting at position 1171 of SEQ ID NO: 318531
aucgcugucauguucugua

SEQ ID NO: 410610 - RNA, 19 nt, Artificial Sequence
  Description of Artificial Sequence: Synthetic oligonucleotide
  Antisense Strand to SEQ ID NO: 410609
uacagaacaugacagcgau

SEQ ID NO: 410611 - RNA, 19 nt, Artificial Sequence
  Description of Artificial Sequence: Synthetic oligonucleotide
  Sense Strand Starting at position 1171 of SEQ ID NO: 318535
cugucauguucuguacuau

SEQ ID NO: 410612 - RNA, 19 nt, Artificial Sequence
  Description of Artificial Sequence: Synthetic oligonucleotide
  Antisense Strand to SEQ ID NO: 410611
auaguacagaacaugacag

SEQ ID NO: 410613 - RNA, 19 nt, Artificial Sequence
  Description of Artificial Sequence: Synthetic oligonucleotide
  Sense Strand Starting at position 1171 of SEQ ID NO: 318536
ugucauguucuguacuaua

SEQ ID NO: 410614 - RNA, 19 nt, Artificial Sequence
  Description of Artificial Sequence: Synthetic oligonucleotide
  Antisense Strand to SEQ ID NO: 410613
uauaguacagaacaugaca

SEQ ID NO: 410615 - RNA, 19 nt, Artificial Sequence
  Description of Artificial Sequence: Synthetic oligonucleotide
  Sense Strand Starting at position 1171 of SEQ ID NO: 318553
uaugcaguuccugaaagaa

SEQ ID NO: 410616 - RNA, 19 nt, Artificial Sequence
  Description of Artificial Sequence: Synthetic oligonucleotide
  Antisense Strand to SEQ ID NO: 410615
uucuuucaggaacugcaua

SEQ ID NO: 410617 - RNA, 19 nt, Artificial Sequence
  Description of Artificial Sequence: Synthetic oligonucleotide
  Sense Strand Starting at position 1171 of SEQ ID NO: 318577
gcaagaaggagucagcuaa

SEQ ID NO: 410618 - RNA, 19 nt, Artificial Sequence
  Description of Artificial Sequence: Synthetic oligonucleotide
  Antisense Strand to SEQ ID NO: 410617
uuagcugacuccuucuugc

SEQ ID NO: 410619 - RNA, 19 nt, Artificial Sequence
  Description of Artificial Sequence: Synthetic oligonucleotide
  Sense Strand Starting at position 1171 of SEQ ID NO: 318602
ugaacugucuuagugccaa

SEQ ID NO: 410620 - RNA, 19 nt, Artificial Sequence
  Description of Artificial Sequence: Synthetic oligonucleotide
  Antisense Strand to SEQ ID NO: 410619
uuggcacuaagacaguuca

SEQ ID NO: 410621 - RNA, 19 nt, Artificial Sequence
  Description of Artificial Sequence: Synthetic oligonucleotide
  Sense Strand Starting at position 1171 of SEQ ID NO: 318690
ggagaugauguguaugagu

SEQ ID NO: 410622 - RNA, 19 nt, Artificial Sequence
  Description of Artificial Sequence: Synthetic oligonucleotide
  Antisense Strand to SEQ ID NO: 410621
acucauacacaucaucucc

SEQ ID NO: 410623 - RNA, 19 nt, Artificial Sequence
  Description of Artificial Sequence: Synthetic oligonucleotide
  Sense Strand Starting at position 1171 of SEQ ID NO: 318692
agaugauguguaugagugu

SEQ ID NO: 410624 - RNA, 19 nt, Artificial Sequence
  Description of Artificial Sequence: Synthetic oligonucleotide
  Antisense Strand to SEQ ID NO: 410623
acacucauacacaucaucu

SEQ ID NO: 410625 - RNA, 19 nt, Artificial Sequence
  Description of Artificial Sequence: Synthetic oligonucleotide
  Sense Strand Starting at position 1171 of SEQ ID NO: 318721
gugugugcaugccuaacau

SEQ ID NO: 410626 - RNA, 19 nt, Artificial Sequence
  Description of Artificial Sequence: Synthetic oligonucleotide
  Antisense Strand to SEQ ID NO: 410625
auguuaggcaugcacacac

SEQ ID NO: 410627 - RNA, 19 nt, Artificial Sequence
  Description of Artificial Sequence: Synthetic oligonucleotide
  Sense Strand Starting at position 1171 of SEQ ID NO: 319074
gcgugaguuguguggaggu

SEQ ID NO: 410628 - RNA, 19 nt, Artificial Sequence
  Description of Artificial Sequence: Synthetic oligonucleotide
  Antisense Strand to SEQ ID NO: 410627
accuccacacaacucacgc

SEQ ID NO: 410629 - RNA, 19 nt, Artificial Sequence
  Description of Artificial Sequence: Synthetic oligonucleotide
  Sense Strand Starting at position 1171 of SEQ ID NO: 319076
gugaguuguguggaggugu

SEQ ID NO: 410630 - RNA, 19 nt, Artificial Sequence
  Description of Artificial Sequence: Synthetic oligonucleotide
  Antisense Strand to SEQ ID NO: 410629
acaccuccacacaacucac

SEQ ID NO: 410631 - RNA, 19 nt, Artificial Sequence
  Description of Artificial Sequence: Synthetic oligonucleotide
  Sense Strand Starting at position 1171 of SEQ ID NO: 319113
agagaagcuucuccauauc

SEQ ID NO: 410632 - RNA, 19 nt, Artificial Sequence
  Description of Artificial Sequence: Synthetic oligonucleotide
  Antisense Strand to SEQ ID NO: 410631
gauauggagaagcuucucu

SEQ ID NO: 410633 - RNA, 19 nt, Artificial Sequence
  Description of Artificial Sequence: Synthetic oligonucleotide
  Sense Strand Starting at position 1171 of SEQ ID NO: 319133
ggcauauccuagccaugac

SEQ ID NO: 410634 - RNA, 19 nt, Artificial Sequence
  Description of Artificial Sequence: Synthetic oligonucleotide
  Antisense Strand to SEQ ID NO: 410633
gucauggcuaggauaugcc

SEQ ID NO: 410635 - RNA, 19 nt, Artificial Sequence
  Description of Artificial Sequence: Synthetic oligonucleotide
  Sense Strand Starting at position 1171 of SEQ ID NO: 319197
aagcuuccuggauguugua

SEQ ID NO: 410636 - RNA, 19 nt, Artificial Sequence
  Description of Artificial Sequence: Synthetic oligonucleotide
  Antisense Strand to SEQ ID NO: 410635
uacaacauccaggaagcuu

SEQ ID NO: 410637 - RNA, 19 nt, Artificial Sequence
  Description of Artificial Sequence: Synthetic oligonucleotide
  Sense Strand Starting at position 1171 of SEQ ID NO: 319206
ggauguuguaugcaggaau

SEQ ID NO: 410638 - RNA, 19 nt, Artificial Sequence
  Description of Artificial Sequence: Synthetic oligonucleotide
  Antisense Strand to SEQ ID NO: 410637
auuccugcauacaacaucc

SEQ ID NO: 410639 - RNA, 19 nt, Artificial Sequence
  Description of Artificial Sequence: Synthetic oligonucleotide
  Sense Strand Starting at position 1172 of SEQ ID NO: 315762
ggugaaaugcuucagguag

SEQ ID NO: 410640 - RNA, 19 nt, Artificial Sequence
  Description of Artificial Sequence: Synthetic oligonucleotide
  Antisense Strand to SEQ ID NO: 410639
cuaccugaagcauuucacc

SEQ ID NO: 410641 - RNA, 19 nt, Artificial Sequence
  Description of Artificial Sequence: Synthetic oligonucleotide
  Sense Strand Starting at position 1172 of SEQ ID NO: 315956
aggugcuaaguagauaagu

SEQ ID NO: 410642 - RNA, 19 nt, Artificial Sequence
  Description of Artificial Sequence: Synthetic oligonucleotide
  Antisense Strand to SEQ ID NO: 410641
acuuaucuacuuagcaccu

SEQ ID NO: 410643 - RNA, 19 nt, Artificial Sequence
  Description of Artificial Sequence: Synthetic oligonucleotide
  Sense Strand Starting at position 1172 of SEQ ID NO: 315958
gugcuaaguagauaaguag

SEQ ID NO: 410644 - RNA, 19 nt, Artificial Sequence
  Description of Artificial Sequence: Synthetic oligonucleotide
  Antisense Strand to SEQ ID NO: 410643
cuacuuaucuacuuagcac

SEQ ID NO: 410645 - RNA, 19 nt, Artificial Sequence
  Description of Artificial Sequence: Synthetic oligonucleotide
  Sense Strand Starting at position 1172 of SEQ ID NO: 316035
gaugucuugucuuuagaga

SEQ ID NO: 410646 - RNA, 19 nt, Artificial Sequence
  Description of Artificial Sequence: Synthetic oligonucleotide
  Antisense Strand to SEQ ID NO: 410645
ucucuaaagacaagacauc

SEQ ID NO: 410647 - RNA, 19 nt, Artificial Sequence
  Description of Artificial Sequence: Synthetic oligonucleotide
  Sense Strand Starting at position 1172 of SEQ ID NO: 316036
augucuugucuuuagagac

SEQ ID NO: 410648 - RNA, 19 nt, Artificial Sequence
  Description of Artificial Sequence: Synthetic oligonucleotide
  Antisense Strand to SEQ ID NO: 410647
gucucuaaagacaagacau

SEQ ID NO: 410649 - RNA, 19 nt, Artificial Sequence
  Description of Artificial Sequence: Synthetic oligonucleotide
  Sense Strand Starting at position 1172 of SEQ ID NO: 316098
guugcuauuuccuuaucua

SEQ ID NO: 410650 - RNA, 19 nt, Artificial Sequence
  Description of Artificial Sequence: Synthetic oligonucleotide
  Antisense Strand to SEQ ID NO: 410649
uagauaaggaaauagcaac

SEQ ID NO: 410651 - RNA, 19 nt, Artificial Sequence
  Description of Artificial Sequence: Synthetic oligonucleotide
  Sense Strand Starting at position 1172 of SEQ ID NO: 316204
gauguugucauugacggga

SEQ ID NO: 410652 - RNA, 19 nt, Artificial Sequence
  Description of Artificial Sequence: Synthetic oligonucleotide
  Antisense Strand to SEQ ID NO: 410651
ucccgucaaugacaacauc

SEQ ID NO: 410653 - RNA, 19 nt, Artificial Sequence
  Description of Artificial Sequence: Synthetic oligonucleotide
  Sense Strand Starting at position 1172 of SEQ ID NO: 316209
ugucauugacgggaccaga

SEQ ID NO: 410654 - RNA, 19 nt, Artificial Sequence
  Description of Artificial Sequence: Synthetic oligonucleotide
  Antisense Strand to SEQ ID NO: 410653
ucuggucccgucaaugaca

SEQ ID NO: 410655 - RNA, 19 nt, Artificial Sequence
  Description of Artificial Sequence: Synthetic oligonucleotide
  Sense Strand Starting at position 1172 of SEQ ID NO: 316402
ggcugugguguuuaagaga

SEQ ID NO: 410656 - RNA, 19 nt, Artificial Sequence
  Description of Artificial Sequence: Synthetic oligonucleotide
  Antisense Strand to SEQ ID NO: 410655
ucucuuaaacaccacagcc

SEQ ID NO: 410657 - RNA, 19 nt, Artificial Sequence
  Description of Artificial Sequence: Synthetic oligonucleotide
  Sense Strand Starting at position 1172 of SEQ ID NO: 316407
ugguguuuaagagagguua

SEQ ID NO: 410658 - RNA, 19 nt, Artificial Sequence
  Description of Artificial Sequence: Synthetic oligonucleotide
  Antisense Strand to SEQ ID NO: 410657
uaaccucucuuaaacacca

SEQ ID NO: 410659 - RNA, 19 nt, Artificial Sequence
  Description of Artificial Sequence: Synthetic oligonucleotide
  Sense Strand Starting at position 1172 of SEQ ID NO: 316409
guguuuaagagagguuaga

SEQ ID NO: 410660 - RNA, 19 nt, Artificial Sequence
  Description of Artificial Sequence: Synthetic oligonucleotide
  Antisense Strand to SEQ ID NO: 410659
ucuaaccucucuuaaacac

SEQ ID NO: 410661 - RNA, 19 nt, Artificial Sequence
  Description of Artificial Sequence: Synthetic oligonucleotide
  Sense Strand Starting at position 1172 of SEQ ID NO: 316420
agguuagauauuugccguu

SEQ ID NO: 410662 - RNA, 19 nt, Artificial Sequence
  Description of Artificial Sequence: Synthetic oligonucleotide
  Antisense Strand to SEQ ID NO: 410661
aacggcaaauaucuaaccu

SEQ ID NO: 410663 - RNA, 19 nt, Artificial Sequence
  Description of Artificial Sequence: Synthetic oligonucleotide
  Sense Strand Starting at position 1172 of SEQ ID NO: 316565
acaguaauuguugauucua

SEQ ID NO: 410664 - RNA, 19 nt, Artificial Sequence
  Description of Artificial Sequence: Synthetic oligonucleotide
  Antisense Strand to SEQ ID NO: 410663
uagaaucaacaauuacugu

SEQ ID NO: 410665 - RNA, 19 nt, Artificial Sequence
  Description of Artificial Sequence: Synthetic oligonucleotide
  Sense Strand Starting at position 1172 of SEQ ID NO: 316860
gguacugcccuugagacau

SEQ ID NO: 410666 - RNA, 19 nt, Artificial Sequence
  Description of Artificial Sequence: Synthetic oligonucleotide
  Antisense Strand to SEQ ID NO: 410665
augucucaagggcaguacc

SEQ ID NO: 410667 - RNA, 19 nt, Artificial Sequence
  Description of Artificial Sequence: Synthetic oligonucleotide
  Sense Strand Starting at position 1172 of SEQ ID NO: 316870
uugagacauuguguauuaa

SEQ ID NO: 410668 - RNA, 19 nt, Artificial Sequence
  Description of Artificial Sequence: Synthetic oligonucleotide
  Antisense Strand to SEQ ID NO: 410667
uuaauacacaaugucucaa

SEQ ID NO: 410669 - RNA, 19 nt, Artificial Sequence
  Description of Artificial Sequence: Synthetic oligonucleotide
  Sense Strand Starting at position 1172 of SEQ ID NO: 317068
auucgaccuuguuuaaaua

SEQ ID NO: 410670 - RNA, 19 nt, Artificial Sequence
  Description of Artificial Sequence: Synthetic oligonucleotide
  Antisense Strand to SEQ ID NO: 410669
uauuuaaacaaggucgaau

SEQ ID NO: 410671 - RNA, 19 nt, Artificial Sequence
  Description of Artificial Sequence: Synthetic oligonucleotide
  Sense Strand Starting at position 1172 of SEQ ID NO: 317271
gggaguucuguauauguau

SEQ ID NO: 410672 - RNA, 19 nt, Artificial Sequence
  Description of Artificial Sequence: Synthetic oligonucleotide
  Antisense Strand to SEQ ID NO: 410671
auacauauacagaacuccc

SEQ ID NO: 410673 - RNA, 19 nt, Artificial Sequence
  Description of Artificial Sequence: Synthetic oligonucleotide
  Sense Strand Starting at position 1172 of SEQ ID NO: 317457
acuggaaacuuacucugua

SEQ ID NO: 410674 - RNA, 19 nt, Artificial Sequence
  Description of Artificial Sequence: Synthetic oligonucleotide
  Antisense Strand to SEQ ID NO: 410673
uacagaguaaguuuccagu

SEQ ID NO: 410675 - RNA, 19 nt, Artificial Sequence
  Description of Artificial Sequence: Synthetic oligonucleotide
  Sense Strand Starting at position 1172 of SEQ ID NO: 317458
cuggaaacuuacucuguau

SEQ ID NO: 410676 - RNA, 19 nt, Artificial Sequence
  Description of Artificial Sequence: Synthetic oligonucleotide
  Antisense Strand to SEQ ID NO: 410675
auacagaguaaguuuccag

SEQ ID NO: 410677 - RNA, 19 nt, Artificial Sequence
  Description of Artificial Sequence: Synthetic oligonucleotide
  Sense Strand Starting at position 1172 of SEQ ID NO: 317573
agagccauauuguuacaua

SEQ ID NO: 410678 - RNA, 19 nt, Artificial Sequence
  Description of Artificial Sequence: Synthetic oligonucleotide
  Antisense Strand to SEQ ID NO: 410677
uauguaacaauauggcucu

SEQ ID NO: 410679 - RNA, 19 nt, Artificial Sequence
  Description of Artificial Sequence: Synthetic oligonucleotide
  Sense Strand Starting at position 1172 of SEQ ID NO: 317596
gcguaagaggaauggagaa

SEQ ID NO: 410680 - RNA, 19 nt, Artificial Sequence
  Description of Artificial Sequence: Synthetic oligonucleotide
  Antisense Strand to SEQ ID NO: 410679
uucuccauuccucuuacgc

SEQ ID NO: 410681 - RNA, 19 nt, Artificial Sequence
  Description of Artificial Sequence: Synthetic oligonucleotide
  Sense Strand Starting at position 1172 of SEQ ID NO: 317660
cguaucauauuucuuccua

SEQ ID NO: 410682 - RNA, 19 nt, Artificial Sequence
  Description of Artificial Sequence: Synthetic oligonucleotide
  Antisense Strand to SEQ ID NO: 410681
uaggaagaaauaugauacg

SEQ ID NO: 410683 - RNA, 19 nt, Artificial Sequence
  Description of Artificial Sequence: Synthetic oligonucleotide
  Sense Strand Starting at position 1172 of SEQ ID NO: 317806
acuggaauugcuugguuaa

SEQ ID NO: 410684 - RNA, 19 nt, Artificial Sequence
  Description of Artificial Sequence: Synthetic oligonucleotide
  Antisense Strand to SEQ ID NO: 410683
uuaaccaagcaauuccagu

SEQ ID NO: 410685 - RNA, 19 nt, Artificial Sequence
  Description of Artificial Sequence: Synthetic oligonucleotide
  Sense Strand Starting at position 1172 of SEQ ID NO: 317807
cuggaauugcuugguuaaa

SEQ ID NO: 410686 - RNA, 19 nt, Artificial Sequence
  Description of Artificial Sequence: Synthetic oligonucleotide
  Antisense Strand to SEQ ID NO: 410685
uuuaaccaagcaauuccag

SEQ ID NO: 410687 - RNA, 19 nt, Artificial Sequence
  Description of Artificial Sequence: Synthetic oligonucleotide
  Sense Strand Starting at position 1172 of SEQ ID NO: 317808
uggaauugcuugguuaaag

SEQ ID NO: 410688 - RNA, 19 nt, Artificial Sequence
  Description of Artificial Sequence: Synthetic oligonucleotide
  Antisense Strand to SEQ ID NO: 410687
cuuuaaccaagcaauucca

SEQ ID NO: 410689 - RNA, 19 nt, Artificial Sequence
  Description of Artificial Sequence: Synthetic oligonucleotide
  Sense Strand Starting at position 1172 of SEQ ID NO: 317809
ggaauugcuugguuaaagg

SEQ ID NO: 410690 - RNA, 19 nt, Artificial Sequence
  Description of Artificial Sequence: Synthetic oligonucleotide
  Antisense Strand to SEQ ID NO: 410689
ccuuuaaccaagcaauucc

SEQ ID NO: 410691 - RNA, 19 nt, Artificial Sequence
  Description of Artificial Sequence: Synthetic oligonucleotide
  Sense Strand Starting at position 1172 of SEQ ID NO: 317824
aaggguggaugcuuccaaa

SEQ ID NO: 410692 - RNA, 19 nt, Artificial Sequence
  Description of Artificial Sequence: Synthetic oligonucleotide
  Antisense Strand to SEQ ID NO: 410691
uuuggaagcauccacccuu

SEQ ID NO: 410693 - RNA, 19 nt, Artificial Sequence
  Description of Artificial Sequence: Synthetic oligonucleotide
  Sense Strand Starting at position 1172 of SEQ ID NO: 317850
cgaagaagccugcaccaau

SEQ ID NO: 410694 - RNA, 19 nt, Artificial Sequence
  Description of Artificial Sequence: Synthetic oligonucleotide
  Antisense Strand to SEQ ID NO: 410693
auuggugcaggcuucuucg

SEQ ID NO: 410695 - RNA, 19 nt, Artificial Sequence
  Description of Artificial Sequence: Synthetic oligonucleotide
  Sense Strand Starting at position 1172 of SEQ ID NO: 317907
uugagagcuuaucucccaa

SEQ ID NO: 410696 - RNA, 19 nt, Artificial Sequence
  Description of Artificial Sequence: Synthetic oligonucleotide
  Antisense Strand to SEQ ID NO: 410695
uugggagauaagcucucaa

SEQ ID NO: 410697 - RNA, 19 nt, Artificial Sequence
  Description of Artificial Sequence: Synthetic oligonucleotide
  Sense Strand Starting at position 1172 of SEQ ID NO: 317964
uuguuaauacaguauguga

SEQ ID NO: 410698 - RNA, 19 nt, Artificial Sequence
  Description of Artificial Sequence: Synthetic oligonucleotide
  Antisense Strand to SEQ ID NO: 410697
ucacauacuguauuaacaa

SEQ ID NO: 410699 - RNA, 19 nt, Artificial Sequence
  Description of Artificial Sequence: Synthetic oligonucleotide
  Sense Strand Starting at position 1172 of SEQ ID NO: 317966
guuaauacaguaugugaaa

SEQ ID NO: 410700 - RNA, 19 nt, Artificial Sequence
  Description of Artificial Sequence: Synthetic oligonucleotide
  Antisense Strand to SEQ ID NO: 410699
uuucacauacuguauuaac

SEQ ID NO: 410701 - RNA, 19 nt, Artificial Sequence
  Description of Artificial Sequence: Synthetic oligonucleotide
  Sense Strand Starting at position 1172 of SEQ ID NO: 318066
uggacuggcuucuuugaga

SEQ ID NO: 410702 - RNA, 19 nt, Artificial Sequence
  Description of Artificial Sequence: Synthetic oligonucleotide
  Antisense Strand to SEQ ID NO: 410701
ucucaaagaagccagucca

SEQ ID NO: 410703 - RNA, 19 nt, Artificial Sequence
  Description of Artificial Sequence: Synthetic oligonucleotide
  Sense Strand Starting at position 1172 of SEQ ID NO: 318077
cuuugagacucagcccaaa

SEQ ID NO: 410704 - RNA, 19 nt, Artificial Sequence
  Description of Artificial Sequence: Synthetic oligonucleotide
  Antisense Strand to SEQ ID NO: 410703
uuugggcugagucucaaag

SEQ ID NO: 410705 - RNA, 19 nt, Artificial Sequence
  Description of Artificial Sequence: Synthetic oligonucleotide
  Sense Strand Starting at position 1172 of SEQ ID NO: 318656
ccagaaaucuggucuucca

SEQ ID NO: 410706 - RNA, 19 nt, Artificial Sequence
  Description of Artificial Sequence: Synthetic oligonucleotide
  Antisense Strand to SEQ ID NO: 410705
uggaagaccagauuucugg

SEQ ID NO: 410707 - RNA, 19 nt, Artificial Sequence
  Description of Artificial Sequence: Synthetic oligonucleotide
  Sense Strand Starting at position 1172 of SEQ ID NO: 318659
gaaaucuggucuuccagaa

SEQ ID NO: 410708 - RNA, 19 nt, Artificial Sequence
  Description of Artificial Sequence: Synthetic oligonucleotide
  Antisense Strand to SEQ ID NO: 410707
uucuggaagaccagauuuc

SEQ ID NO: 410709 - RNA, 19 nt, Artificial Sequence
  Description of Artificial Sequence: Synthetic oligonucleotide
  Sense Strand Starting at position 1172 of SEQ ID NO: 318663
ucuggucuuccagaaaccu

SEQ ID NO: 410710 - RNA, 19 nt, Artificial Sequence
  Description of Artificial Sequence: Synthetic oligonucleotide
  Antisense Strand to SEQ ID NO: 410709
agguuucuggaagaccaga

SEQ ID NO: 410711 - RNA, 19 nt, Artificial Sequence
  Description of Artificial Sequence: Synthetic oligonucleotide
  Sense Strand Starting at position 1172 of SEQ ID NO: 318813
agggcaagguccuugagaa

SEQ ID NO: 410712 - RNA, 19 nt, Artificial Sequence
  Description of Artificial Sequence: Synthetic oligonucleotide
  Antisense Strand to SEQ ID NO: 410711
uucucaaggaccuugcccu

SEQ ID NO: 410713 - RNA, 19 nt, Artificial Sequence
  Description of Artificial Sequence: Synthetic oligonucleotide
  Sense Strand Starting at position 1172 of SEQ ID NO: 318814
gggcaagguccuugagaag

SEQ ID NO: 410714 - RNA, 19 nt, Artificial Sequence
  Description of Artificial Sequence: Synthetic oligonucleotide
  Antisense Strand to SEQ ID NO: 410713
cuucucaaggaccuugccc

SEQ ID NO: 410715 - RNA, 19 nt, Artificial Sequence
  Description of Artificial Sequence: Synthetic oligonucleotide
  Sense Strand Starting at position 1172 of SEQ ID NO: 318952
acugauauucugggcugaa

SEQ ID NO: 410716 - RNA, 19 nt, Artificial Sequence
  Description of Artificial Sequence: Synthetic oligonucleotide
  Antisense Strand to SEQ ID NO: 410715
uucagcccagaauaucagu

SEQ ID NO: 410717 - RNA, 19 nt, Artificial Sequence
  Description of Artificial Sequence: Synthetic oligonucleotide
  Sense Strand Starting at position 1172 of SEQ ID NO: 318955
gauauucugggcugaauuc

SEQ ID NO: 410718 - RNA, 19 nt, Artificial Sequence
  Description of Artificial Sequence: Synthetic oligonucleotide
  Antisense Strand to SEQ ID NO: 410717
gaauucagcccagaauauc

SEQ ID NO: 410719 - RNA, 19 nt, Artificial Sequence
  Description of Artificial Sequence: Synthetic oligonucleotide
  Sense Strand Starting at position 1173 of SEQ ID NO: 315281
cugcacucuagggaaguaa

SEQ ID NO: 410720 - RNA, 19 nt, Artificial Sequence
  Description of Artificial Sequence: Synthetic oligonucleotide
  Antisense Strand to SEQ ID NO: 410719
uuacuucccuagagugcag

SEQ ID NO: 410721 - RNA, 19 nt, Artificial Sequence
  Description of Artificial Sequence: Synthetic oligonucleotide
  Sense Strand Starting at position 1173 of SEQ ID NO: 315393
gaaagauacucaggagaca

SEQ ID NO: 410722 - RNA, 19 nt, Artificial Sequence
  Description of Artificial Sequence: Synthetic oligonucleotide
  Antisense Strand to SEQ ID NO: 410721
ugucuccugaguaucuuuc

SEQ ID NO: 410723 - RNA, 19 nt, Artificial Sequence
  Description of Artificial Sequence: Synthetic oligonucleotide
  Sense Strand Starting at position 1173 of SEQ ID NO: 315425
ggcagaagcaucgaaguca

SEQ ID NO: 410724 - RNA, 19 nt, Artificial Sequence
  Description of Artificial Sequence: Synthetic oligonucleotide
  Antisense Strand to SEQ ID NO: 410723
ugacuucgaugcuucugcc

SEQ ID NO: 410725 - RNA, 19 nt, Artificial Sequence
  Description of Artificial Sequence: Synthetic oligonucleotide
  Sense Strand Starting at position 1173 of SEQ ID NO: 315737
ggaagucagacaugaguua

SEQ ID NO: 410726 - RNA, 19 nt, Artificial Sequence
  Description of Artificial Sequence: Synthetic oligonucleotide
  Antisense Strand to SEQ ID NO: 410725
uaacucaugucugacuucc

SEQ ID NO: 410727 - RNA, 19 nt, Artificial Sequence
  Description of Artificial Sequence: Synthetic oligonucleotide
  Sense Strand Starting at position 1173 of SEQ ID NO: 315949
aggcccuguccucacauaa

SEQ ID NO: 410728 - RNA, 19 nt, Artificial Sequence
  Description of Artificial Sequence: Synthetic oligonucleotide
  Antisense Strand to SEQ ID NO: 410727
uuaugugaggacagggccu

SEQ ID NO: 410729 - RNA, 19 nt, Artificial Sequence
  Description of Artificial Sequence: Synthetic oligonucleotide
  Sense Strand Starting at position 1173 of SEQ ID NO: 316065
ccauguuaccgaugaauca

SEQ ID NO: 410730 - RNA, 19 nt, Artificial Sequence
  Description of Artificial Sequence: Synthetic oligonucleotide
  Antisense Strand to SEQ ID NO: 410729
ugauucaucgguaacaugg

SEQ ID NO: 410731 - RNA, 19 nt, Artificial Sequence
  Description of Artificial Sequence: Synthetic oligonucleotide
  Sense Strand Starting at position 1173 of SEQ ID NO: 316066
cauguuaccgaugaaucau

SEQ ID NO: 410732 - RNA, 19 nt, Artificial Sequence
  Description of Artificial Sequence: Synthetic oligonucleotide
  Antisense Strand to SEQ ID NO: 410731
augauucaucgguaacaug

SEQ ID NO: 410733 - RNA, 19 nt, Artificial Sequence
  Description of Artificial Sequence: Synthetic oligonucleotide
  Sense Strand Starting at position 1173 of SEQ ID NO: 316480
aguauugaaucugcuuaua

SEQ ID NO: 410734 - RNA, 19 nt, Artificial Sequence
  Description of Artificial Sequence: Synthetic oligonucleotide
  Antisense Strand to SEQ ID NO: 410733
uauaagcagauucaauacu

SEQ ID NO: 410735 - RNA, 19 nt, Artificial Sequence
  Description of Artificial Sequence: Synthetic oligonucleotide
  Sense Strand Starting at position 1173 of SEQ ID NO: 316579
uaggcagagucauuaacau

SEQ ID NO: 410736 - RNA, 19 nt, Artificial Sequence
  Description of Artificial Sequence: Synthetic oligonucleotide
  Antisense Strand to SEQ ID NO: 410735
auguuaaugacucugccua

SEQ ID NO: 410737 - RNA, 19 nt, Artificial Sequence
  Description of Artificial Sequence: Synthetic oligonucleotide
  Sense Strand Starting at position 1173 of SEQ ID NO: 316646
guuagaaguaaccauguga

SEQ ID NO: 410738 - RNA, 19 nt, Artificial Sequence
  Description of Artificial Sequence: Synthetic oligonucleotide
  Antisense Strand to SEQ ID NO: 410737
ucacaugguuacuucuaac

SEQ ID NO: 410739 - RNA, 19 nt, Artificial Sequence
  Description of Artificial Sequence: Synthetic oligonucleotide
  Sense Strand Starting at position 1173 of SEQ ID NO: 316660
ugugaaauuccaggucuuu

SEQ ID NO: 410740 - RNA, 19 nt, Artificial Sequence
  Description of Artificial Sequence: Synthetic oligonucleotide
  Antisense Strand to SEQ ID NO: 410739
aaagaccuggaauuucaca

SEQ ID NO: 410741 - RNA, 19 nt, Artificial Sequence
  Description of Artificial Sequence: Synthetic oligonucleotide
  Sense Strand Starting at position 1173 of SEQ ID NO: 316734
ucaaaugacagguguagaa

SEQ ID NO: 410742 - RNA, 19 nt, Artificial Sequence
  Description of Artificial Sequence: Synthetic oligonucleotide
  Antisense Strand to SEQ ID NO: 410741
uucuacaccugucauuuga

SEQ ID NO: 410743 - RNA, 19 nt, Artificial Sequence
  Description of Artificial Sequence: Synthetic oligonucleotide
  Sense Strand Starting at position 1173 of SEQ ID NO: 316766
gcuggcaaucucuagcaau

SEQ ID NO: 410744 - RNA, 19 nt, Artificial Sequence
  Description of Artificial Sequence: Synthetic oligonucleotide
  Antisense Strand to SEQ ID NO: 410743
auugcuagagauugccagc

SEQ ID NO: 410745 - RNA, 19 nt, Artificial Sequence
  Description of Artificial Sequence: Synthetic oligonucleotide
  Sense Strand Starting at position 1173 of SEQ ID NO: 316809
agcucauaccuguaagaga

SEQ ID NO: 410746 - RNA, 19 nt, Artificial Sequence
  Description of Artificial Sequence: Synthetic oligonucleotide
  Antisense Strand to SEQ ID NO: 410745
ucucuuacagguaugagcu

SEQ ID NO: 410747 - RNA, 19 nt, Artificial Sequence
  Description of Artificial Sequence: Synthetic oligonucleotide
  Sense Strand Starting at position 1173 of SEQ ID NO: 317644
ggacgugaauuccugaaag

SEQ ID NO: 410748 - RNA, 19 nt, Artificial Sequence
  Description of Artificial Sequence: Synthetic oligonucleotide
  Antisense Strand to SEQ ID NO: 410747
cuuucaggaauucacgucc

SEQ ID NO: 410749 - RNA, 19 nt, Artificial Sequence
  Description of Artificial Sequence: Synthetic oligonucleotide
  Sense Strand Starting at position 1173 of SEQ ID NO: 317816
gggaauuuaucucagccuc

SEQ ID NO: 410750 - RNA, 19 nt, Artificial Sequence
  Description of Artificial Sequence: Synthetic oligonucleotide
  Antisense Strand to SEQ ID NO: 410749
gaggcugagauaaauuccc

SEQ ID NO: 410751 - RNA, 19 nt, Artificial Sequence
  Description of Artificial Sequence: Synthetic oligonucleotide
  Sense Strand Starting at position 1173 of SEQ ID NO: 317927
ggguaaacguguuuauuga

SEQ ID NO: 410752 - RNA, 19 nt, Artificial Sequence
  Description of Artificial Sequence: Synthetic oligonucleotide
  Antisense Strand to SEQ ID NO: 410751
ucaauaaacacguuuaccc

SEQ ID NO: 410753 - RNA, 19 nt, Artificial Sequence
  Description of Artificial Sequence: Synthetic oligonucleotide
  Sense Strand Starting at position 1173 of SEQ ID NO: 317928
gguaaacguguuuauugag

SEQ ID NO: 410754 - RNA, 19 nt, Artificial Sequence
  Description of Artificial Sequence: Synthetic oligonucleotide
  Antisense Strand to SEQ ID NO: 410753
cucaauaaacacguuuacc

SEQ ID NO: 410755 - RNA, 19 nt, Artificial Sequence
  Description of Artificial Sequence: Synthetic oligonucleotide
  Sense Strand Starting at position 1173 of SEQ ID NO: 317936
uguuuauugagugguucca

SEQ ID NO: 410756 - RNA, 19 nt, Artificial Sequence
  Description of Artificial Sequence: Synthetic oligonucleotide
  Antisense Strand to SEQ ID NO: 410755
uggaaccacucaauaaaca

SEQ ID NO: 410757 - RNA, 19 nt, Artificial Sequence
  Description of Artificial Sequence: Synthetic oligonucleotide
  Sense Strand Starting at position 1173 of SEQ ID NO: 317938
uuuauugagugguuccacu

SEQ ID NO: 410758 - RNA, 19 nt, Artificial Sequence
  Description of Artificial Sequence: Synthetic oligonucleotide
  Antisense Strand to SEQ ID NO: 410757
aguggaaccacucaauaaa

SEQ ID NO: 410759 - RNA, 19 nt, Artificial Sequence
  Description of Artificial Sequence: Synthetic oligonucleotide
  Sense Strand Starting at position 1173 of SEQ ID NO: 318043
guuauuaaauacgcccaaa

SEQ ID NO: 410760 - RNA, 19 nt, Artificial Sequence
  Description of Artificial Sequence: Synthetic oligonucleotide
  Antisense Strand to SEQ ID NO: 410759
uuugggcguauuuaauaac

SEQ ID NO: 410761 - RNA, 19 nt, Artificial Sequence
  Description of Artificial Sequence: Synthetic oligonucleotide
  Sense Strand Starting at position 1173 of SEQ ID NO: 318055
gcccaaagucguuaauagu

SEQ ID NO: 410762 - RNA, 19 nt, Artificial Sequence
  Description of Artificial Sequence: Synthetic oligonucleotide
  Antisense Strand to SEQ ID NO: 410761
acuauuaacgacuuugggc

SEQ ID NO: 410763 - RNA, 19 nt, Artificial Sequence
  Description of Artificial Sequence: Synthetic oligonucleotide
  Sense Strand Starting at position 1173 of SEQ ID NO: 318061
agucguuaauaguuucuaa

SEQ ID NO: 410764 - RNA, 19 nt, Artificial Sequence
  Description of Artificial Sequence: Synthetic oligonucleotide
  Antisense Strand to SEQ ID NO: 410763
uuagaaacuauuaacgacu

SEQ ID NO: 410765 - RNA, 19 nt, Artificial Sequence
  Description of Artificial Sequence: Synthetic oligonucleotide
  Sense Strand Starting at position 1173 of SEQ ID NO: 318064
cguuaauaguuucuaaauc

SEQ ID NO: 410766 - RNA, 19 nt, Artificial Sequence
  Description of Artificial Sequence: Synthetic oligonucleotide
  Antisense Strand to SEQ ID NO: 410765
gauuuagaaacuauuaacg

SEQ ID NO: 410767 - RNA, 19 nt, Artificial Sequence
  Description of Artificial Sequence: Synthetic oligonucleotide
  Sense Strand Starting at position 1173 of SEQ ID NO: 318108
aagccugacgguuacuuaa

SEQ ID NO: 410768 - RNA, 19 nt, Artificial Sequence
  Description of Artificial Sequence: Synthetic oligonucleotide
  Antisense Strand to SEQ ID NO: 410767
uuaaguaaccgucaggcuu

SEQ ID NO: 410769 - RNA, 19 nt, Artificial Sequence
  Description of Artificial Sequence: Synthetic oligonucleotide
  Sense Strand Starting at position 1173 of SEQ ID NO: 318157
auuagauaguuguuuccau

SEQ ID NO: 410770 - RNA, 19 nt, Artificial Sequence
  Description of Artificial Sequence: Synthetic oligonucleotide
  Antisense Strand to SEQ ID NO: 410769
auggaaacaacuaucuaau

SEQ ID NO: 410771 - RNA, 19 nt, Artificial Sequence
  Description of Artificial Sequence: Synthetic oligonucleotide
  Sense Strand Starting at position 1173 of SEQ ID NO: 318191
ggauuuaggccucggcaga

SEQ ID NO: 410772 - RNA, 19 nt, Artificial Sequence
  Description of Artificial Sequence: Synthetic oligonucleotide
  Antisense Strand to SEQ ID NO: 410771
ucugccgaggccuaaaucc

SEQ ID NO: 410773 - RNA, 19 nt, Artificial Sequence
  Description of Artificial Sequence: Synthetic oligonucleotide
  Sense Strand Starting at position 1173 of SEQ ID NO: 318206
cagaaagaauugguagcau

SEQ ID NO: 410774 - RNA, 19 nt, Artificial Sequence
  Description of Artificial Sequence: Synthetic oligonucleotide
  Antisense Strand to SEQ ID NO: 410773
augcuaccaauucuuucug

SEQ ID NO: 410775 - RNA, 19 nt, Artificial Sequence
  Description of Artificial Sequence: Synthetic oligonucleotide
  Sense Strand Starting at position 1173 of SEQ ID NO: 318228
aggccauuucagcgucagu

SEQ ID NO: 410776 - RNA, 19 nt, Artificial Sequence
  Description of Artificial Sequence: Synthetic oligonucleotide
  Antisense Strand to SEQ ID NO: 410775
acugacgcugaaauggccu

SEQ ID NO: 410777 - RNA, 19 nt, Artificial Sequence
  Description of Artificial Sequence: Synthetic oligonucleotide
  Sense Strand Starting at position 1173 of SEQ ID NO: 318256
ugugaaugccauggaucca

SEQ ID NO: 410778 - RNA, 19 nt, Artificial Sequence
  Description of Artificial Sequence: Synthetic oligonucleotide
  Antisense Strand to SEQ ID NO: 410777
uggauccauggcauucaca

SEQ ID NO: 410779 - RNA, 19 nt, Artificial Sequence
  Description of Artificial Sequence: Synthetic oligonucleotide
  Sense Strand Starting at position 1173 of SEQ ID NO: 318793
ggugaaaugcuucagguag

SEQ ID NO: 410780 - RNA, 19 nt, Artificial Sequence
  Description of Artificial Sequence: Synthetic oligonucleotide
  Antisense Strand to SEQ ID NO: 410779
cuaccugaagcauuucacc

SEQ ID NO: 410781 - RNA, 19 nt, Artificial Sequence
  Description of Artificial Sequence: Synthetic oligonucleotide
  Sense Strand Starting at position 1173 of SEQ ID NO: 318922
uaaagauguuacucagugu

SEQ ID NO: 410782 - RNA, 19 nt, Artificial Sequence
  Description of Artificial Sequence: Synthetic oligonucleotide
  Antisense Strand to SEQ ID NO: 410781
acacugaguaacaucuuua

SEQ ID NO: 410783 - RNA, 19 nt, Artificial Sequence
  Description of Artificial Sequence: Synthetic oligonucleotide
  Sense Strand Starting at position 1173 of SEQ ID NO: 318925
agauguuacucaguguggu

SEQ ID NO: 410784 - RNA, 19 nt, Artificial Sequence
  Description of Artificial Sequence: Synthetic oligonucleotide
  Antisense Strand to SEQ ID NO: 410783
accacacugaguaacaucu

SEQ ID NO: 410785 - RNA, 19 nt, Artificial Sequence
  Description of Artificial Sequence: Synthetic oligonucleotide
  Sense Strand Starting at position 1173 of SEQ ID NO: 318987
aggugcuaaguagauaagu

SEQ ID NO: 410786 - RNA, 19 nt, Artificial Sequence
  Description of Artificial Sequence: Synthetic oligonucleotide
  Antisense Strand to SEQ ID NO: 410785
acuuaucuacuuagcaccu

SEQ ID NO: 410787 - RNA, 19 nt, Artificial Sequence
  Description of Artificial Sequence: Synthetic oligonucleotide
  Sense Strand Starting at position 1173 of SEQ ID NO: 318989
gugcuaaguagauaaguag

SEQ ID NO: 410788 - RNA, 19 nt, Artificial Sequence
  Description of Artificial Sequence: Synthetic oligonucleotide
  Antisense Strand to SEQ ID NO: 410787
cuacuuaucuacuuagcac

SEQ ID NO: 410789 - RNA, 19 nt, Artificial Sequence
  Description of Artificial Sequence: Synthetic oligonucleotide
  Sense Strand Starting at position 1173 of SEQ ID NO: 319000
auaaguagcgcccacaaua

SEQ ID NO: 410790 - RNA, 19 nt, Artificial Sequence
  Description of Artificial Sequence: Synthetic oligonucleotide
  Antisense Strand to SEQ ID NO: 410789
uauugugggcgcuacuuau

SEQ ID NO: 410791 - RNA, 19 nt, Artificial Sequence
  Description of Artificial Sequence: Synthetic oligonucleotide
  Sense Strand Starting at position 1173 of SEQ ID NO: 319066
gaugucuugucuuuagaga

SEQ ID NO: 410792 - RNA, 19 nt, Artificial Sequence
  Description of Artificial Sequence: Synthetic oligonucleotide
  Antisense Strand to SEQ ID NO: 410791
ucucuaaagacaagacauc

SEQ ID NO: 410793 - RNA, 19 nt, Artificial Sequence
  Description of Artificial Sequence: Synthetic oligonucleotide
  Sense Strand Starting at position 1173 of SEQ ID NO: 319067
augucuugucuuuagagac

SEQ ID NO: 410794 - RNA, 19 nt, Artificial Sequence
  Description of Artificial Sequence: Synthetic oligonucleotide
  Antisense Strand to SEQ ID NO: 410793
gucucuaaagacaagacau

SEQ ID NO: 410795 - RNA, 19 nt, Artificial Sequence
  Description of Artificial Sequence: Synthetic oligonucleotide
  Sense Strand Starting at position 1173 of SEQ ID NO: 319125
cugcguugcuauuuccuua

SEQ ID NO: 410796 - RNA, 19 nt, Artificial Sequence
  Description of Artificial Sequence: Synthetic oligonucleotide
  Antisense Strand to SEQ ID NO: 410795
uaaggaaauagcaacgcag

SEQ ID NO: 410797 - RNA, 19 nt, Artificial Sequence
  Description of Artificial Sequence: Synthetic oligonucleotide
  Sense Strand Starting at position 1173 of SEQ ID NO: 319129
guugcuauuuccuuaucua

SEQ ID NO: 410798 - RNA, 19 nt, Artificial Sequence
  Description of Artificial Sequence: Synthetic oligonucleotide
  Antisense Strand to SEQ ID NO: 410797
uagauaaggaaauagcaac

SEQ ID NO: 410799 - RNA, 19 nt, Artificial Sequence
  Description of Artificial Sequence: Synthetic oligonucleotide
  Sense Strand Starting at position 1174 of SEQ ID NO: 315264
guggaauacuuagcucugu

SEQ ID NO: 410800 - RNA, 19 nt, Artificial Sequence
  Description of Artificial Sequence: Synthetic oligonucleotide
  Antisense Strand to SEQ ID NO: 410799
acagagcuaaguauuccac

SEQ ID NO: 410801 - RNA, 19 nt, Artificial Sequence
  Description of Artificial Sequence: Synthetic oligonucleotide
  Sense Strand Starting at position 1174 of SEQ ID NO: 315268
aauacuuagcucuguggaa

SEQ ID NO: 410802 - RNA, 19 nt, Artificial Sequence
  Description of Artificial Sequence: Synthetic oligonucleotide
  Antisense Strand to SEQ ID NO: 410801
uuccacagagcuaaguauu

SEQ ID NO: 410803 - RNA, 19 nt, Artificial Sequence
  Description of Artificial Sequence: Synthetic oligonucleotide
  Sense Strand Starting at position 1174 of SEQ ID NO: 315269
auacuuagcucuguggaau

SEQ ID NO: 410804 - RNA, 19 nt, Artificial Sequence
  Description of Artificial Sequence: Synthetic oligonucleotide
  Antisense Strand to SEQ ID NO: 410803
auuccacagagcuaaguau

SEQ ID NO: 410805 - RNA, 19 nt, Artificial Sequence
  Description of Artificial Sequence: Synthetic oligonucleotide
  Sense Strand Starting at position 1174 of SEQ ID NO: 315270
uacuuagcucuguggaauu

SEQ ID NO: 410806 - RNA, 19 nt, Artificial Sequence
  Description of Artificial Sequence: Synthetic oligonucleotide
  Antisense Strand to SEQ ID NO: 410805
aauuccacagagcuaagua

SEQ ID NO: 410807 - RNA, 19 nt, Artificial Sequence
  Description of Artificial Sequence: Synthetic oligonucleotide
  Sense Strand Starting at position 1174 of SEQ ID NO: 315392
ucuaaacuuucggugucaa

SEQ ID NO: 410808 - RNA, 19 nt, Artificial Sequence
  Description of Artificial Sequence: Synthetic oligonucleotide
  Antisense Strand to SEQ ID NO: 410807
uugacaccgaaaguuuaga

SEQ ID NO: 410809 - RNA, 19 nt, Artificial Sequence
  Description of Artificial Sequence: Synthetic oligonucleotide
  Sense Strand Starting at position 1174 of SEQ ID NO: 315393
cuaaacuuucggugucaag

SEQ ID NO: 410810 - RNA, 19 nt, Artificial Sequence
  Description of Artificial Sequence: Synthetic oligonucleotide
  Antisense Strand to SEQ ID NO: 410809
cuugacaccgaaaguuuag

SEQ ID NO: 410811 - RNA, 19 nt, Artificial Sequence
  Description of Artificial Sequence: Synthetic oligonucleotide
  Sense Strand Starting at position 1174 of SEQ ID NO: 315416
ugagguguugcccacuagu

SEQ ID NO: 410812 - RNA, 19 nt, Artificial Sequence
  Description of Artificial Sequence: Synthetic oligonucleotide
  Antisense Strand to SEQ ID NO: 410811
acuagugggcaacaccuca

SEQ ID NO: 410813 - RNA, 19 nt, Artificial Sequence
  Description of Artificial Sequence: Synthetic oligonucleotide
  Sense Strand Starting at position 1174 of SEQ ID NO: 315489
cucaucuugucuccaguaa

SEQ ID NO: 410814 - RNA, 19 nt, Artificial Sequence
  Description of Artificial Sequence: Synthetic oligonucleotide
  Antisense Strand to SEQ ID NO: 410813
uuacuggagacaagaugag

SEQ ID NO: 410815 - RNA, 19 nt, Artificial Sequence
  Description of Artificial Sequence: Synthetic oligonucleotide
  Sense Strand Starting at position 1174 of SEQ ID NO: 315493
ucuugucuccaguaacuuu

SEQ ID NO: 410816 - RNA, 19 nt, Artificial Sequence
  Description of Artificial Sequence: Synthetic oligonucleotide
  Antisense Strand to SEQ ID NO: 410815
aaaguuacuggagacaaga

SEQ ID NO: 410817 - RNA, 19 nt, Artificial Sequence
  Description of Artificial Sequence: Synthetic oligonucleotide
  Sense Strand Starting at position 1174 of SEQ ID NO: 315568
ccaggcacugucuaaaugu

SEQ ID NO: 410818 - RNA, 19 nt, Artificial Sequence
  Description of Artificial Sequence: Synthetic oligonucleotide
  Antisense Strand to SEQ ID NO: 410817
acauuuagacagugccugg

SEQ ID NO: 410819 - RNA, 19 nt, Artificial Sequence
  Description of Artificial Sequence: Synthetic oligonucleotide
  Sense Strand Starting at position 1174 of SEQ ID NO: 315649
caaguaguuagagguuaag

SEQ ID NO: 410820 - RNA, 19 nt, Artificial Sequence
  Description of Artificial Sequence: Synthetic oligonucleotide
  Antisense Strand to SEQ ID NO: 410819
cuuaaccucuaacuacuug

SEQ ID NO: 410821 - RNA, 19 nt, Artificial Sequence
  Description of Artificial Sequence: Synthetic oligonucleotide
  Sense Strand Starting at position 1174 of SEQ ID NO: 315668
agacuugcccaagguaaca

SEQ ID NO: 410822 - RNA, 19 nt, Artificial Sequence
  Description of Artificial Sequence: Synthetic oligonucleotide
  Antisense Strand to SEQ ID NO: 410821
uguuaccuugggcaagucu

SEQ ID NO: 410823 - RNA, 19 nt, Artificial Sequence
  Description of Artificial Sequence: Synthetic oligonucleotide
  Sense Strand Starting at position 1174 of SEQ ID NO: 315809
gcauuaaauccuuguugga

SEQ ID NO: 410824 - RNA, 19 nt, Artificial Sequence
  Description of Artificial Sequence: Synthetic oligonucleotide
  Antisense Strand to SEQ ID NO: 410823
uccaacaaggauuuaaugc

SEQ ID NO: 410825 - RNA, 19 nt, Artificial Sequence
  Description of Artificial Sequence: Synthetic oligonucleotide
  Sense Strand Starting at position 1174 of SEQ ID NO: 315811
auuaaauccuuguuggaca

SEQ ID NO: 410826 - RNA, 19 nt, Artificial Sequence
  Description of Artificial Sequence: Synthetic oligonucleotide
  Antisense Strand to SEQ ID NO: 410825
uguccaacaaggauuuaau

SEQ ID NO: 410827 - RNA, 19 nt, Artificial Sequence
  Description of Artificial Sequence: Synthetic oligonucleotide
  Sense Strand Starting at position 1174 of SEQ ID NO: 315825
ggacaucucugagcccaaa

SEQ ID NO: 410828 - RNA, 19 nt, Artificial Sequence
  Description of Artificial Sequence: Synthetic oligonucleotide
  Antisense Strand to SEQ ID NO: 410827
uuugggcucagagaugucc

SEQ ID NO: 410829 - RNA, 19 nt, Artificial Sequence
  Description of Artificial Sequence: Synthetic oligonucleotide
  Sense Strand Starting at position 1174 of SEQ ID NO: 315926
cuuccugucuccucaagga

SEQ ID NO: 410830 - RNA, 19 nt, Artificial Sequence
  Description of Artificial Sequence: Synthetic oligonucleotide
  Antisense Strand to SEQ ID NO: 410829
uccuugaggagacaggaag

SEQ ID NO: 410831 - RNA, 19 nt, Artificial Sequence
  Description of Artificial Sequence: Synthetic oligonucleotide
  Sense Strand Starting at position 1174 of SEQ ID NO: 316209
ggaaauaaccacugagcca

SEQ ID NO: 410832 - RNA, 19 nt, Artificial Sequence
  Description of Artificial Sequence: Synthetic oligonucleotide
  Antisense Strand to SEQ ID NO: 410831
uggcucagugguuauuucc

SEQ ID NO: 410833 - RNA, 19 nt, Artificial Sequence
  Description of Artificial Sequence: Synthetic oligonucleotide
  Sense Strand Starting at position 1174 of SEQ ID NO: 316769
cuuaaaggacgcuaaaguu

SEQ ID NO: 410834 - RNA, 19 nt, Artificial Sequence
  Description of Artificial Sequence: Synthetic oligonucleotide
  Antisense Strand to SEQ ID NO: 410833
aacuuuagcguccuuuaag

SEQ ID NO: 410835 - RNA, 19 nt, Artificial Sequence
  Description of Artificial Sequence: Synthetic oligonucleotide
  Sense Strand Starting at position 1174 of SEQ ID NO: 317382
gguugcugagguugauuua

SEQ ID NO: 410836 - RNA, 19 nt, Artificial Sequence
  Description of Artificial Sequence: Synthetic oligonucleotide
  Antisense Strand to SEQ ID NO: 410835
uaaaucaaccucagcaacc

SEQ ID NO: 410837 - RNA, 19 nt, Artificial Sequence
  Description of Artificial Sequence: Synthetic oligonucleotide
  Sense Strand Starting at position 1174 of SEQ ID NO: 317385
ugcugagguugauuuagca

SEQ ID NO: 410838 - RNA, 19 nt, Artificial Sequence
  Description of Artificial Sequence: Synthetic oligonucleotide
  Antisense Strand to SEQ ID NO: 410837
ugcuaaaucaaccucagca

SEQ ID NO: 410839 - RNA, 19 nt, Artificial Sequence
  Description of Artificial Sequence: Synthetic oligonucleotide
  Sense Strand Starting at position 1174 of SEQ ID NO: 317617
guggcuucgcaacagacuu

SEQ ID NO: 410840 - RNA, 19 nt, Artificial Sequence
  Description of Artificial Sequence: Synthetic oligonucleotide
  Antisense Strand to SEQ ID NO: 410839
aagucuguugcgaagccac

SEQ ID NO: 410841 - RNA, 19 nt, Artificial Sequence
  Description of Artificial Sequence: Synthetic oligonucleotide
  Sense Strand Starting at position 1174 of SEQ ID NO: 317709
uucugcauagcgcaaauau

SEQ ID NO: 410842 - RNA, 19 nt, Artificial Sequence
  Description of Artificial Sequence: Synthetic oligonucleotide
  Antisense Strand to SEQ ID NO: 410841
auauuugcgcuaugcagaa

SEQ ID NO: 410843 - RNA, 19 nt, Artificial Sequence
  Description of Artificial Sequence: Synthetic oligonucleotide
  Sense Strand Starting at position 1174 of SEQ ID NO: 317753
ucccacuuccgugaguaua

SEQ ID NO: 410844 - RNA, 19 nt, Artificial Sequence
  Description of Artificial Sequence: Synthetic oligonucleotide
  Antisense Strand to SEQ ID NO: 410843
uauacucacggaaguggga

SEQ ID NO: 410845 - RNA, 19 nt, Artificial Sequence
  Description of Artificial Sequence: Synthetic oligonucleotide
  Sense Strand Starting at position 1174 of SEQ ID NO: 317755
ccacuuccgugaguauauu

SEQ ID NO: 410846 - RNA, 19 nt, Artificial Sequence
  Description of Artificial Sequence: Synthetic oligonucleotide
  Antisense Strand to SEQ ID NO: 410845
aauauacucacggaagugg

SEQ ID NO: 410847 - RNA, 19 nt, Artificial Sequence
  Description of Artificial Sequence: Synthetic oligonucleotide
  Sense Strand Starting at position 1174 of SEQ ID NO: 317864
guucacguuccaugggaau

SEQ ID NO: 410848 - RNA, 19 nt, Artificial Sequence
  Description of Artificial Sequence: Synthetic oligonucleotide
  Antisense Strand to SEQ ID NO: 410847
auucccauggaacgugaac

SEQ ID NO: 410849 - RNA, 19 nt, Artificial Sequence
  Description of Artificial Sequence: Synthetic oligonucleotide
  Sense Strand Starting at position 1174 of SEQ ID NO: 317946
gugguuuagcgguaacuua

SEQ ID NO: 410850 - RNA, 19 nt, Artificial Sequence
  Description of Artificial Sequence: Synthetic oligonucleotide
  Antisense Strand to SEQ ID NO: 410849
uaaguuaccgcuaaaccac

SEQ ID NO: 410851 - RNA, 19 nt, Artificial Sequence
  Description of Artificial Sequence: Synthetic oligonucleotide
  Sense Strand Starting at position 1174 of SEQ ID NO: 317964
acgugauucccacgucaag

SEQ ID NO: 410852 - RNA, 19 nt, Artificial Sequence
  Description of Artificial Sequence: Synthetic oligonucleotide
  Antisense Strand to SEQ ID NO: 410851
cuugacgugggaaucacgu

SEQ ID NO: 410853 - RNA, 19 nt, Artificial Sequence
  Description of Artificial Sequence: Synthetic oligonucleotide
  Sense Strand Starting at position 1174 of SEQ ID NO: 318017
ucaaauuucugaggaccua

SEQ ID NO: 410854 - RNA, 19 nt, Artificial Sequence
  Description of Artificial Sequence: Synthetic oligonucleotide
  Antisense Strand to SEQ ID NO: 410853
uagguccucagaaauuuga

SEQ ID NO: 410855 - RNA, 19 nt, Artificial Sequence
  Description of Artificial Sequence: Synthetic oligonucleotide
  Sense Strand Starting at position 1174 of SEQ ID NO: 318119
aggugacaacuaugcucau

SEQ ID NO: 410856 - RNA, 19 nt, Artificial Sequence
  Description of Artificial Sequence: Synthetic oligonucleotide
  Antisense Strand to SEQ ID NO: 410855
augagcauaguugucaccu

SEQ ID NO: 410857 - RNA, 19 nt, Artificial Sequence
  Description of Artificial Sequence: Synthetic oligonucleotide
  Sense Strand Starting at position 1174 of SEQ ID NO: 318120
ggugacaacuaugcucaua

SEQ ID NO: 410858 - RNA, 19 nt, Artificial Sequence
  Description of Artificial Sequence: Synthetic oligonucleotide
  Antisense Strand to SEQ ID NO: 410857
uaugagcauaguugucacc

SEQ ID NO: 410859 - RNA, 19 nt, Artificial Sequence
  Description of Artificial Sequence: Synthetic oligonucleotide
  Sense Strand Starting at position 1174 of SEQ ID NO: 318122
ugacaacuaugcucauaag

SEQ ID NO: 410860 - RNA, 19 nt, Artificial Sequence
  Description of Artificial Sequence: Synthetic oligonucleotide
  Antisense Strand to SEQ ID NO: 410859
cuuaugagcauaguuguca

SEQ ID NO: 410861 - RNA, 19 nt, Artificial Sequence
  Description of Artificial Sequence: Synthetic oligonucleotide
  Sense Strand Starting at position 1174 of SEQ ID NO: 318133
cucauaagcuuggcuacaa

SEQ ID NO: 410862 - RNA, 19 nt, Artificial Sequence
  Description of Artificial Sequence: Synthetic oligonucleotide
  Antisense Strand to SEQ ID NO: 410861
uuguagccaagcuuaugag

SEQ ID NO: 410863 - RNA, 19 nt, Artificial Sequence
  Description of Artificial Sequence: Synthetic oligonucleotide
  Sense Strand Starting at position 1174 of SEQ ID NO: 318170
cuacuuugguauccugaca

SEQ ID NO: 410864 - RNA, 19 nt, Artificial Sequence
  Description of Artificial Sequence: Synthetic oligonucleotide
  Antisense Strand to SEQ ID NO: 410863
ugucaggauaccaaaguag

SEQ ID NO: 410865 - RNA, 19 nt, Artificial Sequence
  Description of Artificial Sequence: Synthetic oligonucleotide
  Sense Strand Starting at position 1174 of SEQ ID NO: 318266
ggugguucaccuuguggau

SEQ ID NO: 410866 - RNA, 19 nt, Artificial Sequence
  Description of Artificial Sequence: Synthetic oligonucleotide
  Antisense Strand to SEQ ID NO: 410865
auccacaaggugaaccacc

SEQ ID NO: 410867 - RNA, 19 nt, Artificial Sequence
  Description of Artificial Sequence: Synthetic oligonucleotide
  Sense Strand Starting at position 1174 of SEQ ID NO: 318527
uggucaaacccucagcuua

SEQ ID NO: 410868 - RNA, 19 nt, Artificial Sequence
  Description of Artificial Sequence: Synthetic oligonucleotide
  Antisense Strand to SEQ ID NO: 410867
uaagcugaggguuugacca

SEQ ID NO: 410869 - RNA, 19 nt, Artificial Sequence
  Description of Artificial Sequence: Synthetic oligonucleotide
  Sense Strand Starting at position 1174 of SEQ ID NO: 318694
aggaaaccauuauaaggaa

SEQ ID NO: 410870 - RNA, 19 nt, Artificial Sequence
  Description of Artificial Sequence: Synthetic oligonucleotide
  Antisense Strand to SEQ ID NO: 410869
uuccuuauaaugguuuccu

SEQ ID NO: 410871 - RNA, 19 nt, Artificial Sequence
  Description of Artificial Sequence: Synthetic oligonucleotide
  Sense Strand Starting at position 1174 of SEQ ID NO: 318706
uaaggaagugcccauucuu

SEQ ID NO: 410872 - RNA, 19 nt, Artificial Sequence
  Description of Artificial Sequence: Synthetic oligonucleotide
  Antisense Strand to SEQ ID NO: 410871
aagaaugggcacuuccuua

SEQ ID NO: 410873 - RNA, 19 nt, Artificial Sequence
  Description of Artificial Sequence: Synthetic oligonucleotide
  Sense Strand Starting at position 1174 of SEQ ID NO: 319005
uuguaacaggucugaggaa

SEQ ID NO: 410874 - RNA, 19 nt, Artificial Sequence
  Description of Artificial Sequence: Synthetic oligonucleotide
  Antisense Strand to SEQ ID NO: 410873
uuccucagaccuguuacaa

SEQ ID NO: 410875 - RNA, 19 nt, Artificial Sequence
  Description of Artificial Sequence: Synthetic oligonucleotide
  Sense Strand Starting at position 1174 of SEQ ID NO: 319095
cuaucaugaguccagacuu

SEQ ID NO: 410876 - RNA, 19 nt, Artificial Sequence
  Description of Artificial Sequence: Synthetic oligonucleotide
  Antisense Strand to SEQ ID NO: 410875
aagucuggacucaugauag

SEQ ID NO: 410877 - RNA, 19 nt, Artificial Sequence
  Description of Artificial Sequence: Synthetic oligonucleotide
  Sense Strand Starting at position 1174 of SEQ ID NO: 319135
uccucuguccaaggaauca

SEQ ID NO: 410878 - RNA, 19 nt, Artificial Sequence
  Description of Artificial Sequence: Synthetic oligonucleotide
  Antisense Strand to SEQ ID NO: 410877
ugauuccuuggacagagga

SEQ ID NO: 410879 - RNA, 19 nt, Artificial Sequence
  Description of Artificial Sequence: Synthetic oligonucleotide
  Sense Strand Starting at position 1175 of SEQ ID NO: 315363
guggaauacuuagcucugu

SEQ ID NO: 410880 - RNA, 19 nt, Artificial Sequence
  Description of Artificial Sequence: Synthetic oligonucleotide
  Antisense Strand to SEQ ID NO: 410879
acagagcuaaguauuccac

SEQ ID NO: 410881 - RNA, 19 nt, Artificial Sequence
  Description of Artificial Sequence: Synthetic oligonucleotide
  Sense Strand Starting at position 1175 of SEQ ID NO: 315367
aauacuuagcucuguggaa

SEQ ID NO: 410882 - RNA, 19 nt, Artificial Sequence
  Description of Artificial Sequence: Synthetic oligonucleotide
  Antisense Strand to SEQ ID NO: 410881
uuccacagagcuaaguauu

SEQ ID NO: 410883 - RNA, 19 nt, Artificial Sequence
  Description of Artificial Sequence: Synthetic oligonucleotide
  Sense Strand Starting at position 1175 of SEQ ID NO: 315368
auacuuagcucuguggaau

SEQ ID NO: 410884 - RNA, 19 nt, Artificial Sequence
  Description of Artificial Sequence: Synthetic oligonucleotide
  Antisense Strand to SEQ ID NO: 410883
auuccacagagcuaaguau

SEQ ID NO: 410885 - RNA, 19 nt, Artificial Sequence
  Description of Artificial Sequence: Synthetic oligonucleotide
  Sense Strand Starting at position 1175 of SEQ ID NO: 315369
uacuuagcucuguggaauu

SEQ ID NO: 410886 - RNA, 19 nt, Artificial Sequence
  Description of Artificial Sequence: Synthetic oligonucleotide
  Antisense Strand to SEQ ID NO: 410885
aauuccacagagcuaagua

SEQ ID NO: 410887 - RNA, 19 nt, Artificial Sequence
  Description of Artificial Sequence: Synthetic oligonucleotide
  Sense Strand Starting at position 1175 of SEQ ID NO: 315491
ucuaaacuuucggugucaa

SEQ ID NO: 410888 - RNA, 19 nt, Artificial Sequence
  Description of Artificial Sequence: Synthetic oligonucleotide
  Antisense Strand to SEQ ID NO: 410887
uugacaccgaaaguuuaga

SEQ ID NO: 410889 - RNA, 19 nt, Artificial Sequence
  Description of Artificial Sequence: Synthetic oligonucleotide
  Sense Strand Starting at position 1175 of SEQ ID NO: 315492
cuaaacuuucggugucaag

SEQ ID NO: 410890 - RNA, 19 nt, Artificial Sequence
  Description of Artificial Sequence: Synthetic oligonucleotide
  Antisense Strand to SEQ ID NO: 410889
cuugacaccgaaaguuuag

SEQ ID NO: 410891 - RNA, 19 nt, Artificial Sequence
  Description of Artificial Sequence: Synthetic oligonucleotide
  Sense Strand Starting at position 1175 of SEQ ID NO: 315515
ugagguguugcccacuagu

SEQ ID NO: 410892 - RNA, 19 nt, Artificial Sequence
  Description of Artificial Sequence: Synthetic oligonucleotide
  Antisense Strand to SEQ ID NO: 410891
acuagugggcaacaccuca

SEQ ID NO: 410893 - RNA, 19 nt, Artificial Sequence
  Description of Artificial Sequence: Synthetic oligonucleotide
  Sense Strand Starting at position 1175 of SEQ ID NO: 315588
cucaucuugucuccaguaa

SEQ ID NO: 410894 - RNA, 19 nt, Artificial Sequence
  Description of Artificial Sequence: Synthetic oligonucleotide
  Antisense Strand to SEQ ID NO: 410893
uuacuggagacaagaugag

SEQ ID NO: 410895 - RNA, 19 nt, Artificial Sequence
  Description of Artificial Sequence: Synthetic oligonucleotide
  Sense Strand Starting at position 1175 of SEQ ID NO: 315592
ucuugucuccaguaacuuu

SEQ ID NO: 410896 - RNA, 19 nt, Artificial Sequence
  Description of Artificial Sequence: Synthetic oligonucleotide
  Antisense Strand to SEQ ID NO: 410895
aaaguuacuggagacaaga

SEQ ID NO: 410897 - RNA, 19 nt, Artificial Sequence
  Description of Artificial Sequence: Synthetic oligonucleotide
  Sense Strand Starting at position 1175 of SEQ ID NO: 315667
ccaggcacugucuaaaugu

SEQ ID NO: 410898 - RNA, 19 nt, Artificial Sequence
  Description of Artificial Sequence: Synthetic oligonucleotide
  Antisense Strand to SEQ ID NO: 410897
acauuuagacagugccugg

SEQ ID NO: 410899 - RNA, 19 nt, Artificial Sequence
  Description of Artificial Sequence: Synthetic oligonucleotide
  Sense Strand Starting at position 1175 of SEQ ID NO: 315748
caaguaguuagagguuaag

SEQ ID NO: 410900 - RNA, 19 nt, Artificial Sequence
  Description of Artificial Sequence: Synthetic oligonucleotide
  Antisense Strand to SEQ ID NO: 410899
cuuaaccucuaacuacuug

SEQ ID NO: 410901 - RNA, 19 nt, Artificial Sequence
  Description of Artificial Sequence: Synthetic oligonucleotide
  Sense Strand Starting at position 1175 of SEQ ID NO: 315767
agacuugcccaagguaaca

SEQ ID NO: 410902 - RNA, 19 nt, Artificial Sequence
  Description of Artificial Sequence: Synthetic oligonucleotide
  Antisense Strand to SEQ ID NO: 410901
uguuaccuugggcaagucu

SEQ ID NO: 410903 - RNA, 19 nt, Artificial Sequence
  Description of Artificial Sequence: Synthetic oligonucleotide
  Sense Strand Starting at position 1175 of SEQ ID NO: 315908
gcauuaaauccuuguugga

SEQ ID NO: 410904 - RNA, 19 nt, Artificial Sequence
  Description of Artificial Sequence: Synthetic oligonucleotide
  Antisense Strand to SEQ ID NO: 410903
uccaacaaggauuuaaugc

SEQ ID NO: 410905 - RNA, 19 nt, Artificial Sequence
  Description of Artificial Sequence: Synthetic oligonucleotide
  Sense Strand Starting at position 1175 of SEQ ID NO: 315910
auuaaauccuuguuggaca

SEQ ID NO: 410906 - RNA, 19 nt, Artificial Sequence
  Description of Artificial Sequence: Synthetic oligonucleotide
  Antisense Strand to SEQ ID NO: 410905
uguccaacaaggauuuaau

SEQ ID NO: 410907 - RNA, 19 nt, Artificial Sequence
  Description of Artificial Sequence: Synthetic oligonucleotide
  Sense Strand Starting at position 1175 of SEQ ID NO: 315924
ggacaucucugagcccaaa

SEQ ID NO: 410908 - RNA, 19 nt, Artificial Sequence
  Description of Artificial Sequence: Synthetic oligonucleotide
  Antisense Strand to SEQ ID NO: 410907
uuugggcucagagaugucc

SEQ ID NO: 410909 - RNA, 19 nt, Artificial Sequence
  Description of Artificial Sequence: Synthetic oligonucleotide
  Sense Strand Starting at position 1175 of SEQ ID NO: 316025
cuuccugucuccucaagga

SEQ ID NO: 410910 - RNA, 19 nt, Artificial Sequence
  Description of Artificial Sequence: Synthetic oligonucleotide
  Antisense Strand to SEQ ID NO: 410909
uccuugaggagacaggaag

SEQ ID NO: 410911 - RNA, 19 nt, Artificial Sequence
  Description of Artificial Sequence: Synthetic oligonucleotide
  Sense Strand Starting at position 1175 of SEQ ID NO: 316308
ggaaauaaccacugagcca

SEQ ID NO: 410912 - RNA, 19 nt, Artificial Sequence
  Description of Artificial Sequence: Synthetic oligonucleotide
  Antisense Strand to SEQ ID NO: 410911
uggcucagugguuauuucc

SEQ ID NO: 410913 - RNA, 19 nt, Artificial Sequence
  Description of Artificial Sequence: Synthetic oligonucleotide
  Sense Strand Starting at position 1175 of SEQ ID NO: 316443
aggucucuucgcuagagcu

SEQ ID NO: 410914 - RNA, 19 nt, Artificial Sequence
  Description of Artificial Sequence: Synthetic oligonucleotide
  Antisense Strand to SEQ ID NO: 410913
agcucuagcgaagagaccu

SEQ ID NO: 410915 - RNA, 19 nt, Artificial Sequence
  Description of Artificial Sequence: Synthetic oligonucleotide
  Sense Strand Starting at position 1175 of SEQ ID NO: 316868
cuuaaaggacgcuaaaguu

SEQ ID NO: 410916 - RNA, 19 nt, Artificial Sequence
  Description of Artificial Sequence: Synthetic oligonucleotide
  Antisense Strand to SEQ ID NO: 410915
aacuuuagcguccuuuaag

SEQ ID NO: 410917 - RNA, 19 nt, Artificial Sequence
  Description of Artificial Sequence: Synthetic oligonucleotide
  Sense Strand Starting at position 1175 of SEQ ID NO: 317481
gguugcugagguugauuua

SEQ ID NO: 410918 - RNA, 19 nt, Artificial Sequence
  Description of Artificial Sequence: Synthetic oligonucleotide
  Antisense Strand to SEQ ID NO: 410917
uaaaucaaccucagcaacc

SEQ ID NO: 410919 - RNA, 19 nt, Artificial Sequence
  Description of Artificial Sequence: Synthetic oligonucleotide
  Sense Strand Starting at position 1175 of SEQ ID NO: 317484
ugcugagguugauuuagca

SEQ ID NO: 410920 - RNA, 19 nt, Artificial Sequence
  Description of Artificial Sequence: Synthetic oligonucleotide
  Antisense Strand to SEQ ID NO: 410919
ugcuaaaucaaccucagca

SEQ ID NO: 410921 - RNA, 19 nt, Artificial Sequence
  Description of Artificial Sequence: Synthetic oligonucleotide
  Sense Strand Starting at position 1175 of SEQ ID NO: 317716
guggcuucgcaacagacuu

SEQ ID NO: 410922 - RNA, 19 nt, Artificial Sequence
  Description of Artificial Sequence: Synthetic oligonucleotide
  Antisense Strand to SEQ ID NO: 410921
aagucuguugcgaagccac

SEQ ID NO: 410923 - RNA, 19 nt, Artificial Sequence
  Description of Artificial Sequence: Synthetic oligonucleotide
  Sense Strand Starting at position 1175 of SEQ ID NO: 317808
uucugcauagcgcaaauau

SEQ ID NO: 410924 - RNA, 19 nt, Artificial Sequence
  Description of Artificial Sequence: Synthetic oligonucleotide
  Antisense Strand to SEQ ID NO: 410923
auauuugcgcuaugcagaa

SEQ ID NO: 410925 - RNA, 19 nt, Artificial Sequence
  Description of Artificial Sequence: Synthetic oligonucleotide
  Sense Strand Starting at position 1175 of SEQ ID NO: 317852
ucccacuuccgugaguaua

SEQ ID NO: 410926 - RNA, 19 nt, Artificial Sequence
  Description of Artificial Sequence: Synthetic oligonucleotide
  Antisense Strand to SEQ ID NO: 410925
uauacucacggaaguggga

SEQ ID NO: 410927 - RNA, 19 nt, Artificial Sequence
  Description of Artificial Sequence: Synthetic oligonucleotide
  Sense Strand Starting at position 1175 of SEQ ID NO: 317854
ccacuuccgugaguauauu

SEQ ID NO: 410928 - RNA, 19 nt, Artificial Sequence
  Description of Artificial Sequence: Synthetic oligonucleotide
  Antisense Strand to SEQ ID NO: 410927
aauauacucacggaagugg

SEQ ID NO: 410929 - RNA, 19 nt, Artificial Sequence
  Description of Artificial Sequence: Synthetic oligonucleotide
  Sense Strand Starting at position 1175 of SEQ ID NO: 317963
guucacguuccaugggaau

SEQ ID NO: 410930 - RNA, 19 nt, Artificial Sequence
  Description of Artificial Sequence: Synthetic oligonucleotide
  Antisense Strand to SEQ ID NO: 410929
auucccauggaacgugaac

SEQ ID NO: 410931 - RNA, 19 nt, Artificial Sequence
  Description of Artificial Sequence: Synthetic oligonucleotide
  Sense Strand Starting at position 1175 of SEQ ID NO: 318045
gugguuuagcgguaacuua

SEQ ID NO: 410932 - RNA, 19 nt, Artificial Sequence
  Description of Artificial Sequence: Synthetic oligonucleotide
  Antisense Strand to SEQ ID NO: 410931
uaaguuaccgcuaaaccac

SEQ ID NO: 410933 - RNA, 19 nt, Artificial Sequence
  Description of Artificial Sequence: Synthetic oligonucleotide
  Sense Strand Starting at position 1175 of SEQ ID NO: 318063
acgugauucccacgucaag

SEQ ID NO: 410934 - RNA, 19 nt, Artificial Sequence
  Description of Artificial Sequence: Synthetic oligonucleotide
  Antisense Strand to SEQ ID NO: 410933
cuugacgugggaaucacgu

SEQ ID NO: 410935 - RNA, 19 nt, Artificial Sequence
  Description of Artificial Sequence: Synthetic oligonucleotide
  Sense Strand Starting at position 1175 of SEQ ID NO: 318116
ucaaauuucugaggaccua

SEQ ID NO: 410936 - RNA, 19 nt, Artificial Sequence
  Description of Artificial Sequence: Synthetic oligonucleotide
  Antisense Strand to SEQ ID NO: 410935
uagguccucagaaauuuga

SEQ ID NO: 410937 - RNA, 19 nt, Artificial Sequence
  Description of Artificial Sequence: Synthetic oligonucleotide
  Sense Strand Starting at position 1175 of SEQ ID NO: 318218
aggugacaacuaugcucau

SEQ ID NO: 410938 - RNA, 19 nt, Artificial Sequence
  Description of Artificial Sequence: Synthetic oligonucleotide
  Antisense Strand to SEQ ID NO: 410937
augagcauaguugucaccu

SEQ ID NO: 410939 - RNA, 19 nt, Artificial Sequence
  Description of Artificial Sequence: Synthetic oligonucleotide
  Sense Strand Starting at position 1175 of SEQ ID NO: 318219
ggugacaacuaugcucaua

SEQ ID NO: 410940 - RNA, 19 nt, Artificial Sequence
  Description of Artificial Sequence: Synthetic oligonucleotide
  Antisense Strand to SEQ ID NO: 410939
uaugagcauaguugucacc

SEQ ID NO: 410941 - RNA, 19 nt, Artificial Sequence
  Description of Artificial Sequence: Synthetic oligonucleotide
  Sense Strand Starting at position 1175 of SEQ ID NO: 318221
ugacaacuaugcucauaag

SEQ ID NO: 410942 - RNA, 19 nt, Artificial Sequence
  Description of Artificial Sequence: Synthetic oligonucleotide
  Antisense Strand to SEQ ID NO: 410941
cuuaugagcauaguuguca

SEQ ID NO: 410943 - RNA, 19 nt, Artificial Sequence
  Description of Artificial Sequence: Synthetic oligonucleotide
  Sense Strand Starting at position 1175 of SEQ ID NO: 318232
cucauaagcuuggcuacaa

SEQ ID NO: 410944 - RNA, 19 nt, Artificial Sequence
  Description of Artificial Sequence: Synthetic oligonucleotide
  Antisense Strand to SEQ ID NO: 410943
uuguagccaagcuuaugag

SEQ ID NO: 410945 - RNA, 19 nt, Artificial Sequence
  Description of Artificial Sequence: Synthetic oligonucleotide
  Sense Strand Starting at position 1175 of SEQ ID NO: 318269
cuacuuugguauccugaca

SEQ ID NO: 410946 - RNA, 19 nt, Artificial Sequence
  Description of Artificial Sequence: Synthetic oligonucleotide
  Antisense Strand to SEQ ID NO: 410945
ugucaggauaccaaaguag

SEQ ID NO: 410947 - RNA, 19 nt, Artificial Sequence
  Description of Artificial Sequence: Synthetic oligonucleotide
  Sense Strand Starting at position 1175 of SEQ ID NO: 318365
ggugguucaccuuguggau

SEQ ID NO: 410948 - RNA, 19 nt, Artificial Sequence
  Description of Artificial Sequence: Synthetic oligonucleotide
  Antisense Strand to SEQ ID NO: 410947
auccacaaggugaaccacc

SEQ ID NO: 410949 - RNA, 19 nt, Artificial Sequence
  Description of Artificial Sequence: Synthetic oligonucleotide
  Sense Strand Starting at position 1175 of SEQ ID NO: 318626
uggucaaacccucagcuua

SEQ ID NO: 410950 - RNA, 19 nt, Artificial Sequence
  Description of Artificial Sequence: Synthetic oligonucleotide
  Antisense Strand to SEQ ID NO: 410949
uaagcugaggguuugacca

SEQ ID NO: 410951 - RNA, 19 nt, Artificial Sequence
  Description of Artificial Sequence: Synthetic oligonucleotide
  Sense Strand Starting at position 1175 of SEQ ID NO: 318793
aggaaaccauuauaaggaa

SEQ ID NO: 410952 - RNA, 19 nt, Artificial Sequence
  Description of Artificial Sequence: Synthetic oligonucleotide
  Antisense Strand to SEQ ID NO: 410951
uuccuuauaaugguuuccu

SEQ ID NO: 410953 - RNA, 19 nt, Artificial Sequence
  Description of Artificial Sequence: Synthetic oligonucleotide
  Sense Strand Starting at position 1175 of SEQ ID NO: 318805
uaaggaagugcccauucuu

SEQ ID NO: 410954 - RNA, 19 nt, Artificial Sequence
  Description of Artificial Sequence: Synthetic oligonucleotide
  Antisense Strand to SEQ ID NO: 410953
aagaaugggcacuuccuua

SEQ ID NO: 410955 - RNA, 19 nt, Artificial Sequence
  Description of Artificial Sequence: Synthetic oligonucleotide
  Sense Strand Starting at position 1175 of SEQ ID NO: 319104
uuguaacaggucugaggaa

SEQ ID NO: 410956 - RNA, 19 nt, Artificial Sequence
  Description of Artificial Sequence: Synthetic oligonucleotide
  Antisense Strand to SEQ ID NO: 410955
uuccucagaccuguuacaa

SEQ ID NO: 410957 - RNA, 19 nt, Artificial Sequence
  Description of Artificial Sequence: Synthetic oligonucleotide
  Sense Strand Starting at position 1175 of SEQ ID NO: 319194
cuaucaugaguccagacuu

SEQ ID NO: 410958 - RNA, 19 nt, Artificial Sequence
  Description of Artificial Sequence: Synthetic oligonucleotide
  Antisense Strand to SEQ ID NO: 410957
aagucuggacucaugauag

SEQ ID NO: 410959 - RNA, 19 nt, Artificial Sequence
  Description of Artificial Sequence: Synthetic oligonucleotide
  Sense Strand Starting at position 1176 of SEQ ID NO: 315288
gaacauaagccucaguaug

SEQ ID NO: 410960 - RNA, 19 nt, Artificial Sequence
  Description of Artificial Sequence: Synthetic oligonucleotide
  Antisense Strand to SEQ ID NO: 410959
cauacugaggcuuauguuc

SEQ ID NO: 410961 - RNA, 19 nt, Artificial Sequence
  Description of Artificial Sequence: Synthetic oligonucleotide
  Sense Strand Starting at position 1176 of SEQ ID NO: 315400
gagugagacucagagaaug

SEQ ID NO: 410962 - RNA, 19 nt, Artificial Sequence
  Description of Artificial Sequence: Synthetic oligonucleotide
  Antisense Strand to SEQ ID NO: 410961
cauucucugagucucacuc

SEQ ID NO: 410963 - RNA, 19 nt, Artificial Sequence
  Description of Artificial Sequence: Synthetic oligonucleotide
  Sense Strand Starting at position 1176 of SEQ ID NO: 315475
ccuagaaucugggucucca

SEQ ID NO: 410964 - RNA, 19 nt, Artificial Sequence
  Description of Artificial Sequence: Synthetic oligonucleotide
  Antisense Strand to SEQ ID NO: 410963
uggagacccagauucuagg

SEQ ID NO: 410965 - RNA, 19 nt, Artificial Sequence
  Description of Artificial Sequence: Synthetic oligonucleotide
  Sense Strand Starting at position 1176 of SEQ ID NO: 315549
cuucuuggccaguaguuga

SEQ ID NO: 410966 - RNA, 19 nt, Artificial Sequence
  Description of Artificial Sequence: Synthetic oligonucleotide
  Antisense Strand to SEQ ID NO: 410965
ucaacuacuggccaagaag

SEQ ID NO: 410967 - RNA, 19 nt, Artificial Sequence
  Description of Artificial Sequence: Synthetic oligonucleotide
  Sense Strand Starting at position 1176 of SEQ ID NO: 315557
ccaguaguugaggguaaau

SEQ ID NO: 410968 - RNA, 19 nt, Artificial Sequence
  Description of Artificial Sequence: Synthetic oligonucleotide
  Antisense Strand to SEQ ID NO: 410967
auuuacccucaacuacugg

SEQ ID NO: 410969 - RNA, 19 nt, Artificial Sequence
  Description of Artificial Sequence: Synthetic oligonucleotide
  Sense Strand Starting at position 1176 of SEQ ID NO: 315559
aguaguugaggguaaauua

SEQ ID NO: 410970 - RNA, 19 nt, Artificial Sequence
  Description of Artificial Sequence: Synthetic oligonucleotide
  Antisense Strand to SEQ ID NO: 410969
uaauuuacccucaacuacu

SEQ ID NO: 410971 - RNA, 19 nt, Artificial Sequence
  Description of Artificial Sequence: Synthetic oligonucleotide
  Sense Strand Starting at position 1176 of SEQ ID NO: 315737
agccauggguaacuauuaa

SEQ ID NO: 410972 - RNA, 19 nt, Artificial Sequence
  Description of Artificial Sequence: Synthetic oligonucleotide
  Antisense Strand to SEQ ID NO: 410971
uuaauaguuacccauggcu

SEQ ID NO: 410973 - RNA, 19 nt, Artificial Sequence
  Description of Artificial Sequence: Synthetic oligonucleotide
  Sense Strand Starting at position 1176 of SEQ ID NO: 315755
aaauccaugugguugcaga

SEQ ID NO: 410974 - RNA, 19 nt, Artificial Sequence
  Description of Artificial Sequence: Synthetic oligonucleotide
  Antisense Strand to SEQ ID NO: 410973
ucugcaaccacauggauuu

SEQ ID NO: 410975 - RNA, 19 nt, Artificial Sequence
  Description of Artificial Sequence: Synthetic oligonucleotide
  Sense Strand Starting at position 1176 of SEQ ID NO: 315860
acucacuggcucugaagaa

SEQ ID NO: 410976 - RNA, 19 nt, Artificial Sequence
  Description of Artificial Sequence: Synthetic oligonucleotide
  Antisense Strand to SEQ ID NO: 410975
uucuucagagccagugagu

SEQ ID NO: 410977 - RNA, 19 nt, Artificial Sequence
  Description of Artificial Sequence: Synthetic oligonucleotide
  Sense Strand Starting at position 1176 of SEQ ID NO: 315972
ccucuuggcccaugggaaa

SEQ ID NO: 410978 - RNA, 19 nt, Artificial Sequence
  Description of Artificial Sequence: Synthetic oligonucleotide
  Antisense Strand to SEQ ID NO: 410977
uuucccaugggccaagagg

SEQ ID NO: 410979 - RNA, 19 nt, Artificial Sequence
  Description of Artificial Sequence: Synthetic oligonucleotide
  Sense Strand Starting at position 1176 of SEQ ID NO: 315984
ugggaaauccuaggaggca

SEQ ID NO: 410980 - RNA, 19 nt, Artificial Sequence
  Description of Artificial Sequence: Synthetic oligonucleotide
  Antisense Strand to SEQ ID NO: 410979
ugccuccuaggauuuccca

SEQ ID NO: 410981 - RNA, 19 nt, Artificial Sequence
  Description of Artificial Sequence: Synthetic oligonucleotide
  Sense Strand Starting at position 1176 of SEQ ID NO: 316075
ggagcauuaccuugcacag

SEQ ID NO: 410982 - RNA, 19 nt, Artificial Sequence
  Description of Artificial Sequence: Synthetic oligonucleotide
  Antisense Strand to SEQ ID NO: 410981
cugugcaagguaaugcucc

SEQ ID NO: 410983 - RNA, 19 nt, Artificial Sequence
  Description of Artificial Sequence: Synthetic oligonucleotide
  Sense Strand Starting at position 1176 of SEQ ID NO: 316212
ccaugaauggcaggcagaa

SEQ ID NO: 410984 - RNA, 19 nt, Artificial Sequence
  Description of Artificial Sequence: Synthetic oligonucleotide
  Antisense Strand to SEQ ID NO: 410983
uucugccugccauucaugg

SEQ ID NO: 410985 - RNA, 19 nt, Artificial Sequence
  Description of Artificial Sequence: Synthetic oligonucleotide
  Sense Strand Starting at position 1176 of SEQ ID NO: 316296
gcaggaugugugcaacauc

SEQ ID NO: 410986 - RNA, 19 nt, Artificial Sequence
  Description of Artificial Sequence: Synthetic oligonucleotide
  Antisense Strand to SEQ ID NO: 410985
gauguugcacacauccugc

SEQ ID NO: 410987 - RNA, 19 nt, Artificial Sequence
  Description of Artificial Sequence: Synthetic oligonucleotide
  Sense Strand Starting at position 1176 of SEQ ID NO: 316569
ggaguucggacuugacaag

SEQ ID NO: 410988 - RNA, 19 nt, Artificial Sequence
  Description of Artificial Sequence: Synthetic oligonucleotide
  Antisense Strand to SEQ ID NO: 410987
cuugucaaguccgaacucc

SEQ ID NO: 410989 - RNA, 19 nt, Artificial Sequence
  Description of Artificial Sequence: Synthetic oligonucleotide
  Sense Strand Starting at position 1176 of SEQ ID NO: 316618
uuagacgugcucugauuua

SEQ ID NO: 410990 - RNA, 19 nt, Artificial Sequence
  Description of Artificial Sequence: Synthetic oligonucleotide
  Antisense Strand to SEQ ID NO: 410989
uaaaucagagcacgucuaa

SEQ ID NO: 410991 - RNA, 19 nt, Artificial Sequence
  Description of Artificial Sequence: Synthetic oligonucleotide
  Sense Strand Starting at position 1176 of SEQ ID NO: 316623
cgugcucugauuuauugua

SEQ ID NO: 410992 - RNA, 19 nt, Artificial Sequence
  Description of Artificial Sequence: Synthetic oligonucleotide
  Antisense Strand to SEQ ID NO: 410991
uacaauaaaucagagcacg

SEQ ID NO: 410993 - RNA, 19 nt, Artificial Sequence
  Description of Artificial Sequence: Synthetic oligonucleotide
  Sense Strand Starting at position 1176 of SEQ ID NO: 316625
ugcucugauuuauuguauu

SEQ ID NO: 410994 - RNA, 19 nt, Artificial Sequence
  Description of Artificial Sequence: Synthetic oligonucleotide
  Antisense Strand to SEQ ID NO: 410993
aauacaauaaaucagagca

SEQ ID NO: 410995 - RNA, 19 nt, Artificial Sequence
  Description of Artificial Sequence: Synthetic oligonucleotide
  Sense Strand Starting at position 1176 of SEQ ID NO: 316700
agugaaaggugucuagaag

SEQ ID NO: 410996 - RNA, 19 nt, Artificial Sequence
  Description of Artificial Sequence: Synthetic oligonucleotide
  Antisense Strand to SEQ ID NO: 410995
cuucuagacaccuuucacu

SEQ ID NO: 410997 - RNA, 19 nt, Artificial Sequence
  Description of Artificial Sequence: Synthetic oligonucleotide
  Sense Strand Starting at position 1176 of SEQ ID NO: 317600
ucaagcuuccugugggaca

SEQ ID NO: 410998 - RNA, 19 nt, Artificial Sequence
  Description of Artificial Sequence: Synthetic oligonucleotide
  Antisense Strand to SEQ ID NO: 410997
ugucccacaggaagcuuga

SEQ ID NO: 410999 - RNA, 19 nt, Artificial Sequence
  Description of Artificial Sequence: Synthetic oligonucleotide
  Sense Strand Starting at position 1176 of SEQ ID NO: 317713
agugucaucuuagcacaaa

SEQ ID NO: 411000 - RNA, 19 nt, Artificial Sequence
  Description of Artificial Sequence: Synthetic oligonucleotide
  Antisense Strand to SEQ ID NO: 410999
uuugugcuaagaugacacu

SEQ ID NO: 411001 - RNA, 19 nt, Artificial Sequence
  Description of Artificial Sequence: Synthetic oligonucleotide
  Sense Strand Starting at position 1176 of SEQ ID NO: 317969
uugcuuaugcggccuuaua

SEQ ID NO: 411002 - RNA, 19 nt, Artificial Sequence
  Description of Artificial Sequence: Synthetic oligonucleotide
  Antisense Strand to SEQ ID NO: 411001
uauaaggccgcauaagcaa

SEQ ID NO: 411003 - RNA, 19 nt, Artificial Sequence
  Description of Artificial Sequence: Synthetic oligonucleotide
  Sense Strand Starting at position 1176 of SEQ ID NO: 317978
cggccuuauacaggauuau

SEQ ID NO: 411004 - RNA, 19 nt, Artificial Sequence
  Description of Artificial Sequence: Synthetic oligonucleotide
  Antisense Strand to SEQ ID NO: 411003
auaauccuguauaaggccg

SEQ ID NO: 411005 - RNA, 19 nt, Artificial Sequence
  Description of Artificial Sequence: Synthetic oligonucleotide
  Sense Strand Starting at position 1176 of SEQ ID NO: 317979
ggccuuauacaggauuauu

SEQ ID NO: 411006 - RNA, 19 nt, Artificial Sequence
  Description of Artificial Sequence: Synthetic oligonucleotide
  Antisense Strand to SEQ ID NO: 411005
aauaauccuguauaaggcc

SEQ ID NO: 411007 - RNA, 19 nt, Artificial Sequence
  Description of Artificial Sequence: Synthetic oligonucleotide
  Sense Strand Starting at position 1176 of SEQ ID NO: 318032
gauuccuuccacgaagugu

SEQ ID NO: 411008 - RNA, 19 nt, Artificial Sequence
  Description of Artificial Sequence: Synthetic oligonucleotide
  Antisense Strand to SEQ ID NO: 411007
acacuucguggaaggaauc

SEQ ID NO: 411009 - RNA, 19 nt, Artificial Sequence
  Description of Artificial Sequence: Synthetic oligonucleotide
  Sense Strand Starting at position 1176 of SEQ ID NO: 318163
cacgucaggucagucauuu

SEQ ID NO: 411010 - RNA, 19 nt, Artificial Sequence
  Description of Artificial Sequence: Synthetic oligonucleotide
  Antisense Strand to SEQ ID NO: 411009
aaaugacugaccugacgug

SEQ ID NO: 411011 - RNA, 19 nt, Artificial Sequence
  Description of Artificial Sequence: Synthetic oligonucleotide
  Sense Strand Starting at position 1176 of SEQ ID NO: 318206
uugucagaauugucuccua

SEQ ID NO: 411012 - RNA, 19 nt, Artificial Sequence
  Description of Artificial Sequence: Synthetic oligonucleotide
  Antisense Strand to SEQ ID NO: 411011
uaggagacaauucugacaa

SEQ ID NO: 411013 - RNA, 19 nt, Artificial Sequence
  Description of Artificial Sequence: Synthetic oligonucleotide
  Sense Strand Starting at position 1176 of SEQ ID NO: 318225
auucuaguuucuuuguaag

SEQ ID NO: 411014 - RNA, 19 nt, Artificial Sequence
  Description of Artificial Sequence: Synthetic oligonucleotide
  Antisense Strand to SEQ ID NO: 411013
cuuacaaagaaacuagaau

SEQ ID NO: 411015 - RNA, 19 nt, Artificial Sequence
  Description of Artificial Sequence: Synthetic oligonucleotide
  Sense Strand Starting at position 1176 of SEQ ID NO: 318256
gcaugugugcaucucguga

SEQ ID NO: 411016 - RNA, 19 nt, Artificial Sequence
  Description of Artificial Sequence: Synthetic oligonucleotide
  Antisense Strand to SEQ ID NO: 411015
ucacgagaugcacacaugc

SEQ ID NO: 411017 - RNA, 19 nt, Artificial Sequence
  Description of Artificial Sequence: Synthetic oligonucleotide
  Sense Strand Starting at position 1176 of SEQ ID NO: 318281
gaguuaaagccagauuauc

SEQ ID NO: 411018 - RNA, 19 nt, Artificial Sequence
  Description of Artificial Sequence: Synthetic oligonucleotide
  Antisense Strand to SEQ ID NO: 411017
gauaaucuggcuuuaacuc

SEQ ID NO: 411019 - RNA, 19 nt, Artificial Sequence
  Description of Artificial Sequence: Synthetic oligonucleotide
  Sense Strand Starting at position 1176 of SEQ ID NO: 318312
ccguuuaacugggcacaua

SEQ ID NO: 411020 - RNA, 19 nt, Artificial Sequence
  Description of Artificial Sequence: Synthetic oligonucleotide
  Antisense Strand to SEQ ID NO: 411019
uaugugcccaguuaaacgg

SEQ ID NO: 411021 - RNA, 19 nt, Artificial Sequence
  Description of Artificial Sequence: Synthetic oligonucleotide
  Sense Strand Starting at position 1176 of SEQ ID NO: 318557
guuagauuauguucuccca

SEQ ID NO: 411022 - RNA, 19 nt, Artificial Sequence
  Description of Artificial Sequence: Synthetic oligonucleotide
  Antisense Strand to SEQ ID NO: 411021
ugggagaacauaaucuaac

SEQ ID NO: 411023 - RNA, 19 nt, Artificial Sequence
  Description of Artificial Sequence: Synthetic oligonucleotide
  Sense Strand Starting at position 1176 of SEQ ID NO: 318560
agauuauguucucccacac

SEQ ID NO: 411024 - RNA, 19 nt, Artificial Sequence
  Description of Artificial Sequence: Synthetic oligonucleotide
  Antisense Strand to SEQ ID NO: 411023
gugugggagaacauaaucu

SEQ ID NO: 411025 - RNA, 19 nt, Artificial Sequence
  Description of Artificial Sequence: Synthetic oligonucleotide
  Sense Strand Starting at position 1176 of SEQ ID NO: 318766
gugcuugagccauagggaa

SEQ ID NO: 411026 - RNA, 19 nt, Artificial Sequence
  Description of Artificial Sequence: Synthetic oligonucleotide
  Antisense Strand to SEQ ID NO: 411025
uucccuauggcucaagcac

SEQ ID NO: 411027 - RNA, 19 nt, Artificial Sequence
  Description of Artificial Sequence: Synthetic oligonucleotide
  Sense Strand Starting at position 1176 of SEQ ID NO: 318838
ggcaguggucuggauucau

SEQ ID NO: 411028 - RNA, 19 nt, Artificial Sequence
  Description of Artificial Sequence: Synthetic oligonucleotide
  Antisense Strand to SEQ ID NO: 411027
augaauccagaccacugcc

SEQ ID NO: 411029 - RNA, 19 nt, Artificial Sequence
  Description of Artificial Sequence: Synthetic oligonucleotide
  Sense Strand Starting at position 1176 of SEQ ID NO: 319070
agaagauggucagugauuc

SEQ ID NO: 411030 - RNA, 19 nt, Artificial Sequence
  Description of Artificial Sequence: Synthetic oligonucleotide
  Antisense Strand to SEQ ID NO: 411029
gaaucacugaccaucuucu

SEQ ID NO: 411031 - RNA, 19 nt, Artificial Sequence
  Description of Artificial Sequence: Synthetic oligonucleotide
  Sense Strand Starting at position 1176 of SEQ ID NO: 319071
gaagauggucagugauucu

SEQ ID NO: 411032 - RNA, 19 nt, Artificial Sequence
  Description of Artificial Sequence: Synthetic oligonucleotide
  Antisense Strand to SEQ ID NO: 411031
agaaucacugaccaucuuc

SEQ ID NO: 411033 - RNA, 19 nt, Artificial Sequence
  Description of Artificial Sequence: Synthetic oligonucleotide
  Sense Strand Starting at position 1176 of SEQ ID NO: 319103
ccaucuacauucguagacu

SEQ ID NO: 411034 - RNA, 19 nt, Artificial Sequence
  Description of Artificial Sequence: Synthetic oligonucleotide
  Antisense Strand to SEQ ID NO: 411033
agucuacgaauguagaugg

SEQ ID NO: 411035 - RNA, 19 nt, Artificial Sequence
  Description of Artificial Sequence: Synthetic oligonucleotide
  Sense Strand Starting at position 1176 of SEQ ID NO: 319106
ucuacauucguagacuaag

SEQ ID NO: 411036 - RNA, 19 nt, Artificial Sequence
  Description of Artificial Sequence: Synthetic oligonucleotide
  Antisense Strand to SEQ ID NO: 411035
cuuagucuacgaauguaga

SEQ ID NO: 411037 - RNA, 19 nt, Artificial Sequence
  Description of Artificial Sequence: Synthetic oligonucleotide
  Sense Strand Starting at position 1176 of SEQ ID NO: 319207
cugaguccucuccagagca

SEQ ID NO: 411038 - RNA, 19 nt, Artificial Sequence
  Description of Artificial Sequence: Synthetic oligonucleotide
  Antisense Strand to SEQ ID NO: 411037
ugcucuggagaggacucag

SEQ ID NO: 411039 - RNA, 19 nt, Artificial Sequence
  Description of Artificial Sequence: Synthetic oligonucleotide
  Sense Strand Starting at position 1177 of SEQ ID NO: 315318
agaguuuaguaagucuuga

SEQ ID NO: 411040 - RNA, 19 nt, Artificial Sequence
  Description of Artificial Sequence: Synthetic oligonucleotide
  Antisense Strand to SEQ ID NO: 411039
ucaagacuuacuaaacucu

SEQ ID NO: 411041 - RNA, 19 nt, Artificial Sequence
  Description of Artificial Sequence: Synthetic oligonucleotide
  Sense Strand Starting at position 1177 of SEQ ID NO: 315323
uuaguaagucuugaaccuu

SEQ ID NO: 411042 - RNA, 19 nt, Artificial Sequence
  Description of Artificial Sequence: Synthetic oligonucleotide
  Antisense Strand to SEQ ID NO: 411041
aagguucaagacuuacuaa

SEQ ID NO: 411043 - RNA, 19 nt, Artificial Sequence
  Description of Artificial Sequence: Synthetic oligonucleotide
  Sense Strand Starting at position 1177 of SEQ ID NO: 315440
ggcacaagauguucuaaua

SEQ ID NO: 411044 - RNA, 19 nt, Artificial Sequence
  Description of Artificial Sequence: Synthetic oligonucleotide
  Antisense Strand to SEQ ID NO: 411043
uauuagaacaucuugugcc

SEQ ID NO: 411045 - RNA, 19 nt, Artificial Sequence
  Description of Artificial Sequence: Synthetic oligonucleotide
  Sense Strand Starting at position 1177 of SEQ ID NO: 315541
gagaauggacacugccauu

SEQ ID NO: 411046 - RNA, 19 nt, Artificial Sequence
  Description of Artificial Sequence: Synthetic oligonucleotide
  Antisense Strand to SEQ ID NO: 411045
aauggcaguguccauucuc

SEQ ID NO: 411047 - RNA, 19 nt, Artificial Sequence
  Description of Artificial Sequence: Synthetic oligonucleotide
  Sense Strand Starting at position 1177 of SEQ ID NO: 315689
ggacaugauuaugccauau

SEQ ID NO: 411048 - RNA, 19 nt, Artificial Sequence
  Description of Artificial Sequence: Synthetic oligonucleotide
  Antisense Strand to SEQ ID NO: 411047
auauggcauaaucaugucc

SEQ ID NO: 411049 - RNA, 19 nt, Artificial Sequence
  Description of Artificial Sequence: Synthetic oligonucleotide
  Sense Strand Starting at position 1177 of SEQ ID NO: 315826
gguugugcaagucaaauga

SEQ ID NO: 411050 - RNA, 19 nt, Artificial Sequence
  Description of Artificial Sequence: Synthetic oligonucleotide
  Antisense Strand to SEQ ID NO: 411049
ucauuugacuugcacaacc

SEQ ID NO: 411051 - RNA, 19 nt, Artificial Sequence
  Description of Artificial Sequence: Synthetic oligonucleotide
  Sense Strand Starting at position 1177 of SEQ ID NO: 316212
gcaucuaauuuacagauga

SEQ ID NO: 411052 - RNA, 19 nt, Artificial Sequence
  Description of Artificial Sequence: Synthetic oligonucleotide
  Antisense Strand to SEQ ID NO: 411051
ucaucuguaaauuagaugc

SEQ ID NO: 411053 - RNA, 19 nt, Artificial Sequence
  Description of Artificial Sequence: Synthetic oligonucleotide
  Sense Strand Starting at position 1177 of SEQ ID NO: 316307
gucucucagcgagauccua

SEQ ID NO: 411054 - RNA, 19 nt, Artificial Sequence
  Description of Artificial Sequence: Synthetic oligonucleotide
  Antisense Strand to SEQ ID NO: 411053
uaggaucucgcugagagac

SEQ ID NO: 411055 - RNA, 19 nt, Artificial Sequence
  Description of Artificial Sequence: Synthetic oligonucleotide
  Sense Strand Starting at position 1177 of SEQ ID NO: 316332
cccuuacacuucuuuguga

SEQ ID NO: 411056 - RNA, 19 nt, Artificial Sequence
  Description of Artificial Sequence: Synthetic oligonucleotide
  Antisense Strand to SEQ ID NO: 411055
ucacaaagaaguguaaggg

SEQ ID NO: 411057 - RNA, 19 nt, Artificial Sequence
  Description of Artificial Sequence: Synthetic oligonucleotide
  Sense Strand Starting at position 1177 of SEQ ID NO: 316334
cuuacacuucuuugugaag

SEQ ID NO: 411058 - RNA, 19 nt, Artificial Sequence
  Description of Artificial Sequence: Synthetic oligonucleotide
  Antisense Strand to SEQ ID NO: 411057
cuucacaaagaaguguaag

SEQ ID NO: 411059 - RNA, 19 nt, Artificial Sequence
  Description of Artificial Sequence: Synthetic oligonucleotide
  Sense Strand Starting at position 1177 of SEQ ID NO: 316335
uuacacuucuuugugaaga

SEQ ID NO: 411060 - RNA, 19 nt, Artificial Sequence
  Description of Artificial Sequence: Synthetic oligonucleotide
  Antisense Strand to SEQ ID NO: 411059
ucuucacaaagaaguguaa

SEQ ID NO: 411061 - RNA, 19 nt, Artificial Sequence
  Description of Artificial Sequence: Synthetic oligonucleotide
  Sense Strand Starting at position 1177 of SEQ ID NO: 316356
gaccuuggcuuuccagauu

SEQ ID NO: 411062 - RNA, 19 nt, Artificial Sequence
  Description of Artificial Sequence: Synthetic oligonucleotide
  Antisense Strand to SEQ ID NO: 411061
aaucuggaaagccaagguc

SEQ ID NO: 411063 - RNA, 19 nt, Artificial Sequence
  Description of Artificial Sequence: Synthetic oligonucleotide
  Sense Strand Starting at position 1177 of SEQ ID NO: 316380
aaaggagucugggcccaaa

SEQ ID NO: 411064 - RNA, 19 nt, Artificial Sequence
  Description of Artificial Sequence: Synthetic oligonucleotide
  Antisense Strand to SEQ ID NO: 411063
uuugggcccagacuccuuu

SEQ ID NO: 411065 - RNA, 19 nt, Artificial Sequence
  Description of Artificial Sequence: Synthetic oligonucleotide
  Sense Strand Starting at position 1177 of SEQ ID NO: 316510
aggccugugagucaugaaa

SEQ ID NO: 411066 - RNA, 19 nt, Artificial Sequence
  Description of Artificial Sequence: Synthetic oligonucleotide
  Antisense Strand to SEQ ID NO: 411065
uuucaugacucacaggccu

SEQ ID NO: 411067 - RNA, 19 nt, Artificial Sequence
  Description of Artificial Sequence: Synthetic oligonucleotide
  Sense Strand Starting at position 1177 of SEQ ID NO: 316562
agccauccuucuuugaaga

SEQ ID NO: 411068 - RNA, 19 nt, Artificial Sequence
  Description of Artificial Sequence: Synthetic oligonucleotide
  Antisense Strand to SEQ ID NO: 411067
ucuucaaagaaggauggcu

SEQ ID NO: 411069 - RNA, 19 nt, Artificial Sequence
  Description of Artificial Sequence: Synthetic oligonucleotide
  Sense Strand Starting at position 1177 of SEQ ID NO: 316648
cgauuugcucuaugcacua

SEQ ID NO: 411070 - RNA, 19 nt, Artificial Sequence
  Description of Artificial Sequence: Synthetic oligonucleotide
  Antisense Strand to SEQ ID NO: 411069
uagugcauagagcaaaucg

SEQ ID NO: 411071 - RNA, 19 nt, Artificial Sequence
  Description of Artificial Sequence: Synthetic oligonucleotide
  Sense Strand Starting at position 1177 of SEQ ID NO: 317023
ggucaaggcccaggaguuu

SEQ ID NO: 411072 - RNA, 19 nt, Artificial Sequence
  Description of Artificial Sequence: Synthetic oligonucleotide
  Antisense Strand to SEQ ID NO: 411071
aaacuccugggccuugacc

SEQ ID NO: 411073 - RNA, 19 nt, Artificial Sequence
  Description of Artificial Sequence: Synthetic oligonucleotide
  Sense Strand Starting at position 1177 of SEQ ID NO: 317237
ccgauuggcccucagaaug

SEQ ID NO: 411074 - RNA, 19 nt, Artificial Sequence
  Description of Artificial Sequence: Synthetic oligonucleotide
  Antisense Strand to SEQ ID NO: 411073
cauucugagggccaaucgg

SEQ ID NO: 411075 - RNA, 19 nt, Artificial Sequence
  Description of Artificial Sequence: Synthetic oligonucleotide
  Sense Strand Starting at position 1177 of SEQ ID NO: 317548
cugcgacuugggugggaau

SEQ ID NO: 411076 - RNA, 19 nt, Artificial Sequence
  Description of Artificial Sequence: Synthetic oligonucleotide
  Antisense Strand to SEQ ID NO: 411075
auucccacccaagucgcag

SEQ ID NO: 411077 - RNA, 19 nt, Artificial Sequence
  Description of Artificial Sequence: Synthetic oligonucleotide
  Sense Strand Starting at position 1177 of SEQ ID NO: 317908
ucguucgugccgaaguuaa

SEQ ID NO: 411078 - RNA, 19 nt, Artificial Sequence
  Description of Artificial Sequence: Synthetic oligonucleotide
  Antisense Strand to SEQ ID NO: 411077
uuaacuucggcacgaacga

SEQ ID NO: 411079 - RNA, 19 nt, Artificial Sequence
  Description of Artificial Sequence: Synthetic oligonucleotide
  Sense Strand Starting at position 1177 of SEQ ID NO: 317953
acgauuagaucuuucucau

SEQ ID NO: 411080 - RNA, 19 nt, Artificial Sequence
  Description of Artificial Sequence: Synthetic oligonucleotide
  Antisense Strand to SEQ ID NO: 411079
augagaaagaucuaaucgu

SEQ ID NO: 411081 - RNA, 19 nt, Artificial Sequence
  Description of Artificial Sequence: Synthetic oligonucleotide
  Sense Strand Starting at position 1177 of SEQ ID NO: 318481
uagagugaucugggaaggu

SEQ ID NO: 411082 - RNA, 19 nt, Artificial Sequence
  Description of Artificial Sequence: Synthetic oligonucleotide
  Antisense Strand to SEQ ID NO: 411081
accuucccagaucacucua

SEQ ID NO: 411083 - RNA, 19 nt, Artificial Sequence
  Description of Artificial Sequence: Synthetic oligonucleotide
  Sense Strand Starting at position 1177 of SEQ ID NO: 318504
cggagaaggugguauuuaa

SEQ ID NO: 411084 - RNA, 19 nt, Artificial Sequence
  Description of Artificial Sequence: Synthetic oligonucleotide
  Antisense Strand to SEQ ID NO: 411083
uuaaauaccaccuucuccg

SEQ ID NO: 411085 - RNA, 19 nt, Artificial Sequence
  Description of Artificial Sequence: Synthetic oligonucleotide
  Sense Strand Starting at position 1177 of SEQ ID NO: 318590
gagacaauuguaugcauaa

SEQ ID NO: 411086 - RNA, 19 nt, Artificial Sequence
  Description of Artificial Sequence: Synthetic oligonucleotide
  Antisense Strand to SEQ ID NO: 411085
uuaugcauacaauugucuc

SEQ ID NO: 411087 - RNA, 19 nt, Artificial Sequence
  Description of Artificial Sequence: Synthetic oligonucleotide
  Sense Strand Starting at position 1177 of SEQ ID NO: 318591
agacaauuguaugcauaau

SEQ ID NO: 411088 - RNA, 19 nt, Artificial Sequence
  Description of Artificial Sequence: Synthetic oligonucleotide
  Antisense Strand to SEQ ID NO: 411087
auuaugcauacaauugucu

SEQ ID NO: 411089 - RNA, 19 nt, Artificial Sequence
  Description of Artificial Sequence: Synthetic oligonucleotide
  Sense Strand Starting at position 1177 of SEQ ID NO: 318615
guaacuaguccugagaguc

SEQ ID NO: 411090 - RNA, 19 nt, Artificial Sequence
  Description of Artificial Sequence: Synthetic oligonucleotide
  Antisense Strand to SEQ ID NO: 411089
gacucucaggacuaguuac

SEQ ID NO: 411091 - RNA, 19 nt, Artificial Sequence
  Description of Artificial Sequence: Synthetic oligonucleotide
  Sense Strand Starting at position 1177 of SEQ ID NO: 318628
agaguccaagaaugucaaa

SEQ ID NO: 411092 - RNA, 19 nt, Artificial Sequence
  Description of Artificial Sequence: Synthetic oligonucleotide
  Antisense Strand to SEQ ID NO: 411091
uuugacauucuuggacucu

SEQ ID NO: 411093 - RNA, 19 nt, Artificial Sequence
  Description of Artificial Sequence: Synthetic oligonucleotide
  Sense Strand Starting at position 1177 of SEQ ID NO: 318648
gcaguacuccacugacuga

SEQ ID NO: 411094 - RNA, 19 nt, Artificial Sequence
  Description of Artificial Sequence: Synthetic oligonucleotide
  Antisense Strand to SEQ ID NO: 411093
ucagucaguggaguacugc

SEQ ID NO: 411095 - RNA, 19 nt, Artificial Sequence
  Description of Artificial Sequence: Synthetic oligonucleotide
  Sense Strand Starting at position 1177 of SEQ ID NO: 318843
caaggaacucaguguagca

SEQ ID NO: 411096 - RNA, 19 nt, Artificial Sequence
  Description of Artificial Sequence: Synthetic oligonucleotide
  Antisense Strand to SEQ ID NO: 411095
ugcuacacugaguuccuug

SEQ ID NO: 411097 - RNA, 19 nt, Artificial Sequence
  Description of Artificial Sequence: Synthetic oligonucleotide
  Sense Strand Starting at position 1177 of SEQ ID NO: 318896
cguaaauaaccaugaugga

SEQ ID NO: 411098 - RNA, 19 nt, Artificial Sequence
  Description of Artificial Sequence: Synthetic oligonucleotide
  Antisense Strand to SEQ ID NO: 411097
uccaucaugguuauuuacg

SEQ ID NO: 411099 - RNA, 19 nt, Artificial Sequence
  Description of Artificial Sequence: Synthetic oligonucleotide
  Sense Strand Starting at position 1177 of SEQ ID NO: 318922
acacaaagugcuugggcua

SEQ ID NO: 411100 - RNA, 19 nt, Artificial Sequence
  Description of Artificial Sequence: Synthetic oligonucleotide
  Antisense Strand to SEQ ID NO: 411099
uagcccaagcacuuugugu

SEQ ID NO: 411101 - RNA, 19 nt, Artificial Sequence
  Description of Artificial Sequence: Synthetic oligonucleotide
  Sense Strand Starting at position 1177 of SEQ ID NO: 318923
cacaaagugcuugggcuaa

SEQ ID NO: 411102 - RNA, 19 nt, Artificial Sequence
  Description of Artificial Sequence: Synthetic oligonucleotide
  Antisense Strand to SEQ ID NO: 411101
uuagcccaagcacuuugug

SEQ ID NO: 411103 - RNA, 19 nt, Artificial Sequence
  Description of Artificial Sequence: Synthetic oligonucleotide
  Sense Strand Starting at position 1177 of SEQ ID NO: 318927
aagugcuugggcuaaugua

SEQ ID NO: 411104 - RNA, 19 nt, Artificial Sequence
  Description of Artificial Sequence: Synthetic oligonucleotide
  Antisense Strand to SEQ ID NO: 411103
uacauuagcccaagcacuu

SEQ ID NO: 411105 - RNA, 19 nt, Artificial Sequence
  Description of Artificial Sequence: Synthetic oligonucleotide
  Sense Strand Starting at position 1177 of SEQ ID NO: 318971
agcuguaacuaucuuagga

SEQ ID NO: 411106 - RNA, 19 nt, Artificial Sequence
  Description of Artificial Sequence: Synthetic oligonucleotide
  Antisense Strand to SEQ ID NO: 411105
uccuaagauaguuacagcu

SEQ ID NO: 411107 - RNA, 19 nt, Artificial Sequence
  Description of Artificial Sequence: Synthetic oligonucleotide
  Sense Strand Starting at position 1177 of SEQ ID NO: 319026
guacuaaauuuggagugaa

SEQ ID NO: 411108 - RNA, 19 nt, Artificial Sequence
  Description of Artificial Sequence: Synthetic oligonucleotide
  Antisense Strand to SEQ ID NO: 411107
uucacuccaaauuuaguac

SEQ ID NO: 411109 - RNA, 19 nt, Artificial Sequence
  Description of Artificial Sequence: Synthetic oligonucleotide
  Sense Strand Starting at position 1177 of SEQ ID NO: 319041
ugaaguuauggcuaugagg

SEQ ID NO: 411110 - RNA, 19 nt, Artificial Sequence
  Description of Artificial Sequence: Synthetic oligonucleotide
  Antisense Strand to SEQ ID NO: 411109
ccucauagccauaacuuca

SEQ ID NO: 411111 - RNA, 19 nt, Artificial Sequence
  Description of Artificial Sequence: Synthetic oligonucleotide
  Sense Strand Starting at position 1177 of SEQ ID NO: 319043
aaguuauggcuaugaggga

SEQ ID NO: 411112 - RNA, 19 nt, Artificial Sequence
  Description of Artificial Sequence: Synthetic oligonucleotide
  Antisense Strand to SEQ ID NO: 411111
ucccucauagccauaacuu

SEQ ID NO: 411113 - RNA, 19 nt, Artificial Sequence
  Description of Artificial Sequence: Synthetic oligonucleotide
  Sense Strand Starting at position 1177 of SEQ ID NO: 319078
uaggucagagucugaagau

SEQ ID NO: 411114 - RNA, 19 nt, Artificial Sequence
  Description of Artificial Sequence: Synthetic oligonucleotide
  Antisense Strand to SEQ ID NO: 411113
aucuucagacucugaccua

SEQ ID NO: 411115 - RNA, 19 nt, Artificial Sequence
  Description of Artificial Sequence: Synthetic oligonucleotide
  Sense Strand Starting at position 1177 of SEQ ID NO: 319187
auguaaugcauguaguaag

SEQ ID NO: 411116 - RNA, 19 nt, Artificial Sequence
  Description of Artificial Sequence: Synthetic oligonucleotide
  Antisense Strand to SEQ ID NO: 411115
cuuacuacaugcauuacau

SEQ ID NO: 411117 - RNA, 19 nt, Artificial Sequence
  Description of Artificial Sequence: Synthetic oligonucleotide
  Sense Strand Starting at position 1177 of SEQ ID NO: 319209
ucaauaaaugauggcaauu

SEQ ID NO: 411118 - RNA, 19 nt, Artificial Sequence
  Description of Artificial Sequence: Synthetic oligonucleotide
  Antisense Strand to SEQ ID NO: 411117
aauugccaucauuuauuga

SEQ ID NO: 411119 - RNA, 19 nt, Artificial Sequence
  Description of Artificial Sequence: Synthetic oligonucleotide
  Sense Strand Starting at position 1178 of SEQ ID NO: 315593
acuuaaauguuaucaugug

SEQ ID NO: 411120 - RNA, 19 nt, Artificial Sequence
  Description of Artificial Sequence: Synthetic oligonucleotide
  Antisense Strand to SEQ ID NO: 411119
cacaugauaacauuuaagu

SEQ ID NO: 411121 - RNA, 19 nt, Artificial Sequence
  Description of Artificial Sequence: Synthetic oligonucleotide
  Sense Strand Starting at position 1178 of SEQ ID NO: 315605
ucaugugguuucucugaca

SEQ ID NO: 411122 - RNA, 19 nt, Artificial Sequence
  Description of Artificial Sequence: Synthetic oligonucleotide
  Antisense Strand to SEQ ID NO: 411121
ugucagagaaaccacauga

SEQ ID NO: 411123 - RNA, 19 nt, Artificial Sequence
  Description of Artificial Sequence: Synthetic oligonucleotide
  Sense Strand Starting at position 1178 of SEQ ID NO: 315608
ugugguuucucugacaaua

SEQ ID NO: 411124 - RNA, 19 nt, Artificial Sequence
  Description of Artificial Sequence: Synthetic oligonucleotide
  Antisense Strand to SEQ ID NO: 411123
uauugucagagaaaccaca

SEQ ID NO: 411125 - RNA, 19 nt, Artificial Sequence
  Description of Artificial Sequence: Synthetic oligonucleotide
  Sense Strand Starting at position 1178 of SEQ ID NO: 315610
ugguuucucugacaauaga

SEQ ID NO: 411126 - RNA, 19 nt, Artificial Sequence
  Description of Artificial Sequence: Synthetic oligonucleotide
  Antisense Strand to SEQ ID NO: 411125
ucuauugucagagaaacca

SEQ ID NO: 411127 - RNA, 19 nt, Artificial Sequence
  Description of Artificial Sequence: Synthetic oligonucleotide
  Sense Strand Starting at position 1178 of SEQ ID NO: 315786
gugguauauuaagagauuu

SEQ ID NO: 411128 - RNA, 19 nt, Artificial Sequence
  Description of Artificial Sequence: Synthetic oligonucleotide
  Antisense Strand to SEQ ID NO: 411127
aaaucucuuaauauaccac

SEQ ID NO: 411129 - RNA, 19 nt, Artificial Sequence
  Description of Artificial Sequence: Synthetic oligonucleotide
  Sense Strand Starting at position 1178 of SEQ ID NO: 315832
cuauaagaagcaugcaguu

SEQ ID NO: 411130 - RNA, 19 nt, Artificial Sequence
  Description of Artificial Sequence: Synthetic oligonucleotide
  Antisense Strand to SEQ ID NO: 411129
aacugcaugcuucuuauag

SEQ ID NO: 411131 - RNA, 19 nt, Artificial Sequence
  Description of Artificial Sequence: Synthetic oligonucleotide
  Sense Strand Starting at position 1178 of SEQ ID NO: 316019
acgugaagacgucgaggau

SEQ ID NO: 411132 - RNA, 19 nt, Artificial Sequence
  Description of Artificial Sequence: Synthetic oligonucleotide
  Antisense Strand to SEQ ID NO: 411131
auccucgacgucuucacgu

SEQ ID NO: 411133 - RNA, 19 nt, Artificial Sequence
  Description of Artificial Sequence: Synthetic oligonucleotide
  Sense Strand Starting at position 1178 of SEQ ID NO: 316022
ugaagacgucgaggaugaa

SEQ ID NO: 411134 - RNA, 19 nt, Artificial Sequence
  Description of Artificial Sequence: Synthetic oligonucleotide
  Antisense Strand to SEQ ID NO: 411133
uucauccucgacgucuuca

SEQ ID NO: 411135 - RNA, 19 nt, Artificial Sequence
  Description of Artificial Sequence: Synthetic oligonucleotide
  Sense Strand Starting at position 1178 of SEQ ID NO: 316223
gcuucuagucaauaauaag

SEQ ID NO: 411136 - RNA, 19 nt, Artificial Sequence
  Description of Artificial Sequence: Synthetic oligonucleotide
  Antisense Strand to SEQ ID NO: 411135
cuuauuauugacuagaagc

SEQ ID NO: 411137 - RNA, 19 nt, Artificial Sequence
  Description of Artificial Sequence: Synthetic oligonucleotide
  Sense Strand Starting at position 1178 of SEQ ID NO: 316317
ccuugcauuggucaaaggu

SEQ ID NO: 411138 - RNA, 19 nt, Artificial Sequence
  Description of Artificial Sequence: Synthetic oligonucleotide
  Antisense Strand to SEQ ID NO: 411137
accuuugaccaaugcaagg

SEQ ID NO: 411139 - RNA, 19 nt, Artificial Sequence
  Description of Artificial Sequence: Synthetic oligonucleotide
  Sense Strand Starting at position 1178 of SEQ ID NO: 316396
gggcaaguaucucaaacua

SEQ ID NO: 411140 - RNA, 19 nt, Artificial Sequence
  Description of Artificial Sequence: Synthetic oligonucleotide
  Antisense Strand to SEQ ID NO: 411139
uaguuugagauacuugccc

SEQ ID NO: 411141 - RNA, 19 nt, Artificial Sequence
  Description of Artificial Sequence: Synthetic oligonucleotide
  Sense Strand Starting at position 1178 of SEQ ID NO: 316551
gaagcaaaugggugaguuu

SEQ ID NO: 411142 - RNA, 19 nt, Artificial Sequence
  Description of Artificial Sequence: Synthetic oligonucleotide
  Antisense Strand to SEQ ID NO: 411141
aaacucacccauuugcuuc

SEQ ID NO: 411143 - RNA, 19 nt, Artificial Sequence
  Description of Artificial Sequence: Synthetic oligonucleotide
  Sense Strand Starting at position 1178 of SEQ ID NO: 316554
gcaaaugggugaguuugua

SEQ ID NO: 411144 - RNA, 19 nt, Artificial Sequence
  Description of Artificial Sequence: Synthetic oligonucleotide
  Antisense Strand to SEQ ID NO: 411143
uacaaacucacccauuugc

SEQ ID NO: 411145 - RNA, 19 nt, Artificial Sequence
  Description of Artificial Sequence: Synthetic oligonucleotide
  Sense Strand Starting at position 1178 of SEQ ID NO: 316951
gcgauaaauggcuguaacu

SEQ ID NO: 411146 - RNA, 19 nt, Artificial Sequence
  Description of Artificial Sequence: Synthetic oligonucleotide
  Antisense Strand to SEQ ID NO: 411145
aguuacagccauuuaucgc

SEQ ID NO: 411147 - RNA, 19 nt, Artificial Sequence
  Description of Artificial Sequence: Synthetic oligonucleotide
  Sense Strand Starting at position 1178 of SEQ ID NO: 316961
gcuguaacugggugucuua

SEQ ID NO: 411148 - RNA, 19 nt, Artificial Sequence
  Description of Artificial Sequence: Synthetic oligonucleotide
  Antisense Strand to SEQ ID NO: 411147
uaagacacccaguuacagc

SEQ ID NO: 411149 - RNA, 19 nt, Artificial Sequence
  Description of Artificial Sequence: Synthetic oligonucleotide
  Sense Strand Starting at position 1178 of SEQ ID NO: 317158
gaggguuuauucucugcuu

SEQ ID NO: 411150 - RNA, 19 nt, Artificial Sequence
  Description of Artificial Sequence: Synthetic oligonucleotide
  Antisense Strand to SEQ ID NO: 411149
aagcagagaauaaacccuc

SEQ ID NO: 411151 - RNA, 19 nt, Artificial Sequence
  Description of Artificial Sequence: Synthetic oligonucleotide
  Sense Strand Starting at position 1178 of SEQ ID NO: 317195
guugcauccuaauagcaga

SEQ ID NO: 411152 - RNA, 19 nt, Artificial Sequence
  Description of Artificial Sequence: Synthetic oligonucleotide
  Antisense Strand to SEQ ID NO: 411151
ucugcuauuaggaugcaac

SEQ ID NO: 411153 - RNA, 19 nt, Artificial Sequence
  Description of Artificial Sequence: Synthetic oligonucleotide
  Sense Strand Starting at position 1178 of SEQ ID NO: 317444
uuccaauagucucacaagu

SEQ ID NO: 411154 - RNA, 19 nt, Artificial Sequence
  Description of Artificial Sequence: Synthetic oligonucleotide
  Antisense Strand to SEQ ID NO: 411153
acuugugagacuauuggaa

SEQ ID NO: 411155 - RNA, 19 nt, Artificial Sequence
  Description of Artificial Sequence: Synthetic oligonucleotide
  Sense Strand Starting at position 1178 of SEQ ID NO: 317446
ccaauagucucacaagucu

SEQ ID NO: 411156 - RNA, 19 nt, Artificial Sequence
  Description of Artificial Sequence: Synthetic oligonucleotide
  Antisense Strand to SEQ ID NO: 411155
agacuugugagacuauugg

SEQ ID NO: 411157 - RNA, 19 nt, Artificial Sequence
  Description of Artificial Sequence: Synthetic oligonucleotide
  Sense Strand Starting at position 1178 of SEQ ID NO: 317491
guaagacucaaaggugcaa

SEQ ID NO: 411158 - RNA, 19 nt, Artificial Sequence
  Description of Artificial Sequence: Synthetic oligonucleotide
  Antisense Strand to SEQ ID NO: 411157
uugcaccuuugagucuuac

SEQ ID NO: 411159 - RNA, 19 nt, Artificial Sequence
  Description of Artificial Sequence: Synthetic oligonucleotide
  Sense Strand Starting at position 1178 of SEQ ID NO: 317697
ucagaauaaucuucgacuu

SEQ ID NO: 411160 - RNA, 19 nt, Artificial Sequence
  Description of Artificial Sequence: Synthetic oligonucleotide
  Antisense Strand to SEQ ID NO: 411159
aagucgaagauuauucuga

SEQ ID NO: 411161 - RNA, 19 nt, Artificial Sequence
  Description of Artificial Sequence: Synthetic oligonucleotide
  Sense Strand Starting at position 1178 of SEQ ID NO: 317814
guucuccuggguuagaguu

SEQ ID NO: 411162 - RNA, 19 nt, Artificial Sequence
  Description of Artificial Sequence: Synthetic oligonucleotide
  Antisense Strand to SEQ ID NO: 411161
aacucuaacccaggagaac

SEQ ID NO: 411163 - RNA, 19 nt, Artificial Sequence
  Description of Artificial Sequence: Synthetic oligonucleotide
  Sense Strand Starting at position 1178 of SEQ ID NO: 317821
uggguuagaguuugagucu

SEQ ID NO: 411164 - RNA, 19 nt, Artificial Sequence
  Description of Artificial Sequence: Synthetic oligonucleotide
  Antisense Strand to SEQ ID NO: 411163
agacucaaacucuaaccca

SEQ ID NO: 411165 - RNA, 19 nt, Artificial Sequence
  Description of Artificial Sequence: Synthetic oligonucleotide
  Sense Strand Starting at position 1178 of SEQ ID NO: 317822
ggguuagaguuugagucuu

SEQ ID NO: 411166 - RNA, 19 nt, Artificial Sequence
  Description of Artificial Sequence: Synthetic oligonucleotide
  Antisense Strand to SEQ ID NO: 411165
aagacucaaacucuaaccc

SEQ ID NO: 411167 - RNA, 19 nt, Artificial Sequence
  Description of Artificial Sequence: Synthetic oligonucleotide
  Sense Strand Starting at position 1178 of SEQ ID NO: 317824
guuagaguuugagucuucu

SEQ ID NO: 411168 - RNA, 19 nt, Artificial Sequence
  Description of Artificial Sequence: Synthetic oligonucleotide
  Antisense Strand to SEQ ID NO: 411167
agaagacucaaacucuaac

SEQ ID NO: 411169 - RNA, 19 nt, Artificial Sequence
  Description of Artificial Sequence: Synthetic oligonucleotide
  Sense Strand Starting at position 1178 of SEQ ID NO: 317964
gccucaccucuguagcaau

SEQ ID NO: 411170 - RNA, 19 nt, Artificial Sequence
  Description of Artificial Sequence: Synthetic oligonucleotide
  Antisense Strand to SEQ ID NO: 411169
auugcuacagaggugaggc

SEQ ID NO: 411171 - RNA, 19 nt, Artificial Sequence
  Description of Artificial Sequence: Synthetic oligonucleotide
  Sense Strand Starting at position 1178 of SEQ ID NO: 317978
gcaauucucugccaggauc

SEQ ID NO: 411172 - RNA, 19 nt, Artificial Sequence
  Description of Artificial Sequence: Synthetic oligonucleotide
  Antisense Strand to SEQ ID NO: 411171
gauccuggcagagaauugc

SEQ ID NO: 411173 - RNA, 19 nt, Artificial Sequence
  Description of Artificial Sequence: Synthetic oligonucleotide
  Sense Strand Starting at position 1178 of SEQ ID NO: 318226
agggauugccaggguuuca

SEQ ID NO: 411174 - RNA, 19 nt, Artificial Sequence
  Description of Artificial Sequence: Synthetic oligonucleotide
  Antisense Strand to SEQ ID NO: 411173
ugaaacccuggcaaucccu

SEQ ID NO: 411175 - RNA, 19 nt, Artificial Sequence
  Description of Artificial Sequence: Synthetic oligonucleotide
  Sense Strand Starting at position 1178 of SEQ ID NO: 318322
accgguaaucacugaaaug

SEQ ID NO: 411176 - RNA, 19 nt, Artificial Sequence
  Description of Artificial Sequence: Synthetic oligonucleotide
  Antisense Strand to SEQ ID NO: 411175
cauuucagugauuaccggu

SEQ ID NO: 411177 - RNA, 19 nt, Artificial Sequence
  Description of Artificial Sequence: Synthetic oligonucleotide
  Sense Strand Starting at position 1178 of SEQ ID NO: 318332
acugaaaugcuauggguuu

SEQ ID NO: 411178 - RNA, 19 nt, Artificial Sequence
  Description of Artificial Sequence: Synthetic oligonucleotide
  Antisense Strand to SEQ ID NO: 411177
aaacccauagcauuucagu

SEQ ID NO: 411179 - RNA, 19 nt, Artificial Sequence
  Description of Artificial Sequence: Synthetic oligonucleotide
  Sense Strand Starting at position 1178 of SEQ ID NO: 318333
cugaaaugcuauggguuua

SEQ ID NO: 411180 - RNA, 19 nt, Artificial Sequence
  Description of Artificial Sequence: Synthetic oligonucleotide
  Antisense Strand to SEQ ID NO: 411179
uaaacccauagcauuucag

SEQ ID NO: 411181 - RNA, 19 nt, Artificial Sequence
  Description of Artificial Sequence: Synthetic oligonucleotide
  Sense Strand Starting at position 1178 of SEQ ID NO: 318334
ugaaaugcuauggguuuau

SEQ ID NO: 411182 - RNA, 19 nt, Artificial Sequence
  Description of Artificial Sequence: Synthetic oligonucleotide
  Antisense Strand to SEQ ID NO: 411181
auaaacccauagcauuuca

SEQ ID NO: 411183 - RNA, 19 nt, Artificial Sequence
  Description of Artificial Sequence: Synthetic oligonucleotide
  Sense Strand Starting at position 1178 of SEQ ID NO: 318343
auggguuuauucuuccauu

SEQ ID NO: 411184 - RNA, 19 nt, Artificial Sequence
  Description of Artificial Sequence: Synthetic oligonucleotide
  Antisense Strand to SEQ ID NO: 411183
aauggaagaauaaacccau

SEQ ID NO: 411185 - RNA, 19 nt, Artificial Sequence
  Description of Artificial Sequence: Synthetic oligonucleotide
  Sense Strand Starting at position 1178 of SEQ ID NO: 318344
uggguuuauucuuccauug

SEQ ID NO: 411186 - RNA, 19 nt, Artificial Sequence
  Description of Artificial Sequence: Synthetic oligonucleotide
  Antisense Strand to SEQ ID NO: 411185
caauggaagaauaaaccca

SEQ ID NO: 411187 - RNA, 19 nt, Artificial Sequence
  Description of Artificial Sequence: Synthetic oligonucleotide
  Sense Strand Starting at position 1178 of SEQ ID NO: 318346
gguuuauucuuccauuguu

SEQ ID NO: 411188 - RNA, 19 nt, Artificial Sequence
  Description of Artificial Sequence: Synthetic oligonucleotide
  Antisense Strand to SEQ ID NO: 411187
aacaauggaagaauaaacc

SEQ ID NO: 411189 - RNA, 19 nt, Artificial Sequence
  Description of Artificial Sequence: Synthetic oligonucleotide
  Sense Strand Starting at position 1178 of SEQ ID NO: 318602
agagauuucuuugaccaaa

SEQ ID NO: 411190 - RNA, 19 nt, Artificial Sequence
  Description of Artificial Sequence: Synthetic oligonucleotide
  Antisense Strand to SEQ ID NO: 411189
uuuggucaaagaaaucucu

SEQ ID NO: 411191 - RNA, 19 nt, Artificial Sequence
  Description of Artificial Sequence: Synthetic oligonucleotide
  Sense Strand Starting at position 1178 of SEQ ID NO: 318683
agugaagucccuugccacu

SEQ ID NO: 411192 - RNA, 19 nt, Artificial Sequence
  Description of Artificial Sequence: Synthetic oligonucleotide
  Antisense Strand to SEQ ID NO: 411191
aguggcaagggacuucacu

SEQ ID NO: 411193 - RNA, 19 nt, Artificial Sequence
  Description of Artificial Sequence: Synthetic oligonucleotide
  Sense Strand Starting at position 1178 of SEQ ID NO: 318707
gguuguuguuuaguucuuu

SEQ ID NO: 411194 - RNA, 19 nt, Artificial Sequence
  Description of Artificial Sequence: Synthetic oligonucleotide
  Antisense Strand to SEQ ID NO: 411193
aaagaacuaaacaacaacc

SEQ ID NO: 411195 - RNA, 19 nt, Artificial Sequence
  Description of Artificial Sequence: Synthetic oligonucleotide
  Sense Strand Starting at position 1178 of SEQ ID NO: 318933
cccagauucgagugaucuu

SEQ ID NO: 411196 - RNA, 19 nt, Artificial Sequence
  Description of Artificial Sequence: Synthetic oligonucleotide
  Antisense Strand to SEQ ID NO: 411195
aagaucacucgaaucuggg

SEQ ID NO: 411197 - RNA, 19 nt, Artificial Sequence
  Description of Artificial Sequence: Synthetic oligonucleotide
  Sense Strand Starting at position 1178 of SEQ ID NO: 318934
ccagauucgagugaucuuc

SEQ ID NO: 411198 - RNA, 19 nt, Artificial Sequence
  Description of Artificial Sequence: Synthetic oligonucleotide
  Antisense Strand to SEQ ID NO: 411197
gaagaucacucgaaucugg

SEQ ID NO: 411199 - RNA, 19 nt, Artificial Sequence
  Description of Artificial Sequence: Synthetic oligonucleotide
  Sense Strand Starting at position 1179 of SEQ ID NO: 315619
guaccuacugucuagugau

SEQ ID NO: 411200 - RNA, 19 nt, Artificial Sequence
  Description of Artificial Sequence: Synthetic oligonucleotide
  Antisense Strand to SEQ ID NO: 411199
aucacuagacaguagguac

SEQ ID NO: 411201 - RNA, 19 nt, Artificial Sequence
  Description of Artificial Sequence: Synthetic oligonucleotide
  Sense Strand Starting at position 1179 of SEQ ID NO: 315804
aaauauuggguauguuacu

SEQ ID NO: 411202 - RNA, 19 nt, Artificial Sequence
  Description of Artificial Sequence: Synthetic oligonucleotide
  Antisense Strand to SEQ ID NO: 411201
aguaacauacccaauauuu

SEQ ID NO: 411203 - RNA, 19 nt, Artificial Sequence
  Description of Artificial Sequence: Synthetic oligonucleotide
  Sense Strand Starting at position 1179 of SEQ ID NO: 315977
gaagaaacaucuguugcuu

SEQ ID NO: 411204 - RNA, 19 nt, Artificial Sequence
  Description of Artificial Sequence: Synthetic oligonucleotide
  Antisense Strand to SEQ ID NO: 411203
aagcaacagauguuucuuc

SEQ ID NO: 411205 - RNA, 19 nt, Artificial Sequence
  Description of Artificial Sequence: Synthetic oligonucleotide
  Sense Strand Starting at position 1179 of SEQ ID NO: 316009
gggcuuuccuaacugaaag

SEQ ID NO: 411206 - RNA, 19 nt, Artificial Sequence
  Description of Artificial Sequence: Synthetic oligonucleotide
  Antisense Strand to SEQ ID NO: 411205
cuuucaguuaggaaagccc

SEQ ID NO: 411207 - RNA, 19 nt, Artificial Sequence
  Description of Artificial Sequence: Synthetic oligonucleotide
  Sense Strand Starting at position 1179 of SEQ ID NO: 316233
auaagacgugucuaauaga

SEQ ID NO: 411208 - RNA, 19 nt, Artificial Sequence
  Description of Artificial Sequence: Synthetic oligonucleotide
  Antisense Strand to SEQ ID NO: 411207
ucuauuagacacgucuuau

SEQ ID NO: 411209 - RNA, 19 nt, Artificial Sequence
  Description of Artificial Sequence: Synthetic oligonucleotide
  Sense Strand Starting at position 1179 of SEQ ID NO: 316241
ugucuaauagaauauacgu

SEQ ID NO: 411210 - RNA, 19 nt, Artificial Sequence
  Description of Artificial Sequence: Synthetic oligonucleotide
  Antisense Strand to SEQ ID NO: 411209
acguauauucuauuagaca

SEQ ID NO: 411211 - RNA, 19 nt, Artificial Sequence
  Description of Artificial Sequence: Synthetic oligonucleotide
  Sense Strand Starting at position 1179 of SEQ ID NO: 316248
uagaauauacguuguaacu

SEQ ID NO: 411212 - RNA, 19 nt, Artificial Sequence
  Description of Artificial Sequence: Synthetic oligonucleotide
  Antisense Strand to SEQ ID NO: 411211
aguuacaacguauauucua

SEQ ID NO: 411213 - RNA, 19 nt, Artificial Sequence
  Description of Artificial Sequence: Synthetic oligonucleotide
  Sense Strand Starting at position 1179 of SEQ ID NO: 316539
gcaaacaaugccuaagcuu

SEQ ID NO: 411214 - RNA, 19 nt, Artificial Sequence
  Description of Artificial Sequence: Synthetic oligonucleotide
  Antisense Strand to SEQ ID NO: 411213
aagcuuaggcauuguuugc

SEQ ID NO: 411215 - RNA, 19 nt, Artificial Sequence
  Description of Artificial Sequence: Synthetic oligonucleotide
  Sense Strand Starting at position 1179 of SEQ ID NO: 316665
cagguugauuuccaaggau

SEQ ID NO: 411216 - RNA, 19 nt, Artificial Sequence
  Description of Artificial Sequence: Synthetic oligonucleotide
  Antisense Strand to SEQ ID NO: 411215
auccuuggaaaucaaccug

SEQ ID NO: 411217 - RNA, 19 nt, Artificial Sequence
  Description of Artificial Sequence: Synthetic oligonucleotide
  Sense Strand Starting at position 1179 of SEQ ID NO: 316871
gcuuuaguuccugaauuaa

SEQ ID NO: 411218 - RNA, 19 nt, Artificial Sequence
  Description of Artificial Sequence: Synthetic oligonucleotide
  Antisense Strand to SEQ ID NO: 411217
uuaauucaggaacuaaagc

SEQ ID NO: 411219 - RNA, 19 nt, Artificial Sequence
  Description of Artificial Sequence: Synthetic oligonucleotide
  Sense Strand Starting at position 1179 of SEQ ID NO: 317043
cgugcuccuggcuauuuau

SEQ ID NO: 411220 - RNA, 19 nt, Artificial Sequence
  Description of Artificial Sequence: Synthetic oligonucleotide
  Antisense Strand to SEQ ID NO: 411219
auaaauagccaggagcacg

SEQ ID NO: 411221 - RNA, 19 nt, Artificial Sequence
  Description of Artificial Sequence: Synthetic oligonucleotide
  Sense Strand Starting at position 1179 of SEQ ID NO: 317046
gcuccuggcuauuuaucaa

SEQ ID NO: 411222 - RNA, 19 nt, Artificial Sequence
  Description of Artificial Sequence: Synthetic oligonucleotide
  Antisense Strand to SEQ ID NO: 411221
uugauaaauagccaggagc

SEQ ID NO: 411223 - RNA, 19 nt, Artificial Sequence
  Description of Artificial Sequence: Synthetic oligonucleotide
  Sense Strand Starting at position 1179 of SEQ ID NO: 317071
auugcugcugcuuaaagaa

SEQ ID NO: 411224 - RNA, 19 nt, Artificial Sequence
  Description of Artificial Sequence: Synthetic oligonucleotide
  Antisense Strand to SEQ ID NO: 411223
uucuuuaagcagcagcaau

SEQ ID NO: 411225 - RNA, 19 nt, Artificial Sequence
  Description of Artificial Sequence: Synthetic oligonucleotide
  Sense Strand Starting at position 1179 of SEQ ID NO: 317218
gaaacuugagacuguguca

SEQ ID NO: 411226 - RNA, 19 nt, Artificial Sequence
  Description of Artificial Sequence: Synthetic oligonucleotide
  Antisense Strand to SEQ ID NO: 411225
ugacacagucucaaguuuc

SEQ ID NO: 411227 - RNA, 19 nt, Artificial Sequence
  Description of Artificial Sequence: Synthetic oligonucleotide
  Sense Strand Starting at position 1179 of SEQ ID NO: 317599
agauuaaacuuacucguga

SEQ ID NO: 411228 - RNA, 19 nt, Artificial Sequence
  Description of Artificial Sequence: Synthetic oligonucleotide
  Antisense Strand to SEQ ID NO: 411227
ucacgaguaaguuuaaucu

SEQ ID NO: 411229 - RNA, 19 nt, Artificial Sequence
  Description of Artificial Sequence: Synthetic oligonucleotide
  Sense Strand Starting at position 1179 of SEQ ID NO: 317600
gauuaaacuuacucgugaa

SEQ ID NO: 411230 - RNA, 19 nt, Artificial Sequence
  Description of Artificial Sequence: Synthetic oligonucleotide
  Antisense Strand to SEQ ID NO: 411229
uucacgaguaaguuuaauc

SEQ ID NO: 411231 - RNA, 19 nt, Artificial Sequence
  Description of Artificial Sequence: Synthetic oligonucleotide
  Sense Strand Starting at position 1179 of SEQ ID NO: 317612
ucgugaaaccugcauaauu

SEQ ID NO: 411232 - RNA, 19 nt, Artificial Sequence
  Description of Artificial Sequence: Synthetic oligonucleotide
  Antisense Strand to SEQ ID NO: 411231
aauuaugcagguuucacga

SEQ ID NO: 411233 - RNA, 19 nt, Artificial Sequence
  Description of Artificial Sequence: Synthetic oligonucleotide
  Sense Strand Starting at position 1179 of SEQ ID NO: 317783
guaauaacuguccagcucu

SEQ ID NO: 411234 - RNA, 19 nt, Artificial Sequence
  Description of Artificial Sequence: Synthetic oligonucleotide
  Antisense Strand to SEQ ID NO: 411233
agagcuggacaguuauuac

SEQ ID NO: 411235 - RNA, 19 nt, Artificial Sequence
  Description of Artificial Sequence: Synthetic oligonucleotide
  Sense Strand Starting at position 1179 of SEQ ID NO: 317794
ccagcucuugugggaggaa

SEQ ID NO: 411236 - RNA, 19 nt, Artificial Sequence
  Description of Artificial Sequence: Synthetic oligonucleotide
  Antisense Strand to SEQ ID NO: 411235
uuccucccacaagagcugg

SEQ ID NO: 411237 - RNA, 19 nt, Artificial Sequence
  Description of Artificial Sequence: Synthetic oligonucleotide
  Sense Strand Starting at position 1179 of SEQ ID NO: 317835
gagauaggaggcuaugcuu

SEQ ID NO: 411238 - RNA, 19 nt, Artificial Sequence
  Description of Artificial Sequence: Synthetic oligonucleotide
  Antisense Strand to SEQ ID NO: 411237
aagcauagccuccuaucuc

SEQ ID NO: 411239 - RNA, 19 nt, Artificial Sequence
  Description of Artificial Sequence: Synthetic oligonucleotide
  Sense Strand Starting at position 1179 of SEQ ID NO: 317968
ccuuuauagcuaggguuaa

SEQ ID NO: 411240 - RNA, 19 nt, Artificial Sequence
  Description of Artificial Sequence: Synthetic oligonucleotide
  Antisense Strand to SEQ ID NO: 411239
uuaacccuagcuauaaagg

SEQ ID NO: 411241 - RNA, 19 nt, Artificial Sequence
  Description of Artificial Sequence: Synthetic oligonucleotide
  Sense Strand Starting at position 1179 of SEQ ID NO: 318358
gcugaauacuuauuaugag

SEQ ID NO: 411242 - RNA, 19 nt, Artificial Sequence
  Description of Artificial Sequence: Synthetic oligonucleotide
  Antisense Strand to SEQ ID NO: 411241
cucauaauaaguauucagc

SEQ ID NO: 411243 - RNA, 19 nt, Artificial Sequence
  Description of Artificial Sequence: Synthetic oligonucleotide
  Sense Strand Starting at position 1179 of SEQ ID NO: 318403
uacaguagugaaugcaaca

SEQ ID NO: 411244 - RNA, 19 nt, Artificial Sequence
  Description of Artificial Sequence: Synthetic oligonucleotide
  Antisense Strand to SEQ ID NO: 411243
uguugcauucacuacugua

SEQ ID NO: 411245 - RNA, 19 nt, Artificial Sequence
  Description of Artificial Sequence: Synthetic oligonucleotide
  Sense Strand Starting at position 1179 of SEQ ID NO: 318447
gucuuucgugagcuuaguu

SEQ ID NO: 411246 - RNA, 19 nt, Artificial Sequence
  Description of Artificial Sequence: Synthetic oligonucleotide
  Antisense Strand to SEQ ID NO: 411245
aacuaagcucacgaaagac

SEQ ID NO: 411247 - RNA, 19 nt, Artificial Sequence
  Description of Artificial Sequence: Synthetic oligonucleotide
  Sense Strand Starting at position 1179 of SEQ ID NO: 318448
ucuuucgugagcuuaguuu

SEQ ID NO: 411248 - RNA, 19 nt, Artificial Sequence
  Description of Artificial Sequence: Synthetic oligonucleotide
  Antisense Strand to SEQ ID NO: 411247
aaacuaagcucacgaaaga

SEQ ID NO: 411249 - RNA, 19 nt, Artificial Sequence
  Description of Artificial Sequence: Synthetic oligonucleotide
  Sense Strand Starting at position 1179 of SEQ ID NO: 318452
ucgugagcuuaguuuauuu

SEQ ID NO: 411250 - RNA, 19 nt, Artificial Sequence
  Description of Artificial Sequence: Synthetic oligonucleotide
  Antisense Strand to SEQ ID NO: 411249
aaauaaacuaagcucacga

SEQ ID NO: 411251 - RNA, 19 nt, Artificial Sequence
  Description of Artificial Sequence: Synthetic oligonucleotide
  Sense Strand Starting at position 1179 of SEQ ID NO: 318521
guugacuaguuaucaccua

SEQ ID NO: 411252 - RNA, 19 nt, Artificial Sequence
  Description of Artificial Sequence: Synthetic oligonucleotide
  Antisense Strand to SEQ ID NO: 411251
uaggugauaacuagucaac

SEQ ID NO: 411253 - RNA, 19 nt, Artificial Sequence
  Description of Artificial Sequence: Synthetic oligonucleotide
  Sense Strand Starting at position 1179 of SEQ ID NO: 318555
cuuggaaaguaugucuuga

SEQ ID NO: 411254 - RNA, 19 nt, Artificial Sequence
  Description of Artificial Sequence: Synthetic oligonucleotide
  Antisense Strand to SEQ ID NO: 411253
ucaagacauacuuuccaag

SEQ ID NO: 411255 - RNA, 19 nt, Artificial Sequence
  Description of Artificial Sequence: Synthetic oligonucleotide
  Sense Strand Starting at position 1179 of SEQ ID NO: 318557
uggaaaguaugucuugaca

SEQ ID NO: 411256 - RNA, 19 nt, Artificial Sequence
  Description of Artificial Sequence: Synthetic oligonucleotide
  Antisense Strand to SEQ ID NO: 411255
ugucaagacauacuuucca

SEQ ID NO: 411257 - RNA, 19 nt, Artificial Sequence
  Description of Artificial Sequence: Synthetic oligonucleotide
  Sense Strand Starting at position 1179 of SEQ ID NO: 318644
gugucuguuagacacucaa

SEQ ID NO: 411258 - RNA, 19 nt, Artificial Sequence
  Description of Artificial Sequence: Synthetic oligonucleotide
  Antisense Strand to SEQ ID NO: 411257
uugagugucuaacagacac

SEQ ID NO: 411259 - RNA, 19 nt, Artificial Sequence
  Description of Artificial Sequence: Synthetic oligonucleotide
  Sense Strand Starting at position 1179 of SEQ ID NO: 318780
uaaauuaaacuggguugua

SEQ ID NO: 411260 - RNA, 19 nt, Artificial Sequence
  Description of Artificial Sequence: Synthetic oligonucleotide
  Antisense Strand to SEQ ID NO: 411259
uacaacccaguuuaauuua

SEQ ID NO: 411261 - RNA, 19 nt, Artificial Sequence
  Description of Artificial Sequence: Synthetic oligonucleotide
  Sense Strand Starting at position 1179 of SEQ ID NO: 318781
aaauuaaacuggguuguaa

SEQ ID NO: 411262 - RNA, 19 nt, Artificial Sequence
  Description of Artificial Sequence: Synthetic oligonucleotide
  Antisense Strand to SEQ ID NO: 411261
uuacaacccaguuuaauuu

SEQ ID NO: 411263 - RNA, 19 nt, Artificial Sequence
  Description of Artificial Sequence: Synthetic oligonucleotide
  Sense Strand Starting at position 1179 of SEQ ID NO: 318783
auuaaacuggguuguaaac

SEQ ID NO: 411264 - RNA, 19 nt, Artificial Sequence
  Description of Artificial Sequence: Synthetic oligonucleotide
  Antisense Strand to SEQ ID NO: 411263
guuuacaacccaguuuaau

SEQ ID NO: 411265 - RNA, 19 nt, Artificial Sequence
  Description of Artificial Sequence: Synthetic oligonucleotide
  Sense Strand Starting at position 1179 of SEQ ID NO: 318798
aaacacguguuaguauaaa

SEQ ID NO: 411266 - RNA, 19 nt, Artificial Sequence
  Description of Artificial Sequence: Synthetic oligonucleotide
  Antisense Strand to SEQ ID NO: 411265
uuuauacuaacacguguuu

SEQ ID NO: 411267 - RNA, 19 nt, Artificial Sequence
  Description of Artificial Sequence: Synthetic oligonucleotide
  Sense Strand Starting at position 1179 of SEQ ID NO: 318890
augugaggucaguauaaua

SEQ ID NO: 411268 - RNA, 19 nt, Artificial Sequence
  Description of Artificial Sequence: Synthetic oligonucleotide
  Antisense Strand to SEQ ID NO: 411267
uauuauacugaccucacau

SEQ ID NO: 411269 - RNA, 19 nt, Artificial Sequence
  Description of Artificial Sequence: Synthetic oligonucleotide
  Sense Strand Starting at position 1179 of SEQ ID NO: 318898
ucaguauaauaucugagua

SEQ ID NO: 411270 - RNA, 19 nt, Artificial Sequence
  Description of Artificial Sequence: Synthetic oligonucleotide
  Antisense Strand to SEQ ID NO: 411269
uacucagauauuauacuga

SEQ ID NO: 411271 - RNA, 19 nt, Artificial Sequence
  Description of Artificial Sequence: Synthetic oligonucleotide
  Sense Strand Starting at position 1179 of SEQ ID NO: 319012
aucugaucaguuugguaua

SEQ ID NO: 411272 - RNA, 19 nt, Artificial Sequence
  Description of Artificial Sequence: Synthetic oligonucleotide
  Antisense Strand to SEQ ID NO: 411271
uauaccaaacugaucagau

SEQ ID NO: 411273 - RNA, 19 nt, Artificial Sequence
  Description of Artificial Sequence: Synthetic oligonucleotide
  Sense Strand Starting at position 1179 of SEQ ID NO: 319014
cugaucaguuugguauauu

SEQ ID NO: 411274 - RNA, 19 nt, Artificial Sequence
  Description of Artificial Sequence: Synthetic oligonucleotide
  Antisense Strand to SEQ ID NO: 411273
aauauaccaaacugaucag

SEQ ID NO: 411275 - RNA, 19 nt, Artificial Sequence
  Description of Artificial Sequence: Synthetic oligonucleotide
  Sense Strand Starting at position 1179 of SEQ ID NO: 319127
agaugacgcuucuuacaga

SEQ ID NO: 411276 - RNA, 19 nt, Artificial Sequence
  Description of Artificial Sequence: Synthetic oligonucleotide
  Antisense Strand to SEQ ID NO: 411275
ucuguaagaagcgucaucu

SEQ ID NO: 411277 - RNA, 19 nt, Artificial Sequence
  Description of Artificial Sequence: Synthetic oligonucleotide
  Sense Strand Starting at position 1179 of SEQ ID NO: 319168
ccugucagaucagcuagaa

SEQ ID NO: 411278 - RNA, 19 nt, Artificial Sequence
  Description of Artificial Sequence: Synthetic oligonucleotide
  Antisense Strand to SEQ ID NO: 411277
uucuagcugaucugacagg

SEQ ID NO: 411279 - RNA, 19 nt, Artificial Sequence
  Description of Artificial Sequence: Synthetic oligonucleotide
  Sense Strand Starting at position 1180 of SEQ ID NO: 315438
uuucuaucugccguguuua

SEQ ID NO: 411280 - RNA, 19 nt, Artificial Sequence
  Description of Artificial Sequence: Synthetic oligonucleotide
  Antisense Strand to SEQ ID NO: 411279
uaaacacggcagauagaaa

SEQ ID NO: 411281 - RNA, 19 nt, Artificial Sequence
  Description of Artificial Sequence: Synthetic oligonucleotide
  Sense Strand Starting at position 1180 of SEQ ID NO: 315585
aaaguaagugugcaacaaa

SEQ ID NO: 411282 - RNA, 19 nt, Artificial Sequence
  Description of Artificial Sequence: Synthetic oligonucleotide
  Antisense Strand to SEQ ID NO: 411281
uuuguugcacacuuacuuu

SEQ ID NO: 411283 - RNA, 19 nt, Artificial Sequence
  Description of Artificial Sequence: Synthetic oligonucleotide
  Sense Strand Starting at position 1180 of SEQ ID NO: 315676
caaaguagagacugguauu

SEQ ID NO: 411284 - RNA, 19 nt, Artificial Sequence
  Description of Artificial Sequence: Synthetic oligonucleotide
  Antisense Strand to SEQ ID NO: 411283
aauaccagucucuacuuug

SEQ ID NO: 411285 - RNA, 19 nt, Artificial Sequence
  Description of Artificial Sequence: Synthetic oligonucleotide
  Sense Strand Starting at position 1180 of SEQ ID NO: 315830
uucucagcacugggaauaa

SEQ ID NO: 411286 - RNA, 19 nt, Artificial Sequence
  Description of Artificial Sequence: Synthetic oligonucleotide
  Antisense Strand to SEQ ID NO: 411285
uuauucccagugcugagaa

SEQ ID NO: 411287 - RNA, 19 nt, Artificial Sequence
  Description of Artificial Sequence: Synthetic oligonucleotide
  Sense Strand Starting at position 1180 of SEQ ID NO: 315936
aggguaagacccugcucaa

SEQ ID NO: 411288 - RNA, 19 nt, Artificial Sequence
  Description of Artificial Sequence: Synthetic oligonucleotide
  Antisense Strand to SEQ ID NO: 411287
uugagcagggucuuacccu

SEQ ID NO: 411289 - RNA, 19 nt, Artificial Sequence
  Description of Artificial Sequence: Synthetic oligonucleotide
  Sense Strand Starting at position 1180 of SEQ ID NO: 316080
gcagcaagacgguaaagau

SEQ ID NO: 411290 - RNA, 19 nt, Artificial Sequence
  Description of Artificial Sequence: Synthetic oligonucleotide
  Antisense Strand to SEQ ID NO: 411289
aucuuuaccgucuugcugc

SEQ ID NO: 411291 - RNA, 19 nt, Artificial Sequence
  Description of Artificial Sequence: Synthetic oligonucleotide
  Sense Strand Starting at position 1180 of SEQ ID NO: 316089
cgguaaagauucucacuac

SEQ ID NO: 411292 - RNA, 19 nt, Artificial Sequence
  Description of Artificial Sequence: Synthetic oligonucleotide
  Antisense Strand to SEQ ID NO: 411291
guagugagaaucuuuaccg

SEQ ID NO: 411293 - RNA, 19 nt, Artificial Sequence
  Description of Artificial Sequence: Synthetic oligonucleotide
  Sense Strand Starting at position 1180 of SEQ ID NO: 316169
auaucugaauuuggaggaa

SEQ ID NO: 411294 - RNA, 19 nt, Artificial Sequence
  Description of Artificial Sequence: Synthetic oligonucleotide
  Antisense Strand to SEQ ID NO: 411293
uuccuccaaauucagauau

SEQ ID NO: 411295 - RNA, 19 nt, Artificial Sequence
  Description of Artificial Sequence: Synthetic oligonucleotide
  Sense Strand Starting at position 1180 of SEQ ID NO: 316252
cucuuaaaguuagcuagaa

SEQ ID NO: 411296 - RNA, 19 nt, Artificial Sequence
  Description of Artificial Sequence: Synthetic oligonucleotide
  Antisense Strand to SEQ ID NO: 411295
uucuagcuaacuuuaagag

SEQ ID NO: 411297 - RNA, 19 nt, Artificial Sequence
  Description of Artificial Sequence: Synthetic oligonucleotide
  Sense Strand Starting at position 1180 of SEQ ID NO: 316253
ucuuaaaguuagcuagaau

SEQ ID NO: 411298 - RNA, 19 nt, Artificial Sequence
  Description of Artificial Sequence: Synthetic oligonucleotide
  Antisense Strand to SEQ ID NO: 411297
auucuagcuaacuuuaaga

SEQ ID NO: 411299 - RNA, 19 nt, Artificial Sequence
  Description of Artificial Sequence: Synthetic oligonucleotide
  Sense Strand Starting at position 1180 of SEQ ID NO: 316317
cgcugacuuagccaaggaa

SEQ ID NO: 411300 - RNA, 19 nt, Artificial Sequence
  Description of Artificial Sequence: Synthetic oligonucleotide
  Antisense Strand to SEQ ID NO: 411299
uuccuuggcuaagucagcg

SEQ ID NO: 411301 - RNA, 19 nt, Artificial Sequence
  Description of Artificial Sequence: Synthetic oligonucleotide
  Sense Strand Starting at position 1180 of SEQ ID NO: 316320
ugacuuagccaaggaacua

SEQ ID NO: 411302 - RNA, 19 nt, Artificial Sequence
  Description of Artificial Sequence: Synthetic oligonucleotide
  Antisense Strand to SEQ ID NO: 411301
uaguuccuuggcuaaguca

SEQ ID NO: 411303 - RNA, 19 nt, Artificial Sequence
  Description of Artificial Sequence: Synthetic oligonucleotide
  Sense Strand Starting at position 1180 of SEQ ID NO: 317499
ggaguuuccaauuaagcag

SEQ ID NO: 411304 - RNA, 19 nt, Artificial Sequence
  Description of Artificial Sequence: Synthetic oligonucleotide
  Antisense Strand to SEQ ID NO: 411303
cugcuuaauuggaaacucc

SEQ ID NO: 411305 - RNA, 19 nt, Artificial Sequence
  Description of Artificial Sequence: Synthetic oligonucleotide
  Sense Strand Starting at position 1180 of SEQ ID NO: 317529
agcguuuaugagcaaggaa

SEQ ID NO: 411306 - RNA, 19 nt, Artificial Sequence
  Description of Artificial Sequence: Synthetic oligonucleotide
  Antisense Strand to SEQ ID NO: 411305
uuccuugcucauaaacgcu

SEQ ID NO: 411307 - RNA, 19 nt, Artificial Sequence
  Description of Artificial Sequence: Synthetic oligonucleotide
  Sense Strand Starting at position 1180 of SEQ ID NO: 317550
ucuguaacuguguaaagga

SEQ ID NO: 411308 - RNA, 19 nt, Artificial Sequence
  Description of Artificial Sequence: Synthetic oligonucleotide
  Antisense Strand to SEQ ID NO: 411307
uccuuuacacaguuacaga

SEQ ID NO: 411309 - RNA, 19 nt, Artificial Sequence
  Description of Artificial Sequence: Synthetic oligonucleotide
  Sense Strand Starting at position 1180 of SEQ ID NO: 317587
ggcuaaagauuccugagug

SEQ ID NO: 411310 - RNA, 19 nt, Artificial Sequence
  Description of Artificial Sequence: Synthetic oligonucleotide
  Antisense Strand to SEQ ID NO: 411309
cacucaggaaucuuuagcc

SEQ ID NO: 411311 - RNA, 19 nt, Artificial Sequence
  Description of Artificial Sequence: Synthetic oligonucleotide
  Sense Strand Starting at position 1180 of SEQ ID NO: 317621
ggcauuugaguguguccua

SEQ ID NO: 411312 - RNA, 19 nt, Artificial Sequence
  Description of Artificial Sequence: Synthetic oligonucleotide
  Antisense Strand to SEQ ID NO: 411311
uaggacacacucaaaugcc

SEQ ID NO: 411313 - RNA, 19 nt, Artificial Sequence
  Description of Artificial Sequence: Synthetic oligonucleotide
  Sense Strand Starting at position 1180 of SEQ ID NO: 317676
aauacaguaugaguaagua

SEQ ID NO: 411314 - RNA, 19 nt, Artificial Sequence
  Description of Artificial Sequence: Synthetic oligonucleotide
  Antisense Strand to SEQ ID NO: 411313
uacuuacucauacuguauu

SEQ ID NO: 411315 - RNA, 19 nt, Artificial Sequence
  Description of Artificial Sequence: Synthetic oligonucleotide
  Sense Strand Starting at position 1180 of SEQ ID NO: 317680
caguaugaguaaguaggaa

SEQ ID NO: 411316 - RNA, 19 nt, Artificial Sequence
  Description of Artificial Sequence: Synthetic oligonucleotide
  Antisense Strand to SEQ ID NO: 411315
uuccuacuuacucauacug

SEQ ID NO: 411317 - RNA, 19 nt, Artificial Sequence
  Description of Artificial Sequence: Synthetic oligonucleotide
  Sense Strand Starting at position 1180 of SEQ ID NO: 317684
augaguaaguaggaauuua

SEQ ID NO: 411318 - RNA, 19 nt, Artificial Sequence
  Description of Artificial Sequence: Synthetic oligonucleotide
  Antisense Strand to SEQ ID NO: 411317
uaaauuccuacuuacucau

SEQ ID NO: 411319 - RNA, 19 nt, Artificial Sequence
  Description of Artificial Sequence: Synthetic oligonucleotide
  Sense Strand Starting at position 1180 of SEQ ID NO: 317869
gagggauucucacuacacu

SEQ ID NO: 411320 - RNA, 19 nt, Artificial Sequence
  Description of Artificial Sequence: Synthetic oligonucleotide
  Antisense Strand to SEQ ID NO: 411319
aguguagugagaaucccuc

SEQ ID NO: 411321 - RNA, 19 nt, Artificial Sequence
  Description of Artificial Sequence: Synthetic oligonucleotide
  Sense Strand Starting at position 1180 of SEQ ID NO: 318003
gguggagacuaagcugaua

SEQ ID NO: 411322 - RNA, 19 nt, Artificial Sequence
  Description of Artificial Sequence: Synthetic oligonucleotide
  Antisense Strand to SEQ ID NO: 411321
uaucagcuuagucuccacc

SEQ ID NO: 411323 - RNA, 19 nt, Artificial Sequence
  Description of Artificial Sequence: Synthetic oligonucleotide
  Sense Strand Starting at position 1180 of SEQ ID NO: 318225
agaaauuggcagugaagua

SEQ ID NO: 411324 - RNA, 19 nt, Artificial Sequence
  Description of Artificial Sequence: Synthetic oligonucleotide
  Antisense Strand to SEQ ID NO: 411323
uacuucacugccaauuucu

SEQ ID NO: 411325 - RNA, 19 nt, Artificial Sequence
  Description of Artificial Sequence: Synthetic oligonucleotide
  Sense Strand Starting at position 1180 of SEQ ID NO: 318301
cuaugagugauugaagugu

SEQ ID NO: 411326 - RNA, 19 nt, Artificial Sequence
  Description of Artificial Sequence: Synthetic oligonucleotide
  Antisense Strand to SEQ ID NO: 411325
acacuucaaucacucauag

SEQ ID NO: 411327 - RNA, 19 nt, Artificial Sequence
  Description of Artificial Sequence: Synthetic oligonucleotide
  Sense Strand Starting at position 1180 of SEQ ID NO: 318349
uuguaagagacgcauacuu

SEQ ID NO: 411328 - RNA, 19 nt, Artificial Sequence
  Description of Artificial Sequence: Synthetic oligonucleotide
  Antisense Strand to SEQ ID NO: 411327
aaguaugcgucucuuacaa

SEQ ID NO: 411329 - RNA, 19 nt, Artificial Sequence
  Description of Artificial Sequence: Synthetic oligonucleotide
  Sense Strand Starting at position 1180 of SEQ ID NO: 318351
guaagagacgcauacuucu

SEQ ID NO: 411330 - RNA, 19 nt, Artificial Sequence
  Description of Artificial Sequence: Synthetic oligonucleotide
  Antisense Strand to SEQ ID NO: 411329
agaaguaugcgucucuuac

SEQ ID NO: 411331 - RNA, 19 nt, Artificial Sequence
  Description of Artificial Sequence: Synthetic oligonucleotide
  Sense Strand Starting at position 1180 of SEQ ID NO: 318511
gguguuucagggugagaag

SEQ ID NO: 411332 - RNA, 19 nt, Artificial Sequence
  Description of Artificial Sequence: Synthetic oligonucleotide
  Antisense Strand to SEQ ID NO: 411331
cuucucacccugaaacacc

SEQ ID NO: 411333 - RNA, 19 nt, Artificial Sequence
  Description of Artificial Sequence: Synthetic oligonucleotide
  Sense Strand Starting at position 1180 of SEQ ID NO: 318569
aguuauaagucucugaaac

SEQ ID NO: 411334 - RNA, 19 nt, Artificial Sequence
  Description of Artificial Sequence: Synthetic oligonucleotide
  Antisense Strand to SEQ ID NO: 411333
guuucagagacuuauaacu

SEQ ID NO: 411335 - RNA, 19 nt, Artificial Sequence
  Description of Artificial Sequence: Synthetic oligonucleotide
  Sense Strand Starting at position 1180 of SEQ ID NO: 318580
ucugaaacuucuguuugag

SEQ ID NO: 411336 - RNA, 19 nt, Artificial Sequence
  Description of Artificial Sequence: Synthetic oligonucleotide
  Antisense Strand to SEQ ID NO: 411335
cucaaacagaaguuucaga

SEQ ID NO: 411337 - RNA, 19 nt, Artificial Sequence
  Description of Artificial Sequence: Synthetic oligonucleotide
  Sense Strand Starting at position 1180 of SEQ ID NO: 318582
ugaaacuucuguuugagag

SEQ ID NO: 411338 - RNA, 19 nt, Artificial Sequence
  Description of Artificial Sequence: Synthetic oligonucleotide
  Antisense Strand to SEQ ID NO: 411337
cucucaaacagaaguuuca

SEQ ID NO: 411339 - RNA, 19 nt, Artificial Sequence
  Description of Artificial Sequence: Synthetic oligonucleotide
  Sense Strand Starting at position 1180 of SEQ ID NO: 318583
gaaacuucuguuugagagu

SEQ ID NO: 411340 - RNA, 19 nt, Artificial Sequence
  Description of Artificial Sequence: Synthetic oligonucleotide
  Antisense Strand to SEQ ID NO: 411339
acucucaaacagaaguuuc

SEQ ID NO: 411341 - RNA, 19 nt, Artificial Sequence
  Description of Artificial Sequence: Synthetic oligonucleotide
  Sense Strand Starting at position 1180 of SEQ ID NO: 318589
ucuguuugagagugaaaua

SEQ ID NO: 411342 - RNA, 19 nt, Artificial Sequence
  Description of Artificial Sequence: Synthetic oligonucleotide
  Antisense Strand to SEQ ID NO: 411341
uauuucacucucaaacaga

SEQ ID NO: 411343 - RNA, 19 nt, Artificial Sequence
  Description of Artificial Sequence: Synthetic oligonucleotide
  Sense Strand Starting at position 1180 of SEQ ID NO: 318670
aauuguuugcagggauaag

SEQ ID NO: 411344 - RNA, 19 nt, Artificial Sequence
  Description of Artificial Sequence: Synthetic oligonucleotide
  Antisense Strand to SEQ ID NO: 411343
cuuaucccugcaaacaauu

SEQ ID NO: 411345 - RNA, 19 nt, Artificial Sequence
  Description of Artificial Sequence: Synthetic oligonucleotide
  Sense Strand Starting at position 1180 of SEQ ID NO: 318691
aguggaguacugcagaaga

SEQ ID NO: 411346 - RNA, 19 nt, Artificial Sequence
  Description of Artificial Sequence: Synthetic oligonucleotide
  Antisense Strand to SEQ ID NO: 411345
ucuucugcaguacuccacu

SEQ ID NO: 411347 - RNA, 19 nt, Artificial Sequence
  Description of Artificial Sequence: Synthetic oligonucleotide
  Sense Strand Starting at position 1180 of SEQ ID NO: 318825
ucauuaagaugguuuggga

SEQ ID NO: 411348 - RNA, 19 nt, Artificial Sequence
  Description of Artificial Sequence: Synthetic oligonucleotide
  Antisense Strand to SEQ ID NO: 411347
ucccaaaccaucuuaauga

SEQ ID NO: 411349 - RNA, 19 nt, Artificial Sequence
  Description of Artificial Sequence: Synthetic oligonucleotide
  Sense Strand Starting at position 1180 of SEQ ID NO: 318943
gauccugaggcaggagaua

SEQ ID NO: 411350 - RNA, 19 nt, Artificial Sequence
  Description of Artificial Sequence: Synthetic oligonucleotide
  Antisense Strand to SEQ ID NO: 411349
uaucuccugccucaggauc

SEQ ID NO: 411351 - RNA, 19 nt, Artificial Sequence
  Description of Artificial Sequence: Synthetic oligonucleotide
  Sense Strand Starting at position 1180 of SEQ ID NO: 318968
ugaaccuuggccuauuaua

SEQ ID NO: 411352 - RNA, 19 nt, Artificial Sequence
  Description of Artificial Sequence: Synthetic oligonucleotide
  Antisense Strand to SEQ ID NO: 411351
uauaauaggccaagguuca

SEQ ID NO: 411353 - RNA, 19 nt, Artificial Sequence
  Description of Artificial Sequence: Synthetic oligonucleotide
  Sense Strand Starting at position 1180 of SEQ ID NO: 318995
agaguaucugcugaggauc

SEQ ID NO: 411354 - RNA, 19 nt, Artificial Sequence
  Description of Artificial Sequence: Synthetic oligonucleotide
  Antisense Strand to SEQ ID NO: 411353
gauccucagcagauacucu

SEQ ID NO: 411355 - RNA, 19 nt, Artificial Sequence
  Description of Artificial Sequence: Synthetic oligonucleotide
  Sense Strand Starting at position 1180 of SEQ ID NO: 319181
uguuguaauuucccucaug

SEQ ID NO: 411356 - RNA, 19 nt, Artificial Sequence
  Description of Artificial Sequence: Synthetic oligonucleotide
  Antisense Strand to SEQ ID NO: 411355
caugagggaaauuacaaca

SEQ ID NO: 411357 - RNA, 19 nt, Artificial Sequence
  Description of Artificial Sequence: Synthetic oligonucleotide
  Sense Strand Starting at position 1180 of SEQ ID NO: 319205
ucccgaagccaucaguaaa

SEQ ID NO: 411358 - RNA, 19 nt, Artificial Sequence
  Description of Artificial Sequence: Synthetic oligonucleotide
  Antisense Strand to SEQ ID NO: 411357
uuuacugauggcuucggga

SEQ ID NO: 411359 - RNA, 19 nt, Artificial Sequence
  Description of Artificial Sequence: Synthetic oligonucleotide
  Sense Strand Starting at position 1181 of SEQ ID NO: 315304
aagauaauugaugguaugu

SEQ ID NO: 411360 - RNA, 19 nt, Artificial Sequence
  Description of Artificial Sequence: Synthetic oligonucleotide
  Antisense Strand to SEQ ID NO: 411359
acauaccaucaauuaucuu

SEQ ID NO: 411361 - RNA, 19 nt, Artificial Sequence
  Description of Artificial Sequence: Synthetic oligonucleotide
  Sense Strand Starting at position 1181 of SEQ ID NO: 315690
uuucuaucugccguguuua

SEQ ID NO: 411362 - RNA, 19 nt, Artificial Sequence
  Description of Artificial Sequence: Synthetic oligonucleotide
  Antisense Strand to SEQ ID NO: 411361
uaaacacggcagauagaaa

SEQ ID NO: 411363 - RNA, 19 nt, Artificial Sequence
  Description of Artificial Sequence: Synthetic oligonucleotide
  Sense Strand Starting at position 1181 of SEQ ID NO: 315837
aaaguaagugugcaacaaa

SEQ ID NO: 411364 - RNA, 19 nt, Artificial Sequence
  Description of Artificial Sequence: Synthetic oligonucleotide
  Antisense Strand to SEQ ID NO: 411363
uuuguugcacacuuacuuu

SEQ ID NO: 411365 - RNA, 19 nt, Artificial Sequence
  Description of Artificial Sequence: Synthetic oligonucleotide
  Sense Strand Starting at position 1181 of SEQ ID NO: 315928
caaaguagagacugguauu

SEQ ID NO: 411366 - RNA, 19 nt, Artificial Sequence
  Description of Artificial Sequence: Synthetic oligonucleotide
  Antisense Strand to SEQ ID NO: 411365
aauaccagucucuacuuug

SEQ ID NO: 411367 - RNA, 19 nt, Artificial Sequence
  Description of Artificial Sequence: Synthetic oligonucleotide
  Sense Strand Starting at position 1181 of SEQ ID NO: 315941
gguauuaacuaguuccuag

SEQ ID NO: 411368 - RNA, 19 nt, Artificial Sequence
  Description of Artificial Sequence: Synthetic oligonucleotide
  Antisense Strand to SEQ ID NO: 411367
cuaggaacuaguuaauacc

SEQ ID NO: 411369 - RNA, 19 nt, Artificial Sequence
  Description of Artificial Sequence: Synthetic oligonucleotide
  Sense Strand Starting at position 1181 of SEQ ID NO: 316029
agaaaugacucggcuucua

SEQ ID NO: 411370 - RNA, 19 nt, Artificial Sequence
  Description of Artificial Sequence: Synthetic oligonucleotide
  Antisense Strand to SEQ ID NO: 411369
uagaagccgagucauuucu

SEQ ID NO: 411371 - RNA, 19 nt, Artificial Sequence
  Description of Artificial Sequence: Synthetic oligonucleotide
  Sense Strand Starting at position 1181 of SEQ ID NO: 316082
uucucagcacugggaauaa

SEQ ID NO: 411372 - RNA, 19 nt, Artificial Sequence
  Description of Artificial Sequence: Synthetic oligonucleotide
  Antisense Strand to SEQ ID NO: 411371
uuauucccagugcugagaa

SEQ ID NO: 411373 - RNA, 19 nt, Artificial Sequence
  Description of Artificial Sequence: Synthetic oligonucleotide
  Sense Strand Starting at position 1181 of SEQ ID NO: 316188
aggguaagacccugcucaa

SEQ ID NO: 411374 - RNA, 19 nt, Artificial Sequence
  Description of Artificial Sequence: Synthetic oligonucleotide
  Antisense Strand to SEQ ID NO: 411373
uugagcagggucuuacccu

SEQ ID NO: 411375 - RNA, 19 nt, Artificial Sequence
  Description of Artificial Sequence: Synthetic oligonucleotide
  Sense Strand Starting at position 1181 of SEQ ID NO: 316332
gcagcaagacgguaaagau

SEQ ID NO: 411376 - RNA, 19 nt, Artificial Sequence
  Description of Artificial Sequence: Synthetic oligonucleotide
  Antisense Strand to SEQ ID NO: 411375
aucuuuaccgucuugcugc

SEQ ID NO: 411377 - RNA, 19 nt, Artificial Sequence
  Description of Artificial Sequence: Synthetic oligonucleotide
  Sense Strand Starting at position 1181 of SEQ ID NO: 316341
cgguaaagauucucacuac

SEQ ID NO: 411378 - RNA, 19 nt, Artificial Sequence
  Description of Artificial Sequence: Synthetic oligonucleotide
  Antisense Strand to SEQ ID NO: 411377
guagugagaaucuuuaccg

SEQ ID NO: 411379 - RNA, 19 nt, Artificial Sequence
  Description of Artificial Sequence: Synthetic oligonucleotide
  Sense Strand Starting at position 1181 of SEQ ID NO: 316421
auaucugaauuuggaggaa

SEQ ID NO: 411380 - RNA, 19 nt, Artificial Sequence
  Description of Artificial Sequence: Synthetic oligonucleotide
  Antisense Strand to SEQ ID NO: 411379
uuccuccaaauucagauau

SEQ ID NO: 411381 - RNA, 19 nt, Artificial Sequence
  Description of Artificial Sequence: Synthetic oligonucleotide
  Sense Strand Starting at position 1181 of SEQ ID NO: 316504
cucuuaaaguuagcuagaa

SEQ ID NO: 411382 - RNA, 19 nt, Artificial Sequence
  Description of Artificial Sequence: Synthetic oligonucleotide
  Antisense Strand to SEQ ID NO: 411381
uucuagcuaacuuuaagag

SEQ ID NO: 411383 - RNA, 19 nt, Artificial Sequence
  Description of Artificial Sequence: Synthetic oligonucleotide
  Sense Strand Starting at position 1181 of SEQ ID NO: 316505
ucuuaaaguuagcuagaau

SEQ ID NO: 411384 - RNA, 19 nt, Artificial Sequence
  Description of Artificial Sequence: Synthetic oligonucleotide
  Antisense Strand to SEQ ID NO: 411383
auucuagcuaacuuuaaga

SEQ ID NO: 411385 - RNA, 19 nt, Artificial Sequence
  Description of Artificial Sequence: Synthetic oligonucleotide
  Sense Strand Starting at position 1181 of SEQ ID NO: 316569
cgcugacuuagccaaggaa

SEQ ID NO: 411386 - RNA, 19 nt, Artificial Sequence
  Description of Artificial Sequence: Synthetic oligonucleotide
  Antisense Strand to SEQ ID NO: 411385
uuccuuggcuaagucagcg

SEQ ID NO: 411387 - RNA, 19 nt, Artificial Sequence
  Description of Artificial Sequence: Synthetic oligonucleotide
  Sense Strand Starting at position 1181 of SEQ ID NO: 316572
ugacuuagccaaggaacua

SEQ ID NO: 411388 - RNA, 19 nt, Artificial Sequence
  Description of Artificial Sequence: Synthetic oligonucleotide
  Antisense Strand to SEQ ID NO: 411387
uaguuccuuggcuaaguca

SEQ ID NO: 411389 - RNA, 19 nt, Artificial Sequence
  Description of Artificial Sequence: Synthetic oligonucleotide
  Sense Strand Starting at position 1181 of SEQ ID NO: 317751
ggaguuuccaauuaagcag

SEQ ID NO: 411390 - RNA, 19 nt, Artificial Sequence
  Description of Artificial Sequence: Synthetic oligonucleotide
  Antisense Strand to SEQ ID NO: 411389
cugcuuaauuggaaacucc

SEQ ID NO: 411391 - RNA, 19 nt, Artificial Sequence
  Description of Artificial Sequence: Synthetic oligonucleotide
  Sense Strand Starting at position 1181 of SEQ ID NO: 317781
agcguuuaugagcaaggaa

SEQ ID NO: 411392 - RNA, 19 nt, Artificial Sequence
  Description of Artificial Sequence: Synthetic oligonucleotide
  Antisense Strand to SEQ ID NO: 411391
uuccuugcucauaaacgcu

SEQ ID NO: 411393 - RNA, 19 nt, Artificial Sequence
  Description of Artificial Sequence: Synthetic oligonucleotide
  Sense Strand Starting at position 1181 of SEQ ID NO: 317802
ucuguaacuguguaaagga

SEQ ID NO: 411394 - RNA, 19 nt, Artificial Sequence
  Description of Artificial Sequence: Synthetic oligonucleotide
  Antisense Strand to SEQ ID NO: 411393
uccuuuacacaguuacaga

SEQ ID NO: 411395 - RNA, 19 nt, Artificial Sequence
  Description of Artificial Sequence: Synthetic oligonucleotide
  Sense Strand Starting at position 1181 of SEQ ID NO: 317839
ggcuaaagauuccugagug

SEQ ID NO: 411396 - RNA, 19 nt, Artificial Sequence
  Description of Artificial Sequence: Synthetic oligonucleotide
  Antisense Strand to SEQ ID NO: 411395
cacucaggaaucuuuagcc

SEQ ID NO: 411397 - RNA, 19 nt, Artificial Sequence
  Description of Artificial Sequence: Synthetic oligonucleotide
  Sense Strand Starting at position 1181 of SEQ ID NO: 317873
ggcauuugaguguguccua

SEQ ID NO: 411398 - RNA, 19 nt, Artificial Sequence
  Description of Artificial Sequence: Synthetic oligonucleotide
  Antisense Strand to SEQ ID NO: 411397
uaggacacacucaaaugcc

SEQ ID NO: 411399 - RNA, 19 nt, Artificial Sequence
  Description of Artificial Sequence: Synthetic oligonucleotide
  Sense Strand Starting at position 1181 of SEQ ID NO: 317928
aauacaguaugaguaagua

SEQ ID NO: 411400 - RNA, 19 nt, Artificial Sequence
  Description of Artificial Sequence: Synthetic oligonucleotide
  Antisense Strand to SEQ ID NO: 411399
uacuuacucauacuguauu

SEQ ID NO: 411401 - RNA, 19 nt, Artificial Sequence
  Description of Artificial Sequence: Synthetic oligonucleotide
  Sense Strand Starting at position 1181 of SEQ ID NO: 317932
caguaugaguaaguaggaa

SEQ ID NO: 411402 - RNA, 19 nt, Artificial Sequence
  Description of Artificial Sequence: Synthetic oligonucleotide
  Antisense Strand to SEQ ID NO: 411401
uuccuacuuacucauacug

SEQ ID NO: 411403 - RNA, 19 nt, Artificial Sequence
  Description of Artificial Sequence: Synthetic oligonucleotide
  Sense Strand Starting at position 1181 of SEQ ID NO: 317936
augaguaaguaggaauuua

SEQ ID NO: 411404 - RNA, 19 nt, Artificial Sequence
  Description of Artificial Sequence: Synthetic oligonucleotide
  Antisense Strand to SEQ ID NO: 411403
uaaauuccuacuuacucau

SEQ ID NO: 411405 - RNA, 19 nt, Artificial Sequence
  Description of Artificial Sequence: Synthetic oligonucleotide
  Sense Strand Starting at position 1181 of SEQ ID NO: 318121
gagggauucucacuacacu

SEQ ID NO: 411406 - RNA, 19 nt, Artificial Sequence
  Description of Artificial Sequence: Synthetic oligonucleotide
  Antisense Strand to SEQ ID NO: 411405
aguguagugagaaucccuc

SEQ ID NO: 411407 - RNA, 19 nt, Artificial Sequence
  Description of Artificial Sequence: Synthetic oligonucleotide
  Sense Strand Starting at position 1181 of SEQ ID NO: 318255
gguggagacuaagcugaua

SEQ ID NO: 411408 - RNA, 19 nt, Artificial Sequence
  Description of Artificial Sequence: Synthetic oligonucleotide
  Antisense Strand to SEQ ID NO: 411407
uaucagcuuagucuccacc

SEQ ID NO: 411409 - RNA, 19 nt, Artificial Sequence
  Description of Artificial Sequence: Synthetic oligonucleotide
  Sense Strand Starting at position 1181 of SEQ ID NO: 318477
agaaauuggcagugaagua

SEQ ID NO: 411410 - RNA, 19 nt, Artificial Sequence
  Description of Artificial Sequence: Synthetic oligonucleotide
  Antisense Strand to SEQ ID NO: 411409
uacuucacugccaauuucu

SEQ ID NO: 411411 - RNA, 19 nt, Artificial Sequence
  Description of Artificial Sequence: Synthetic oligonucleotide
  Sense Strand Starting at position 1181 of SEQ ID NO: 318553
cuaugagugauugaagugu

SEQ ID NO: 411412 - RNA, 19 nt, Artificial Sequence
  Description of Artificial Sequence: Synthetic oligonucleotide
  Antisense Strand to SEQ ID NO: 411411
acacuucaaucacucauag

SEQ ID NO: 411413 - RNA, 19 nt, Artificial Sequence
  Description of Artificial Sequence: Synthetic oligonucleotide
  Sense Strand Starting at position 1181 of SEQ ID NO: 318601
uuguaagagacgcauacuu

SEQ ID NO: 411414 - RNA, 19 nt, Artificial Sequence
  Description of Artificial Sequence: Synthetic oligonucleotide
  Antisense Strand to SEQ ID NO: 411413
aaguaugcgucucuuacaa

SEQ ID NO: 411415 - RNA, 19 nt, Artificial Sequence
  Description of Artificial Sequence: Synthetic oligonucleotide
  Sense Strand Starting at position 1181 of SEQ ID NO: 318603
guaagagacgcauacuucu

SEQ ID NO: 411416 - RNA, 19 nt, Artificial Sequence
  Description of Artificial Sequence: Synthetic oligonucleotide
  Antisense Strand to SEQ ID NO: 411415
agaaguaugcgucucuuac

SEQ ID NO: 411417 - RNA, 19 nt, Artificial Sequence
  Description of Artificial Sequence: Synthetic oligonucleotide
  Sense Strand Starting at position 1181 of SEQ ID NO: 318763
gguguuucagggugagaag

SEQ ID NO: 411418 - RNA, 19 nt, Artificial Sequence
  Description of Artificial Sequence: Synthetic oligonucleotide
  Antisense Strand to SEQ ID NO: 411417
cuucucacccugaaacacc

SEQ ID NO: 411419 - RNA, 19 nt, Artificial Sequence
  Description of Artificial Sequence: Synthetic oligonucleotide
  Sense Strand Starting at position 1181 of SEQ ID NO: 318821
aguuauaagucucugaaac

SEQ ID NO: 411420 - RNA, 19 nt, Artificial Sequence
  Description of Artificial Sequence: Synthetic oligonucleotide
  Antisense Strand to SEQ ID NO: 411419
guuucagagacuuauaacu

SEQ ID NO: 411421 - RNA, 19 nt, Artificial Sequence
  Description of Artificial Sequence: Synthetic oligonucleotide
  Sense Strand Starting at position 1181 of SEQ ID NO: 318822
guuauaagucucugaaacu

SEQ ID NO: 411422 - RNA, 19 nt, Artificial Sequence
  Description of Artificial Sequence: Synthetic oligonucleotide
  Antisense Strand to SEQ ID NO: 411421
aguuucagagacuuauaac

SEQ ID NO: 411423 - RNA, 19 nt, Artificial Sequence
  Description of Artificial Sequence: Synthetic oligonucleotide
  Sense Strand Starting at position 1181 of SEQ ID NO: 318832
ucugaaacuucuguuugag

SEQ ID NO: 411424 - RNA, 19 nt, Artificial Sequence
  Description of Artificial Sequence: Synthetic oligonucleotide
  Antisense Strand to SEQ ID NO: 411423
cucaaacagaaguuucaga

SEQ ID NO: 411425 - RNA, 19 nt, Artificial Sequence
  Description of Artificial Sequence: Synthetic oligonucleotide
  Sense Strand Starting at position 1181 of SEQ ID NO: 318834
ugaaacuucuguuugagag

SEQ ID NO: 411426 - RNA, 19 nt, Artificial Sequence
  Description of Artificial Sequence: Synthetic oligonucleotide
  Antisense Strand to SEQ ID NO: 411425
cucucaaacagaaguuuca

SEQ ID NO: 411427 - RNA, 19 nt, Artificial Sequence
  Description of Artificial Sequence: Synthetic oligonucleotide
  Sense Strand Starting at position 1181 of SEQ ID NO: 318835
gaaacuucuguuugagagu

SEQ ID NO: 411428 - RNA, 19 nt, Artificial Sequence
  Description of Artificial Sequence: Synthetic oligonucleotide
  Antisense Strand to SEQ ID NO: 411427
acucucaaacagaaguuuc

SEQ ID NO: 411429 - RNA, 19 nt, Artificial Sequence
  Description of Artificial Sequence: Synthetic oligonucleotide
  Sense Strand Starting at position 1181 of SEQ ID NO: 318841
ucuguuugagagugaaaua

SEQ ID NO: 411430 - RNA, 19 nt, Artificial Sequence
  Description of Artificial Sequence: Synthetic oligonucleotide
  Antisense Strand to SEQ ID NO: 411429
uauuucacucucaaacaga

SEQ ID NO: 411431 - RNA, 19 nt, Artificial Sequence
  Description of Artificial Sequence: Synthetic oligonucleotide
  Sense Strand Starting at position 1181 of SEQ ID NO: 318922
aauuguuugcagggauaag

SEQ ID NO: 411432 - RNA, 19 nt, Artificial Sequence
  Description of Artificial Sequence: Synthetic oligonucleotide
  Antisense Strand to SEQ ID NO: 411431
cuuaucccugcaaacaauu

SEQ ID NO: 411433 - RNA, 19 nt, Artificial Sequence
  Description of Artificial Sequence: Synthetic oligonucleotide
  Sense Strand Starting at position 1181 of SEQ ID NO: 318943
aguggaguacugcagaaga

SEQ ID NO: 411434 - RNA, 19 nt, Artificial Sequence
  Description of Artificial Sequence: Synthetic oligonucleotide
  Antisense Strand to SEQ ID NO: 411433
ucuucugcaguacuccacu

SEQ ID NO: 411435 - RNA, 19 nt, Artificial Sequence
  Description of Artificial Sequence: Synthetic oligonucleotide
  Sense Strand Starting at position 1181 of SEQ ID NO: 319077
ucauuaagaugguuuggga

SEQ ID NO: 411436 - RNA, 19 nt, Artificial Sequence
  Description of Artificial Sequence: Synthetic oligonucleotide
  Antisense Strand to SEQ ID NO: 411435
ucccaaaccaucuuaauga

SEQ ID NO: 411437 - RNA, 19 nt, Artificial Sequence
  Description of Artificial Sequence: Synthetic oligonucleotide
  Sense Strand Starting at position 1181 of SEQ ID NO: 319195
gauccugaggcaggagaua

SEQ ID NO: 411438 - RNA, 19 nt, Artificial Sequence
  Description of Artificial Sequence: Synthetic oligonucleotide
  Antisense Strand to SEQ ID NO: 411437
uaucuccugccucaggauc

SEQ ID NO: 411439 - RNA, 19 nt, Artificial Sequence
  Description of Artificial Sequence: Synthetic oligonucleotide
  Sense Strand Starting at position 1182 of SEQ ID NO: 315479
uuucuaucugccguguuua

SEQ ID NO: 411440 - RNA, 19 nt, Artificial Sequence
  Description of Artificial Sequence: Synthetic oligonucleotide
  Antisense Strand to SEQ ID NO: 411439
uaaacacggcagauagaaa

SEQ ID NO: 411441 - RNA, 19 nt, Artificial Sequence
  Description of Artificial Sequence: Synthetic oligonucleotide
  Sense Strand Starting at position 1182 of SEQ ID NO: 315626
aaaguaagugugcaacaaa

SEQ ID NO: 411442 - RNA, 19 nt, Artificial Sequence
  Description of Artificial Sequence: Synthetic oligonucleotide
  Antisense Strand to SEQ ID NO: 411441
uuuguugcacacuuacuuu

SEQ ID NO: 411443 - RNA, 19 nt, Artificial Sequence
  Description of Artificial Sequence: Synthetic oligonucleotide
  Sense Strand Starting at position 1182 of SEQ ID NO: 315717
caaaguagagacugguauu

SEQ ID NO: 411444 - RNA, 19 nt, Artificial Sequence
  Description of Artificial Sequence: Synthetic oligonucleotide
  Antisense Strand to SEQ ID NO: 411443
aauaccagucucuacuuug

SEQ ID NO: 411445 - RNA, 19 nt, Artificial Sequence
  Description of Artificial Sequence: Synthetic oligonucleotide
  Sense Strand Starting at position 1182 of SEQ ID NO: 315818
agaaaugacucggcuucua

SEQ ID NO: 411446 - RNA, 19 nt, Artificial Sequence
  Description of Artificial Sequence: Synthetic oligonucleotide
  Antisense Strand to SEQ ID NO: 411445
uagaagccgagucauuucu

SEQ ID NO: 411447 - RNA, 19 nt, Artificial Sequence
  Description of Artificial Sequence: Synthetic oligonucleotide
  Sense Strand Starting at position 1182 of SEQ ID NO: 315871
uucucagcacugggaauaa

SEQ ID NO: 411448 - RNA, 19 nt, Artificial Sequence
  Description of Artificial Sequence: Synthetic oligonucleotide
  Antisense Strand to SEQ ID NO: 411447
uuauucccagugcugagaa

SEQ ID NO: 411449 - RNA, 19 nt, Artificial Sequence
  Description of Artificial Sequence: Synthetic oligonucleotide
  Sense Strand Starting at position 1182 of SEQ ID NO: 315977
aggguaagacccugcucaa

SEQ ID NO: 411450 - RNA, 19 nt, Artificial Sequence
  Description of Artificial Sequence: Synthetic oligonucleotide
  Antisense Strand to SEQ ID NO: 411449
uugagcagggucuuacccu

SEQ ID NO: 411451 - RNA, 19 nt, Artificial Sequence
  Description of Artificial Sequence: Synthetic oligonucleotide
  Sense Strand Starting at position 1182 of SEQ ID NO: 316121
gcagcaagacgguaaagau

SEQ ID NO: 411452 - RNA, 19 nt, Artificial Sequence
  Description of Artificial Sequence: Synthetic oligonucleotide
  Antisense Strand to SEQ ID NO: 411451
aucuuuaccgucuugcugc

SEQ ID NO: 411453 - RNA, 19 nt, Artificial Sequence
  Description of Artificial Sequence: Synthetic oligonucleotide
  Sense Strand Starting at position 1182 of SEQ ID NO: 316130
cgguaaagauucucacuac

SEQ ID NO: 411454 - RNA, 19 nt, Artificial Sequence
  Description of Artificial Sequence: Synthetic oligonucleotide
  Antisense Strand to SEQ ID NO: 411453
guagugagaaucuuuaccg

SEQ ID NO: 411455 - RNA, 19 nt, Artificial Sequence
  Description of Artificial Sequence: Synthetic oligonucleotide
  Sense Strand Starting at position 1182 of SEQ ID NO: 316210
auaucugaauuuggaggaa

SEQ ID NO: 411456 - RNA, 19 nt, Artificial Sequence
  Description of Artificial Sequence: Synthetic oligonucleotide
  Antisense Strand to SEQ ID NO: 411455
uuccuccaaauucagauau

SEQ ID NO: 411457 - RNA, 19 nt, Artificial Sequence
  Description of Artificial Sequence: Synthetic oligonucleotide
  Sense Strand Starting at position 1182 of SEQ ID NO: 316293
cucuuaaaguuagcuagaa

SEQ ID NO: 411458 - RNA, 19 nt, Artificial Sequence
  Description of Artificial Sequence: Synthetic oligonucleotide
  Antisense Strand to SEQ ID NO: 411457
uucuagcuaacuuuaagag

SEQ ID NO: 411459 - RNA, 19 nt, Artificial Sequence
  Description of Artificial Sequence: Synthetic oligonucleotide
  Sense Strand Starting at position 1182 of SEQ ID NO: 316294
ucuuaaaguuagcuagaau

SEQ ID NO: 411460 - RNA, 19 nt, Artificial Sequence
  Description of Artificial Sequence: Synthetic oligonucleotide
  Antisense Strand to SEQ ID NO: 411459
auucuagcuaacuuuaaga

SEQ ID NO: 411461 - RNA, 19 nt, Artificial Sequence
  Description of Artificial Sequence: Synthetic oligonucleotide
  Sense Strand Starting at position 1182 of SEQ ID NO: 316358
cgcugacuuagccaaggaa

SEQ ID NO: 411462 - RNA, 19 nt, Artificial Sequence
  Description of Artificial Sequence: Synthetic oligonucleotide
  Antisense Strand to SEQ ID NO: 411461
uuccuuggcuaagucagcg

SEQ ID NO: 411463 - RNA, 19 nt, Artificial Sequence
  Description of Artificial Sequence: Synthetic oligonucleotide
  Sense Strand Starting at position 1182 of SEQ ID NO: 316361
ugacuuagccaaggaacua

SEQ ID NO: 411464 - RNA, 19 nt, Artificial Sequence
  Description of Artificial Sequence: Synthetic oligonucleotide
  Antisense Strand to SEQ ID NO: 411463
uaguuccuuggcuaaguca

SEQ ID NO: 411465 - RNA, 19 nt, Artificial Sequence
  Description of Artificial Sequence: Synthetic oligonucleotide
  Sense Strand Starting at position 1182 of SEQ ID NO: 317540
ggaguuuccaauuaagcag

SEQ ID NO: 411466 - RNA, 19 nt, Artificial Sequence
  Description of Artificial Sequence: Synthetic oligonucleotide
  Antisense Strand to SEQ ID NO: 411465
cugcuuaauuggaaacucc

SEQ ID NO: 411467 - RNA, 19 nt, Artificial Sequence
  Description of Artificial Sequence: Synthetic oligonucleotide
  Sense Strand Starting at position 1182 of SEQ ID NO: 317570
agcguuuaugagcaaggaa

SEQ ID NO: 411468 - RNA, 19 nt, Artificial Sequence
  Description of Artificial Sequence: Synthetic oligonucleotide
  Antisense Strand to SEQ ID NO: 411467
uuccuugcucauaaacgcu

SEQ ID NO: 411469 - RNA, 19 nt, Artificial Sequence
  Description of Artificial Sequence: Synthetic oligonucleotide
  Sense Strand Starting at position 1182 of SEQ ID NO: 317591
ucuguaacuguguaaagga

SEQ ID NO: 411470 - RNA, 19 nt, Artificial Sequence
  Description of Artificial Sequence: Synthetic oligonucleotide
  Antisense Strand to SEQ ID NO: 411469
uccuuuacacaguuacaga

SEQ ID NO: 411471 - RNA, 19 nt, Artificial Sequence
  Description of Artificial Sequence: Synthetic oligonucleotide
  Sense Strand Starting at position 1182 of SEQ ID NO: 317628
ggcuaaagauuccugagug

SEQ ID NO: 411472 - RNA, 19 nt, Artificial Sequence
  Description of Artificial Sequence: Synthetic oligonucleotide
  Antisense Strand to SEQ ID NO: 411471
cacucaggaaucuuuagcc

SEQ ID NO: 411473 - RNA, 19 nt, Artificial Sequence
  Description of Artificial Sequence: Synthetic oligonucleotide
  Sense Strand Starting at position 1182 of SEQ ID NO: 317662
ggcauuugaguguguccua

SEQ ID NO: 411474 - RNA, 19 nt, Artificial Sequence
  Description of Artificial Sequence: Synthetic oligonucleotide
  Antisense Strand to SEQ ID NO: 411473
uaggacacacucaaaugcc

SEQ ID NO: 411475 - RNA, 19 nt, Artificial Sequence
  Description of Artificial Sequence: Synthetic oligonucleotide
  Sense Strand Starting at position 1182 of SEQ ID NO: 317717
aauacaguaugaguaagua

SEQ ID NO: 411476 - RNA, 19 nt, Artificial Sequence
  Description of Artificial Sequence: Synthetic oligonucleotide
  Antisense Strand to SEQ ID NO: 411475
uacuuacucauacuguauu

SEQ ID NO: 411477 - RNA, 19 nt, Artificial Sequence
  Description of Artificial Sequence: Synthetic oligonucleotide
  Sense Strand Starting at position 1182 of SEQ ID NO: 317721
caguaugaguaaguaggaa

SEQ ID NO: 411478 - RNA, 19 nt, Artificial Sequence
  Description of Artificial Sequence: Synthetic oligonucleotide
  Antisense Strand to SEQ ID NO: 411477
uuccuacuuacucauacug

SEQ ID NO: 411479 - RNA, 19 nt, Artificial Sequence
  Description of Artificial Sequence: Synthetic oligonucleotide
  Sense Strand Starting at position 1182 of SEQ ID NO: 317725
augaguaaguaggaauuua

SEQ ID NO: 411480 - RNA, 19 nt, Artificial Sequence
  Description of Artificial Sequence: Synthetic oligonucleotide
  Antisense Strand to SEQ ID NO: 411479
uaaauuccuacuuacucau

SEQ ID NO: 411481 - RNA, 19 nt, Artificial Sequence
  Description of Artificial Sequence: Synthetic oligonucleotide
  Sense Strand Starting at position 1182 of SEQ ID NO: 317910
gagggauucucacuacacu

SEQ ID NO: 411482 - RNA, 19 nt, Artificial Sequence
  Description of Artificial Sequence: Synthetic oligonucleotide
  Antisense Strand to SEQ ID NO: 411481
aguguagugagaaucccuc

SEQ ID NO: 411483 - RNA, 19 nt, Artificial Sequence
  Description of Artificial Sequence: Synthetic oligonucleotide
  Sense Strand Starting at position 1182 of SEQ ID NO: 318044
gguggagacuaagcugaua

SEQ ID NO: 411484 - RNA, 19 nt, Artificial Sequence
  Description of Artificial Sequence: Synthetic oligonucleotide
  Antisense Strand to SEQ ID NO: 411483
uaucagcuuagucuccacc

SEQ ID NO: 411485 - RNA, 19 nt, Artificial Sequence
  Description of Artificial Sequence: Synthetic oligonucleotide
  Sense Strand Starting at position 1182 of SEQ ID NO: 318266
agaaauuggcagugaagua

SEQ ID NO: 411486 - RNA, 19 nt, Artificial Sequence
  Description of Artificial Sequence: Synthetic oligonucleotide
  Antisense Strand to SEQ ID NO: 411485
uacuucacugccaauuucu

SEQ ID NO: 411487 - RNA, 19 nt, Artificial Sequence
  Description of Artificial Sequence: Synthetic oligonucleotide
  Sense Strand Starting at position 1182 of SEQ ID NO: 318342
cuaugagugauugaagugu

SEQ ID NO: 411488 - RNA, 19 nt, Artificial Sequence
  Description of Artificial Sequence: Synthetic oligonucleotide
  Antisense Strand to SEQ ID NO: 411487
acacuucaaucacucauag

SEQ ID NO: 411489 - RNA, 19 nt, Artificial Sequence
  Description of Artificial Sequence: Synthetic oligonucleotide
  Sense Strand Starting at position 1182 of SEQ ID NO: 318390
uuguaagagacgcauacuu

SEQ ID NO: 411490 - RNA, 19 nt, Artificial Sequence
  Description of Artificial Sequence: Synthetic oligonucleotide
  Antisense Strand to SEQ ID NO: 411489
aaguaugcgucucuuacaa

SEQ ID NO: 411491 - RNA, 19 nt, Artificial Sequence
  Description of Artificial Sequence: Synthetic oligonucleotide
  Sense Strand Starting at position 1182 of SEQ ID NO: 318392
guaagagacgcauacuucu

SEQ ID NO: 411492 - RNA, 19 nt, Artificial Sequence
  Description of Artificial Sequence: Synthetic oligonucleotide
  Antisense Strand to SEQ ID NO: 411491
agaaguaugcgucucuuac

SEQ ID NO: 411493 - RNA, 19 nt, Artificial Sequence
  Description of Artificial Sequence: Synthetic oligonucleotide
  Sense Strand Starting at position 1182 of SEQ ID NO: 318552
gguguuucagggugagaag

SEQ ID NO: 411494 - RNA, 19 nt, Artificial Sequence
  Description of Artificial Sequence: Synthetic oligonucleotide
  Antisense Strand to SEQ ID NO: 411493
cuucucacccugaaacacc

SEQ ID NO: 411495 - RNA, 19 nt, Artificial Sequence
  Description of Artificial Sequence: Synthetic oligonucleotide
  Sense Strand Starting at position 1182 of SEQ ID NO: 318610
aguuauaagucucugaaac

SEQ ID NO: 411496 - RNA, 19 nt, Artificial Sequence
  Description of Artificial Sequence: Synthetic oligonucleotide
  Antisense Strand to SEQ ID NO: 411495
guuucagagacuuauaacu

SEQ ID NO: 411497 - RNA, 19 nt, Artificial Sequence
  Description of Artificial Sequence: Synthetic oligonucleotide
  Sense Strand Starting at position 1182 of SEQ ID NO: 318611
guuauaagucucugaaacu

SEQ ID NO: 411498 - RNA, 19 nt, Artificial Sequence
  Description of Artificial Sequence: Synthetic oligonucleotide
  Antisense Strand to SEQ ID NO: 411497
aguuucagagacuuauaac

SEQ ID NO: 411499 - RNA, 19 nt, Artificial Sequence
  Description of Artificial Sequence: Synthetic oligonucleotide
  Sense Strand Starting at position 1182 of SEQ ID NO: 318621
ucugaaacuucuguuugag

SEQ ID NO: 411500 - RNA, 19 nt, Artificial Sequence
  Description of Artificial Sequence: Synthetic oligonucleotide
  Antisense Strand to SEQ ID NO: 411499
cucaaacagaaguuucaga

SEQ ID NO: 411501 - RNA, 19 nt, Artificial Sequence
  Description of Artificial Sequence: Synthetic oligonucleotide
  Sense Strand Starting at position 1182 of SEQ ID NO: 318623
ugaaacuucuguuugagag

SEQ ID NO: 411502 - RNA, 19 nt, Artificial Sequence
  Description of Artificial Sequence: Synthetic oligonucleotide
  Antisense Strand to SEQ ID NO: 411501
cucucaaacagaaguuuca

SEQ ID NO: 411503 - RNA, 19 nt, Artificial Sequence
  Description of Artificial Sequence: Synthetic oligonucleotide
  Sense Strand Starting at position 1182 of SEQ ID NO: 318624
gaaacuucuguuugagagu

SEQ ID NO: 411504 - RNA, 19 nt, Artificial Sequence
  Description of Artificial Sequence: Synthetic oligonucleotide
  Antisense Strand to SEQ ID NO: 411503
acucucaaacagaaguuuc

SEQ ID NO: 411505 - RNA, 19 nt, Artificial Sequence
  Description of Artificial Sequence: Synthetic oligonucleotide
  Sense Strand Starting at position 1182 of SEQ ID NO: 318630
ucuguuugagagugaaaua

SEQ ID NO: 411506 - RNA, 19 nt, Artificial Sequence
  Description of Artificial Sequence: Synthetic oligonucleotide
  Antisense Strand to SEQ ID NO: 411505
uauuucacucucaaacaga

SEQ ID NO: 411507 - RNA, 19 nt, Artificial Sequence
  Description of Artificial Sequence: Synthetic oligonucleotide
  Sense Strand Starting at position 1182 of SEQ ID NO: 318711
aauuguuugcagggauaag

SEQ ID NO: 411508 - RNA, 19 nt, Artificial Sequence
  Description of Artificial Sequence: Synthetic oligonucleotide
  Antisense Strand to SEQ ID NO: 411507
cuuaucccugcaaacaauu

SEQ ID NO: 411509 - RNA, 19 nt, Artificial Sequence
  Description of Artificial Sequence: Synthetic oligonucleotide
  Sense Strand Starting at position 1182 of SEQ ID NO: 318732
aguggaguacugcagaaga

SEQ ID NO: 411510 - RNA, 19 nt, Artificial Sequence
  Description of Artificial Sequence: Synthetic oligonucleotide
  Antisense Strand to SEQ ID NO: 411509
ucuucugcaguacuccacu

SEQ ID NO: 411511 - RNA, 19 nt, Artificial Sequence
  Description of Artificial Sequence: Synthetic oligonucleotide
  Sense Strand Starting at position 1182 of SEQ ID NO: 318866
ucauuaagaugguuuggga

SEQ ID NO: 411512 - RNA, 19 nt, Artificial Sequence
  Description of Artificial Sequence: Synthetic oligonucleotide
  Antisense Strand to SEQ ID NO: 411511
ucccaaaccaucuuaauga

SEQ ID NO: 411513 - RNA, 19 nt, Artificial Sequence
  Description of Artificial Sequence: Synthetic oligonucleotide
  Sense Strand Starting at position 1182 of SEQ ID NO: 318984
gauccugaggcaggagaua

SEQ ID NO: 411514 - RNA, 19 nt, Artificial Sequence
  Description of Artificial Sequence: Synthetic oligonucleotide
  Antisense Strand to SEQ ID NO: 411513
uaucuccugccucaggauc

SEQ ID NO: 411515 - RNA, 19 nt, Artificial Sequence
  Description of Artificial Sequence: Synthetic oligonucleotide
  Sense Strand Starting at position 1182 of SEQ ID NO: 319009
ugaaccuuggccuauuaua

SEQ ID NO: 411516 - RNA, 19 nt, Artificial Sequence
  Description of Artificial Sequence: Synthetic oligonucleotide
  Antisense Strand to SEQ ID NO: 411515
uauaauaggccaagguuca

SEQ ID NO: 411517 - RNA, 19 nt, Artificial Sequence
  Description of Artificial Sequence: Synthetic oligonucleotide
  Sense Strand Starting at position 1182 of SEQ ID NO: 319036
agaguaucugcugaggauc

SEQ ID NO: 411518 - RNA, 19 nt, Artificial Sequence
  Description of Artificial Sequence: Synthetic oligonucleotide
  Antisense Strand to SEQ ID NO: 411517
gauccucagcagauacucu

SEQ ID NO: 411519 - RNA, 19 nt, Artificial Sequence
  Description of Artificial Sequence: Synthetic oligonucleotide
  Sense Strand Starting at position 1183 of SEQ ID NO: 315628
cuagcauugugaucgauuc

SEQ ID NO: 411520 - RNA, 19 nt, Artificial Sequence
  Description of Artificial Sequence: Synthetic oligonucleotide
  Antisense Strand to SEQ ID NO: 411519
gaaucgaucacaaugcuag

SEQ ID NO: 411521 - RNA, 19 nt, Artificial Sequence
  Description of Artificial Sequence: Synthetic oligonucleotide
  Sense Strand Starting at position 1183 of SEQ ID NO: 315645
ucagguuuagcugggaauc

SEQ ID NO: 411522 - RNA, 19 nt, Artificial Sequence
  Description of Artificial Sequence: Synthetic oligonucleotide
  Antisense Strand to SEQ ID NO: 411521
gauucccagcuaaaccuga

SEQ ID NO: 411523 - RNA, 19 nt, Artificial Sequence
  Description of Artificial Sequence: Synthetic oligonucleotide
  Sense Strand Starting at position 1183 of SEQ ID NO: 315646
cagguuuagcugggaaucu

SEQ ID NO: 411524 - RNA, 19 nt, Artificial Sequence
  Description of Artificial Sequence: Synthetic oligonucleotide
  Antisense Strand to SEQ ID NO: 411523
agauucccagcuaaaccug

SEQ ID NO: 411525 - RNA, 19 nt, Artificial Sequence
  Description of Artificial Sequence: Synthetic oligonucleotide
  Sense Strand Starting at position 1183 of SEQ ID NO: 315655
cugggaaucuugcuccaug

SEQ ID NO: 411526 - RNA, 19 nt, Artificial Sequence
  Description of Artificial Sequence: Synthetic oligonucleotide
  Antisense Strand to SEQ ID NO: 411525
cauggagcaagauucccag

SEQ ID NO: 411527 - RNA, 19 nt, Artificial Sequence
  Description of Artificial Sequence: Synthetic oligonucleotide
  Sense Strand Starting at position 1183 of SEQ ID NO: 315656
ugggaaucuugcuccauga

SEQ ID NO: 411528 - RNA, 19 nt, Artificial Sequence
  Description of Artificial Sequence: Synthetic oligonucleotide
  Antisense Strand to SEQ ID NO: 411527
ucauggagcaagauuccca

SEQ ID NO: 411529 - RNA, 19 nt, Artificial Sequence
  Description of Artificial Sequence: Synthetic oligonucleotide
  Sense Strand Starting at position 1183 of SEQ ID NO: 315658
ggaaucuugcuccaugaca

SEQ ID NO: 411530 - RNA, 19 nt, Artificial Sequence
  Description of Artificial Sequence: Synthetic oligonucleotide
  Antisense Strand to SEQ ID NO: 411529
ugucauggagcaagauucc

SEQ ID NO: 411531 - RNA, 19 nt, Artificial Sequence
  Description of Artificial Sequence: Synthetic oligonucleotide
  Sense Strand Starting at position 1183 of SEQ ID NO: 315812
gaaggaugcuaugcuauau

SEQ ID NO: 411532 - RNA, 19 nt, Artificial Sequence
  Description of Artificial Sequence: Synthetic oligonucleotide
  Antisense Strand to SEQ ID NO: 411531
auauagcauagcauccuuc

SEQ ID NO: 411533 - RNA, 19 nt, Artificial Sequence
  Description of Artificial Sequence: Synthetic oligonucleotide
  Sense Strand Starting at position 1183 of SEQ ID NO: 315877
ucuugagaagcauauugua

SEQ ID NO: 411534 - RNA, 19 nt, Artificial Sequence
  Description of Artificial Sequence: Synthetic oligonucleotide
  Antisense Strand to SEQ ID NO: 411533
uacaauaugcuucucaaga

SEQ ID NO: 411535 - RNA, 19 nt, Artificial Sequence
  Description of Artificial Sequence: Synthetic oligonucleotide
  Sense Strand Starting at position 1183 of SEQ ID NO: 315973
acaguaagcuuagcauaua

SEQ ID NO: 411536 - RNA, 19 nt, Artificial Sequence
  Description of Artificial Sequence: Synthetic oligonucleotide
  Antisense Strand to SEQ ID NO: 411535
uauaugcuaagcuuacugu

SEQ ID NO: 411537 - RNA, 19 nt, Artificial Sequence
  Description of Artificial Sequence: Synthetic oligonucleotide
  Sense Strand Starting at position 1183 of SEQ ID NO: 316110
gagggaaagcguuauccga

SEQ ID NO: 411538 - RNA, 19 nt, Artificial Sequence
  Description of Artificial Sequence: Synthetic oligonucleotide
  Antisense Strand to SEQ ID NO: 411537
ucggauaacgcuuucccuc

SEQ ID NO: 411539 - RNA, 19 nt, Artificial Sequence
  Description of Artificial Sequence: Synthetic oligonucleotide
  Sense Strand Starting at position 1183 of SEQ ID NO: 316112
gggaaagcguuauccgaaa

SEQ ID NO: 411540 - RNA, 19 nt, Artificial Sequence
  Description of Artificial Sequence: Synthetic oligonucleotide
  Antisense Strand to SEQ ID NO: 411539
uuucggauaacgcuuuccc

SEQ ID NO: 411541 - RNA, 19 nt, Artificial Sequence
  Description of Artificial Sequence: Synthetic oligonucleotide
  Sense Strand Starting at position 1183 of SEQ ID NO: 316250
accgcuaaucuccaaguau

SEQ ID NO: 411542 - RNA, 19 nt, Artificial Sequence
  Description of Artificial Sequence: Synthetic oligonucleotide
  Antisense Strand to SEQ ID NO: 411541
auacuuggagauuagcggu

SEQ ID NO: 411543 - RNA, 19 nt, Artificial Sequence
  Description of Artificial Sequence: Synthetic oligonucleotide
  Sense Strand Starting at position 1183 of SEQ ID NO: 316298
ccgucuuguagugagaacu

SEQ ID NO: 411544 - RNA, 19 nt, Artificial Sequence
  Description of Artificial Sequence: Synthetic oligonucleotide
  Antisense Strand to SEQ ID NO: 411543
aguucucacuacaagacgg

SEQ ID NO: 411545 - RNA, 19 nt, Artificial Sequence
  Description of Artificial Sequence: Synthetic oligonucleotide
  Sense Strand Starting at position 1183 of SEQ ID NO: 316355
gucggauucugccuugaga

SEQ ID NO: 411546 - RNA, 19 nt, Artificial Sequence
  Description of Artificial Sequence: Synthetic oligonucleotide
  Antisense Strand to SEQ ID NO: 411545
ucucaaggcagaauccgac

SEQ ID NO: 411547 - RNA, 19 nt, Artificial Sequence
  Description of Artificial Sequence: Synthetic oligonucleotide
  Sense Strand Starting at position 1183 of SEQ ID NO: 316357
cggauucugccuugagaaa

SEQ ID NO: 411548 - RNA, 19 nt, Artificial Sequence
  Description of Artificial Sequence: Synthetic oligonucleotide
  Antisense Strand to SEQ ID NO: 411547
uuucucaaggcagaauccg

SEQ ID NO: 411549 - RNA, 19 nt, Artificial Sequence
  Description of Artificial Sequence: Synthetic oligonucleotide
  Sense Strand Starting at position 1183 of SEQ ID NO: 316412
gcaagaucagguuguacca

SEQ ID NO: 411550 - RNA, 19 nt, Artificial Sequence
  Description of Artificial Sequence: Synthetic oligonucleotide
  Antisense Strand to SEQ ID NO: 411549
ugguacaaccugaucuugc

SEQ ID NO: 411551 - RNA, 19 nt, Artificial Sequence
  Description of Artificial Sequence: Synthetic oligonucleotide
  Sense Strand Starting at position 1183 of SEQ ID NO: 316451
agaaacccguaucuaauua

SEQ ID NO: 411552 - RNA, 19 nt, Artificial Sequence
  Description of Artificial Sequence: Synthetic oligonucleotide
  Antisense Strand to SEQ ID NO: 411551
uaauuagauacggguuucu

SEQ ID NO: 411553 - RNA, 19 nt, Artificial Sequence
  Description of Artificial Sequence: Synthetic oligonucleotide
  Sense Strand Starting at position 1183 of SEQ ID NO: 316785
gucauucgucgcucuguga

SEQ ID NO: 411554 - RNA, 19 nt, Artificial Sequence
  Description of Artificial Sequence: Synthetic oligonucleotide
  Antisense Strand to SEQ ID NO: 411553
ucacagagcgacgaaugac

SEQ ID NO: 411555 - RNA, 19 nt, Artificial Sequence
  Description of Artificial Sequence: Synthetic oligonucleotide
  Sense Strand Starting at position 1183 of SEQ ID NO: 317513
cgcuuaaauguuggauauu

SEQ ID NO: 411556 - RNA, 19 nt, Artificial Sequence
  Description of Artificial Sequence: Synthetic oligonucleotide
  Antisense Strand to SEQ ID NO: 411555
aauauccaacauuuaagcg

SEQ ID NO: 411557 - RNA, 19 nt, Artificial Sequence
  Description of Artificial Sequence: Synthetic oligonucleotide
  Sense Strand Starting at position 1183 of SEQ ID NO: 317516
uuaaauguuggauauugca

SEQ ID NO: 411558 - RNA, 19 nt, Artificial Sequence
  Description of Artificial Sequence: Synthetic oligonucleotide
  Antisense Strand to SEQ ID NO: 411557
ugcaauauccaacauuuaa

SEQ ID NO: 411559 - RNA, 19 nt, Artificial Sequence
  Description of Artificial Sequence: Synthetic oligonucleotide
  Sense Strand Starting at position 1183 of SEQ ID NO: 317536
ugcggcagugccuugaaau

SEQ ID NO: 411560 - RNA, 19 nt, Artificial Sequence
  Description of Artificial Sequence: Synthetic oligonucleotide
  Antisense Strand to SEQ ID NO: 411559
auuucaaggcacugccgca

SEQ ID NO: 411561 - RNA, 19 nt, Artificial Sequence
  Description of Artificial Sequence: Synthetic oligonucleotide
  Sense Strand Starting at position 1183 of SEQ ID NO: 317548
uugaaauguacgugcagga

SEQ ID NO: 411562 - RNA, 19 nt, Artificial Sequence
  Description of Artificial Sequence: Synthetic oligonucleotide
  Antisense Strand to SEQ ID NO: 411561
uccugcacguacauuucaa

SEQ ID NO: 411563 - RNA, 19 nt, Artificial Sequence
  Description of Artificial Sequence: Synthetic oligonucleotide
  Sense Strand Starting at position 1183 of SEQ ID NO: 317566
auggaauguuagguaacua

SEQ ID NO: 411564 - RNA, 19 nt, Artificial Sequence
  Description of Artificial Sequence: Synthetic oligonucleotide
  Antisense Strand to SEQ ID NO: 411563
uaguuaccuaacauuccau

SEQ ID NO: 411565 - RNA, 19 nt, Artificial Sequence
  Description of Artificial Sequence: Synthetic oligonucleotide
  Sense Strand Starting at position 1183 of SEQ ID NO: 317592
cacucuugugaagauguau

SEQ ID NO: 411566 - RNA, 19 nt, Artificial Sequence
  Description of Artificial Sequence: Synthetic oligonucleotide
  Antisense Strand to SEQ ID NO: 411565
auacaucuucacaagagug

SEQ ID NO: 411567 - RNA, 19 nt, Artificial Sequence
  Description of Artificial Sequence: Synthetic oligonucleotide
  Sense Strand Starting at position 1183 of SEQ ID NO: 317718
auguuuaaugcaugaggga

SEQ ID NO: 411568 - RNA, 19 nt, Artificial Sequence
  Description of Artificial Sequence: Synthetic oligonucleotide
  Antisense Strand to SEQ ID NO: 411567
ucccucaugcauuaaacau

SEQ ID NO: 411569 - RNA, 19 nt, Artificial Sequence
  Description of Artificial Sequence: Synthetic oligonucleotide
  Sense Strand Starting at position 1183 of SEQ ID NO: 317770
gggugauaggauuguagau

SEQ ID NO: 411570 - RNA, 19 nt, Artificial Sequence
  Description of Artificial Sequence: Synthetic oligonucleotide
  Antisense Strand to SEQ ID NO: 411569
aucuacaauccuaucaccc

SEQ ID NO: 411571 - RNA, 19 nt, Artificial Sequence
  Description of Artificial Sequence: Synthetic oligonucleotide
  Sense Strand Starting at position 1183 of SEQ ID NO: 317813
cuguuauuggauugugcaa

SEQ ID NO: 411572 - RNA, 19 nt, Artificial Sequence
  Description of Artificial Sequence: Synthetic oligonucleotide
  Antisense Strand to SEQ ID NO: 411571
uugcacaauccaauaacag

SEQ ID NO: 411573 - RNA, 19 nt, Artificial Sequence
  Description of Artificial Sequence: Synthetic oligonucleotide
  Sense Strand Starting at position 1183 of SEQ ID NO: 317820
uggauugugcaaugaauaa

SEQ ID NO: 411574 - RNA, 19 nt, Artificial Sequence
  Description of Artificial Sequence: Synthetic oligonucleotide
  Antisense Strand to SEQ ID NO: 411573
uuauucauugcacaaucca

SEQ ID NO: 411575 - RNA, 19 nt, Artificial Sequence
  Description of Artificial Sequence: Synthetic oligonucleotide
  Sense Strand Starting at position 1183 of SEQ ID NO: 317858
ucuugucacuguuuaaacu

SEQ ID NO: 411576 - RNA, 19 nt, Artificial Sequence
  Description of Artificial Sequence: Synthetic oligonucleotide
  Antisense Strand to SEQ ID NO: 411575
aguuuaaacagugacaaga

SEQ ID NO: 411577 - RNA, 19 nt, Artificial Sequence
  Description of Artificial Sequence: Synthetic oligonucleotide
  Sense Strand Starting at position 1183 of SEQ ID NO: 318487
gucauaugagcaggagcau

SEQ ID NO: 411578 - RNA, 19 nt, Artificial Sequence
  Description of Artificial Sequence: Synthetic oligonucleotide
  Antisense Strand to SEQ ID NO: 411577
augcuccugcucauaugac

SEQ ID NO: 411579 - RNA, 19 nt, Artificial Sequence
  Description of Artificial Sequence: Synthetic oligonucleotide
  Sense Strand Starting at position 1183 of SEQ ID NO: 318488
ucauaugagcaggagcauu

SEQ ID NO: 411580 - RNA, 19 nt, Artificial Sequence
  Description of Artificial Sequence: Synthetic oligonucleotide
  Antisense Strand to SEQ ID NO: 411579
aaugcuccugcucauauga

SEQ ID NO: 411581 - RNA, 19 nt, Artificial Sequence
  Description of Artificial Sequence: Synthetic oligonucleotide
  Sense Strand Starting at position 1183 of SEQ ID NO: 318499
ggagcauugcugcaccuuu

SEQ ID NO: 411582 - RNA, 19 nt, Artificial Sequence
  Description of Artificial Sequence: Synthetic oligonucleotide
  Antisense Strand to SEQ ID NO: 411581
aaaggugcagcaaugcucc

SEQ ID NO: 411583 - RNA, 19 nt, Artificial Sequence
  Description of Artificial Sequence: Synthetic oligonucleotide
  Sense Strand Starting at position 1183 of SEQ ID NO: 318600
ugguguuccuucuuuauuu

SEQ ID NO: 411584 - RNA, 19 nt, Artificial Sequence
  Description of Artificial Sequence: Synthetic oligonucleotide
  Antisense Strand to SEQ ID NO: 411583
aaauaaagaaggaacacca

SEQ ID NO: 411585 - RNA, 19 nt, Artificial Sequence
  Description of Artificial Sequence: Synthetic oligonucleotide
  Sense Strand Starting at position 1183 of SEQ ID NO: 318977
ugcuauguagcccagacua

SEQ ID NO: 411586 - RNA, 19 nt, Artificial Sequence
  Description of Artificial Sequence: Synthetic oligonucleotide
  Antisense Strand to SEQ ID NO: 411585
uagucugggcuacauagca

SEQ ID NO: 411587 - RNA, 19 nt, Artificial Sequence
  Description of Artificial Sequence: Synthetic oligonucleotide
  Sense Strand Starting at position 1183 of SEQ ID NO: 318979
cuauguagcccagacuagu

SEQ ID NO: 411588 - RNA, 19 nt, Artificial Sequence
  Description of Artificial Sequence: Synthetic oligonucleotide
  Antisense Strand to SEQ ID NO: 411587
acuagucugggcuacauag

SEQ ID NO: 411589 - RNA, 19 nt, Artificial Sequence
  Description of Artificial Sequence: Synthetic oligonucleotide
  Sense Strand Starting at position 1183 of SEQ ID NO: 319083
ucugccuuuccuugacuga

SEQ ID NO: 411590 - RNA, 19 nt, Artificial Sequence
  Description of Artificial Sequence: Synthetic oligonucleotide
  Antisense Strand to SEQ ID NO: 411589
ucagucaaggaaaggcaga

SEQ ID NO: 411591 - RNA, 19 nt, Artificial Sequence
  Description of Artificial Sequence: Synthetic oligonucleotide
  Sense Strand Starting at position 1183 of SEQ ID NO: 319084
cugccuuuccuugacugaa

SEQ ID NO: 411592 - RNA, 19 nt, Artificial Sequence
  Description of Artificial Sequence: Synthetic oligonucleotide
  Antisense Strand to SEQ ID NO: 411591
uucagucaaggaaaggcag

SEQ ID NO: 411593 - RNA, 19 nt, Artificial Sequence
  Description of Artificial Sequence: Synthetic oligonucleotide
  Sense Strand Starting at position 1183 of SEQ ID NO: 319086
gccuuuccuugacugaagu

SEQ ID NO: 411594 - RNA, 19 nt, Artificial Sequence
  Description of Artificial Sequence: Synthetic oligonucleotide
  Antisense Strand to SEQ ID NO: 411593
acuucagucaaggaaaggc

SEQ ID NO: 411595 - RNA, 19 nt, Artificial Sequence
  Description of Artificial Sequence: Synthetic oligonucleotide
  Sense Strand Starting at position 1183 of SEQ ID NO: 319087
ccuuuccuugacugaagua

SEQ ID NO: 411596 - RNA, 19 nt, Artificial Sequence
  Description of Artificial Sequence: Synthetic oligonucleotide
  Antisense Strand to SEQ ID NO: 411595
uacuucagucaaggaaagg

SEQ ID NO: 411597 - RNA, 19 nt, Artificial Sequence
  Description of Artificial Sequence: Synthetic oligonucleotide
  Sense Strand Starting at position 1183 of SEQ ID NO: 319194
auggcuaaucccuguaauc

SEQ ID NO: 411598 - RNA, 19 nt, Artificial Sequence
  Description of Artificial Sequence: Synthetic oligonucleotide
  Antisense Strand to SEQ ID NO: 411597
gauuacagggauuagccau

SEQ ID NO: 411599 - RNA, 19 nt, Artificial Sequence
  Description of Artificial Sequence: Synthetic oligonucleotide
  Sense Strand Starting at position 1184 of SEQ ID NO: 315699
cuagcauugugaucgauuc

SEQ ID NO: 411600 - RNA, 19 nt, Artificial Sequence
  Description of Artificial Sequence: Synthetic oligonucleotide
  Antisense Strand to SEQ ID NO: 411599
gaaucgaucacaaugcuag

SEQ ID NO: 411601 - RNA, 19 nt, Artificial Sequence
  Description of Artificial Sequence: Synthetic oligonucleotide
  Sense Strand Starting at position 1184 of SEQ ID NO: 315716
ucagguuuagcugggaauc

SEQ ID NO: 411602 - RNA, 19 nt, Artificial Sequence
  Description of Artificial Sequence: Synthetic oligonucleotide
  Antisense Strand to SEQ ID NO: 411601
gauucccagcuaaaccuga

SEQ ID NO: 411603 - RNA, 19 nt, Artificial Sequence
  Description of Artificial Sequence: Synthetic oligonucleotide
  Sense Strand Starting at position 1184 of SEQ ID NO: 315717
cagguuuagcugggaaucu

SEQ ID NO: 411604 - RNA, 19 nt, Artificial Sequence
  Description of Artificial Sequence: Synthetic oligonucleotide
  Antisense Strand to SEQ ID NO: 411603
agauucccagcuaaaccug

SEQ ID NO: 411605 - RNA, 19 nt, Artificial Sequence
  Description of Artificial Sequence: Synthetic oligonucleotide
  Sense Strand Starting at position 1184 of SEQ ID NO: 315726
cugggaaucuugcuccaug

SEQ ID NO: 411606 - RNA, 19 nt, Artificial Sequence
  Description of Artificial Sequence: Synthetic oligonucleotide
  Antisense Strand to SEQ ID NO: 411605
cauggagcaagauucccag

SEQ ID NO: 411607 - RNA, 19 nt, Artificial Sequence
  Description of Artificial Sequence: Synthetic oligonucleotide
  Sense Strand Starting at position 1184 of SEQ ID NO: 315727
ugggaaucuugcuccauga

SEQ ID NO: 411608 - RNA, 19 nt, Artificial Sequence
  Description of Artificial Sequence: Synthetic oligonucleotide
  Antisense Strand to SEQ ID NO: 411607
ucauggagcaagauuccca

SEQ ID NO: 411609 - RNA, 19 nt, Artificial Sequence
  Description of Artificial Sequence: Synthetic oligonucleotide
  Sense Strand Starting at position 1184 of SEQ ID NO: 315729
ggaaucuugcuccaugaca

SEQ ID NO: 411610 - RNA, 19 nt, Artificial Sequence
  Description of Artificial Sequence: Synthetic oligonucleotide
  Antisense Strand to SEQ ID NO: 411609
ugucauggagcaagauucc

SEQ ID NO: 411611 - RNA, 19 nt, Artificial Sequence
  Description of Artificial Sequence: Synthetic oligonucleotide
  Sense Strand Starting at position 1184 of SEQ ID NO: 315883
gaaggaugcuaugcuauau

SEQ ID NO: 411612 - RNA, 19 nt, Artificial Sequence
  Description of Artificial Sequence: Synthetic oligonucleotide
  Antisense Strand to SEQ ID NO: 411611
auauagcauagcauccuuc

SEQ ID NO: 411613 - RNA, 19 nt, Artificial Sequence
  Description of Artificial Sequence: Synthetic oligonucleotide
  Sense Strand Starting at position 1184 of SEQ ID NO: 315948
ucuugagaagcauauugua

SEQ ID NO: 411614 - RNA, 19 nt, Artificial Sequence
  Description of Artificial Sequence: Synthetic oligonucleotide
  Antisense Strand to SEQ ID NO: 411613
uacaauaugcuucucaaga

SEQ ID NO: 411615 - RNA, 19 nt, Artificial Sequence
  Description of Artificial Sequence: Synthetic oligonucleotide
  Sense Strand Starting at position 1184 of SEQ ID NO: 316044
acaguaagcuuagcauaua

SEQ ID NO: 411616 - RNA, 19 nt, Artificial Sequence
  Description of Artificial Sequence: Synthetic oligonucleotide
  Antisense Strand to SEQ ID NO: 411615
uauaugcuaagcuuacugu

SEQ ID NO: 411617 - RNA, 19 nt, Artificial Sequence
  Description of Artificial Sequence: Synthetic oligonucleotide
  Sense Strand Starting at position 1184 of SEQ ID NO: 316181
gagggaaagcguuauccga

SEQ ID NO: 411618 - RNA, 19 nt, Artificial Sequence
  Description of Artificial Sequence: Synthetic oligonucleotide
  Antisense Strand to SEQ ID NO: 411617
ucggauaacgcuuucccuc

SEQ ID NO: 411619 - RNA, 19 nt, Artificial Sequence
  Description of Artificial Sequence: Synthetic oligonucleotide
  Sense Strand Starting at position 1184 of SEQ ID NO: 316183
gggaaagcguuauccgaaa

SEQ ID NO: 411620 - RNA, 19 nt, Artificial Sequence
  Description of Artificial Sequence: Synthetic oligonucleotide
  Antisense Strand to SEQ ID NO: 411619
uuucggauaacgcuuuccc

SEQ ID NO: 411621 - RNA, 19 nt, Artificial Sequence
  Description of Artificial Sequence: Synthetic oligonucleotide
  Sense Strand Starting at position 1184 of SEQ ID NO: 316321
accgcuaaucuccaaguau

SEQ ID NO: 411622 - RNA, 19 nt, Artificial Sequence
  Description of Artificial Sequence: Synthetic oligonucleotide
  Antisense Strand to SEQ ID NO: 411621
auacuuggagauuagcggu

SEQ ID NO: 411623 - RNA, 19 nt, Artificial Sequence
  Description of Artificial Sequence: Synthetic oligonucleotide
  Sense Strand Starting at position 1184 of SEQ ID NO: 316369
ccgucuuguagugagaacu

SEQ ID NO: 411624 - RNA, 19 nt, Artificial Sequence
  Description of Artificial Sequence: Synthetic oligonucleotide
  Antisense Strand to SEQ ID NO: 411623
aguucucacuacaagacgg

SEQ ID NO: 411625 - RNA, 19 nt, Artificial Sequence
  Description of Artificial Sequence: Synthetic oligonucleotide
  Sense Strand Starting at position 1184 of SEQ ID NO: 316426
gucggauucugccuugaga

SEQ ID NO: 411626 - RNA, 19 nt, Artificial Sequence
  Description of Artificial Sequence: Synthetic oligonucleotide
  Antisense Strand to SEQ ID NO: 411625
ucucaaggcagaauccgac

SEQ ID NO: 411627 - RNA, 19 nt, Artificial Sequence
  Description of Artificial Sequence: Synthetic oligonucleotide
  Sense Strand Starting at position 1184 of SEQ ID NO: 316428
cggauucugccuugagaaa

SEQ ID NO: 411628 - RNA, 19 nt, Artificial Sequence
  Description of Artificial Sequence: Synthetic oligonucleotide
  Antisense Strand to SEQ ID NO: 411627
uuucucaaggcagaauccg

SEQ ID NO: 411629 - RNA, 19 nt, Artificial Sequence
  Description of Artificial Sequence: Synthetic oligonucleotide
  Sense Strand Starting at position 1184 of SEQ ID NO: 316483
gcaagaucagguuguacca

SEQ ID NO: 411630 - RNA, 19 nt, Artificial Sequence
  Description of Artificial Sequence: Synthetic oligonucleotide
  Antisense Strand to SEQ ID NO: 411629
ugguacaaccugaucuugc

SEQ ID NO: 411631 - RNA, 19 nt, Artificial Sequence
  Description of Artificial Sequence: Synthetic oligonucleotide
  Sense Strand Starting at position 1184 of SEQ ID NO: 316522
agaaacccguaucuaauua

SEQ ID NO: 411632 - RNA, 19 nt, Artificial Sequence
  Description of Artificial Sequence: Synthetic oligonucleotide
  Antisense Strand to SEQ ID NO: 411631
uaauuagauacggguuucu

SEQ ID NO: 411633 - RNA, 19 nt, Artificial Sequence
  Description of Artificial Sequence: Synthetic oligonucleotide
  Sense Strand Starting at position 1184 of SEQ ID NO: 316583
cccuuuccgcagugagaac

SEQ ID NO: 411634 - RNA, 19 nt, Artificial Sequence
  Description of Artificial Sequence: Synthetic oligonucleotide
  Antisense Strand to SEQ ID NO: 411633
guucucacugcggaaaggg

SEQ ID NO: 411635 - RNA, 19 nt, Artificial Sequence
  Description of Artificial Sequence: Synthetic oligonucleotide
  Sense Strand Starting at position 1184 of SEQ ID NO: 316856
gucauucgucgcucuguga

SEQ ID NO: 411636 - RNA, 19 nt, Artificial Sequence
  Description of Artificial Sequence: Synthetic oligonucleotide
  Antisense Strand to SEQ ID NO: 411635
ucacagagcgacgaaugac

SEQ ID NO: 411637 - RNA, 19 nt, Artificial Sequence
  Description of Artificial Sequence: Synthetic oligonucleotide
  Sense Strand Starting at position 1184 of SEQ ID NO: 317584
cgcuuaaauguuggauauu

SEQ ID NO: 411638 - RNA, 19 nt, Artificial Sequence
  Description of Artificial Sequence: Synthetic oligonucleotide
  Antisense Strand to SEQ ID NO: 411637
aauauccaacauuuaagcg

SEQ ID NO: 411639 - RNA, 19 nt, Artificial Sequence
  Description of Artificial Sequence: Synthetic oligonucleotide
  Sense Strand Starting at position 1184 of SEQ ID NO: 317587
uuaaauguuggauauugca

SEQ ID NO: 411640 - RNA, 19 nt, Artificial Sequence
  Description of Artificial Sequence: Synthetic oligonucleotide
  Antisense Strand to SEQ ID NO: 411639
ugcaauauccaacauuuaa

SEQ ID NO: 411641 - RNA, 19 nt, Artificial Sequence
  Description of Artificial Sequence: Synthetic oligonucleotide
  Sense Strand Starting at position 1184 of SEQ ID NO: 317607
ugcggcagugccuugaaau

SEQ ID NO: 411642 - RNA, 19 nt, Artificial Sequence
  Description of Artificial Sequence: Synthetic oligonucleotide
  Antisense Strand to SEQ ID NO: 411641
auuucaaggcacugccgca

SEQ ID NO: 411643 - RNA, 19 nt, Artificial Sequence
  Description of Artificial Sequence: Synthetic oligonucleotide
  Sense Strand Starting at position 1184 of SEQ ID NO: 317619
uugaaauguacgugcagga

SEQ ID NO: 411644 - RNA, 19 nt, Artificial Sequence
  Description of Artificial Sequence: Synthetic oligonucleotide
  Antisense Strand to SEQ ID NO: 411643
uccugcacguacauuucaa

SEQ ID NO: 411645 - RNA, 19 nt, Artificial Sequence
  Description of Artificial Sequence: Synthetic oligonucleotide
  Sense Strand Starting at position 1184 of SEQ ID NO: 317637
auggaauguuagguaacua

SEQ ID NO: 411646 - RNA, 19 nt, Artificial Sequence
  Description of Artificial Sequence: Synthetic oligonucleotide
  Antisense Strand to SEQ ID NO: 411645
uaguuaccuaacauuccau

SEQ ID NO: 411647 - RNA, 19 nt, Artificial Sequence
  Description of Artificial Sequence: Synthetic oligonucleotide
  Sense Strand Starting at position 1184 of SEQ ID NO: 317663
cacucuugugaagauguau

SEQ ID NO: 411648 - RNA, 19 nt, Artificial Sequence
  Description of Artificial Sequence: Synthetic oligonucleotide
  Antisense Strand to SEQ ID NO: 411647
auacaucuucacaagagug

SEQ ID NO: 411649 - RNA, 19 nt, Artificial Sequence
  Description of Artificial Sequence: Synthetic oligonucleotide
  Sense Strand Starting at position 1184 of SEQ ID NO: 317789
auguuuaaugcaugaggga

SEQ ID NO: 411650 - RNA, 19 nt, Artificial Sequence
  Description of Artificial Sequence: Synthetic oligonucleotide
  Antisense Strand to SEQ ID NO: 411649
ucccucaugcauuaaacau

SEQ ID NO: 411651 - RNA, 19 nt, Artificial Sequence
  Description of Artificial Sequence: Synthetic oligonucleotide
  Sense Strand Starting at position 1184 of SEQ ID NO: 317841
gggugauaggauuguagau

SEQ ID NO: 411652 - RNA, 19 nt, Artificial Sequence
  Description of Artificial Sequence: Synthetic oligonucleotide
  Antisense Strand to SEQ ID NO: 411651
aucuacaauccuaucaccc

SEQ ID NO: 411653 - RNA, 19 nt, Artificial Sequence
  Description of Artificial Sequence: Synthetic oligonucleotide
  Sense Strand Starting at position 1184 of SEQ ID NO: 317884
cuguuauuggauugugcaa

SEQ ID NO: 411654 - RNA, 19 nt, Artificial Sequence
  Description of Artificial Sequence: Synthetic oligonucleotide
  Antisense Strand to SEQ ID NO: 411653
uugcacaauccaauaacag

SEQ ID NO: 411655 - RNA, 19 nt, Artificial Sequence
  Description of Artificial Sequence: Synthetic oligonucleotide
  Sense Strand Starting at position 1184 of SEQ ID NO: 317891
uggauugugcaaugaauaa

SEQ ID NO: 411656 - RNA, 19 nt, Artificial Sequence
  Description of Artificial Sequence: Synthetic oligonucleotide
  Antisense Strand to SEQ ID NO: 411655
uuauucauugcacaaucca

SEQ ID NO: 411657 - RNA, 19 nt, Artificial Sequence
  Description of Artificial Sequence: Synthetic oligonucleotide
  Sense Strand Starting at position 1184 of SEQ ID NO: 317929
ucuugucacuguuuaaacu

SEQ ID NO: 411658 - RNA, 19 nt, Artificial Sequence
  Description of Artificial Sequence: Synthetic oligonucleotide
  Antisense Strand to SEQ ID NO: 411657
aguuuaaacagugacaaga

SEQ ID NO: 411659 - RNA, 19 nt, Artificial Sequence
  Description of Artificial Sequence: Synthetic oligonucleotide
  Sense Strand Starting at position 1184 of SEQ ID NO: 318558
gucauaugagcaggagcau

SEQ ID NO: 411660 - RNA, 19 nt, Artificial Sequence
  Description of Artificial Sequence: Synthetic oligonucleotide
  Antisense Strand to SEQ ID NO: 411659
augcuccugcucauaugac

SEQ ID NO: 411661 - RNA, 19 nt, Artificial Sequence
  Description of Artificial Sequence: Synthetic oligonucleotide
  Sense Strand Starting at position 1184 of SEQ ID NO: 318559
ucauaugagcaggagcauu

SEQ ID NO: 411662 - RNA, 19 nt, Artificial Sequence
  Description of Artificial Sequence: Synthetic oligonucleotide
  Antisense Strand to SEQ ID NO: 411661
aaugcuccugcucauauga

SEQ ID NO: 411663 - RNA, 19 nt, Artificial Sequence
  Description of Artificial Sequence: Synthetic oligonucleotide
  Sense Strand Starting at position 1184 of SEQ ID NO: 318570
ggagcauugcugcaccuuu

SEQ ID NO: 411664 - RNA, 19 nt, Artificial Sequence
  Description of Artificial Sequence: Synthetic oligonucleotide
  Antisense Strand to SEQ ID NO: 411663
aaaggugcagcaaugcucc

SEQ ID NO: 411665 - RNA, 19 nt, Artificial Sequence
  Description of Artificial Sequence: Synthetic oligonucleotide
  Sense Strand Starting at position 1184 of SEQ ID NO: 318671
ugguguuccuucuuuauuu

SEQ ID NO: 411666 - RNA, 19 nt, Artificial Sequence
  Description of Artificial Sequence: Synthetic oligonucleotide
  Antisense Strand to SEQ ID NO: 411665
aaauaaagaaggaacacca

SEQ ID NO: 411667 - RNA, 19 nt, Artificial Sequence
  Description of Artificial Sequence: Synthetic oligonucleotide
  Sense Strand Starting at position 1184 of SEQ ID NO: 319048
ugcuauguagcccagacua

SEQ ID NO: 411668 - RNA, 19 nt, Artificial Sequence
  Description of Artificial Sequence: Synthetic oligonucleotide
  Antisense Strand to SEQ ID NO: 411667
uagucugggcuacauagca

SEQ ID NO: 411669 - RNA, 19 nt, Artificial Sequence
  Description of Artificial Sequence: Synthetic oligonucleotide
  Sense Strand Starting at position 1184 of SEQ ID NO: 319050
cuauguagcccagacuagu

SEQ ID NO: 411670 - RNA, 19 nt, Artificial Sequence
  Description of Artificial Sequence: Synthetic oligonucleotide
  Antisense Strand to SEQ ID NO: 411669
acuagucugggcuacauag

SEQ ID NO: 411671 - RNA, 19 nt, Artificial Sequence
  Description of Artificial Sequence: Synthetic oligonucleotide
  Sense Strand Starting at position 1184 of SEQ ID NO: 319154
ucugccuuuccuugacuga

SEQ ID NO: 411672 - RNA, 19 nt, Artificial Sequence
  Description of Artificial Sequence: Synthetic oligonucleotide
  Antisense Strand to SEQ ID NO: 411671
ucagucaaggaaaggcaga

SEQ ID NO: 411673 - RNA, 19 nt, Artificial Sequence
  Description of Artificial Sequence: Synthetic oligonucleotide
  Sense Strand Starting at position 1184 of SEQ ID NO: 319155
cugccuuuccuugacugaa

SEQ ID NO: 411674 - RNA, 19 nt, Artificial Sequence
  Description of Artificial Sequence: Synthetic oligonucleotide
  Antisense Strand to SEQ ID NO: 411673
uucagucaaggaaaggcag

SEQ ID NO: 411675 - RNA, 19 nt, Artificial Sequence
  Description of Artificial Sequence: Synthetic oligonucleotide
  Sense Strand Starting at position 1184 of SEQ ID NO: 319157
gccuuuccuugacugaagu

SEQ ID NO: 411676 - RNA, 19 nt, Artificial Sequence
  Description of Artificial Sequence: Synthetic oligonucleotide
  Antisense Strand to SEQ ID NO: 411675
acuucagucaaggaaaggc

SEQ ID NO: 411677 - RNA, 19 nt, Artificial Sequence
  Description of Artificial Sequence: Synthetic oligonucleotide
  Sense Strand Starting at position 1184 of SEQ ID NO: 319158
ccuuuccuugacugaagua

SEQ ID NO: 411678 - RNA, 19 nt, Artificial Sequence
  Description of Artificial Sequence: Synthetic oligonucleotide
  Antisense Strand to SEQ ID NO: 411677
uacuucagucaaggaaagg

SEQ ID NO: 411679 - RNA, 19 nt, Artificial Sequence
  Description of Artificial Sequence: Synthetic oligonucleotide
  Sense Strand Starting at position 1185 of SEQ ID NO: 315266
cuacaugggucaucuccaa

SEQ ID NO: 411680 - RNA, 19 nt, Artificial Sequence
  Description of Artificial Sequence: Synthetic oligonucleotide
  Antisense Strand to SEQ ID NO: 411679
uuggagaugacccauguag

SEQ ID NO: 411681 - RNA, 19 nt, Artificial Sequence
  Description of Artificial Sequence: Synthetic oligonucleotide
  Sense Strand Starting at position 1185 of SEQ ID NO: 315270
augggucaucuccaaguca

SEQ ID NO: 411682 - RNA, 19 nt, Artificial Sequence
  Description of Artificial Sequence: Synthetic oligonucleotide
  Antisense Strand to SEQ ID NO: 411681
ugacuuggagaugacccau

SEQ ID NO: 411683 - RNA, 19 nt, Artificial Sequence
  Description of Artificial Sequence: Synthetic oligonucleotide
  Sense Strand Starting at position 1185 of SEQ ID NO: 315322
cgauacguaagauguuaaa

SEQ ID NO: 411684 - RNA, 19 nt, Artificial Sequence
  Description of Artificial Sequence: Synthetic oligonucleotide
  Antisense Strand to SEQ ID NO: 411683
uuuaacaucuuacguaucg

SEQ ID NO: 411685 - RNA, 19 nt, Artificial Sequence
  Description of Artificial Sequence: Synthetic oligonucleotide
  Sense Strand Starting at position 1185 of SEQ ID NO: 315470
uuuggaucauagcugcaaa

SEQ ID NO: 411686 - RNA, 19 nt, Artificial Sequence
  Description of Artificial Sequence: Synthetic oligonucleotide
  Antisense Strand to SEQ ID NO: 411685
uuugcagcuaugauccaaa

SEQ ID NO: 411687 - RNA, 19 nt, Artificial Sequence
  Description of Artificial Sequence: Synthetic oligonucleotide
  Sense Strand Starting at position 1185 of SEQ ID NO: 316015
uucgguuuccaacaaacga

SEQ ID NO: 411688 - RNA, 19 nt, Artificial Sequence
  Description of Artificial Sequence: Synthetic oligonucleotide
  Antisense Strand to SEQ ID NO: 411687
ucguuuguuggaaaccgaa

SEQ ID NO: 411689 - RNA, 19 nt, Artificial Sequence
  Description of Artificial Sequence: Synthetic oligonucleotide
  Sense Strand Starting at position 1185 of SEQ ID NO: 316110
guaggcauucagugaggga

SEQ ID NO: 411690 - RNA, 19 nt, Artificial Sequence
  Description of Artificial Sequence: Synthetic oligonucleotide
  Antisense Strand to SEQ ID NO: 411689
ucccucacugaaugccuac

SEQ ID NO: 411691 - RNA, 19 nt, Artificial Sequence
  Description of Artificial Sequence: Synthetic oligonucleotide
  Sense Strand Starting at position 1185 of SEQ ID NO: 316114
gcauucagugagggauucu

SEQ ID NO: 411692 - RNA, 19 nt, Artificial Sequence
  Description of Artificial Sequence: Synthetic oligonucleotide
  Antisense Strand to SEQ ID NO: 411691
agaaucccucacugaaugc

SEQ ID NO: 411693 - RNA, 19 nt, Artificial Sequence
  Description of Artificial Sequence: Synthetic oligonucleotide
  Sense Strand Starting at position 1185 of SEQ ID NO: 316277
ggccgucuccaggagcuaa

SEQ ID NO: 411694 - RNA, 19 nt, Artificial Sequence
  Description of Artificial Sequence: Synthetic oligonucleotide
  Antisense Strand to SEQ ID NO: 411693
uuagcuccuggagacggcc

SEQ ID NO: 411695 - RNA, 19 nt, Artificial Sequence
  Description of Artificial Sequence: Synthetic oligonucleotide
  Sense Strand Starting at position 1185 of SEQ ID NO: 316636
gggaaacuuuccucguuuc

SEQ ID NO: 411696 - RNA, 19 nt, Artificial Sequence
  Description of Artificial Sequence: Synthetic oligonucleotide
  Antisense Strand to SEQ ID NO: 411695
gaaacgaggaaaguuuccc

SEQ ID NO: 411697 - RNA, 19 nt, Artificial Sequence
  Description of Artificial Sequence: Synthetic oligonucleotide
  Sense Strand Starting at position 1185 of SEQ ID NO: 317519
aguugagauccaggaguga

SEQ ID NO: 411698 - RNA, 19 nt, Artificial Sequence
  Description of Artificial Sequence: Synthetic oligonucleotide
  Antisense Strand to SEQ ID NO: 411697
ucacuccuggaucucaacu

SEQ ID NO: 411699 - RNA, 19 nt, Artificial Sequence
  Description of Artificial Sequence: Synthetic oligonucleotide
  Sense Strand Starting at position 1185 of SEQ ID NO: 317530
aggagugaauacuccaauc

SEQ ID NO: 411700 - RNA, 19 nt, Artificial Sequence
  Description of Artificial Sequence: Synthetic oligonucleotide
  Antisense Strand to SEQ ID NO: 411699
gauuggaguauucacuccu

SEQ ID NO: 411701 - RNA, 19 nt, Artificial Sequence
  Description of Artificial Sequence: Synthetic oligonucleotide
  Sense Strand Starting at position 1185 of SEQ ID NO: 317686
ggucgaagucuagagguuu

SEQ ID NO: 411702 - RNA, 19 nt, Artificial Sequence
  Description of Artificial Sequence: Synthetic oligonucleotide
  Antisense Strand to SEQ ID NO: 411701
aaaccucuagacuucgacc

SEQ ID NO: 411703 - RNA, 19 nt, Artificial Sequence
  Description of Artificial Sequence: Synthetic oligonucleotide
  Sense Strand Starting at position 1185 of SEQ ID NO: 317806
uaaugagcaccuggauaga

SEQ ID NO: 411704 - RNA, 19 nt, Artificial Sequence
  Description of Artificial Sequence: Synthetic oligonucleotide
  Antisense Strand to SEQ ID NO: 411703
ucuauccaggugcucauua

SEQ ID NO: 411705 - RNA, 19 nt, Artificial Sequence
  Description of Artificial Sequence: Synthetic oligonucleotide
  Sense Strand Starting at position 1185 of SEQ ID NO: 317852
gggacugagucagugagua

SEQ ID NO: 411706 - RNA, 19 nt, Artificial Sequence
  Description of Artificial Sequence: Synthetic oligonucleotide
  Antisense Strand to SEQ ID NO: 411705
uacucacugacucaguccc

SEQ ID NO: 411707 - RNA, 19 nt, Artificial Sequence
  Description of Artificial Sequence: Synthetic oligonucleotide
  Sense Strand Starting at position 1185 of SEQ ID NO: 317854
gacugagucagugaguaau

SEQ ID NO: 411708 - RNA, 19 nt, Artificial Sequence
  Description of Artificial Sequence: Synthetic oligonucleotide
  Antisense Strand to SEQ ID NO: 411707
auuacucacugacucaguc

SEQ ID NO: 411709 - RNA, 19 nt, Artificial Sequence
  Description of Artificial Sequence: Synthetic oligonucleotide
  Sense Strand Starting at position 1185 of SEQ ID NO: 317856
cugagucagugaguaauug

SEQ ID NO: 411710 - RNA, 19 nt, Artificial Sequence
  Description of Artificial Sequence: Synthetic oligonucleotide
  Antisense Strand to SEQ ID NO: 411709
caauuacucacugacucag

SEQ ID NO: 411711 - RNA, 19 nt, Artificial Sequence
  Description of Artificial Sequence: Synthetic oligonucleotide
  Sense Strand Starting at position 1185 of SEQ ID NO: 317857
ugagucagugaguaauugu

SEQ ID NO: 411712 - RNA, 19 nt, Artificial Sequence
  Description of Artificial Sequence: Synthetic oligonucleotide
  Antisense Strand to SEQ ID NO: 411711
acaauuacucacugacuca

SEQ ID NO: 411713 - RNA, 19 nt, Artificial Sequence
  Description of Artificial Sequence: Synthetic oligonucleotide
  Sense Strand Starting at position 1185 of SEQ ID NO: 317860
gucagugaguaauuguaaa

SEQ ID NO: 411714 - RNA, 19 nt, Artificial Sequence
  Description of Artificial Sequence: Synthetic oligonucleotide
  Antisense Strand to SEQ ID NO: 411713
uuuacaauuacucacugac

SEQ ID NO: 411715 - RNA, 19 nt, Artificial Sequence
  Description of Artificial Sequence: Synthetic oligonucleotide
  Sense Strand Starting at position 1185 of SEQ ID NO: 317885
ccuaucacgaagugauagu

SEQ ID NO: 411716 - RNA, 19 nt, Artificial Sequence
  Description of Artificial Sequence: Synthetic oligonucleotide
  Antisense Strand to SEQ ID NO: 411715
acuaucacuucgugauagg

SEQ ID NO: 411717 - RNA, 19 nt, Artificial Sequence
  Description of Artificial Sequence: Synthetic oligonucleotide
  Sense Strand Starting at position 1185 of SEQ ID NO: 317895
agugauaguggugggaaau

SEQ ID NO: 411718 - RNA, 19 nt, Artificial Sequence
  Description of Artificial Sequence: Synthetic oligonucleotide
  Antisense Strand to SEQ ID NO: 411717
auuucccaccacuaucacu

SEQ ID NO: 411719 - RNA, 19 nt, Artificial Sequence
  Description of Artificial Sequence: Synthetic oligonucleotide
  Sense Strand Starting at position 1185 of SEQ ID NO: 317896
gugauaguggugggaaaug

SEQ ID NO: 411720 - RNA, 19 nt, Artificial Sequence
  Description of Artificial Sequence: Synthetic oligonucleotide
  Antisense Strand to SEQ ID NO: 411719
cauuucccaccacuaucac

SEQ ID NO: 411721 - RNA, 19 nt, Artificial Sequence
  Description of Artificial Sequence: Synthetic oligonucleotide
  Sense Strand Starting at position 1185 of SEQ ID NO: 317901
aguggugggaaauguaauu

SEQ ID NO: 411722 - RNA, 19 nt, Artificial Sequence
  Description of Artificial Sequence: Synthetic oligonucleotide
  Antisense Strand to SEQ ID NO: 411721
aauuacauuucccaccacu

SEQ ID NO: 411723 - RNA, 19 nt, Artificial Sequence
  Description of Artificial Sequence: Synthetic oligonucleotide
  Sense Strand Starting at position 1185 of SEQ ID NO: 317924
gaauguauagaguauagca

SEQ ID NO: 411724 - RNA, 19 nt, Artificial Sequence
  Description of Artificial Sequence: Synthetic oligonucleotide
  Antisense Strand to SEQ ID NO: 411723
ugcuauacucuauacauuc

SEQ ID NO: 411725 - RNA, 19 nt, Artificial Sequence
  Description of Artificial Sequence: Synthetic oligonucleotide
  Sense Strand Starting at position 1185 of SEQ ID NO: 318180
auauguccugauuggauaa

SEQ ID NO: 411726 - RNA, 19 nt, Artificial Sequence
  Description of Artificial Sequence: Synthetic oligonucleotide
  Antisense Strand to SEQ ID NO: 411725
uuauccaaucaggacauau

SEQ ID NO: 411727 - RNA, 19 nt, Artificial Sequence
  Description of Artificial Sequence: Synthetic oligonucleotide
  Sense Strand Starting at position 1185 of SEQ ID NO: 318187
cugauuggauaauaaacua

SEQ ID NO: 411728 - RNA, 19 nt, Artificial Sequence
  Description of Artificial Sequence: Synthetic oligonucleotide
  Antisense Strand to SEQ ID NO: 411727
uaguuuauuauccaaucag

SEQ ID NO: 411729 - RNA, 19 nt, Artificial Sequence
  Description of Artificial Sequence: Synthetic oligonucleotide
  Sense Strand Starting at position 1185 of SEQ ID NO: 318258
gucaguagaucuucuagca

SEQ ID NO: 411730 - RNA, 19 nt, Artificial Sequence
  Description of Artificial Sequence: Synthetic oligonucleotide
  Antisense Strand to SEQ ID NO: 411729
ugcuagaagaucuacugac

SEQ ID NO: 411731 - RNA, 19 nt, Artificial Sequence
  Description of Artificial Sequence: Synthetic oligonucleotide
  Sense Strand Starting at position 1185 of SEQ ID NO: 318287
ugaauuccuuuaccugaga

SEQ ID NO: 411732 - RNA, 19 nt, Artificial Sequence
  Description of Artificial Sequence: Synthetic oligonucleotide
  Antisense Strand to SEQ ID NO: 411731
ucucagguaaaggaauuca

SEQ ID NO: 411733 - RNA, 19 nt, Artificial Sequence
  Description of Artificial Sequence: Synthetic oligonucleotide
  Sense Strand Starting at position 1185 of SEQ ID NO: 318477
gccacuucccaguacucau

SEQ ID NO: 411734 - RNA, 19 nt, Artificial Sequence
  Description of Artificial Sequence: Synthetic oligonucleotide
  Antisense Strand to SEQ ID NO: 411733
augaguacugggaaguggc

SEQ ID NO: 411735 - RNA, 19 nt, Artificial Sequence
  Description of Artificial Sequence: Synthetic oligonucleotide
  Sense Strand Starting at position 1185 of SEQ ID NO: 318492
ucauguugaagaugcagaa

SEQ ID NO: 411736 - RNA, 19 nt, Artificial Sequence
  Description of Artificial Sequence: Synthetic oligonucleotide
  Antisense Strand to SEQ ID NO: 411735
uucugcaucuucaacauga

SEQ ID NO: 411737 - RNA, 19 nt, Artificial Sequence
  Description of Artificial Sequence: Synthetic oligonucleotide
  Sense Strand Starting at position 1185 of SEQ ID NO: 318506
cagaaagugcagugaaauc

SEQ ID NO: 411738 - RNA, 19 nt, Artificial Sequence
  Description of Artificial Sequence: Synthetic oligonucleotide
  Antisense Strand to SEQ ID NO: 411737
gauuucacugcacuuucug

SEQ ID NO: 411739 - RNA, 19 nt, Artificial Sequence
  Description of Artificial Sequence: Synthetic oligonucleotide
  Sense Strand Starting at position 1185 of SEQ ID NO: 318574
uggagugacuuugucaaug

SEQ ID NO: 411740 - RNA, 19 nt, Artificial Sequence
  Description of Artificial Sequence: Synthetic oligonucleotide
  Antisense Strand to SEQ ID NO: 411739
cauugacaaagucacucca

SEQ ID NO: 411741 - RNA, 19 nt, Artificial Sequence
  Description of Artificial Sequence: Synthetic oligonucleotide
  Sense Strand Starting at position 1185 of SEQ ID NO: 318579
ugacuuugucaauggagga

SEQ ID NO: 411742 - RNA, 19 nt, Artificial Sequence
  Description of Artificial Sequence: Synthetic oligonucleotide
  Antisense Strand to SEQ ID NO: 411741
uccuccauugacaaaguca

SEQ ID NO: 411743 - RNA, 19 nt, Artificial Sequence
  Description of Artificial Sequence: Synthetic oligonucleotide
  Sense Strand Starting at position 1185 of SEQ ID NO: 318668
aggagucucccacgaguca

SEQ ID NO: 411744 - RNA, 19 nt, Artificial Sequence
  Description of Artificial Sequence: Synthetic oligonucleotide
  Antisense Strand to SEQ ID NO: 411743
ugacucgugggagacuccu

SEQ ID NO: 411745 - RNA, 19 nt, Artificial Sequence
  Description of Artificial Sequence: Synthetic oligonucleotide
  Sense Strand Starting at position 1185 of SEQ ID NO: 318806
cccacugcucuugagauaa

SEQ ID NO: 411746 - RNA, 19 nt, Artificial Sequence
  Description of Artificial Sequence: Synthetic oligonucleotide
  Antisense Strand to SEQ ID NO: 411745
uuaucucaagagcaguggg

SEQ ID NO: 411747 - RNA, 19 nt, Artificial Sequence
  Description of Artificial Sequence: Synthetic oligonucleotide
  Sense Strand Starting at position 1185 of SEQ ID NO: 318836
aaaccagauccuugaacgu

SEQ ID NO: 411748 - RNA, 19 nt, Artificial Sequence
  Description of Artificial Sequence: Synthetic oligonucleotide
  Antisense Strand to SEQ ID NO: 411747
acguucaaggaucugguuu

SEQ ID NO: 411749 - RNA, 19 nt, Artificial Sequence
  Description of Artificial Sequence: Synthetic oligonucleotide
  Sense Strand Starting at position 1185 of SEQ ID NO: 318931
ugaauaugccucuguaauc

SEQ ID NO: 411750 - RNA, 19 nt, Artificial Sequence
  Description of Artificial Sequence: Synthetic oligonucleotide
  Antisense Strand to SEQ ID NO: 411749
gauuacagaggcauauuca

SEQ ID NO: 411751 - RNA, 19 nt, Artificial Sequence
  Description of Artificial Sequence: Synthetic oligonucleotide
  Sense Strand Starting at position 1185 of SEQ ID NO: 319027
ccuggucuucguggauuga

SEQ ID NO: 411752 - RNA, 19 nt, Artificial Sequence
  Description of Artificial Sequence: Synthetic oligonucleotide
  Antisense Strand to SEQ ID NO: 411751
ucaauccacgaagaccagg

SEQ ID NO: 411753 - RNA, 19 nt, Artificial Sequence
  Description of Artificial Sequence: Synthetic oligonucleotide
  Sense Strand Starting at position 1185 of SEQ ID NO: 319028
cuggucuucguggauugaa

SEQ ID NO: 411754 - RNA, 19 nt, Artificial Sequence
  Description of Artificial Sequence: Synthetic oligonucleotide
  Antisense Strand to SEQ ID NO: 411753
uucaauccacgaagaccag

SEQ ID NO: 411755 - RNA, 19 nt, Artificial Sequence
  Description of Artificial Sequence: Synthetic oligonucleotide
  Sense Strand Starting at position 1185 of SEQ ID NO: 319031
gucuucguggauugaauca

SEQ ID NO: 411756 - RNA, 19 nt, Artificial Sequence
  Description of Artificial Sequence: Synthetic oligonucleotide
  Antisense Strand to SEQ ID NO: 411755
ugauucaauccacgaagac

SEQ ID NO: 411757 - RNA, 19 nt, Artificial Sequence
  Description of Artificial Sequence: Synthetic oligonucleotide
  Sense Strand Starting at position 1185 of SEQ ID NO: 319036
cguggauugaaucauaacu

SEQ ID NO: 411758 - RNA, 19 nt, Artificial Sequence
  Description of Artificial Sequence: Synthetic oligonucleotide
  Antisense Strand to SEQ ID NO: 411757
aguuaugauucaauccacg

SEQ ID NO: 411759 - RNA, 19 nt, Artificial Sequence
  Description of Artificial Sequence: Synthetic oligonucleotide
  Sense Strand Starting at position 1186 of SEQ ID NO: 315257
ugagauagauaucuggcuu

SEQ ID NO: 411760 - RNA, 19 nt, Artificial Sequence
  Description of Artificial Sequence: Synthetic oligonucleotide
  Antisense Strand to SEQ ID NO: 411759
aagccagauaucuaucuca

SEQ ID NO: 411761 - RNA, 19 nt, Artificial Sequence
  Description of Artificial Sequence: Synthetic oligonucleotide
  Sense Strand Starting at position 1186 of SEQ ID NO: 315291
acuaaccaguuguccuaau

SEQ ID NO: 411762 - RNA, 19 nt, Artificial Sequence
  Description of Artificial Sequence: Synthetic oligonucleotide
  Antisense Strand to SEQ ID NO: 411761
auuaggacaacugguuagu

SEQ ID NO: 411763 - RNA, 19 nt, Artificial Sequence
  Description of Artificial Sequence: Synthetic oligonucleotide
  Sense Strand Starting at position 1186 of SEQ ID NO: 315292
cuaaccaguuguccuaaua

SEQ ID NO: 411764 - RNA, 19 nt, Artificial Sequence
  Description of Artificial Sequence: Synthetic oligonucleotide
  Antisense Strand to SEQ ID NO: 411763
uauuaggacaacugguuag

SEQ ID NO: 411765 - RNA, 19 nt, Artificial Sequence
  Description of Artificial Sequence: Synthetic oligonucleotide
  Sense Strand Starting at position 1186 of SEQ ID NO: 315302
guccuaauaccauaaagug

SEQ ID NO: 411766 - RNA, 19 nt, Artificial Sequence
  Description of Artificial Sequence: Synthetic oligonucleotide
  Antisense Strand to SEQ ID NO: 411765
cacuuuaugguauuaggac

SEQ ID NO: 411767 - RNA, 19 nt, Artificial Sequence
  Description of Artificial Sequence: Synthetic oligonucleotide
  Sense Strand Starting at position 1186 of SEQ ID NO: 315411
cuccuagagugguuggaag

SEQ ID NO: 411768 - RNA, 19 nt, Artificial Sequence
  Description of Artificial Sequence: Synthetic oligonucleotide
  Antisense Strand to SEQ ID NO: 411767
cuuccaaccacucuaggag

SEQ ID NO: 411769 - RNA, 19 nt, Artificial Sequence
  Description of Artificial Sequence: Synthetic oligonucleotide
  Sense Strand Starting at position 1186 of SEQ ID NO: 315413
ccuagagugguuggaagaa

SEQ ID NO: 411770 - RNA, 19 nt, Artificial Sequence
  Description of Artificial Sequence: Synthetic oligonucleotide
  Antisense Strand to SEQ ID NO: 411769
uucuuccaaccacucuagg

SEQ ID NO: 411771 - RNA, 19 nt, Artificial Sequence
  Description of Artificial Sequence: Synthetic oligonucleotide
  Sense Strand Starting at position 1186 of SEQ ID NO: 315581
ccaggagaugacugucuuu

SEQ ID NO: 411772 - RNA, 19 nt, Artificial Sequence
  Description of Artificial Sequence: Synthetic oligonucleotide
  Antisense Strand to SEQ ID NO: 411771
aaagacagucaucuccugg

SEQ ID NO: 411773 - RNA, 19 nt, Artificial Sequence
  Description of Artificial Sequence: Synthetic oligonucleotide
  Sense Strand Starting at position 1186 of SEQ ID NO: 315584
ggagaugacugucuuuggu

SEQ ID NO: 411774 - RNA, 19 nt, Artificial Sequence
  Description of Artificial Sequence: Synthetic oligonucleotide
  Antisense Strand to SEQ ID NO: 411773
accaaagacagucaucucc

SEQ ID NO: 411775 - RNA, 19 nt, Artificial Sequence
  Description of Artificial Sequence: Synthetic oligonucleotide
  Sense Strand Starting at position 1186 of SEQ ID NO: 315586
agaugacugucuuugguga

SEQ ID NO: 411776 - RNA, 19 nt, Artificial Sequence
  Description of Artificial Sequence: Synthetic oligonucleotide
  Antisense Strand to SEQ ID NO: 411775
ucaccaaagacagucaucu

SEQ ID NO: 411777 - RNA, 19 nt, Artificial Sequence
  Description of Artificial Sequence: Synthetic oligonucleotide
  Sense Strand Starting at position 1186 of SEQ ID NO: 315587
gaugacugucuuuggugau

SEQ ID NO: 411778 - RNA, 19 nt, Artificial Sequence
  Description of Artificial Sequence: Synthetic oligonucleotide
  Antisense Strand to SEQ ID NO: 411777
aucaccaaagacagucauc

SEQ ID NO: 411779 - RNA, 19 nt, Artificial Sequence
  Description of Artificial Sequence: Synthetic oligonucleotide
  Sense Strand Starting at position 1186 of SEQ ID NO: 315651
cauaguguggcaugaaaug

SEQ ID NO: 411780 - RNA, 19 nt, Artificial Sequence
  Description of Artificial Sequence: Synthetic oligonucleotide
  Antisense Strand to SEQ ID NO: 411779
cauuucaugccacacuaug

SEQ ID NO: 411781 - RNA, 19 nt, Artificial Sequence
  Description of Artificial Sequence: Synthetic oligonucleotide
  Sense Strand Starting at position 1186 of SEQ ID NO: 315797
ucagguaguccucaguaau

SEQ ID NO: 411782 - RNA, 19 nt, Artificial Sequence
  Description of Artificial Sequence: Synthetic oligonucleotide
  Antisense Strand to SEQ ID NO: 411781
auuacugaggacuaccuga

SEQ ID NO: 411783 - RNA, 19 nt, Artificial Sequence
  Description of Artificial Sequence: Synthetic oligonucleotide
  Sense Strand Starting at position 1186 of SEQ ID NO: 315823
gugcuuucacgggauugau

SEQ ID NO: 411784 - RNA, 19 nt, Artificial Sequence
  Description of Artificial Sequence: Synthetic oligonucleotide
  Antisense Strand to SEQ ID NO: 411783
aucaaucccgugaaagcac

SEQ ID NO: 411785 - RNA, 19 nt, Artificial Sequence
  Description of Artificial Sequence: Synthetic oligonucleotide
  Sense Strand Starting at position 1186 of SEQ ID NO: 315826
cuuucacgggauugaugua

SEQ ID NO: 411786 - RNA, 19 nt, Artificial Sequence
  Description of Artificial Sequence: Synthetic oligonucleotide
  Antisense Strand to SEQ ID NO: 411785
uacaucaaucccgugaaag

SEQ ID NO: 411787 - RNA, 19 nt, Artificial Sequence
  Description of Artificial Sequence: Synthetic oligonucleotide
  Sense Strand Starting at position 1186 of SEQ ID NO: 315860
cagggcuauuuagacauga

SEQ ID NO: 411788 - RNA, 19 nt, Artificial Sequence
  Description of Artificial Sequence: Synthetic oligonucleotide
  Antisense Strand to SEQ ID NO: 411787
ucaugucuaaauagcccug

SEQ ID NO: 411789 - RNA, 19 nt, Artificial Sequence
  Description of Artificial Sequence: Synthetic oligonucleotide
  Sense Strand Starting at position 1186 of SEQ ID NO: 316023
aaagaagagucugauuuau

SEQ ID NO: 411790 - RNA, 19 nt, Artificial Sequence
  Description of Artificial Sequence: Synthetic oligonucleotide
  Antisense Strand to SEQ ID NO: 411789
auaaaucagacucuucuuu

SEQ ID NO: 411791 - RNA, 19 nt, Artificial Sequence
  Description of Artificial Sequence: Synthetic oligonucleotide
  Sense Strand Starting at position 1186 of SEQ ID NO: 316034
ugauuuauuucgcaauguc

SEQ ID NO: 411792 - RNA, 19 nt, Artificial Sequence
  Description of Artificial Sequence: Synthetic oligonucleotide
  Antisense Strand to SEQ ID NO: 411791
gacauugcgaaauaaauca

SEQ ID NO: 411793 - RNA, 19 nt, Artificial Sequence
  Description of Artificial Sequence: Synthetic oligonucleotide
  Sense Strand Starting at position 1186 of SEQ ID NO: 316259
cccggacucccugaaguaa

SEQ ID NO: 411794 - RNA, 19 nt, Artificial Sequence
  Description of Artificial Sequence: Synthetic oligonucleotide
  Antisense Strand to SEQ ID NO: 411793
uuacuucagggaguccggg

SEQ ID NO: 411795 - RNA, 19 nt, Artificial Sequence
  Description of Artificial Sequence: Synthetic oligonucleotide
  Sense Strand Starting at position 1186 of SEQ ID NO: 316656
aaaucuguggguuggauaa

SEQ ID NO: 411796 - RNA, 19 nt, Artificial Sequence
  Description of Artificial Sequence: Synthetic oligonucleotide
  Antisense Strand to SEQ ID NO: 411795
uuauccaacccacagauuu

SEQ ID NO: 411797 - RNA, 19 nt, Artificial Sequence
  Description of Artificial Sequence: Synthetic oligonucleotide
  Sense Strand Starting at position 1186 of SEQ ID NO: 316674
acaguauugaaaugguguu

SEQ ID NO: 411798 - RNA, 19 nt, Artificial Sequence
  Description of Artificial Sequence: Synthetic oligonucleotide
  Antisense Strand to SEQ ID NO: 411797
aacaccauuucaauacugu

SEQ ID NO: 411799 - RNA, 19 nt, Artificial Sequence
  Description of Artificial Sequence: Synthetic oligonucleotide
  Sense Strand Starting at position 1186 of SEQ ID NO: 316710
aauuguauugguuacguaa

SEQ ID NO: 411800 - RNA, 19 nt, Artificial Sequence
  Description of Artificial Sequence: Synthetic oligonucleotide
  Antisense Strand to SEQ ID NO: 411799
uuacguaaccaauacaauu

SEQ ID NO: 411801 - RNA, 19 nt, Artificial Sequence
  Description of Artificial Sequence: Synthetic oligonucleotide
  Sense Strand Starting at position 1186 of SEQ ID NO: 316840
ucaucuaucuguccacuga

SEQ ID NO: 411802 - RNA, 19 nt, Artificial Sequence
  Description of Artificial Sequence: Synthetic oligonucleotide
  Antisense Strand to SEQ ID NO: 411801
ucaguggacagauagauga

SEQ ID NO: 411803 - RNA, 19 nt, Artificial Sequence
  Description of Artificial Sequence: Synthetic oligonucleotide
  Sense Strand Starting at position 1186 of SEQ ID NO: 316847
ucuguccacugaucgagaa

SEQ ID NO: 411804 - RNA, 19 nt, Artificial Sequence
  Description of Artificial Sequence: Synthetic oligonucleotide
  Antisense Strand to SEQ ID NO: 411803
uucucgaucaguggacaga

SEQ ID NO: 411805 - RNA, 19 nt, Artificial Sequence
  Description of Artificial Sequence: Synthetic oligonucleotide
  Sense Strand Starting at position 1186 of SEQ ID NO: 316881
aguaauaauuuagggaauc

SEQ ID NO: 411806 - RNA, 19 nt, Artificial Sequence
  Description of Artificial Sequence: Synthetic oligonucleotide
  Antisense Strand to SEQ ID NO: 411805
gauucccuaaauuauuacu

SEQ ID NO: 411807 - RNA, 19 nt, Artificial Sequence
  Description of Artificial Sequence: Synthetic oligonucleotide
  Sense Strand Starting at position 1186 of SEQ ID NO: 316955
cugaaauuaugccuaaaug

SEQ ID NO: 411808 - RNA, 19 nt, Artificial Sequence
  Description of Artificial Sequence: Synthetic oligonucleotide
  Antisense Strand to SEQ ID NO: 411807
cauuuaggcauaauuucag

SEQ ID NO: 411809 - RNA, 19 nt, Artificial Sequence
  Description of Artificial Sequence: Synthetic oligonucleotide
  Sense Strand Starting at position 1186 of SEQ ID NO: 317028
gccacaagucagggugaga

SEQ ID NO: 411810 - RNA, 19 nt, Artificial Sequence
  Description of Artificial Sequence: Synthetic oligonucleotide
  Antisense Strand to SEQ ID NO: 411809
ucucacccugacuuguggc

SEQ ID NO: 411811 - RNA, 19 nt, Artificial Sequence
  Description of Artificial Sequence: Synthetic oligonucleotide
  Sense Strand Starting at position 1186 of SEQ ID NO: 317261
augugauccugggcuagau

SEQ ID NO: 411812 - RNA, 19 nt, Artificial Sequence
  Description of Artificial Sequence: Synthetic oligonucleotide
  Antisense Strand to SEQ ID NO: 411811
aucuagcccaggaucacau

SEQ ID NO: 411813 - RNA, 19 nt, Artificial Sequence
  Description of Artificial Sequence: Synthetic oligonucleotide
  Sense Strand Starting at position 1186 of SEQ ID NO: 317316
gaaggcgauguugauuaga

SEQ ID NO: 411814 - RNA, 19 nt, Artificial Sequence
  Description of Artificial Sequence: Synthetic oligonucleotide
  Antisense Strand to SEQ ID NO: 411813
ucuaaucaacaucgccuuc

SEQ ID NO: 411815 - RNA, 19 nt, Artificial Sequence
  Description of Artificial Sequence: Synthetic oligonucleotide
  Sense Strand Starting at position 1186 of SEQ ID NO: 317318
aggcgauguugauuagaaa

SEQ ID NO: 411816 - RNA, 19 nt, Artificial Sequence
  Description of Artificial Sequence: Synthetic oligonucleotide
  Antisense Strand to SEQ ID NO: 411815
uuucuaaucaacaucgccu

SEQ ID NO: 411817 - RNA, 19 nt, Artificial Sequence
  Description of Artificial Sequence: Synthetic oligonucleotide
  Sense Strand Starting at position 1186 of SEQ ID NO: 317319
ggcgauguugauuagaaau

SEQ ID NO: 411818 - RNA, 19 nt, Artificial Sequence
  Description of Artificial Sequence: Synthetic oligonucleotide
  Antisense Strand to SEQ ID NO: 411817
auuucuaaucaacaucgcc

SEQ ID NO: 411819 - RNA, 19 nt, Artificial Sequence
  Description of Artificial Sequence: Synthetic oligonucleotide
  Sense Strand Starting at position 1186 of SEQ ID NO: 317438
guuauaugagccuaacagu

SEQ ID NO: 411820 - RNA, 19 nt, Artificial Sequence
  Description of Artificial Sequence: Synthetic oligonucleotide
  Antisense Strand to SEQ ID NO: 411819
acuguuaggcucauauaac

SEQ ID NO: 411821 - RNA, 19 nt, Artificial Sequence
  Description of Artificial Sequence: Synthetic oligonucleotide
  Sense Strand Starting at position 1186 of SEQ ID NO: 317501
cugacauucugguuacuau

SEQ ID NO: 411822 - RNA, 19 nt, Artificial Sequence
  Description of Artificial Sequence: Synthetic oligonucleotide
  Antisense Strand to SEQ ID NO: 411821
auaguaaccagaaugucag

SEQ ID NO: 411823 - RNA, 19 nt, Artificial Sequence
  Description of Artificial Sequence: Synthetic oligonucleotide
  Sense Strand Starting at position 1186 of SEQ ID NO: 317502
ugacauucugguuacuauc

SEQ ID NO: 411824 - RNA, 19 nt, Artificial Sequence
  Description of Artificial Sequence: Synthetic oligonucleotide
  Antisense Strand to SEQ ID NO: 411823
gauaguaaccagaauguca

SEQ ID NO: 411825 - RNA, 19 nt, Artificial Sequence
  Description of Artificial Sequence: Synthetic oligonucleotide
  Sense Strand Starting at position 1186 of SEQ ID NO: 318412
gaaggagacgcaggucuaa

SEQ ID NO: 411826 - RNA, 19 nt, Artificial Sequence
  Description of Artificial Sequence: Synthetic oligonucleotide
  Antisense Strand to SEQ ID NO: 411825
uuagaccugcgucuccuuc

SEQ ID NO: 411827 - RNA, 19 nt, Artificial Sequence
  Description of Artificial Sequence: Synthetic oligonucleotide
  Sense Strand Starting at position 1186 of SEQ ID NO: 318556
gagagcauaucacugcauu

SEQ ID NO: 411828 - RNA, 19 nt, Artificial Sequence
  Description of Artificial Sequence: Synthetic oligonucleotide
  Antisense Strand to SEQ ID NO: 411827
aaugcagugauaugcucuc

SEQ ID NO: 411829 - RNA, 19 nt, Artificial Sequence
  Description of Artificial Sequence: Synthetic oligonucleotide
  Sense Strand Starting at position 1186 of SEQ ID NO: 318860
cucacaugaguguaucuau

SEQ ID NO: 411830 - RNA, 19 nt, Artificial Sequence
  Description of Artificial Sequence: Synthetic oligonucleotide
  Antisense Strand to SEQ ID NO: 411829
auagauacacucaugugag

SEQ ID NO: 411831 - RNA, 19 nt, Artificial Sequence
  Description of Artificial Sequence: Synthetic oligonucleotide
  Sense Strand Starting at position 1186 of SEQ ID NO: 318868
aguguaucuauaggaagaa

SEQ ID NO: 411832 - RNA, 19 nt, Artificial Sequence
  Description of Artificial Sequence: Synthetic oligonucleotide
  Antisense Strand to SEQ ID NO: 411831
uucuuccuauagauacacu

SEQ ID NO: 411833 - RNA, 19 nt, Artificial Sequence
  Description of Artificial Sequence: Synthetic oligonucleotide
  Sense Strand Starting at position 1186 of SEQ ID NO: 318885
aauugaaugccuugaagug

SEQ ID NO: 411834 - RNA, 19 nt, Artificial Sequence
  Description of Artificial Sequence: Synthetic oligonucleotide
  Antisense Strand to SEQ ID NO: 411833
cacuucaaggcauucaauu

SEQ ID NO: 411835 - RNA, 19 nt, Artificial Sequence
  Description of Artificial Sequence: Synthetic oligonucleotide
  Sense Strand Starting at position 1186 of SEQ ID NO: 318991
ugauguuaugucuacugaa

SEQ ID NO: 411836 - RNA, 19 nt, Artificial Sequence
  Description of Artificial Sequence: Synthetic oligonucleotide
  Antisense Strand to SEQ ID NO: 411835
uucaguagacauaacauca

SEQ ID NO: 411837 - RNA, 19 nt, Artificial Sequence
  Description of Artificial Sequence: Synthetic oligonucleotide
  Sense Strand Starting at position 1186 of SEQ ID NO: 319167
cggucucuuccagaccaaa

SEQ ID NO: 411838 - RNA, 19 nt, Artificial Sequence
  Description of Artificial Sequence: Synthetic oligonucleotide
  Antisense Strand to SEQ ID NO: 411837
uuuggucuggaagagaccg

SEQ ID NO: 411839 - RNA, 19 nt, Artificial Sequence
  Description of Artificial Sequence: Synthetic oligonucleotide
  Sense Strand Starting at position 1187 of SEQ ID NO: 315433
acaccacaccaguguuaaa

SEQ ID NO: 411840 - RNA, 19 nt, Artificial Sequence
  Description of Artificial Sequence: Synthetic oligonucleotide
  Antisense Strand to SEQ ID NO: 411839
uuuaacacugguguggugu

SEQ ID NO: 411841 - RNA, 19 nt, Artificial Sequence
  Description of Artificial Sequence: Synthetic oligonucleotide
  Sense Strand Starting at position 1187 of SEQ ID NO: 315465
uccuauugcccuuagagau

SEQ ID NO: 411842 - RNA, 19 nt, Artificial Sequence
  Description of Artificial Sequence: Synthetic oligonucleotide
  Antisense Strand to SEQ ID NO: 411841
aucucuaagggcaauagga

SEQ ID NO: 411843 - RNA, 19 nt, Artificial Sequence
  Description of Artificial Sequence: Synthetic oligonucleotide
  Sense Strand Starting at position 1187 of SEQ ID NO: 315475
cuuagagaucucuggcuca

SEQ ID NO: 411844 - RNA, 19 nt, Artificial Sequence
  Description of Artificial Sequence: Synthetic oligonucleotide
  Antisense Strand to SEQ ID NO: 411843
ugagccagagaucucuaag

SEQ ID NO: 411845 - RNA, 19 nt, Artificial Sequence
  Description of Artificial Sequence: Synthetic oligonucleotide
  Sense Strand Starting at position 1187 of SEQ ID NO: 315478
agagaucucuggcucauaa

SEQ ID NO: 411846 - RNA, 19 nt, Artificial Sequence
  Description of Artificial Sequence: Synthetic oligonucleotide
  Antisense Strand to SEQ ID NO: 411845
uuaugagccagagaucucu

SEQ ID NO: 411847 - RNA, 19 nt, Artificial Sequence
  Description of Artificial Sequence: Synthetic oligonucleotide
  Sense Strand Starting at position 1187 of SEQ ID NO: 315480
agaucucuggcucauaacu

SEQ ID NO: 411848 - RNA, 19 nt, Artificial Sequence
  Description of Artificial Sequence: Synthetic oligonucleotide
  Antisense Strand to SEQ ID NO: 411847
aguuaugagccagagaucu

SEQ ID NO: 411849 - RNA, 19 nt, Artificial Sequence
  Description of Artificial Sequence: Synthetic oligonucleotide
  Sense Strand Starting at position 1187 of SEQ ID NO: 315523
agcuuugaguucuuccaac

SEQ ID NO: 411850 - RNA, 19 nt, Artificial Sequence
  Description of Artificial Sequence: Synthetic oligonucleotide
  Antisense Strand to SEQ ID NO: 411849
guuggaagaacucaaagcu

SEQ ID NO: 411851 - RNA, 19 nt, Artificial Sequence
  Description of Artificial Sequence: Synthetic oligonucleotide
  Sense Strand Starting at position 1187 of SEQ ID NO: 315664
uuuguuacauguuccuaca

SEQ ID NO: 411852 - RNA, 19 nt, Artificial Sequence
  Description of Artificial Sequence: Synthetic oligonucleotide
  Antisense Strand to SEQ ID NO: 411851
uguaggaacauguaacaaa

SEQ ID NO: 411853 - RNA, 19 nt, Artificial Sequence
  Description of Artificial Sequence: Synthetic oligonucleotide
  Sense Strand Starting at position 1187 of SEQ ID NO: 315666
uguuacauguuccuacagu

SEQ ID NO: 411854 - RNA, 19 nt, Artificial Sequence
  Description of Artificial Sequence: Synthetic oligonucleotide
  Antisense Strand to SEQ ID NO: 411853
acuguaggaacauguaaca

SEQ ID NO: 411855 - RNA, 19 nt, Artificial Sequence
  Description of Artificial Sequence: Synthetic oligonucleotide
  Sense Strand Starting at position 1187 of SEQ ID NO: 315704
ugugguaauauuugucacu

SEQ ID NO: 411856 - RNA, 19 nt, Artificial Sequence
  Description of Artificial Sequence: Synthetic oligonucleotide
  Antisense Strand to SEQ ID NO: 411855
agugacaaauauuaccaca

SEQ ID NO: 411857 - RNA, 19 nt, Artificial Sequence
  Description of Artificial Sequence: Synthetic oligonucleotide
  Sense Strand Starting at position 1187 of SEQ ID NO: 315707
gguaauauuugucacucuu

SEQ ID NO: 411858 - RNA, 19 nt, Artificial Sequence
  Description of Artificial Sequence: Synthetic oligonucleotide
  Antisense Strand to SEQ ID NO: 411857
aagagugacaaauauuacc

SEQ ID NO: 411859 - RNA, 19 nt, Artificial Sequence
  Description of Artificial Sequence: Synthetic oligonucleotide
  Sense Strand Starting at position 1187 of SEQ ID NO: 315730
cucauuagucaauguuucu

SEQ ID NO: 411860 - RNA, 19 nt, Artificial Sequence
  Description of Artificial Sequence: Synthetic oligonucleotide
  Antisense Strand to SEQ ID NO: 411859
agaaacauugacuaaugag

SEQ ID NO: 411861 - RNA, 19 nt, Artificial Sequence
  Description of Artificial Sequence: Synthetic oligonucleotide
  Sense Strand Starting at position 1187 of SEQ ID NO: 315793
uuaguucuggguuguaauc

SEQ ID NO: 411862 - RNA, 19 nt, Artificial Sequence
  Description of Artificial Sequence: Synthetic oligonucleotide
  Antisense Strand to SEQ ID NO: 411861
gauuacaacccagaacuaa

SEQ ID NO: 411863 - RNA, 19 nt, Artificial Sequence
  Description of Artificial Sequence: Synthetic oligonucleotide
  Sense Strand Starting at position 1187 of SEQ ID NO: 315885
caugaaguuccugggucuu

SEQ ID NO: 411864 - RNA, 19 nt, Artificial Sequence
  Description of Artificial Sequence: Synthetic oligonucleotide
  Antisense Strand to SEQ ID NO: 411863
aagacccaggaacuucaug

SEQ ID NO: 411865 - RNA, 19 nt, Artificial Sequence
  Description of Artificial Sequence: Synthetic oligonucleotide
  Sense Strand Starting at position 1187 of SEQ ID NO: 315887
ugaaguuccugggucuuua

SEQ ID NO: 411866 - RNA, 19 nt, Artificial Sequence
  Description of Artificial Sequence: Synthetic oligonucleotide
  Antisense Strand to SEQ ID NO: 411865
uaaagacccaggaacuuca

SEQ ID NO: 411867 - RNA, 19 nt, Artificial Sequence
  Description of Artificial Sequence: Synthetic oligonucleotide
  Sense Strand Starting at position 1187 of SEQ ID NO: 315927
ucuuuaucagucuggaaau

SEQ ID NO: 411868 - RNA, 19 nt, Artificial Sequence
  Description of Artificial Sequence: Synthetic oligonucleotide
  Antisense Strand to SEQ ID NO: 411867
auuuccagacugauaaaga

SEQ ID NO: 411869 - RNA, 19 nt, Artificial Sequence
  Description of Artificial Sequence: Synthetic oligonucleotide
  Sense Strand Starting at position 1187 of SEQ ID NO: 315937
ucuggaaauuugggccuau

SEQ ID NO: 411870 - RNA, 19 nt, Artificial Sequence
  Description of Artificial Sequence: Synthetic oligonucleotide
  Antisense Strand to SEQ ID NO: 411869
auaggcccaaauuuccaga

SEQ ID NO: 411871 - RNA, 19 nt, Artificial Sequence
  Description of Artificial Sequence: Synthetic oligonucleotide
  Sense Strand Starting at position 1187 of SEQ ID NO: 316049
cggucaccaucuccugaaa

SEQ ID NO: 411872 - RNA, 19 nt, Artificial Sequence
  Description of Artificial Sequence: Synthetic oligonucleotide
  Antisense Strand to SEQ ID NO: 411871
uuucaggagauggugaccg

SEQ ID NO: 411873 - RNA, 19 nt, Artificial Sequence
  Description of Artificial Sequence: Synthetic oligonucleotide
  Sense Strand Starting at position 1187 of SEQ ID NO: 316176
cccaaagugucaccuuauu

SEQ ID NO: 411874 - RNA, 19 nt, Artificial Sequence
  Description of Artificial Sequence: Synthetic oligonucleotide
  Antisense Strand to SEQ ID NO: 411873
aauaaggugacacuuuggg

SEQ ID NO: 411875 - RNA, 19 nt, Artificial Sequence
  Description of Artificial Sequence: Synthetic oligonucleotide
  Sense Strand Starting at position 1187 of SEQ ID NO: 316330
acggucucaucacuauacu

SEQ ID NO: 411876 - RNA, 19 nt, Artificial Sequence
  Description of Artificial Sequence: Synthetic oligonucleotide
  Antisense Strand to SEQ ID NO: 411875
aguauagugaugagaccgu

SEQ ID NO: 411877 - RNA, 19 nt, Artificial Sequence
  Description of Artificial Sequence: Synthetic oligonucleotide
  Sense Strand Starting at position 1187 of SEQ ID NO: 316366
guaaaucucccagguacac

SEQ ID NO: 411878 - RNA, 19 nt, Artificial Sequence
  Description of Artificial Sequence: Synthetic oligonucleotide
  Antisense Strand to SEQ ID NO: 411877
guguaccugggagauuuac

SEQ ID NO: 411879 - RNA, 19 nt, Artificial Sequence
  Description of Artificial Sequence: Synthetic oligonucleotide
  Sense Strand Starting at position 1187 of SEQ ID NO: 316399
ccggauaccucaucccuau

SEQ ID NO: 411880 - RNA, 19 nt, Artificial Sequence
  Description of Artificial Sequence: Synthetic oligonucleotide
  Antisense Strand to SEQ ID NO: 411879
auagggaugagguauccgg

SEQ ID NO: 411881 - RNA, 19 nt, Artificial Sequence
  Description of Artificial Sequence: Synthetic oligonucleotide
  Sense Strand Starting at position 1187 of SEQ ID NO: 318389
ggaugaagaaguuguguag

SEQ ID NO: 411882 - RNA, 19 nt, Artificial Sequence
  Description of Artificial Sequence: Synthetic oligonucleotide
  Antisense Strand to SEQ ID NO: 411881
cuacacaacuucuucaucc

SEQ ID NO: 411883 - RNA, 19 nt, Artificial Sequence
  Description of Artificial Sequence: Synthetic oligonucleotide
  Sense Strand Starting at position 1187 of SEQ ID NO: 318392
ugaagaaguuguguaggau

SEQ ID NO: 411884 - RNA, 19 nt, Artificial Sequence
  Description of Artificial Sequence: Synthetic oligonucleotide
  Antisense Strand to SEQ ID NO: 411883
auccuacacaacuucuuca

SEQ ID NO: 411885 - RNA, 19 nt, Artificial Sequence
  Description of Artificial Sequence: Synthetic oligonucleotide
  Sense Strand Starting at position 1187 of SEQ ID NO: 318395
agaaguuguguaggauaaa

SEQ ID NO: 411886 - RNA, 19 nt, Artificial Sequence
  Description of Artificial Sequence: Synthetic oligonucleotide
  Antisense Strand to SEQ ID NO: 411885
uuuauccuacacaacuucu

SEQ ID NO: 411887 - RNA, 19 nt, Artificial Sequence
  Description of Artificial Sequence: Synthetic oligonucleotide
  Sense Strand Starting at position 1187 of SEQ ID NO: 318398
aguuguguaggauaaacuu

SEQ ID NO: 411888 - RNA, 19 nt, Artificial Sequence
  Description of Artificial Sequence: Synthetic oligonucleotide
  Antisense Strand to SEQ ID NO: 411887
aaguuuauccuacacaacu

SEQ ID NO: 411889 - RNA, 19 nt, Artificial Sequence
  Description of Artificial Sequence: Synthetic oligonucleotide
  Sense Strand Starting at position 1187 of SEQ ID NO: 318404
guaggauaaacuugguugu

SEQ ID NO: 411890 - RNA, 19 nt, Artificial Sequence
  Description of Artificial Sequence: Synthetic oligonucleotide
  Antisense Strand to SEQ ID NO: 411889
acaaccaaguuuauccuac

SEQ ID NO: 411891 - RNA, 19 nt, Artificial Sequence
  Description of Artificial Sequence: Synthetic oligonucleotide
  Sense Strand Starting at position 1187 of SEQ ID NO: 318406
aggauaaacuugguuguuu

SEQ ID NO: 411892 - RNA, 19 nt, Artificial Sequence
  Description of Artificial Sequence: Synthetic oligonucleotide
  Antisense Strand to SEQ ID NO: 411891
aaacaaccaaguuuauccu

SEQ ID NO: 411893 - RNA, 19 nt, Artificial Sequence
  Description of Artificial Sequence: Synthetic oligonucleotide
  Sense Strand Starting at position 1187 of SEQ ID NO: 318407
ggauaaacuugguuguuuc

SEQ ID NO: 411894 - RNA, 19 nt, Artificial Sequence
  Description of Artificial Sequence: Synthetic oligonucleotide
  Antisense Strand to SEQ ID NO: 411893
gaaacaaccaaguuuaucc

SEQ ID NO: 411895 - RNA, 19 nt, Artificial Sequence
  Description of Artificial Sequence: Synthetic oligonucleotide
  Sense Strand Starting at position 1187 of SEQ ID NO: 318483
ggagaaguugcagaugcaa

SEQ ID NO: 411896 - RNA, 19 nt, Artificial Sequence
  Description of Artificial Sequence: Synthetic oligonucleotide
  Antisense Strand to SEQ ID NO: 411895
uugcaucugcaacuucucc

SEQ ID NO: 411897 - RNA, 19 nt, Artificial Sequence
  Description of Artificial Sequence: Synthetic oligonucleotide
  Sense Strand Starting at position 1187 of SEQ ID NO: 318485
agaaguugcagaugcaaau

SEQ ID NO: 411898 - RNA, 19 nt, Artificial Sequence
  Description of Artificial Sequence: Synthetic oligonucleotide
  Antisense Strand to SEQ ID NO: 411897
auuugcaucugcaacuucu

SEQ ID NO: 411899 - RNA, 19 nt, Artificial Sequence
  Description of Artificial Sequence: Synthetic oligonucleotide
  Sense Strand Starting at position 1187 of SEQ ID NO: 318502
auguauuaaagugaagugu

SEQ ID NO: 411900 - RNA, 19 nt, Artificial Sequence
  Description of Artificial Sequence: Synthetic oligonucleotide
  Antisense Strand to SEQ ID NO: 411899
acacuucacuuuaauacau

SEQ ID NO: 411901 - RNA, 19 nt, Artificial Sequence
  Description of Artificial Sequence: Synthetic oligonucleotide
  Sense Strand Starting at position 1187 of SEQ ID NO: 318506
auuaaagugaaguguguuu

SEQ ID NO: 411902 - RNA, 19 nt, Artificial Sequence
  Description of Artificial Sequence: Synthetic oligonucleotide
  Antisense Strand to SEQ ID NO: 411901
aaacacacuucacuuuaau

SEQ ID NO: 411903 - RNA, 19 nt, Artificial Sequence
  Description of Artificial Sequence: Synthetic oligonucleotide
  Sense Strand Starting at position 1187 of SEQ ID NO: 318508
uaaagugaaguguguuuaa

SEQ ID NO: 411904 - RNA, 19 nt, Artificial Sequence
  Description of Artificial Sequence: Synthetic oligonucleotide
  Antisense Strand to SEQ ID NO: 411903
uuaaacacacuucacuuua

SEQ ID NO: 411905 - RNA, 19 nt, Artificial Sequence
  Description of Artificial Sequence: Synthetic oligonucleotide
  Sense Strand Starting at position 1187 of SEQ ID NO: 318511
agugaaguguguuuaaccu

SEQ ID NO: 411906 - RNA, 19 nt, Artificial Sequence
  Description of Artificial Sequence: Synthetic oligonucleotide
  Antisense Strand to SEQ ID NO: 411905
agguuaaacacacuucacu

SEQ ID NO: 411907 - RNA, 19 nt, Artificial Sequence
  Description of Artificial Sequence: Synthetic oligonucleotide
  Sense Strand Starting at position 1187 of SEQ ID NO: 318519
guguuuaaccucuagcaag

SEQ ID NO: 411908 - RNA, 19 nt, Artificial Sequence
  Description of Artificial Sequence: Synthetic oligonucleotide
  Antisense Strand to SEQ ID NO: 411907
cuugcuagagguuaaacac

SEQ ID NO: 411909 - RNA, 19 nt, Artificial Sequence
  Description of Artificial Sequence: Synthetic oligonucleotide
  Sense Strand Starting at position 1187 of SEQ ID NO: 318563
augugagaccagugacuuc

SEQ ID NO: 411910 - RNA, 19 nt, Artificial Sequence
  Description of Artificial Sequence: Synthetic oligonucleotide
  Antisense Strand to SEQ ID NO: 411909
gaagucacuggucucacau

SEQ ID NO: 411911 - RNA, 19 nt, Artificial Sequence
  Description of Artificial Sequence: Synthetic oligonucleotide
  Sense Strand Starting at position 1187 of SEQ ID NO: 318589
ccauuacagugcucucaag

SEQ ID NO: 411912 - RNA, 19 nt, Artificial Sequence
  Description of Artificial Sequence: Synthetic oligonucleotide
  Antisense Strand to SEQ ID NO: 411911
cuugagagcacuguaaugg

SEQ ID NO: 411913 - RNA, 19 nt, Artificial Sequence
  Description of Artificial Sequence: Synthetic oligonucleotide
  Sense Strand Starting at position 1187 of SEQ ID NO: 318660
ugaagauucugagauguga

SEQ ID NO: 411914 - RNA, 19 nt, Artificial Sequence
  Description of Artificial Sequence: Synthetic oligonucleotide
  Antisense Strand to SEQ ID NO: 411913
ucacaucucagaaucuuca

SEQ ID NO: 411915 - RNA, 19 nt, Artificial Sequence
  Description of Artificial Sequence: Synthetic oligonucleotide
  Sense Strand Starting at position 1187 of SEQ ID NO: 318741
guaggugggcaucaucaga

SEQ ID NO: 411916 - RNA, 19 nt, Artificial Sequence
  Description of Artificial Sequence: Synthetic oligonucleotide
  Antisense Strand to SEQ ID NO: 411915
ucugaugaugcccaccuac

SEQ ID NO: 411917 - RNA, 19 nt, Artificial Sequence
  Description of Artificial Sequence: Synthetic oligonucleotide
  Sense Strand Starting at position 1187 of SEQ ID NO: 318824
aguacuacagauuguaaac

SEQ ID NO: 411918 - RNA, 19 nt, Artificial Sequence
  Description of Artificial Sequence: Synthetic oligonucleotide
  Antisense Strand to SEQ ID NO: 411917
guuuacaaucuguaguacu

SEQ ID NO: 411919 - RNA, 19 nt, Artificial Sequence
  Description of Artificial Sequence: Synthetic oligonucleotide
  Sense Strand Starting at position 1188 of SEQ ID NO: 315343
gugauccuuucuccucaga

SEQ ID NO: 411920 - RNA, 19 nt, Artificial Sequence
  Description of Artificial Sequence: Synthetic oligonucleotide
  Antisense Strand to SEQ ID NO: 411919
ucugaggagaaaggaucac

SEQ ID NO: 411921 - RNA, 19 nt, Artificial Sequence
  Description of Artificial Sequence: Synthetic oligonucleotide
  Sense Strand Starting at position 1188 of SEQ ID NO: 315570
acaccacaccaguguuaaa

SEQ ID NO: 411922 - RNA, 19 nt, Artificial Sequence
  Description of Artificial Sequence: Synthetic oligonucleotide
  Antisense Strand to SEQ ID NO: 411921
uuuaacacugguguggugu

SEQ ID NO: 411923 - RNA, 19 nt, Artificial Sequence
  Description of Artificial Sequence: Synthetic oligonucleotide
  Sense Strand Starting at position 1188 of SEQ ID NO: 315602
uccuauugcccuuagagau

SEQ ID NO: 411924 - RNA, 19 nt, Artificial Sequence
  Description of Artificial Sequence: Synthetic oligonucleotide
  Antisense Strand to SEQ ID NO: 411923
aucucuaagggcaauagga

SEQ ID NO: 411925 - RNA, 19 nt, Artificial Sequence
  Description of Artificial Sequence: Synthetic oligonucleotide
  Sense Strand Starting at position 1188 of SEQ ID NO: 315612
cuuagagaucucuggcuca

SEQ ID NO: 411926 - RNA, 19 nt, Artificial Sequence
  Description of Artificial Sequence: Synthetic oligonucleotide
  Antisense Strand to SEQ ID NO: 411925
ugagccagagaucucuaag

SEQ ID NO: 411927 - RNA, 19 nt, Artificial Sequence
  Description of Artificial Sequence: Synthetic oligonucleotide
  Sense Strand Starting at position 1188 of SEQ ID NO: 315615
agagaucucuggcucauaa

SEQ ID NO: 411928 - RNA, 19 nt, Artificial Sequence
  Description of Artificial Sequence: Synthetic oligonucleotide
  Antisense Strand to SEQ ID NO: 411927
uuaugagccagagaucucu

SEQ ID NO: 411929 - RNA, 19 nt, Artificial Sequence
  Description of Artificial Sequence: Synthetic oligonucleotide
  Sense Strand Starting at position 1188 of SEQ ID NO: 315617
agaucucuggcucauaacu

SEQ ID NO: 411930 - RNA, 19 nt, Artificial Sequence
  Description of Artificial Sequence: Synthetic oligonucleotide
  Antisense Strand to SEQ ID NO: 411929
aguuaugagccagagaucu

SEQ ID NO: 411931 - RNA, 19 nt, Artificial Sequence
  Description of Artificial Sequence: Synthetic oligonucleotide
  Sense Strand Starting at position 1188 of SEQ ID NO: 315660
agcuuugaguucuuccaac

SEQ ID NO: 411932 - RNA, 19 nt, Artificial Sequence
  Description of Artificial Sequence: Synthetic oligonucleotide
  Antisense Strand to SEQ ID NO: 411931
guuggaagaacucaaagcu

SEQ ID NO: 411933 - RNA, 19 nt, Artificial Sequence
  Description of Artificial Sequence: Synthetic oligonucleotide
  Sense Strand Starting at position 1188 of SEQ ID NO: 315801
uuuguuacauguuccuaca

SEQ ID NO: 411934 - RNA, 19 nt, Artificial Sequence
  Description of Artificial Sequence: Synthetic oligonucleotide
  Antisense Strand to SEQ ID NO: 411933
uguaggaacauguaacaaa

SEQ ID NO: 411935 - RNA, 19 nt, Artificial Sequence
  Description of Artificial Sequence: Synthetic oligonucleotide
  Sense Strand Starting at position 1188 of SEQ ID NO: 315803
uguuacauguuccuacagu

SEQ ID NO: 411936 - RNA, 19 nt, Artificial Sequence
  Description of Artificial Sequence: Synthetic oligonucleotide
  Antisense Strand to SEQ ID NO: 411935
acuguaggaacauguaaca

SEQ ID NO: 411937 - RNA, 19 nt, Artificial Sequence
  Description of Artificial Sequence: Synthetic oligonucleotide
  Sense Strand Starting at position 1188 of SEQ ID NO: 315841
ugugguaauauuugucacu

SEQ ID NO: 411938 - RNA, 19 nt, Artificial Sequence
  Description of Artificial Sequence: Synthetic oligonucleotide
  Antisense Strand to SEQ ID NO: 411937
agugacaaauauuaccaca

SEQ ID NO: 411939 - RNA, 19 nt, Artificial Sequence
  Description of Artificial Sequence: Synthetic oligonucleotide
  Sense Strand Starting at position 1188 of SEQ ID NO: 315844
gguaauauuugucacucuu

SEQ ID NO: 411940 - RNA, 19 nt, Artificial Sequence
  Description of Artificial Sequence: Synthetic oligonucleotide
  Antisense Strand to SEQ ID NO: 411939
aagagugacaaauauuacc

SEQ ID NO: 411941 - RNA, 19 nt, Artificial Sequence
  Description of Artificial Sequence: Synthetic oligonucleotide
  Sense Strand Starting at position 1188 of SEQ ID NO: 315867
cucauuagucaauguuucu

SEQ ID NO: 411942 - RNA, 19 nt, Artificial Sequence
  Description of Artificial Sequence: Synthetic oligonucleotide
  Antisense Strand to SEQ ID NO: 411941
agaaacauugacuaaugag

SEQ ID NO: 411943 - RNA, 19 nt, Artificial Sequence
  Description of Artificial Sequence: Synthetic oligonucleotide
  Sense Strand Starting at position 1188 of SEQ ID NO: 315930
uuaguucuggguuguaauc

SEQ ID NO: 411944 - RNA, 19 nt, Artificial Sequence
  Description of Artificial Sequence: Synthetic oligonucleotide
  Antisense Strand to SEQ ID NO: 411943
gauuacaacccagaacuaa

SEQ ID NO: 411945 - RNA, 19 nt, Artificial Sequence
  Description of Artificial Sequence: Synthetic oligonucleotide
  Sense Strand Starting at position 1188 of SEQ ID NO: 316022
caugaaguuccugggucuu

SEQ ID NO: 411946 - RNA, 19 nt, Artificial Sequence
  Description of Artificial Sequence: Synthetic oligonucleotide
  Antisense Strand to SEQ ID NO: 411945
aagacccaggaacuucaug

SEQ ID NO: 411947 - RNA, 19 nt, Artificial Sequence
  Description of Artificial Sequence: Synthetic oligonucleotide
  Sense Strand Starting at position 1188 of SEQ ID NO: 316024
ugaaguuccugggucuuua

SEQ ID NO: 411948 - RNA, 19 nt, Artificial Sequence
  Description of Artificial Sequence: Synthetic oligonucleotide
  Antisense Strand to SEQ ID NO: 411947
uaaagacccaggaacuuca

SEQ ID NO: 411949 - RNA, 19 nt, Artificial Sequence
  Description of Artificial Sequence: Synthetic oligonucleotide
  Sense Strand Starting at position 1188 of SEQ ID NO: 316064
ucuuuaucagucuggaaau

SEQ ID NO: 411950 - RNA, 19 nt, Artificial Sequence
  Description of Artificial Sequence: Synthetic oligonucleotide
  Antisense Strand to SEQ ID NO: 411949
auuuccagacugauaaaga

SEQ ID NO: 411951 - RNA, 19 nt, Artificial Sequence
  Description of Artificial Sequence: Synthetic oligonucleotide
  Sense Strand Starting at position 1188 of SEQ ID NO: 316074
ucuggaaauuugggccuau

SEQ ID NO: 411952 - RNA, 19 nt, Artificial Sequence
  Description of Artificial Sequence: Synthetic oligonucleotide
  Antisense Strand to SEQ ID NO: 411951
auaggcccaaauuuccaga

SEQ ID NO: 411953 - RNA, 19 nt, Artificial Sequence
  Description of Artificial Sequence: Synthetic oligonucleotide
  Sense Strand Starting at position 1188 of SEQ ID NO: 316186
cggucaccaucuccugaaa

SEQ ID NO: 411954 - RNA, 19 nt, Artificial Sequence
  Description of Artificial Sequence: Synthetic oligonucleotide
  Antisense Strand to SEQ ID NO: 411953
uuucaggagauggugaccg

SEQ ID NO: 411955 - RNA, 19 nt, Artificial Sequence
  Description of Artificial Sequence: Synthetic oligonucleotide
  Sense Strand Starting at position 1188 of SEQ ID NO: 316313
cccaaagugucaccuuauu

SEQ ID NO: 411956 - RNA, 19 nt, Artificial Sequence
  Description of Artificial Sequence: Synthetic oligonucleotide
  Antisense Strand to SEQ ID NO: 411955
aauaaggugacacuuuggg

SEQ ID NO: 411957 - RNA, 19 nt, Artificial Sequence
  Description of Artificial Sequence: Synthetic oligonucleotide
  Sense Strand Starting at position 1188 of SEQ ID NO: 316467
acggucucaucacuauacu

SEQ ID NO: 411958 - RNA, 19 nt, Artificial Sequence
  Description of Artificial Sequence: Synthetic oligonucleotide
  Antisense Strand to SEQ ID NO: 411957
aguauagugaugagaccgu

SEQ ID NO: 411959 - RNA, 19 nt, Artificial Sequence
  Description of Artificial Sequence: Synthetic oligonucleotide
  Sense Strand Starting at position 1188 of SEQ ID NO: 316503
guaaaucucccagguacac

SEQ ID NO: 411960 - RNA, 19 nt, Artificial Sequence
  Description of Artificial Sequence: Synthetic oligonucleotide
  Antisense Strand to SEQ ID NO: 411959
guguaccugggagauuuac

SEQ ID NO: 411961 - RNA, 19 nt, Artificial Sequence
  Description of Artificial Sequence: Synthetic oligonucleotide
  Sense Strand Starting at position 1188 of SEQ ID NO: 316536
ccggauaccucaucccuau

SEQ ID NO: 411962 - RNA, 19 nt, Artificial Sequence
  Description of Artificial Sequence: Synthetic oligonucleotide
  Antisense Strand to SEQ ID NO: 411961
auagggaugagguauccgg

SEQ ID NO: 411963 - RNA, 19 nt, Artificial Sequence
  Description of Artificial Sequence: Synthetic oligonucleotide
  Sense Strand Starting at position 1188 of SEQ ID NO: 318526
ggaugaagaaguuguguag

SEQ ID NO: 411964 - RNA, 19 nt, Artificial Sequence
  Description of Artificial Sequence: Synthetic oligonucleotide
  Antisense Strand to SEQ ID NO: 411963
cuacacaacuucuucaucc

SEQ ID NO: 411965 - RNA, 19 nt, Artificial Sequence
  Description of Artificial Sequence: Synthetic oligonucleotide
  Sense Strand Starting at position 1188 of SEQ ID NO: 318529
ugaagaaguuguguaggau

SEQ ID NO: 411966 - RNA, 19 nt, Artificial Sequence
  Description of Artificial Sequence: Synthetic oligonucleotide
  Antisense Strand to SEQ ID NO: 411965
auccuacacaacuucuuca

SEQ ID NO: 411967 - RNA, 19 nt, Artificial Sequence
  Description of Artificial Sequence: Synthetic oligonucleotide
  Sense Strand Starting at position 1188 of SEQ ID NO: 318532
agaaguuguguaggauaaa

SEQ ID NO: 411968 - RNA, 19 nt, Artificial Sequence
  Description of Artificial Sequence: Synthetic oligonucleotide
  Antisense Strand to SEQ ID NO: 411967
uuuauccuacacaacuucu

SEQ ID NO: 411969 - RNA, 19 nt, Artificial Sequence
  Description of Artificial Sequence: Synthetic oligonucleotide
  Sense Strand Starting at position 1188 of SEQ ID NO: 318535
aguuguguaggauaaacuu

SEQ ID NO: 411970 - RNA, 19 nt, Artificial Sequence
  Description of Artificial Sequence: Synthetic oligonucleotide
  Antisense Strand to SEQ ID NO: 411969
aaguuuauccuacacaacu

SEQ ID NO: 411971 - RNA, 19 nt, Artificial Sequence
  Description of Artificial Sequence: Synthetic oligonucleotide
  Sense Strand Starting at position 1188 of SEQ ID NO: 318541
guaggauaaacuugguugu

SEQ ID NO: 411972 - RNA, 19 nt, Artificial Sequence
  Description of Artificial Sequence: Synthetic oligonucleotide
  Antisense Strand to SEQ ID NO: 411971
acaaccaaguuuauccuac

SEQ ID NO: 411973 - RNA, 19 nt, Artificial Sequence
  Description of Artificial Sequence: Synthetic oligonucleotide
  Sense Strand Starting at position 1188 of SEQ ID NO: 318543
aggauaaacuugguuguuu

SEQ ID NO: 411974 - RNA, 19 nt, Artificial Sequence
  Description of Artificial Sequence: Synthetic oligonucleotide
  Antisense Strand to SEQ ID NO: 411973
aaacaaccaaguuuauccu

SEQ ID NO: 411975 - RNA, 19 nt, Artificial Sequence
  Description of Artificial Sequence: Synthetic oligonucleotide
  Sense Strand Starting at position 1188 of SEQ ID NO: 318544
ggauaaacuugguuguuuc

SEQ ID NO: 411976 - RNA, 19 nt, Artificial Sequence
  Description of Artificial Sequence: Synthetic oligonucleotide
  Antisense Strand to SEQ ID NO: 411975
gaaacaaccaaguuuaucc

SEQ ID NO: 411977 - RNA, 19 nt, Artificial Sequence
  Description of Artificial Sequence: Synthetic oligonucleotide
  Sense Strand Starting at position 1188 of SEQ ID NO: 318620
ggagaaguugcagaugcaa

SEQ ID NO: 411978 - RNA, 19 nt, Artificial Sequence
  Description of Artificial Sequence: Synthetic oligonucleotide
  Antisense Strand to SEQ ID NO: 411977
uugcaucugcaacuucucc

SEQ ID NO: 411979 - RNA, 19 nt, Artificial Sequence
  Description of Artificial Sequence: Synthetic oligonucleotide
  Sense Strand Starting at position 1188 of SEQ ID NO: 318622
agaaguugcagaugcaaau

SEQ ID NO: 411980 - RNA, 19 nt, Artificial Sequence
  Description of Artificial Sequence: Synthetic oligonucleotide
  Antisense Strand to SEQ ID NO: 411979
auuugcaucugcaacuucu

SEQ ID NO: 411981 - RNA, 19 nt, Artificial Sequence
  Description of Artificial Sequence: Synthetic oligonucleotide
  Sense Strand Starting at position 1188 of SEQ ID NO: 318639
auguauuaaagugaagugu

SEQ ID NO: 411982 - RNA, 19 nt, Artificial Sequence
  Description of Artificial Sequence: Synthetic oligonucleotide
  Antisense Strand to SEQ ID NO: 411981
acacuucacuuuaauacau

SEQ ID NO: 411983 - RNA, 19 nt, Artificial Sequence
  Description of Artificial Sequence: Synthetic oligonucleotide
  Sense Strand Starting at position 1188 of SEQ ID NO: 318643
auuaaagugaaguguguuu

SEQ ID NO: 411984 - RNA, 19 nt, Artificial Sequence
  Description of Artificial Sequence: Synthetic oligonucleotide
  Antisense Strand to SEQ ID NO: 411983
aaacacacuucacuuuaau

SEQ ID NO: 411985 - RNA, 19 nt, Artificial Sequence
  Description of Artificial Sequence: Synthetic oligonucleotide
  Sense Strand Starting at position 1188 of SEQ ID NO: 318645
uaaagugaaguguguuuaa

SEQ ID NO: 411986 - RNA, 19 nt, Artificial Sequence
  Description of Artificial Sequence: Synthetic oligonucleotide
  Antisense Strand to SEQ ID NO: 411985
uuaaacacacuucacuuua

SEQ ID NO: 411987 - RNA, 19 nt, Artificial Sequence
  Description of Artificial Sequence: Synthetic oligonucleotide
  Sense Strand Starting at position 1188 of SEQ ID NO: 318648
agugaaguguguuuaaccu

SEQ ID NO: 411988 - RNA, 19 nt, Artificial Sequence
  Description of Artificial Sequence: Synthetic oligonucleotide
  Antisense Strand to SEQ ID NO: 411987
agguuaaacacacuucacu

SEQ ID NO: 411989 - RNA, 19 nt, Artificial Sequence
  Description of Artificial Sequence: Synthetic oligonucleotide
  Sense Strand Starting at position 1188 of SEQ ID NO: 318656
guguuuaaccucuagcaag

SEQ ID NO: 411990 - RNA, 19 nt, Artificial Sequence
  Description of Artificial Sequence: Synthetic oligonucleotide
  Antisense Strand to SEQ ID NO: 411989
cuugcuagagguuaaacac

SEQ ID NO: 411991 - RNA, 19 nt, Artificial Sequence
  Description of Artificial Sequence: Synthetic oligonucleotide
  Sense Strand Starting at position 1188 of SEQ ID NO: 318700
augugagaccagugacuuc

SEQ ID NO: 411992 - RNA, 19 nt, Artificial Sequence
  Description of Artificial Sequence: Synthetic oligonucleotide
  Antisense Strand to SEQ ID NO: 411991
gaagucacuggucucacau

SEQ ID NO: 411993 - RNA, 19 nt, Artificial Sequence
  Description of Artificial Sequence: Synthetic oligonucleotide
  Sense Strand Starting at position 1188 of SEQ ID NO: 318726
ccauuacagugcucucaag

SEQ ID NO: 411994 - RNA, 19 nt, Artificial Sequence
  Description of Artificial Sequence: Synthetic oligonucleotide
  Antisense Strand to SEQ ID NO: 411993
cuugagagcacuguaaugg

SEQ ID NO: 411995 - RNA, 19 nt, Artificial Sequence
  Description of Artificial Sequence: Synthetic oligonucleotide
  Sense Strand Starting at position 1188 of SEQ ID NO: 318878
guaggugggcaucaucaga

SEQ ID NO: 411996 - RNA, 19 nt, Artificial Sequence
  Description of Artificial Sequence: Synthetic oligonucleotide
  Antisense Strand to SEQ ID NO: 411995
ucugaugaugcccaccuac

SEQ ID NO: 411997 - RNA, 19 nt, Artificial Sequence
  Description of Artificial Sequence: Synthetic oligonucleotide
  Sense Strand Starting at position 1188 of SEQ ID NO: 318961
aguacuacagauuguaaac

SEQ ID NO: 411998 - RNA, 19 nt, Artificial Sequence
  Description of Artificial Sequence: Synthetic oligonucleotide
  Antisense Strand to SEQ ID NO: 411997
guuuacaaucuguaguacu

SEQ ID NO: 411999 - RNA, 19 nt, Artificial Sequence
  Description of Artificial Sequence: Synthetic oligonucleotide
  Sense Strand Starting at position 1189 of SEQ ID NO: 315439
uagcaagaagagugaacau

SEQ ID NO: 412000 - RNA, 19 nt, Artificial Sequence
  Description of Artificial Sequence: Synthetic oligonucleotide
  Antisense Strand to SEQ ID NO: 411999
auguucacucuucuugcua

SEQ ID NO: 412001 - RNA, 19 nt, Artificial Sequence
  Description of Artificial Sequence: Synthetic oligonucleotide
  Sense Strand Starting at position 1189 of SEQ ID NO: 315462
ccaaguuucuaggaagaga

SEQ ID NO: 412002 - RNA, 19 nt, Artificial Sequence
  Description of Artificial Sequence: Synthetic oligonucleotide
  Antisense Strand to SEQ ID NO: 412001
ucucuuccuagaaacuugg

SEQ ID NO: 412003 - RNA, 19 nt, Artificial Sequence
  Description of Artificial Sequence: Synthetic oligonucleotide
  Sense Strand Starting at position 1189 of SEQ ID NO: 315939
caggacuccucagugaauc

SEQ ID NO: 412004 - RNA, 19 nt, Artificial Sequence
  Description of Artificial Sequence: Synthetic oligonucleotide
  Antisense Strand to SEQ ID NO: 412003
gauucacugaggaguccug

SEQ ID NO: 412005 - RNA, 19 nt, Artificial Sequence
  Description of Artificial Sequence: Synthetic oligonucleotide
  Sense Strand Starting at position 1189 of SEQ ID NO: 316043
ugagcaaccuugguuguua

SEQ ID NO: 412006 - RNA, 19 nt, Artificial Sequence
  Description of Artificial Sequence: Synthetic oligonucleotide
  Antisense Strand to SEQ ID NO: 412005
uaacaaccaagguugcuca

SEQ ID NO: 412007 - RNA, 19 nt, Artificial Sequence
  Description of Artificial Sequence: Synthetic oligonucleotide
  Sense Strand Starting at position 1189 of SEQ ID NO: 316270
ggcgguaugggagaaauua

SEQ ID NO: 412008 - RNA, 19 nt, Artificial Sequence
  Description of Artificial Sequence: Synthetic oligonucleotide
  Antisense Strand to SEQ ID NO: 412007
uaauuucucccauaccgcc

SEQ ID NO: 412009 - RNA, 19 nt, Artificial Sequence
  Description of Artificial Sequence: Synthetic oligonucleotide
  Sense Strand Starting at position 1189 of SEQ ID NO: 316402
gggacuuccuuccugagac

SEQ ID NO: 412010 - RNA, 19 nt, Artificial Sequence
  Description of Artificial Sequence: Synthetic oligonucleotide
  Antisense Strand to SEQ ID NO: 412009
gucucaggaaggaaguccc

SEQ ID NO: 412011 - RNA, 19 nt, Artificial Sequence
  Description of Artificial Sequence: Synthetic oligonucleotide
  Sense Strand Starting at position 1189 of SEQ ID NO: 316445
cugggugaugcccaccuua

SEQ ID NO: 412012 - RNA, 19 nt, Artificial Sequence
  Description of Artificial Sequence: Synthetic oligonucleotide
  Antisense Strand to SEQ ID NO: 412011
uaaggugggcaucacccag

SEQ ID NO: 412013 - RNA, 19 nt, Artificial Sequence
  Description of Artificial Sequence: Synthetic oligonucleotide
  Sense Strand Starting at position 1189 of SEQ ID NO: 316636
uccuguaggucugucaaca

SEQ ID NO: 412014 - RNA, 19 nt, Artificial Sequence
  Description of Artificial Sequence: Synthetic oligonucleotide
  Antisense Strand to SEQ ID NO: 412013
uguugacagaccuacagga

SEQ ID NO: 412015 - RNA, 19 nt, Artificial Sequence
  Description of Artificial Sequence: Synthetic oligonucleotide
  Sense Strand Starting at position 1189 of SEQ ID NO: 316641
uaggucugucaacaugagu

SEQ ID NO: 412016 - RNA, 19 nt, Artificial Sequence
  Description of Artificial Sequence: Synthetic oligonucleotide
  Antisense Strand to SEQ ID NO: 412015
acucauguugacagaccua

SEQ ID NO: 412017 - RNA, 19 nt, Artificial Sequence
  Description of Artificial Sequence: Synthetic oligonucleotide
  Sense Strand Starting at position 1189 of SEQ ID NO: 316788
uuacuacuguguuugcuaa

SEQ ID NO: 412018 - RNA, 19 nt, Artificial Sequence
  Description of Artificial Sequence: Synthetic oligonucleotide
  Antisense Strand to SEQ ID NO: 412017
uuagcaaacacaguaguaa

SEQ ID NO: 412019 - RNA, 19 nt, Artificial Sequence
  Description of Artificial Sequence: Synthetic oligonucleotide
  Sense Strand Starting at position 1189 of SEQ ID NO: 316795
uguguuugcuaagcccuaa

SEQ ID NO: 412020 - RNA, 19 nt, Artificial Sequence
  Description of Artificial Sequence: Synthetic oligonucleotide
  Antisense Strand to SEQ ID NO: 412019
uuagggcuuagcaaacaca

SEQ ID NO: 412021 - RNA, 19 nt, Artificial Sequence
  Description of Artificial Sequence: Synthetic oligonucleotide
  Sense Strand Starting at position 1189 of SEQ ID NO: 316881
gcuguauuccaccaaguaa

SEQ ID NO: 412022 - RNA, 19 nt, Artificial Sequence
  Description of Artificial Sequence: Synthetic oligonucleotide
  Antisense Strand to SEQ ID NO: 412021
uuacuugguggaauacagc

SEQ ID NO: 412023 - RNA, 19 nt, Artificial Sequence
  Description of Artificial Sequence: Synthetic oligonucleotide
  Sense Strand Starting at position 1189 of SEQ ID NO: 316899
agugaucagucccucagaa

SEQ ID NO: 412024 - RNA, 19 nt, Artificial Sequence
  Description of Artificial Sequence: Synthetic oligonucleotide
  Antisense Strand to SEQ ID NO: 412023
uucugagggacugaucacu

SEQ ID NO: 412025 - RNA, 19 nt, Artificial Sequence
  Description of Artificial Sequence: Synthetic oligonucleotide
  Sense Strand Starting at position 1189 of SEQ ID NO: 316972
gcuacacucuucucgacaa

SEQ ID NO: 412026 - RNA, 19 nt, Artificial Sequence
  Description of Artificial Sequence: Synthetic oligonucleotide
  Antisense Strand to SEQ ID NO: 412025
uugucgagaagaguguagc

SEQ ID NO: 412027 - RNA, 19 nt, Artificial Sequence
  Description of Artificial Sequence: Synthetic oligonucleotide
  Sense Strand Starting at position 1189 of SEQ ID NO: 316976
cacucuucucgacaaaggu

SEQ ID NO: 412028 - RNA, 19 nt, Artificial Sequence
  Description of Artificial Sequence: Synthetic oligonucleotide
  Antisense Strand to SEQ ID NO: 412027
accuuugucgagaagagug

SEQ ID NO: 412029 - RNA, 19 nt, Artificial Sequence
  Description of Artificial Sequence: Synthetic oligonucleotide
  Sense Strand Starting at position 1189 of SEQ ID NO: 317225
ggccacuucugcccaauca

SEQ ID NO: 412030 - RNA, 19 nt, Artificial Sequence
  Description of Artificial Sequence: Synthetic oligonucleotide
  Antisense Strand to SEQ ID NO: 412029
ugauugggcagaaguggcc

SEQ ID NO: 412031 - RNA, 19 nt, Artificial Sequence
  Description of Artificial Sequence: Synthetic oligonucleotide
  Sense Strand Starting at position 1189 of SEQ ID NO: 317438
ggaggaaucuggcaggaca

SEQ ID NO: 412032 - RNA, 19 nt, Artificial Sequence
  Description of Artificial Sequence: Synthetic oligonucleotide
  Antisense Strand to SEQ ID NO: 412031
uguccugccagauuccucc

SEQ ID NO: 412033 - RNA, 19 nt, Artificial Sequence
  Description of Artificial Sequence: Synthetic oligonucleotide
  Sense Strand Starting at position 1189 of SEQ ID NO: 317440
aggaaucuggcaggacauu

SEQ ID NO: 412034 - RNA, 19 nt, Artificial Sequence
  Description of Artificial Sequence: Synthetic oligonucleotide
  Antisense Strand to SEQ ID NO: 412033
aauguccugccagauuccu

SEQ ID NO: 412035 - RNA, 19 nt, Artificial Sequence
  Description of Artificial Sequence: Synthetic oligonucleotide
  Sense Strand Starting at position 1189 of SEQ ID NO: 317481
agaggucuuguuuaagauu

SEQ ID NO: 412036 - RNA, 19 nt, Artificial Sequence
  Description of Artificial Sequence: Synthetic oligonucleotide
  Antisense Strand to SEQ ID NO: 412035
aaucuuaaacaagaccucu

SEQ ID NO: 412037 - RNA, 19 nt, Artificial Sequence
  Description of Artificial Sequence: Synthetic oligonucleotide
  Sense Strand Starting at position 1189 of SEQ ID NO: 317651
acggauauugcccacauga

SEQ ID NO: 412038 - RNA, 19 nt, Artificial Sequence
  Description of Artificial Sequence: Synthetic oligonucleotide
  Antisense Strand to SEQ ID NO: 412037
ucaugugggcaauauccgu

SEQ ID NO: 412039 - RNA, 19 nt, Artificial Sequence
  Description of Artificial Sequence: Synthetic oligonucleotide
  Sense Strand Starting at position 1189 of SEQ ID NO: 317669
agagaaaucuccuguuaug

SEQ ID NO: 412040 - RNA, 19 nt, Artificial Sequence
  Description of Artificial Sequence: Synthetic oligonucleotide
  Antisense Strand to SEQ ID NO: 412039
cauaacaggagauuucucu

SEQ ID NO: 412041 - RNA, 19 nt, Artificial Sequence
  Description of Artificial Sequence: Synthetic oligonucleotide
  Sense Strand Starting at position 1189 of SEQ ID NO: 317672
gaaaucuccuguuaugggu

SEQ ID NO: 412042 - RNA, 19 nt, Artificial Sequence
  Description of Artificial Sequence: Synthetic oligonucleotide
  Antisense Strand to SEQ ID NO: 412041
acccauaacaggagauuuc

SEQ ID NO: 412043 - RNA, 19 nt, Artificial Sequence
  Description of Artificial Sequence: Synthetic oligonucleotide
  Sense Strand Starting at position 1189 of SEQ ID NO: 317680
cuguuauggguugguguua

SEQ ID NO: 412044 - RNA, 19 nt, Artificial Sequence
  Description of Artificial Sequence: Synthetic oligonucleotide
  Antisense Strand to SEQ ID NO: 412043
uaacaccaacccauaacag

SEQ ID NO: 412045 - RNA, 19 nt, Artificial Sequence
  Description of Artificial Sequence: Synthetic oligonucleotide
  Sense Strand Starting at position 1189 of SEQ ID NO: 317681
uguuauggguugguguuau

SEQ ID NO: 412046 - RNA, 19 nt, Artificial Sequence
  Description of Artificial Sequence: Synthetic oligonucleotide
  Antisense Strand to SEQ ID NO: 412045
auaacaccaacccauaaca

SEQ ID NO: 412047 - RNA, 19 nt, Artificial Sequence
  Description of Artificial Sequence: Synthetic oligonucleotide
  Sense Strand Starting at position 1189 of SEQ ID NO: 317768
cuggguuaagccugagcuu

SEQ ID NO: 412048 - RNA, 19 nt, Artificial Sequence
  Description of Artificial Sequence: Synthetic oligonucleotide
  Antisense Strand to SEQ ID NO: 412047
aagcucaggcuuaacccag

SEQ ID NO: 412049 - RNA, 19 nt, Artificial Sequence
  Description of Artificial Sequence: Synthetic oligonucleotide
  Sense Strand Starting at position 1189 of SEQ ID NO: 317769
uggguuaagccugagcuua

SEQ ID NO: 412050 - RNA, 19 nt, Artificial Sequence
  Description of Artificial Sequence: Synthetic oligonucleotide
  Antisense Strand to SEQ ID NO: 412049
uaagcucaggcuuaaccca

SEQ ID NO: 412051 - RNA, 19 nt, Artificial Sequence
  Description of Artificial Sequence: Synthetic oligonucleotide
  Sense Strand Starting at position 1189 of SEQ ID NO: 317811
uggcuuagauggcuacaca

SEQ ID NO: 412052 - RNA, 19 nt, Artificial Sequence
  Description of Artificial Sequence: Synthetic oligonucleotide
  Antisense Strand to SEQ ID NO: 412051
uguguagccaucuaagcca

SEQ ID NO: 412053 - RNA, 19 nt, Artificial Sequence
  Description of Artificial Sequence: Synthetic oligonucleotide
  Sense Strand Starting at position 1189 of SEQ ID NO: 317929
gucccugucuuaggaaaga

SEQ ID NO: 412054 - RNA, 19 nt, Artificial Sequence
  Description of Artificial Sequence: Synthetic oligonucleotide
  Antisense Strand to SEQ ID NO: 412053
ucuuuccuaagacagggac

SEQ ID NO: 412055 - RNA, 19 nt, Artificial Sequence
  Description of Artificial Sequence: Synthetic oligonucleotide
  Sense Strand Starting at position 1189 of SEQ ID NO: 318149
augggcaugucugcugaga

SEQ ID NO: 412056 - RNA, 19 nt, Artificial Sequence
  Description of Artificial Sequence: Synthetic oligonucleotide
  Antisense Strand to SEQ ID NO: 412055
ucucagcagacaugcccau

SEQ ID NO: 412057 - RNA, 19 nt, Artificial Sequence
  Description of Artificial Sequence: Synthetic oligonucleotide
  Sense Strand Starting at position 1189 of SEQ ID NO: 318163
ugagaaguguggccuagau

SEQ ID NO: 412058 - RNA, 19 nt, Artificial Sequence
  Description of Artificial Sequence: Synthetic oligonucleotide
  Antisense Strand to SEQ ID NO: 412057
aucuaggccacacuucuca

SEQ ID NO: 412059 - RNA, 19 nt, Artificial Sequence
  Description of Artificial Sequence: Synthetic oligonucleotide
  Sense Strand Starting at position 1189 of SEQ ID NO: 318172
uggccuagauccuggaauu

SEQ ID NO: 412060 - RNA, 19 nt, Artificial Sequence
  Description of Artificial Sequence: Synthetic oligonucleotide
  Antisense Strand to SEQ ID NO: 412059
aauuccaggaucuaggcca

SEQ ID NO: 412061 - RNA, 19 nt, Artificial Sequence
  Description of Artificial Sequence: Synthetic oligonucleotide
  Sense Strand Starting at position 1189 of SEQ ID NO: 318207
cgagaugucucccaagauu

SEQ ID NO: 412062 - RNA, 19 nt, Artificial Sequence
  Description of Artificial Sequence: Synthetic oligonucleotide
  Antisense Strand to SEQ ID NO: 412061
aaucuugggagacaucucg

SEQ ID NO: 412063 - RNA, 19 nt, Artificial Sequence
  Description of Artificial Sequence: Synthetic oligonucleotide
  Sense Strand Starting at position 1189 of SEQ ID NO: 318239
cugggauagcugggaggau

SEQ ID NO: 412064 - RNA, 19 nt, Artificial Sequence
  Description of Artificial Sequence: Synthetic oligonucleotide
  Antisense Strand to SEQ ID NO: 412063
auccucccagcuaucccag

SEQ ID NO: 412065 - RNA, 19 nt, Artificial Sequence
  Description of Artificial Sequence: Synthetic oligonucleotide
  Sense Strand Starting at position 1189 of SEQ ID NO: 318240
ugggauagcugggaggaua

SEQ ID NO: 412066 - RNA, 19 nt, Artificial Sequence
  Description of Artificial Sequence: Synthetic oligonucleotide
  Antisense Strand to SEQ ID NO: 412065
uauccucccagcuauccca

SEQ ID NO: 412067 - RNA, 19 nt, Artificial Sequence
  Description of Artificial Sequence: Synthetic oligonucleotide
  Sense Strand Starting at position 1189 of SEQ ID NO: 318399
gucgaaugcgccugaggau

SEQ ID NO: 412068 - RNA, 19 nt, Artificial Sequence
  Description of Artificial Sequence: Synthetic oligonucleotide
  Antisense Strand to SEQ ID NO: 412067
auccucaggcgcauucgac

SEQ ID NO: 412069 - RNA, 19 nt, Artificial Sequence
  Description of Artificial Sequence: Synthetic oligonucleotide
  Sense Strand Starting at position 1189 of SEQ ID NO: 318400
ucgaaugcgccugaggaua

SEQ ID NO: 412070 - RNA, 19 nt, Artificial Sequence
  Description of Artificial Sequence: Synthetic oligonucleotide
  Antisense Strand to SEQ ID NO: 412069
uauccucaggcgcauucga

SEQ ID NO: 412071 - RNA, 19 nt, Artificial Sequence
  Description of Artificial Sequence: Synthetic oligonucleotide
  Sense Strand Starting at position 1189 of SEQ ID NO: 318408
gccugaggauaaguuacaa

SEQ ID NO: 412072 - RNA, 19 nt, Artificial Sequence
  Description of Artificial Sequence: Synthetic oligonucleotide
  Antisense Strand to SEQ ID NO: 412071
uuguaacuuauccucaggc

SEQ ID NO: 412073 - RNA, 19 nt, Artificial Sequence
  Description of Artificial Sequence: Synthetic oligonucleotide
  Sense Strand Starting at position 1189 of SEQ ID NO: 318432
gggagauacugucacucca

SEQ ID NO: 412074 - RNA, 19 nt, Artificial Sequence
  Description of Artificial Sequence: Synthetic oligonucleotide
  Antisense Strand to SEQ ID NO: 412073
uggagugacaguaucuccc

SEQ ID NO: 412075 - RNA, 19 nt, Artificial Sequence
  Description of Artificial Sequence: Synthetic oligonucleotide
  Sense Strand Starting at position 1189 of SEQ ID NO: 318483
gucccuguccuggguaaca

SEQ ID NO: 412076 - RNA, 19 nt, Artificial Sequence
  Description of Artificial Sequence: Synthetic oligonucleotide
  Antisense Strand to SEQ ID NO: 412075
uguuacccaggacagggac

SEQ ID NO: 412077 - RNA, 19 nt, Artificial Sequence
  Description of Artificial Sequence: Synthetic oligonucleotide
  Sense Strand Starting at position 1189 of SEQ ID NO: 318628
cguugucaucuuuaaagac

SEQ ID NO: 412078 - RNA, 19 nt, Artificial Sequence
  Description of Artificial Sequence: Synthetic oligonucleotide
  Antisense Strand to SEQ ID NO: 412077
gucuuuaaagaugacaacg

SEQ ID NO: 412079 - RNA, 19 nt, Artificial Sequence
  Description of Artificial Sequence: Synthetic oligonucleotide
  Sense Strand Starting at position 1190 of SEQ ID NO: 315308
uuacuacuguguuugcuaa

SEQ ID NO: 412080 - RNA, 19 nt, Artificial Sequence
  Description of Artificial Sequence: Synthetic oligonucleotide
  Antisense Strand to SEQ ID NO: 412079
uuagcaaacacaguaguaa

SEQ ID NO: 412081 - RNA, 19 nt, Artificial Sequence
  Description of Artificial Sequence: Synthetic oligonucleotide
  Sense Strand Starting at position 1190 of SEQ ID NO: 315315
uguguuugcuaagcccuaa

SEQ ID NO: 412082 - RNA, 19 nt, Artificial Sequence
  Description of Artificial Sequence: Synthetic oligonucleotide
  Antisense Strand to SEQ ID NO: 412081
uuagggcuuagcaaacaca

SEQ ID NO: 412083 - RNA, 19 nt, Artificial Sequence
  Description of Artificial Sequence: Synthetic oligonucleotide
  Sense Strand Starting at position 1190 of SEQ ID NO: 315401
gcuguauuccaccaaguaa

SEQ ID NO: 412084 - RNA, 19 nt, Artificial Sequence
  Description of Artificial Sequence: Synthetic oligonucleotide
  Antisense Strand to SEQ ID NO: 412083
uuacuugguggaauacagc

SEQ ID NO: 412085 - RNA, 19 nt, Artificial Sequence
  Description of Artificial Sequence: Synthetic oligonucleotide
  Sense Strand Starting at position 1190 of SEQ ID NO: 315419
agugaucagucccucagaa

SEQ ID NO: 412086 - RNA, 19 nt, Artificial Sequence
  Description of Artificial Sequence: Synthetic oligonucleotide
  Antisense Strand to SEQ ID NO: 412085
uucugagggacugaucacu

SEQ ID NO: 412087 - RNA, 19 nt, Artificial Sequence
  Description of Artificial Sequence: Synthetic oligonucleotide
  Sense Strand Starting at position 1190 of SEQ ID NO: 315492
gcuacacucuucucgacaa

SEQ ID NO: 412088 - RNA, 19 nt, Artificial Sequence
  Description of Artificial Sequence: Synthetic oligonucleotide
  Antisense Strand to SEQ ID NO: 412087
uugucgagaagaguguagc

SEQ ID NO: 412089 - RNA, 19 nt, Artificial Sequence
  Description of Artificial Sequence: Synthetic oligonucleotide
  Sense Strand Starting at position 1190 of SEQ ID NO: 315496
cacucuucucgacaaaggu

SEQ ID NO: 412090 - RNA, 19 nt, Artificial Sequence
  Description of Artificial Sequence: Synthetic oligonucleotide
  Antisense Strand to SEQ ID NO: 412089
accuuugucgagaagagug

SEQ ID NO: 412091 - RNA, 19 nt, Artificial Sequence
  Description of Artificial Sequence: Synthetic oligonucleotide
  Sense Strand Starting at position 1190 of SEQ ID NO: 315745
ggccacuucugcccaauca

SEQ ID NO: 412092 - RNA, 19 nt, Artificial Sequence
  Description of Artificial Sequence: Synthetic oligonucleotide
  Antisense Strand to SEQ ID NO: 412091
ugauugggcagaaguggcc

SEQ ID NO: 412093 - RNA, 19 nt, Artificial Sequence
  Description of Artificial Sequence: Synthetic oligonucleotide
  Sense Strand Starting at position 1190 of SEQ ID NO: 315958
ggaggaaucuggcaggaca

SEQ ID NO: 412094 - RNA, 19 nt, Artificial Sequence
  Description of Artificial Sequence: Synthetic oligonucleotide
  Antisense Strand to SEQ ID NO: 412093
uguccugccagauuccucc

SEQ ID NO: 412095 - RNA, 19 nt, Artificial Sequence
  Description of Artificial Sequence: Synthetic oligonucleotide
  Sense Strand Starting at position 1190 of SEQ ID NO: 315960
aggaaucuggcaggacauu

SEQ ID NO: 412096 - RNA, 19 nt, Artificial Sequence
  Description of Artificial Sequence: Synthetic oligonucleotide
  Antisense Strand to SEQ ID NO: 412095
aauguccugccagauuccu

SEQ ID NO: 412097 - RNA, 19 nt, Artificial Sequence
  Description of Artificial Sequence: Synthetic oligonucleotide
  Sense Strand Starting at position 1190 of SEQ ID NO: 316001
agaggucuuguuuaagauu

SEQ ID NO: 412098 - RNA, 19 nt, Artificial Sequence
  Description of Artificial Sequence: Synthetic oligonucleotide
  Antisense Strand to SEQ ID NO: 412097
aaucuuaaacaagaccucu

SEQ ID NO: 412099 - RNA, 19 nt, Artificial Sequence
  Description of Artificial Sequence: Synthetic oligonucleotide
  Sense Strand Starting at position 1190 of SEQ ID NO: 316004
ggucuuguuuaagauuggu

SEQ ID NO: 412100 - RNA, 19 nt, Artificial Sequence
  Description of Artificial Sequence: Synthetic oligonucleotide
  Antisense Strand to SEQ ID NO: 412099
accaaucuuaaacaagacc

SEQ ID NO: 412101 - RNA, 19 nt, Artificial Sequence
  Description of Artificial Sequence: Synthetic oligonucleotide
  Sense Strand Starting at position 1190 of SEQ ID NO: 316171
acggauauugcccacauga

SEQ ID NO: 412102 - RNA, 19 nt, Artificial Sequence
  Description of Artificial Sequence: Synthetic oligonucleotide
  Antisense Strand to SEQ ID NO: 412101
ucaugugggcaauauccgu

SEQ ID NO: 412103 - RNA, 19 nt, Artificial Sequence
  Description of Artificial Sequence: Synthetic oligonucleotide
  Sense Strand Starting at position 1190 of SEQ ID NO: 316189
agagaaaucuccuguuaug

SEQ ID NO: 412104 - RNA, 19 nt, Artificial Sequence
  Description of Artificial Sequence: Synthetic oligonucleotide
  Antisense Strand to SEQ ID NO: 412103
cauaacaggagauuucucu

SEQ ID NO: 412105 - RNA, 19 nt, Artificial Sequence
  Description of Artificial Sequence: Synthetic oligonucleotide
  Sense Strand Starting at position 1190 of SEQ ID NO: 316192
gaaaucuccuguuaugggu

SEQ ID NO: 412106 - RNA, 19 nt, Artificial Sequence
  Description of Artificial Sequence: Synthetic oligonucleotide
  Antisense Strand to SEQ ID NO: 412105
acccauaacaggagauuuc

SEQ ID NO: 412107 - RNA, 19 nt, Artificial Sequence
  Description of Artificial Sequence: Synthetic oligonucleotide
  Sense Strand Starting at position 1190 of SEQ ID NO: 316200
cuguuauggguugguguua

SEQ ID NO: 412108 - RNA, 19 nt, Artificial Sequence
  Description of Artificial Sequence: Synthetic oligonucleotide
  Antisense Strand to SEQ ID NO: 412107
uaacaccaacccauaacag

SEQ ID NO: 412109 - RNA, 19 nt, Artificial Sequence
  Description of Artificial Sequence: Synthetic oligonucleotide
  Sense Strand Starting at position 1190 of SEQ ID NO: 316201
uguuauggguugguguuau

SEQ ID NO: 412110 - RNA, 19 nt, Artificial Sequence
  Description of Artificial Sequence: Synthetic oligonucleotide
  Antisense Strand to SEQ ID NO: 412109
auaacaccaacccauaaca

SEQ ID NO: 412111 - RNA, 19 nt, Artificial Sequence
  Description of Artificial Sequence: Synthetic oligonucleotide
  Sense Strand Starting at position 1190 of SEQ ID NO: 316288
cuggguuaagccugagcuu

SEQ ID NO: 412112 - RNA, 19 nt, Artificial Sequence
  Description of Artificial Sequence: Synthetic oligonucleotide
  Antisense Strand to SEQ ID NO: 412111
aagcucaggcuuaacccag

SEQ ID NO: 412113 - RNA, 19 nt, Artificial Sequence
  Description of Artificial Sequence: Synthetic oligonucleotide
  Sense Strand Starting at position 1190 of SEQ ID NO: 316289
uggguuaagccugagcuua

SEQ ID NO: 412114 - RNA, 19 nt, Artificial Sequence
  Description of Artificial Sequence: Synthetic oligonucleotide
  Antisense Strand to SEQ ID NO: 412113
uaagcucaggcuuaaccca

SEQ ID NO: 412115 - RNA, 19 nt, Artificial Sequence
  Description of Artificial Sequence: Synthetic oligonucleotide
  Sense Strand Starting at position 1190 of SEQ ID NO: 316331
uggcuuagauggcuacaca

SEQ ID NO: 412116 - RNA, 19 nt, Artificial Sequence
  Description of Artificial Sequence: Synthetic oligonucleotide
  Antisense Strand to SEQ ID NO: 412115
uguguagccaucuaagcca

SEQ ID NO: 412117 - RNA, 19 nt, Artificial Sequence
  Description of Artificial Sequence: Synthetic oligonucleotide
  Sense Strand Starting at position 1190 of SEQ ID NO: 316449
gucccugucuuaggaaaga

SEQ ID NO: 412118 - RNA, 19 nt, Artificial Sequence
  Description of Artificial Sequence: Synthetic oligonucleotide
  Antisense Strand to SEQ ID NO: 412117
ucuuuccuaagacagggac

SEQ ID NO: 412119 - RNA, 19 nt, Artificial Sequence
  Description of Artificial Sequence: Synthetic oligonucleotide
  Sense Strand Starting at position 1190 of SEQ ID NO: 316669
augggcaugucugcugaga

SEQ ID NO: 412120 - RNA, 19 nt, Artificial Sequence
  Description of Artificial Sequence: Synthetic oligonucleotide
  Antisense Strand to SEQ ID NO: 412119
ucucagcagacaugcccau

SEQ ID NO: 412121 - RNA, 19 nt, Artificial Sequence
  Description of Artificial Sequence: Synthetic oligonucleotide
  Sense Strand Starting at position 1190 of SEQ ID NO: 316683
ugagaaguguggccuagau

SEQ ID NO: 412122 - RNA, 19 nt, Artificial Sequence
  Description of Artificial Sequence: Synthetic oligonucleotide
  Antisense Strand to SEQ ID NO: 412121
aucuaggccacacuucuca

SEQ ID NO: 412123 - RNA, 19 nt, Artificial Sequence
  Description of Artificial Sequence: Synthetic oligonucleotide
  Sense Strand Starting at position 1190 of SEQ ID NO: 316692
uggccuagauccuggaauu

SEQ ID NO: 412124 - RNA, 19 nt, Artificial Sequence
  Description of Artificial Sequence: Synthetic oligonucleotide
  Antisense Strand to SEQ ID NO: 412123
aauuccaggaucuaggcca

SEQ ID NO: 412125 - RNA, 19 nt, Artificial Sequence
  Description of Artificial Sequence: Synthetic oligonucleotide
  Sense Strand Starting at position 1190 of SEQ ID NO: 316727
cgagaugucucccaagauu

SEQ ID NO: 412126 - RNA, 19 nt, Artificial Sequence
  Description of Artificial Sequence: Synthetic oligonucleotide
  Antisense Strand to SEQ ID NO: 412125
aaucuugggagacaucucg

SEQ ID NO: 412127 - RNA, 19 nt, Artificial Sequence
  Description of Artificial Sequence: Synthetic oligonucleotide
  Sense Strand Starting at position 1190 of SEQ ID NO: 316759
cugggauagcugggaggau

SEQ ID NO: 412128 - RNA, 19 nt, Artificial Sequence
  Description of Artificial Sequence: Synthetic oligonucleotide
  Antisense Strand to SEQ ID NO: 412127
auccucccagcuaucccag

SEQ ID NO: 412129 - RNA, 19 nt, Artificial Sequence
  Description of Artificial Sequence: Synthetic oligonucleotide
  Sense Strand Starting at position 1190 of SEQ ID NO: 316760
ugggauagcugggaggaua

SEQ ID NO: 412130 - RNA, 19 nt, Artificial Sequence
  Description of Artificial Sequence: Synthetic oligonucleotide
  Antisense Strand to SEQ ID NO: 412129
uauccucccagcuauccca

SEQ ID NO: 412131 - RNA, 19 nt, Artificial Sequence
  Description of Artificial Sequence: Synthetic oligonucleotide
  Sense Strand Starting at position 1190 of SEQ ID NO: 316919
gucgaaugcgccugaggau

SEQ ID NO: 412132 - RNA, 19 nt, Artificial Sequence
  Description of Artificial Sequence: Synthetic oligonucleotide
  Antisense Strand to SEQ ID NO: 412131
auccucaggcgcauucgac

SEQ ID NO: 412133 - RNA, 19 nt, Artificial Sequence
  Description of Artificial Sequence: Synthetic oligonucleotide
  Sense Strand Starting at position 1190 of SEQ ID NO: 316920
ucgaaugcgccugaggaua

SEQ ID NO: 412134 - RNA, 19 nt, Artificial Sequence
  Description of Artificial Sequence: Synthetic oligonucleotide
  Antisense Strand to SEQ ID NO: 412133
uauccucaggcgcauucga

SEQ ID NO: 412135 - RNA, 19 nt, Artificial Sequence
  Description of Artificial Sequence: Synthetic oligonucleotide
  Sense Strand Starting at position 1190 of SEQ ID NO: 316928
gccugaggauaaguuacaa

SEQ ID NO: 412136 - RNA, 19 nt, Artificial Sequence
  Description of Artificial Sequence: Synthetic oligonucleotide
  Antisense Strand to SEQ ID NO: 412135
uuguaacuuauccucaggc

SEQ ID NO: 412137 - RNA, 19 nt, Artificial Sequence
  Description of Artificial Sequence: Synthetic oligonucleotide
  Sense Strand Starting at position 1190 of SEQ ID NO: 316952
gggagauacugucacucca

SEQ ID NO: 412138 - RNA, 19 nt, Artificial Sequence
  Description of Artificial Sequence: Synthetic oligonucleotide
  Antisense Strand to SEQ ID NO: 412137
uggagugacaguaucuccc

SEQ ID NO: 412139 - RNA, 19 nt, Artificial Sequence
  Description of Artificial Sequence: Synthetic oligonucleotide
  Sense Strand Starting at position 1190 of SEQ ID NO: 317003
gucccuguccuggguaaca

SEQ ID NO: 412140 - RNA, 19 nt, Artificial Sequence
  Description of Artificial Sequence: Synthetic oligonucleotide
  Antisense Strand to SEQ ID NO: 412139
uguuacccaggacagggac

SEQ ID NO: 412141 - RNA, 19 nt, Artificial Sequence
  Description of Artificial Sequence: Synthetic oligonucleotide
  Sense Strand Starting at position 1190 of SEQ ID NO: 317148
cguugucaucuuuaaagac

SEQ ID NO: 412142 - RNA, 19 nt, Artificial Sequence
  Description of Artificial Sequence: Synthetic oligonucleotide
  Antisense Strand to SEQ ID NO: 412141
gucuuuaaagaugacaacg

SEQ ID NO: 412143 - RNA, 19 nt, Artificial Sequence
  Description of Artificial Sequence: Synthetic oligonucleotide
  Sense Strand Starting at position 1190 of SEQ ID NO: 318527
gugugaggcucugugccaa

SEQ ID NO: 412144 - RNA, 19 nt, Artificial Sequence
  Description of Artificial Sequence: Synthetic oligonucleotide
  Antisense Strand to SEQ ID NO: 412143
uuggcacagagccucacac

SEQ ID NO: 412145 - RNA, 19 nt, Artificial Sequence
  Description of Artificial Sequence: Synthetic oligonucleotide
  Sense Strand Starting at position 1190 of SEQ ID NO: 318539
gugccaacuccguuucguu

SEQ ID NO: 412146 - RNA, 19 nt, Artificial Sequence
  Description of Artificial Sequence: Synthetic oligonucleotide
  Antisense Strand to SEQ ID NO: 412145
aacgaaacggaguuggcac

SEQ ID NO: 412147 - RNA, 19 nt, Artificial Sequence
  Description of Artificial Sequence: Synthetic oligonucleotide
  Sense Strand Starting at position 1190 of SEQ ID NO: 318577
auggcagccuugcuagaua

SEQ ID NO: 412148 - RNA, 19 nt, Artificial Sequence
  Description of Artificial Sequence: Synthetic oligonucleotide
  Antisense Strand to SEQ ID NO: 412147
uaucuagcaaggcugccau

SEQ ID NO: 412149 - RNA, 19 nt, Artificial Sequence
  Description of Artificial Sequence: Synthetic oligonucleotide
  Sense Strand Starting at position 1190 of SEQ ID NO: 318586
uugcuagauagagaguauu

SEQ ID NO: 412150 - RNA, 19 nt, Artificial Sequence
  Description of Artificial Sequence: Synthetic oligonucleotide
  Antisense Strand to SEQ ID NO: 412149
aauacucucuaucuagcaa

SEQ ID NO: 412151 - RNA, 19 nt, Artificial Sequence
  Description of Artificial Sequence: Synthetic oligonucleotide
  Sense Strand Starting at position 1190 of SEQ ID NO: 318592
gauagagaguauuauuauc

SEQ ID NO: 412152 - RNA, 19 nt, Artificial Sequence
  Description of Artificial Sequence: Synthetic oligonucleotide
  Antisense Strand to SEQ ID NO: 412151
gauaauaauacucucuauc

SEQ ID NO: 412153 - RNA, 19 nt, Artificial Sequence
  Description of Artificial Sequence: Synthetic oligonucleotide
  Sense Strand Starting at position 1190 of SEQ ID NO: 318646
gaugaaguagcuugucuag

SEQ ID NO: 412154 - RNA, 19 nt, Artificial Sequence
  Description of Artificial Sequence: Synthetic oligonucleotide
  Antisense Strand to SEQ ID NO: 412153
cuagacaagcuacuucauc

SEQ ID NO: 412155 - RNA, 19 nt, Artificial Sequence
  Description of Artificial Sequence: Synthetic oligonucleotide
  Sense Strand Starting at position 1190 of SEQ ID NO: 319008
agcugaagcccguguucuu

SEQ ID NO: 412156 - RNA, 19 nt, Artificial Sequence
  Description of Artificial Sequence: Synthetic oligonucleotide
  Antisense Strand to SEQ ID NO: 412155
aagaacacgggcuucagcu

SEQ ID NO: 412157 - RNA, 19 nt, Artificial Sequence
  Description of Artificial Sequence: Synthetic oligonucleotide
  Sense Strand Starting at position 1190 of SEQ ID NO: 319009
gcugaagcccguguucuua

SEQ ID NO: 412158 - RNA, 19 nt, Artificial Sequence
  Description of Artificial Sequence: Synthetic oligonucleotide
  Antisense Strand to SEQ ID NO: 412157
uaagaacacgggcuucagc

SEQ ID NO: 412159 - RNA, 19 nt, Artificial Sequence
  Description of Artificial Sequence: Synthetic oligonucleotide
  Sense Strand Starting at position 1191 of SEQ ID NO: 315242
auaccuuugcauuguaaug

SEQ ID NO: 412160 - RNA, 19 nt, Artificial Sequence
  Description of Artificial Sequence: Synthetic oligonucleotide
  Antisense Strand to SEQ ID NO: 412159
cauuacaaugcaaagguau

SEQ ID NO: 412161 - RNA, 19 nt, Artificial Sequence
  Description of Artificial Sequence: Synthetic oligonucleotide
  Sense Strand Starting at position 1191 of SEQ ID NO: 315253
uuguaaugccaacaggaau

SEQ ID NO: 412162 - RNA, 19 nt, Artificial Sequence
  Description of Artificial Sequence: Synthetic oligonucleotide
  Antisense Strand to SEQ ID NO: 412161
auuccuguuggcauuacaa

SEQ ID NO: 412163 - RNA, 19 nt, Artificial Sequence
  Description of Artificial Sequence: Synthetic oligonucleotide
  Sense Strand Starting at position 1191 of SEQ ID NO: 315299
agcuauacucaguauuauu

SEQ ID NO: 412164 - RNA, 19 nt, Artificial Sequence
  Description of Artificial Sequence: Synthetic oligonucleotide
  Antisense Strand to SEQ ID NO: 412163
aauaauacugaguauagcu

SEQ ID NO: 412165 - RNA, 19 nt, Artificial Sequence
  Description of Artificial Sequence: Synthetic oligonucleotide
  Sense Strand Starting at position 1191 of SEQ ID NO: 315460
ucaccaaugucuuuguaua

SEQ ID NO: 412166 - RNA, 19 nt, Artificial Sequence
  Description of Artificial Sequence: Synthetic oligonucleotide
  Antisense Strand to SEQ ID NO: 412165
uauacaaagacauugguga

SEQ ID NO: 412167 - RNA, 19 nt, Artificial Sequence
  Description of Artificial Sequence: Synthetic oligonucleotide
  Sense Strand Starting at position 1191 of SEQ ID NO: 315462
accaaugucuuuguauaaa

SEQ ID NO: 412168 - RNA, 19 nt, Artificial Sequence
  Description of Artificial Sequence: Synthetic oligonucleotide
  Antisense Strand to SEQ ID NO: 412167
uuuauacaaagacauuggu

SEQ ID NO: 412169 - RNA, 19 nt, Artificial Sequence
  Description of Artificial Sequence: Synthetic oligonucleotide
  Sense Strand Starting at position 1191 of SEQ ID NO: 315670
gcaggucagucacugaaua

SEQ ID NO: 412170 - RNA, 19 nt, Artificial Sequence
  Description of Artificial Sequence: Synthetic oligonucleotide
  Antisense Strand to SEQ ID NO: 412169
uauucagugacugaccugc

SEQ ID NO: 412171 - RNA, 19 nt, Artificial Sequence
  Description of Artificial Sequence: Synthetic oligonucleotide
  Sense Strand Starting at position 1191 of SEQ ID NO: 315671
caggucagucacugaauau

SEQ ID NO: 412172 - RNA, 19 nt, Artificial Sequence
  Description of Artificial Sequence: Synthetic oligonucleotide
  Antisense Strand to SEQ ID NO: 412171
auauucagugacugaccug

SEQ ID NO: 412173 - RNA, 19 nt, Artificial Sequence
  Description of Artificial Sequence: Synthetic oligonucleotide
  Sense Strand Starting at position 1191 of SEQ ID NO: 315798
augugaagauugcccaaca

SEQ ID NO: 412174 - RNA, 19 nt, Artificial Sequence
  Description of Artificial Sequence: Synthetic oligonucleotide
  Antisense Strand to SEQ ID NO: 412173
uguugggcaaucuucacau

SEQ ID NO: 412175 - RNA, 19 nt, Artificial Sequence
  Description of Artificial Sequence: Synthetic oligonucleotide
  Sense Strand Starting at position 1191 of SEQ ID NO: 315809
gcccaacaggucuacauua

SEQ ID NO: 412176 - RNA, 19 nt, Artificial Sequence
  Description of Artificial Sequence: Synthetic oligonucleotide
  Antisense Strand to SEQ ID NO: 412175
uaauguagaccuguugggc

SEQ ID NO: 412177 - RNA, 19 nt, Artificial Sequence
  Description of Artificial Sequence: Synthetic oligonucleotide
  Sense Strand Starting at position 1191 of SEQ ID NO: 315852
acugcugugcuugauauua

SEQ ID NO: 412178 - RNA, 19 nt, Artificial Sequence
  Description of Artificial Sequence: Synthetic oligonucleotide
  Antisense Strand to SEQ ID NO: 412177
uaauaucaagcacagcagu

SEQ ID NO: 412179 - RNA, 19 nt, Artificial Sequence
  Description of Artificial Sequence: Synthetic oligonucleotide
  Sense Strand Starting at position 1191 of SEQ ID NO: 315989
cugauuacacaguguuuga

SEQ ID NO: 412180 - RNA, 19 nt, Artificial Sequence
  Description of Artificial Sequence: Synthetic oligonucleotide
  Antisense Strand to SEQ ID NO: 412179
ucaaacacuguguaaucag

SEQ ID NO: 412181 - RNA, 19 nt, Artificial Sequence
  Description of Artificial Sequence: Synthetic oligonucleotide
  Sense Strand Starting at position 1191 of SEQ ID NO: 316021
cuaaauuuauguggacaaa

SEQ ID NO: 412182 - RNA, 19 nt, Artificial Sequence
  Description of Artificial Sequence: Synthetic oligonucleotide
  Antisense Strand to SEQ ID NO: 412181
uuuguccacauaaauuuag

SEQ ID NO: 412183 - RNA, 19 nt, Artificial Sequence
  Description of Artificial Sequence: Synthetic oligonucleotide
  Sense Strand Starting at position 1191 of SEQ ID NO: 316106
auuguuauguuucuagauc

SEQ ID NO: 412184 - RNA, 19 nt, Artificial Sequence
  Description of Artificial Sequence: Synthetic oligonucleotide
  Antisense Strand to SEQ ID NO: 412183
gaucuagaaacauaacaau

SEQ ID NO: 412185 - RNA, 19 nt, Artificial Sequence
  Description of Artificial Sequence: Synthetic oligonucleotide
  Sense Strand Starting at position 1191 of SEQ ID NO: 316244
ccacaauggucauugggaa

SEQ ID NO: 412186 - RNA, 19 nt, Artificial Sequence
  Description of Artificial Sequence: Synthetic oligonucleotide
  Antisense Strand to SEQ ID NO: 412185
uucccaaugaccauugugg

SEQ ID NO: 412187 - RNA, 19 nt, Artificial Sequence
  Description of Artificial Sequence: Synthetic oligonucleotide
  Sense Strand Starting at position 1191 of SEQ ID NO: 317078
cgcgguccucuagccaaau

SEQ ID NO: 412188 - RNA, 19 nt, Artificial Sequence
  Description of Artificial Sequence: Synthetic oligonucleotide
  Antisense Strand to SEQ ID NO: 412187
auuuggcuagaggaccgcg

SEQ ID NO: 412189 - RNA, 19 nt, Artificial Sequence
  Description of Artificial Sequence: Synthetic oligonucleotide
  Sense Strand Starting at position 1191 of SEQ ID NO: 318009
gcggguuugggcgucauua

SEQ ID NO: 412190 - RNA, 19 nt, Artificial Sequence
  Description of Artificial Sequence: Synthetic oligonucleotide
  Antisense Strand to SEQ ID NO: 412189
uaaugacgcccaaacccgc

SEQ ID NO: 412191 - RNA, 19 nt, Artificial Sequence
  Description of Artificial Sequence: Synthetic oligonucleotide
  Sense Strand Starting at position 1191 of SEQ ID NO: 318010
cggguuugggcgucauuac

SEQ ID NO: 412192 - RNA, 19 nt, Artificial Sequence
  Description of Artificial Sequence: Synthetic oligonucleotide
  Antisense Strand to SEQ ID NO: 412191
guaaugacgcccaaacccg

SEQ ID NO: 412193 - RNA, 19 nt, Artificial Sequence
  Description of Artificial Sequence: Synthetic oligonucleotide
  Sense Strand Starting at position 1191 of SEQ ID NO: 318022
ucauuacucuaguuggaga

SEQ ID NO: 412194 - RNA, 19 nt, Artificial Sequence
  Description of Artificial Sequence: Synthetic oligonucleotide
  Antisense Strand to SEQ ID NO: 412193
ucuccaacuagaguaauga

SEQ ID NO: 412195 - RNA, 19 nt, Artificial Sequence
  Description of Artificial Sequence: Synthetic oligonucleotide
  Sense Strand Starting at position 1191 of SEQ ID NO: 318405
auuugucuuugcccuggaa

SEQ ID NO: 412196 - RNA, 19 nt, Artificial Sequence
  Description of Artificial Sequence: Synthetic oligonucleotide
  Antisense Strand to SEQ ID NO: 412195
uuccagggcaaagacaaau

SEQ ID NO: 412197 - RNA, 19 nt, Artificial Sequence
  Description of Artificial Sequence: Synthetic oligonucleotide
  Sense Strand Starting at position 1191 of SEQ ID NO: 318408
ugucuuugcccuggaaaug

SEQ ID NO: 412198 - RNA, 19 nt, Artificial Sequence
  Description of Artificial Sequence: Synthetic oligonucleotide
  Antisense Strand to SEQ ID NO: 412197
cauuuccagggcaaagaca

SEQ ID NO: 412199 - RNA, 19 nt, Artificial Sequence
  Description of Artificial Sequence: Synthetic oligonucleotide
  Sense Strand Starting at position 1191 of SEQ ID NO: 318409
gucuuugcccuggaaaugu

SEQ ID NO: 412200 - RNA, 19 nt, Artificial Sequence
  Description of Artificial Sequence: Synthetic oligonucleotide
  Antisense Strand to SEQ ID NO: 412199
acauuuccagggcaaagac

SEQ ID NO: 412201 - RNA, 19 nt, Artificial Sequence
  Description of Artificial Sequence: Synthetic oligonucleotide
  Sense Strand Starting at position 1191 of SEQ ID NO: 318468
aagagaucuuucccgggca

SEQ ID NO: 412202 - RNA, 19 nt, Artificial Sequence
  Description of Artificial Sequence: Synthetic oligonucleotide
  Antisense Strand to SEQ ID NO: 412201
ugcccgggaaagaucucuu

SEQ ID NO: 412203 - RNA, 19 nt, Artificial Sequence
  Description of Artificial Sequence: Synthetic oligonucleotide
  Sense Strand Starting at position 1191 of SEQ ID NO: 318470
gagaucuuucccgggcaaa

SEQ ID NO: 412204 - RNA, 19 nt, Artificial Sequence
  Description of Artificial Sequence: Synthetic oligonucleotide
  Antisense Strand to SEQ ID NO: 412203
uuugcccgggaaagaucuc

SEQ ID NO: 412205 - RNA, 19 nt, Artificial Sequence
  Description of Artificial Sequence: Synthetic oligonucleotide
  Sense Strand Starting at position 1191 of SEQ ID NO: 318471
agaucuuucccgggcaaau

SEQ ID NO: 412206 - RNA, 19 nt, Artificial Sequence
  Description of Artificial Sequence: Synthetic oligonucleotide
  Antisense Strand to SEQ ID NO: 412205
auuugcccgggaaagaucu

SEQ ID NO: 412207 - RNA, 19 nt, Artificial Sequence
  Description of Artificial Sequence: Synthetic oligonucleotide
  Sense Strand Starting at position 1191 of SEQ ID NO: 318473
aucuuucccgggcaaauau

SEQ ID NO: 412208 - RNA, 19 nt, Artificial Sequence
  Description of Artificial Sequence: Synthetic oligonucleotide
  Antisense Strand to SEQ ID NO: 412207
auauuugcccgggaaagau

SEQ ID NO: 412209 - RNA, 19 nt, Artificial Sequence
  Description of Artificial Sequence: Synthetic oligonucleotide
  Sense Strand Starting at position 1191 of SEQ ID NO: 318532
ggaagagacuugcuuucug

SEQ ID NO: 412210 - RNA, 19 nt, Artificial Sequence
  Description of Artificial Sequence: Synthetic oligonucleotide
  Antisense Strand to SEQ ID NO: 412209
cagaaagcaagucucuucc

SEQ ID NO: 412211 - RNA, 19 nt, Artificial Sequence
  Description of Artificial Sequence: Synthetic oligonucleotide
  Sense Strand Starting at position 1191 of SEQ ID NO: 318706
caucuauucguguaacacg

SEQ ID NO: 412212 - RNA, 19 nt, Artificial Sequence
  Description of Artificial Sequence: Synthetic oligonucleotide
  Antisense Strand to SEQ ID NO: 412211
cguguuacacgaauagaug

SEQ ID NO: 412213 - RNA, 19 nt, Artificial Sequence
  Description of Artificial Sequence: Synthetic oligonucleotide
  Sense Strand Starting at position 1191 of SEQ ID NO: 318716
uguaacacgcaguauaaua

SEQ ID NO: 412214 - RNA, 19 nt, Artificial Sequence
  Description of Artificial Sequence: Synthetic oligonucleotide
  Antisense Strand to SEQ ID NO: 412213
uauuauacugcguguuaca

SEQ ID NO: 412215 - RNA, 19 nt, Artificial Sequence
  Description of Artificial Sequence: Synthetic oligonucleotide
  Sense Strand Starting at position 1191 of SEQ ID NO: 318723
cgcaguauaauagaguuau

SEQ ID NO: 412216 - RNA, 19 nt, Artificial Sequence
  Description of Artificial Sequence: Synthetic oligonucleotide
  Antisense Strand to SEQ ID NO: 412215
auaacucuauuauacugcg

SEQ ID NO: 412217 - RNA, 19 nt, Artificial Sequence
  Description of Artificial Sequence: Synthetic oligonucleotide
  Sense Strand Starting at position 1191 of SEQ ID NO: 318727
guauaauagaguuaugacg

SEQ ID NO: 412218 - RNA, 19 nt, Artificial Sequence
  Description of Artificial Sequence: Synthetic oligonucleotide
  Antisense Strand to SEQ ID NO: 412217
cgucauaacucuauuauac

SEQ ID NO: 412219 - RNA, 19 nt, Artificial Sequence
  Description of Artificial Sequence: Synthetic oligonucleotide
  Sense Strand Starting at position 1191 of SEQ ID NO: 318763
ccugacaauguauagguua

SEQ ID NO: 412220 - RNA, 19 nt, Artificial Sequence
  Description of Artificial Sequence: Synthetic oligonucleotide
  Antisense Strand to SEQ ID NO: 412219
uaaccuauacauugucagg

SEQ ID NO: 412221 - RNA, 19 nt, Artificial Sequence
  Description of Artificial Sequence: Synthetic oligonucleotide
  Sense Strand Starting at position 1191 of SEQ ID NO: 318777
gguuauuuauuggaagguu

SEQ ID NO: 412222 - RNA, 19 nt, Artificial Sequence
  Description of Artificial Sequence: Synthetic oligonucleotide
  Antisense Strand to SEQ ID NO: 412221
aaccuuccaauaaauaacc

SEQ ID NO: 412223 - RNA, 19 nt, Artificial Sequence
  Description of Artificial Sequence: Synthetic oligonucleotide
  Sense Strand Starting at position 1191 of SEQ ID NO: 318785
auuggaagguucucuagau

SEQ ID NO: 412224 - RNA, 19 nt, Artificial Sequence
  Description of Artificial Sequence: Synthetic oligonucleotide
  Antisense Strand to SEQ ID NO: 412223
aucuagagaaccuuccaau

SEQ ID NO: 412225 - RNA, 19 nt, Artificial Sequence
  Description of Artificial Sequence: Synthetic oligonucleotide
  Sense Strand Starting at position 1191 of SEQ ID NO: 318786
uuggaagguucucuagauu

SEQ ID NO: 412226 - RNA, 19 nt, Artificial Sequence
  Description of Artificial Sequence: Synthetic oligonucleotide
  Antisense Strand to SEQ ID NO: 412225
aaucuagagaaccuuccaa

SEQ ID NO: 412227 - RNA, 19 nt, Artificial Sequence
  Description of Artificial Sequence: Synthetic oligonucleotide
  Sense Strand Starting at position 1191 of SEQ ID NO: 318809
gccagugacauguauguuu

SEQ ID NO: 412228 - RNA, 19 nt, Artificial Sequence
  Description of Artificial Sequence: Synthetic oligonucleotide
  Antisense Strand to SEQ ID NO: 412227
aaacauacaugucacuggc

SEQ ID NO: 412229 - RNA, 19 nt, Artificial Sequence
  Description of Artificial Sequence: Synthetic oligonucleotide
  Sense Strand Starting at position 1191 of SEQ ID NO: 318974
uuugguccucggugagaag

SEQ ID NO: 412230 - RNA, 19 nt, Artificial Sequence
  Description of Artificial Sequence: Synthetic oligonucleotide
  Antisense Strand to SEQ ID NO: 412229
cuucucaccgaggaccaaa

SEQ ID NO: 412231 - RNA, 19 nt, Artificial Sequence
  Description of Artificial Sequence: Synthetic oligonucleotide
  Sense Strand Starting at position 1191 of SEQ ID NO: 319017
auaagucugcaccauagga

SEQ ID NO: 412232 - RNA, 19 nt, Artificial Sequence
  Description of Artificial Sequence: Synthetic oligonucleotide
  Antisense Strand to SEQ ID NO: 412231
uccuauggugcagacuuau

SEQ ID NO: 412233 - RNA, 19 nt, Artificial Sequence
  Description of Artificial Sequence: Synthetic oligonucleotide
  Sense Strand Starting at position 1191 of SEQ ID NO: 319041
aggcuucuguaguuggaga

SEQ ID NO: 412234 - RNA, 19 nt, Artificial Sequence
  Description of Artificial Sequence: Synthetic oligonucleotide
  Antisense Strand to SEQ ID NO: 412233
ucuccaacuacagaagccu

SEQ ID NO: 412235 - RNA, 19 nt, Artificial Sequence
  Description of Artificial Sequence: Synthetic oligonucleotide
  Sense Strand Starting at position 1191 of SEQ ID NO: 319065
ucuccuuugcagggaaguu

SEQ ID NO: 412236 - RNA, 19 nt, Artificial Sequence
  Description of Artificial Sequence: Synthetic oligonucleotide
  Antisense Strand to SEQ ID NO: 412235
aacuucccugcaaaggaga

SEQ ID NO: 412237 - RNA, 19 nt, Artificial Sequence
  Description of Artificial Sequence: Synthetic oligonucleotide
  Sense Strand Starting at position 1191 of SEQ ID NO: 319075
agggaaguuccugggcuuu

SEQ ID NO: 412238 - RNA, 19 nt, Artificial Sequence
  Description of Artificial Sequence: Synthetic oligonucleotide
  Antisense Strand to SEQ ID NO: 412237
aaagcccaggaacuucccu

SEQ ID NO: 412239 - RNA, 19 nt, Artificial Sequence
  Description of Artificial Sequence: Synthetic oligonucleotide
  Sense Strand Starting at position 1192 of SEQ ID NO: 315588
uguuaagaacaugguuagu

SEQ ID NO: 412240 - RNA, 19 nt, Artificial Sequence
  Description of Artificial Sequence: Synthetic oligonucleotide
  Antisense Strand to SEQ ID NO: 412239
acuaaccauguucuuaaca

SEQ ID NO: 412241 - RNA, 19 nt, Artificial Sequence
  Description of Artificial Sequence: Synthetic oligonucleotide
  Sense Strand Starting at position 1192 of SEQ ID NO: 315590
uuaagaacaugguuaguua

SEQ ID NO: 412242 - RNA, 19 nt, Artificial Sequence
  Description of Artificial Sequence: Synthetic oligonucleotide
  Antisense Strand to SEQ ID NO: 412241
uaacuaaccauguucuuaa

SEQ ID NO: 412243 - RNA, 19 nt, Artificial Sequence
  Description of Artificial Sequence: Synthetic oligonucleotide
  Sense Strand Starting at position 1192 of SEQ ID NO: 315593
agaacaugguuaguuaaga

SEQ ID NO: 412244 - RNA, 19 nt, Artificial Sequence
  Description of Artificial Sequence: Synthetic oligonucleotide
  Antisense Strand to SEQ ID NO: 412243
ucuuaacuaaccauguucu

SEQ ID NO: 412245 - RNA, 19 nt, Artificial Sequence
  Description of Artificial Sequence: Synthetic oligonucleotide
  Sense Strand Starting at position 1192 of SEQ ID NO: 315594
gaacaugguuaguuaagaa

SEQ ID NO: 412246 - RNA, 19 nt, Artificial Sequence
  Description of Artificial Sequence: Synthetic oligonucleotide
  Antisense Strand to SEQ ID NO: 412245
uucuuaacuaaccauguuc

SEQ ID NO: 412247 - RNA, 19 nt, Artificial Sequence
  Description of Artificial Sequence: Synthetic oligonucleotide
  Sense Strand Starting at position 1192 of SEQ ID NO: 315999
ccaccaucauagguugaau

SEQ ID NO: 412248 - RNA, 19 nt, Artificial Sequence
  Description of Artificial Sequence: Synthetic oligonucleotide
  Antisense Strand to SEQ ID NO: 412247
auucaaccuaugauggugg

SEQ ID NO: 412249 - RNA, 19 nt, Artificial Sequence
  Description of Artificial Sequence: Synthetic oligonucleotide
  Sense Strand Starting at position 1192 of SEQ ID NO: 316001
accaucauagguugaauga

SEQ ID NO: 412250 - RNA, 19 nt, Artificial Sequence
  Description of Artificial Sequence: Synthetic oligonucleotide
  Antisense Strand to SEQ ID NO: 412249
ucauucaaccuaugauggu

SEQ ID NO: 412251 - RNA, 19 nt, Artificial Sequence
  Description of Artificial Sequence: Synthetic oligonucleotide
  Sense Strand Starting at position 1192 of SEQ ID NO: 316010
gguugaaugacuuauggca

SEQ ID NO: 412252 - RNA, 19 nt, Artificial Sequence
  Description of Artificial Sequence: Synthetic oligonucleotide
  Antisense Strand to SEQ ID NO: 412251
ugccauaagucauucaacc

SEQ ID NO: 412253 - RNA, 19 nt, Artificial Sequence
  Description of Artificial Sequence: Synthetic oligonucleotide
  Sense Strand Starting at position 1192 of SEQ ID NO: 316074
accucuuuccuagagucgu

SEQ ID NO: 412254 - RNA, 19 nt, Artificial Sequence
  Description of Artificial Sequence: Synthetic oligonucleotide
  Antisense Strand to SEQ ID NO: 412253
acgacucuaggaaagaggu

SEQ ID NO: 412255 - RNA, 19 nt, Artificial Sequence
  Description of Artificial Sequence: Synthetic oligonucleotide
  Sense Strand Starting at position 1192 of SEQ ID NO: 316080
uuccuagagucguuaggag

SEQ ID NO: 412256 - RNA, 19 nt, Artificial Sequence
  Description of Artificial Sequence: Synthetic oligonucleotide
  Antisense Strand to SEQ ID NO: 412255
cuccuaacgacucuaggaa

SEQ ID NO: 412257 - RNA, 19 nt, Artificial Sequence
  Description of Artificial Sequence: Synthetic oligonucleotide
  Sense Strand Starting at position 1192 of SEQ ID NO: 316088
gucguuaggagacaaguga

SEQ ID NO: 412258 - RNA, 19 nt, Artificial Sequence
  Description of Artificial Sequence: Synthetic oligonucleotide
  Antisense Strand to SEQ ID NO: 412257
ucacuugucuccuaacgac

SEQ ID NO: 412259 - RNA, 19 nt, Artificial Sequence
  Description of Artificial Sequence: Synthetic oligonucleotide
  Sense Strand Starting at position 1192 of SEQ ID NO: 316092
uuaggagacaagugagagu

SEQ ID NO: 412260 - RNA, 19 nt, Artificial Sequence
  Description of Artificial Sequence: Synthetic oligonucleotide
  Antisense Strand to SEQ ID NO: 412259
acucucacuugucuccuaa

SEQ ID NO: 412261 - RNA, 19 nt, Artificial Sequence
  Description of Artificial Sequence: Synthetic oligonucleotide
  Sense Strand Starting at position 1192 of SEQ ID NO: 316105
gagaguaguaccugguuag

SEQ ID NO: 412262 - RNA, 19 nt, Artificial Sequence
  Description of Artificial Sequence: Synthetic oligonucleotide
  Antisense Strand to SEQ ID NO: 412261
cuaaccagguacuacucuc

SEQ ID NO: 412263 - RNA, 19 nt, Artificial Sequence
  Description of Artificial Sequence: Synthetic oligonucleotide
  Sense Strand Starting at position 1192 of SEQ ID NO: 316117
ugguuaggccaauaauuaa

SEQ ID NO: 412264 - RNA, 19 nt, Artificial Sequence
  Description of Artificial Sequence: Synthetic oligonucleotide
  Antisense Strand to SEQ ID NO: 412263
uuaauuauuggccuaacca

SEQ ID NO: 412265 - RNA, 19 nt, Artificial Sequence
  Description of Artificial Sequence: Synthetic oligonucleotide
  Sense Strand Starting at position 1192 of SEQ ID NO: 316289
gagaccaaucugcguaaga

SEQ ID NO: 412266 - RNA, 19 nt, Artificial Sequence
  Description of Artificial Sequence: Synthetic oligonucleotide
  Antisense Strand to SEQ ID NO: 412265
ucuuacgcagauuggucuc

SEQ ID NO: 412267 - RNA, 19 nt, Artificial Sequence
  Description of Artificial Sequence: Synthetic oligonucleotide
  Sense Strand Starting at position 1192 of SEQ ID NO: 316290
agaccaaucugcguaagau

SEQ ID NO: 412268 - RNA, 19 nt, Artificial Sequence
  Description of Artificial Sequence: Synthetic oligonucleotide
  Antisense Strand to SEQ ID NO: 412267
aucuuacgcagauuggucu

SEQ ID NO: 412269 - RNA, 19 nt, Artificial Sequence
  Description of Artificial Sequence: Synthetic oligonucleotide
  Sense Strand Starting at position 1192 of SEQ ID NO: 316291
gaccaaucugcguaagaug

SEQ ID NO: 412270 - RNA, 19 nt, Artificial Sequence
  Description of Artificial Sequence: Synthetic oligonucleotide
  Antisense Strand to SEQ ID NO: 412269
caucuuacgcagauugguc

SEQ ID NO: 412271 - RNA, 19 nt, Artificial Sequence
  Description of Artificial Sequence: Synthetic oligonucleotide
  Sense Strand Starting at position 1192 of SEQ ID NO: 316581
uuggaaguaauccgaaaua

SEQ ID NO: 412272 - RNA, 19 nt, Artificial Sequence
  Description of Artificial Sequence: Synthetic oligonucleotide
  Antisense Strand to SEQ ID NO: 412271
uauuucggauuacuuccaa

SEQ ID NO: 412273 - RNA, 19 nt, Artificial Sequence
  Description of Artificial Sequence: Synthetic oligonucleotide
  Sense Strand Starting at position 1192 of SEQ ID NO: 316770
gauacacgacaguguuuaa

SEQ ID NO: 412274 - RNA, 19 nt, Artificial Sequence
  Description of Artificial Sequence: Synthetic oligonucleotide
  Antisense Strand to SEQ ID NO: 412273
uuaaacacugucguguauc

SEQ ID NO: 412275 - RNA, 19 nt, Artificial Sequence
  Description of Artificial Sequence: Synthetic oligonucleotide
  Sense Strand Starting at position 1192 of SEQ ID NO: 316780
aguguuuaacacuacguca

SEQ ID NO: 412276 - RNA, 19 nt, Artificial Sequence
  Description of Artificial Sequence: Synthetic oligonucleotide
  Antisense Strand to SEQ ID NO: 412275
ugacguaguguuaaacacu

SEQ ID NO: 412277 - RNA, 19 nt, Artificial Sequence
  Description of Artificial Sequence: Synthetic oligonucleotide
  Sense Strand Starting at position 1192 of SEQ ID NO: 317372
guguccuaccaugguauuu

SEQ ID NO: 412278 - RNA, 19 nt, Artificial Sequence
  Description of Artificial Sequence: Synthetic oligonucleotide
  Antisense Strand to SEQ ID NO: 412277
aaauaccaugguaggacac

SEQ ID NO: 412279 - RNA, 19 nt, Artificial Sequence
  Description of Artificial Sequence: Synthetic oligonucleotide
  Sense Strand Starting at position 1192 of SEQ ID NO: 317444
ugcgucaucucauuuggaa

SEQ ID NO: 412280 - RNA, 19 nt, Artificial Sequence
  Description of Artificial Sequence: Synthetic oligonucleotide
  Antisense Strand to SEQ ID NO: 412279
uuccaaaugagaugacgca

SEQ ID NO: 412281 - RNA, 19 nt, Artificial Sequence
  Description of Artificial Sequence: Synthetic oligonucleotide
  Sense Strand Starting at position 1192 of SEQ ID NO: 317572
ugccacuaguuccugauuu

SEQ ID NO: 412282 - RNA, 19 nt, Artificial Sequence
  Description of Artificial Sequence: Synthetic oligonucleotide
  Antisense Strand to SEQ ID NO: 412281
aaaucaggaacuaguggca

SEQ ID NO: 412283 - RNA, 19 nt, Artificial Sequence
  Description of Artificial Sequence: Synthetic oligonucleotide
  Sense Strand Starting at position 1192 of SEQ ID NO: 317576
acuaguuccugauuucugu

SEQ ID NO: 412284 - RNA, 19 nt, Artificial Sequence
  Description of Artificial Sequence: Synthetic oligonucleotide
  Antisense Strand to SEQ ID NO: 412283
acagaaaucaggaacuagu

SEQ ID NO: 412285 - RNA, 19 nt, Artificial Sequence
  Description of Artificial Sequence: Synthetic oligonucleotide
  Sense Strand Starting at position 1192 of SEQ ID NO: 317579
aguuccugauuucuguauu

SEQ ID NO: 412286 - RNA, 19 nt, Artificial Sequence
  Description of Artificial Sequence: Synthetic oligonucleotide
  Antisense Strand to SEQ ID NO: 412285
aauacagaaaucaggaacu

SEQ ID NO: 412287 - RNA, 19 nt, Artificial Sequence
  Description of Artificial Sequence: Synthetic oligonucleotide
  Sense Strand Starting at position 1192 of SEQ ID NO: 317591
cuguauugccaucacuauu

SEQ ID NO: 412288 - RNA, 19 nt, Artificial Sequence
  Description of Artificial Sequence: Synthetic oligonucleotide
  Antisense Strand to SEQ ID NO: 412287
aauagugauggcaauacag

SEQ ID NO: 412289 - RNA, 19 nt, Artificial Sequence
  Description of Artificial Sequence: Synthetic oligonucleotide
  Sense Strand Starting at position 1192 of SEQ ID NO: 317764
gcccaaucagaugaacuuu

SEQ ID NO: 412290 - RNA, 19 nt, Artificial Sequence
  Description of Artificial Sequence: Synthetic oligonucleotide
  Antisense Strand to SEQ ID NO: 412289
aaaguucaucugauugggc

SEQ ID NO: 412291 - RNA, 19 nt, Artificial Sequence
  Description of Artificial Sequence: Synthetic oligonucleotide
  Sense Strand Starting at position 1192 of SEQ ID NO: 317994
agaagaguugcuuacccag

SEQ ID NO: 412292 - RNA, 19 nt, Artificial Sequence
  Description of Artificial Sequence: Synthetic oligonucleotide
  Antisense Strand to SEQ ID NO: 412291
cuggguaagcaacucuucu

SEQ ID NO: 412293 - RNA, 19 nt, Artificial Sequence
  Description of Artificial Sequence: Synthetic oligonucleotide
  Sense Strand Starting at position 1192 of SEQ ID NO: 317996
aagaguugcuuacccagga

SEQ ID NO: 412294 - RNA, 19 nt, Artificial Sequence
  Description of Artificial Sequence: Synthetic oligonucleotide
  Antisense Strand to SEQ ID NO: 412293
uccuggguaagcaacucuu

SEQ ID NO: 412295 - RNA, 19 nt, Artificial Sequence
  Description of Artificial Sequence: Synthetic oligonucleotide
  Sense Strand Starting at position 1192 of SEQ ID NO: 318204
agggauuuaugcuaaacac

SEQ ID NO: 412296 - RNA, 19 nt, Artificial Sequence
  Description of Artificial Sequence: Synthetic oligonucleotide
  Antisense Strand to SEQ ID NO: 412295
guguuuagcauaaaucccu

SEQ ID NO: 412297 - RNA, 19 nt, Artificial Sequence
  Description of Artificial Sequence: Synthetic oligonucleotide
  Sense Strand Starting at position 1192 of SEQ ID NO: 318263
cacgaauauuuaugaaagg

SEQ ID NO: 412298 - RNA, 19 nt, Artificial Sequence
  Description of Artificial Sequence: Synthetic oligonucleotide
  Antisense Strand to SEQ ID NO: 412297
ccuuucauaaauauucgug

SEQ ID NO: 412299 - RNA, 19 nt, Artificial Sequence
  Description of Artificial Sequence: Synthetic oligonucleotide
  Sense Strand Starting at position 1192 of SEQ ID NO: 318264
acgaauauuuaugaaagga

SEQ ID NO: 412300 - RNA, 19 nt, Artificial Sequence
  Description of Artificial Sequence: Synthetic oligonucleotide
  Antisense Strand to SEQ ID NO: 412299
uccuuucauaaauauucgu

SEQ ID NO: 412301 - RNA, 19 nt, Artificial Sequence
  Description of Artificial Sequence: Synthetic oligonucleotide
  Sense Strand Starting at position 1192 of SEQ ID NO: 318345
uggccuuagcaugauccaa

SEQ ID NO: 412302 - RNA, 19 nt, Artificial Sequence
  Description of Artificial Sequence: Synthetic oligonucleotide
  Antisense Strand to SEQ ID NO: 412301
uuggaucaugcuaaggcca

SEQ ID NO: 412303 - RNA, 19 nt, Artificial Sequence
  Description of Artificial Sequence: Synthetic oligonucleotide
  Sense Strand Starting at position 1192 of SEQ ID NO: 318353
gcaugauccaaggguagag

SEQ ID NO: 412304 - RNA, 19 nt, Artificial Sequence
  Description of Artificial Sequence: Synthetic oligonucleotide
  Antisense Strand to SEQ ID NO: 412303
cucuacccuuggaucaugc

SEQ ID NO: 412305 - RNA, 19 nt, Artificial Sequence
  Description of Artificial Sequence: Synthetic oligonucleotide
  Sense Strand Starting at position 1192 of SEQ ID NO: 318461
gauggugggugaucucuua

SEQ ID NO: 412306 - RNA, 19 nt, Artificial Sequence
  Description of Artificial Sequence: Synthetic oligonucleotide
  Antisense Strand to SEQ ID NO: 412305
uaagagaucacccaccauc

SEQ ID NO: 412307 - RNA, 19 nt, Artificial Sequence
  Description of Artificial Sequence: Synthetic oligonucleotide
  Sense Strand Starting at position 1192 of SEQ ID NO: 318468
ggugaucucuuaucaggaa

SEQ ID NO: 412308 - RNA, 19 nt, Artificial Sequence
  Description of Artificial Sequence: Synthetic oligonucleotide
  Antisense Strand to SEQ ID NO: 412307
uuccugauaagagaucacc

SEQ ID NO: 412309 - RNA, 19 nt, Artificial Sequence
  Description of Artificial Sequence: Synthetic oligonucleotide
  Sense Strand Starting at position 1192 of SEQ ID NO: 318499
gguuguucuauugaaacug

SEQ ID NO: 412310 - RNA, 19 nt, Artificial Sequence
  Description of Artificial Sequence: Synthetic oligonucleotide
  Antisense Strand to SEQ ID NO: 412309
caguuucaauagaacaacc

SEQ ID NO: 412311 - RNA, 19 nt, Artificial Sequence
  Description of Artificial Sequence: Synthetic oligonucleotide
  Sense Strand Starting at position 1192 of SEQ ID NO: 318621
ggguuauaaagaggugugu

SEQ ID NO: 412312 - RNA, 19 nt, Artificial Sequence
  Description of Artificial Sequence: Synthetic oligonucleotide
  Antisense Strand to SEQ ID NO: 412311
acacaccucuuuauaaccc

SEQ ID NO: 412313 - RNA, 19 nt, Artificial Sequence
  Description of Artificial Sequence: Synthetic oligonucleotide
  Sense Strand Starting at position 1192 of SEQ ID NO: 318924
gcucgcuugagcucagagu

SEQ ID NO: 412314 - RNA, 19 nt, Artificial Sequence
  Description of Artificial Sequence: Synthetic oligonucleotide
  Antisense Strand to SEQ ID NO: 412313
acucugagcucaagcgagc

SEQ ID NO: 412315 - RNA, 19 nt, Artificial Sequence
  Description of Artificial Sequence: Synthetic oligonucleotide
  Sense Strand Starting at position 1192 of SEQ ID NO: 318932
gagcucagaguuugagacu

SEQ ID NO: 412316 - RNA, 19 nt, Artificial Sequence
  Description of Artificial Sequence: Synthetic oligonucleotide
  Antisense Strand to SEQ ID NO: 412315
agucucaaacucugagcuc

SEQ ID NO: 412317 - RNA, 19 nt, Artificial Sequence
  Description of Artificial Sequence: Synthetic oligonucleotide
  Sense Strand Starting at position 1192 of SEQ ID NO: 319167
auguaaagggcuugaauag

SEQ ID NO: 412318 - RNA, 19 nt, Artificial Sequence
  Description of Artificial Sequence: Synthetic oligonucleotide
  Antisense Strand to SEQ ID NO: 412317
cuauucaagcccuuuacau

SEQ ID NO: 412319 - RNA, 19 nt, Artificial Sequence
  Description of Artificial Sequence: Synthetic oligonucleotide
  Sense Strand Starting at position 1193 of SEQ ID NO: 315303
gcuagagggagagguuuau

SEQ ID NO: 412320 - RNA, 19 nt, Artificial Sequence
  Description of Artificial Sequence: Synthetic oligonucleotide
  Antisense Strand to SEQ ID NO: 412319
auaaaccucucccucuagc

SEQ ID NO: 412321 - RNA, 19 nt, Artificial Sequence
  Description of Artificial Sequence: Synthetic oligonucleotide
  Sense Strand Starting at position 1193 of SEQ ID NO: 315309
gggagagguuuauccacca

SEQ ID NO: 412322 - RNA, 19 nt, Artificial Sequence
  Description of Artificial Sequence: Synthetic oligonucleotide
  Antisense Strand to SEQ ID NO: 412321
ugguggauaaaccucuccc

SEQ ID NO: 412323 - RNA, 19 nt, Artificial Sequence
  Description of Artificial Sequence: Synthetic oligonucleotide
  Sense Strand Starting at position 1193 of SEQ ID NO: 315338
gcaggaauaccugagcuuu

SEQ ID NO: 412324 - RNA, 19 nt, Artificial Sequence
  Description of Artificial Sequence: Synthetic oligonucleotide
  Antisense Strand to SEQ ID NO: 412323
aaagcucagguauuccugc

SEQ ID NO: 412325 - RNA, 19 nt, Artificial Sequence
  Description of Artificial Sequence: Synthetic oligonucleotide
  Sense Strand Starting at position 1193 of SEQ ID NO: 315340
aggaauaccugagcuuucu

SEQ ID NO: 412326 - RNA, 19 nt, Artificial Sequence
  Description of Artificial Sequence: Synthetic oligonucleotide
  Antisense Strand to SEQ ID NO: 412325
agaaagcucagguauuccu

SEQ ID NO: 412327 - RNA, 19 nt, Artificial Sequence
  Description of Artificial Sequence: Synthetic oligonucleotide
  Sense Strand Starting at position 1193 of SEQ ID NO: 315666
cugucaucauuccuaggga

SEQ ID NO: 412328 - RNA, 19 nt, Artificial Sequence
  Description of Artificial Sequence: Synthetic oligonucleotide
  Antisense Strand to SEQ ID NO: 412327
ucccuaggaaugaugacag

SEQ ID NO: 412329 - RNA, 19 nt, Artificial Sequence
  Description of Artificial Sequence: Synthetic oligonucleotide
  Sense Strand Starting at position 1193 of SEQ ID NO: 315688
ggacgaagcacaugugagu

SEQ ID NO: 412330 - RNA, 19 nt, Artificial Sequence
  Description of Artificial Sequence: Synthetic oligonucleotide
  Antisense Strand to SEQ ID NO: 412329
acucacaugugcuucgucc

SEQ ID NO: 412331 - RNA, 19 nt, Artificial Sequence
  Description of Artificial Sequence: Synthetic oligonucleotide
  Sense Strand Starting at position 1193 of SEQ ID NO: 315779
gaaugauaguuucuccagu

SEQ ID NO: 412332 - RNA, 19 nt, Artificial Sequence
  Description of Artificial Sequence: Synthetic oligonucleotide
  Antisense Strand to SEQ ID NO: 412331
acuggagaaacuaucauuc

SEQ ID NO: 412333 - RNA, 19 nt, Artificial Sequence
  Description of Artificial Sequence: Synthetic oligonucleotide
  Sense Strand Starting at position 1193 of SEQ ID NO: 315812
cuccauagaggcuguaauu

SEQ ID NO: 412334 - RNA, 19 nt, Artificial Sequence
  Description of Artificial Sequence: Synthetic oligonucleotide
  Antisense Strand to SEQ ID NO: 412333
aauuacagccucuauggag

SEQ ID NO: 412335 - RNA, 19 nt, Artificial Sequence
  Description of Artificial Sequence: Synthetic oligonucleotide
  Sense Strand Starting at position 1193 of SEQ ID NO: 315823
cuguaauuauuuccuguuu

SEQ ID NO: 412336 - RNA, 19 nt, Artificial Sequence
  Description of Artificial Sequence: Synthetic oligonucleotide
  Antisense Strand to SEQ ID NO: 412335
aaacaggaaauaauuacag

SEQ ID NO: 412337 - RNA, 19 nt, Artificial Sequence
  Description of Artificial Sequence: Synthetic oligonucleotide
  Sense Strand Starting at position 1193 of SEQ ID NO: 316118
gccuguauuguauaauuag

SEQ ID NO: 412338 - RNA, 19 nt, Artificial Sequence
  Description of Artificial Sequence: Synthetic oligonucleotide
  Antisense Strand to SEQ ID NO: 412337
cuaauuauacaauacaggc

SEQ ID NO: 412339 - RNA, 19 nt, Artificial Sequence
  Description of Artificial Sequence: Synthetic oligonucleotide
  Sense Strand Starting at position 1193 of SEQ ID NO: 316141
uuacuaaaugccuggcuua

SEQ ID NO: 412340 - RNA, 19 nt, Artificial Sequence
  Description of Artificial Sequence: Synthetic oligonucleotide
  Antisense Strand to SEQ ID NO: 412339
uaagccaggcauuuaguaa

SEQ ID NO: 412341 - RNA, 19 nt, Artificial Sequence
  Description of Artificial Sequence: Synthetic oligonucleotide
  Sense Strand Starting at position 1193 of SEQ ID NO: 316144
cuaaaugccuggcuuauga

SEQ ID NO: 412342 - RNA, 19 nt, Artificial Sequence
  Description of Artificial Sequence: Synthetic oligonucleotide
  Antisense Strand to SEQ ID NO: 412341
ucauaagccaggcauuuag

SEQ ID NO: 412343 - RNA, 19 nt, Artificial Sequence
  Description of Artificial Sequence: Synthetic oligonucleotide
  Sense Strand Starting at position 1193 of SEQ ID NO: 316152
cuggcuuaugacuacacaa

SEQ ID NO: 412344 - RNA, 19 nt, Artificial Sequence
  Description of Artificial Sequence: Synthetic oligonucleotide
  Antisense Strand to SEQ ID NO: 412343
uuguguagucauaagccag

SEQ ID NO: 412345 - RNA, 19 nt, Artificial Sequence
  Description of Artificial Sequence: Synthetic oligonucleotide
  Sense Strand Starting at position 1193 of SEQ ID NO: 316154
ggcuuaugacuacacaacu

SEQ ID NO: 412346 - RNA, 19 nt, Artificial Sequence
  Description of Artificial Sequence: Synthetic oligonucleotide
  Antisense Strand to SEQ ID NO: 412345
aguuguguagucauaagcc

SEQ ID NO: 412347 - RNA, 19 nt, Artificial Sequence
  Description of Artificial Sequence: Synthetic oligonucleotide
  Sense Strand Starting at position 1193 of SEQ ID NO: 316335
aguucuaugcuggaugcau

SEQ ID NO: 412348 - RNA, 19 nt, Artificial Sequence
  Description of Artificial Sequence: Synthetic oligonucleotide
  Antisense Strand to SEQ ID NO: 412347
augcauccagcauagaacu

SEQ ID NO: 412349 - RNA, 19 nt, Artificial Sequence
  Description of Artificial Sequence: Synthetic oligonucleotide
  Sense Strand Starting at position 1193 of SEQ ID NO: 316337
uucuaugcuggaugcauua

SEQ ID NO: 412350 - RNA, 19 nt, Artificial Sequence
  Description of Artificial Sequence: Synthetic oligonucleotide
  Antisense Strand to SEQ ID NO: 412349
uaaugcauccagcauagaa

SEQ ID NO: 412351 - RNA, 19 nt, Artificial Sequence
  Description of Artificial Sequence: Synthetic oligonucleotide
  Sense Strand Starting at position 1193 of SEQ ID NO: 316382
gguugauugucauuugcag

SEQ ID NO: 412352 - RNA, 19 nt, Artificial Sequence
  Description of Artificial Sequence: Synthetic oligonucleotide
  Antisense Strand to SEQ ID NO: 412351
cugcaaaugacaaucaacc

SEQ ID NO: 412353 - RNA, 19 nt, Artificial Sequence
  Description of Artificial Sequence: Synthetic oligonucleotide
  Sense Strand Starting at position 1193 of SEQ ID NO: 316389
ugucauuugcagugccuga

SEQ ID NO: 412354 - RNA, 19 nt, Artificial Sequence
  Description of Artificial Sequence: Synthetic oligonucleotide
  Antisense Strand to SEQ ID NO: 412353
ucaggcacugcaaaugaca

SEQ ID NO: 412355 - RNA, 19 nt, Artificial Sequence
  Description of Artificial Sequence: Synthetic oligonucleotide
  Sense Strand Starting at position 1193 of SEQ ID NO: 316660
ucagucucuagugguagaa

SEQ ID NO: 412356 - RNA, 19 nt, Artificial Sequence
  Description of Artificial Sequence: Synthetic oligonucleotide
  Antisense Strand to SEQ ID NO: 412355
uucuaccacuagagacuga

SEQ ID NO: 412357 - RNA, 19 nt, Artificial Sequence
  Description of Artificial Sequence: Synthetic oligonucleotide
  Sense Strand Starting at position 1193 of SEQ ID NO: 316734
ccuggaaaguuccugaaag

SEQ ID NO: 412358 - RNA, 19 nt, Artificial Sequence
  Description of Artificial Sequence: Synthetic oligonucleotide
  Antisense Strand to SEQ ID NO: 412357
cuuucaggaacuuuccagg

SEQ ID NO: 412359 - RNA, 19 nt, Artificial Sequence
  Description of Artificial Sequence: Synthetic oligonucleotide
  Sense Strand Starting at position 1193 of SEQ ID NO: 316926
cucagagauuguccuuucu

SEQ ID NO: 412360 - RNA, 19 nt, Artificial Sequence
  Description of Artificial Sequence: Synthetic oligonucleotide
  Antisense Strand to SEQ ID NO: 412359
agaaaggacaaucucugag

SEQ ID NO: 412361 - RNA, 19 nt, Artificial Sequence
  Description of Artificial Sequence: Synthetic oligonucleotide
  Sense Strand Starting at position 1193 of SEQ ID NO: 317011
uggagucuucccuacacaa

SEQ ID NO: 412362 - RNA, 19 nt, Artificial Sequence
  Description of Artificial Sequence: Synthetic oligonucleotide
  Antisense Strand to SEQ ID NO: 412361
uuguguagggaagacucca

SEQ ID NO: 412363 - RNA, 19 nt, Artificial Sequence
  Description of Artificial Sequence: Synthetic oligonucleotide
  Sense Strand Starting at position 1193 of SEQ ID NO: 317403
uacacucgucuuuggauua

SEQ ID NO: 412364 - RNA, 19 nt, Artificial Sequence
  Description of Artificial Sequence: Synthetic oligonucleotide
  Antisense Strand to SEQ ID NO: 412363
uaauccaaagacgagugua

SEQ ID NO: 412365 - RNA, 19 nt, Artificial Sequence
  Description of Artificial Sequence: Synthetic oligonucleotide
  Sense Strand Starting at position 1193 of SEQ ID NO: 317500
cuguguagugcccaagauu

SEQ ID NO: 412366 - RNA, 19 nt, Artificial Sequence
  Description of Artificial Sequence: Synthetic oligonucleotide
  Antisense Strand to SEQ ID NO: 412365
aaucuugggcacuacacag

SEQ ID NO: 412367 - RNA, 19 nt, Artificial Sequence
  Description of Artificial Sequence: Synthetic oligonucleotide
  Sense Strand Starting at position 1193 of SEQ ID NO: 317579
aagaaugugcaaugauaag

SEQ ID NO: 412368 - RNA, 19 nt, Artificial Sequence
  Description of Artificial Sequence: Synthetic oligonucleotide
  Antisense Strand to SEQ ID NO: 412367
cuuaucauugcacauucuu

SEQ ID NO: 412369 - RNA, 19 nt, Artificial Sequence
  Description of Artificial Sequence: Synthetic oligonucleotide
  Sense Strand Starting at position 1193 of SEQ ID NO: 317595
aagagaagcuuaucauugu

SEQ ID NO: 412370 - RNA, 19 nt, Artificial Sequence
  Description of Artificial Sequence: Synthetic oligonucleotide
  Antisense Strand to SEQ ID NO: 412369
acaaugauaagcuucucuu

SEQ ID NO: 412371 - RNA, 19 nt, Artificial Sequence
  Description of Artificial Sequence: Synthetic oligonucleotide
  Sense Strand Starting at position 1193 of SEQ ID NO: 317629
agggacugcacuugaaauc

SEQ ID NO: 412372 - RNA, 19 nt, Artificial Sequence
  Description of Artificial Sequence: Synthetic oligonucleotide
  Antisense Strand to SEQ ID NO: 412371
gauuucaagugcagucccu

SEQ ID NO: 412373 - RNA, 19 nt, Artificial Sequence
  Description of Artificial Sequence: Synthetic oligonucleotide
  Sense Strand Starting at position 1193 of SEQ ID NO: 317722
gcaacuuucccuugaagga

SEQ ID NO: 412374 - RNA, 19 nt, Artificial Sequence
  Description of Artificial Sequence: Synthetic oligonucleotide
  Antisense Strand to SEQ ID NO: 412373
uccuucaagggaaaguugc

SEQ ID NO: 412375 - RNA, 19 nt, Artificial Sequence
  Description of Artificial Sequence: Synthetic oligonucleotide
  Sense Strand Starting at position 1193 of SEQ ID NO: 317774
guuuaucuggacugagacu

SEQ ID NO: 412376 - RNA, 19 nt, Artificial Sequence
  Description of Artificial Sequence: Synthetic oligonucleotide
  Antisense Strand to SEQ ID NO: 412375
agucucaguccagauaaac

SEQ ID NO: 412377 - RNA, 19 nt, Artificial Sequence
  Description of Artificial Sequence: Synthetic oligonucleotide
  Sense Strand Starting at position 1193 of SEQ ID NO: 317795
auugaauucuggcuugauu

SEQ ID NO: 412378 - RNA, 19 nt, Artificial Sequence
  Description of Artificial Sequence: Synthetic oligonucleotide
  Antisense Strand to SEQ ID NO: 412377
aaucaagccagaauucaau

SEQ ID NO: 412379 - RNA, 19 nt, Artificial Sequence
  Description of Artificial Sequence: Synthetic oligonucleotide
  Sense Strand Starting at position 1193 of SEQ ID NO: 317806
gcuugauuucucuggugca

SEQ ID NO: 412380 - RNA, 19 nt, Artificial Sequence
  Description of Artificial Sequence: Synthetic oligonucleotide
  Antisense Strand to SEQ ID NO: 412379
ugcaccagagaaaucaagc

SEQ ID NO: 412381 - RNA, 19 nt, Artificial Sequence
  Description of Artificial Sequence: Synthetic oligonucleotide
  Sense Strand Starting at position 1193 of SEQ ID NO: 317872
ccucaugagagcuggaaau

SEQ ID NO: 412382 - RNA, 19 nt, Artificial Sequence
  Description of Artificial Sequence: Synthetic oligonucleotide
  Antisense Strand to SEQ ID NO: 412381
auuuccagcucucaugagg

SEQ ID NO: 412383 - RNA, 19 nt, Artificial Sequence
  Description of Artificial Sequence: Synthetic oligonucleotide
  Sense Strand Starting at position 1193 of SEQ ID NO: 318565
auaccuaauguguguccaa

SEQ ID NO: 412384 - RNA, 19 nt, Artificial Sequence
  Description of Artificial Sequence: Synthetic oligonucleotide
  Antisense Strand to SEQ ID NO: 412383
uuggacacacauuagguau

SEQ ID NO: 412385 - RNA, 19 nt, Artificial Sequence
  Description of Artificial Sequence: Synthetic oligonucleotide
  Sense Strand Starting at position 1193 of SEQ ID NO: 318607
gagggauguuucccaaacu

SEQ ID NO: 412386 - RNA, 19 nt, Artificial Sequence
  Description of Artificial Sequence: Synthetic oligonucleotide
  Antisense Strand to SEQ ID NO: 412385
aguuugggaaacaucccuc

SEQ ID NO: 412387 - RNA, 19 nt, Artificial Sequence
  Description of Artificial Sequence: Synthetic oligonucleotide
  Sense Strand Starting at position 1193 of SEQ ID NO: 318798
gagaaacuuagaggugguu

SEQ ID NO: 412388 - RNA, 19 nt, Artificial Sequence
  Description of Artificial Sequence: Synthetic oligonucleotide
  Antisense Strand to SEQ ID NO: 412387
aaccaccucuaaguuucuc

SEQ ID NO: 412389 - RNA, 19 nt, Artificial Sequence
  Description of Artificial Sequence: Synthetic oligonucleotide
  Sense Strand Starting at position 1193 of SEQ ID NO: 318868
agaggaauauggucaaguc

SEQ ID NO: 412390 - RNA, 19 nt, Artificial Sequence
  Description of Artificial Sequence: Synthetic oligonucleotide
  Antisense Strand to SEQ ID NO: 412389
gacuugaccauauuccucu

SEQ ID NO: 412391 - RNA, 19 nt, Artificial Sequence
  Description of Artificial Sequence: Synthetic oligonucleotide
  Sense Strand Starting at position 1193 of SEQ ID NO: 318893
gaucaauggugcucuagag

SEQ ID NO: 412392 - RNA, 19 nt, Artificial Sequence
  Description of Artificial Sequence: Synthetic oligonucleotide
  Antisense Strand to SEQ ID NO: 412391
cucuagagcaccauugauc

SEQ ID NO: 412393 - RNA, 19 nt, Artificial Sequence
  Description of Artificial Sequence: Synthetic oligonucleotide
  Sense Strand Starting at position 1193 of SEQ ID NO: 318931
gguccaaagucauccuguu

SEQ ID NO: 412394 - RNA, 19 nt, Artificial Sequence
  Description of Artificial Sequence: Synthetic oligonucleotide
  Antisense Strand to SEQ ID NO: 412393
aacaggaugacuuuggacc

SEQ ID NO: 412395 - RNA, 19 nt, Artificial Sequence
  Description of Artificial Sequence: Synthetic oligonucleotide
  Sense Strand Starting at position 1193 of SEQ ID NO: 319061
uggugaaguguucagcaca

SEQ ID NO: 412396 - RNA, 19 nt, Artificial Sequence
  Description of Artificial Sequence: Synthetic oligonucleotide
  Antisense Strand to SEQ ID NO: 412395
ugugcugaacacuucacca

SEQ ID NO: 412397 - RNA, 19 nt, Artificial Sequence
  Description of Artificial Sequence: Synthetic oligonucleotide
  Sense Strand Starting at position 1193 of SEQ ID NO: 319187
gugcuuugucaagaguaaa

SEQ ID NO: 412398 - RNA, 19 nt, Artificial Sequence
  Description of Artificial Sequence: Synthetic oligonucleotide
  Antisense Strand to SEQ ID NO: 412397
uuuacucuugacaaagcac

SEQ ID NO: 412399 - RNA, 19 nt, Artificial Sequence
  Description of Artificial Sequence: Synthetic oligonucleotide
  Sense Strand Starting at position 1194 of SEQ ID NO: 315575
uagggcaauguaugaaaga

SEQ ID NO: 412400 - RNA, 19 nt, Artificial Sequence
  Description of Artificial Sequence: Synthetic oligonucleotide
  Antisense Strand to SEQ ID NO: 412399
ucuuucauacauugcccua

SEQ ID NO: 412401 - RNA, 19 nt, Artificial Sequence
  Description of Artificial Sequence: Synthetic oligonucleotide
  Sense Strand Starting at position 1194 of SEQ ID NO: 315649
augaaauacucagauagga

SEQ ID NO: 412402 - RNA, 19 nt, Artificial Sequence
  Description of Artificial Sequence: Synthetic oligonucleotide
  Antisense Strand to SEQ ID NO: 412401
uccuaucugaguauuucau

SEQ ID NO: 412403 - RNA, 19 nt, Artificial Sequence
  Description of Artificial Sequence: Synthetic oligonucleotide
  Sense Strand Starting at position 1194 of SEQ ID NO: 315657
cucagauaggacuguacua

SEQ ID NO: 412404 - RNA, 19 nt, Artificial Sequence
  Description of Artificial Sequence: Synthetic oligonucleotide
  Antisense Strand to SEQ ID NO: 412403
uaguacaguccuaucugag

SEQ ID NO: 412405 - RNA, 19 nt, Artificial Sequence
  Description of Artificial Sequence: Synthetic oligonucleotide
  Sense Strand Starting at position 1194 of SEQ ID NO: 315662
auaggacuguacuaauaaa

SEQ ID NO: 412406 - RNA, 19 nt, Artificial Sequence
  Description of Artificial Sequence: Synthetic oligonucleotide
  Antisense Strand to SEQ ID NO: 412405
uuuauuaguacaguccuau

SEQ ID NO: 412407 - RNA, 19 nt, Artificial Sequence
  Description of Artificial Sequence: Synthetic oligonucleotide
  Sense Strand Starting at position 1194 of SEQ ID NO: 315743
ggacuugagcccgaguuca

SEQ ID NO: 412408 - RNA, 19 nt, Artificial Sequence
  Description of Artificial Sequence: Synthetic oligonucleotide
  Antisense Strand to SEQ ID NO: 412407
ugaacucgggcucaagucc

SEQ ID NO: 412409 - RNA, 19 nt, Artificial Sequence
  Description of Artificial Sequence: Synthetic oligonucleotide
  Sense Strand Starting at position 1194 of SEQ ID NO: 315780
agcaaagauccuggcucua

SEQ ID NO: 412410 - RNA, 19 nt, Artificial Sequence
  Description of Artificial Sequence: Synthetic oligonucleotide
  Antisense Strand to SEQ ID NO: 412409
uagagccaggaucuuugcu

SEQ ID NO: 412411 - RNA, 19 nt, Artificial Sequence
  Description of Artificial Sequence: Synthetic oligonucleotide
  Sense Strand Starting at position 1194 of SEQ ID NO: 315946
ugaagcuuccaagauguca

SEQ ID NO: 412412 - RNA, 19 nt, Artificial Sequence
  Description of Artificial Sequence: Synthetic oligonucleotide
  Antisense Strand to SEQ ID NO: 412411
ugacaucuuggaagcuuca

SEQ ID NO: 412413 - RNA, 19 nt, Artificial Sequence
  Description of Artificial Sequence: Synthetic oligonucleotide
  Sense Strand Starting at position 1194 of SEQ ID NO: 315965
uccugagacugcucuaaca

SEQ ID NO: 412414 - RNA, 19 nt, Artificial Sequence
  Description of Artificial Sequence: Synthetic oligonucleotide
  Antisense Strand to SEQ ID NO: 412413
uguuagagcagucucagga

SEQ ID NO: 412415 - RNA, 19 nt, Artificial Sequence
  Description of Artificial Sequence: Synthetic oligonucleotide
  Sense Strand Starting at position 1194 of SEQ ID NO: 315981
acaaauagcugucuuaagu

SEQ ID NO: 412416 - RNA, 19 nt, Artificial Sequence
  Description of Artificial Sequence: Synthetic oligonucleotide
  Antisense Strand to SEQ ID NO: 412415
acuuaagacagcuauuugu

SEQ ID NO: 412417 - RNA, 19 nt, Artificial Sequence
  Description of Artificial Sequence: Synthetic oligonucleotide
  Sense Strand Starting at position 1194 of SEQ ID NO: 316457
ugguaagaacccugucuau

SEQ ID NO: 412418 - RNA, 19 nt, Artificial Sequence
  Description of Artificial Sequence: Synthetic oligonucleotide
  Antisense Strand to SEQ ID NO: 412417
auagacaggguucuuacca

SEQ ID NO: 412419 - RNA, 19 nt, Artificial Sequence
  Description of Artificial Sequence: Synthetic oligonucleotide
  Sense Strand Starting at position 1194 of SEQ ID NO: 316674
aagauacaagcuuggguua

SEQ ID NO: 412420 - RNA, 19 nt, Artificial Sequence
  Description of Artificial Sequence: Synthetic oligonucleotide
  Antisense Strand to SEQ ID NO: 412419
uaacccaagcuuguaucuu

SEQ ID NO: 412421 - RNA, 19 nt, Artificial Sequence
  Description of Artificial Sequence: Synthetic oligonucleotide
  Sense Strand Starting at position 1194 of SEQ ID NO: 316679
acaagcuuggguuacaaau

SEQ ID NO: 412422 - RNA, 19 nt, Artificial Sequence
  Description of Artificial Sequence: Synthetic oligonucleotide
  Antisense Strand to SEQ ID NO: 412421
auuuguaacccaagcuugu

SEQ ID NO: 412423 - RNA, 19 nt, Artificial Sequence
  Description of Artificial Sequence: Synthetic oligonucleotide
  Sense Strand Starting at position 1194 of SEQ ID NO: 317336
guuggcugccaguagugaa

SEQ ID NO: 412424 - RNA, 19 nt, Artificial Sequence
  Description of Artificial Sequence: Synthetic oligonucleotide
  Antisense Strand to SEQ ID NO: 412423
uucacuacuggcagccaac

SEQ ID NO: 412425 - RNA, 19 nt, Artificial Sequence
  Description of Artificial Sequence: Synthetic oligonucleotide
  Sense Strand Starting at position 1194 of SEQ ID NO: 317413
cggugucugcggcuacuua

SEQ ID NO: 412426 - RNA, 19 nt, Artificial Sequence
  Description of Artificial Sequence: Synthetic oligonucleotide
  Antisense Strand to SEQ ID NO: 412425
uaaguagccgcagacaccg

SEQ ID NO: 412427 - RNA, 19 nt, Artificial Sequence
  Description of Artificial Sequence: Synthetic oligonucleotide
  Sense Strand Starting at position 1194 of SEQ ID NO: 317435
ucagcuugagguggucaua

SEQ ID NO: 412428 - RNA, 19 nt, Artificial Sequence
  Description of Artificial Sequence: Synthetic oligonucleotide
  Antisense Strand to SEQ ID NO: 412427
uaugaccaccucaagcuga

SEQ ID NO: 412429 - RNA, 19 nt, Artificial Sequence
  Description of Artificial Sequence: Synthetic oligonucleotide
  Sense Strand Starting at position 1194 of SEQ ID NO: 317438
gcuugagguggucauaggu

SEQ ID NO: 412430 - RNA, 19 nt, Artificial Sequence
  Description of Artificial Sequence: Synthetic oligonucleotide
  Antisense Strand to SEQ ID NO: 412429
accuaugaccaccucaagc

SEQ ID NO: 412431 - RNA, 19 nt, Artificial Sequence
  Description of Artificial Sequence: Synthetic oligonucleotide
  Sense Strand Starting at position 1194 of SEQ ID NO: 317445
guggucauagguugaagua

SEQ ID NO: 412432 - RNA, 19 nt, Artificial Sequence
  Description of Artificial Sequence: Synthetic oligonucleotide
  Antisense Strand to SEQ ID NO: 412431
uacuucaaccuaugaccac

SEQ ID NO: 412433 - RNA, 19 nt, Artificial Sequence
  Description of Artificial Sequence: Synthetic oligonucleotide
  Sense Strand Starting at position 1194 of SEQ ID NO: 317446
uggucauagguugaaguaa

SEQ ID NO: 412434 - RNA, 19 nt, Artificial Sequence
  Description of Artificial Sequence: Synthetic oligonucleotide
  Antisense Strand to SEQ ID NO: 412433
uuacuucaaccuaugacca

SEQ ID NO: 412435 - RNA, 19 nt, Artificial Sequence
  Description of Artificial Sequence: Synthetic oligonucleotide
  Sense Strand Starting at position 1194 of SEQ ID NO: 317483
ccaggaauuagccgggcau

SEQ ID NO: 412436 - RNA, 19 nt, Artificial Sequence
  Description of Artificial Sequence: Synthetic oligonucleotide
  Antisense Strand to SEQ ID NO: 412435
augcccggcuaauuccugg

SEQ ID NO: 412437 - RNA, 19 nt, Artificial Sequence
  Description of Artificial Sequence: Synthetic oligonucleotide
  Sense Strand Starting at position 1194 of SEQ ID NO: 317847
gguguuggugccaguuaca

SEQ ID NO: 412438 - RNA, 19 nt, Artificial Sequence
  Description of Artificial Sequence: Synthetic oligonucleotide
  Antisense Strand to SEQ ID NO: 412437
uguaacuggcaccaacacc

SEQ ID NO: 412439 - RNA, 19 nt, Artificial Sequence
  Description of Artificial Sequence: Synthetic oligonucleotide
  Sense Strand Starting at position 1194 of SEQ ID NO: 317850
guuggugccaguuacacua

SEQ ID NO: 412440 - RNA, 19 nt, Artificial Sequence
  Description of Artificial Sequence: Synthetic oligonucleotide
  Antisense Strand to SEQ ID NO: 412439
uaguguaacuggcaccaac

SEQ ID NO: 412441 - RNA, 19 nt, Artificial Sequence
  Description of Artificial Sequence: Synthetic oligonucleotide
  Sense Strand Starting at position 1194 of SEQ ID NO: 317863
acacuaagauuucgagaac

SEQ ID NO: 412442 - RNA, 19 nt, Artificial Sequence
  Description of Artificial Sequence: Synthetic oligonucleotide
  Antisense Strand to SEQ ID NO: 412441
guucucgaaaucuuagugu

SEQ ID NO: 412443 - RNA, 19 nt, Artificial Sequence
  Description of Artificial Sequence: Synthetic oligonucleotide
  Sense Strand Starting at position 1194 of SEQ ID NO: 317981
uggaauuucuaucaagugu

SEQ ID NO: 412444 - RNA, 19 nt, Artificial Sequence
  Description of Artificial Sequence: Synthetic oligonucleotide
  Antisense Strand to SEQ ID NO: 412443
acacuugauagaaauucca

SEQ ID NO: 412445 - RNA, 19 nt, Artificial Sequence
  Description of Artificial Sequence: Synthetic oligonucleotide
  Sense Strand Starting at position 1194 of SEQ ID NO: 317989
cuaucaaguguuuguauaa

SEQ ID NO: 412446 - RNA, 19 nt, Artificial Sequence
  Description of Artificial Sequence: Synthetic oligonucleotide
  Antisense Strand to SEQ ID NO: 412445
uuauacaaacacuugauag

SEQ ID NO: 412447 - RNA, 19 nt, Artificial Sequence
  Description of Artificial Sequence: Synthetic oligonucleotide
  Sense Strand Starting at position 1194 of SEQ ID NO: 318031
uaacauaugcuucgaagua

SEQ ID NO: 412448 - RNA, 19 nt, Artificial Sequence
  Description of Artificial Sequence: Synthetic oligonucleotide
  Antisense Strand to SEQ ID NO: 412447
uacuucgaagcauauguua

SEQ ID NO: 412449 - RNA, 19 nt, Artificial Sequence
  Description of Artificial Sequence: Synthetic oligonucleotide
  Sense Strand Starting at position 1194 of SEQ ID NO: 318082
uucucaauauucguguaau

SEQ ID NO: 412450 - RNA, 19 nt, Artificial Sequence
  Description of Artificial Sequence: Synthetic oligonucleotide
  Antisense Strand to SEQ ID NO: 412449
auuacacgaauauugagaa

SEQ ID NO: 412451 - RNA, 19 nt, Artificial Sequence
  Description of Artificial Sequence: Synthetic oligonucleotide
  Sense Strand Starting at position 1194 of SEQ ID NO: 318165
auuccuuucuaguugucaa

SEQ ID NO: 412452 - RNA, 19 nt, Artificial Sequence
  Description of Artificial Sequence: Synthetic oligonucleotide
  Antisense Strand to SEQ ID NO: 412451
uugacaacuagaaaggaau

SEQ ID NO: 412453 - RNA, 19 nt, Artificial Sequence
  Description of Artificial Sequence: Synthetic oligonucleotide
  Sense Strand Starting at position 1194 of SEQ ID NO: 318168
ccuuucuaguugucaauca

SEQ ID NO: 412454 - RNA, 19 nt, Artificial Sequence
  Description of Artificial Sequence: Synthetic oligonucleotide
  Antisense Strand to SEQ ID NO: 412453
ugauugacaacuagaaagg

SEQ ID NO: 412455 - RNA, 19 nt, Artificial Sequence
  Description of Artificial Sequence: Synthetic oligonucleotide
  Sense Strand Starting at position 1194 of SEQ ID NO: 318250
cacauaagucccugagaag

SEQ ID NO: 412456 - RNA, 19 nt, Artificial Sequence
  Description of Artificial Sequence: Synthetic oligonucleotide
  Antisense Strand to SEQ ID NO: 412455
cuucucagggacuuaugug

SEQ ID NO: 412457 - RNA, 19 nt, Artificial Sequence
  Description of Artificial Sequence: Synthetic oligonucleotide
  Sense Strand Starting at position 1194 of SEQ ID NO: 318264
agaagugacugacuagagu

SEQ ID NO: 412458 - RNA, 19 nt, Artificial Sequence
  Description of Artificial Sequence: Synthetic oligonucleotide
  Antisense Strand to SEQ ID NO: 412457
acucuagucagucacuucu

SEQ ID NO: 412459 - RNA, 19 nt, Artificial Sequence
  Description of Artificial Sequence: Synthetic oligonucleotide
  Sense Strand Starting at position 1194 of SEQ ID NO: 318279
gagugaccagcucaauuag

SEQ ID NO: 412460 - RNA, 19 nt, Artificial Sequence
  Description of Artificial Sequence: Synthetic oligonucleotide
  Antisense Strand to SEQ ID NO: 412459
cuaauugagcuggucacuc

SEQ ID NO: 412461 - RNA, 19 nt, Artificial Sequence
  Description of Artificial Sequence: Synthetic oligonucleotide
  Sense Strand Starting at position 1194 of SEQ ID NO: 318312
agacuacucugggauauga

SEQ ID NO: 412462 - RNA, 19 nt, Artificial Sequence
  Description of Artificial Sequence: Synthetic oligonucleotide
  Antisense Strand to SEQ ID NO: 412461
ucauaucccagaguagucu

SEQ ID NO: 412463 - RNA, 19 nt, Artificial Sequence
  Description of Artificial Sequence: Synthetic oligonucleotide
  Sense Strand Starting at position 1194 of SEQ ID NO: 318505
gacuucuggcucuggauua

SEQ ID NO: 412464 - RNA, 19 nt, Artificial Sequence
  Description of Artificial Sequence: Synthetic oligonucleotide
  Antisense Strand to SEQ ID NO: 412463
uaauccagagccagaaguc

SEQ ID NO: 412465 - RNA, 19 nt, Artificial Sequence
  Description of Artificial Sequence: Synthetic oligonucleotide
  Sense Strand Starting at position 1194 of SEQ ID NO: 318517
uggauuacugcuuauccca

SEQ ID NO: 412466 - RNA, 19 nt, Artificial Sequence
  Description of Artificial Sequence: Synthetic oligonucleotide
  Antisense Strand to SEQ ID NO: 412465
ugggauaagcaguaaucca

SEQ ID NO: 412467 - RNA, 19 nt, Artificial Sequence
  Description of Artificial Sequence: Synthetic oligonucleotide
  Sense Strand Starting at position 1194 of SEQ ID NO: 318531
ucccauguuagguagaagu

SEQ ID NO: 412468 - RNA, 19 nt, Artificial Sequence
  Description of Artificial Sequence: Synthetic oligonucleotide
  Antisense Strand to SEQ ID NO: 412467
acuucuaccuaacauggga

SEQ ID NO: 412469 - RNA, 19 nt, Artificial Sequence
  Description of Artificial Sequence: Synthetic oligonucleotide
  Sense Strand Starting at position 1194 of SEQ ID NO: 318596
uguacagucuguuucuaac

SEQ ID NO: 412470 - RNA, 19 nt, Artificial Sequence
  Description of Artificial Sequence: Synthetic oligonucleotide
  Antisense Strand to SEQ ID NO: 412469
guuagaaacagacuguaca

SEQ ID NO: 412471 - RNA, 19 nt, Artificial Sequence
  Description of Artificial Sequence: Synthetic oligonucleotide
  Sense Strand Starting at position 1194 of SEQ ID NO: 318602
gucuguuucuaaccuauau

SEQ ID NO: 412472 - RNA, 19 nt, Artificial Sequence
  Description of Artificial Sequence: Synthetic oligonucleotide
  Antisense Strand to SEQ ID NO: 412471
auauagguuagaaacagac

SEQ ID NO: 412473 - RNA, 19 nt, Artificial Sequence
  Description of Artificial Sequence: Synthetic oligonucleotide
  Sense Strand Starting at position 1194 of SEQ ID NO: 318606
guuucuaaccuauauguag

SEQ ID NO: 412474 - RNA, 19 nt, Artificial Sequence
  Description of Artificial Sequence: Synthetic oligonucleotide
  Antisense Strand to SEQ ID NO: 412473
cuacauauagguuagaaac

SEQ ID NO: 412475 - RNA, 19 nt, Artificial Sequence
  Description of Artificial Sequence: Synthetic oligonucleotide
  Sense Strand Starting at position 1194 of SEQ ID NO: 318711
ggaagauacugacacaauc

SEQ ID NO: 412476 - RNA, 19 nt, Artificial Sequence
  Description of Artificial Sequence: Synthetic oligonucleotide
  Antisense Strand to SEQ ID NO: 412475
gauugugucaguaucuucc

SEQ ID NO: 412477 - RNA, 19 nt, Artificial Sequence
  Description of Artificial Sequence: Synthetic oligonucleotide
  Sense Strand Starting at position 1194 of SEQ ID NO: 318810
acuuguuucucauuugggu

SEQ ID NO: 412478 - RNA, 19 nt, Artificial Sequence
  Description of Artificial Sequence: Synthetic oligonucleotide
  Antisense Strand to SEQ ID NO: 412477
acccaaaugagaaacaagu

SEQ ID NO: 412479 - RNA, 19 nt, Artificial Sequence
  Description of Artificial Sequence: Synthetic oligonucleotide
  Sense Strand Starting at position 1195 of SEQ ID NO: 315268
ccuuuaucuguuugauuuc

SEQ ID NO: 412480 - RNA, 19 nt, Artificial Sequence
  Description of Artificial Sequence: Synthetic oligonucleotide
  Antisense Strand to SEQ ID NO: 412479
gaaaucaaacagauaaagg

SEQ ID NO: 412481 - RNA, 19 nt, Artificial Sequence
  Description of Artificial Sequence: Synthetic oligonucleotide
  Sense Strand Starting at position 1195 of SEQ ID NO: 315619
ucuggagagcucuaguucu

SEQ ID NO: 412482 - RNA, 19 nt, Artificial Sequence
  Description of Artificial Sequence: Synthetic oligonucleotide
  Antisense Strand to SEQ ID NO: 412481
agaacuagagcucuccaga

SEQ ID NO: 412483 - RNA, 19 nt, Artificial Sequence
  Description of Artificial Sequence: Synthetic oligonucleotide
  Sense Strand Starting at position 1195 of SEQ ID NO: 315708
gcagucggugugaaguuua

SEQ ID NO: 412484 - RNA, 19 nt, Artificial Sequence
  Description of Artificial Sequence: Synthetic oligonucleotide
  Antisense Strand to SEQ ID NO: 412483
uaaacuucacaccgacugc

SEQ ID NO: 412485 - RNA, 19 nt, Artificial Sequence
  Description of Artificial Sequence: Synthetic oligonucleotide
  Sense Strand Starting at position 1195 of SEQ ID NO: 315755
ccgccuacaguugauauua

SEQ ID NO: 412486 - RNA, 19 nt, Artificial Sequence
  Description of Artificial Sequence: Synthetic oligonucleotide
  Antisense Strand to SEQ ID NO: 412485
uaauaucaacuguaggcgg

SEQ ID NO: 412487 - RNA, 19 nt, Artificial Sequence
  Description of Artificial Sequence: Synthetic oligonucleotide
  Sense Strand Starting at position 1195 of SEQ ID NO: 315962
agugcacacguguaaagaa

SEQ ID NO: 412488 - RNA, 19 nt, Artificial Sequence
  Description of Artificial Sequence: Synthetic oligonucleotide
  Antisense Strand to SEQ ID NO: 412487
uucuuuacacgugugcacu

SEQ ID NO: 412489 - RNA, 19 nt, Artificial Sequence
  Description of Artificial Sequence: Synthetic oligonucleotide
  Sense Strand Starting at position 1195 of SEQ ID NO: 316003
cgcuaagacgguuagagau

SEQ ID NO: 412490 - RNA, 19 nt, Artificial Sequence
  Description of Artificial Sequence: Synthetic oligonucleotide
  Antisense Strand to SEQ ID NO: 412489
aucucuaaccgucuuagcg

SEQ ID NO: 412491 - RNA, 19 nt, Artificial Sequence
  Description of Artificial Sequence: Synthetic oligonucleotide
  Sense Strand Starting at position 1195 of SEQ ID NO: 316073
aaguuagcccuugaaggau

SEQ ID NO: 412492 - RNA, 19 nt, Artificial Sequence
  Description of Artificial Sequence: Synthetic oligonucleotide
  Antisense Strand to SEQ ID NO: 412491
auccuucaagggcuaacuu

SEQ ID NO: 412493 - RNA, 19 nt, Artificial Sequence
  Description of Artificial Sequence: Synthetic oligonucleotide
  Sense Strand Starting at position 1195 of SEQ ID NO: 316198
caguuauaggccuggacag

SEQ ID NO: 412494 - RNA, 19 nt, Artificial Sequence
  Description of Artificial Sequence: Synthetic oligonucleotide
  Antisense Strand to SEQ ID NO: 412493
cuguccaggccuauaacug

SEQ ID NO: 412495 - RNA, 19 nt, Artificial Sequence
  Description of Artificial Sequence: Synthetic oligonucleotide
  Sense Strand Starting at position 1195 of SEQ ID NO: 316199
aguuauaggccuggacaga

SEQ ID NO: 412496 - RNA, 19 nt, Artificial Sequence
  Description of Artificial Sequence: Synthetic oligonucleotide
  Antisense Strand to SEQ ID NO: 412495
ucuguccaggccuauaacu

SEQ ID NO: 412497 - RNA, 19 nt, Artificial Sequence
  Description of Artificial Sequence: Synthetic oligonucleotide
  Sense Strand Starting at position 1195 of SEQ ID NO: 316348
gagggaggucgcuauggaa

SEQ ID NO: 412498 - RNA, 19 nt, Artificial Sequence
  Description of Artificial Sequence: Synthetic oligonucleotide
  Antisense Strand to SEQ ID NO: 412497
uuccauagcgaccucccuc

SEQ ID NO: 412499 - RNA, 19 nt, Artificial Sequence
  Description of Artificial Sequence: Synthetic oligonucleotide
  Sense Strand Starting at position 1195 of SEQ ID NO: 316360
uauggaagucccugaugaa

SEQ ID NO: 412500 - RNA, 19 nt, Artificial Sequence
  Description of Artificial Sequence: Synthetic oligonucleotide
  Antisense Strand to SEQ ID NO: 412499
uucaucagggacuuccaua

SEQ ID NO: 412501 - RNA, 19 nt, Artificial Sequence
  Description of Artificial Sequence: Synthetic oligonucleotide
  Sense Strand Starting at position 1195 of SEQ ID NO: 316518
uacugcuggccagauacua

SEQ ID NO: 412502 - RNA, 19 nt, Artificial Sequence
  Description of Artificial Sequence: Synthetic oligonucleotide
  Antisense Strand to SEQ ID NO: 412501
uaguaucuggccagcagua

SEQ ID NO: 412503 - RNA, 19 nt, Artificial Sequence
  Description of Artificial Sequence: Synthetic oligonucleotide
  Sense Strand Starting at position 1195 of SEQ ID NO: 316918
ccugcauacucaguaagau

SEQ ID NO: 412504 - RNA, 19 nt, Artificial Sequence
  Description of Artificial Sequence: Synthetic oligonucleotide
  Antisense Strand to SEQ ID NO: 412503
aucuuacugaguaugcagg

SEQ ID NO: 412505 - RNA, 19 nt, Artificial Sequence
  Description of Artificial Sequence: Synthetic oligonucleotide
  Sense Strand Starting at position 1195 of SEQ ID NO: 316919
cugcauacucaguaagaug

SEQ ID NO: 412506 - RNA, 19 nt, Artificial Sequence
  Description of Artificial Sequence: Synthetic oligonucleotide
  Antisense Strand to SEQ ID NO: 412505
caucuuacugaguaugcag

SEQ ID NO: 412507 - RNA, 19 nt, Artificial Sequence
  Description of Artificial Sequence: Synthetic oligonucleotide
  Sense Strand Starting at position 1195 of SEQ ID NO: 317028
ggauggugucaagggcaga

SEQ ID NO: 412508 - RNA, 19 nt, Artificial Sequence
  Description of Artificial Sequence: Synthetic oligonucleotide
  Antisense Strand to SEQ ID NO: 412507
ucugcccuugacaccaucc

SEQ ID NO: 412509 - RNA, 19 nt, Artificial Sequence
  Description of Artificial Sequence: Synthetic oligonucleotide
  Sense Strand Starting at position 1195 of SEQ ID NO: 317029
gauggugucaagggcagaa

SEQ ID NO: 412510 - RNA, 19 nt, Artificial Sequence
  Description of Artificial Sequence: Synthetic oligonucleotide
  Antisense Strand to SEQ ID NO: 412509
uucugcccuugacaccauc

SEQ ID NO: 412511 - RNA, 19 nt, Artificial Sequence
  Description of Artificial Sequence: Synthetic oligonucleotide
  Sense Strand Starting at position 1195 of SEQ ID NO: 317414
cagccagugcuuuagaaac

SEQ ID NO: 412512 - RNA, 19 nt, Artificial Sequence
  Description of Artificial Sequence: Synthetic oligonucleotide
  Antisense Strand to SEQ ID NO: 412511
guuucuaaagcacuggcug

SEQ ID NO: 412513 - RNA, 19 nt, Artificial Sequence
  Description of Artificial Sequence: Synthetic oligonucleotide
  Sense Strand Starting at position 1195 of SEQ ID NO: 317450
gccucagacucuccagaua

SEQ ID NO: 412514 - RNA, 19 nt, Artificial Sequence
  Description of Artificial Sequence: Synthetic oligonucleotide
  Antisense Strand to SEQ ID NO: 412513
uaucuggagagucugaggc

SEQ ID NO: 412515 - RNA, 19 nt, Artificial Sequence
  Description of Artificial Sequence: Synthetic oligonucleotide
  Sense Strand Starting at position 1195 of SEQ ID NO: 317550
ggcccuagacuacauugau

SEQ ID NO: 412516 - RNA, 19 nt, Artificial Sequence
  Description of Artificial Sequence: Synthetic oligonucleotide
  Antisense Strand to SEQ ID NO: 412515
aucaauguagucuagggcc

SEQ ID NO: 412517 - RNA, 19 nt, Artificial Sequence
  Description of Artificial Sequence: Synthetic oligonucleotide
  Sense Strand Starting at position 1195 of SEQ ID NO: 317601
ugucauguucuagaaggug

SEQ ID NO: 412518 - RNA, 19 nt, Artificial Sequence
  Description of Artificial Sequence: Synthetic oligonucleotide
  Antisense Strand to SEQ ID NO: 412517
caccuucuagaacaugaca

SEQ ID NO: 412519 - RNA, 19 nt, Artificial Sequence
  Description of Artificial Sequence: Synthetic oligonucleotide
  Sense Strand Starting at position 1195 of SEQ ID NO: 317723
ucgagaucacccuagccau

SEQ ID NO: 412520 - RNA, 19 nt, Artificial Sequence
  Description of Artificial Sequence: Synthetic oligonucleotide
  Antisense Strand to SEQ ID NO: 412519
auggcuagggugaucucga

SEQ ID NO: 412521 - RNA, 19 nt, Artificial Sequence
  Description of Artificial Sequence: Synthetic oligonucleotide
  Sense Strand Starting at position 1195 of SEQ ID NO: 318043
cccaaaucuccaugggauu

SEQ ID NO: 412522 - RNA, 19 nt, Artificial Sequence
  Description of Artificial Sequence: Synthetic oligonucleotide
  Antisense Strand to SEQ ID NO: 412521
aaucccauggagauuuggg

SEQ ID NO: 412523 - RNA, 19 nt, Artificial Sequence
  Description of Artificial Sequence: Synthetic oligonucleotide
  Sense Strand Starting at position 1195 of SEQ ID NO: 318044
ccaaaucuccaugggauua

SEQ ID NO: 412524 - RNA, 19 nt, Artificial Sequence
  Description of Artificial Sequence: Synthetic oligonucleotide
  Antisense Strand to SEQ ID NO: 412523
uaaucccauggagauuugg

SEQ ID NO: 412525 - RNA, 19 nt, Artificial Sequence
  Description of Artificial Sequence: Synthetic oligonucleotide
  Sense Strand Starting at position 1195 of SEQ ID NO: 318057
ggauuauugcugugggaug

SEQ ID NO: 412526 - RNA, 19 nt, Artificial Sequence
  Description of Artificial Sequence: Synthetic oligonucleotide
  Antisense Strand to SEQ ID NO: 412525
caucccacagcaauaaucc

SEQ ID NO: 412527 - RNA, 19 nt, Artificial Sequence
  Description of Artificial Sequence: Synthetic oligonucleotide
  Sense Strand Starting at position 1195 of SEQ ID NO: 318185
agaguugaacuacgugauu

SEQ ID NO: 412528 - RNA, 19 nt, Artificial Sequence
  Description of Artificial Sequence: Synthetic oligonucleotide
  Antisense Strand to SEQ ID NO: 412527
aaucacguaguucaacucu

SEQ ID NO: 412529 - RNA, 19 nt, Artificial Sequence
  Description of Artificial Sequence: Synthetic oligonucleotide
  Sense Strand Starting at position 1195 of SEQ ID NO: 318307
cccauaggagucugacuuu

SEQ ID NO: 412530 - RNA, 19 nt, Artificial Sequence
  Description of Artificial Sequence: Synthetic oligonucleotide
  Antisense Strand to SEQ ID NO: 412529
aaagucagacuccuauggg

SEQ ID NO: 412531 - RNA, 19 nt, Artificial Sequence
  Description of Artificial Sequence: Synthetic oligonucleotide
  Sense Strand Starting at position 1195 of SEQ ID NO: 318410
gagagcugagucugacuga

SEQ ID NO: 412532 - RNA, 19 nt, Artificial Sequence
  Description of Artificial Sequence: Synthetic oligonucleotide
  Antisense Strand to SEQ ID NO: 412531
ucagucagacucagcucuc

SEQ ID NO: 412533 - RNA, 19 nt, Artificial Sequence
  Description of Artificial Sequence: Synthetic oligonucleotide
  Sense Strand Starting at position 1195 of SEQ ID NO: 318413
agcugagucugacugaaag

SEQ ID NO: 412534 - RNA, 19 nt, Artificial Sequence
  Description of Artificial Sequence: Synthetic oligonucleotide
  Antisense Strand to SEQ ID NO: 412533
cuuucagucagacucagcu

SEQ ID NO: 412535 - RNA, 19 nt, Artificial Sequence
  Description of Artificial Sequence: Synthetic oligonucleotide
  Sense Strand Starting at position 1195 of SEQ ID NO: 318430
agaugaaaugcccggguua

SEQ ID NO: 412536 - RNA, 19 nt, Artificial Sequence
  Description of Artificial Sequence: Synthetic oligonucleotide
  Antisense Strand to SEQ ID NO: 412535
uaacccgggcauuucaucu

SEQ ID NO: 412537 - RNA, 19 nt, Artificial Sequence
  Description of Artificial Sequence: Synthetic oligonucleotide
  Sense Strand Starting at position 1195 of SEQ ID NO: 318431
gaugaaaugcccggguuag

SEQ ID NO: 412538 - RNA, 19 nt, Artificial Sequence
  Description of Artificial Sequence: Synthetic oligonucleotide
  Antisense Strand to SEQ ID NO: 412537
cuaacccgggcauuucauc

SEQ ID NO: 412539 - RNA, 19 nt, Artificial Sequence
  Description of Artificial Sequence: Synthetic oligonucleotide
  Sense Strand Starting at position 1195 of SEQ ID NO: 318483
caagauagaggcugaugua

SEQ ID NO: 412540 - RNA, 19 nt, Artificial Sequence
  Description of Artificial Sequence: Synthetic oligonucleotide
  Antisense Strand to SEQ ID NO: 412539
uacaucagccucuaucuug

SEQ ID NO: 412541 - RNA, 19 nt, Artificial Sequence
  Description of Artificial Sequence: Synthetic oligonucleotide
  Sense Strand Starting at position 1195 of SEQ ID NO: 318496
gauguacuauuugaaggga

SEQ ID NO: 412542 - RNA, 19 nt, Artificial Sequence
  Description of Artificial Sequence: Synthetic oligonucleotide
  Antisense Strand to SEQ ID NO: 412541
ucccuucaaauaguacauc

SEQ ID NO: 412543 - RNA, 19 nt, Artificial Sequence
  Description of Artificial Sequence: Synthetic oligonucleotide
  Sense Strand Starting at position 1195 of SEQ ID NO: 318572
gugagauacagugacuugu

SEQ ID NO: 412544 - RNA, 19 nt, Artificial Sequence
  Description of Artificial Sequence: Synthetic oligonucleotide
  Antisense Strand to SEQ ID NO: 412543
acaagucacuguaucucac

SEQ ID NO: 412545 - RNA, 19 nt, Artificial Sequence
  Description of Artificial Sequence: Synthetic oligonucleotide
  Sense Strand Starting at position 1195 of SEQ ID NO: 318580
cagugacuuguagaaaguc

SEQ ID NO: 412546 - RNA, 19 nt, Artificial Sequence
  Description of Artificial Sequence: Synthetic oligonucleotide
  Antisense Strand to SEQ ID NO: 412545
gacuuucuacaagucacug

SEQ ID NO: 412547 - RNA, 19 nt, Artificial Sequence
  Description of Artificial Sequence: Synthetic oligonucleotide
  Sense Strand Starting at position 1195 of SEQ ID NO: 318696
cuugaaaucuugcccuuag

SEQ ID NO: 412548 - RNA, 19 nt, Artificial Sequence
  Description of Artificial Sequence: Synthetic oligonucleotide
  Antisense Strand to SEQ ID NO: 412547
cuaagggcaagauuucaag

SEQ ID NO: 412549 - RNA, 19 nt, Artificial Sequence
  Description of Artificial Sequence: Synthetic oligonucleotide
  Sense Strand Starting at position 1195 of SEQ ID NO: 318697
uugaaaucuugcccuuaga

SEQ ID NO: 412550 - RNA, 19 nt, Artificial Sequence
  Description of Artificial Sequence: Synthetic oligonucleotide
  Antisense Strand to SEQ ID NO: 412549
ucuaagggcaagauuucaa

SEQ ID NO: 412551 - RNA, 19 nt, Artificial Sequence
  Description of Artificial Sequence: Synthetic oligonucleotide
  Sense Strand Starting at position 1195 of SEQ ID NO: 318905
gguauuggugagcagugaa

SEQ ID NO: 412552 - RNA, 19 nt, Artificial Sequence
  Description of Artificial Sequence: Synthetic oligonucleotide
  Antisense Strand to SEQ ID NO: 412551
uucacugcucaccaauacc

SEQ ID NO: 412553 - RNA, 19 nt, Artificial Sequence
  Description of Artificial Sequence: Synthetic oligonucleotide
  Sense Strand Starting at position 1195 of SEQ ID NO: 318915
agcagugaagagugugaaa

SEQ ID NO: 412554 - RNA, 19 nt, Artificial Sequence
  Description of Artificial Sequence: Synthetic oligonucleotide
  Antisense Strand to SEQ ID NO: 412553
uuucacacucuucacugcu

SEQ ID NO: 412555 - RNA, 19 nt, Artificial Sequence
  Description of Artificial Sequence: Synthetic oligonucleotide
  Sense Strand Starting at position 1195 of SEQ ID NO: 318917
cagugaagagugugaaaga

SEQ ID NO: 412556 - RNA, 19 nt, Artificial Sequence
  Description of Artificial Sequence: Synthetic oligonucleotide
  Antisense Strand to SEQ ID NO: 412555
ucuuucacacucuucacug

SEQ ID NO: 412557 - RNA, 19 nt, Artificial Sequence
  Description of Artificial Sequence: Synthetic oligonucleotide
  Sense Strand Starting at position 1195 of SEQ ID NO: 319186
uuuaaagauguaggguaua

SEQ ID NO: 412558 - RNA, 19 nt, Artificial Sequence
  Description of Artificial Sequence: Synthetic oligonucleotide
  Antisense Strand to SEQ ID NO: 412557
uauacccuacaucuuuaaa

SEQ ID NO: 412559 - RNA, 19 nt, Artificial Sequence
  Description of Artificial Sequence: Synthetic oligonucleotide
  Sense Strand Starting at position 1196 of SEQ ID NO: 315537
gaaagagaucugugacgca

SEQ ID NO: 412560 - RNA, 19 nt, Artificial Sequence
  Description of Artificial Sequence: Synthetic oligonucleotide
  Antisense Strand to SEQ ID NO: 412559
ugcgucacagaucucuuuc

SEQ ID NO: 412561 - RNA, 19 nt, Artificial Sequence
  Description of Artificial Sequence: Synthetic oligonucleotide
  Sense Strand Starting at position 1196 of SEQ ID NO: 315582
auccuaggugcccaauaaa

SEQ ID NO: 412562 - RNA, 19 nt, Artificial Sequence
  Description of Artificial Sequence: Synthetic oligonucleotide
  Antisense Strand to SEQ ID NO: 412561
uuuauugggcaccuaggau

SEQ ID NO: 412563 - RNA, 19 nt, Artificial Sequence
  Description of Artificial Sequence: Synthetic oligonucleotide
  Sense Strand Starting at position 1196 of SEQ ID NO: 315649
uuggcugaauuaguuaaga

SEQ ID NO: 412564 - RNA, 19 nt, Artificial Sequence
  Description of Artificial Sequence: Synthetic oligonucleotide
  Antisense Strand to SEQ ID NO: 412563
ucuuaacuaauucagccaa

SEQ ID NO: 412565 - RNA, 19 nt, Artificial Sequence
  Description of Artificial Sequence: Synthetic oligonucleotide
  Sense Strand Starting at position 1196 of SEQ ID NO: 315770
ucauaaaucuauguguaag

SEQ ID NO: 412566 - RNA, 19 nt, Artificial Sequence
  Description of Artificial Sequence: Synthetic oligonucleotide
  Antisense Strand to SEQ ID NO: 412565
cuuacacauagauuuauga

SEQ ID NO: 412567 - RNA, 19 nt, Artificial Sequence
  Description of Artificial Sequence: Synthetic oligonucleotide
  Sense Strand Starting at position 1196 of SEQ ID NO: 315782
guguaagaaguccaucaaa

SEQ ID NO: 412568 - RNA, 19 nt, Artificial Sequence
  Description of Artificial Sequence: Synthetic oligonucleotide
  Antisense Strand to SEQ ID NO: 412567
uuugauggacuucuuacac

SEQ ID NO: 412569 - RNA, 19 nt, Artificial Sequence
  Description of Artificial Sequence: Synthetic oligonucleotide
  Sense Strand Starting at position 1196 of SEQ ID NO: 315822
gcaguuuauaacgaaguau

SEQ ID NO: 412570 - RNA, 19 nt, Artificial Sequence
  Description of Artificial Sequence: Synthetic oligonucleotide
  Antisense Strand to SEQ ID NO: 412569
auacuucguuauaaacugc

SEQ ID NO: 412571 - RNA, 19 nt, Artificial Sequence
  Description of Artificial Sequence: Synthetic oligonucleotide
  Sense Strand Starting at position 1196 of SEQ ID NO: 315880
aggagaguucacuguaagc

SEQ ID NO: 412572 - RNA, 19 nt, Artificial Sequence
  Description of Artificial Sequence: Synthetic oligonucleotide
  Antisense Strand to SEQ ID NO: 412571
gcuuacagugaacucuccu

SEQ ID NO: 412573 - RNA, 19 nt, Artificial Sequence
  Description of Artificial Sequence: Synthetic oligonucleotide
  Sense Strand Starting at position 1196 of SEQ ID NO: 315900
ggcauuguuagggaaagcu

SEQ ID NO: 412574 - RNA, 19 nt, Artificial Sequence
  Description of Artificial Sequence: Synthetic oligonucleotide
  Antisense Strand to SEQ ID NO: 412573
agcuuucccuaacaaugcc

SEQ ID NO: 412575 - RNA, 19 nt, Artificial Sequence
  Description of Artificial Sequence: Synthetic oligonucleotide
  Sense Strand Starting at position 1196 of SEQ ID NO: 315970
caagccaggcguuauuauu

SEQ ID NO: 412576 - RNA, 19 nt, Artificial Sequence
  Description of Artificial Sequence: Synthetic oligonucleotide
  Antisense Strand to SEQ ID NO: 412575
aauaauaacgccuggcuug

SEQ ID NO: 412577 - RNA, 19 nt, Artificial Sequence
  Description of Artificial Sequence: Synthetic oligonucleotide
  Sense Strand Starting at position 1196 of SEQ ID NO: 316014
gcacaauuggcacagauug

SEQ ID NO: 412578 - RNA, 19 nt, Artificial Sequence
  Description of Artificial Sequence: Synthetic oligonucleotide
  Antisense Strand to SEQ ID NO: 412577
caaucugugccaauugugc

SEQ ID NO: 412579 - RNA, 19 nt, Artificial Sequence
  Description of Artificial Sequence: Synthetic oligonucleotide
  Sense Strand Starting at position 1196 of SEQ ID NO: 316151
gugugucugcgcguacaca

SEQ ID NO: 412580 - RNA, 19 nt, Artificial Sequence
  Description of Artificial Sequence: Synthetic oligonucleotide
  Antisense Strand to SEQ ID NO: 412579
uguguacgcgcagacacac

SEQ ID NO: 412581 - RNA, 19 nt, Artificial Sequence
  Description of Artificial Sequence: Synthetic oligonucleotide
  Sense Strand Starting at position 1196 of SEQ ID NO: 316705
cccugcaucccagagacua

SEQ ID NO: 412582 - RNA, 19 nt, Artificial Sequence
  Description of Artificial Sequence: Synthetic oligonucleotide
  Antisense Strand to SEQ ID NO: 412581
uagucucugggaugcaggg

SEQ ID NO: 412583 - RNA, 19 nt, Artificial Sequence
  Description of Artificial Sequence: Synthetic oligonucleotide
  Sense Strand Starting at position 1196 of SEQ ID NO: 317884
gauggagggucacuuuguu

SEQ ID NO: 412584 - RNA, 19 nt, Artificial Sequence
  Description of Artificial Sequence: Synthetic oligonucleotide
  Antisense Strand to SEQ ID NO: 412583
aacaaagugacccuccauc

SEQ ID NO: 412585 - RNA, 19 nt, Artificial Sequence
  Description of Artificial Sequence: Synthetic oligonucleotide
  Sense Strand Starting at position 1196 of SEQ ID NO: 317890
gggucacuuuguuccgaga

SEQ ID NO: 412586 - RNA, 19 nt, Artificial Sequence
  Description of Artificial Sequence: Synthetic oligonucleotide
  Antisense Strand to SEQ ID NO: 412585
ucucggaacaaagugaccc

SEQ ID NO: 412587 - RNA, 19 nt, Artificial Sequence
  Description of Artificial Sequence: Synthetic oligonucleotide
  Sense Strand Starting at position 1196 of SEQ ID NO: 317964
ggcuuuguuuauuugccua

SEQ ID NO: 412588 - RNA, 19 nt, Artificial Sequence
  Description of Artificial Sequence: Synthetic oligonucleotide
  Antisense Strand to SEQ ID NO: 412587
uaggcaaauaaacaaagcc

SEQ ID NO: 412589 - RNA, 19 nt, Artificial Sequence
  Description of Artificial Sequence: Synthetic oligonucleotide
  Sense Strand Starting at position 1196 of SEQ ID NO: 318116
cgacuauuucgugggccuu

SEQ ID NO: 412590 - RNA, 19 nt, Artificial Sequence
  Description of Artificial Sequence: Synthetic oligonucleotide
  Antisense Strand to SEQ ID NO: 412589
aaggcccacgaaauagucg

SEQ ID NO: 412591 - RNA, 19 nt, Artificial Sequence
  Description of Artificial Sequence: Synthetic oligonucleotide
  Sense Strand Starting at position 1196 of SEQ ID NO: 318180
agcgcauuuacuuguguuu

SEQ ID NO: 412592 - RNA, 19 nt, Artificial Sequence
  Description of Artificial Sequence: Synthetic oligonucleotide
  Antisense Strand to SEQ ID NO: 412591
aaacacaaguaaaugcgcu

SEQ ID NO: 412593 - RNA, 19 nt, Artificial Sequence
  Description of Artificial Sequence: Synthetic oligonucleotide
  Sense Strand Starting at position 1196 of SEQ ID NO: 318236
ucagcaaaugucugucaga

SEQ ID NO: 412594 - RNA, 19 nt, Artificial Sequence
  Description of Artificial Sequence: Synthetic oligonucleotide
  Antisense Strand to SEQ ID NO: 412593
ucugacagacauuugcuga

SEQ ID NO: 412595 - RNA, 19 nt, Artificial Sequence
  Description of Artificial Sequence: Synthetic oligonucleotide
  Sense Strand Starting at position 1196 of SEQ ID NO: 318237
cagcaaaugucugucagag

SEQ ID NO: 412596 - RNA, 19 nt, Artificial Sequence
  Description of Artificial Sequence: Synthetic oligonucleotide
  Antisense Strand to SEQ ID NO: 412595
cucugacagacauuugcug

SEQ ID NO: 412597 - RNA, 19 nt, Artificial Sequence
  Description of Artificial Sequence: Synthetic oligonucleotide
  Sense Strand Starting at position 1196 of SEQ ID NO: 318245
gucugucagagcgucuauu

SEQ ID NO: 412598 - RNA, 19 nt, Artificial Sequence
  Description of Artificial Sequence: Synthetic oligonucleotide
  Antisense Strand to SEQ ID NO: 412597
aauagacgcucugacagac

SEQ ID NO: 412599 - RNA, 19 nt, Artificial Sequence
  Description of Artificial Sequence: Synthetic oligonucleotide
  Sense Strand Starting at position 1196 of SEQ ID NO: 318249
gucagagcgucuauuacgu

SEQ ID NO: 412600 - RNA, 19 nt, Artificial Sequence
  Description of Artificial Sequence: Synthetic oligonucleotide
  Antisense Strand to SEQ ID NO: 412599
acguaauagacgcucugac

SEQ ID NO: 412601 - RNA, 19 nt, Artificial Sequence
  Description of Artificial Sequence: Synthetic oligonucleotide
  Sense Strand Starting at position 1196 of SEQ ID NO: 318271
aggcauguagccugaacuu

SEQ ID NO: 412602 - RNA, 19 nt, Artificial Sequence
  Description of Artificial Sequence: Synthetic oligonucleotide
  Antisense Strand to SEQ ID NO: 412601
aaguucaggcuacaugccu

SEQ ID NO: 412603 - RNA, 19 nt, Artificial Sequence
  Description of Artificial Sequence: Synthetic oligonucleotide
  Sense Strand Starting at position 1196 of SEQ ID NO: 318407
uucaguagugagggaagaa

SEQ ID NO: 412604 - RNA, 19 nt, Artificial Sequence
  Description of Artificial Sequence: Synthetic oligonucleotide
  Antisense Strand to SEQ ID NO: 412603
uucuucccucacuacugaa

SEQ ID NO: 412605 - RNA, 19 nt, Artificial Sequence
  Description of Artificial Sequence: Synthetic oligonucleotide
  Sense Strand Starting at position 1196 of SEQ ID NO: 318594
auagauuaaggguguuauc

SEQ ID NO: 412606 - RNA, 19 nt, Artificial Sequence
  Description of Artificial Sequence: Synthetic oligonucleotide
  Antisense Strand to SEQ ID NO: 412605
gauaacacccuuaaucuau

SEQ ID NO: 412607 - RNA, 19 nt, Artificial Sequence
  Description of Artificial Sequence: Synthetic oligonucleotide
  Sense Strand Starting at position 1196 of SEQ ID NO: 318655
aaacuaaggugagaaugau

SEQ ID NO: 412608 - RNA, 19 nt, Artificial Sequence
  Description of Artificial Sequence: Synthetic oligonucleotide
  Antisense Strand to SEQ ID NO: 412607
aucauucucaccuuaguuu

SEQ ID NO: 412609 - RNA, 19 nt, Artificial Sequence
  Description of Artificial Sequence: Synthetic oligonucleotide
  Sense Strand Starting at position 1196 of SEQ ID NO: 318665
gagaaugauaugggcggaa

SEQ ID NO: 412610 - RNA, 19 nt, Artificial Sequence
  Description of Artificial Sequence: Synthetic oligonucleotide
  Antisense Strand to SEQ ID NO: 412609
uuccgcccauaucauucuc

SEQ ID NO: 412611 - RNA, 19 nt, Artificial Sequence
  Description of Artificial Sequence: Synthetic oligonucleotide
  Sense Strand Starting at position 1196 of SEQ ID NO: 318667
gaaugauaugggcggaauu

SEQ ID NO: 412612 - RNA, 19 nt, Artificial Sequence
  Description of Artificial Sequence: Synthetic oligonucleotide
  Antisense Strand to SEQ ID NO: 412611
aauuccgcccauaucauuc

SEQ ID NO: 412613 - RNA, 19 nt, Artificial Sequence
  Description of Artificial Sequence: Synthetic oligonucleotide
  Sense Strand Starting at position 1196 of SEQ ID NO: 318741
agaucuuggucagugucua

SEQ ID NO: 412614 - RNA, 19 nt, Artificial Sequence
  Description of Artificial Sequence: Synthetic oligonucleotide
  Antisense Strand to SEQ ID NO: 412613
uagacacugaccaagaucu

SEQ ID NO: 412615 - RNA, 19 nt, Artificial Sequence
  Description of Artificial Sequence: Synthetic oligonucleotide
  Sense Strand Starting at position 1196 of SEQ ID NO: 318749
gucagugucuacucauaca

SEQ ID NO: 412616 - RNA, 19 nt, Artificial Sequence
  Description of Artificial Sequence: Synthetic oligonucleotide
  Antisense Strand to SEQ ID NO: 412615
uguaugaguagacacugac

SEQ ID NO: 412617 - RNA, 19 nt, Artificial Sequence
  Description of Artificial Sequence: Synthetic oligonucleotide
  Sense Strand Starting at position 1196 of SEQ ID NO: 318776
ccuagaagcuaauauuuga

SEQ ID NO: 412618 - RNA, 19 nt, Artificial Sequence
  Description of Artificial Sequence: Synthetic oligonucleotide
  Antisense Strand to SEQ ID NO: 412617
ucaaauauuagcuucuagg

SEQ ID NO: 412619 - RNA, 19 nt, Artificial Sequence
  Description of Artificial Sequence: Synthetic oligonucleotide
  Sense Strand Starting at position 1196 of SEQ ID NO: 318791
uugaguuuaccauauuacu

SEQ ID NO: 412620 - RNA, 19 nt, Artificial Sequence
  Description of Artificial Sequence: Synthetic oligonucleotide
  Antisense Strand to SEQ ID NO: 412619
aguaauaugguaaacucaa

SEQ ID NO: 412621 - RNA, 19 nt, Artificial Sequence
  Description of Artificial Sequence: Synthetic oligonucleotide
  Sense Strand Starting at position 1196 of SEQ ID NO: 318859
ugccuucuuguagauuauu

SEQ ID NO: 412622 - RNA, 19 nt, Artificial Sequence
  Description of Artificial Sequence: Synthetic oligonucleotide
  Antisense Strand to SEQ ID NO: 412621
aauaaucuacaagaaggca

SEQ ID NO: 412623 - RNA, 19 nt, Artificial Sequence
  Description of Artificial Sequence: Synthetic oligonucleotide
  Sense Strand Starting at position 1196 of SEQ ID NO: 318891
uguaacaauuagguuguua

SEQ ID NO: 412624 - RNA, 19 nt, Artificial Sequence
  Description of Artificial Sequence: Synthetic oligonucleotide
  Antisense Strand to SEQ ID NO: 412623
uaacaaccuaauuguuaca

SEQ ID NO: 412625 - RNA, 19 nt, Artificial Sequence
  Description of Artificial Sequence: Synthetic oligonucleotide
  Sense Strand Starting at position 1196 of SEQ ID NO: 318895
acaauuagguuguuauaca

SEQ ID NO: 412626 - RNA, 19 nt, Artificial Sequence
  Description of Artificial Sequence: Synthetic oligonucleotide
  Antisense Strand to SEQ ID NO: 412625
uguauaacaaccuaauugu

SEQ ID NO: 412627 - RNA, 19 nt, Artificial Sequence
  Description of Artificial Sequence: Synthetic oligonucleotide
  Sense Strand Starting at position 1196 of SEQ ID NO: 318906
guuauacauucuuuaugcu

SEQ ID NO: 412628 - RNA, 19 nt, Artificial Sequence
  Description of Artificial Sequence: Synthetic oligonucleotide
  Antisense Strand to SEQ ID NO: 412627
agcauaaagaauguauaac

SEQ ID NO: 412629 - RNA, 19 nt, Artificial Sequence
  Description of Artificial Sequence: Synthetic oligonucleotide
  Sense Strand Starting at position 1196 of SEQ ID NO: 319014
uucugaauucucuggcaca

SEQ ID NO: 412630 - RNA, 19 nt, Artificial Sequence
  Description of Artificial Sequence: Synthetic oligonucleotide
  Antisense Strand to SEQ ID NO: 412629
ugugccagagaauucagaa

SEQ ID NO: 412631 - RNA, 19 nt, Artificial Sequence
  Description of Artificial Sequence: Synthetic oligonucleotide
  Sense Strand Starting at position 1196 of SEQ ID NO: 319061
gcucauuucugcuccauga

SEQ ID NO: 412632 - RNA, 19 nt, Artificial Sequence
  Description of Artificial Sequence: Synthetic oligonucleotide
  Antisense Strand to SEQ ID NO: 412631
ucauggagcagaaaugagc

SEQ ID NO: 412633 - RNA, 19 nt, Artificial Sequence
  Description of Artificial Sequence: Synthetic oligonucleotide
  Sense Strand Starting at position 1196 of SEQ ID NO: 319119
gcuggaauggcuuaacuag

SEQ ID NO: 412634 - RNA, 19 nt, Artificial Sequence
  Description of Artificial Sequence: Synthetic oligonucleotide
  Antisense Strand to SEQ ID NO: 412633
cuaguuaagccauuccagc

SEQ ID NO: 412635 - RNA, 19 nt, Artificial Sequence
  Description of Artificial Sequence: Synthetic oligonucleotide
  Sense Strand Starting at position 1196 of SEQ ID NO: 319129
cuuaacuagggucauaagu

SEQ ID NO: 412636 - RNA, 19 nt, Artificial Sequence
  Description of Artificial Sequence: Synthetic oligonucleotide
  Antisense Strand to SEQ ID NO: 412635
acuuaugacccuaguuaag

SEQ ID NO: 412637 - RNA, 19 nt, Artificial Sequence
  Description of Artificial Sequence: Synthetic oligonucleotide
  Sense Strand Starting at position 1196 of SEQ ID NO: 319139
gucauaagucuugggacuu

SEQ ID NO: 412638 - RNA, 19 nt, Artificial Sequence
  Description of Artificial Sequence: Synthetic oligonucleotide
  Antisense Strand to SEQ ID NO: 412637
aagucccaagacuuaugac

SEQ ID NO: 412639 - RNA, 19 nt, Artificial Sequence
  Description of Artificial Sequence: Synthetic oligonucleotide
  Sense Strand Starting at position 1197 of SEQ ID NO: 316327
ccugacugauucccugaaa

SEQ ID NO: 412640 - RNA, 19 nt, Artificial Sequence
  Description of Artificial Sequence: Synthetic oligonucleotide
  Antisense Strand to SEQ ID NO: 412639
uuucagggaaucagucagg

SEQ ID NO: 412641 - RNA, 19 nt, Artificial Sequence
  Description of Artificial Sequence: Synthetic oligonucleotide
  Sense Strand Starting at position 1197 of SEQ ID NO: 316328
cugacugauucccugaaac

SEQ ID NO: 412642 - RNA, 19 nt, Artificial Sequence
  Description of Artificial Sequence: Synthetic oligonucleotide
  Antisense Strand to SEQ ID NO: 412641
guuucagggaaucagucag

SEQ ID NO: 412643 - RNA, 19 nt, Artificial Sequence
  Description of Artificial Sequence: Synthetic oligonucleotide
  Sense Strand Starting at position 1197 of SEQ ID NO: 316472
aggccauuggcaugcauuu

SEQ ID NO: 412644 - RNA, 19 nt, Artificial Sequence
  Description of Artificial Sequence: Synthetic oligonucleotide
  Antisense Strand to SEQ ID NO: 412643
aaaugcaugccaauggccu

SEQ ID NO: 412645 - RNA, 19 nt, Artificial Sequence
  Description of Artificial Sequence: Synthetic oligonucleotide
  Sense Strand Starting at position 1197 of SEQ ID NO: 316481
gcaugcauuuguggacuga

SEQ ID NO: 412646 - RNA, 19 nt, Artificial Sequence
  Description of Artificial Sequence: Synthetic oligonucleotide
  Antisense Strand to SEQ ID NO: 412645
ucaguccacaaaugcaugc

SEQ ID NO: 412647 - RNA, 19 nt, Artificial Sequence
  Description of Artificial Sequence: Synthetic oligonucleotide
  Sense Strand Starting at position 1197 of SEQ ID NO: 316502
acauaagaguuugcaauuc

SEQ ID NO: 412648 - RNA, 19 nt, Artificial Sequence
  Description of Artificial Sequence: Synthetic oligonucleotide
  Antisense Strand to SEQ ID NO: 412647
gaauugcaaacucuuaugu

SEQ ID NO: 412649 - RNA, 19 nt, Artificial Sequence
  Description of Artificial Sequence: Synthetic oligonucleotide
  Sense Strand Starting at position 1197 of SEQ ID NO: 316514
gcaauucugcuagguuaag

SEQ ID NO: 412650 - RNA, 19 nt, Artificial Sequence
  Description of Artificial Sequence: Synthetic oligonucleotide
  Antisense Strand to SEQ ID NO: 412649
cuuaaccuagcagaauugc

SEQ ID NO: 412651 - RNA, 19 nt, Artificial Sequence
  Description of Artificial Sequence: Synthetic oligonucleotide
  Sense Strand Starting at position 1197 of SEQ ID NO: 316515
caauucugcuagguuaaga

SEQ ID NO: 412652 - RNA, 19 nt, Artificial Sequence
  Description of Artificial Sequence: Synthetic oligonucleotide
  Antisense Strand to SEQ ID NO: 412651
ucuuaaccuagcagaauug

SEQ ID NO: 412653 - RNA, 19 nt, Artificial Sequence
  Description of Artificial Sequence: Synthetic oligonucleotide
  Sense Strand Starting at position 1197 of SEQ ID NO: 316627
cuuugcgguucucuuuaua

SEQ ID NO: 412654 - RNA, 19 nt, Artificial Sequence
  Description of Artificial Sequence: Synthetic oligonucleotide
  Antisense Strand to SEQ ID NO: 412653
uauaaagagaaccgcaaag

SEQ ID NO: 412655 - RNA, 19 nt, Artificial Sequence
  Description of Artificial Sequence: Synthetic oligonucleotide
  Sense Strand Starting at position 1197 of SEQ ID NO: 316630
ugcgguucucuuuauaguu

SEQ ID NO: 412656 - RNA, 19 nt, Artificial Sequence
  Description of Artificial Sequence: Synthetic oligonucleotide
  Antisense Strand to SEQ ID NO: 412655
aacuauaaagagaaccgca

SEQ ID NO: 412657 - RNA, 19 nt, Artificial Sequence
  Description of Artificial Sequence: Synthetic oligonucleotide
  Sense Strand Starting at position 1197 of SEQ ID NO: 316649
guuuauguaucaccuaucu

SEQ ID NO: 412658 - RNA, 19 nt, Artificial Sequence
  Description of Artificial Sequence: Synthetic oligonucleotide
  Antisense Strand to SEQ ID NO: 412657
agauaggugauacauaaac

SEQ ID NO: 412659 - RNA, 19 nt, Artificial Sequence
  Description of Artificial Sequence: Synthetic oligonucleotide
  Sense Strand Starting at position 1197 of SEQ ID NO: 316661
ccuaucucaugaguugaca

SEQ ID NO: 412660 - RNA, 19 nt, Artificial Sequence
  Description of Artificial Sequence: Synthetic oligonucleotide
  Antisense Strand to SEQ ID NO: 412659
ugucaacucaugagauagg

SEQ ID NO: 412661 - RNA, 19 nt, Artificial Sequence
  Description of Artificial Sequence: Synthetic oligonucleotide
  Sense Strand Starting at position 1197 of SEQ ID NO: 316735
gagucaauuuaaggguaua

SEQ ID NO: 412662 - RNA, 19 nt, Artificial Sequence
  Description of Artificial Sequence: Synthetic oligonucleotide
  Antisense Strand to SEQ ID NO: 412661
uauacccuuaaauugacuc

SEQ ID NO: 412663 - RNA, 19 nt, Artificial Sequence
  Description of Artificial Sequence: Synthetic oligonucleotide
  Sense Strand Starting at position 1197 of SEQ ID NO: 316774
gggcucucaauugaaaugu

SEQ ID NO: 412664 - RNA, 19 nt, Artificial Sequence
  Description of Artificial Sequence: Synthetic oligonucleotide
  Antisense Strand to SEQ ID NO: 412663
acauuucaauugagagccc

SEQ ID NO: 412665 - RNA, 19 nt, Artificial Sequence
  Description of Artificial Sequence: Synthetic oligonucleotide
  Sense Strand Starting at position 1197 of SEQ ID NO: 316783
auugaaauguucuauggga

SEQ ID NO: 412666 - RNA, 19 nt, Artificial Sequence
  Description of Artificial Sequence: Synthetic oligonucleotide
  Antisense Strand to SEQ ID NO: 412665
ucccauagaacauuucaau

SEQ ID NO: 412667 - RNA, 19 nt, Artificial Sequence
  Description of Artificial Sequence: Synthetic oligonucleotide
  Sense Strand Starting at position 1197 of SEQ ID NO: 316788
aauguucuaugggagaaag

SEQ ID NO: 412668 - RNA, 19 nt, Artificial Sequence
  Description of Artificial Sequence: Synthetic oligonucleotide
  Antisense Strand to SEQ ID NO: 412667
cuuucucccauagaacauu

SEQ ID NO: 412669 - RNA, 19 nt, Artificial Sequence
  Description of Artificial Sequence: Synthetic oligonucleotide
  Sense Strand Starting at position 1197 of SEQ ID NO: 316854
auccaagaauguuaagagu

SEQ ID NO: 412670 - RNA, 19 nt, Artificial Sequence
  Description of Artificial Sequence: Synthetic oligonucleotide
  Antisense Strand to SEQ ID NO: 412669
acucuuaacauucuuggau

SEQ ID NO: 412671 - RNA, 19 nt, Artificial Sequence
  Description of Artificial Sequence: Synthetic oligonucleotide
  Sense Strand Starting at position 1197 of SEQ ID NO: 316857
caagaauguuaagagucua

SEQ ID NO: 412672 - RNA, 19 nt, Artificial Sequence
  Description of Artificial Sequence: Synthetic oligonucleotide
  Antisense Strand to SEQ ID NO: 412671
uagacucuuaacauucuug

SEQ ID NO: 412673 - RNA, 19 nt, Artificial Sequence
  Description of Artificial Sequence: Synthetic oligonucleotide
  Sense Strand Starting at position 1197 of SEQ ID NO: 316900
ccgcuucugauggaauaca

SEQ ID NO: 412674 - RNA, 19 nt, Artificial Sequence
  Description of Artificial Sequence: Synthetic oligonucleotide
  Antisense Strand to SEQ ID NO: 412673
uguauuccaucagaagcgg

SEQ ID NO: 412675 - RNA, 19 nt, Artificial Sequence
  Description of Artificial Sequence: Synthetic oligonucleotide
  Sense Strand Starting at position 1197 of SEQ ID NO: 316911
ggaauacaaggguguguuu

SEQ ID NO: 412676 - RNA, 19 nt, Artificial Sequence
  Description of Artificial Sequence: Synthetic oligonucleotide
  Antisense Strand to SEQ ID NO: 412675
aaacacacccuuguauucc

SEQ ID NO: 412677 - RNA, 19 nt, Artificial Sequence
  Description of Artificial Sequence: Synthetic oligonucleotide
  Sense Strand Starting at position 1197 of SEQ ID NO: 316962
cacgaugugucagaagaca

SEQ ID NO: 412678 - RNA, 19 nt, Artificial Sequence
  Description of Artificial Sequence: Synthetic oligonucleotide
  Antisense Strand to SEQ ID NO: 412677
ugucuucugacacaucgug

SEQ ID NO: 412679 - RNA, 19 nt, Artificial Sequence
  Description of Artificial Sequence: Synthetic oligonucleotide
  Sense Strand Starting at position 1197 of SEQ ID NO: 317226
aaggaauggugaugagcaa

SEQ ID NO: 412680 - RNA, 19 nt, Artificial Sequence
  Description of Artificial Sequence: Synthetic oligonucleotide
  Antisense Strand to SEQ ID NO: 412679
uugcucaucaccauuccuu

SEQ ID NO: 412681 - RNA, 19 nt, Artificial Sequence
  Description of Artificial Sequence: Synthetic oligonucleotide
  Sense Strand Starting at position 1197 of SEQ ID NO: 317275
gaaagagaucugugacgca

SEQ ID NO: 412682 - RNA, 19 nt, Artificial Sequence
  Description of Artificial Sequence: Synthetic oligonucleotide
  Antisense Strand to SEQ ID NO: 412681
ugcgucacagaucucuuuc

SEQ ID NO: 412683 - RNA, 19 nt, Artificial Sequence
  Description of Artificial Sequence: Synthetic oligonucleotide
  Sense Strand Starting at position 1197 of SEQ ID NO: 317320
auccuaggugcccaauaaa

SEQ ID NO: 412684 - RNA, 19 nt, Artificial Sequence
  Description of Artificial Sequence: Synthetic oligonucleotide
  Antisense Strand to SEQ ID NO: 412683
uuuauugggcaccuaggau

SEQ ID NO: 412685 - RNA, 19 nt, Artificial Sequence
  Description of Artificial Sequence: Synthetic oligonucleotide
  Sense Strand Starting at position 1197 of SEQ ID NO: 317360
cacagcugguguuccauau

SEQ ID NO: 412686 - RNA, 19 nt, Artificial Sequence
  Description of Artificial Sequence: Synthetic oligonucleotide
  Antisense Strand to SEQ ID NO: 412685
auauggaacaccagcugug

SEQ ID NO: 412687 - RNA, 19 nt, Artificial Sequence
  Description of Artificial Sequence: Synthetic oligonucleotide
  Sense Strand Starting at position 1197 of SEQ ID NO: 317387
uuggcugaauuaguuaaga

SEQ ID NO: 412688 - RNA, 19 nt, Artificial Sequence
  Description of Artificial Sequence: Synthetic oligonucleotide
  Antisense Strand to SEQ ID NO: 412687
ucuuaacuaauucagccaa

SEQ ID NO: 412689 - RNA, 19 nt, Artificial Sequence
  Description of Artificial Sequence: Synthetic oligonucleotide
  Sense Strand Starting at position 1197 of SEQ ID NO: 317421
ugcuuaguucuuuguuguu

SEQ ID NO: 412690 - RNA, 19 nt, Artificial Sequence
  Description of Artificial Sequence: Synthetic oligonucleotide
  Antisense Strand to SEQ ID NO: 412689
aacaacaaagaacuaagca

SEQ ID NO: 412691 - RNA, 19 nt, Artificial Sequence
  Description of Artificial Sequence: Synthetic oligonucleotide
  Sense Strand Starting at position 1197 of SEQ ID NO: 317433
uguuguuugugggucaaca

SEQ ID NO: 412692 - RNA, 19 nt, Artificial Sequence
  Description of Artificial Sequence: Synthetic oligonucleotide
  Antisense Strand to SEQ ID NO: 412691
uguugacccacaaacaaca

SEQ ID NO: 412693 - RNA, 19 nt, Artificial Sequence
  Description of Artificial Sequence: Synthetic oligonucleotide
  Sense Strand Starting at position 1197 of SEQ ID NO: 317499
auuggagagucauaaaucu

SEQ ID NO: 412694 - RNA, 19 nt, Artificial Sequence
  Description of Artificial Sequence: Synthetic oligonucleotide
  Antisense Strand to SEQ ID NO: 412693
agauuuaugacucuccaau

SEQ ID NO: 412695 - RNA, 19 nt, Artificial Sequence
  Description of Artificial Sequence: Synthetic oligonucleotide
  Sense Strand Starting at position 1197 of SEQ ID NO: 317508
ucauaaaucuauguguaag

SEQ ID NO: 412696 - RNA, 19 nt, Artificial Sequence
  Description of Artificial Sequence: Synthetic oligonucleotide
  Antisense Strand to SEQ ID NO: 412695
cuuacacauagauuuauga

SEQ ID NO: 412697 - RNA, 19 nt, Artificial Sequence
  Description of Artificial Sequence: Synthetic oligonucleotide
  Sense Strand Starting at position 1197 of SEQ ID NO: 317520
guguaagaaguccaucaaa

SEQ ID NO: 412698 - RNA, 19 nt, Artificial Sequence
  Description of Artificial Sequence: Synthetic oligonucleotide
  Antisense Strand to SEQ ID NO: 412697
uuugauggacuucuuacac

SEQ ID NO: 412699 - RNA, 19 nt, Artificial Sequence
  Description of Artificial Sequence: Synthetic oligonucleotide
  Sense Strand Starting at position 1197 of SEQ ID NO: 317560
gcaguuuauaacgaaguau

SEQ ID NO: 412700 - RNA, 19 nt, Artificial Sequence
  Description of Artificial Sequence: Synthetic oligonucleotide
  Antisense Strand to SEQ ID NO: 412699
auacuucguuauaaacugc

SEQ ID NO: 412701 - RNA, 19 nt, Artificial Sequence
  Description of Artificial Sequence: Synthetic oligonucleotide
  Sense Strand Starting at position 1197 of SEQ ID NO: 317618
aggagaguucacuguaagc

SEQ ID NO: 412702 - RNA, 19 nt, Artificial Sequence
  Description of Artificial Sequence: Synthetic oligonucleotide
  Antisense Strand to SEQ ID NO: 412701
gcuuacagugaacucuccu

SEQ ID NO: 412703 - RNA, 19 nt, Artificial Sequence
  Description of Artificial Sequence: Synthetic oligonucleotide
  Sense Strand Starting at position 1197 of SEQ ID NO: 317638
ggcauuguuagggaaagcu

SEQ ID NO: 412704 - RNA, 19 nt, Artificial Sequence
  Description of Artificial Sequence: Synthetic oligonucleotide
  Antisense Strand to SEQ ID NO: 412703
agcuuucccuaacaaugcc

SEQ ID NO: 412705 - RNA, 19 nt, Artificial Sequence
  Description of Artificial Sequence: Synthetic oligonucleotide
  Sense Strand Starting at position 1197 of SEQ ID NO: 317648
gggaaagcuucacgaagaa

SEQ ID NO: 412706 - RNA, 19 nt, Artificial Sequence
  Description of Artificial Sequence: Synthetic oligonucleotide
  Antisense Strand to SEQ ID NO: 412705
uucuucgugaagcuuuccc

SEQ ID NO: 412707 - RNA, 19 nt, Artificial Sequence
  Description of Artificial Sequence: Synthetic oligonucleotide
  Sense Strand Starting at position 1197 of SEQ ID NO: 317708
caagccaggcguuauuauu

SEQ ID NO: 412708 - RNA, 19 nt, Artificial Sequence
  Description of Artificial Sequence: Synthetic oligonucleotide
  Antisense Strand to SEQ ID NO: 412707
aauaauaacgccuggcuug

SEQ ID NO: 412709 - RNA, 19 nt, Artificial Sequence
  Description of Artificial Sequence: Synthetic oligonucleotide
  Sense Strand Starting at position 1197 of SEQ ID NO: 317736
guguuauugccucaaggca

SEQ ID NO: 412710 - RNA, 19 nt, Artificial Sequence
  Description of Artificial Sequence: Synthetic oligonucleotide
  Antisense Strand to SEQ ID NO: 412709
ugccuugaggcaauaacac

SEQ ID NO: 412711 - RNA, 19 nt, Artificial Sequence
  Description of Artificial Sequence: Synthetic oligonucleotide
  Sense Strand Starting at position 1197 of SEQ ID NO: 317752
gcacaauuggcacagauug

SEQ ID NO: 412712 - RNA, 19 nt, Artificial Sequence
  Description of Artificial Sequence: Synthetic oligonucleotide
  Antisense Strand to SEQ ID NO: 412711
caaucugugccaauugugc

SEQ ID NO: 412713 - RNA, 19 nt, Artificial Sequence
  Description of Artificial Sequence: Synthetic oligonucleotide
  Sense Strand Starting at position 1197 of SEQ ID NO: 317889
gugugucugcgcguacaca

SEQ ID NO: 412714 - RNA, 19 nt, Artificial Sequence
  Description of Artificial Sequence: Synthetic oligonucleotide
  Antisense Strand to SEQ ID NO: 412713
uguguacgcgcagacacac

SEQ ID NO: 412715 - RNA, 19 nt, Artificial Sequence
  Description of Artificial Sequence: Synthetic oligonucleotide
  Sense Strand Starting at position 1197 of SEQ ID NO: 317947
ucaucaaacucggaaacaa

SEQ ID NO: 412716 - RNA, 19 nt, Artificial Sequence
  Description of Artificial Sequence: Synthetic oligonucleotide
  Antisense Strand to SEQ ID NO: 412715
uuguuuccgaguuugauga

SEQ ID NO: 412717 - RNA, 19 nt, Artificial Sequence
  Description of Artificial Sequence: Synthetic oligonucleotide
  Sense Strand Starting at position 1197 of SEQ ID NO: 318443
cccugcaucccagagacua

SEQ ID NO: 412718 - RNA, 19 nt, Artificial Sequence
  Description of Artificial Sequence: Synthetic oligonucleotide
  Antisense Strand to SEQ ID NO: 412717
uagucucugggaugcaggg

SEQ ID NO: 412719 - RNA, 19 nt, Artificial Sequence
  Description of Artificial Sequence: Synthetic oligonucleotide
  Sense Strand Starting at position 1198 of SEQ ID NO: 315260
ucauaaaucuauguguaag

SEQ ID NO: 412720 - RNA, 19 nt, Artificial Sequence
  Description of Artificial Sequence: Synthetic oligonucleotide
  Antisense Strand to SEQ ID NO: 412719
cuuacacauagauuuauga

SEQ ID NO: 412721 - RNA, 19 nt, Artificial Sequence
  Description of Artificial Sequence: Synthetic oligonucleotide
  Sense Strand Starting at position 1198 of SEQ ID NO: 315272
guguaagaaguccaucaaa

SEQ ID NO: 412722 - RNA, 19 nt, Artificial Sequence
  Description of Artificial Sequence: Synthetic oligonucleotide
  Antisense Strand to SEQ ID NO: 412721
uuugauggacuucuuacac

SEQ ID NO: 412723 - RNA, 19 nt, Artificial Sequence
  Description of Artificial Sequence: Synthetic oligonucleotide
  Sense Strand Starting at position 1198 of SEQ ID NO: 315312
gcaguuuauaacgaaguau

SEQ ID NO: 412724 - RNA, 19 nt, Artificial Sequence
  Description of Artificial Sequence: Synthetic oligonucleotide
  Antisense Strand to SEQ ID NO: 412723
auacuucguuauaaacugc

SEQ ID NO: 412725 - RNA, 19 nt, Artificial Sequence
  Description of Artificial Sequence: Synthetic oligonucleotide
  Sense Strand Starting at position 1198 of SEQ ID NO: 315370
aggagaguucacuguaagc

SEQ ID NO: 412726 - RNA, 19 nt, Artificial Sequence
  Description of Artificial Sequence: Synthetic oligonucleotide
  Antisense Strand to SEQ ID NO: 412725
gcuuacagugaacucuccu

SEQ ID NO: 412727 - RNA, 19 nt, Artificial Sequence
  Description of Artificial Sequence: Synthetic oligonucleotide
  Sense Strand Starting at position 1198 of SEQ ID NO: 315390
ggcauuguuagggaaagcu

SEQ ID NO: 412728 - RNA, 19 nt, Artificial Sequence
  Description of Artificial Sequence: Synthetic oligonucleotide
  Antisense Strand to SEQ ID NO: 412727
agcuuucccuaacaaugcc

SEQ ID NO: 412729 - RNA, 19 nt, Artificial Sequence
  Description of Artificial Sequence: Synthetic oligonucleotide
  Sense Strand Starting at position 1198 of SEQ ID NO: 315504
gcacaauuggcacagauug

SEQ ID NO: 412730 - RNA, 19 nt, Artificial Sequence
  Description of Artificial Sequence: Synthetic oligonucleotide
  Antisense Strand to SEQ ID NO: 412729
caaucugugccaauugugc

SEQ ID NO: 412731 - RNA, 19 nt, Artificial Sequence
  Description of Artificial Sequence: Synthetic oligonucleotide
  Sense Strand Starting at position 1198 of SEQ ID NO: 315641
gugugucugcgcguacaca

SEQ ID NO: 412732 - RNA, 19 nt, Artificial Sequence
  Description of Artificial Sequence: Synthetic oligonucleotide
  Antisense Strand to SEQ ID NO: 412731
uguguacgcgcagacacac

SEQ ID NO: 412733 - RNA, 19 nt, Artificial Sequence
  Description of Artificial Sequence: Synthetic oligonucleotide
  Sense Strand Starting at position 1198 of SEQ ID NO: 316195
cccugcaucccagagacua

SEQ ID NO: 412734 - RNA, 19 nt, Artificial Sequence
  Description of Artificial Sequence: Synthetic oligonucleotide
  Antisense Strand to SEQ ID NO: 412733
uagucucugggaugcaggg

SEQ ID NO: 412735 - RNA, 19 nt, Artificial Sequence
  Description of Artificial Sequence: Synthetic oligonucleotide
  Sense Strand Starting at position 1198 of SEQ ID NO: 317374
gauggagggucacuuuguu

SEQ ID NO: 412736 - RNA, 19 nt, Artificial Sequence
  Description of Artificial Sequence: Synthetic oligonucleotide
  Antisense Strand to SEQ ID NO: 412735
aacaaagugacccuccauc

SEQ ID NO: 412737 - RNA, 19 nt, Artificial Sequence
  Description of Artificial Sequence: Synthetic oligonucleotide
  Sense Strand Starting at position 1198 of SEQ ID NO: 317454
ggcuuuguuuauuugccua

SEQ ID NO: 412738 - RNA, 19 nt, Artificial Sequence
  Description of Artificial Sequence: Synthetic oligonucleotide
  Antisense Strand to SEQ ID NO: 412737
uaggcaaauaaacaaagcc

SEQ ID NO: 412739 - RNA, 19 nt, Artificial Sequence
  Description of Artificial Sequence: Synthetic oligonucleotide
  Sense Strand Starting at position 1198 of SEQ ID NO: 317606
cgacuauuucgugggccuu

SEQ ID NO: 412740 - RNA, 19 nt, Artificial Sequence
  Description of Artificial Sequence: Synthetic oligonucleotide
  Antisense Strand to SEQ ID NO: 412739
aaggcccacgaaauagucg

SEQ ID NO: 412741 - RNA, 19 nt, Artificial Sequence
  Description of Artificial Sequence: Synthetic oligonucleotide
  Sense Strand Starting at position 1198 of SEQ ID NO: 317726
ucagcaaaugucugucaga

SEQ ID NO: 412742 - RNA, 19 nt, Artificial Sequence
  Description of Artificial Sequence: Synthetic oligonucleotide
  Antisense Strand to SEQ ID NO: 412741
ucugacagacauuugcuga

SEQ ID NO: 412743 - RNA, 19 nt, Artificial Sequence
  Description of Artificial Sequence: Synthetic oligonucleotide
  Sense Strand Starting at position 1198 of SEQ ID NO: 317727
cagcaaaugucugucagag

SEQ ID NO: 412744 - RNA, 19 nt, Artificial Sequence
  Description of Artificial Sequence: Synthetic oligonucleotide
  Antisense Strand to SEQ ID NO: 412743
cucugacagacauuugcug

SEQ ID NO: 412745 - RNA, 19 nt, Artificial Sequence
  Description of Artificial Sequence: Synthetic oligonucleotide
  Sense Strand Starting at position 1198 of SEQ ID NO: 317735
gucugucagagcgucuauu

SEQ ID NO: 412746 - RNA, 19 nt, Artificial Sequence
  Description of Artificial Sequence: Synthetic oligonucleotide
  Antisense Strand to SEQ ID NO: 412745
aauagacgcucugacagac

SEQ ID NO: 412747 - RNA, 19 nt, Artificial Sequence
  Description of Artificial Sequence: Synthetic oligonucleotide
  Sense Strand Starting at position 1198 of SEQ ID NO: 317739
gucagagcgucuauuacgu

SEQ ID NO: 412748 - RNA, 19 nt, Artificial Sequence
  Description of Artificial Sequence: Synthetic oligonucleotide
  Antisense Strand to SEQ ID NO: 412747
acguaauagacgcucugac

SEQ ID NO: 412749 - RNA, 19 nt, Artificial Sequence
  Description of Artificial Sequence: Synthetic oligonucleotide
  Sense Strand Starting at position 1198 of SEQ ID NO: 317897
uucaguagugagggaagaa

SEQ ID NO: 412750 - RNA, 19 nt, Artificial Sequence
  Description of Artificial Sequence: Synthetic oligonucleotide
  Antisense Strand to SEQ ID NO: 412749
uucuucccucacuacugaa

SEQ ID NO: 412751 - RNA, 19 nt, Artificial Sequence
  Description of Artificial Sequence: Synthetic oligonucleotide
  Sense Strand Starting at position 1198 of SEQ ID NO: 318084
auagauuaaggguguuauc

SEQ ID NO: 412752 - RNA, 19 nt, Artificial Sequence
  Description of Artificial Sequence: Synthetic oligonucleotide
  Antisense Strand to SEQ ID NO: 412751
gauaacacccuuaaucuau

SEQ ID NO: 412753 - RNA, 19 nt, Artificial Sequence
  Description of Artificial Sequence: Synthetic oligonucleotide
  Sense Strand Starting at position 1198 of SEQ ID NO: 318145
aaacuaaggugagaaugau

SEQ ID NO: 412754 - RNA, 19 nt, Artificial Sequence
  Description of Artificial Sequence: Synthetic oligonucleotide
  Antisense Strand to SEQ ID NO: 412753
aucauucucaccuuaguuu

SEQ ID NO: 412755 - RNA, 19 nt, Artificial Sequence
  Description of Artificial Sequence: Synthetic oligonucleotide
  Sense Strand Starting at position 1198 of SEQ ID NO: 318155
gagaaugauaugggcggaa

SEQ ID NO: 412756 - RNA, 19 nt, Artificial Sequence
  Description of Artificial Sequence: Synthetic oligonucleotide
  Antisense Strand to SEQ ID NO: 412755
uuccgcccauaucauucuc

SEQ ID NO: 412757 - RNA, 19 nt, Artificial Sequence
  Description of Artificial Sequence: Synthetic oligonucleotide
  Sense Strand Starting at position 1198 of SEQ ID NO: 318157
gaaugauaugggcggaauu

SEQ ID NO: 412758 - RNA, 19 nt, Artificial Sequence
  Description of Artificial Sequence: Synthetic oligonucleotide
  Antisense Strand to SEQ ID NO: 412757
aauuccgcccauaucauuc

SEQ ID NO: 412759 - RNA, 19 nt, Artificial Sequence
  Description of Artificial Sequence: Synthetic oligonucleotide
  Sense Strand Starting at position 1198 of SEQ ID NO: 318231
agaucuuggucagugucua

SEQ ID NO: 412760 - RNA, 19 nt, Artificial Sequence
  Description of Artificial Sequence: Synthetic oligonucleotide
  Antisense Strand to SEQ ID NO: 412759
uagacacugaccaagaucu

SEQ ID NO: 412761 - RNA, 19 nt, Artificial Sequence
  Description of Artificial Sequence: Synthetic oligonucleotide
  Sense Strand Starting at position 1198 of SEQ ID NO: 318266
ccuagaagcuaauauuuga

SEQ ID NO: 412762 - RNA, 19 nt, Artificial Sequence
  Description of Artificial Sequence: Synthetic oligonucleotide
  Antisense Strand to SEQ ID NO: 412761
ucaaauauuagcuucuagg

SEQ ID NO: 412763 - RNA, 19 nt, Artificial Sequence
  Description of Artificial Sequence: Synthetic oligonucleotide
  Sense Strand Starting at position 1198 of SEQ ID NO: 318281
uugaguuuaccauauuacu

SEQ ID NO: 412764 - RNA, 19 nt, Artificial Sequence
  Description of Artificial Sequence: Synthetic oligonucleotide
  Antisense Strand to SEQ ID NO: 412763
aguaauaugguaaacucaa

SEQ ID NO: 412765 - RNA, 19 nt, Artificial Sequence
  Description of Artificial Sequence: Synthetic oligonucleotide
  Sense Strand Starting at position 1198 of SEQ ID NO: 318349
ugccuucuuguagauuauu

SEQ ID NO: 412766 - RNA, 19 nt, Artificial Sequence
  Description of Artificial Sequence: Synthetic oligonucleotide
  Antisense Strand to SEQ ID NO: 412765
aauaaucuacaagaaggca

SEQ ID NO: 412767 - RNA, 19 nt, Artificial Sequence
  Description of Artificial Sequence: Synthetic oligonucleotide
  Sense Strand Starting at position 1198 of SEQ ID NO: 318381
uguaacaauuagguuguua

SEQ ID NO: 412768 - RNA, 19 nt, Artificial Sequence
  Description of Artificial Sequence: Synthetic oligonucleotide
  Antisense Strand to SEQ ID NO: 412767
uaacaaccuaauuguuaca

SEQ ID NO: 412769 - RNA, 19 nt, Artificial Sequence
  Description of Artificial Sequence: Synthetic oligonucleotide
  Sense Strand Starting at position 1198 of SEQ ID NO: 318385
acaauuagguuguuauaca

SEQ ID NO: 412770 - RNA, 19 nt, Artificial Sequence
  Description of Artificial Sequence: Synthetic oligonucleotide
  Antisense Strand to SEQ ID NO: 412769
uguauaacaaccuaauugu

SEQ ID NO: 412771 - RNA, 19 nt, Artificial Sequence
  Description of Artificial Sequence: Synthetic oligonucleotide
  Sense Strand Starting at position 1198 of SEQ ID NO: 318504
uucugaauucucuggcaca

SEQ ID NO: 412772 - RNA, 19 nt, Artificial Sequence
  Description of Artificial Sequence: Synthetic oligonucleotide
  Antisense Strand to SEQ ID NO: 412771
ugugccagagaauucagaa

SEQ ID NO: 412773 - RNA, 19 nt, Artificial Sequence
  Description of Artificial Sequence: Synthetic oligonucleotide
  Sense Strand Starting at position 1198 of SEQ ID NO: 318551
gcucauuucugcuccauga

SEQ ID NO: 412774 - RNA, 19 nt, Artificial Sequence
  Description of Artificial Sequence: Synthetic oligonucleotide
  Antisense Strand to SEQ ID NO: 412773
ucauggagcagaaaugagc

SEQ ID NO: 412775 - RNA, 19 nt, Artificial Sequence
  Description of Artificial Sequence: Synthetic oligonucleotide
  Sense Strand Starting at position 1198 of SEQ ID NO: 318609
gcuggaauggcuuaacuag

SEQ ID NO: 412776 - RNA, 19 nt, Artificial Sequence
  Description of Artificial Sequence: Synthetic oligonucleotide
  Antisense Strand to SEQ ID NO: 412775
cuaguuaagccauuccagc

SEQ ID NO: 412777 - RNA, 19 nt, Artificial Sequence
  Description of Artificial Sequence: Synthetic oligonucleotide
  Sense Strand Starting at position 1198 of SEQ ID NO: 318619
cuuaacuagggucauaagu

SEQ ID NO: 412778 - RNA, 19 nt, Artificial Sequence
  Description of Artificial Sequence: Synthetic oligonucleotide
  Antisense Strand to SEQ ID NO: 412777
acuuaugacccuaguuaag

SEQ ID NO: 412779 - RNA, 19 nt, Artificial Sequence
  Description of Artificial Sequence: Synthetic oligonucleotide
  Sense Strand Starting at position 1198 of SEQ ID NO: 318629
gucauaagucuugggacuu

SEQ ID NO: 412780 - RNA, 19 nt, Artificial Sequence
  Description of Artificial Sequence: Synthetic oligonucleotide
  Antisense Strand to SEQ ID NO: 412779
aagucccaagacuuaugac

SEQ ID NO: 412781 - RNA, 19 nt, Artificial Sequence
  Description of Artificial Sequence: Synthetic oligonucleotide
  Sense Strand Starting at position 1198 of SEQ ID NO: 318743
gaaggcuguuagcuacaua

SEQ ID NO: 412782 - RNA, 19 nt, Artificial Sequence
  Description of Artificial Sequence: Synthetic oligonucleotide
  Antisense Strand to SEQ ID NO: 412781
uauguagcuaacagccuuc

SEQ ID NO: 412783 - RNA, 19 nt, Artificial Sequence
  Description of Artificial Sequence: Synthetic oligonucleotide
  Sense Strand Starting at position 1198 of SEQ ID NO: 318972
ugaauauugggagguguga

SEQ ID NO: 412784 - RNA, 19 nt, Artificial Sequence
  Description of Artificial Sequence: Synthetic oligonucleotide
  Antisense Strand to SEQ ID NO: 412783
ucacaccucccaauauuca

SEQ ID NO: 412785 - RNA, 19 nt, Artificial Sequence
  Description of Artificial Sequence: Synthetic oligonucleotide
  Sense Strand Starting at position 1198 of SEQ ID NO: 318974
aauauugggaggugugaca

SEQ ID NO: 412786 - RNA, 19 nt, Artificial Sequence
  Description of Artificial Sequence: Synthetic oligonucleotide
  Antisense Strand to SEQ ID NO: 412785
ugucacaccucccaauauu

SEQ ID NO: 412787 - RNA, 19 nt, Artificial Sequence
  Description of Artificial Sequence: Synthetic oligonucleotide
  Sense Strand Starting at position 1198 of SEQ ID NO: 318981
ggaggugugacauauuggu

SEQ ID NO: 412788 - RNA, 19 nt, Artificial Sequence
  Description of Artificial Sequence: Synthetic oligonucleotide
  Antisense Strand to SEQ ID NO: 412787
accaauaugucacaccucc

SEQ ID NO: 412789 - RNA, 19 nt, Artificial Sequence
  Description of Artificial Sequence: Synthetic oligonucleotide
  Sense Strand Starting at position 1198 of SEQ ID NO: 318986
ugugacauauugguaguca

SEQ ID NO: 412790 - RNA, 19 nt, Artificial Sequence
  Description of Artificial Sequence: Synthetic oligonucleotide
  Antisense Strand to SEQ ID NO: 412789
ugacuaccaauaugucaca

SEQ ID NO: 412791 - RNA, 19 nt, Artificial Sequence
  Description of Artificial Sequence: Synthetic oligonucleotide
  Sense Strand Starting at position 1198 of SEQ ID NO: 319003
cauuuagacuagggacaga

SEQ ID NO: 412792 - RNA, 19 nt, Artificial Sequence
  Description of Artificial Sequence: Synthetic oligonucleotide
  Antisense Strand to SEQ ID NO: 412791
ucugucccuagucuaaaug

SEQ ID NO: 412793 - RNA, 19 nt, Artificial Sequence
  Description of Artificial Sequence: Synthetic oligonucleotide
  Sense Strand Starting at position 1198 of SEQ ID NO: 319052
aaguuacuuccaggguaua

SEQ ID NO: 412794 - RNA, 19 nt, Artificial Sequence
  Description of Artificial Sequence: Synthetic oligonucleotide
  Antisense Strand to SEQ ID NO: 412793
uauacccuggaaguaacuu

SEQ ID NO: 412795 - RNA, 19 nt, Artificial Sequence
  Description of Artificial Sequence: Synthetic oligonucleotide
  Sense Strand Starting at position 1198 of SEQ ID NO: 319207
gaauguuaauugccucgaa

SEQ ID NO: 412796 - RNA, 19 nt, Artificial Sequence
  Description of Artificial Sequence: Synthetic oligonucleotide
  Antisense Strand to SEQ ID NO: 412795
uucgaggcaauuaacauuc

SEQ ID NO: 412797 - RNA, 19 nt, Artificial Sequence
  Description of Artificial Sequence: Synthetic oligonucleotide
  Sense Strand Starting at position 1198 of SEQ ID NO: 319211
guuaauugccucgaaggga

SEQ ID NO: 412798 - RNA, 19 nt, Artificial Sequence
  Description of Artificial Sequence: Synthetic oligonucleotide
  Antisense Strand to SEQ ID NO: 412797
ucccuucgaggcaauuaac

SEQ ID NO: 412799 - RNA, 19 nt, Artificial Sequence
  Description of Artificial Sequence: Synthetic oligonucleotide
  Sense Strand Starting at position 1199 of SEQ ID NO: 315250
uuuaucuagcccugaaaga

SEQ ID NO: 412800 - RNA, 19 nt, Artificial Sequence
  Description of Artificial Sequence: Synthetic oligonucleotide
  Antisense Strand to SEQ ID NO: 412799
ucuuucagggcuagauaaa

SEQ ID NO: 412801 - RNA, 19 nt, Artificial Sequence
  Description of Artificial Sequence: Synthetic oligonucleotide
  Sense Strand Starting at position 1199 of SEQ ID NO: 315251
uuaucuagcccugaaagau

SEQ ID NO: 412802 - RNA, 19 nt, Artificial Sequence
  Description of Artificial Sequence: Synthetic oligonucleotide
  Antisense Strand to SEQ ID NO: 412801
aucuuucagggcuagauaa

SEQ ID NO: 412803 - RNA, 19 nt, Artificial Sequence
  Description of Artificial Sequence: Synthetic oligonucleotide
  Sense Strand Starting at position 1199 of SEQ ID NO: 315260
ccugaaagaugcucagaug

SEQ ID NO: 412804 - RNA, 19 nt, Artificial Sequence
  Description of Artificial Sequence: Synthetic oligonucleotide
  Antisense Strand to SEQ ID NO: 412803
caucugagcaucuuucagg

SEQ ID NO: 412805 - RNA, 19 nt, Artificial Sequence
  Description of Artificial Sequence: Synthetic oligonucleotide
  Sense Strand Starting at position 1199 of SEQ ID NO: 315269
ugcucagaugugcaauacu

SEQ ID NO: 412806 - RNA, 19 nt, Artificial Sequence
  Description of Artificial Sequence: Synthetic oligonucleotide
  Antisense Strand to SEQ ID NO: 412805
aguauugcacaucugagca

SEQ ID NO: 412807 - RNA, 19 nt, Artificial Sequence
  Description of Artificial Sequence: Synthetic oligonucleotide
  Sense Strand Starting at position 1199 of SEQ ID NO: 315272
ucagaugugcaauacuacu

SEQ ID NO: 412808 - RNA, 19 nt, Artificial Sequence
  Description of Artificial Sequence: Synthetic oligonucleotide
  Antisense Strand to SEQ ID NO: 412807
aguaguauugcacaucuga

SEQ ID NO: 412809 - RNA, 19 nt, Artificial Sequence
  Description of Artificial Sequence: Synthetic oligonucleotide
  Sense Strand Starting at position 1199 of SEQ ID NO: 315278
gugcaauacuacuuaguug

SEQ ID NO: 412810 - RNA, 19 nt, Artificial Sequence
  Description of Artificial Sequence: Synthetic oligonucleotide
  Antisense Strand to SEQ ID NO: 412809
caacuaaguaguauugcac

SEQ ID NO: 412811 - RNA, 19 nt, Artificial Sequence
  Description of Artificial Sequence: Synthetic oligonucleotide
  Sense Strand Starting at position 1199 of SEQ ID NO: 315284
uacuacuuaguuggguaau

SEQ ID NO: 412812 - RNA, 19 nt, Artificial Sequence
  Description of Artificial Sequence: Synthetic oligonucleotide
  Antisense Strand to SEQ ID NO: 412811
auuacccaacuaaguagua

SEQ ID NO: 412813 - RNA, 19 nt, Artificial Sequence
  Description of Artificial Sequence: Synthetic oligonucleotide
  Sense Strand Starting at position 1199 of SEQ ID NO: 315567
cugagaacagggugucuua

SEQ ID NO: 412814 - RNA, 19 nt, Artificial Sequence
  Description of Artificial Sequence: Synthetic oligonucleotide
  Antisense Strand to SEQ ID NO: 412813
uaagacacccuguucucag

SEQ ID NO: 412815 - RNA, 19 nt, Artificial Sequence
  Description of Artificial Sequence: Synthetic oligonucleotide
  Sense Strand Starting at position 1199 of SEQ ID NO: 315576
gggugucuuagaggcacaa

SEQ ID NO: 412816 - RNA, 19 nt, Artificial Sequence
  Description of Artificial Sequence: Synthetic oligonucleotide
  Antisense Strand to SEQ ID NO: 412815
uugugccucuaagacaccc

SEQ ID NO: 412817 - RNA, 19 nt, Artificial Sequence
  Description of Artificial Sequence: Synthetic oligonucleotide
  Sense Strand Starting at position 1199 of SEQ ID NO: 315603
ugcguauccacccagaaag

SEQ ID NO: 412818 - RNA, 19 nt, Artificial Sequence
  Description of Artificial Sequence: Synthetic oligonucleotide
  Antisense Strand to SEQ ID NO: 412817
cuuucuggguggauacgca

SEQ ID NO: 412819 - RNA, 19 nt, Artificial Sequence
  Description of Artificial Sequence: Synthetic oligonucleotide
  Sense Strand Starting at position 1199 of SEQ ID NO: 315672
gccagaaucuugucugucu

SEQ ID NO: 412820 - RNA, 19 nt, Artificial Sequence
  Description of Artificial Sequence: Synthetic oligonucleotide
  Antisense Strand to SEQ ID NO: 412819
agacagacaagauucuggc

SEQ ID NO: 412821 - RNA, 19 nt, Artificial Sequence
  Description of Artificial Sequence: Synthetic oligonucleotide
  Sense Strand Starting at position 1199 of SEQ ID NO: 315674
cagaaucuugucugucuga

SEQ ID NO: 412822 - RNA, 19 nt, Artificial Sequence
  Description of Artificial Sequence: Synthetic oligonucleotide
  Antisense Strand to SEQ ID NO: 412821
ucagacagacaagauucug

SEQ ID NO: 412823 - RNA, 19 nt, Artificial Sequence
  Description of Artificial Sequence: Synthetic oligonucleotide
  Sense Strand Starting at position 1199 of SEQ ID NO: 315675
agaaucuugucugucugaa

SEQ ID NO: 412824 - RNA, 19 nt, Artificial Sequence
  Description of Artificial Sequence: Synthetic oligonucleotide
  Antisense Strand to SEQ ID NO: 412823
uucagacagacaagauucu

SEQ ID NO: 412825 - RNA, 19 nt, Artificial Sequence
  Description of Artificial Sequence: Synthetic oligonucleotide
  Sense Strand Starting at position 1199 of SEQ ID NO: 315693
aacagagcuuguuugggaa

SEQ ID NO: 412826 - RNA, 19 nt, Artificial Sequence
  Description of Artificial Sequence: Synthetic oligonucleotide
  Antisense Strand to SEQ ID NO: 412825
uucccaaacaagcucuguu

SEQ ID NO: 412827 - RNA, 19 nt, Artificial Sequence
  Description of Artificial Sequence: Synthetic oligonucleotide
  Sense Strand Starting at position 1199 of SEQ ID NO: 315717
cgagaaaucauccaucacg

SEQ ID NO: 412828 - RNA, 19 nt, Artificial Sequence
  Description of Artificial Sequence: Synthetic oligonucleotide
  Antisense Strand to SEQ ID NO: 412827
cgugauggaugauuucucg

SEQ ID NO: 412829 - RNA, 19 nt, Artificial Sequence
  Description of Artificial Sequence: Synthetic oligonucleotide
  Sense Strand Starting at position 1199 of SEQ ID NO: 315872
ggaagcaggcucugaagua

SEQ ID NO: 412830 - RNA, 19 nt, Artificial Sequence
  Description of Artificial Sequence: Synthetic oligonucleotide
  Antisense Strand to SEQ ID NO: 412829
uacuucagagccugcuucc

SEQ ID NO: 412831 - RNA, 19 nt, Artificial Sequence
  Description of Artificial Sequence: Synthetic oligonucleotide
  Sense Strand Starting at position 1199 of SEQ ID NO: 315942
cacgguggcccucauuaau

SEQ ID NO: 412832 - RNA, 19 nt, Artificial Sequence
  Description of Artificial Sequence: Synthetic oligonucleotide
  Antisense Strand to SEQ ID NO: 412831
auuaaugagggccaccgug

SEQ ID NO: 412833 - RNA, 19 nt, Artificial Sequence
  Description of Artificial Sequence: Synthetic oligonucleotide
  Sense Strand Starting at position 1199 of SEQ ID NO: 315945
gguggcccucauuaauuau

SEQ ID NO: 412834 - RNA, 19 nt, Artificial Sequence
  Description of Artificial Sequence: Synthetic oligonucleotide
  Antisense Strand to SEQ ID NO: 412833
auaauuaaugagggccacc

SEQ ID NO: 412835 - RNA, 19 nt, Artificial Sequence
  Description of Artificial Sequence: Synthetic oligonucleotide
  Sense Strand Starting at position 1199 of SEQ ID NO: 316055
agcuccugccugggagaua

SEQ ID NO: 412836 - RNA, 19 nt, Artificial Sequence
  Description of Artificial Sequence: Synthetic oligonucleotide
  Antisense Strand to SEQ ID NO: 412835
uaucucccaggcaggagcu

SEQ ID NO: 412837 - RNA, 19 nt, Artificial Sequence
  Description of Artificial Sequence: Synthetic oligonucleotide
  Sense Strand Starting at position 1199 of SEQ ID NO: 316455
aucagaucucccugugugu

SEQ ID NO: 412838 - RNA, 19 nt, Artificial Sequence
  Description of Artificial Sequence: Synthetic oligonucleotide
  Antisense Strand to SEQ ID NO: 412837
acacacagggagaucugau

SEQ ID NO: 412839 - RNA, 19 nt, Artificial Sequence
  Description of Artificial Sequence: Synthetic oligonucleotide
  Sense Strand Starting at position 1199 of SEQ ID NO: 316457
cagaucucccuguguguaa

SEQ ID NO: 412840 - RNA, 19 nt, Artificial Sequence
  Description of Artificial Sequence: Synthetic oligonucleotide
  Antisense Strand to SEQ ID NO: 412839
uuacacacagggagaucug

SEQ ID NO: 412841 - RNA, 19 nt, Artificial Sequence
  Description of Artificial Sequence: Synthetic oligonucleotide
  Sense Strand Starting at position 1199 of SEQ ID NO: 316584
ucuguagaacagcaguaau

SEQ ID NO: 412842 - RNA, 19 nt, Artificial Sequence
  Description of Artificial Sequence: Synthetic oligonucleotide
  Antisense Strand to SEQ ID NO: 412841
auuacugcuguucuacaga

SEQ ID NO: 412843 - RNA, 19 nt, Artificial Sequence
  Description of Artificial Sequence: Synthetic oligonucleotide
  Sense Strand Starting at position 1199 of SEQ ID NO: 317045
gcuugugguagcucuccau

SEQ ID NO: 412844 - RNA, 19 nt, Artificial Sequence
  Description of Artificial Sequence: Synthetic oligonucleotide
  Antisense Strand to SEQ ID NO: 412843
auggagagcuaccacaagc

SEQ ID NO: 412845 - RNA, 19 nt, Artificial Sequence
  Description of Artificial Sequence: Synthetic oligonucleotide
  Sense Strand Starting at position 1199 of SEQ ID NO: 317381
cugggcuccugacucgaaa

SEQ ID NO: 412846 - RNA, 19 nt, Artificial Sequence
  Description of Artificial Sequence: Synthetic oligonucleotide
  Antisense Strand to SEQ ID NO: 412845
uuucgagucaggagcccag

SEQ ID NO: 412847 - RNA, 19 nt, Artificial Sequence
  Description of Artificial Sequence: Synthetic oligonucleotide
  Sense Strand Starting at position 1199 of SEQ ID NO: 317422
cacaguccuccguggacuu

SEQ ID NO: 412848 - RNA, 19 nt, Artificial Sequence
  Description of Artificial Sequence: Synthetic oligonucleotide
  Antisense Strand to SEQ ID NO: 412847
aaguccacggaggacugug

SEQ ID NO: 412849 - RNA, 19 nt, Artificial Sequence
  Description of Artificial Sequence: Synthetic oligonucleotide
  Sense Strand Starting at position 1199 of SEQ ID NO: 317434
uggacuugucacggcgaau

SEQ ID NO: 412850 - RNA, 19 nt, Artificial Sequence
  Description of Artificial Sequence: Synthetic oligonucleotide
  Antisense Strand to SEQ ID NO: 412849
auucgccgugacaagucca

SEQ ID NO: 412851 - RNA, 19 nt, Artificial Sequence
  Description of Artificial Sequence: Synthetic oligonucleotide
  Sense Strand Starting at position 1199 of SEQ ID NO: 317937
agugauuacagcugccuga

SEQ ID NO: 412852 - RNA, 19 nt, Artificial Sequence
  Description of Artificial Sequence: Synthetic oligonucleotide
  Antisense Strand to SEQ ID NO: 412851
ucaggcagcuguaaucacu

SEQ ID NO: 412853 - RNA, 19 nt, Artificial Sequence
  Description of Artificial Sequence: Synthetic oligonucleotide
  Sense Strand Starting at position 1199 of SEQ ID NO: 318142
gccggauuauagguaugag

SEQ ID NO: 412854 - RNA, 19 nt, Artificial Sequence
  Description of Artificial Sequence: Synthetic oligonucleotide
  Antisense Strand to SEQ ID NO: 412853
cucauaccuauaauccggc

SEQ ID NO: 412855 - RNA, 19 nt, Artificial Sequence
  Description of Artificial Sequence: Synthetic oligonucleotide
  Sense Strand Starting at position 1199 of SEQ ID NO: 318231
gauagugguagccaugaca

SEQ ID NO: 412856 - RNA, 19 nt, Artificial Sequence
  Description of Artificial Sequence: Synthetic oligonucleotide
  Antisense Strand to SEQ ID NO: 412855
ugucauggcuaccacuauc

SEQ ID NO: 412857 - RNA, 19 nt, Artificial Sequence
  Description of Artificial Sequence: Synthetic oligonucleotide
  Sense Strand Starting at position 1199 of SEQ ID NO: 318333
ggagauuauuggguuugcu

SEQ ID NO: 412858 - RNA, 19 nt, Artificial Sequence
  Description of Artificial Sequence: Synthetic oligonucleotide
  Antisense Strand to SEQ ID NO: 412857
agcaaacccaauaaucucc

SEQ ID NO: 412859 - RNA, 19 nt, Artificial Sequence
  Description of Artificial Sequence: Synthetic oligonucleotide
  Sense Strand Starting at position 1199 of SEQ ID NO: 318401
augguucccagagguauga

SEQ ID NO: 412860 - RNA, 19 nt, Artificial Sequence
  Description of Artificial Sequence: Synthetic oligonucleotide
  Antisense Strand to SEQ ID NO: 412859
ucauaccucugggaaccau

SEQ ID NO: 412861 - RNA, 19 nt, Artificial Sequence
  Description of Artificial Sequence: Synthetic oligonucleotide
  Sense Strand Starting at position 1199 of SEQ ID NO: 318487
acacuuggccagugaggua

SEQ ID NO: 412862 - RNA, 19 nt, Artificial Sequence
  Description of Artificial Sequence: Synthetic oligonucleotide
  Antisense Strand to SEQ ID NO: 412861
uaccucacuggccaagugu

SEQ ID NO: 412863 - RNA, 19 nt, Artificial Sequence
  Description of Artificial Sequence: Synthetic oligonucleotide
  Sense Strand Starting at position 1199 of SEQ ID NO: 318502
gguacauacugccuacaau

SEQ ID NO: 412864 - RNA, 19 nt, Artificial Sequence
  Description of Artificial Sequence: Synthetic oligonucleotide
  Antisense Strand to SEQ ID NO: 412863
auuguaggcaguauguacc

SEQ ID NO: 412865 - RNA, 19 nt, Artificial Sequence
  Description of Artificial Sequence: Synthetic oligonucleotide
  Sense Strand Starting at position 1199 of SEQ ID NO: 318675
cucagagagcucuggcuca

SEQ ID NO: 412866 - RNA, 19 nt, Artificial Sequence
  Description of Artificial Sequence: Synthetic oligonucleotide
  Antisense Strand to SEQ ID NO: 412865
ugagccagagcucucugag

SEQ ID NO: 412867 - RNA, 19 nt, Artificial Sequence
  Description of Artificial Sequence: Synthetic oligonucleotide
  Sense Strand Starting at position 1199 of SEQ ID NO: 318694
ugaggcgauugacugaauu

SEQ ID NO: 412868 - RNA, 19 nt, Artificial Sequence
  Description of Artificial Sequence: Synthetic oligonucleotide
  Antisense Strand to SEQ ID NO: 412867
aauucagucaaucgccuca

SEQ ID NO: 412869 - RNA, 19 nt, Artificial Sequence
  Description of Artificial Sequence: Synthetic oligonucleotide
  Sense Strand Starting at position 1199 of SEQ ID NO: 318939
gcugcucacugucuggaaa

SEQ ID NO: 412870 - RNA, 19 nt, Artificial Sequence
  Description of Artificial Sequence: Synthetic oligonucleotide
  Antisense Strand to SEQ ID NO: 412869
uuuccagacagugagcagc

SEQ ID NO: 412871 - RNA, 19 nt, Artificial Sequence
  Description of Artificial Sequence: Synthetic oligonucleotide
  Sense Strand Starting at position 1199 of SEQ ID NO: 318979
uuugaaagcucugugccuu

SEQ ID NO: 412872 - RNA, 19 nt, Artificial Sequence
  Description of Artificial Sequence: Synthetic oligonucleotide
  Antisense Strand to SEQ ID NO: 412871
aaggcacagagcuuucaaa

SEQ ID NO: 412873 - RNA, 19 nt, Artificial Sequence
  Description of Artificial Sequence: Synthetic oligonucleotide
  Sense Strand Starting at position 1199 of SEQ ID NO: 319079
ucacucuggucucugacaa

SEQ ID NO: 412874 - RNA, 19 nt, Artificial Sequence
  Description of Artificial Sequence: Synthetic oligonucleotide
  Antisense Strand to SEQ ID NO: 412873
uugucagagaccagaguga

SEQ ID NO: 412875 - RNA, 19 nt, Artificial Sequence
  Description of Artificial Sequence: Synthetic oligonucleotide
  Sense Strand Starting at position 1199 of SEQ ID NO: 319204
ccugguguuccacaugaau

SEQ ID NO: 412876 - RNA, 19 nt, Artificial Sequence
  Description of Artificial Sequence: Synthetic oligonucleotide
  Antisense Strand to SEQ ID NO: 412875
auucauguggaacaccagg

SEQ ID NO: 412877 - RNA, 19 nt, Artificial Sequence
  Description of Artificial Sequence: Synthetic oligonucleotide
  Sense Strand Starting at position 1199 of SEQ ID NO: 319206
ugguguuccacaugaaugg

SEQ ID NO: 412878 - RNA, 19 nt, Artificial Sequence
  Description of Artificial Sequence: Synthetic oligonucleotide
  Antisense Strand to SEQ ID NO: 412877
ccauucauguggaacacca

SEQ ID NO: 412879 - RNA, 19 nt, Artificial Sequence
  Description of Artificial Sequence: Synthetic oligonucleotide
  Sense Strand Starting at position 1200 of SEQ ID NO: 315844
gugugagagucucccacua

SEQ ID NO: 412880 - RNA, 19 nt, Artificial Sequence
  Description of Artificial Sequence: Synthetic oligonucleotide
  Antisense Strand to SEQ ID NO: 412879
uagugggagacucucacac

SEQ ID NO: 412881 - RNA, 19 nt, Artificial Sequence
  Description of Artificial Sequence: Synthetic oligonucleotide
  Sense Strand Starting at position 1200 of SEQ ID NO: 315944
ccgagagccuuugccuuau

SEQ ID NO: 412882 - RNA, 19 nt, Artificial Sequence
  Description of Artificial Sequence: Synthetic oligonucleotide
  Antisense Strand to SEQ ID NO: 412881
auaaggcaaaggcucucgg

SEQ ID NO: 412883 - RNA, 19 nt, Artificial Sequence
  Description of Artificial Sequence: Synthetic oligonucleotide
  Sense Strand Starting at position 1200 of SEQ ID NO: 315948
gagccuuugccuuaugggu

SEQ ID NO: 412884 - RNA, 19 nt, Artificial Sequence
  Description of Artificial Sequence: Synthetic oligonucleotide
  Antisense Strand to SEQ ID NO: 412883
acccauaaggcaaaggcuc

SEQ ID NO: 412885 - RNA, 19 nt, Artificial Sequence
  Description of Artificial Sequence: Synthetic oligonucleotide
  Sense Strand Starting at position 1200 of SEQ ID NO: 315953
uuugccuuaugggucagaa

SEQ ID NO: 412886 - RNA, 19 nt, Artificial Sequence
  Description of Artificial Sequence: Synthetic oligonucleotide
  Antisense Strand to SEQ ID NO: 412885
uucugacccauaaggcaaa

SEQ ID NO: 412887 - RNA, 19 nt, Artificial Sequence
  Description of Artificial Sequence: Synthetic oligonucleotide
  Sense Strand Starting at position 1200 of SEQ ID NO: 315955
ugccuuaugggucagaaca

SEQ ID NO: 412888 - RNA, 19 nt, Artificial Sequence
  Description of Artificial Sequence: Synthetic oligonucleotide
  Antisense Strand to SEQ ID NO: 412887
uguucugacccauaaggca

SEQ ID NO: 412889 - RNA, 19 nt, Artificial Sequence
  Description of Artificial Sequence: Synthetic oligonucleotide
  Sense Strand Starting at position 1200 of SEQ ID NO: 315957
ccuuaugggucagaacaga

SEQ ID NO: 412890 - RNA, 19 nt, Artificial Sequence
  Description of Artificial Sequence: Synthetic oligonucleotide
  Antisense Strand to SEQ ID NO: 412889
ucuguucugacccauaagg

SEQ ID NO: 412891 - RNA, 19 nt, Artificial Sequence
  Description of Artificial Sequence: Synthetic oligonucleotide
  Sense Strand Starting at position 1200 of SEQ ID NO: 316104
ugggucucauugcucagaa

SEQ ID NO: 412892 - RNA, 19 nt, Artificial Sequence
  Description of Artificial Sequence: Synthetic oligonucleotide
  Antisense Strand to SEQ ID NO: 412891
uucugagcaaugagaccca

SEQ ID NO: 412893 - RNA, 19 nt, Artificial Sequence
  Description of Artificial Sequence: Synthetic oligonucleotide
  Sense Strand Starting at position 1200 of SEQ ID NO: 316105
gggucucauugcucagaag

SEQ ID NO: 412894 - RNA, 19 nt, Artificial Sequence
  Description of Artificial Sequence: Synthetic oligonucleotide
  Antisense Strand to SEQ ID NO: 412893
cuucugagcaaugagaccc

SEQ ID NO: 412895 - RNA, 19 nt, Artificial Sequence
  Description of Artificial Sequence: Synthetic oligonucleotide
  Sense Strand Starting at position 1200 of SEQ ID NO: 316106
ggucucauugcucagaaga

SEQ ID NO: 412896 - RNA, 19 nt, Artificial Sequence
  Description of Artificial Sequence: Synthetic oligonucleotide
  Antisense Strand to SEQ ID NO: 412895
ucuucugagcaaugagacc

SEQ ID NO: 412897 - RNA, 19 nt, Artificial Sequence
  Description of Artificial Sequence: Synthetic oligonucleotide
  Sense Strand Starting at position 1200 of SEQ ID NO: 316497
gugacaacccgucacuguu

SEQ ID NO: 412898 - RNA, 19 nt, Artificial Sequence
  Description of Artificial Sequence: Synthetic oligonucleotide
  Antisense Strand to SEQ ID NO: 412897
aacagugacggguugucac

SEQ ID NO: 412899 - RNA, 19 nt, Artificial Sequence
  Description of Artificial Sequence: Synthetic oligonucleotide
  Sense Strand Starting at position 1200 of SEQ ID NO: 316582
gagagcuguuguccuacca

SEQ ID NO: 412900 - RNA, 19 nt, Artificial Sequence
  Description of Artificial Sequence: Synthetic oligonucleotide
  Antisense Strand to SEQ ID NO: 412899
ugguaggacaacagcucuc

SEQ ID NO: 412901 - RNA, 19 nt, Artificial Sequence
  Description of Artificial Sequence: Synthetic oligonucleotide
  Sense Strand Starting at position 1200 of SEQ ID NO: 316814
ugcauagucaaauggcaga

SEQ ID NO: 412902 - RNA, 19 nt, Artificial Sequence
  Description of Artificial Sequence: Synthetic oligonucleotide
  Antisense Strand to SEQ ID NO: 412901
ucugccauuugacuaugca

SEQ ID NO: 412903 - RNA, 19 nt, Artificial Sequence
  Description of Artificial Sequence: Synthetic oligonucleotide
  Sense Strand Starting at position 1200 of SEQ ID NO: 317114
gcaccaucuccagaguucu

SEQ ID NO: 412904 - RNA, 19 nt, Artificial Sequence
  Description of Artificial Sequence: Synthetic oligonucleotide
  Antisense Strand to SEQ ID NO: 412903
agaacucuggagauggugc

SEQ ID NO: 412905 - RNA, 19 nt, Artificial Sequence
  Description of Artificial Sequence: Synthetic oligonucleotide
  Sense Strand Starting at position 1200 of SEQ ID NO: 317206
cuugcaacaucuuccggaa

SEQ ID NO: 412906 - RNA, 19 nt, Artificial Sequence
  Description of Artificial Sequence: Synthetic oligonucleotide
  Antisense Strand to SEQ ID NO: 412905
uuccggaagauguugcaag

SEQ ID NO: 412907 - RNA, 19 nt, Artificial Sequence
  Description of Artificial Sequence: Synthetic oligonucleotide
  Sense Strand Starting at position 1200 of SEQ ID NO: 317374
uucugaucuaggugaggag

SEQ ID NO: 412908 - RNA, 19 nt, Artificial Sequence
  Description of Artificial Sequence: Synthetic oligonucleotide
  Antisense Strand to SEQ ID NO: 412907
cuccucaccuagaucagaa

SEQ ID NO: 412909 - RNA, 19 nt, Artificial Sequence
  Description of Artificial Sequence: Synthetic oligonucleotide
  Sense Strand Starting at position 1200 of SEQ ID NO: 317386
ugaggagacucagauuccu

SEQ ID NO: 412910 - RNA, 19 nt, Artificial Sequence
  Description of Artificial Sequence: Synthetic oligonucleotide
  Antisense Strand to SEQ ID NO: 412909
aggaaucugagucuccuca

SEQ ID NO: 412911 - RNA, 19 nt, Artificial Sequence
  Description of Artificial Sequence: Synthetic oligonucleotide
  Sense Strand Starting at position 1200 of SEQ ID NO: 317440
gcaaguucugcugggucca

SEQ ID NO: 412912 - RNA, 19 nt, Artificial Sequence
  Description of Artificial Sequence: Synthetic oligonucleotide
  Antisense Strand to SEQ ID NO: 412911
uggacccagcagaacuugc

SEQ ID NO: 412913 - RNA, 19 nt, Artificial Sequence
  Description of Artificial Sequence: Synthetic oligonucleotide
  Sense Strand Starting at position 1200 of SEQ ID NO: 317963
gcuccuuugccuggucuau

SEQ ID NO: 412914 - RNA, 19 nt, Artificial Sequence
  Description of Artificial Sequence: Synthetic oligonucleotide
  Antisense Strand to SEQ ID NO: 412913
auagaccaggcaaaggagc

SEQ ID NO: 412915 - RNA, 19 nt, Artificial Sequence
  Description of Artificial Sequence: Synthetic oligonucleotide
  Sense Strand Starting at position 1200 of SEQ ID NO: 317975
ggucuauguuucucuuugu

SEQ ID NO: 412916 - RNA, 19 nt, Artificial Sequence
  Description of Artificial Sequence: Synthetic oligonucleotide
  Antisense Strand to SEQ ID NO: 412915
acaaagagaaacauagacc

SEQ ID NO: 412917 - RNA, 19 nt, Artificial Sequence
  Description of Artificial Sequence: Synthetic oligonucleotide
  Sense Strand Starting at position 1200 of SEQ ID NO: 317980
auguuucucuuuguccuaa

SEQ ID NO: 412918 - RNA, 19 nt, Artificial Sequence
  Description of Artificial Sequence: Synthetic oligonucleotide
  Antisense Strand to SEQ ID NO: 412917
uuaggacaaagagaaacau

SEQ ID NO: 412919 - RNA, 19 nt, Artificial Sequence
  Description of Artificial Sequence: Synthetic oligonucleotide
  Sense Strand Starting at position 1200 of SEQ ID NO: 317982
guuucucuuuguccuaaca

SEQ ID NO: 412920 - RNA, 19 nt, Artificial Sequence
  Description of Artificial Sequence: Synthetic oligonucleotide
  Antisense Strand to SEQ ID NO: 412919
uguuaggacaaagagaaac

SEQ ID NO: 412921 - RNA, 19 nt, Artificial Sequence
  Description of Artificial Sequence: Synthetic oligonucleotide
  Sense Strand Starting at position 1200 of SEQ ID NO: 318068
gcuggaaugucagcuucuu

SEQ ID NO: 412922 - RNA, 19 nt, Artificial Sequence
  Description of Artificial Sequence: Synthetic oligonucleotide
  Antisense Strand to SEQ ID NO: 412921
aagaagcugacauuccagc

SEQ ID NO: 412923 - RNA, 19 nt, Artificial Sequence
  Description of Artificial Sequence: Synthetic oligonucleotide
  Sense Strand Starting at position 1200 of SEQ ID NO: 318080
gcuucuuaagggcagugau

SEQ ID NO: 412924 - RNA, 19 nt, Artificial Sequence
  Description of Artificial Sequence: Synthetic oligonucleotide
  Antisense Strand to SEQ ID NO: 412923
aucacugcccuuaagaagc

SEQ ID NO: 412925 - RNA, 19 nt, Artificial Sequence
  Description of Artificial Sequence: Synthetic oligonucleotide
  Sense Strand Starting at position 1200 of SEQ ID NO: 318083
ucuuaagggcagugaucuu

SEQ ID NO: 412926 - RNA, 19 nt, Artificial Sequence
  Description of Artificial Sequence: Synthetic oligonucleotide
  Antisense Strand to SEQ ID NO: 412925
aagaucacugcccuuaaga

SEQ ID NO: 412927 - RNA, 19 nt, Artificial Sequence
  Description of Artificial Sequence: Synthetic oligonucleotide
  Sense Strand Starting at position 1200 of SEQ ID NO: 318139
cauaguaagugcuugauau

SEQ ID NO: 412928 - RNA, 19 nt, Artificial Sequence
  Description of Artificial Sequence: Synthetic oligonucleotide
  Antisense Strand to SEQ ID NO: 412927
auaucaagcacuuacuaug

SEQ ID NO: 412929 - RNA, 19 nt, Artificial Sequence
  Description of Artificial Sequence: Synthetic oligonucleotide
  Sense Strand Starting at position 1200 of SEQ ID NO: 318140
auaguaagugcuugauauc

SEQ ID NO: 412930 - RNA, 19 nt, Artificial Sequence
  Description of Artificial Sequence: Synthetic oligonucleotide
  Antisense Strand to SEQ ID NO: 412929
gauaucaagcacuuacuau

SEQ ID NO: 412931 - RNA, 19 nt, Artificial Sequence
  Description of Artificial Sequence: Synthetic oligonucleotide
  Sense Strand Starting at position 1200 of SEQ ID NO: 318141
uaguaagugcuugauaucu

SEQ ID NO: 412932 - RNA, 19 nt, Artificial Sequence
  Description of Artificial Sequence: Synthetic oligonucleotide
  Antisense Strand to SEQ ID NO: 412931
agauaucaagcacuuacua

SEQ ID NO: 412933 - RNA, 19 nt, Artificial Sequence
  Description of Artificial Sequence: Synthetic oligonucleotide
  Sense Strand Starting at position 1200 of SEQ ID NO: 318147
gugcuugauaucugcugaa

SEQ ID NO: 412934 - RNA, 19 nt, Artificial Sequence
  Description of Artificial Sequence: Synthetic oligonucleotide
  Antisense Strand to SEQ ID NO: 412933
uucagcagauaucaagcac

SEQ ID NO: 412935 - RNA, 19 nt, Artificial Sequence
  Description of Artificial Sequence: Synthetic oligonucleotide
  Sense Strand Starting at position 1200 of SEQ ID NO: 318151
uugauaucugcugaauuau

SEQ ID NO: 412936 - RNA, 19 nt, Artificial Sequence
  Description of Artificial Sequence: Synthetic oligonucleotide
  Antisense Strand to SEQ ID NO: 412935
auaauucagcagauaucaa

SEQ ID NO: 412937 - RNA, 19 nt, Artificial Sequence
  Description of Artificial Sequence: Synthetic oligonucleotide
  Sense Strand Starting at position 1200 of SEQ ID NO: 318214
cugagugaaggcugaauga

SEQ ID NO: 412938 - RNA, 19 nt, Artificial Sequence
  Description of Artificial Sequence: Synthetic oligonucleotide
  Antisense Strand to SEQ ID NO: 412937
ucauucagccuucacucag

SEQ ID NO: 412939 - RNA, 19 nt, Artificial Sequence
  Description of Artificial Sequence: Synthetic oligonucleotide
  Sense Strand Starting at position 1200 of SEQ ID NO: 318404
caauguuucggcugggcaa

SEQ ID NO: 412940 - RNA, 19 nt, Artificial Sequence
  Description of Artificial Sequence: Synthetic oligonucleotide
  Antisense Strand to SEQ ID NO: 412939
uugcccagccgaaacauug

SEQ ID NO: 412941 - RNA, 19 nt, Artificial Sequence
  Description of Artificial Sequence: Synthetic oligonucleotide
  Sense Strand Starting at position 1200 of SEQ ID NO: 318686
cugagacuuucccagaguc

SEQ ID NO: 412942 - RNA, 19 nt, Artificial Sequence
  Description of Artificial Sequence: Synthetic oligonucleotide
  Antisense Strand to SEQ ID NO: 412941
gacucugggaaagucucag

SEQ ID NO: 412943 - RNA, 19 nt, Artificial Sequence
  Description of Artificial Sequence: Synthetic oligonucleotide
  Sense Strand Starting at position 1200 of SEQ ID NO: 318852
cgauaucgauguccacaga

SEQ ID NO: 412944 - RNA, 19 nt, Artificial Sequence
  Description of Artificial Sequence: Synthetic oligonucleotide
  Antisense Strand to SEQ ID NO: 412943
ucuguggacaucgauaucg

SEQ ID NO: 412945 - RNA, 19 nt, Artificial Sequence
  Description of Artificial Sequence: Synthetic oligonucleotide
  Sense Strand Starting at position 1200 of SEQ ID NO: 318922
gcccuuaucccauguggga

SEQ ID NO: 412946 - RNA, 19 nt, Artificial Sequence
  Description of Artificial Sequence: Synthetic oligonucleotide
  Antisense Strand to SEQ ID NO: 412945
ucccacaugggauaagggc

SEQ ID NO: 412947 - RNA, 19 nt, Artificial Sequence
  Description of Artificial Sequence: Synthetic oligonucleotide
  Sense Strand Starting at position 1200 of SEQ ID NO: 318958
cucagagauccuuguccua

SEQ ID NO: 412948 - RNA, 19 nt, Artificial Sequence
  Description of Artificial Sequence: Synthetic oligonucleotide
  Antisense Strand to SEQ ID NO: 412947
uaggacaaggaucucugag

SEQ ID NO: 412949 - RNA, 19 nt, Artificial Sequence
  Description of Artificial Sequence: Synthetic oligonucleotide
  Sense Strand Starting at position 1200 of SEQ ID NO: 318961
agagauccuuguccuaauu

SEQ ID NO: 412950 - RNA, 19 nt, Artificial Sequence
  Description of Artificial Sequence: Synthetic oligonucleotide
  Antisense Strand to SEQ ID NO: 412949
aauuaggacaaggaucucu

SEQ ID NO: 412951 - RNA, 19 nt, Artificial Sequence
  Description of Artificial Sequence: Synthetic oligonucleotide
  Sense Strand Starting at position 1200 of SEQ ID NO: 319027
aacgacuucgcagauguga

SEQ ID NO: 412952 - RNA, 19 nt, Artificial Sequence
  Description of Artificial Sequence: Synthetic oligonucleotide
  Antisense Strand to SEQ ID NO: 412951
ucacaucugcgaagucguu

SEQ ID NO: 412953 - RNA, 19 nt, Artificial Sequence
  Description of Artificial Sequence: Synthetic oligonucleotide
  Sense Strand Starting at position 1200 of SEQ ID NO: 319029
cgacuucgcagaugugauu

SEQ ID NO: 412954 - RNA, 19 nt, Artificial Sequence
  Description of Artificial Sequence: Synthetic oligonucleotide
  Antisense Strand to SEQ ID NO: 412953
aaucacaucugcgaagucg

SEQ ID NO: 412955 - RNA, 19 nt, Artificial Sequence
  Description of Artificial Sequence: Synthetic oligonucleotide
  Sense Strand Starting at position 1200 of SEQ ID NO: 319035
cgcagaugugauuaaguua

SEQ ID NO: 412956 - RNA, 19 nt, Artificial Sequence
  Description of Artificial Sequence: Synthetic oligonucleotide
  Antisense Strand to SEQ ID NO: 412955
uaacuuaaucacaucugcg

SEQ ID NO: 412957 - RNA, 19 nt, Artificial Sequence
  Description of Artificial Sequence: Synthetic oligonucleotide
  Sense Strand Starting at position 1200 of SEQ ID NO: 319042
gugauuaaguuacccaucu

SEQ ID NO: 412958 - RNA, 19 nt, Artificial Sequence
  Description of Artificial Sequence: Synthetic oligonucleotide
  Antisense Strand to SEQ ID NO: 412957
agauggguaacuuaaucac

SEQ ID NO: 412959 - RNA, 19 nt, Artificial Sequence
  Description of Artificial Sequence: Synthetic oligonucleotide
  Sense Strand Starting at position 1201 of SEQ ID NO: 315266
gcucauaugggucagguua

SEQ ID NO: 412960 - RNA, 19 nt, Artificial Sequence
  Description of Artificial Sequence: Synthetic oligonucleotide
  Antisense Strand to SEQ ID NO: 412959
uaaccugacccauaugagc

SEQ ID NO: 412961 - RNA, 19 nt, Artificial Sequence
  Description of Artificial Sequence: Synthetic oligonucleotide
  Sense Strand Starting at position 1201 of SEQ ID NO: 315333
ugauuagguugaccagaua

SEQ ID NO: 412962 - RNA, 19 nt, Artificial Sequence
  Description of Artificial Sequence: Synthetic oligonucleotide
  Antisense Strand to SEQ ID NO: 412961
uaucuggucaaccuaauca

SEQ ID NO: 412963 - RNA, 19 nt, Artificial Sequence
  Description of Artificial Sequence: Synthetic oligonucleotide
  Sense Strand Starting at position 1201 of SEQ ID NO: 315478
uguaaacguguuuauucca

SEQ ID NO: 412964 - RNA, 19 nt, Artificial Sequence
  Description of Artificial Sequence: Synthetic oligonucleotide
  Antisense Strand to SEQ ID NO: 412963
uggaauaaacacguuuaca

SEQ ID NO: 412965 - RNA, 19 nt, Artificial Sequence
  Description of Artificial Sequence: Synthetic oligonucleotide
  Sense Strand Starting at position 1201 of SEQ ID NO: 315485
guguuuauuccacaagagu

SEQ ID NO: 412966 - RNA, 19 nt, Artificial Sequence
  Description of Artificial Sequence: Synthetic oligonucleotide
  Antisense Strand to SEQ ID NO: 412965
acucuuguggaauaaacac

SEQ ID NO: 412967 - RNA, 19 nt, Artificial Sequence
  Description of Artificial Sequence: Synthetic oligonucleotide
  Sense Strand Starting at position 1201 of SEQ ID NO: 315763
ucgaaagaaacuuaagugu

SEQ ID NO: 412968 - RNA, 19 nt, Artificial Sequence
  Description of Artificial Sequence: Synthetic oligonucleotide
  Antisense Strand to SEQ ID NO: 412967
acacuuaaguuucuuucga

SEQ ID NO: 412969 - RNA, 19 nt, Artificial Sequence
  Description of Artificial Sequence: Synthetic oligonucleotide
  Sense Strand Starting at position 1201 of SEQ ID NO: 315769
gaaacuuaagugugauguu

SEQ ID NO: 412970 - RNA, 19 nt, Artificial Sequence
  Description of Artificial Sequence: Synthetic oligonucleotide
  Antisense Strand to SEQ ID NO: 412969
aacaucacacuuaaguuuc

SEQ ID NO: 412971 - RNA, 19 nt, Artificial Sequence
  Description of Artificial Sequence: Synthetic oligonucleotide
  Sense Strand Starting at position 1201 of SEQ ID NO: 315781
ugauguuauguuuaagaca

SEQ ID NO: 412972 - RNA, 19 nt, Artificial Sequence
  Description of Artificial Sequence: Synthetic oligonucleotide
  Antisense Strand to SEQ ID NO: 412971
ugucuuaaacauaacauca

SEQ ID NO: 412973 - RNA, 19 nt, Artificial Sequence
  Description of Artificial Sequence: Synthetic oligonucleotide
  Sense Strand Starting at position 1201 of SEQ ID NO: 315900
gucacuugggcccaugagu

SEQ ID NO: 412974 - RNA, 19 nt, Artificial Sequence
  Description of Artificial Sequence: Synthetic oligonucleotide
  Antisense Strand to SEQ ID NO: 412973
acucaugggcccaagugac

SEQ ID NO: 412975 - RNA, 19 nt, Artificial Sequence
  Description of Artificial Sequence: Synthetic oligonucleotide
  Sense Strand Starting at position 1201 of SEQ ID NO: 315992
auaaauaauuuagggcaga

SEQ ID NO: 412976 - RNA, 19 nt, Artificial Sequence
  Description of Artificial Sequence: Synthetic oligonucleotide
  Antisense Strand to SEQ ID NO: 412975
ucugcccuaaauuauuuau

SEQ ID NO: 412977 - RNA, 19 nt, Artificial Sequence
  Description of Artificial Sequence: Synthetic oligonucleotide
  Sense Strand Starting at position 1201 of SEQ ID NO: 316017
augccauaaucaguguauu

SEQ ID NO: 412978 - RNA, 19 nt, Artificial Sequence
  Description of Artificial Sequence: Synthetic oligonucleotide
  Antisense Strand to SEQ ID NO: 412977
aauacacugauuauggcau

SEQ ID NO: 412979 - RNA, 19 nt, Artificial Sequence
  Description of Artificial Sequence: Synthetic oligonucleotide
  Sense Strand Starting at position 1201 of SEQ ID NO: 316018
ugccauaaucaguguauua

SEQ ID NO: 412980 - RNA, 19 nt, Artificial Sequence
  Description of Artificial Sequence: Synthetic oligonucleotide
  Antisense Strand to SEQ ID NO: 412979
uaauacacugauuauggca

SEQ ID NO: 412981 - RNA, 19 nt, Artificial Sequence
  Description of Artificial Sequence: Synthetic oligonucleotide
  Sense Strand Starting at position 1201 of SEQ ID NO: 316029
guguauuagguuuaaaugu

SEQ ID NO: 412982 - RNA, 19 nt, Artificial Sequence
  Description of Artificial Sequence: Synthetic oligonucleotide
  Antisense Strand to SEQ ID NO: 412981
acauuuaaaccuaauacac

SEQ ID NO: 412983 - RNA, 19 nt, Artificial Sequence
  Description of Artificial Sequence: Synthetic oligonucleotide
  Sense Strand Starting at position 1201 of SEQ ID NO: 316203
ccagguuggcagggaaauu

SEQ ID NO: 412984 - RNA, 19 nt, Artificial Sequence
  Description of Artificial Sequence: Synthetic oligonucleotide
  Antisense Strand to SEQ ID NO: 412983
aauuucccugccaaccugg

SEQ ID NO: 412985 - RNA, 19 nt, Artificial Sequence
  Description of Artificial Sequence: Synthetic oligonucleotide
  Sense Strand Starting at position 1201 of SEQ ID NO: 316565
ucuguuuccuaccuauaga

SEQ ID NO: 412986 - RNA, 19 nt, Artificial Sequence
  Description of Artificial Sequence: Synthetic oligonucleotide
  Antisense Strand to SEQ ID NO: 412985
ucuauagguaggaaacaga

SEQ ID NO: 412987 - RNA, 19 nt, Artificial Sequence
  Description of Artificial Sequence: Synthetic oligonucleotide
  Sense Strand Starting at position 1201 of SEQ ID NO: 316568
guuuccuaccuauagaguu

SEQ ID NO: 412988 - RNA, 19 nt, Artificial Sequence
  Description of Artificial Sequence: Synthetic oligonucleotide
  Antisense Strand to SEQ ID NO: 412987
aacucuauagguaggaaac

SEQ ID NO: 412989 - RNA, 19 nt, Artificial Sequence
  Description of Artificial Sequence: Synthetic oligonucleotide
  Sense Strand Starting at position 1201 of SEQ ID NO: 316575
accuauagaguuuagcaaa

SEQ ID NO: 412990 - RNA, 19 nt, Artificial Sequence
  Description of Artificial Sequence: Synthetic oligonucleotide
  Antisense Strand to SEQ ID NO: 412989
uuugcuaaacucuauaggu

SEQ ID NO: 412991 - RNA, 19 nt, Artificial Sequence
  Description of Artificial Sequence: Synthetic oligonucleotide
  Sense Strand Starting at position 1201 of SEQ ID NO: 316968
guccgaugcaucgugcaca

SEQ ID NO: 412992 - RNA, 19 nt, Artificial Sequence
  Description of Artificial Sequence: Synthetic oligonucleotide
  Antisense Strand to SEQ ID NO: 412991
ugugcacgaugcaucggac

SEQ ID NO: 412993 - RNA, 19 nt, Artificial Sequence
  Description of Artificial Sequence: Synthetic oligonucleotide
  Sense Strand Starting at position 1201 of SEQ ID NO: 317073
ugcccuucugguggagaaa

SEQ ID NO: 412994 - RNA, 19 nt, Artificial Sequence
  Description of Artificial Sequence: Synthetic oligonucleotide
  Antisense Strand to SEQ ID NO: 412993
uuucuccaccagaagggca

SEQ ID NO: 412995 - RNA, 19 nt, Artificial Sequence
  Description of Artificial Sequence: Synthetic oligonucleotide
  Sense Strand Starting at position 1201 of SEQ ID NO: 317124
ucuuaaauacugcgauucu

SEQ ID NO: 412996 - RNA, 19 nt, Artificial Sequence
  Description of Artificial Sequence: Synthetic oligonucleotide
  Antisense Strand to SEQ ID NO: 412995
agaaucgcaguauuuaaga

SEQ ID NO: 412997 - RNA, 19 nt, Artificial Sequence
  Description of Artificial Sequence: Synthetic oligonucleotide
  Sense Strand Starting at position 1201 of SEQ ID NO: 317833
ggccuaaagcaugggacaa

SEQ ID NO: 412998 - RNA, 19 nt, Artificial Sequence
  Description of Artificial Sequence: Synthetic oligonucleotide
  Antisense Strand to SEQ ID NO: 412997
uugucccaugcuuuaggcc

SEQ ID NO: 412999 - RNA, 19 nt, Artificial Sequence
  Description of Artificial Sequence: Synthetic oligonucleotide
  Sense Strand Starting at position 1201 of SEQ ID NO: 318141
gagguaaacagaugguuua

SEQ ID NO: 413000 - RNA, 19 nt, Artificial Sequence
  Description of Artificial Sequence: Synthetic oligonucleotide
  Antisense Strand to SEQ ID NO: 412999
uaaaccaucuguuuaccuc

SEQ ID NO: 413001 - RNA, 19 nt, Artificial Sequence
  Description of Artificial Sequence: Synthetic oligonucleotide
  Sense Strand Starting at position 1201 of SEQ ID NO: 318216
guguuagacuaacuuucua

SEQ ID NO: 413002 - RNA, 19 nt, Artificial Sequence
  Description of Artificial Sequence: Synthetic oligonucleotide
  Antisense Strand to SEQ ID NO: 413001
uagaaaguuagucuaacac

SEQ ID NO: 413003 - RNA, 19 nt, Artificial Sequence
  Description of Artificial Sequence: Synthetic oligonucleotide
  Sense Strand Starting at position 1201 of SEQ ID NO: 318224
cuaacuuucuaggugguua

SEQ ID NO: 413004 - RNA, 19 nt, Artificial Sequence
  Description of Artificial Sequence: Synthetic oligonucleotide
  Antisense Strand to SEQ ID NO: 413003
uaaccaccuagaaaguuag

SEQ ID NO: 413005 - RNA, 19 nt, Artificial Sequence
  Description of Artificial Sequence: Synthetic oligonucleotide
  Sense Strand Starting at position 1201 of SEQ ID NO: 318359
gggccuugucaccaggaca

SEQ ID NO: 413006 - RNA, 19 nt, Artificial Sequence
  Description of Artificial Sequence: Synthetic oligonucleotide
  Antisense Strand to SEQ ID NO: 413005
uguccuggugacaaggccc

SEQ ID NO: 413007 - RNA, 19 nt, Artificial Sequence
  Description of Artificial Sequence: Synthetic oligonucleotide
  Sense Strand Starting at position 1201 of SEQ ID NO: 318441
gugaaugagguucacgaau

SEQ ID NO: 413008 - RNA, 19 nt, Artificial Sequence
  Description of Artificial Sequence: Synthetic oligonucleotide
  Antisense Strand to SEQ ID NO: 413007
auucgugaaccucauucac

SEQ ID NO: 413009 - RNA, 19 nt, Artificial Sequence
  Description of Artificial Sequence: Synthetic oligonucleotide
  Sense Strand Starting at position 1201 of SEQ ID NO: 318622
gaaauaaaucaguggaguu

SEQ ID NO: 413010 - RNA, 19 nt, Artificial Sequence
  Description of Artificial Sequence: Synthetic oligonucleotide
  Antisense Strand to SEQ ID NO: 413009
aacuccacugauuuauuuc

SEQ ID NO: 413011 - RNA, 19 nt, Artificial Sequence
  Description of Artificial Sequence: Synthetic oligonucleotide
  Sense Strand Starting at position 1201 of SEQ ID NO: 318685
uccucauaagagugucauu

SEQ ID NO: 413012 - RNA, 19 nt, Artificial Sequence
  Description of Artificial Sequence: Synthetic oligonucleotide
  Antisense Strand to SEQ ID NO: 413011
aaugacacucuuaugagga

SEQ ID NO: 413013 - RNA, 19 nt, Artificial Sequence
  Description of Artificial Sequence: Synthetic oligonucleotide
  Sense Strand Starting at position 1201 of SEQ ID NO: 318690
auaagagugucauuggguc

SEQ ID NO: 413014 - RNA, 19 nt, Artificial Sequence
  Description of Artificial Sequence: Synthetic oligonucleotide
  Antisense Strand to SEQ ID NO: 413013
gacccaaugacacucuuau

SEQ ID NO: 413015 - RNA, 19 nt, Artificial Sequence
  Description of Artificial Sequence: Synthetic oligonucleotide
  Sense Strand Starting at position 1201 of SEQ ID NO: 318694
gagugucauugggucacca

SEQ ID NO: 413016 - RNA, 19 nt, Artificial Sequence
  Description of Artificial Sequence: Synthetic oligonucleotide
  Antisense Strand to SEQ ID NO: 413015
uggugacccaaugacacuc

SEQ ID NO: 413017 - RNA, 19 nt, Artificial Sequence
  Description of Artificial Sequence: Synthetic oligonucleotide
  Sense Strand Starting at position 1201 of SEQ ID NO: 318696
gugucauugggucaccacu

SEQ ID NO: 413018 - RNA, 19 nt, Artificial Sequence
  Description of Artificial Sequence: Synthetic oligonucleotide
  Antisense Strand to SEQ ID NO: 413017
aguggugacccaaugacac

SEQ ID NO: 413019 - RNA, 19 nt, Artificial Sequence
  Description of Artificial Sequence: Synthetic oligonucleotide
  Sense Strand Starting at position 1201 of SEQ ID NO: 318698
gucauugggucaccacuau

SEQ ID NO: 413020 - RNA, 19 nt, Artificial Sequence
  Description of Artificial Sequence: Synthetic oligonucleotide
  Antisense Strand to SEQ ID NO: 413019
auaguggugacccaaugac

SEQ ID NO: 413021 - RNA, 19 nt, Artificial Sequence
  Description of Artificial Sequence: Synthetic oligonucleotide
  Sense Strand Starting at position 1201 of SEQ ID NO: 318709
accacuauguguccaacaa

SEQ ID NO: 413022 - RNA, 19 nt, Artificial Sequence
  Description of Artificial Sequence: Synthetic oligonucleotide
  Antisense Strand to SEQ ID NO: 413021
uuguuggacacauaguggu

SEQ ID NO: 413023 - RNA, 19 nt, Artificial Sequence
  Description of Artificial Sequence: Synthetic oligonucleotide
  Sense Strand Starting at position 1201 of SEQ ID NO: 318710
ccacuauguguccaacaac

SEQ ID NO: 413024 - RNA, 19 nt, Artificial Sequence
  Description of Artificial Sequence: Synthetic oligonucleotide
  Antisense Strand to SEQ ID NO: 413023
guuguuggacacauagugg

SEQ ID NO: 413025 - RNA, 19 nt, Artificial Sequence
  Description of Artificial Sequence: Synthetic oligonucleotide
  Sense Strand Starting at position 1201 of SEQ ID NO: 318761
acaggauuccacuggugac

SEQ ID NO: 413026 - RNA, 19 nt, Artificial Sequence
  Description of Artificial Sequence: Synthetic oligonucleotide
  Antisense Strand to SEQ ID NO: 413025
gucaccaguggaauccugu

SEQ ID NO: 413027 - RNA, 19 nt, Artificial Sequence
  Description of Artificial Sequence: Synthetic oligonucleotide
  Sense Strand Starting at position 1201 of SEQ ID NO: 318780
agagccuaugggugaauga

SEQ ID NO: 413028 - RNA, 19 nt, Artificial Sequence
  Description of Artificial Sequence: Synthetic oligonucleotide
  Antisense Strand to SEQ ID NO: 413027
ucauucacccauaggcucu

SEQ ID NO: 413029 - RNA, 19 nt, Artificial Sequence
  Description of Artificial Sequence: Synthetic oligonucleotide
  Sense Strand Starting at position 1201 of SEQ ID NO: 318790
ggugaaugacggcauccuu

SEQ ID NO: 413030 - RNA, 19 nt, Artificial Sequence
  Description of Artificial Sequence: Synthetic oligonucleotide
  Antisense Strand to SEQ ID NO: 413029
aaggaugccgucauucacc

SEQ ID NO: 413031 - RNA, 19 nt, Artificial Sequence
  Description of Artificial Sequence: Synthetic oligonucleotide
  Sense Strand Starting at position 1201 of SEQ ID NO: 318797
gacggcauccuuuguugaa

SEQ ID NO: 413032 - RNA, 19 nt, Artificial Sequence
  Description of Artificial Sequence: Synthetic oligonucleotide
  Antisense Strand to SEQ ID NO: 413031
uucaacaaaggaugccguc

SEQ ID NO: 413033 - RNA, 19 nt, Artificial Sequence
  Description of Artificial Sequence: Synthetic oligonucleotide
  Sense Strand Starting at position 1201 of SEQ ID NO: 318801
gcauccuuuguugaagcau

SEQ ID NO: 413034 - RNA, 19 nt, Artificial Sequence
  Description of Artificial Sequence: Synthetic oligonucleotide
  Antisense Strand to SEQ ID NO: 413033
augcuucaacaaaggaugc

SEQ ID NO: 413035 - RNA, 19 nt, Artificial Sequence
  Description of Artificial Sequence: Synthetic oligonucleotide
  Sense Strand Starting at position 1201 of SEQ ID NO: 318956
ucacgugucaagugagaga

SEQ ID NO: 413036 - RNA, 19 nt, Artificial Sequence
  Description of Artificial Sequence: Synthetic oligonucleotide
  Antisense Strand to SEQ ID NO: 413035
ucucucacuugacacguga

SEQ ID NO: 413037 - RNA, 19 nt, Artificial Sequence
  Description of Artificial Sequence: Synthetic oligonucleotide
  Sense Strand Starting at position 1201 of SEQ ID NO: 319087
ugaugauugucuuuccugu

SEQ ID NO: 413038 - RNA, 19 nt, Artificial Sequence
  Description of Artificial Sequence: Synthetic oligonucleotide
  Antisense Strand to SEQ ID NO: 413037
acaggaaagacaaucauca

SEQ ID NO: 413039 - RNA, 19 nt, Artificial Sequence
  Description of Artificial Sequence: Synthetic oligonucleotide
  Sense Strand Starting at position 1202 of SEQ ID NO: 315280
uugcauauugagggaaaca

SEQ ID NO: 413040 - RNA, 19 nt, Artificial Sequence
  Description of Artificial Sequence: Synthetic oligonucleotide
  Antisense Strand to SEQ ID NO: 413039
uguuucccucaauaugcaa

SEQ ID NO: 413041 - RNA, 19 nt, Artificial Sequence
  Description of Artificial Sequence: Synthetic oligonucleotide
  Sense Strand Starting at position 1202 of SEQ ID NO: 315659
acuguaugaagugaaugua

SEQ ID NO: 413042 - RNA, 19 nt, Artificial Sequence
  Description of Artificial Sequence: Synthetic oligonucleotide
  Antisense Strand to SEQ ID NO: 413041
uacauucacuucauacagu

SEQ ID NO: 413043 - RNA, 19 nt, Artificial Sequence
  Description of Artificial Sequence: Synthetic oligonucleotide
  Sense Strand Starting at position 1202 of SEQ ID NO: 315662
guaugaagugaauguacca

SEQ ID NO: 413044 - RNA, 19 nt, Artificial Sequence
  Description of Artificial Sequence: Synthetic oligonucleotide
  Antisense Strand to SEQ ID NO: 413043
ugguacauucacuucauac

SEQ ID NO: 413045 - RNA, 19 nt, Artificial Sequence
  Description of Artificial Sequence: Synthetic oligonucleotide
  Sense Strand Starting at position 1202 of SEQ ID NO: 315692
gcuacuucucuguaagaug

SEQ ID NO: 413046 - RNA, 19 nt, Artificial Sequence
  Description of Artificial Sequence: Synthetic oligonucleotide
  Antisense Strand to SEQ ID NO: 413045
caucuuacagagaaguagc

SEQ ID NO: 413047 - RNA, 19 nt, Artificial Sequence
  Description of Artificial Sequence: Synthetic oligonucleotide
  Sense Strand Starting at position 1202 of SEQ ID NO: 315709
ugcuucuucuaguuauuua

SEQ ID NO: 413048 - RNA, 19 nt, Artificial Sequence
  Description of Artificial Sequence: Synthetic oligonucleotide
  Antisense Strand to SEQ ID NO: 413047
uaaauaacuagaagaagca

SEQ ID NO: 413049 - RNA, 19 nt, Artificial Sequence
  Description of Artificial Sequence: Synthetic oligonucleotide
  Sense Strand Starting at position 1202 of SEQ ID NO: 315813
uaggauuacugagucaaac

SEQ ID NO: 413050 - RNA, 19 nt, Artificial Sequence
  Description of Artificial Sequence: Synthetic oligonucleotide
  Antisense Strand to SEQ ID NO: 413049
guuugacucaguaauccua

SEQ ID NO: 413051 - RNA, 19 nt, Artificial Sequence
  Description of Artificial Sequence: Synthetic oligonucleotide
  Sense Strand Starting at position 1202 of SEQ ID NO: 315889
gacauuuauuuguagugca

SEQ ID NO: 413052 - RNA, 19 nt, Artificial Sequence
  Description of Artificial Sequence: Synthetic oligonucleotide
  Antisense Strand to SEQ ID NO: 413051
ugcacuacaaauaaauguc

SEQ ID NO: 413053 - RNA, 19 nt, Artificial Sequence
  Description of Artificial Sequence: Synthetic oligonucleotide
  Sense Strand Starting at position 1202 of SEQ ID NO: 316094
uacauuauugguggucuga

SEQ ID NO: 413054 - RNA, 19 nt, Artificial Sequence
  Description of Artificial Sequence: Synthetic oligonucleotide
  Antisense Strand to SEQ ID NO: 413053
ucagaccaccaauaaugua

SEQ ID NO: 413055 - RNA, 19 nt, Artificial Sequence
  Description of Artificial Sequence: Synthetic oligonucleotide
  Sense Strand Starting at position 1202 of SEQ ID NO: 316176
cugaguugccaacaugauu

SEQ ID NO: 413056 - RNA, 19 nt, Artificial Sequence
  Description of Artificial Sequence: Synthetic oligonucleotide
  Antisense Strand to SEQ ID NO: 413055
aaucauguuggcaacucag

SEQ ID NO: 413057 - RNA, 19 nt, Artificial Sequence
  Description of Artificial Sequence: Synthetic oligonucleotide
  Sense Strand Starting at position 1202 of SEQ ID NO: 316246
cauggauucuugccauuga

SEQ ID NO: 413058 - RNA, 19 nt, Artificial Sequence
  Description of Artificial Sequence: Synthetic oligonucleotide
  Antisense Strand to SEQ ID NO: 413057
ucaauggcaagaauccaug

SEQ ID NO: 413059 - RNA, 19 nt, Artificial Sequence
  Description of Artificial Sequence: Synthetic oligonucleotide
  Sense Strand Starting at position 1202 of SEQ ID NO: 316296
auuauuagggucuaaugua

SEQ ID NO: 413060 - RNA, 19 nt, Artificial Sequence
  Description of Artificial Sequence: Synthetic oligonucleotide
  Antisense Strand to SEQ ID NO: 413059
uacauuagacccuaauaau

SEQ ID NO: 413061 - RNA, 19 nt, Artificial Sequence
  Description of Artificial Sequence: Synthetic oligonucleotide
  Sense Strand Starting at position 1202 of SEQ ID NO: 316303
gggucuaauguaggacuau

SEQ ID NO: 413062 - RNA, 19 nt, Artificial Sequence
  Description of Artificial Sequence: Synthetic oligonucleotide
  Antisense Strand to SEQ ID NO: 413061
auaguccuacauuagaccc

SEQ ID NO: 413063 - RNA, 19 nt, Artificial Sequence
  Description of Artificial Sequence: Synthetic oligonucleotide
  Sense Strand Starting at position 1202 of SEQ ID NO: 316373
ggcuaucuacuacauguca

SEQ ID NO: 413064 - RNA, 19 nt, Artificial Sequence
  Description of Artificial Sequence: Synthetic oligonucleotide
  Antisense Strand to SEQ ID NO: 413063
ugacauguaguagauagcc

SEQ ID NO: 413065 - RNA, 19 nt, Artificial Sequence
  Description of Artificial Sequence: Synthetic oligonucleotide
  Sense Strand Starting at position 1202 of SEQ ID NO: 316803
cccaaaugccagcagauua

SEQ ID NO: 413066 - RNA, 19 nt, Artificial Sequence
  Description of Artificial Sequence: Synthetic oligonucleotide
  Antisense Strand to SEQ ID NO: 413065
uaaucugcuggcauuuggg

SEQ ID NO: 413067 - RNA, 19 nt, Artificial Sequence
  Description of Artificial Sequence: Synthetic oligonucleotide
  Sense Strand Starting at position 1202 of SEQ ID NO: 316965
uuaccaugaugccugagaa

SEQ ID NO: 413068 - RNA, 19 nt, Artificial Sequence
  Description of Artificial Sequence: Synthetic oligonucleotide
  Antisense Strand to SEQ ID NO: 413067
uucucaggcaucaugguaa

SEQ ID NO: 413069 - RNA, 19 nt, Artificial Sequence
  Description of Artificial Sequence: Synthetic oligonucleotide
  Sense Strand Starting at position 1202 of SEQ ID NO: 317073
ucacgauuauacuccaaag

SEQ ID NO: 413070 - RNA, 19 nt, Artificial Sequence
  Description of Artificial Sequence: Synthetic oligonucleotide
  Antisense Strand to SEQ ID NO: 413069
cuuuggaguauaaucguga

SEQ ID NO: 413071 - RNA, 19 nt, Artificial Sequence
  Description of Artificial Sequence: Synthetic oligonucleotide
  Sense Strand Starting at position 1202 of SEQ ID NO: 317075
acgauuauacuccaaagug

SEQ ID NO: 413072 - RNA, 19 nt, Artificial Sequence
  Description of Artificial Sequence: Synthetic oligonucleotide
  Antisense Strand to SEQ ID NO: 413071
cacuuuggaguauaaucgu

SEQ ID NO: 413073 - RNA, 19 nt, Artificial Sequence
  Description of Artificial Sequence: Synthetic oligonucleotide
  Sense Strand Starting at position 1202 of SEQ ID NO: 317156
uuagaaccugcgggagauu

SEQ ID NO: 413074 - RNA, 19 nt, Artificial Sequence
  Description of Artificial Sequence: Synthetic oligonucleotide
  Antisense Strand to SEQ ID NO: 413073
aaucucccgcagguucuaa

SEQ ID NO: 413075 - RNA, 19 nt, Artificial Sequence
  Description of Artificial Sequence: Synthetic oligonucleotide
  Sense Strand Starting at position 1202 of SEQ ID NO: 317344
cgacaaucucagugugaaa

SEQ ID NO: 413076 - RNA, 19 nt, Artificial Sequence
  Description of Artificial Sequence: Synthetic oligonucleotide
  Antisense Strand to SEQ ID NO: 413075
uuucacacugagauugucg

SEQ ID NO: 413077 - RNA, 19 nt, Artificial Sequence
  Description of Artificial Sequence: Synthetic oligonucleotide
  Sense Strand Starting at position 1202 of SEQ ID NO: 317346
acaaucucagugugaaaua

SEQ ID NO: 413078 - RNA, 19 nt, Artificial Sequence
  Description of Artificial Sequence: Synthetic oligonucleotide
  Antisense Strand to SEQ ID NO: 413077
uauuucacacugagauugu

SEQ ID NO: 413079 - RNA, 19 nt, Artificial Sequence
  Description of Artificial Sequence: Synthetic oligonucleotide
  Sense Strand Starting at position 1202 of SEQ ID NO: 317357
gugaaauacugguuuacug

SEQ ID NO: 413080 - RNA, 19 nt, Artificial Sequence
  Description of Artificial Sequence: Synthetic oligonucleotide
  Antisense Strand to SEQ ID NO: 413079
caguaaaccaguauuucac

SEQ ID NO: 413081 - RNA, 19 nt, Artificial Sequence
  Description of Artificial Sequence: Synthetic oligonucleotide
  Sense Strand Starting at position 1202 of SEQ ID NO: 317359
gaaauacugguuuacuguu

SEQ ID NO: 413082 - RNA, 19 nt, Artificial Sequence
  Description of Artificial Sequence: Synthetic oligonucleotide
  Antisense Strand to SEQ ID NO: 413081
aacaguaaaccaguauuuc

SEQ ID NO: 413083 - RNA, 19 nt, Artificial Sequence
  Description of Artificial Sequence: Synthetic oligonucleotide
  Sense Strand Starting at position 1202 of SEQ ID NO: 317366
ugguuuacuguuuggagaa

SEQ ID NO: 413084 - RNA, 19 nt, Artificial Sequence
  Description of Artificial Sequence: Synthetic oligonucleotide
  Antisense Strand to SEQ ID NO: 413083
uucuccaaacaguaaacca

SEQ ID NO: 413085 - RNA, 19 nt, Artificial Sequence
  Description of Artificial Sequence: Synthetic oligonucleotide
  Sense Strand Starting at position 1202 of SEQ ID NO: 317518
uuguguuaagaaggaaguu

SEQ ID NO: 413086 - RNA, 19 nt, Artificial Sequence
  Description of Artificial Sequence: Synthetic oligonucleotide
  Antisense Strand to SEQ ID NO: 413085
aacuuccuucuuaacacaa

SEQ ID NO: 413087 - RNA, 19 nt, Artificial Sequence
  Description of Artificial Sequence: Synthetic oligonucleotide
  Sense Strand Starting at position 1202 of SEQ ID NO: 317607
caaggaggcuuauauuuag

SEQ ID NO: 413088 - RNA, 19 nt, Artificial Sequence
  Description of Artificial Sequence: Synthetic oligonucleotide
  Antisense Strand to SEQ ID NO: 413087
cuaaauauaagccuccuug

SEQ ID NO: 413089 - RNA, 19 nt, Artificial Sequence
  Description of Artificial Sequence: Synthetic oligonucleotide
  Sense Strand Starting at position 1202 of SEQ ID NO: 317753
gagaaagugacugguggau

SEQ ID NO: 413090 - RNA, 19 nt, Artificial Sequence
  Description of Artificial Sequence: Synthetic oligonucleotide
  Antisense Strand to SEQ ID NO: 413089
auccaccagucacuuucuc

SEQ ID NO: 413091 - RNA, 19 nt, Artificial Sequence
  Description of Artificial Sequence: Synthetic oligonucleotide
  Sense Strand Starting at position 1202 of SEQ ID NO: 317759
gugacugguggaugagaaa

SEQ ID NO: 413092 - RNA, 19 nt, Artificial Sequence
  Description of Artificial Sequence: Synthetic oligonucleotide
  Antisense Strand to SEQ ID NO: 413091
uuucucauccaccagucac

SEQ ID NO: 413093 - RNA, 19 nt, Artificial Sequence
  Description of Artificial Sequence: Synthetic oligonucleotide
  Sense Strand Starting at position 1202 of SEQ ID NO: 317790
ugguuagaucaguacagcu

SEQ ID NO: 413094 - RNA, 19 nt, Artificial Sequence
  Description of Artificial Sequence: Synthetic oligonucleotide
  Antisense Strand to SEQ ID NO: 413093
agcuguacugaucuaacca

SEQ ID NO: 413095 - RNA, 19 nt, Artificial Sequence
  Description of Artificial Sequence: Synthetic oligonucleotide
  Sense Strand Starting at position 1202 of SEQ ID NO: 317792
guuagaucaguacagcuuu

SEQ ID NO: 413096 - RNA, 19 nt, Artificial Sequence
  Description of Artificial Sequence: Synthetic oligonucleotide
  Antisense Strand to SEQ ID NO: 413095
aaagcuguacugaucuaac

SEQ ID NO: 413097 - RNA, 19 nt, Artificial Sequence
  Description of Artificial Sequence: Synthetic oligonucleotide
  Sense Strand Starting at position 1202 of SEQ ID NO: 318241
ccagguuccaaagagguuu

SEQ ID NO: 413098 - RNA, 19 nt, Artificial Sequence
  Description of Artificial Sequence: Synthetic oligonucleotide
  Antisense Strand to SEQ ID NO: 413097
aaaccucuuuggaaccugg

SEQ ID NO: 413099 - RNA, 19 nt, Artificial Sequence
  Description of Artificial Sequence: Synthetic oligonucleotide
  Sense Strand Starting at position 1202 of SEQ ID NO: 318305
uugaucuaagugcaucaaa

SEQ ID NO: 413100 - RNA, 19 nt, Artificial Sequence
  Description of Artificial Sequence: Synthetic oligonucleotide
  Antisense Strand to SEQ ID NO: 413099
uuugaugcacuuagaucaa

SEQ ID NO: 413101 - RNA, 19 nt, Artificial Sequence
  Description of Artificial Sequence: Synthetic oligonucleotide
  Sense Strand Starting at position 1202 of SEQ ID NO: 318379
uuacuagaguuccugggau

SEQ ID NO: 413102 - RNA, 19 nt, Artificial Sequence
  Description of Artificial Sequence: Synthetic oligonucleotide
  Antisense Strand to SEQ ID NO: 413101
aucccaggaacucuaguaa

SEQ ID NO: 413103 - RNA, 19 nt, Artificial Sequence
  Description of Artificial Sequence: Synthetic oligonucleotide
  Sense Strand Starting at position 1202 of SEQ ID NO: 318381
acuagaguuccugggauga

SEQ ID NO: 413104 - RNA, 19 nt, Artificial Sequence
  Description of Artificial Sequence: Synthetic oligonucleotide
  Antisense Strand to SEQ ID NO: 413103
ucaucccaggaacucuagu

SEQ ID NO: 413105 - RNA, 19 nt, Artificial Sequence
  Description of Artificial Sequence: Synthetic oligonucleotide
  Sense Strand Starting at position 1202 of SEQ ID NO: 318406
agagaauaacauuguuggu

SEQ ID NO: 413106 - RNA, 19 nt, Artificial Sequence
  Description of Artificial Sequence: Synthetic oligonucleotide
  Antisense Strand to SEQ ID NO: 413105
accaacaauguuauucucu

SEQ ID NO: 413107 - RNA, 19 nt, Artificial Sequence
  Description of Artificial Sequence: Synthetic oligonucleotide
  Sense Strand Starting at position 1202 of SEQ ID NO: 318575
uaaugaugacucggaucau

SEQ ID NO: 413108 - RNA, 19 nt, Artificial Sequence
  Description of Artificial Sequence: Synthetic oligonucleotide
  Antisense Strand to SEQ ID NO: 413107
augauccgagucaucauua

SEQ ID NO: 413109 - RNA, 19 nt, Artificial Sequence
  Description of Artificial Sequence: Synthetic oligonucleotide
  Sense Strand Starting at position 1202 of SEQ ID NO: 318952
ggauguggguauaagagaa

SEQ ID NO: 413110 - RNA, 19 nt, Artificial Sequence
  Description of Artificial Sequence: Synthetic oligonucleotide
  Antisense Strand to SEQ ID NO: 413109
uucucuuauacccacaucc

SEQ ID NO: 413111 - RNA, 19 nt, Artificial Sequence
  Description of Artificial Sequence: Synthetic oligonucleotide
  Sense Strand Starting at position 1202 of SEQ ID NO: 319078
gaaugauauggucaguuuc

SEQ ID NO: 413112 - RNA, 19 nt, Artificial Sequence
  Description of Artificial Sequence: Synthetic oligonucleotide
  Antisense Strand to SEQ ID NO: 413111
gaaacugaccauaucauuc

SEQ ID NO: 413113 - RNA, 19 nt, Artificial Sequence
  Description of Artificial Sequence: Synthetic oligonucleotide
  Sense Strand Starting at position 1202 of SEQ ID NO: 319151
ggcagcuggauauacaaau

SEQ ID NO: 413114 - RNA, 19 nt, Artificial Sequence
  Description of Artificial Sequence: Synthetic oligonucleotide
  Antisense Strand to SEQ ID NO: 413113
auuuguauauccagcugcc

SEQ ID NO: 413115 - RNA, 19 nt, Artificial Sequence
  Description of Artificial Sequence: Synthetic oligonucleotide
  Sense Strand Starting at position 1202 of SEQ ID NO: 319181
ggaagaggucugggugaca

SEQ ID NO: 413116 - RNA, 19 nt, Artificial Sequence
  Description of Artificial Sequence: Synthetic oligonucleotide
  Antisense Strand to SEQ ID NO: 413115
ugucacccagaccucuucc

SEQ ID NO: 413117 - RNA, 19 nt, Artificial Sequence
  Description of Artificial Sequence: Synthetic oligonucleotide
  Sense Strand Starting at position 1202 of SEQ ID NO: 319209
gacaguugucagcauauaa

SEQ ID NO: 413118 - RNA, 19 nt, Artificial Sequence
  Description of Artificial Sequence: Synthetic oligonucleotide
  Antisense Strand to SEQ ID NO: 413117
uuauaugcugacaacuguc

SEQ ID NO: 413119 - RNA, 19 nt, Artificial Sequence
  Description of Artificial Sequence: Synthetic oligonucleotide
  Sense Strand Starting at position 1203 of SEQ ID NO: 315370
acuguaugaagugaaugua

SEQ ID NO: 413120 - RNA, 19 nt, Artificial Sequence
  Description of Artificial Sequence: Synthetic oligonucleotide
  Antisense Strand to SEQ ID NO: 413119
uacauucacuucauacagu

SEQ ID NO: 413121 - RNA, 19 nt, Artificial Sequence
  Description of Artificial Sequence: Synthetic oligonucleotide
  Sense Strand Starting at position 1203 of SEQ ID NO: 315373
guaugaagugaauguacca

SEQ ID NO: 413122 - RNA, 19 nt, Artificial Sequence
  Description of Artificial Sequence: Synthetic oligonucleotide
  Antisense Strand to SEQ ID NO: 413121
ugguacauucacuucauac

SEQ ID NO: 413123 - RNA, 19 nt, Artificial Sequence
  Description of Artificial Sequence: Synthetic oligonucleotide
  Sense Strand Starting at position 1203 of SEQ ID NO: 315403
gcuacuucucuguaagaug

SEQ ID NO: 413124 - RNA, 19 nt, Artificial Sequence
  Description of Artificial Sequence: Synthetic oligonucleotide
  Antisense Strand to SEQ ID NO: 413123
caucuuacagagaaguagc

SEQ ID NO: 413125 - RNA, 19 nt, Artificial Sequence
  Description of Artificial Sequence: Synthetic oligonucleotide
  Sense Strand Starting at position 1203 of SEQ ID NO: 315420
ugcuucuucuaguuauuua

SEQ ID NO: 413126 - RNA, 19 nt, Artificial Sequence
  Description of Artificial Sequence: Synthetic oligonucleotide
  Antisense Strand to SEQ ID NO: 413125
uaaauaacuagaagaagca

SEQ ID NO: 413127 - RNA, 19 nt, Artificial Sequence
  Description of Artificial Sequence: Synthetic oligonucleotide
  Sense Strand Starting at position 1203 of SEQ ID NO: 315524
uaggauuacugagucaaac

SEQ ID NO: 413128 - RNA, 19 nt, Artificial Sequence
  Description of Artificial Sequence: Synthetic oligonucleotide
  Antisense Strand to SEQ ID NO: 413127
guuugacucaguaauccua

SEQ ID NO: 413129 - RNA, 19 nt, Artificial Sequence
  Description of Artificial Sequence: Synthetic oligonucleotide
  Sense Strand Starting at position 1203 of SEQ ID NO: 315600
gacauuuauuuguagugca

SEQ ID NO: 413130 - RNA, 19 nt, Artificial Sequence
  Description of Artificial Sequence: Synthetic oligonucleotide
  Antisense Strand to SEQ ID NO: 413129
ugcacuacaaauaaauguc

SEQ ID NO: 413131 - RNA, 19 nt, Artificial Sequence
  Description of Artificial Sequence: Synthetic oligonucleotide
  Sense Strand Starting at position 1203 of SEQ ID NO: 315887
cugaguugccaacaugauu

SEQ ID NO: 413132 - RNA, 19 nt, Artificial Sequence
  Description of Artificial Sequence: Synthetic oligonucleotide
  Antisense Strand to SEQ ID NO: 413131
aaucauguuggcaacucag

SEQ ID NO: 413133 - RNA, 19 nt, Artificial Sequence
  Description of Artificial Sequence: Synthetic oligonucleotide
  Sense Strand Starting at position 1203 of SEQ ID NO: 316007
auuauuagggucuaaugua

SEQ ID NO: 413134 - RNA, 19 nt, Artificial Sequence
  Description of Artificial Sequence: Synthetic oligonucleotide
  Antisense Strand to SEQ ID NO: 413133
uacauuagacccuaauaau

SEQ ID NO: 413135 - RNA, 19 nt, Artificial Sequence
  Description of Artificial Sequence: Synthetic oligonucleotide
  Sense Strand Starting at position 1203 of SEQ ID NO: 316014
gggucuaauguaggacuau

SEQ ID NO: 413136 - RNA, 19 nt, Artificial Sequence
  Description of Artificial Sequence: Synthetic oligonucleotide
  Antisense Strand to SEQ ID NO: 413135
auaguccuacauuagaccc

SEQ ID NO: 413137 - RNA, 19 nt, Artificial Sequence
  Description of Artificial Sequence: Synthetic oligonucleotide
  Sense Strand Starting at position 1203 of SEQ ID NO: 316084
ggcuaucuacuacauguca

SEQ ID NO: 413138 - RNA, 19 nt, Artificial Sequence
  Description of Artificial Sequence: Synthetic oligonucleotide
  Antisense Strand to SEQ ID NO: 413137
ugacauguaguagauagcc

SEQ ID NO: 413139 - RNA, 19 nt, Artificial Sequence
  Description of Artificial Sequence: Synthetic oligonucleotide
  Sense Strand Starting at position 1203 of SEQ ID NO: 316514
cccaaaugccagcagauua

SEQ ID NO: 413140 - RNA, 19 nt, Artificial Sequence
  Description of Artificial Sequence: Synthetic oligonucleotide
  Antisense Strand to SEQ ID NO: 413139
uaaucugcuggcauuuggg

SEQ ID NO: 413141 - RNA, 19 nt, Artificial Sequence
  Description of Artificial Sequence: Synthetic oligonucleotide
  Sense Strand Starting at position 1203 of SEQ ID NO: 316676
uuaccaugaugccugagaa

SEQ ID NO: 413142 - RNA, 19 nt, Artificial Sequence
  Description of Artificial Sequence: Synthetic oligonucleotide
  Antisense Strand to SEQ ID NO: 413141
uucucaggcaucaugguaa

SEQ ID NO: 413143 - RNA, 19 nt, Artificial Sequence
  Description of Artificial Sequence: Synthetic oligonucleotide
  Sense Strand Starting at position 1203 of SEQ ID NO: 316784
ucacgauuauacuccaaag

SEQ ID NO: 413144 - RNA, 19 nt, Artificial Sequence
  Description of Artificial Sequence: Synthetic oligonucleotide
  Antisense Strand to SEQ ID NO: 413143
cuuuggaguauaaucguga

SEQ ID NO: 413145 - RNA, 19 nt, Artificial Sequence
  Description of Artificial Sequence: Synthetic oligonucleotide
  Sense Strand Starting at position 1203 of SEQ ID NO: 316786
acgauuauacuccaaagug

SEQ ID NO: 413146 - RNA, 19 nt, Artificial Sequence
  Description of Artificial Sequence: Synthetic oligonucleotide
  Antisense Strand to SEQ ID NO: 413145
cacuuuggaguauaaucgu

SEQ ID NO: 413147 - RNA, 19 nt, Artificial Sequence
  Description of Artificial Sequence: Synthetic oligonucleotide
  Sense Strand Starting at position 1203 of SEQ ID NO: 316867
uuagaaccugcgggagauu

SEQ ID NO: 413148 - RNA, 19 nt, Artificial Sequence
  Description of Artificial Sequence: Synthetic oligonucleotide
  Antisense Strand to SEQ ID NO: 413147
aaucucccgcagguucuaa

SEQ ID NO: 413149 - RNA, 19 nt, Artificial Sequence
  Description of Artificial Sequence: Synthetic oligonucleotide
  Sense Strand Starting at position 1203 of SEQ ID NO: 317057
acaaucucagugugaaaua

SEQ ID NO: 413150 - RNA, 19 nt, Artificial Sequence
  Description of Artificial Sequence: Synthetic oligonucleotide
  Antisense Strand to SEQ ID NO: 413149
uauuucacacugagauugu

SEQ ID NO: 413151 - RNA, 19 nt, Artificial Sequence
  Description of Artificial Sequence: Synthetic oligonucleotide
  Sense Strand Starting at position 1203 of SEQ ID NO: 317068
gugaaauacugguuuacug

SEQ ID NO: 413152 - RNA, 19 nt, Artificial Sequence
  Description of Artificial Sequence: Synthetic oligonucleotide
  Antisense Strand to SEQ ID NO: 413151
caguaaaccaguauuucac

SEQ ID NO: 413153 - RNA, 19 nt, Artificial Sequence
  Description of Artificial Sequence: Synthetic oligonucleotide
  Sense Strand Starting at position 1203 of SEQ ID NO: 317070
gaaauacugguuuacuguu

SEQ ID NO: 413154 - RNA, 19 nt, Artificial Sequence
  Description of Artificial Sequence: Synthetic oligonucleotide
  Antisense Strand to SEQ ID NO: 413153
aacaguaaaccaguauuuc

SEQ ID NO: 413155 - RNA, 19 nt, Artificial Sequence
  Description of Artificial Sequence: Synthetic oligonucleotide
  Sense Strand Starting at position 1203 of SEQ ID NO: 317229
uuguguuaagaaggaaguu

SEQ ID NO: 413156 - RNA, 19 nt, Artificial Sequence
  Description of Artificial Sequence: Synthetic oligonucleotide
  Antisense Strand to SEQ ID NO: 413155
aacuuccuucuuaacacaa

SEQ ID NO: 413157 - RNA, 19 nt, Artificial Sequence
  Description of Artificial Sequence: Synthetic oligonucleotide
  Sense Strand Starting at position 1203 of SEQ ID NO: 317318
caaggaggcuuauauuuag

SEQ ID NO: 413158 - RNA, 19 nt, Artificial Sequence
  Description of Artificial Sequence: Synthetic oligonucleotide
  Antisense Strand to SEQ ID NO: 413157
cuaaauauaagccuccuug

SEQ ID NO: 413159 - RNA, 19 nt, Artificial Sequence
  Description of Artificial Sequence: Synthetic oligonucleotide
  Sense Strand Starting at position 1203 of SEQ ID NO: 317464
gagaaagugacugguggau

SEQ ID NO: 413160 - RNA, 19 nt, Artificial Sequence
  Description of Artificial Sequence: Synthetic oligonucleotide
  Antisense Strand to SEQ ID NO: 413159
auccaccagucacuuucuc

SEQ ID NO: 413161 - RNA, 19 nt, Artificial Sequence
  Description of Artificial Sequence: Synthetic oligonucleotide
  Sense Strand Starting at position 1203 of SEQ ID NO: 317470
gugacugguggaugagaaa

SEQ ID NO: 413162 - RNA, 19 nt, Artificial Sequence
  Description of Artificial Sequence: Synthetic oligonucleotide
  Antisense Strand to SEQ ID NO: 413161
uuucucauccaccagucac

SEQ ID NO: 413163 - RNA, 19 nt, Artificial Sequence
  Description of Artificial Sequence: Synthetic oligonucleotide
  Sense Strand Starting at position 1203 of SEQ ID NO: 317501
ugguuagaucaguacagcu

SEQ ID NO: 413164 - RNA, 19 nt, Artificial Sequence
  Description of Artificial Sequence: Synthetic oligonucleotide
  Antisense Strand to SEQ ID NO: 413163
agcuguacugaucuaacca

SEQ ID NO: 413165 - RNA, 19 nt, Artificial Sequence
  Description of Artificial Sequence: Synthetic oligonucleotide
  Sense Strand Starting at position 1203 of SEQ ID NO: 317952
ccagguuccaaagagguuu

SEQ ID NO: 413166 - RNA, 19 nt, Artificial Sequence
  Description of Artificial Sequence: Synthetic oligonucleotide
  Antisense Strand to SEQ ID NO: 413165
aaaccucuuuggaaccugg

SEQ ID NO: 413167 - RNA, 19 nt, Artificial Sequence
  Description of Artificial Sequence: Synthetic oligonucleotide
  Sense Strand Starting at position 1203 of SEQ ID NO: 318016
uugaucuaagugcaucaaa

SEQ ID NO: 413168 - RNA, 19 nt, Artificial Sequence
  Description of Artificial Sequence: Synthetic oligonucleotide
  Antisense Strand to SEQ ID NO: 413167
uuugaugcacuuagaucaa

SEQ ID NO: 413169 - RNA, 19 nt, Artificial Sequence
  Description of Artificial Sequence: Synthetic oligonucleotide
  Sense Strand Starting at position 1203 of SEQ ID NO: 318090
uuacuagaguuccugggau

SEQ ID NO: 413170 - RNA, 19 nt, Artificial Sequence
  Description of Artificial Sequence: Synthetic oligonucleotide
  Antisense Strand to SEQ ID NO: 413169
aucccaggaacucuaguaa

SEQ ID NO: 413171 - RNA, 19 nt, Artificial Sequence
  Description of Artificial Sequence: Synthetic oligonucleotide
  Sense Strand Starting at position 1203 of SEQ ID NO: 318092
acuagaguuccugggauga

SEQ ID NO: 413172 - RNA, 19 nt, Artificial Sequence
  Description of Artificial Sequence: Synthetic oligonucleotide
  Antisense Strand to SEQ ID NO: 413171
ucaucccaggaacucuagu

SEQ ID NO: 413173 - RNA, 19 nt, Artificial Sequence
  Description of Artificial Sequence: Synthetic oligonucleotide
  Sense Strand Starting at position 1203 of SEQ ID NO: 318117
agagaauaacauuguuggu

SEQ ID NO: 413174 - RNA, 19 nt, Artificial Sequence
  Description of Artificial Sequence: Synthetic oligonucleotide
  Antisense Strand to SEQ ID NO: 413173
accaacaauguuauucucu

SEQ ID NO: 413175 - RNA, 19 nt, Artificial Sequence
  Description of Artificial Sequence: Synthetic oligonucleotide
  Sense Strand Starting at position 1203 of SEQ ID NO: 318286
uaaugaugacucggaucau

SEQ ID NO: 413176 - RNA, 19 nt, Artificial Sequence
  Description of Artificial Sequence: Synthetic oligonucleotide
  Antisense Strand to SEQ ID NO: 413175
augauccgagucaucauua

SEQ ID NO: 413177 - RNA, 19 nt, Artificial Sequence
  Description of Artificial Sequence: Synthetic oligonucleotide
  Sense Strand Starting at position 1203 of SEQ ID NO: 318663
ggauguggguauaagagaa

SEQ ID NO: 413178 - RNA, 19 nt, Artificial Sequence
  Description of Artificial Sequence: Synthetic oligonucleotide
  Antisense Strand to SEQ ID NO: 413177
uucucuuauacccacaucc

SEQ ID NO: 413179 - RNA, 19 nt, Artificial Sequence
  Description of Artificial Sequence: Synthetic oligonucleotide
  Sense Strand Starting at position 1203 of SEQ ID NO: 318789
gaaugauauggucaguuuc

SEQ ID NO: 413180 - RNA, 19 nt, Artificial Sequence
  Description of Artificial Sequence: Synthetic oligonucleotide
  Antisense Strand to SEQ ID NO: 413179
gaaacugaccauaucauuc

SEQ ID NO: 413181 - RNA, 19 nt, Artificial Sequence
  Description of Artificial Sequence: Synthetic oligonucleotide
  Sense Strand Starting at position 1203 of SEQ ID NO: 318862
ggcagcuggauauacaaau

SEQ ID NO: 413182 - RNA, 19 nt, Artificial Sequence
  Description of Artificial Sequence: Synthetic oligonucleotide
  Antisense Strand to SEQ ID NO: 413181
auuuguauauccagcugcc

SEQ ID NO: 413183 - RNA, 19 nt, Artificial Sequence
  Description of Artificial Sequence: Synthetic oligonucleotide
  Sense Strand Starting at position 1203 of SEQ ID NO: 318892
ggaagaggucugggugaca

SEQ ID NO: 413184 - RNA, 19 nt, Artificial Sequence
  Description of Artificial Sequence: Synthetic oligonucleotide
  Antisense Strand to SEQ ID NO: 413183
ugucacccagaccucuucc

SEQ ID NO: 413185 - RNA, 19 nt, Artificial Sequence
  Description of Artificial Sequence: Synthetic oligonucleotide
  Sense Strand Starting at position 1203 of SEQ ID NO: 318920
gacaguugucagcauauaa

SEQ ID NO: 413186 - RNA, 19 nt, Artificial Sequence
  Description of Artificial Sequence: Synthetic oligonucleotide
  Antisense Strand to SEQ ID NO: 413185
uuauaugcugacaacuguc

SEQ ID NO: 413187 - RNA, 19 nt, Artificial Sequence
  Description of Artificial Sequence: Synthetic oligonucleotide
  Sense Strand Starting at position 1203 of SEQ ID NO: 318963
uaaggaaaugcauguugau

SEQ ID NO: 413188 - RNA, 19 nt, Artificial Sequence
  Description of Artificial Sequence: Synthetic oligonucleotide
  Antisense Strand to SEQ ID NO: 413187
aucaacaugcauuuccuua

SEQ ID NO: 413189 - RNA, 19 nt, Artificial Sequence
  Description of Artificial Sequence: Synthetic oligonucleotide
  Sense Strand Starting at position 1203 of SEQ ID NO: 319069
gccagugagccagaaauga

SEQ ID NO: 413190 - RNA, 19 nt, Artificial Sequence
  Description of Artificial Sequence: Synthetic oligonucleotide
  Antisense Strand to SEQ ID NO: 413189
ucauuucuggcucacuggc

SEQ ID NO: 413191 - RNA, 19 nt, Artificial Sequence
  Description of Artificial Sequence: Synthetic oligonucleotide
  Sense Strand Starting at position 1203 of SEQ ID NO: 319091
ucaggagcuuauucucaaa

SEQ ID NO: 413192 - RNA, 19 nt, Artificial Sequence
  Description of Artificial Sequence: Synthetic oligonucleotide
  Antisense Strand to SEQ ID NO: 413191
uuugagaauaagcuccuga

SEQ ID NO: 413193 - RNA, 19 nt, Artificial Sequence
  Description of Artificial Sequence: Synthetic oligonucleotide
  Sense Strand Starting at position 1203 of SEQ ID NO: 319103
ucucaaaggugacuuucua

SEQ ID NO: 413194 - RNA, 19 nt, Artificial Sequence
  Description of Artificial Sequence: Synthetic oligonucleotide
  Antisense Strand to SEQ ID NO: 413193
uagaaagucaccuuugaga

SEQ ID NO: 413195 - RNA, 19 nt, Artificial Sequence
  Description of Artificial Sequence: Synthetic oligonucleotide
  Sense Strand Starting at position 1203 of SEQ ID NO: 319131
aggcgugaucaacaaaguu

SEQ ID NO: 413196 - RNA, 19 nt, Artificial Sequence
  Description of Artificial Sequence: Synthetic oligonucleotide
  Antisense Strand to SEQ ID NO: 413195
aacuuuguugaucacgccu

SEQ ID NO: 413197 - RNA, 19 nt, Artificial Sequence
  Description of Artificial Sequence: Synthetic oligonucleotide
  Sense Strand Starting at position 1203 of SEQ ID NO: 319163
gggcacaucauacgaaaga

SEQ ID NO: 413198 - RNA, 19 nt, Artificial Sequence
  Description of Artificial Sequence: Synthetic oligonucleotide
  Antisense Strand to SEQ ID NO: 413197
ucuuucguaugaugugccc

SEQ ID NO: 413199 - RNA, 19 nt, Artificial Sequence
  Description of Artificial Sequence: Synthetic oligonucleotide
  Sense Strand Starting at position 1204 of SEQ ID NO: 315387
ugcggcuucgugugaauuu

SEQ ID NO: 413200 - RNA, 19 nt, Artificial Sequence
  Description of Artificial Sequence: Synthetic oligonucleotide
  Antisense Strand to SEQ ID NO: 413199
aaauucacacgaagccgca

SEQ ID NO: 413201 - RNA, 19 nt, Artificial Sequence
  Description of Artificial Sequence: Synthetic oligonucleotide
  Sense Strand Starting at position 1204 of SEQ ID NO: 315465
aaaugugaaccaggagguu

SEQ ID NO: 413202 - RNA, 19 nt, Artificial Sequence
  Description of Artificial Sequence: Synthetic oligonucleotide
  Antisense Strand to SEQ ID NO: 413201
aaccuccugguucacauuu

SEQ ID NO: 413203 - RNA, 19 nt, Artificial Sequence
  Description of Artificial Sequence: Synthetic oligonucleotide
  Sense Strand Starting at position 1204 of SEQ ID NO: 315495
ggccuaauuugauaucuga

SEQ ID NO: 413204 - RNA, 19 nt, Artificial Sequence
  Description of Artificial Sequence: Synthetic oligonucleotide
  Antisense Strand to SEQ ID NO: 413203
ucagauaucaaauuaggcc

SEQ ID NO: 413205 - RNA, 19 nt, Artificial Sequence
  Description of Artificial Sequence: Synthetic oligonucleotide
  Sense Strand Starting at position 1204 of SEQ ID NO: 315519
caagcaagaucagaaggua

SEQ ID NO: 413206 - RNA, 19 nt, Artificial Sequence
  Description of Artificial Sequence: Synthetic oligonucleotide
  Antisense Strand to SEQ ID NO: 413205
uaccuucugaucuugcuug

SEQ ID NO: 413207 - RNA, 19 nt, Artificial Sequence
  Description of Artificial Sequence: Synthetic oligonucleotide
  Sense Strand Starting at position 1204 of SEQ ID NO: 315600
cacgucaucggcuagaugu

SEQ ID NO: 413208 - RNA, 19 nt, Artificial Sequence
  Description of Artificial Sequence: Synthetic oligonucleotide
  Antisense Strand to SEQ ID NO: 413207
acaucuagccgaugacgug

SEQ ID NO: 413209 - RNA, 19 nt, Artificial Sequence
  Description of Artificial Sequence: Synthetic oligonucleotide
  Sense Strand Starting at position 1204 of SEQ ID NO: 315608
cggcuagauguccaggcaa

SEQ ID NO: 413210 - RNA, 19 nt, Artificial Sequence
  Description of Artificial Sequence: Synthetic oligonucleotide
  Antisense Strand to SEQ ID NO: 413209
uugccuggacaucuagccg

SEQ ID NO: 413211 - RNA, 19 nt, Artificial Sequence
  Description of Artificial Sequence: Synthetic oligonucleotide
  Sense Strand Starting at position 1204 of SEQ ID NO: 315610
gcuagauguccaggcaaca

SEQ ID NO: 413212 - RNA, 19 nt, Artificial Sequence
  Description of Artificial Sequence: Synthetic oligonucleotide
  Antisense Strand to SEQ ID NO: 413211
uguugccuggacaucuagc

SEQ ID NO: 413213 - RNA, 19 nt, Artificial Sequence
  Description of Artificial Sequence: Synthetic oligonucleotide
  Sense Strand Starting at position 1204 of SEQ ID NO: 315628
aacagaagugaucggcuca

SEQ ID NO: 413214 - RNA, 19 nt, Artificial Sequence
  Description of Artificial Sequence: Synthetic oligonucleotide
  Antisense Strand to SEQ ID NO: 413213
ugagccgaucacuucuguu

SEQ ID NO: 413215 - RNA, 19 nt, Artificial Sequence
  Description of Artificial Sequence: Synthetic oligonucleotide
  Sense Strand Starting at position 1204 of SEQ ID NO: 315629
acagaagugaucggcucaa

SEQ ID NO: 413216 - RNA, 19 nt, Artificial Sequence
  Description of Artificial Sequence: Synthetic oligonucleotide
  Antisense Strand to SEQ ID NO: 413215
uugagccgaucacuucugu

SEQ ID NO: 413217 - RNA, 19 nt, Artificial Sequence
  Description of Artificial Sequence: Synthetic oligonucleotide
  Sense Strand Starting at position 1204 of SEQ ID NO: 315641
ggcucaauuccauggagga

SEQ ID NO: 413218 - RNA, 19 nt, Artificial Sequence
  Description of Artificial Sequence: Synthetic oligonucleotide
  Antisense Strand to SEQ ID NO: 413217
uccuccauggaauugagcc

SEQ ID NO: 413219 - RNA, 19 nt, Artificial Sequence
  Description of Artificial Sequence: Synthetic oligonucleotide
  Sense Strand Starting at position 1204 of SEQ ID NO: 315642
gcucaauuccauggaggaa

SEQ ID NO: 413220 - RNA, 19 nt, Artificial Sequence
  Description of Artificial Sequence: Synthetic oligonucleotide
  Antisense Strand to SEQ ID NO: 413219
uuccuccauggaauugagc

SEQ ID NO: 413221 - RNA, 19 nt, Artificial Sequence
  Description of Artificial Sequence: Synthetic oligonucleotide
  Sense Strand Starting at position 1204 of SEQ ID NO: 315734
ucggauauuuauuaaguga

SEQ ID NO: 413222 - RNA, 19 nt, Artificial Sequence
  Description of Artificial Sequence: Synthetic oligonucleotide
  Antisense Strand to SEQ ID NO: 413221
ucacuuaauaaauauccga

SEQ ID NO: 413223 - RNA, 19 nt, Artificial Sequence
  Description of Artificial Sequence: Synthetic oligonucleotide
  Sense Strand Starting at position 1204 of SEQ ID NO: 316163
aguaaugucaggugacuau

SEQ ID NO: 413224 - RNA, 19 nt, Artificial Sequence
  Description of Artificial Sequence: Synthetic oligonucleotide
  Antisense Strand to SEQ ID NO: 413223
auagucaccugacauuacu

SEQ ID NO: 413225 - RNA, 19 nt, Artificial Sequence
  Description of Artificial Sequence: Synthetic oligonucleotide
  Sense Strand Starting at position 1204 of SEQ ID NO: 316200
uuguuacacugucuuucua

SEQ ID NO: 413226 - RNA, 19 nt, Artificial Sequence
  Description of Artificial Sequence: Synthetic oligonucleotide
  Antisense Strand to SEQ ID NO: 413225
uagaaagacaguguaacaa

SEQ ID NO: 413227 - RNA, 19 nt, Artificial Sequence
  Description of Artificial Sequence: Synthetic oligonucleotide
  Sense Strand Starting at position 1204 of SEQ ID NO: 316202
guuacacugucuuucuaaa

SEQ ID NO: 413228 - RNA, 19 nt, Artificial Sequence
  Description of Artificial Sequence: Synthetic oligonucleotide
  Antisense Strand to SEQ ID NO: 413227
uuuagaaagacaguguaac

SEQ ID NO: 413229 - RNA, 19 nt, Artificial Sequence
  Description of Artificial Sequence: Synthetic oligonucleotide
  Sense Strand Starting at position 1204 of SEQ ID NO: 316437
ugcgcacgacuucaguaaa

SEQ ID NO: 413230 - RNA, 19 nt, Artificial Sequence
  Description of Artificial Sequence: Synthetic oligonucleotide
  Antisense Strand to SEQ ID NO: 413229
uuuacugaagucgugcgca

SEQ ID NO: 413231 - RNA, 19 nt, Artificial Sequence
  Description of Artificial Sequence: Synthetic oligonucleotide
  Sense Strand Starting at position 1204 of SEQ ID NO: 316502
cgccaagucaagggucuaa

SEQ ID NO: 413232 - RNA, 19 nt, Artificial Sequence
  Description of Artificial Sequence: Synthetic oligonucleotide
  Antisense Strand to SEQ ID NO: 413231
uuagacccuugacuuggcg

SEQ ID NO: 413233 - RNA, 19 nt, Artificial Sequence
  Description of Artificial Sequence: Synthetic oligonucleotide
  Sense Strand Starting at position 1204 of SEQ ID NO: 316522
agcacauuugggugucuca

SEQ ID NO: 413234 - RNA, 19 nt, Artificial Sequence
  Description of Artificial Sequence: Synthetic oligonucleotide
  Antisense Strand to SEQ ID NO: 413233
ugagacacccaaaugugcu

SEQ ID NO: 413235 - RNA, 19 nt, Artificial Sequence
  Description of Artificial Sequence: Synthetic oligonucleotide
  Sense Strand Starting at position 1204 of SEQ ID NO: 316696
gaaggcaaggauugaguuu

SEQ ID NO: 413236 - RNA, 19 nt, Artificial Sequence
  Description of Artificial Sequence: Synthetic oligonucleotide
  Antisense Strand to SEQ ID NO: 413235
aaacucaauccuugccuuc

SEQ ID NO: 413237 - RNA, 19 nt, Artificial Sequence
  Description of Artificial Sequence: Synthetic oligonucleotide
  Sense Strand Starting at position 1204 of SEQ ID NO: 316889
caggaagaguauucuaggu

SEQ ID NO: 413238 - RNA, 19 nt, Artificial Sequence
  Description of Artificial Sequence: Synthetic oligonucleotide
  Antisense Strand to SEQ ID NO: 413237
accuagaauacucuuccug

SEQ ID NO: 413239 - RNA, 19 nt, Artificial Sequence
  Description of Artificial Sequence: Synthetic oligonucleotide
  Sense Strand Starting at position 1204 of SEQ ID NO: 316893
aagaguauucuaggugcaa

SEQ ID NO: 413240 - RNA, 19 nt, Artificial Sequence
  Description of Artificial Sequence: Synthetic oligonucleotide
  Antisense Strand to SEQ ID NO: 413239
uugcaccuagaauacucuu

SEQ ID NO: 413241 - RNA, 19 nt, Artificial Sequence
  Description of Artificial Sequence: Synthetic oligonucleotide
  Sense Strand Starting at position 1204 of SEQ ID NO: 316894
agaguauucuaggugcaaa

SEQ ID NO: 413242 - RNA, 19 nt, Artificial Sequence
  Description of Artificial Sequence: Synthetic oligonucleotide
  Antisense Strand to SEQ ID NO: 413241
uuugcaccuagaauacucu

SEQ ID NO: 413243 - RNA, 19 nt, Artificial Sequence
  Description of Artificial Sequence: Synthetic oligonucleotide
  Sense Strand Starting at position 1204 of SEQ ID NO: 316895
gaguauucuaggugcaaag

SEQ ID NO: 413244 - RNA, 19 nt, Artificial Sequence
  Description of Artificial Sequence: Synthetic oligonucleotide
  Antisense Strand to SEQ ID NO: 413243
cuuugcaccuagaauacuc

SEQ ID NO: 413245 - RNA, 19 nt, Artificial Sequence
  Description of Artificial Sequence: Synthetic oligonucleotide
  Sense Strand Starting at position 1204 of SEQ ID NO: 317184
uugucuuuccaggacucuu

SEQ ID NO: 413246 - RNA, 19 nt, Artificial Sequence
  Description of Artificial Sequence: Synthetic oligonucleotide
  Antisense Strand to SEQ ID NO: 413245
aagaguccuggaaagacaa

SEQ ID NO: 413247 - RNA, 19 nt, Artificial Sequence
  Description of Artificial Sequence: Synthetic oligonucleotide
  Sense Strand Starting at position 1204 of SEQ ID NO: 317214
cagggaggcucuguauaua

SEQ ID NO: 413248 - RNA, 19 nt, Artificial Sequence
  Description of Artificial Sequence: Synthetic oligonucleotide
  Antisense Strand to SEQ ID NO: 413247
uauauacagagccucccug

SEQ ID NO: 413249 - RNA, 19 nt, Artificial Sequence
  Description of Artificial Sequence: Synthetic oligonucleotide
  Sense Strand Starting at position 1204 of SEQ ID NO: 317223
ucuguauauacguagaggu

SEQ ID NO: 413250 - RNA, 19 nt, Artificial Sequence
  Description of Artificial Sequence: Synthetic oligonucleotide
  Antisense Strand to SEQ ID NO: 413249
accucuacguauauacaga

SEQ ID NO: 413251 - RNA, 19 nt, Artificial Sequence
  Description of Artificial Sequence: Synthetic oligonucleotide
  Sense Strand Starting at position 1204 of SEQ ID NO: 317225
uguauauacguagagguca

SEQ ID NO: 413252 - RNA, 19 nt, Artificial Sequence
  Description of Artificial Sequence: Synthetic oligonucleotide
  Antisense Strand to SEQ ID NO: 413251
ugaccucuacguauauaca

SEQ ID NO: 413253 - RNA, 19 nt, Artificial Sequence
  Description of Artificial Sequence: Synthetic oligonucleotide
  Sense Strand Starting at position 1204 of SEQ ID NO: 317397
cuccgcuguccugaugagu

SEQ ID NO: 413254 - RNA, 19 nt, Artificial Sequence
  Description of Artificial Sequence: Synthetic oligonucleotide
  Antisense Strand to SEQ ID NO: 413253
acucaucaggacagcggag

SEQ ID NO: 413255 - RNA, 19 nt, Artificial Sequence
  Description of Artificial Sequence: Synthetic oligonucleotide
  Sense Strand Starting at position 1204 of SEQ ID NO: 317406
ccugaugagucacuggaug

SEQ ID NO: 413256 - RNA, 19 nt, Artificial Sequence
  Description of Artificial Sequence: Synthetic oligonucleotide
  Antisense Strand to SEQ ID NO: 413255
cauccagugacucaucagg

SEQ ID NO: 413257 - RNA, 19 nt, Artificial Sequence
  Description of Artificial Sequence: Synthetic oligonucleotide
  Sense Strand Starting at position 1204 of SEQ ID NO: 317408
ugaugagucacuggaugca

SEQ ID NO: 413258 - RNA, 19 nt, Artificial Sequence
  Description of Artificial Sequence: Synthetic oligonucleotide
  Antisense Strand to SEQ ID NO: 413257
ugcauccagugacucauca

SEQ ID NO: 413259 - RNA, 19 nt, Artificial Sequence
  Description of Artificial Sequence: Synthetic oligonucleotide
  Sense Strand Starting at position 1204 of SEQ ID NO: 317417
acuggaugcacccgugaga

SEQ ID NO: 413260 - RNA, 19 nt, Artificial Sequence
  Description of Artificial Sequence: Synthetic oligonucleotide
  Antisense Strand to SEQ ID NO: 413259
ucucacgggugcauccagu

SEQ ID NO: 413261 - RNA, 19 nt, Artificial Sequence
  Description of Artificial Sequence: Synthetic oligonucleotide
  Sense Strand Starting at position 1204 of SEQ ID NO: 317513
cgaagaauuucggcucuuu

SEQ ID NO: 413262 - RNA, 19 nt, Artificial Sequence
  Description of Artificial Sequence: Synthetic oligonucleotide
  Antisense Strand to SEQ ID NO: 413261
aaagagccgaaauucuucg

SEQ ID NO: 413263 - RNA, 19 nt, Artificial Sequence
  Description of Artificial Sequence: Synthetic oligonucleotide
  Sense Strand Starting at position 1204 of SEQ ID NO: 317624
guacuagacgucuaacuuu

SEQ ID NO: 413264 - RNA, 19 nt, Artificial Sequence
  Description of Artificial Sequence: Synthetic oligonucleotide
  Antisense Strand to SEQ ID NO: 413263
aaaguuagacgucuaguac

SEQ ID NO: 413265 - RNA, 19 nt, Artificial Sequence
  Description of Artificial Sequence: Synthetic oligonucleotide
  Sense Strand Starting at position 1204 of SEQ ID NO: 318015
gugggagauccgugacccu

SEQ ID NO: 413266 - RNA, 19 nt, Artificial Sequence
  Description of Artificial Sequence: Synthetic oligonucleotide
  Antisense Strand to SEQ ID NO: 413265
agggucacggaucucccac

SEQ ID NO: 413267 - RNA, 19 nt, Artificial Sequence
  Description of Artificial Sequence: Synthetic oligonucleotide
  Sense Strand Starting at position 1204 of SEQ ID NO: 318092
auuucuuuacuccgaguua

SEQ ID NO: 413268 - RNA, 19 nt, Artificial Sequence
  Description of Artificial Sequence: Synthetic oligonucleotide
  Antisense Strand to SEQ ID NO: 413267
uaacucggaguaaagaaau

SEQ ID NO: 413269 - RNA, 19 nt, Artificial Sequence
  Description of Artificial Sequence: Synthetic oligonucleotide
  Sense Strand Starting at position 1204 of SEQ ID NO: 318108
uuagguacuucuuucucua

SEQ ID NO: 413270 - RNA, 19 nt, Artificial Sequence
  Description of Artificial Sequence: Synthetic oligonucleotide
  Antisense Strand to SEQ ID NO: 413269
uagagaaagaaguaccuaa

SEQ ID NO: 413271 - RNA, 19 nt, Artificial Sequence
  Description of Artificial Sequence: Synthetic oligonucleotide
  Sense Strand Starting at position 1204 of SEQ ID NO: 318504
aauguuaaagucugaugaa

SEQ ID NO: 413272 - RNA, 19 nt, Artificial Sequence
  Description of Artificial Sequence: Synthetic oligonucleotide
  Antisense Strand to SEQ ID NO: 413271
uucaucagacuuuaacauu

SEQ ID NO: 413273 - RNA, 19 nt, Artificial Sequence
  Description of Artificial Sequence: Synthetic oligonucleotide
  Sense Strand Starting at position 1204 of SEQ ID NO: 318507
guuaaagucugaugaauuu

SEQ ID NO: 413274 - RNA, 19 nt, Artificial Sequence
  Description of Artificial Sequence: Synthetic oligonucleotide
  Antisense Strand to SEQ ID NO: 413273
aaauucaucagacuuuaac

SEQ ID NO: 413275 - RNA, 19 nt, Artificial Sequence
  Description of Artificial Sequence: Synthetic oligonucleotide
  Sense Strand Starting at position 1204 of SEQ ID NO: 318528
acauguauacccuggugaa

SEQ ID NO: 413276 - RNA, 19 nt, Artificial Sequence
  Description of Artificial Sequence: Synthetic oligonucleotide
  Antisense Strand to SEQ ID NO: 413275
uucaccaggguauacaugu

SEQ ID NO: 413277 - RNA, 19 nt, Artificial Sequence
  Description of Artificial Sequence: Synthetic oligonucleotide
  Sense Strand Starting at position 1204 of SEQ ID NO: 318529
cauguauacccuggugaac

SEQ ID NO: 413278 - RNA, 19 nt, Artificial Sequence
  Description of Artificial Sequence: Synthetic oligonucleotide
  Antisense Strand to SEQ ID NO: 413277
guucaccaggguauacaug

SEQ ID NO: 413279 - RNA, 19 nt, Artificial Sequence
  Description of Artificial Sequence: Synthetic oligonucleotide
  Sense Strand Starting at position 1205 of SEQ ID NO: 315344
gaucgauggccgcaugaaa

SEQ ID NO: 413280 - RNA, 19 nt, Artificial Sequence
  Description of Artificial Sequence: Synthetic oligonucleotide
  Antisense Strand to SEQ ID NO: 413279
uuucaugcggccaucgauc

SEQ ID NO: 413281 - RNA, 19 nt, Artificial Sequence
  Description of Artificial Sequence: Synthetic oligonucleotide
  Sense Strand Starting at position 1205 of SEQ ID NO: 315547
ggaaaugacuuguccaagu

SEQ ID NO: 413282 - RNA, 19 nt, Artificial Sequence
  Description of Artificial Sequence: Synthetic oligonucleotide
  Antisense Strand to SEQ ID NO: 413281
acuuggacaagucauuucc

SEQ ID NO: 413283 - RNA, 19 nt, Artificial Sequence
  Description of Artificial Sequence: Synthetic oligonucleotide
  Sense Strand Starting at position 1205 of SEQ ID NO: 315575
cucucaguggcagaggaau

SEQ ID NO: 413284 - RNA, 19 nt, Artificial Sequence
  Description of Artificial Sequence: Synthetic oligonucleotide
  Antisense Strand to SEQ ID NO: 413283
auuccucugccacugagag

SEQ ID NO: 413285 - RNA, 19 nt, Artificial Sequence
  Description of Artificial Sequence: Synthetic oligonucleotide
  Sense Strand Starting at position 1205 of SEQ ID NO: 315622
uugcauucuguauauggga

SEQ ID NO: 413286 - RNA, 19 nt, Artificial Sequence
  Description of Artificial Sequence: Synthetic oligonucleotide
  Antisense Strand to SEQ ID NO: 413285
ucccauauacagaaugcaa

SEQ ID NO: 413287 - RNA, 19 nt, Artificial Sequence
  Description of Artificial Sequence: Synthetic oligonucleotide
  Sense Strand Starting at position 1205 of SEQ ID NO: 315709
aaguaugagggcuauggua

SEQ ID NO: 413288 - RNA, 19 nt, Artificial Sequence
  Description of Artificial Sequence: Synthetic oligonucleotide
  Antisense Strand to SEQ ID NO: 413287
uaccauagcccucauacuu

SEQ ID NO: 413289 - RNA, 19 nt, Artificial Sequence
  Description of Artificial Sequence: Synthetic oligonucleotide
  Sense Strand Starting at position 1205 of SEQ ID NO: 315857
cagagcacccuggaguaau

SEQ ID NO: 413290 - RNA, 19 nt, Artificial Sequence
  Description of Artificial Sequence: Synthetic oligonucleotide
  Antisense Strand to SEQ ID NO: 413289
auuacuccagggugcucug

SEQ ID NO: 413291 - RNA, 19 nt, Artificial Sequence
  Description of Artificial Sequence: Synthetic oligonucleotide
  Sense Strand Starting at position 1205 of SEQ ID NO: 315892
caugguaacucaccgcaaa

SEQ ID NO: 413292 - RNA, 19 nt, Artificial Sequence
  Description of Artificial Sequence: Synthetic oligonucleotide
  Antisense Strand to SEQ ID NO: 413291
uuugcggugaguuaccaug

SEQ ID NO: 413293 - RNA, 19 nt, Artificial Sequence
  Description of Artificial Sequence: Synthetic oligonucleotide
  Sense Strand Starting at position 1205 of SEQ ID NO: 315893
augguaacucaccgcaaau

SEQ ID NO: 413294 - RNA, 19 nt, Artificial Sequence
  Description of Artificial Sequence: Synthetic oligonucleotide
  Antisense Strand to SEQ ID NO: 413293
auuugcggugaguuaccau

SEQ ID NO: 413295 - RNA, 19 nt, Artificial Sequence
  Description of Artificial Sequence: Synthetic oligonucleotide
  Sense Strand Starting at position 1205 of SEQ ID NO: 316143
uggaguguuauggaguacu

SEQ ID NO: 413296 - RNA, 19 nt, Artificial Sequence
  Description of Artificial Sequence: Synthetic oligonucleotide
  Antisense Strand to SEQ ID NO: 413295
aguacuccauaacacucca

SEQ ID NO: 413297 - RNA, 19 nt, Artificial Sequence
  Description of Artificial Sequence: Synthetic oligonucleotide
  Sense Strand Starting at position 1205 of SEQ ID NO: 316146
aguguuauggaguacuuag

SEQ ID NO: 413298 - RNA, 19 nt, Artificial Sequence
  Description of Artificial Sequence: Synthetic oligonucleotide
  Antisense Strand to SEQ ID NO: 413297
cuaaguacuccauaacacu

SEQ ID NO: 413299 - RNA, 19 nt, Artificial Sequence
  Description of Artificial Sequence: Synthetic oligonucleotide
  Sense Strand Starting at position 1205 of SEQ ID NO: 316225
uuuagaugguguguuagaa

SEQ ID NO: 413300 - RNA, 19 nt, Artificial Sequence
  Description of Artificial Sequence: Synthetic oligonucleotide
  Antisense Strand to SEQ ID NO: 413299
uucuaacacaccaucuaaa

SEQ ID NO: 413301 - RNA, 19 nt, Artificial Sequence
  Description of Artificial Sequence: Synthetic oligonucleotide
  Sense Strand Starting at position 1205 of SEQ ID NO: 316264
cucaauugucaugaagagu

SEQ ID NO: 413302 - RNA, 19 nt, Artificial Sequence
  Description of Artificial Sequence: Synthetic oligonucleotide
  Antisense Strand to SEQ ID NO: 413301
acucuucaugacaauugag

SEQ ID NO: 413303 - RNA, 19 nt, Artificial Sequence
  Description of Artificial Sequence: Synthetic oligonucleotide
  Sense Strand Starting at position 1205 of SEQ ID NO: 316439
cguggguuuguuguuguua

SEQ ID NO: 413304 - RNA, 19 nt, Artificial Sequence
  Description of Artificial Sequence: Synthetic oligonucleotide
  Antisense Strand to SEQ ID NO: 413303
uaacaacaacaaacccacg

SEQ ID NO: 413305 - RNA, 19 nt, Artificial Sequence
  Description of Artificial Sequence: Synthetic oligonucleotide
  Sense Strand Starting at position 1205 of SEQ ID NO: 316466
ggcacuaucuuguuggaau

SEQ ID NO: 413306 - RNA, 19 nt, Artificial Sequence
  Description of Artificial Sequence: Synthetic oligonucleotide
  Antisense Strand to SEQ ID NO: 413305
auuccaacaagauagugcc

SEQ ID NO: 413307 - RNA, 19 nt, Artificial Sequence
  Description of Artificial Sequence: Synthetic oligonucleotide
  Sense Strand Starting at position 1205 of SEQ ID NO: 316572
guaaauuuagcugacgugu

SEQ ID NO: 413308 - RNA, 19 nt, Artificial Sequence
  Description of Artificial Sequence: Synthetic oligonucleotide
  Antisense Strand to SEQ ID NO: 413307
acacgucagcuaaauuuac

SEQ ID NO: 413309 - RNA, 19 nt, Artificial Sequence
  Description of Artificial Sequence: Synthetic oligonucleotide
  Sense Strand Starting at position 1205 of SEQ ID NO: 317288
auuguugcaaucgaagaca

SEQ ID NO: 413310 - RNA, 19 nt, Artificial Sequence
  Description of Artificial Sequence: Synthetic oligonucleotide
  Antisense Strand to SEQ ID NO: 413309
ugucuucgauugcaacaau

SEQ ID NO: 413311 - RNA, 19 nt, Artificial Sequence
  Description of Artificial Sequence: Synthetic oligonucleotide
  Sense Strand Starting at position 1205 of SEQ ID NO: 317415
gaguuacauccugguuaaa

SEQ ID NO: 413312 - RNA, 19 nt, Artificial Sequence
  Description of Artificial Sequence: Synthetic oligonucleotide
  Antisense Strand to SEQ ID NO: 413311
uuuaaccaggauguaacuc

SEQ ID NO: 413313 - RNA, 19 nt, Artificial Sequence
  Description of Artificial Sequence: Synthetic oligonucleotide
  Sense Strand Starting at position 1205 of SEQ ID NO: 317688
acacgaugugauggaauua

SEQ ID NO: 413314 - RNA, 19 nt, Artificial Sequence
  Description of Artificial Sequence: Synthetic oligonucleotide
  Antisense Strand to SEQ ID NO: 413313
uaauuccaucacaucgugu

SEQ ID NO: 413315 - RNA, 19 nt, Artificial Sequence
  Description of Artificial Sequence: Synthetic oligonucleotide
  Sense Strand Starting at position 1205 of SEQ ID NO: 317739
cuaugucuuccauauagga

SEQ ID NO: 413316 - RNA, 19 nt, Artificial Sequence
  Description of Artificial Sequence: Synthetic oligonucleotide
  Antisense Strand to SEQ ID NO: 413315
uccuauauggaagacauag

SEQ ID NO: 413317 - RNA, 19 nt, Artificial Sequence
  Description of Artificial Sequence: Synthetic oligonucleotide
  Sense Strand Starting at position 1205 of SEQ ID NO: 317795
gaaggucagcauugguaga

SEQ ID NO: 413318 - RNA, 19 nt, Artificial Sequence
  Description of Artificial Sequence: Synthetic oligonucleotide
  Antisense Strand to SEQ ID NO: 413317
ucuaccaaugcugaccuuc

SEQ ID NO: 413319 - RNA, 19 nt, Artificial Sequence
  Description of Artificial Sequence: Synthetic oligonucleotide
  Sense Strand Starting at position 1205 of SEQ ID NO: 317797
aggucagcauugguagaga

SEQ ID NO: 413320 - RNA, 19 nt, Artificial Sequence
  Description of Artificial Sequence: Synthetic oligonucleotide
  Antisense Strand to SEQ ID NO: 413319
ucucuaccaaugcugaccu

SEQ ID NO: 413321 - RNA, 19 nt, Artificial Sequence
  Description of Artificial Sequence: Synthetic oligonucleotide
  Sense Strand Starting at position 1205 of SEQ ID NO: 317906
auuagaaaguuugccaacu

SEQ ID NO: 413322 - RNA, 19 nt, Artificial Sequence
  Description of Artificial Sequence: Synthetic oligonucleotide
  Antisense Strand to SEQ ID NO: 413321
aguuggcaaacuuucuaau

SEQ ID NO: 413323 - RNA, 19 nt, Artificial Sequence
  Description of Artificial Sequence: Synthetic oligonucleotide
  Sense Strand Starting at position 1205 of SEQ ID NO: 317983
uggaccaagcucuacauua

SEQ ID NO: 413324 - RNA, 19 nt, Artificial Sequence
  Description of Artificial Sequence: Synthetic oligonucleotide
  Antisense Strand to SEQ ID NO: 413323
uaauguagagcuuggucca

SEQ ID NO: 413325 - RNA, 19 nt, Artificial Sequence
  Description of Artificial Sequence: Synthetic oligonucleotide
  Sense Strand Starting at position 1205 of SEQ ID NO: 318060
cuggaagucuuacuaguuc

SEQ ID NO: 413326 - RNA, 19 nt, Artificial Sequence
  Description of Artificial Sequence: Synthetic oligonucleotide
  Antisense Strand to SEQ ID NO: 413325
gaacuaguaagacuuccag

SEQ ID NO: 413327 - RNA, 19 nt, Artificial Sequence
  Description of Artificial Sequence: Synthetic oligonucleotide
  Sense Strand Starting at position 1205 of SEQ ID NO: 318154
acauuauuaccaugguaag

SEQ ID NO: 413328 - RNA, 19 nt, Artificial Sequence
  Description of Artificial Sequence: Synthetic oligonucleotide
  Antisense Strand to SEQ ID NO: 413327
cuuaccaugguaauaaugu

SEQ ID NO: 413329 - RNA, 19 nt, Artificial Sequence
  Description of Artificial Sequence: Synthetic oligonucleotide
  Sense Strand Starting at position 1205 of SEQ ID NO: 318298
uguugaggcuccuucuaaa

SEQ ID NO: 413330 - RNA, 19 nt, Artificial Sequence
  Description of Artificial Sequence: Synthetic oligonucleotide
  Antisense Strand to SEQ ID NO: 413329
uuuagaaggagccucaaca

SEQ ID NO: 413331 - RNA, 19 nt, Artificial Sequence
  Description of Artificial Sequence: Synthetic oligonucleotide
  Sense Strand Starting at position 1205 of SEQ ID NO: 318406
uuuauugagccaugcauaa

SEQ ID NO: 413332 - RNA, 19 nt, Artificial Sequence
  Description of Artificial Sequence: Synthetic oligonucleotide
  Antisense Strand to SEQ ID NO: 413331
uuaugcauggcucaauaaa

SEQ ID NO: 413333 - RNA, 19 nt, Artificial Sequence
  Description of Artificial Sequence: Synthetic oligonucleotide
  Sense Strand Starting at position 1205 of SEQ ID NO: 318437
gaaugagcaccuuaaaugu

SEQ ID NO: 413334 - RNA, 19 nt, Artificial Sequence
  Description of Artificial Sequence: Synthetic oligonucleotide
  Antisense Strand to SEQ ID NO: 413333
acauuuaaggugcucauuc

SEQ ID NO: 413335 - RNA, 19 nt, Artificial Sequence
  Description of Artificial Sequence: Synthetic oligonucleotide
  Sense Strand Starting at position 1205 of SEQ ID NO: 318467
cugugaagaaggugucaug

SEQ ID NO: 413336 - RNA, 19 nt, Artificial Sequence
  Description of Artificial Sequence: Synthetic oligonucleotide
  Antisense Strand to SEQ ID NO: 413335
caugacaccuucuucacag

SEQ ID NO: 413337 - RNA, 19 nt, Artificial Sequence
  Description of Artificial Sequence: Synthetic oligonucleotide
  Sense Strand Starting at position 1205 of SEQ ID NO: 318531
agcucaucucagcauaaga

SEQ ID NO: 413338 - RNA, 19 nt, Artificial Sequence
  Description of Artificial Sequence: Synthetic oligonucleotide
  Antisense Strand to SEQ ID NO: 413337
ucuuaugcugagaugagcu

SEQ ID NO: 413339 - RNA, 19 nt, Artificial Sequence
  Description of Artificial Sequence: Synthetic oligonucleotide
  Sense Strand Starting at position 1205 of SEQ ID NO: 318632
auauguagugauuaagcca

SEQ ID NO: 413340 - RNA, 19 nt, Artificial Sequence
  Description of Artificial Sequence: Synthetic oligonucleotide
  Antisense Strand to SEQ ID NO: 413339
uggcuuaaucacuacauau

SEQ ID NO: 413341 - RNA, 19 nt, Artificial Sequence
  Description of Artificial Sequence: Synthetic oligonucleotide
  Sense Strand Starting at position 1205 of SEQ ID NO: 318637
uagugauuaagccagggua

SEQ ID NO: 413342 - RNA, 19 nt, Artificial Sequence
  Description of Artificial Sequence: Synthetic oligonucleotide
  Antisense Strand to SEQ ID NO: 413341
uacccuggcuuaaucacua

SEQ ID NO: 413343 - RNA, 19 nt, Artificial Sequence
  Description of Artificial Sequence: Synthetic oligonucleotide
  Sense Strand Starting at position 1205 of SEQ ID NO: 318639
gugauuaagccaggguauu

SEQ ID NO: 413344 - RNA, 19 nt, Artificial Sequence
  Description of Artificial Sequence: Synthetic oligonucleotide
  Antisense Strand to SEQ ID NO: 413343
aauacccuggcuuaaucac

SEQ ID NO: 413345 - RNA, 19 nt, Artificial Sequence
  Description of Artificial Sequence: Synthetic oligonucleotide
  Sense Strand Starting at position 1205 of SEQ ID NO: 318661
ggguauccaucacugaaua

SEQ ID NO: 413346 - RNA, 19 nt, Artificial Sequence
  Description of Artificial Sequence: Synthetic oligonucleotide
  Antisense Strand to SEQ ID NO: 413345
uauucagugauggauaccc

SEQ ID NO: 413347 - RNA, 19 nt, Artificial Sequence
  Description of Artificial Sequence: Synthetic oligonucleotide
  Sense Strand Starting at position 1205 of SEQ ID NO: 318662
gguauccaucacugaauau

SEQ ID NO: 413348 - RNA, 19 nt, Artificial Sequence
  Description of Artificial Sequence: Synthetic oligonucleotide
  Antisense Strand to SEQ ID NO: 413347
auauucagugauggauacc

SEQ ID NO: 413349 - RNA, 19 nt, Artificial Sequence
  Description of Artificial Sequence: Synthetic oligonucleotide
  Sense Strand Starting at position 1205 of SEQ ID NO: 318760
auggucacuuuacuguaau

SEQ ID NO: 413350 - RNA, 19 nt, Artificial Sequence
  Description of Artificial Sequence: Synthetic oligonucleotide
  Antisense Strand to SEQ ID NO: 413349
auuacaguaaagugaccau

SEQ ID NO: 413351 - RNA, 19 nt, Artificial Sequence
  Description of Artificial Sequence: Synthetic oligonucleotide
  Sense Strand Starting at position 1205 of SEQ ID NO: 318961
gagguauaugcacacagua

SEQ ID NO: 413352 - RNA, 19 nt, Artificial Sequence
  Description of Artificial Sequence: Synthetic oligonucleotide
  Antisense Strand to SEQ ID NO: 413351
uacugugugcauauaccuc

SEQ ID NO: 413353 - RNA, 19 nt, Artificial Sequence
  Description of Artificial Sequence: Synthetic oligonucleotide
  Sense Strand Starting at position 1205 of SEQ ID NO: 319102
guguuuccaccagaagcaa

SEQ ID NO: 413354 - RNA, 19 nt, Artificial Sequence
  Description of Artificial Sequence: Synthetic oligonucleotide
  Antisense Strand to SEQ ID NO: 413353
uugcuucugguggaaacac

SEQ ID NO: 413355 - RNA, 19 nt, Artificial Sequence
  Description of Artificial Sequence: Synthetic oligonucleotide
  Sense Strand Starting at position 1205 of SEQ ID NO: 319212
gggagucuugagcauauga

SEQ ID NO: 413356 - RNA, 19 nt, Artificial Sequence
  Description of Artificial Sequence: Synthetic oligonucleotide
  Antisense Strand to SEQ ID NO: 413355
ucauaugcucaagacuccc

SEQ ID NO: 413357 - RNA, 19 nt, Artificial Sequence
  Description of Artificial Sequence: Synthetic oligonucleotide
  Sense Strand Starting at position 1205 of SEQ ID NO: 319214
gagucuugagcauaugaac

SEQ ID NO: 413358 - RNA, 19 nt, Artificial Sequence
  Description of Artificial Sequence: Synthetic oligonucleotide
  Antisense Strand to SEQ ID NO: 413357
guucauaugcucaagacuc

SEQ ID NO: 413359 - RNA, 19 nt, Artificial Sequence
  Description of Artificial Sequence: Synthetic oligonucleotide
  Sense Strand Starting at position 1206 of SEQ ID NO: 315384
uuuaaauagcugggauuac

SEQ ID NO: 413360 - RNA, 19 nt, Artificial Sequence
  Description of Artificial Sequence: Synthetic oligonucleotide
  Antisense Strand to SEQ ID NO: 413359
guaaucccagcuauuuaaa

SEQ ID NO: 413361 - RNA, 19 nt, Artificial Sequence
  Description of Artificial Sequence: Synthetic oligonucleotide
  Sense Strand Starting at position 1206 of SEQ ID NO: 315479
gugaacuccuagccuuaaa

SEQ ID NO: 413362 - RNA, 19 nt, Artificial Sequence
  Description of Artificial Sequence: Synthetic oligonucleotide
  Antisense Strand to SEQ ID NO: 413361
uuuaaggcuaggaguucac

SEQ ID NO: 413363 - RNA, 19 nt, Artificial Sequence
  Description of Artificial Sequence: Synthetic oligonucleotide
  Sense Strand Starting at position 1206 of SEQ ID NO: 315530
ggauuauggucagcccauu

SEQ ID NO: 413364 - RNA, 19 nt, Artificial Sequence
  Description of Artificial Sequence: Synthetic oligonucleotide
  Antisense Strand to SEQ ID NO: 413363
aaugggcugaccauaaucc

SEQ ID NO: 413365 - RNA, 19 nt, Artificial Sequence
  Description of Artificial Sequence: Synthetic oligonucleotide
  Sense Strand Starting at position 1206 of SEQ ID NO: 315601
cucagugcuggguagguaa

SEQ ID NO: 413366 - RNA, 19 nt, Artificial Sequence
  Description of Artificial Sequence: Synthetic oligonucleotide
  Antisense Strand to SEQ ID NO: 413365
uuaccuacccagcacugag

SEQ ID NO: 413367 - RNA, 19 nt, Artificial Sequence
  Description of Artificial Sequence: Synthetic oligonucleotide
  Sense Strand Starting at position 1206 of SEQ ID NO: 315708
ggcucacagugcucaaaug

SEQ ID NO: 413368 - RNA, 19 nt, Artificial Sequence
  Description of Artificial Sequence: Synthetic oligonucleotide
  Antisense Strand to SEQ ID NO: 413367
cauuugagcacugugagcc

SEQ ID NO: 413369 - RNA, 19 nt, Artificial Sequence
  Description of Artificial Sequence: Synthetic oligonucleotide
  Sense Strand Starting at position 1206 of SEQ ID NO: 315782
gcuuaugaugcacauaaag

SEQ ID NO: 413370 - RNA, 19 nt, Artificial Sequence
  Description of Artificial Sequence: Synthetic oligonucleotide
  Antisense Strand to SEQ ID NO: 413369
cuuuaugugcaucauaagc

SEQ ID NO: 413371 - RNA, 19 nt, Artificial Sequence
  Description of Artificial Sequence: Synthetic oligonucleotide
  Sense Strand Starting at position 1206 of SEQ ID NO: 316530
acuagaaggcagugaaaua

SEQ ID NO: 413372 - RNA, 19 nt, Artificial Sequence
  Description of Artificial Sequence: Synthetic oligonucleotide
  Antisense Strand to SEQ ID NO: 413371
uauuucacugccuucuagu

SEQ ID NO: 413373 - RNA, 19 nt, Artificial Sequence
  Description of Artificial Sequence: Synthetic oligonucleotide
  Sense Strand Starting at position 1206 of SEQ ID NO: 316575
gacgucagacuuugagaaa

SEQ ID NO: 413374 - RNA, 19 nt, Artificial Sequence
  Description of Artificial Sequence: Synthetic oligonucleotide
  Antisense Strand to SEQ ID NO: 413373
uuucucaaagucugacguc

SEQ ID NO: 413375 - RNA, 19 nt, Artificial Sequence
  Description of Artificial Sequence: Synthetic oligonucleotide
  Sense Strand Starting at position 1206 of SEQ ID NO: 316602
ugaaucugcgucugaggua

SEQ ID NO: 413376 - RNA, 19 nt, Artificial Sequence
  Description of Artificial Sequence: Synthetic oligonucleotide
  Antisense Strand to SEQ ID NO: 413375
uaccucagacgcagauuca

SEQ ID NO: 413377 - RNA, 19 nt, Artificial Sequence
  Description of Artificial Sequence: Synthetic oligonucleotide
  Sense Strand Starting at position 1206 of SEQ ID NO: 316607
cugcgucugagguaaauac

SEQ ID NO: 413378 - RNA, 19 nt, Artificial Sequence
  Description of Artificial Sequence: Synthetic oligonucleotide
  Antisense Strand to SEQ ID NO: 413377
guauuuaccucagacgcag

SEQ ID NO: 413379 - RNA, 19 nt, Artificial Sequence
  Description of Artificial Sequence: Synthetic oligonucleotide
  Sense Strand Starting at position 1206 of SEQ ID NO: 317382
aacugaguggcagacgauu

SEQ ID NO: 413380 - RNA, 19 nt, Artificial Sequence
  Description of Artificial Sequence: Synthetic oligonucleotide
  Antisense Strand to SEQ ID NO: 413379
aaucgucugccacucaguu

SEQ ID NO: 413381 - RNA, 19 nt, Artificial Sequence
  Description of Artificial Sequence: Synthetic oligonucleotide
  Sense Strand Starting at position 1206 of SEQ ID NO: 317567
gucgcuuuccuggaaccaa

SEQ ID NO: 413382 - RNA, 19 nt, Artificial Sequence
  Description of Artificial Sequence: Synthetic oligonucleotide
  Antisense Strand to SEQ ID NO: 413381
uugguuccaggaaagcgac

SEQ ID NO: 413383 - RNA, 19 nt, Artificial Sequence
  Description of Artificial Sequence: Synthetic oligonucleotide
  Sense Strand Starting at position 1206 of SEQ ID NO: 317634
guggacgggaguuauauca

SEQ ID NO: 413384 - RNA, 19 nt, Artificial Sequence
  Description of Artificial Sequence: Synthetic oligonucleotide
  Antisense Strand to SEQ ID NO: 413383
ugauauaacucccguccac

SEQ ID NO: 413385 - RNA, 19 nt, Artificial Sequence
  Description of Artificial Sequence: Synthetic oligonucleotide
  Sense Strand Starting at position 1206 of SEQ ID NO: 317646
uauaucacgugguccuaua

SEQ ID NO: 413386 - RNA, 19 nt, Artificial Sequence
  Description of Artificial Sequence: Synthetic oligonucleotide
  Antisense Strand to SEQ ID NO: 413385
uauaggaccacgugauaua

SEQ ID NO: 413387 - RNA, 19 nt, Artificial Sequence
  Description of Artificial Sequence: Synthetic oligonucleotide
  Sense Strand Starting at position 1206 of SEQ ID NO: 317712
gcaguuugcgaauucuguu

SEQ ID NO: 413388 - RNA, 19 nt, Artificial Sequence
  Description of Artificial Sequence: Synthetic oligonucleotide
  Antisense Strand to SEQ ID NO: 413387
aacagaauucgcaaacugc

SEQ ID NO: 413389 - RNA, 19 nt, Artificial Sequence
  Description of Artificial Sequence: Synthetic oligonucleotide
  Sense Strand Starting at position 1206 of SEQ ID NO: 317717
uugcgaauucuguuuguuc

SEQ ID NO: 413390 - RNA, 19 nt, Artificial Sequence
  Description of Artificial Sequence: Synthetic oligonucleotide
  Antisense Strand to SEQ ID NO: 413389
gaacaaacagaauucgcaa

SEQ ID NO: 413391 - RNA, 19 nt, Artificial Sequence
  Description of Artificial Sequence: Synthetic oligonucleotide
  Sense Strand Starting at position 1206 of SEQ ID NO: 317764
uuuggugauggccauacaa

SEQ ID NO: 413392 - RNA, 19 nt, Artificial Sequence
  Description of Artificial Sequence: Synthetic oligonucleotide
  Antisense Strand to SEQ ID NO: 413391
uuguauggccaucaccaaa

SEQ ID NO: 413393 - RNA, 19 nt, Artificial Sequence
  Description of Artificial Sequence: Synthetic oligonucleotide
  Sense Strand Starting at position 1206 of SEQ ID NO: 317766
uggugauggccauacaacu

SEQ ID NO: 413394 - RNA, 19 nt, Artificial Sequence
  Description of Artificial Sequence: Synthetic oligonucleotide
  Antisense Strand to SEQ ID NO: 413393
aguuguauggccaucacca

SEQ ID NO: 413395 - RNA, 19 nt, Artificial Sequence
  Description of Artificial Sequence: Synthetic oligonucleotide
  Sense Strand Starting at position 1206 of SEQ ID NO: 317812
guacacauugggugaauua

SEQ ID NO: 413396 - RNA, 19 nt, Artificial Sequence
  Description of Artificial Sequence: Synthetic oligonucleotide
  Antisense Strand to SEQ ID NO: 413395
uaauucacccaauguguac

SEQ ID NO: 413397 - RNA, 19 nt, Artificial Sequence
  Description of Artificial Sequence: Synthetic oligonucleotide
  Sense Strand Starting at position 1206 of SEQ ID NO: 317826
aauuauaugguaugcaagu

SEQ ID NO: 413398 - RNA, 19 nt, Artificial Sequence
  Description of Artificial Sequence: Synthetic oligonucleotide
  Antisense Strand to SEQ ID NO: 413397
acuugcauaccauauaauu

SEQ ID NO: 413399 - RNA, 19 nt, Artificial Sequence
  Description of Artificial Sequence: Synthetic oligonucleotide
  Sense Strand Starting at position 1206 of SEQ ID NO: 318202
ugcuacaguguccagagau

SEQ ID NO: 413400 - RNA, 19 nt, Artificial Sequence
  Description of Artificial Sequence: Synthetic oligonucleotide
  Antisense Strand to SEQ ID NO: 413399
aucucuggacacuguagca

SEQ ID NO: 413401 - RNA, 19 nt, Artificial Sequence
  Description of Artificial Sequence: Synthetic oligonucleotide
  Sense Strand Starting at position 1206 of SEQ ID NO: 318217
agauuaggcagaugaguac

SEQ ID NO: 413402 - RNA, 19 nt, Artificial Sequence
  Description of Artificial Sequence: Synthetic oligonucleotide
  Antisense Strand to SEQ ID NO: 413401
guacucaucugccuaaucu

SEQ ID NO: 413403 - RNA, 19 nt, Artificial Sequence
  Description of Artificial Sequence: Synthetic oligonucleotide
  Sense Strand Starting at position 1206 of SEQ ID NO: 318277
aauucuagugagugagaca

SEQ ID NO: 413404 - RNA, 19 nt, Artificial Sequence
  Description of Artificial Sequence: Synthetic oligonucleotide
  Antisense Strand to SEQ ID NO: 413403
ugucucacucacuagaauu

SEQ ID NO: 413405 - RNA, 19 nt, Artificial Sequence
  Description of Artificial Sequence: Synthetic oligonucleotide
  Sense Strand Starting at position 1206 of SEQ ID NO: 318309
gcaaauaaaugggauacau

SEQ ID NO: 413406 - RNA, 19 nt, Artificial Sequence
  Description of Artificial Sequence: Synthetic oligonucleotide
  Antisense Strand to SEQ ID NO: 413405
auguaucccauuuauuugc

SEQ ID NO: 413407 - RNA, 19 nt, Artificial Sequence
  Description of Artificial Sequence: Synthetic oligonucleotide
  Sense Strand Starting at position 1206 of SEQ ID NO: 318334
ggucaugugauauaugcau

SEQ ID NO: 413408 - RNA, 19 nt, Artificial Sequence
  Description of Artificial Sequence: Synthetic oligonucleotide
  Antisense Strand to SEQ ID NO: 413407
augcauauaucacaugacc

SEQ ID NO: 413409 - RNA, 19 nt, Artificial Sequence
  Description of Artificial Sequence: Synthetic oligonucleotide
  Sense Strand Starting at position 1206 of SEQ ID NO: 318399
gugggauggccauaucuga

SEQ ID NO: 413410 - RNA, 19 nt, Artificial Sequence
  Description of Artificial Sequence: Synthetic oligonucleotide
  Antisense Strand to SEQ ID NO: 413409
ucagauauggccaucccac

SEQ ID NO: 413411 - RNA, 19 nt, Artificial Sequence
  Description of Artificial Sequence: Synthetic oligonucleotide
  Sense Strand Starting at position 1206 of SEQ ID NO: 318553
caagaagguccaugugcuu

SEQ ID NO: 413412 - RNA, 19 nt, Artificial Sequence
  Description of Artificial Sequence: Synthetic oligonucleotide
  Antisense Strand to SEQ ID NO: 413411
aagcacauggaccuucuug

SEQ ID NO: 413413 - RNA, 19 nt, Artificial Sequence
  Description of Artificial Sequence: Synthetic oligonucleotide
  Sense Strand Starting at position 1206 of SEQ ID NO: 318723
uuccaccuguguuuggaaa

SEQ ID NO: 413414 - RNA, 19 nt, Artificial Sequence
  Description of Artificial Sequence: Synthetic oligonucleotide
  Antisense Strand to SEQ ID NO: 413413
uuuccaaacacagguggaa

SEQ ID NO: 413415 - RNA, 19 nt, Artificial Sequence
  Description of Artificial Sequence: Synthetic oligonucleotide
  Sense Strand Starting at position 1206 of SEQ ID NO: 318818
ugggauaauccaggcuaga

SEQ ID NO: 413416 - RNA, 19 nt, Artificial Sequence
  Description of Artificial Sequence: Synthetic oligonucleotide
  Antisense Strand to SEQ ID NO: 413415
ucuagccuggauuauccca

SEQ ID NO: 413417 - RNA, 19 nt, Artificial Sequence
  Description of Artificial Sequence: Synthetic oligonucleotide
  Sense Strand Starting at position 1206 of SEQ ID NO: 318834
agagaugugauguggguca

SEQ ID NO: 413418 - RNA, 19 nt, Artificial Sequence
  Description of Artificial Sequence: Synthetic oligonucleotide
  Antisense Strand to SEQ ID NO: 413417
ugacccacaucacaucucu

SEQ ID NO: 413419 - RNA, 19 nt, Artificial Sequence
  Description of Artificial Sequence: Synthetic oligonucleotide
  Sense Strand Starting at position 1206 of SEQ ID NO: 318836
agaugugaugugggucacu

SEQ ID NO: 413420 - RNA, 19 nt, Artificial Sequence
  Description of Artificial Sequence: Synthetic oligonucleotide
  Antisense Strand to SEQ ID NO: 413419
agugacccacaucacaucu

SEQ ID NO: 413421 - RNA, 19 nt, Artificial Sequence
  Description of Artificial Sequence: Synthetic oligonucleotide
  Sense Strand Starting at position 1206 of SEQ ID NO: 318924
ugcugauagauggauguga

SEQ ID NO: 413422 - RNA, 19 nt, Artificial Sequence
  Description of Artificial Sequence: Synthetic oligonucleotide
  Antisense Strand to SEQ ID NO: 413421
ucacauccaucuaucagca

SEQ ID NO: 413423 - RNA, 19 nt, Artificial Sequence
  Description of Artificial Sequence: Synthetic oligonucleotide
  Sense Strand Starting at position 1206 of SEQ ID NO: 318975
cgagguuguugaucugaau

SEQ ID NO: 413424 - RNA, 19 nt, Artificial Sequence
  Description of Artificial Sequence: Synthetic oligonucleotide
  Antisense Strand to SEQ ID NO: 413423
auucagaucaacaaccucg

SEQ ID NO: 413425 - RNA, 19 nt, Artificial Sequence
  Description of Artificial Sequence: Synthetic oligonucleotide
  Sense Strand Starting at position 1206 of SEQ ID NO: 319009
ugcugucauccaugaugga

SEQ ID NO: 413426 - RNA, 19 nt, Artificial Sequence
  Description of Artificial Sequence: Synthetic oligonucleotide
  Antisense Strand to SEQ ID NO: 413425
uccaucauggaugacagca

SEQ ID NO: 413427 - RNA, 19 nt, Artificial Sequence
  Description of Artificial Sequence: Synthetic oligonucleotide
  Sense Strand Starting at position 1206 of SEQ ID NO: 319090
gagauauagguugggaagu

SEQ ID NO: 413428 - RNA, 19 nt, Artificial Sequence
  Description of Artificial Sequence: Synthetic oligonucleotide
  Antisense Strand to SEQ ID NO: 413427
acuucccaaccuauaucuc

SEQ ID NO: 413429 - RNA, 19 nt, Artificial Sequence
  Description of Artificial Sequence: Synthetic oligonucleotide
  Sense Strand Starting at position 1206 of SEQ ID NO: 319101
ugggaaguuugauaaauga

SEQ ID NO: 413430 - RNA, 19 nt, Artificial Sequence
  Description of Artificial Sequence: Synthetic oligonucleotide
  Antisense Strand to SEQ ID NO: 413429
ucauuuaucaaacuuccca

SEQ ID NO: 413431 - RNA, 19 nt, Artificial Sequence
  Description of Artificial Sequence: Synthetic oligonucleotide
  Sense Strand Starting at position 1206 of SEQ ID NO: 319108
uuugauaaaugagccuaga

SEQ ID NO: 413432 - RNA, 19 nt, Artificial Sequence
  Description of Artificial Sequence: Synthetic oligonucleotide
  Antisense Strand to SEQ ID NO: 413431
ucuaggcucauuuaucaaa

SEQ ID NO: 413433 - RNA, 19 nt, Artificial Sequence
  Description of Artificial Sequence: Synthetic oligonucleotide
  Sense Strand Starting at position 1206 of SEQ ID NO: 319153
aggagucaagaguauaguu

SEQ ID NO: 413434 - RNA, 19 nt, Artificial Sequence
  Description of Artificial Sequence: Synthetic oligonucleotide
  Antisense Strand to SEQ ID NO: 413433
aacuauacucuugacuccu

SEQ ID NO: 413435 - RNA, 19 nt, Artificial Sequence
  Description of Artificial Sequence: Synthetic oligonucleotide
  Sense Strand Starting at position 1206 of SEQ ID NO: 319155
gagucaagaguauaguucu

SEQ ID NO: 413436 - RNA, 19 nt, Artificial Sequence
  Description of Artificial Sequence: Synthetic oligonucleotide
  Antisense Strand to SEQ ID NO: 413435
agaacuauacucuugacuc

SEQ ID NO: 413437 - RNA, 19 nt, Artificial Sequence
  Description of Artificial Sequence: Synthetic oligonucleotide
  Sense Strand Starting at position 1206 of SEQ ID NO: 319158
ucaagaguauaguucuguu

SEQ ID NO: 413438 - RNA, 19 nt, Artificial Sequence
  Description of Artificial Sequence: Synthetic oligonucleotide
  Antisense Strand to SEQ ID NO: 413437
aacagaacuauacucuuga

SEQ ID NO: 413439 - RNA, 19 nt, Artificial Sequence
  Description of Artificial Sequence: Synthetic oligonucleotide
  Sense Strand Starting at position 1207 of SEQ ID NO: 315236
aguaauaggcuccaaacua

SEQ ID NO: 413440 - RNA, 19 nt, Artificial Sequence
  Description of Artificial Sequence: Synthetic oligonucleotide
  Antisense Strand to SEQ ID NO: 413439
uaguuuggagccuauuacu

SEQ ID NO: 413441 - RNA, 19 nt, Artificial Sequence
  Description of Artificial Sequence: Synthetic oligonucleotide
  Sense Strand Starting at position 1207 of SEQ ID NO: 315391
gcugaaguccuacaaagac

SEQ ID NO: 413442 - RNA, 19 nt, Artificial Sequence
  Description of Artificial Sequence: Synthetic oligonucleotide
  Antisense Strand to SEQ ID NO: 413441
gucuuuguaggacuucagc

SEQ ID NO: 413443 - RNA, 19 nt, Artificial Sequence
  Description of Artificial Sequence: Synthetic oligonucleotide
  Sense Strand Starting at position 1207 of SEQ ID NO: 315600
ggacauguacacugugauu

SEQ ID NO: 413444 - RNA, 19 nt, Artificial Sequence
  Description of Artificial Sequence: Synthetic oligonucleotide
  Antisense Strand to SEQ ID NO: 413443
aaucacaguguacaugucc

SEQ ID NO: 413445 - RNA, 19 nt, Artificial Sequence
  Description of Artificial Sequence: Synthetic oligonucleotide
  Sense Strand Starting at position 1207 of SEQ ID NO: 315618
ucacuaugccuagaaugcu

SEQ ID NO: 413446 - RNA, 19 nt, Artificial Sequence
  Description of Artificial Sequence: Synthetic oligonucleotide
  Antisense Strand to SEQ ID NO: 413445
agcauucuaggcauaguga

SEQ ID NO: 413447 - RNA, 19 nt, Artificial Sequence
  Description of Artificial Sequence: Synthetic oligonucleotide
  Sense Strand Starting at position 1207 of SEQ ID NO: 315691
augucaccuucuguaugaa

SEQ ID NO: 413448 - RNA, 19 nt, Artificial Sequence
  Description of Artificial Sequence: Synthetic oligonucleotide
  Antisense Strand to SEQ ID NO: 413447
uucauacagaaggugacau

SEQ ID NO: 413449 - RNA, 19 nt, Artificial Sequence
  Description of Artificial Sequence: Synthetic oligonucleotide
  Sense Strand Starting at position 1207 of SEQ ID NO: 315710
gccaucugugaacacucaa

SEQ ID NO: 413450 - RNA, 19 nt, Artificial Sequence
  Description of Artificial Sequence: Synthetic oligonucleotide
  Antisense Strand to SEQ ID NO: 413449
uugaguguucacagauggc

SEQ ID NO: 413451 - RNA, 19 nt, Artificial Sequence
  Description of Artificial Sequence: Synthetic oligonucleotide
  Sense Strand Starting at position 1207 of SEQ ID NO: 315855
gccuguaaucccuggauuu

SEQ ID NO: 413452 - RNA, 19 nt, Artificial Sequence
  Description of Artificial Sequence: Synthetic oligonucleotide
  Antisense Strand to SEQ ID NO: 413451
aaauccagggauuacaggc

SEQ ID NO: 413453 - RNA, 19 nt, Artificial Sequence
  Description of Artificial Sequence: Synthetic oligonucleotide
  Sense Strand Starting at position 1207 of SEQ ID NO: 316029
acuguuugugcccaggaau

SEQ ID NO: 413454 - RNA, 19 nt, Artificial Sequence
  Description of Artificial Sequence: Synthetic oligonucleotide
  Antisense Strand to SEQ ID NO: 413453
auuccugggcacaaacagu

SEQ ID NO: 413455 - RNA, 19 nt, Artificial Sequence
  Description of Artificial Sequence: Synthetic oligonucleotide
  Sense Strand Starting at position 1207 of SEQ ID NO: 316037
ugcccaggaaugugagauu

SEQ ID NO: 413456 - RNA, 19 nt, Artificial Sequence
  Description of Artificial Sequence: Synthetic oligonucleotide
  Antisense Strand to SEQ ID NO: 413455
aaucucacauuccugggca

SEQ ID NO: 413457 - RNA, 19 nt, Artificial Sequence
  Description of Artificial Sequence: Synthetic oligonucleotide
  Sense Strand Starting at position 1207 of SEQ ID NO: 316099
agaacaagacguugucuua

SEQ ID NO: 413458 - RNA, 19 nt, Artificial Sequence
  Description of Artificial Sequence: Synthetic oligonucleotide
  Antisense Strand to SEQ ID NO: 413457
uaagacaacgucuuguucu

SEQ ID NO: 413459 - RNA, 19 nt, Artificial Sequence
  Description of Artificial Sequence: Synthetic oligonucleotide
  Sense Strand Starting at position 1207 of SEQ ID NO: 316268
guguaaagcaaguaaugau

SEQ ID NO: 413460 - RNA, 19 nt, Artificial Sequence
  Description of Artificial Sequence: Synthetic oligonucleotide
  Antisense Strand to SEQ ID NO: 413459
aucauuacuugcuuuacac

SEQ ID NO: 413461 - RNA, 19 nt, Artificial Sequence
  Description of Artificial Sequence: Synthetic oligonucleotide
  Sense Strand Starting at position 1207 of SEQ ID NO: 316325
cucucaaagcauggaagua

SEQ ID NO: 413462 - RNA, 19 nt, Artificial Sequence
  Description of Artificial Sequence: Synthetic oligonucleotide
  Antisense Strand to SEQ ID NO: 413461
uacuuccaugcuuugagag

SEQ ID NO: 413463 - RNA, 19 nt, Artificial Sequence
  Description of Artificial Sequence: Synthetic oligonucleotide
  Sense Strand Starting at position 1207 of SEQ ID NO: 316811
uuaagaaaguucuuguuga

SEQ ID NO: 413464 - RNA, 19 nt, Artificial Sequence
  Description of Artificial Sequence: Synthetic oligonucleotide
  Antisense Strand to SEQ ID NO: 413463
ucaacaagaacuuucuuaa

SEQ ID NO: 413465 - RNA, 19 nt, Artificial Sequence
  Description of Artificial Sequence: Synthetic oligonucleotide
  Sense Strand Starting at position 1207 of SEQ ID NO: 317011
ccuuucuuugcauagguga

SEQ ID NO: 413466 - RNA, 19 nt, Artificial Sequence
  Description of Artificial Sequence: Synthetic oligonucleotide
  Antisense Strand to SEQ ID NO: 413465
ucaccuaugcaaagaaagg

SEQ ID NO: 413467 - RNA, 19 nt, Artificial Sequence
  Description of Artificial Sequence: Synthetic oligonucleotide
  Sense Strand Starting at position 1207 of SEQ ID NO: 317209
ggaugugucuucuccagag

SEQ ID NO: 413468 - RNA, 19 nt, Artificial Sequence
  Description of Artificial Sequence: Synthetic oligonucleotide
  Antisense Strand to SEQ ID NO: 413467
cucuggagaagacacaucc

SEQ ID NO: 413469 - RNA, 19 nt, Artificial Sequence
  Description of Artificial Sequence: Synthetic oligonucleotide
  Sense Strand Starting at position 1207 of SEQ ID NO: 317211
augugucuucuccagagau

SEQ ID NO: 413470 - RNA, 19 nt, Artificial Sequence
  Description of Artificial Sequence: Synthetic oligonucleotide
  Antisense Strand to SEQ ID NO: 413469
aucucuggagaagacacau

SEQ ID NO: 413471 - RNA, 19 nt, Artificial Sequence
  Description of Artificial Sequence: Synthetic oligonucleotide
  Sense Strand Starting at position 1207 of SEQ ID NO: 317213
gugucuucuccagagauua

SEQ ID NO: 413472 - RNA, 19 nt, Artificial Sequence
  Description of Artificial Sequence: Synthetic oligonucleotide
  Antisense Strand to SEQ ID NO: 413471
uaaucucuggagaagacac

SEQ ID NO: 413473 - RNA, 19 nt, Artificial Sequence
  Description of Artificial Sequence: Synthetic oligonucleotide
  Sense Strand Starting at position 1207 of SEQ ID NO: 317277
aaugcaaaugacugucuga

SEQ ID NO: 413474 - RNA, 19 nt, Artificial Sequence
  Description of Artificial Sequence: Synthetic oligonucleotide
  Antisense Strand to SEQ ID NO: 413473
ucagacagucauuugcauu

SEQ ID NO: 413475 - RNA, 19 nt, Artificial Sequence
  Description of Artificial Sequence: Synthetic oligonucleotide
  Sense Strand Starting at position 1207 of SEQ ID NO: 317280
gcaaaugacugucugacaa

SEQ ID NO: 413476 - RNA, 19 nt, Artificial Sequence
  Description of Artificial Sequence: Synthetic oligonucleotide
  Antisense Strand to SEQ ID NO: 413475
uugucagacagucauuugc

SEQ ID NO: 413477 - RNA, 19 nt, Artificial Sequence
  Description of Artificial Sequence: Synthetic oligonucleotide
  Sense Strand Starting at position 1207 of SEQ ID NO: 317490
aaauacuucuggucugaag

SEQ ID NO: 413478 - RNA, 19 nt, Artificial Sequence
  Description of Artificial Sequence: Synthetic oligonucleotide
  Antisense Strand to SEQ ID NO: 413477
cuucagaccagaaguauuu

SEQ ID NO: 413479 - RNA, 19 nt, Artificial Sequence
  Description of Artificial Sequence: Synthetic oligonucleotide
  Sense Strand Starting at position 1207 of SEQ ID NO: 317492
auacuucuggucugaagua

SEQ ID NO: 413480 - RNA, 19 nt, Artificial Sequence
  Description of Artificial Sequence: Synthetic oligonucleotide
  Antisense Strand to SEQ ID NO: 413479
uacuucagaccagaaguau

SEQ ID NO: 413481 - RNA, 19 nt, Artificial Sequence
  Description of Artificial Sequence: Synthetic oligonucleotide
  Sense Strand Starting at position 1207 of SEQ ID NO: 317499
uggucugaaguauaucagu

SEQ ID NO: 413482 - RNA, 19 nt, Artificial Sequence
  Description of Artificial Sequence: Synthetic oligonucleotide
  Antisense Strand to SEQ ID NO: 413481
acugauauacuucagacca

SEQ ID NO: 413483 - RNA, 19 nt, Artificial Sequence
  Description of Artificial Sequence: Synthetic oligonucleotide
  Sense Strand Starting at position 1207 of SEQ ID NO: 317504
ugaaguauaucaguucuca

SEQ ID NO: 413484 - RNA, 19 nt, Artificial Sequence
  Description of Artificial Sequence: Synthetic oligonucleotide
  Antisense Strand to SEQ ID NO: 413483
ugagaacugauauacuuca

SEQ ID NO: 413485 - RNA, 19 nt, Artificial Sequence
  Description of Artificial Sequence: Synthetic oligonucleotide
  Sense Strand Starting at position 1207 of SEQ ID NO: 317871
aagugaucacauggaggua

SEQ ID NO: 413486 - RNA, 19 nt, Artificial Sequence
  Description of Artificial Sequence: Synthetic oligonucleotide
  Antisense Strand to SEQ ID NO: 413485
uaccuccaugugaucacuu

SEQ ID NO: 413487 - RNA, 19 nt, Artificial Sequence
  Description of Artificial Sequence: Synthetic oligonucleotide
  Sense Strand Starting at position 1207 of SEQ ID NO: 317912
ggcacugaguuaucaauga

SEQ ID NO: 413488 - RNA, 19 nt, Artificial Sequence
  Description of Artificial Sequence: Synthetic oligonucleotide
  Antisense Strand to SEQ ID NO: 413487
ucauugauaacucagugcc

SEQ ID NO: 413489 - RNA, 19 nt, Artificial Sequence
  Description of Artificial Sequence: Synthetic oligonucleotide
  Sense Strand Starting at position 1207 of SEQ ID NO: 317916
cugaguuaucaaugacagc

SEQ ID NO: 413490 - RNA, 19 nt, Artificial Sequence
  Description of Artificial Sequence: Synthetic oligonucleotide
  Antisense Strand to SEQ ID NO: 413489
gcugucauugauaacucag

SEQ ID NO: 413491 - RNA, 19 nt, Artificial Sequence
  Description of Artificial Sequence: Synthetic oligonucleotide
  Sense Strand Starting at position 1207 of SEQ ID NO: 318034
ggucauaucaugcaacgaa

SEQ ID NO: 413492 - RNA, 19 nt, Artificial Sequence
  Description of Artificial Sequence: Synthetic oligonucleotide
  Antisense Strand to SEQ ID NO: 413491
uucguugcaugauaugacc

SEQ ID NO: 413493 - RNA, 19 nt, Artificial Sequence
  Description of Artificial Sequence: Synthetic oligonucleotide
  Sense Strand Starting at position 1207 of SEQ ID NO: 318142
uguccacucucagcagaaa

SEQ ID NO: 413494 - RNA, 19 nt, Artificial Sequence
  Description of Artificial Sequence: Synthetic oligonucleotide
  Antisense Strand to SEQ ID NO: 413493
uuucugcugagaguggaca

SEQ ID NO: 413495 - RNA, 19 nt, Artificial Sequence
  Description of Artificial Sequence: Synthetic oligonucleotide
  Sense Strand Starting at position 1207 of SEQ ID NO: 318442
aggaaagacgagugaaugu

SEQ ID NO: 413496 - RNA, 19 nt, Artificial Sequence
  Description of Artificial Sequence: Synthetic oligonucleotide
  Antisense Strand to SEQ ID NO: 413495
acauucacucgucuuuccu

SEQ ID NO: 413497 - RNA, 19 nt, Artificial Sequence
  Description of Artificial Sequence: Synthetic oligonucleotide
  Sense Strand Starting at position 1207 of SEQ ID NO: 318527
gcaucaguaagguauggga

SEQ ID NO: 413498 - RNA, 19 nt, Artificial Sequence
  Description of Artificial Sequence: Synthetic oligonucleotide
  Antisense Strand to SEQ ID NO: 413497
ucccauaccuuacugaugc

SEQ ID NO: 413499 - RNA, 19 nt, Artificial Sequence
  Description of Artificial Sequence: Synthetic oligonucleotide
  Sense Strand Starting at position 1207 of SEQ ID NO: 318597
ugugacuauuuggagaaau

SEQ ID NO: 413500 - RNA, 19 nt, Artificial Sequence
  Description of Artificial Sequence: Synthetic oligonucleotide
  Antisense Strand to SEQ ID NO: 413499
auuucuccaaauagucaca

SEQ ID NO: 413501 - RNA, 19 nt, Artificial Sequence
  Description of Artificial Sequence: Synthetic oligonucleotide
  Sense Strand Starting at position 1207 of SEQ ID NO: 318619
agccaaagauguuccaaau

SEQ ID NO: 413502 - RNA, 19 nt, Artificial Sequence
  Description of Artificial Sequence: Synthetic oligonucleotide
  Antisense Strand to SEQ ID NO: 413501
auuuggaacaucuuuggcu

SEQ ID NO: 413503 - RNA, 19 nt, Artificial Sequence
  Description of Artificial Sequence: Synthetic oligonucleotide
  Sense Strand Starting at position 1207 of SEQ ID NO: 318881
aaaggauauuucuacgaag

SEQ ID NO: 413504 - RNA, 19 nt, Artificial Sequence
  Description of Artificial Sequence: Synthetic oligonucleotide
  Antisense Strand to SEQ ID NO: 413503
cuucguagaaauauccuuu

SEQ ID NO: 413505 - RNA, 19 nt, Artificial Sequence
  Description of Artificial Sequence: Synthetic oligonucleotide
  Sense Strand Starting at position 1207 of SEQ ID NO: 318884
ggauauuucuacgaaggag

SEQ ID NO: 413506 - RNA, 19 nt, Artificial Sequence
  Description of Artificial Sequence: Synthetic oligonucleotide
  Antisense Strand to SEQ ID NO: 413505
cuccuucguagaaauaucc

SEQ ID NO: 413507 - RNA, 19 nt, Artificial Sequence
  Description of Artificial Sequence: Synthetic oligonucleotide
  Sense Strand Starting at position 1207 of SEQ ID NO: 319002
uagggauagcuaugauuaa

SEQ ID NO: 413508 - RNA, 19 nt, Artificial Sequence
  Description of Artificial Sequence: Synthetic oligonucleotide
  Antisense Strand to SEQ ID NO: 413507
uuaaucauagcuaucccua

SEQ ID NO: 413509 - RNA, 19 nt, Artificial Sequence
  Description of Artificial Sequence: Synthetic oligonucleotide
  Sense Strand Starting at position 1207 of SEQ ID NO: 319084
ugcugauaggaauguacga

SEQ ID NO: 413510 - RNA, 19 nt, Artificial Sequence
  Description of Artificial Sequence: Synthetic oligonucleotide
  Antisense Strand to SEQ ID NO: 413509
ucguacauuccuaucagca

SEQ ID NO: 413511 - RNA, 19 nt, Artificial Sequence
  Description of Artificial Sequence: Synthetic oligonucleotide
  Sense Strand Starting at position 1207 of SEQ ID NO: 319091
aggaauguacgaugcuaca

SEQ ID NO: 413512 - RNA, 19 nt, Artificial Sequence
  Description of Artificial Sequence: Synthetic oligonucleotide
  Antisense Strand to SEQ ID NO: 413511
uguagcaucguacauuccu

SEQ ID NO: 413513 - RNA, 19 nt, Artificial Sequence
  Description of Artificial Sequence: Synthetic oligonucleotide
  Sense Strand Starting at position 1207 of SEQ ID NO: 319209
aaguguggucuguaagaga

SEQ ID NO: 413514 - RNA, 19 nt, Artificial Sequence
  Description of Artificial Sequence: Synthetic oligonucleotide
  Antisense Strand to SEQ ID NO: 413513
ucucuuacagaccacacuu

SEQ ID NO: 413515 - RNA, 19 nt, Artificial Sequence
  Description of Artificial Sequence: Synthetic oligonucleotide
  Sense Strand Starting at position 1207 of SEQ ID NO: 319214
uggucuguaagagauaucu

SEQ ID NO: 413516 - RNA, 19 nt, Artificial Sequence
  Description of Artificial Sequence: Synthetic oligonucleotide
  Antisense Strand to SEQ ID NO: 413515
agauaucucuuacagacca

SEQ ID NO: 413517 - RNA, 19 nt, Artificial Sequence
  Description of Artificial Sequence: Synthetic oligonucleotide
  Sense Strand Starting at position 1207 of SEQ ID NO: 319216
gucuguaagagauaucugu

SEQ ID NO: 413518 - RNA, 19 nt, Artificial Sequence
  Description of Artificial Sequence: Synthetic oligonucleotide
  Antisense Strand to SEQ ID NO: 413517
acagauaucucuuacagac

SEQ ID NO: 413519 - RNA, 19 nt, Artificial Sequence
  Description of Artificial Sequence: Synthetic oligonucleotide
  Sense Strand Starting at position 1208 of SEQ ID NO: 315369
guagcccaguacuuagaaa

SEQ ID NO: 413520 - RNA, 19 nt, Artificial Sequence
  Description of Artificial Sequence: Synthetic oligonucleotide
  Antisense Strand to SEQ ID NO: 413519
uuucuaaguacugggcuac

SEQ ID NO: 413521 - RNA, 19 nt, Artificial Sequence
  Description of Artificial Sequence: Synthetic oligonucleotide
  Sense Strand Starting at position 1208 of SEQ ID NO: 315485
auuauauguucugcacauu

SEQ ID NO: 413522 - RNA, 19 nt, Artificial Sequence
  Description of Artificial Sequence: Synthetic oligonucleotide
  Antisense Strand to SEQ ID NO: 413521
aaugugcagaacauauaau

SEQ ID NO: 413523 - RNA, 19 nt, Artificial Sequence
  Description of Artificial Sequence: Synthetic oligonucleotide
  Sense Strand Starting at position 1208 of SEQ ID NO: 315497
gcacauuuaugagaggcau

SEQ ID NO: 413524 - RNA, 19 nt, Artificial Sequence
  Description of Artificial Sequence: Synthetic oligonucleotide
  Antisense Strand to SEQ ID NO: 413523
augccucucauaaaugugc

SEQ ID NO: 413525 - RNA, 19 nt, Artificial Sequence
  Description of Artificial Sequence: Synthetic oligonucleotide
  Sense Strand Starting at position 1208 of SEQ ID NO: 315564
guuuaaaguaauggugguu

SEQ ID NO: 413526 - RNA, 19 nt, Artificial Sequence
  Description of Artificial Sequence: Synthetic oligonucleotide
  Antisense Strand to SEQ ID NO: 413525
aaccaccauuacuuuaaac

SEQ ID NO: 413527 - RNA, 19 nt, Artificial Sequence
  Description of Artificial Sequence: Synthetic oligonucleotide
  Sense Strand Starting at position 1208 of SEQ ID NO: 315569
aaguaauggugguugguca

SEQ ID NO: 413528 - RNA, 19 nt, Artificial Sequence
  Description of Artificial Sequence: Synthetic oligonucleotide
  Antisense Strand to SEQ ID NO: 413527
ugaccaaccaccauuacuu

SEQ ID NO: 413529 - RNA, 19 nt, Artificial Sequence
  Description of Artificial Sequence: Synthetic oligonucleotide
  Sense Strand Starting at position 1208 of SEQ ID NO: 315576
ggugguuggucaccaacua

SEQ ID NO: 413530 - RNA, 19 nt, Artificial Sequence
  Description of Artificial Sequence: Synthetic oligonucleotide
  Antisense Strand to SEQ ID NO: 413529
uaguuggugaccaaccacc

SEQ ID NO: 413531 - RNA, 19 nt, Artificial Sequence
  Description of Artificial Sequence: Synthetic oligonucleotide
  Sense Strand Starting at position 1208 of SEQ ID NO: 315653
aagaguccuucugcaaggu

SEQ ID NO: 413532 - RNA, 19 nt, Artificial Sequence
  Description of Artificial Sequence: Synthetic oligonucleotide
  Antisense Strand to SEQ ID NO: 413531
accuugcagaaggacucuu

SEQ ID NO: 413533 - RNA, 19 nt, Artificial Sequence
  Description of Artificial Sequence: Synthetic oligonucleotide
  Sense Strand Starting at position 1208 of SEQ ID NO: 315688
cggucugugcuucuguuua

SEQ ID NO: 413534 - RNA, 19 nt, Artificial Sequence
  Description of Artificial Sequence: Synthetic oligonucleotide
  Antisense Strand to SEQ ID NO: 413533
uaaacagaagcacagaccg

SEQ ID NO: 413535 - RNA, 19 nt, Artificial Sequence
  Description of Artificial Sequence: Synthetic oligonucleotide
  Sense Strand Starting at position 1208 of SEQ ID NO: 315693
ugugcuucuguuuaucuua

SEQ ID NO: 413536 - RNA, 19 nt, Artificial Sequence
  Description of Artificial Sequence: Synthetic oligonucleotide
  Antisense Strand to SEQ ID NO: 413535
uaagauaaacagaagcaca

SEQ ID NO: 413537 - RNA, 19 nt, Artificial Sequence
  Description of Artificial Sequence: Synthetic oligonucleotide
  Sense Strand Starting at position 1208 of SEQ ID NO: 315696
gcuucuguuuaucuuaaga

SEQ ID NO: 413538 - RNA, 19 nt, Artificial Sequence
  Description of Artificial Sequence: Synthetic oligonucleotide
  Antisense Strand to SEQ ID NO: 413537
ucuuaagauaaacagaagc

SEQ ID NO: 413539 - RNA, 19 nt, Artificial Sequence
  Description of Artificial Sequence: Synthetic oligonucleotide
  Sense Strand Starting at position 1208 of SEQ ID NO: 315712
agaugcaaaugcucugaga

SEQ ID NO: 413540 - RNA, 19 nt, Artificial Sequence
  Description of Artificial Sequence: Synthetic oligonucleotide
  Antisense Strand to SEQ ID NO: 413539
ucucagagcauuugcaucu

SEQ ID NO: 413541 - RNA, 19 nt, Artificial Sequence
  Description of Artificial Sequence: Synthetic oligonucleotide
  Sense Strand Starting at position 1208 of SEQ ID NO: 315714
augcaaaugcucugagaaa

SEQ ID NO: 413542 - RNA, 19 nt, Artificial Sequence
  Description of Artificial Sequence: Synthetic oligonucleotide
  Antisense Strand to SEQ ID NO: 413541
uuucucagagcauuugcau

SEQ ID NO: 413543 - RNA, 19 nt, Artificial Sequence
  Description of Artificial Sequence: Synthetic oligonucleotide
  Sense Strand Starting at position 1208 of SEQ ID NO: 315851
gcugcugaucagcaaucua

SEQ ID NO: 413544 - RNA, 19 nt, Artificial Sequence
  Description of Artificial Sequence: Synthetic oligonucleotide
  Antisense Strand to SEQ ID NO: 413543
uagauugcugaucagcagc

SEQ ID NO: 413545 - RNA, 19 nt, Artificial Sequence
  Description of Artificial Sequence: Synthetic oligonucleotide
  Sense Strand Starting at position 1208 of SEQ ID NO: 315952
gagagugggugauugcaaa

SEQ ID NO: 413546 - RNA, 19 nt, Artificial Sequence
  Description of Artificial Sequence: Synthetic oligonucleotide
  Antisense Strand to SEQ ID NO: 413545
uuugcaaucacccacucuc

SEQ ID NO: 413547 - RNA, 19 nt, Artificial Sequence
  Description of Artificial Sequence: Synthetic oligonucleotide
  Sense Strand Starting at position 1208 of SEQ ID NO: 315992
gguagaggacaggguuauu

SEQ ID NO: 413548 - RNA, 19 nt, Artificial Sequence
  Description of Artificial Sequence: Synthetic oligonucleotide
  Antisense Strand to SEQ ID NO: 413547
aauaacccuguccucuacc

SEQ ID NO: 413549 - RNA, 19 nt, Artificial Sequence
  Description of Artificial Sequence: Synthetic oligonucleotide
  Sense Strand Starting at position 1208 of SEQ ID NO: 315997
aggacaggguuauuaaguu

SEQ ID NO: 413550 - RNA, 19 nt, Artificial Sequence
  Description of Artificial Sequence: Synthetic oligonucleotide
  Antisense Strand to SEQ ID NO: 413549
aacuuaauaacccuguccu

SEQ ID NO: 413551 - RNA, 19 nt, Artificial Sequence
  Description of Artificial Sequence: Synthetic oligonucleotide
  Sense Strand Starting at position 1208 of SEQ ID NO: 316236
cguagagaugcuuauggua

SEQ ID NO: 413552 - RNA, 19 nt, Artificial Sequence
  Description of Artificial Sequence: Synthetic oligonucleotide
  Antisense Strand to SEQ ID NO: 413551
uaccauaagcaucucuacg

SEQ ID NO: 413553 - RNA, 19 nt, Artificial Sequence
  Description of Artificial Sequence: Synthetic oligonucleotide
  Sense Strand Starting at position 1208 of SEQ ID NO: 316401
aauguuguuaagggacgaa

SEQ ID NO: 413554 - RNA, 19 nt, Artificial Sequence
  Description of Artificial Sequence: Synthetic oligonucleotide
  Antisense Strand to SEQ ID NO: 413553
uucgucccuuaacaacauu

SEQ ID NO: 413555 - RNA, 19 nt, Artificial Sequence
  Description of Artificial Sequence: Synthetic oligonucleotide
  Sense Strand Starting at position 1208 of SEQ ID NO: 316690
cugguuucagguggaaaug

SEQ ID NO: 413556 - RNA, 19 nt, Artificial Sequence
  Description of Artificial Sequence: Synthetic oligonucleotide
  Antisense Strand to SEQ ID NO: 413555
cauuuccaccugaaaccag

SEQ ID NO: 413557 - RNA, 19 nt, Artificial Sequence
  Description of Artificial Sequence: Synthetic oligonucleotide
  Sense Strand Starting at position 1208 of SEQ ID NO: 317707
cucccuauuugagucgcaa

SEQ ID NO: 413558 - RNA, 19 nt, Artificial Sequence
  Description of Artificial Sequence: Synthetic oligonucleotide
  Antisense Strand to SEQ ID NO: 413557
uugcgacucaaauagggag

SEQ ID NO: 413559 - RNA, 19 nt, Artificial Sequence
  Description of Artificial Sequence: Synthetic oligonucleotide
  Sense Strand Starting at position 1208 of SEQ ID NO: 317765
ggcagagacucauuacuuu

SEQ ID NO: 413560 - RNA, 19 nt, Artificial Sequence
  Description of Artificial Sequence: Synthetic oligonucleotide
  Antisense Strand to SEQ ID NO: 413559
aaaguaaugagucucugcc

SEQ ID NO: 413561 - RNA, 19 nt, Artificial Sequence
  Description of Artificial Sequence: Synthetic oligonucleotide
  Sense Strand Starting at position 1208 of SEQ ID NO: 317943
ucucaugaaguuugagauc

SEQ ID NO: 413562 - RNA, 19 nt, Artificial Sequence
  Description of Artificial Sequence: Synthetic oligonucleotide
  Antisense Strand to SEQ ID NO: 413561
gaucucaaacuucaugaga

SEQ ID NO: 413563 - RNA, 19 nt, Artificial Sequence
  Description of Artificial Sequence: Synthetic oligonucleotide
  Sense Strand Starting at position 1208 of SEQ ID NO: 317950
aaguuugagaucuggugga

SEQ ID NO: 413564 - RNA, 19 nt, Artificial Sequence
  Description of Artificial Sequence: Synthetic oligonucleotide
  Antisense Strand to SEQ ID NO: 413563
uccaccagaucucaaacuu

SEQ ID NO: 413565 - RNA, 19 nt, Artificial Sequence
  Description of Artificial Sequence: Synthetic oligonucleotide
  Sense Strand Starting at position 1208 of SEQ ID NO: 318026
uucugagagguauauggua

SEQ ID NO: 413566 - RNA, 19 nt, Artificial Sequence
  Description of Artificial Sequence: Synthetic oligonucleotide
  Antisense Strand to SEQ ID NO: 413565
uaccauauaccucucagaa

SEQ ID NO: 413567 - RNA, 19 nt, Artificial Sequence
  Description of Artificial Sequence: Synthetic oligonucleotide
  Sense Strand Starting at position 1208 of SEQ ID NO: 318028
cugagagguauaugguacu

SEQ ID NO: 413568 - RNA, 19 nt, Artificial Sequence
  Description of Artificial Sequence: Synthetic oligonucleotide
  Antisense Strand to SEQ ID NO: 413567
aguaccauauaccucucag

SEQ ID NO: 413569 - RNA, 19 nt, Artificial Sequence
  Description of Artificial Sequence: Synthetic oligonucleotide
  Sense Strand Starting at position 1208 of SEQ ID NO: 318069
ugauuuaguugaggaugaa

SEQ ID NO: 413570 - RNA, 19 nt, Artificial Sequence
  Description of Artificial Sequence: Synthetic oligonucleotide
  Antisense Strand to SEQ ID NO: 413569
uucauccucaacuaaauca

SEQ ID NO: 413571 - RNA, 19 nt, Artificial Sequence
  Description of Artificial Sequence: Synthetic oligonucleotide
  Sense Strand Starting at position 1208 of SEQ ID NO: 318089
aggguagaaucugaggaau

SEQ ID NO: 413572 - RNA, 19 nt, Artificial Sequence
  Description of Artificial Sequence: Synthetic oligonucleotide
  Antisense Strand to SEQ ID NO: 413571
auuccucagauucuacccu

SEQ ID NO: 413573 - RNA, 19 nt, Artificial Sequence
  Description of Artificial Sequence: Synthetic oligonucleotide
  Sense Strand Starting at position 1208 of SEQ ID NO: 318115
ggaggaguuaguugcucca

SEQ ID NO: 413574 - RNA, 19 nt, Artificial Sequence
  Description of Artificial Sequence: Synthetic oligonucleotide
  Antisense Strand to SEQ ID NO: 413573
uggagcaacuaacuccucc

SEQ ID NO: 413575 - RNA, 19 nt, Artificial Sequence
  Description of Artificial Sequence: Synthetic oligonucleotide
  Sense Strand Starting at position 1208 of SEQ ID NO: 318163
gggagcgcuaaagaauauu

SEQ ID NO: 413576 - RNA, 19 nt, Artificial Sequence
  Description of Artificial Sequence: Synthetic oligonucleotide
  Antisense Strand to SEQ ID NO: 413575
aauauucuuuagcgcuccc

SEQ ID NO: 413577 - RNA, 19 nt, Artificial Sequence
  Description of Artificial Sequence: Synthetic oligonucleotide
  Sense Strand Starting at position 1208 of SEQ ID NO: 318166
agcgcuaaagaauauugaa

SEQ ID NO: 413578 - RNA, 19 nt, Artificial Sequence
  Description of Artificial Sequence: Synthetic oligonucleotide
  Antisense Strand to SEQ ID NO: 413577
uucaauauucuuuagcgcu

SEQ ID NO: 413579 - RNA, 19 nt, Artificial Sequence
  Description of Artificial Sequence: Synthetic oligonucleotide
  Sense Strand Starting at position 1208 of SEQ ID NO: 318218
gcgagaacaggugaggauu

SEQ ID NO: 413580 - RNA, 19 nt, Artificial Sequence
  Description of Artificial Sequence: Synthetic oligonucleotide
  Antisense Strand to SEQ ID NO: 413579
aauccucaccuguucucgc

SEQ ID NO: 413581 - RNA, 19 nt, Artificial Sequence
  Description of Artificial Sequence: Synthetic oligonucleotide
  Sense Strand Starting at position 1208 of SEQ ID NO: 318556
uugggacuuuaaucugagu

SEQ ID NO: 413582 - RNA, 19 nt, Artificial Sequence
  Description of Artificial Sequence: Synthetic oligonucleotide
  Antisense Strand to SEQ ID NO: 413581
acucagauuaaagucccaa

SEQ ID NO: 413583 - RNA, 19 nt, Artificial Sequence
  Description of Artificial Sequence: Synthetic oligonucleotide
  Sense Strand Starting at position 1208 of SEQ ID NO: 318561
acuuuaaucugagugcuug

SEQ ID NO: 413584 - RNA, 19 nt, Artificial Sequence
  Description of Artificial Sequence: Synthetic oligonucleotide
  Antisense Strand to SEQ ID NO: 413583
caagcacucagauuaaagu

SEQ ID NO: 413585 - RNA, 19 nt, Artificial Sequence
  Description of Artificial Sequence: Synthetic oligonucleotide
  Sense Strand Starting at position 1208 of SEQ ID NO: 318567
aucugagugcuugguagaa

SEQ ID NO: 413586 - RNA, 19 nt, Artificial Sequence
  Description of Artificial Sequence: Synthetic oligonucleotide
  Antisense Strand to SEQ ID NO: 413585
uucuaccaagcacucagau

SEQ ID NO: 413587 - RNA, 19 nt, Artificial Sequence
  Description of Artificial Sequence: Synthetic oligonucleotide
  Sense Strand Starting at position 1208 of SEQ ID NO: 318571
gagugcuugguagaagcua

SEQ ID NO: 413588 - RNA, 19 nt, Artificial Sequence
  Description of Artificial Sequence: Synthetic oligonucleotide
  Antisense Strand to SEQ ID NO: 413587
uagcuucuaccaagcacuc

SEQ ID NO: 413589 - RNA, 19 nt, Artificial Sequence
  Description of Artificial Sequence: Synthetic oligonucleotide
  Sense Strand Starting at position 1208 of SEQ ID NO: 318579
gguagaagcuauucagguu

SEQ ID NO: 413590 - RNA, 19 nt, Artificial Sequence
  Description of Artificial Sequence: Synthetic oligonucleotide
  Antisense Strand to SEQ ID NO: 413589
aaccugaauagcuucuacc

SEQ ID NO: 413591 - RNA, 19 nt, Artificial Sequence
  Description of Artificial Sequence: Synthetic oligonucleotide
  Sense Strand Starting at position 1208 of SEQ ID NO: 318956
cgugaagaguggucugaug

SEQ ID NO: 413592 - RNA, 19 nt, Artificial Sequence
  Description of Artificial Sequence: Synthetic oligonucleotide
  Antisense Strand to SEQ ID NO: 413591
caucagaccacucuucacg

SEQ ID NO: 413593 - RNA, 19 nt, Artificial Sequence
  Description of Artificial Sequence: Synthetic oligonucleotide
  Sense Strand Starting at position 1208 of SEQ ID NO: 319051
gacagagaagagugcuaau

SEQ ID NO: 413594 - RNA, 19 nt, Artificial Sequence
  Description of Artificial Sequence: Synthetic oligonucleotide
  Antisense Strand to SEQ ID NO: 413593
auuagcacucuucucuguc

SEQ ID NO: 413595 - RNA, 19 nt, Artificial Sequence
  Description of Artificial Sequence: Synthetic oligonucleotide
  Sense Strand Starting at position 1208 of SEQ ID NO: 319130
uggcaagguuuacuuagau

SEQ ID NO: 413596 - RNA, 19 nt, Artificial Sequence
  Description of Artificial Sequence: Synthetic oligonucleotide
  Antisense Strand to SEQ ID NO: 413595
aucuaaguaaaccuugcca

SEQ ID NO: 413597 - RNA, 19 nt, Artificial Sequence
  Description of Artificial Sequence: Synthetic oligonucleotide
  Sense Strand Starting at position 1208 of SEQ ID NO: 319134
aagguuuacuuagauuuga

SEQ ID NO: 413598 - RNA, 19 nt, Artificial Sequence
  Description of Artificial Sequence: Synthetic oligonucleotide
  Antisense Strand to SEQ ID NO: 413597
ucaaaucuaaguaaaccuu

SEQ ID NO: 413599 - RNA, 19 nt, Artificial Sequence
  Description of Artificial Sequence: Synthetic oligonucleotide
  Sense Strand Starting at position 1209 of SEQ ID NO: 315364
ccacuaauuugguuugugu

SEQ ID NO: 413600 - RNA, 19 nt, Artificial Sequence
  Description of Artificial Sequence: Synthetic oligonucleotide
  Antisense Strand to SEQ ID NO: 413599
acacaaaccaaauuagugg

SEQ ID NO: 413601 - RNA, 19 nt, Artificial Sequence
  Description of Artificial Sequence: Synthetic oligonucleotide
  Sense Strand Starting at position 1209 of SEQ ID NO: 315366
acuaauuugguuuguguga

SEQ ID NO: 413602 - RNA, 19 nt, Artificial Sequence
  Description of Artificial Sequence: Synthetic oligonucleotide
  Antisense Strand to SEQ ID NO: 413601
ucacacaaaccaaauuagu

SEQ ID NO: 413603 - RNA, 19 nt, Artificial Sequence
  Description of Artificial Sequence: Synthetic oligonucleotide
  Sense Strand Starting at position 1209 of SEQ ID NO: 315499
uuugauuuccgguggcuga

SEQ ID NO: 413604 - RNA, 19 nt, Artificial Sequence
  Description of Artificial Sequence: Synthetic oligonucleotide
  Antisense Strand to SEQ ID NO: 413603
ucagccaccggaaaucaaa

SEQ ID NO: 413605 - RNA, 19 nt, Artificial Sequence
  Description of Artificial Sequence: Synthetic oligonucleotide
  Sense Strand Starting at position 1209 of SEQ ID NO: 315500
uugauuuccgguggcugau

SEQ ID NO: 413606 - RNA, 19 nt, Artificial Sequence
  Description of Artificial Sequence: Synthetic oligonucleotide
  Antisense Strand to SEQ ID NO: 413605
aucagccaccggaaaucaa

SEQ ID NO: 413607 - RNA, 19 nt, Artificial Sequence
  Description of Artificial Sequence: Synthetic oligonucleotide
  Sense Strand Starting at position 1209 of SEQ ID NO: 315591
acugaauucuuggcaagug

SEQ ID NO: 413608 - RNA, 19 nt, Artificial Sequence
  Description of Artificial Sequence: Synthetic oligonucleotide
  Antisense Strand to SEQ ID NO: 413607
cacuugccaagaauucagu

SEQ ID NO: 413609 - RNA, 19 nt, Artificial Sequence
  Description of Artificial Sequence: Synthetic oligonucleotide
  Sense Strand Starting at position 1209 of SEQ ID NO: 315668
agaaacauguuguuguaca

SEQ ID NO: 413610 - RNA, 19 nt, Artificial Sequence
  Description of Artificial Sequence: Synthetic oligonucleotide
  Antisense Strand to SEQ ID NO: 413609
uguacaacaacauguuucu

SEQ ID NO: 413611 - RNA, 19 nt, Artificial Sequence
  Description of Artificial Sequence: Synthetic oligonucleotide
  Sense Strand Starting at position 1209 of SEQ ID NO: 315785
aauaaauuacguggaaagu

SEQ ID NO: 413612 - RNA, 19 nt, Artificial Sequence
  Description of Artificial Sequence: Synthetic oligonucleotide
  Antisense Strand to SEQ ID NO: 413611
acuuuccacguaauuuauu

SEQ ID NO: 413613 - RNA, 19 nt, Artificial Sequence
  Description of Artificial Sequence: Synthetic oligonucleotide
  Sense Strand Starting at position 1209 of SEQ ID NO: 315824
cauaaugaguuaguugaac

SEQ ID NO: 413614 - RNA, 19 nt, Artificial Sequence
  Description of Artificial Sequence: Synthetic oligonucleotide
  Antisense Strand to SEQ ID NO: 413613
guucaacuaacucauuaug

SEQ ID NO: 413615 - RNA, 19 nt, Artificial Sequence
  Description of Artificial Sequence: Synthetic oligonucleotide
  Sense Strand Starting at position 1209 of SEQ ID NO: 315838
ugaaccauuucuuacagag

SEQ ID NO: 413616 - RNA, 19 nt, Artificial Sequence
  Description of Artificial Sequence: Synthetic oligonucleotide
  Antisense Strand to SEQ ID NO: 413615
cucuguaagaaaugguuca

SEQ ID NO: 413617 - RNA, 19 nt, Artificial Sequence
  Description of Artificial Sequence: Synthetic oligonucleotide
  Sense Strand Starting at position 1209 of SEQ ID NO: 315855
aguagauuaccagguguau

SEQ ID NO: 413618 - RNA, 19 nt, Artificial Sequence
  Description of Artificial Sequence: Synthetic oligonucleotide
  Antisense Strand to SEQ ID NO: 413617
auacaccugguaaucuacu

SEQ ID NO: 413619 - RNA, 19 nt, Artificial Sequence
  Description of Artificial Sequence: Synthetic oligonucleotide
  Sense Strand Starting at position 1209 of SEQ ID NO: 315988
ucuuaaguuccuggacaua

SEQ ID NO: 413620 - RNA, 19 nt, Artificial Sequence
  Description of Artificial Sequence: Synthetic oligonucleotide
  Antisense Strand to SEQ ID NO: 413619
uauguccaggaacuuaaga

SEQ ID NO: 413621 - RNA, 19 nt, Artificial Sequence
  Description of Artificial Sequence: Synthetic oligonucleotide
  Sense Strand Starting at position 1209 of SEQ ID NO: 316115
aagaauuaaggacguguga

SEQ ID NO: 413622 - RNA, 19 nt, Artificial Sequence
  Description of Artificial Sequence: Synthetic oligonucleotide
  Antisense Strand to SEQ ID NO: 413621
ucacacguccuuaauucuu

SEQ ID NO: 413623 - RNA, 19 nt, Artificial Sequence
  Description of Artificial Sequence: Synthetic oligonucleotide
  Sense Strand Starting at position 1209 of SEQ ID NO: 316131
ugaguagguuuaguuuaga

SEQ ID NO: 413624 - RNA, 19 nt, Artificial Sequence
  Description of Artificial Sequence: Synthetic oligonucleotide
  Antisense Strand to SEQ ID NO: 413623
ucuaaacuaaaccuacuca

SEQ ID NO: 413625 - RNA, 19 nt, Artificial Sequence
  Description of Artificial Sequence: Synthetic oligonucleotide
  Sense Strand Starting at position 1209 of SEQ ID NO: 316195
guaauaaccuuccugggua

SEQ ID NO: 413626 - RNA, 19 nt, Artificial Sequence
  Description of Artificial Sequence: Synthetic oligonucleotide
  Antisense Strand to SEQ ID NO: 413625
uacccaggaagguuauuac

SEQ ID NO: 413627 - RNA, 19 nt, Artificial Sequence
  Description of Artificial Sequence: Synthetic oligonucleotide
  Sense Strand Starting at position 1209 of SEQ ID NO: 316279
ggaagaaucucaguguggu

SEQ ID NO: 413628 - RNA, 19 nt, Artificial Sequence
  Description of Artificial Sequence: Synthetic oligonucleotide
  Antisense Strand to SEQ ID NO: 413627
accacacugagauucuucc

SEQ ID NO: 413629 - RNA, 19 nt, Artificial Sequence
  Description of Artificial Sequence: Synthetic oligonucleotide
  Sense Strand Starting at position 1209 of SEQ ID NO: 316280
gaagaaucucaguguggug

SEQ ID NO: 413630 - RNA, 19 nt, Artificial Sequence
  Description of Artificial Sequence: Synthetic oligonucleotide
  Antisense Strand to SEQ ID NO: 413629
caccacacugagauucuuc

SEQ ID NO: 413631 - RNA, 19 nt, Artificial Sequence
  Description of Artificial Sequence: Synthetic oligonucleotide
  Sense Strand Starting at position 1209 of SEQ ID NO: 317415
uggcacucaguugaucaau

SEQ ID NO: 413632 - RNA, 19 nt, Artificial Sequence
  Description of Artificial Sequence: Synthetic oligonucleotide
  Antisense Strand to SEQ ID NO: 413631
auugaucaacugagugcca

SEQ ID NO: 413633 - RNA, 19 nt, Artificial Sequence
  Description of Artificial Sequence: Synthetic oligonucleotide
  Sense Strand Starting at position 1209 of SEQ ID NO: 317417
gcacucaguugaucaauua

SEQ ID NO: 413634 - RNA, 19 nt, Artificial Sequence
  Description of Artificial Sequence: Synthetic oligonucleotide
  Antisense Strand to SEQ ID NO: 413633
uaauugaucaacugagugc

SEQ ID NO: 413635 - RNA, 19 nt, Artificial Sequence
  Description of Artificial Sequence: Synthetic oligonucleotide
  Sense Strand Starting at position 1209 of SEQ ID NO: 317498
ugcggauucugauccagaa

SEQ ID NO: 413636 - RNA, 19 nt, Artificial Sequence
  Description of Artificial Sequence: Synthetic oligonucleotide
  Antisense Strand to SEQ ID NO: 413635
uucuggaucagaauccgca

SEQ ID NO: 413637 - RNA, 19 nt, Artificial Sequence
  Description of Artificial Sequence: Synthetic oligonucleotide
  Sense Strand Starting at position 1209 of SEQ ID NO: 317753
gagggaagguguguuuaau

SEQ ID NO: 413638 - RNA, 19 nt, Artificial Sequence
  Description of Artificial Sequence: Synthetic oligonucleotide
  Antisense Strand to SEQ ID NO: 413637
auuaaacacaccuucccuc

SEQ ID NO: 413639 - RNA, 19 nt, Artificial Sequence
  Description of Artificial Sequence: Synthetic oligonucleotide
  Sense Strand Starting at position 1209 of SEQ ID NO: 317850
acggaauggccauggaaga

SEQ ID NO: 413640 - RNA, 19 nt, Artificial Sequence
  Description of Artificial Sequence: Synthetic oligonucleotide
  Antisense Strand to SEQ ID NO: 413639
ucuuccauggccauuccgu

SEQ ID NO: 413641 - RNA, 19 nt, Artificial Sequence
  Description of Artificial Sequence: Synthetic oligonucleotide
  Sense Strand Starting at position 1209 of SEQ ID NO: 317937
uggccagagaagugguaua

SEQ ID NO: 413642 - RNA, 19 nt, Artificial Sequence
  Description of Artificial Sequence: Synthetic oligonucleotide
  Antisense Strand to SEQ ID NO: 413641
uauaccacuucucuggcca

SEQ ID NO: 413643 - RNA, 19 nt, Artificial Sequence
  Description of Artificial Sequence: Synthetic oligonucleotide
  Sense Strand Starting at position 1209 of SEQ ID NO: 317977
cguaacaauuuguuguaga

SEQ ID NO: 413644 - RNA, 19 nt, Artificial Sequence
  Description of Artificial Sequence: Synthetic oligonucleotide
  Antisense Strand to SEQ ID NO: 413643
ucuacaacaaauuguuacg

SEQ ID NO: 413645 - RNA, 19 nt, Artificial Sequence
  Description of Artificial Sequence: Synthetic oligonucleotide
  Sense Strand Starting at position 1209 of SEQ ID NO: 318092
aauaauaugccuugagggu

SEQ ID NO: 413646 - RNA, 19 nt, Artificial Sequence
  Description of Artificial Sequence: Synthetic oligonucleotide
  Antisense Strand to SEQ ID NO: 413645
acccucaaggcauauuauu

SEQ ID NO: 413647 - RNA, 19 nt, Artificial Sequence
  Description of Artificial Sequence: Synthetic oligonucleotide
  Sense Strand Starting at position 1209 of SEQ ID NO: 318133
uucugucaguaauuccaga

SEQ ID NO: 413648 - RNA, 19 nt, Artificial Sequence
  Description of Artificial Sequence: Synthetic oligonucleotide
  Antisense Strand to SEQ ID NO: 413647
ucuggaauuacugacagaa

SEQ ID NO: 413649 - RNA, 19 nt, Artificial Sequence
  Description of Artificial Sequence: Synthetic oligonucleotide
  Sense Strand Starting at position 1209 of SEQ ID NO: 318138
ucaguaauuccagagucua

SEQ ID NO: 413650 - RNA, 19 nt, Artificial Sequence
  Description of Artificial Sequence: Synthetic oligonucleotide
  Antisense Strand to SEQ ID NO: 413649
uagacucuggaauuacuga

SEQ ID NO: 413651 - RNA, 19 nt, Artificial Sequence
  Description of Artificial Sequence: Synthetic oligonucleotide
  Sense Strand Starting at position 1209 of SEQ ID NO: 318262
cuuauuacccaguagugua

SEQ ID NO: 413652 - RNA, 19 nt, Artificial Sequence
  Description of Artificial Sequence: Synthetic oligonucleotide
  Antisense Strand to SEQ ID NO: 413651
uacacuacuggguaauaag

SEQ ID NO: 413653 - RNA, 19 nt, Artificial Sequence
  Description of Artificial Sequence: Synthetic oligonucleotide
  Sense Strand Starting at position 1209 of SEQ ID NO: 318292
caagauucuuaagugcuga

SEQ ID NO: 413654 - RNA, 19 nt, Artificial Sequence
  Description of Artificial Sequence: Synthetic oligonucleotide
  Antisense Strand to SEQ ID NO: 413653
ucagcacuuaagaaucuug

SEQ ID NO: 413655 - RNA, 19 nt, Artificial Sequence
  Description of Artificial Sequence: Synthetic oligonucleotide
  Sense Strand Starting at position 1209 of SEQ ID NO: 318297
uucuuaagugcugaauucu

SEQ ID NO: 413656 - RNA, 19 nt, Artificial Sequence
  Description of Artificial Sequence: Synthetic oligonucleotide
  Antisense Strand to SEQ ID NO: 413655
agaauucagcacuuaagaa

SEQ ID NO: 413657 - RNA, 19 nt, Artificial Sequence
  Description of Artificial Sequence: Synthetic oligonucleotide
  Sense Strand Starting at position 1209 of SEQ ID NO: 318382
cuaucaaggugaucaaacu

SEQ ID NO: 413658 - RNA, 19 nt, Artificial Sequence
  Description of Artificial Sequence: Synthetic oligonucleotide
  Antisense Strand to SEQ ID NO: 413657
aguuugaucaccuugauag

SEQ ID NO: 413659 - RNA, 19 nt, Artificial Sequence
  Description of Artificial Sequence: Synthetic oligonucleotide
  Sense Strand Starting at position 1209 of SEQ ID NO: 318395
caaacugucgcuuagagaa

SEQ ID NO: 413660 - RNA, 19 nt, Artificial Sequence
  Description of Artificial Sequence: Synthetic oligonucleotide
  Antisense Strand to SEQ ID NO: 413659
uucucuaagcgacaguuug

SEQ ID NO: 413661 - RNA, 19 nt, Artificial Sequence
  Description of Artificial Sequence: Synthetic oligonucleotide
  Sense Strand Starting at position 1209 of SEQ ID NO: 318501
ucacauugucccuaucaga

SEQ ID NO: 413662 - RNA, 19 nt, Artificial Sequence
  Description of Artificial Sequence: Synthetic oligonucleotide
  Antisense Strand to SEQ ID NO: 413661
ucugauagggacaauguga

SEQ ID NO: 413663 - RNA, 19 nt, Artificial Sequence
  Description of Artificial Sequence: Synthetic oligonucleotide
  Sense Strand Starting at position 1209 of SEQ ID NO: 318508
gucccuaucagagauggca

SEQ ID NO: 413664 - RNA, 19 nt, Artificial Sequence
  Description of Artificial Sequence: Synthetic oligonucleotide
  Antisense Strand to SEQ ID NO: 413663
ugccaucucugauagggac

SEQ ID NO: 413665 - RNA, 19 nt, Artificial Sequence
  Description of Artificial Sequence: Synthetic oligonucleotide
  Sense Strand Starting at position 1209 of SEQ ID NO: 318542
aguuucugggaacauguua

SEQ ID NO: 413666 - RNA, 19 nt, Artificial Sequence
  Description of Artificial Sequence: Synthetic oligonucleotide
  Antisense Strand to SEQ ID NO: 413665
uaacauguucccagaaacu

SEQ ID NO: 413667 - RNA, 19 nt, Artificial Sequence
  Description of Artificial Sequence: Synthetic oligonucleotide
  Sense Strand Starting at position 1209 of SEQ ID NO: 318648
guuugcugucauuaaacca

SEQ ID NO: 413668 - RNA, 19 nt, Artificial Sequence
  Description of Artificial Sequence: Synthetic oligonucleotide
  Antisense Strand to SEQ ID NO: 413667
ugguuuaaugacagcaaac

SEQ ID NO: 413669 - RNA, 19 nt, Artificial Sequence
  Description of Artificial Sequence: Synthetic oligonucleotide
  Sense Strand Starting at position 1209 of SEQ ID NO: 318656
ucauuaaaccagugguucu

SEQ ID NO: 413670 - RNA, 19 nt, Artificial Sequence
  Description of Artificial Sequence: Synthetic oligonucleotide
  Antisense Strand to SEQ ID NO: 413669
agaaccacugguuuaauga

SEQ ID NO: 413671 - RNA, 19 nt, Artificial Sequence
  Description of Artificial Sequence: Synthetic oligonucleotide
  Sense Strand Starting at position 1209 of SEQ ID NO: 318802
auccauccaugcuugagaa

SEQ ID NO: 413672 - RNA, 19 nt, Artificial Sequence
  Description of Artificial Sequence: Synthetic oligonucleotide
  Antisense Strand to SEQ ID NO: 413671
uucucaagcauggauggau

SEQ ID NO: 413673 - RNA, 19 nt, Artificial Sequence
  Description of Artificial Sequence: Synthetic oligonucleotide
  Sense Strand Starting at position 1209 of SEQ ID NO: 318804
ccauccaugcuugagaaca

SEQ ID NO: 413674 - RNA, 19 nt, Artificial Sequence
  Description of Artificial Sequence: Synthetic oligonucleotide
  Antisense Strand to SEQ ID NO: 413673
uguucucaagcauggaugg

SEQ ID NO: 413675 - RNA, 19 nt, Artificial Sequence
  Description of Artificial Sequence: Synthetic oligonucleotide
  Sense Strand Starting at position 1209 of SEQ ID NO: 319105
cugauaaacucucugguaa

SEQ ID NO: 413676 - RNA, 19 nt, Artificial Sequence
  Description of Artificial Sequence: Synthetic oligonucleotide
  Antisense Strand to SEQ ID NO: 413675
uuaccagagaguuuaucag

SEQ ID NO: 413677 - RNA, 19 nt, Artificial Sequence
  Description of Artificial Sequence: Synthetic oligonucleotide
  Sense Strand Starting at position 1209 of SEQ ID NO: 319106
ugauaaacucucugguaau

SEQ ID NO: 413678 - RNA, 19 nt, Artificial Sequence
  Description of Artificial Sequence: Synthetic oligonucleotide
  Antisense Strand to SEQ ID NO: 413677
auuaccagagaguuuauca

SEQ ID NO: 413679 - RNA, 19 nt, Artificial Sequence
  Description of Artificial Sequence: Synthetic oligonucleotide
  Sense Strand Starting at position 1210 of SEQ ID NO: 315516
ggacaaugcuagucuagac

SEQ ID NO: 413680 - RNA, 19 nt, Artificial Sequence
  Description of Artificial Sequence: Synthetic oligonucleotide
  Antisense Strand to SEQ ID NO: 413679
gucuagacuagcauugucc

SEQ ID NO: 413681 - RNA, 19 nt, Artificial Sequence
  Description of Artificial Sequence: Synthetic oligonucleotide
  Sense Strand Starting at position 1210 of SEQ ID NO: 315965
aggauagucuuucuuauua

SEQ ID NO: 413682 - RNA, 19 nt, Artificial Sequence
  Description of Artificial Sequence: Synthetic oligonucleotide
  Antisense Strand to SEQ ID NO: 413681
uaauaagaaagacuauccu

SEQ ID NO: 413683 - RNA, 19 nt, Artificial Sequence
  Description of Artificial Sequence: Synthetic oligonucleotide
  Sense Strand Starting at position 1210 of SEQ ID NO: 315983
agauuauacucucccagua

SEQ ID NO: 413684 - RNA, 19 nt, Artificial Sequence
  Description of Artificial Sequence: Synthetic oligonucleotide
  Antisense Strand to SEQ ID NO: 413683
uacugggagaguauaaucu

SEQ ID NO: 413685 - RNA, 19 nt, Artificial Sequence
  Description of Artificial Sequence: Synthetic oligonucleotide
  Sense Strand Starting at position 1210 of SEQ ID NO: 316010
uuuggcauuuggcuuacaa

SEQ ID NO: 413686 - RNA, 19 nt, Artificial Sequence
  Description of Artificial Sequence: Synthetic oligonucleotide
  Antisense Strand to SEQ ID NO: 413685
uuguaagccaaaugccaaa

SEQ ID NO: 413687 - RNA, 19 nt, Artificial Sequence
  Description of Artificial Sequence: Synthetic oligonucleotide
  Sense Strand Starting at position 1210 of SEQ ID NO: 316014
gcauuuggcuuacaaauuu

SEQ ID NO: 413688 - RNA, 19 nt, Artificial Sequence
  Description of Artificial Sequence: Synthetic oligonucleotide
  Antisense Strand to SEQ ID NO: 413687
aaauuuguaagccaaaugc

SEQ ID NO: 413689 - RNA, 19 nt, Artificial Sequence
  Description of Artificial Sequence: Synthetic oligonucleotide
  Sense Strand Starting at position 1210 of SEQ ID NO: 316030
uuugccucagauuaguuaa

SEQ ID NO: 413690 - RNA, 19 nt, Artificial Sequence
  Description of Artificial Sequence: Synthetic oligonucleotide
  Antisense Strand to SEQ ID NO: 413689
uuaacuaaucugaggcaaa

SEQ ID NO: 413691 - RNA, 19 nt, Artificial Sequence
  Description of Artificial Sequence: Synthetic oligonucleotide
  Sense Strand Starting at position 1210 of SEQ ID NO: 316032
ugccucagauuaguuaauu

SEQ ID NO: 413692 - RNA, 19 nt, Artificial Sequence
  Description of Artificial Sequence: Synthetic oligonucleotide
  Antisense Strand to SEQ ID NO: 413691
aauuaacuaaucugaggca

SEQ ID NO: 413693 - RNA, 19 nt, Artificial Sequence
  Description of Artificial Sequence: Synthetic oligonucleotide
  Sense Strand Starting at position 1210 of SEQ ID NO: 316033
gccucagauuaguuaauug

SEQ ID NO: 413694 - RNA, 19 nt, Artificial Sequence
  Description of Artificial Sequence: Synthetic oligonucleotide
  Antisense Strand to SEQ ID NO: 413693
caauuaacuaaucugaggc

SEQ ID NO: 413695 - RNA, 19 nt, Artificial Sequence
  Description of Artificial Sequence: Synthetic oligonucleotide
  Sense Strand Starting at position 1210 of SEQ ID NO: 316037
cagauuaguuaauugaugu

SEQ ID NO: 413696 - RNA, 19 nt, Artificial Sequence
  Description of Artificial Sequence: Synthetic oligonucleotide
  Antisense Strand to SEQ ID NO: 413695
acaucaauuaacuaaucug

SEQ ID NO: 413697 - RNA, 19 nt, Artificial Sequence
  Description of Artificial Sequence: Synthetic oligonucleotide
  Sense Strand Starting at position 1210 of SEQ ID NO: 316069
uacggucaacuguaaagua

SEQ ID NO: 413698 - RNA, 19 nt, Artificial Sequence
  Description of Artificial Sequence: Synthetic oligonucleotide
  Antisense Strand to SEQ ID NO: 413697
uacuuuacaguugaccgua

SEQ ID NO: 413699 - RNA, 19 nt, Artificial Sequence
  Description of Artificial Sequence: Synthetic oligonucleotide
  Sense Strand Starting at position 1210 of SEQ ID NO: 316092
ugacauugguguuccagau

SEQ ID NO: 413700 - RNA, 19 nt, Artificial Sequence
  Description of Artificial Sequence: Synthetic oligonucleotide
  Antisense Strand to SEQ ID NO: 413699
aucuggaacaccaauguca

SEQ ID NO: 413701 - RNA, 19 nt, Artificial Sequence
  Description of Artificial Sequence: Synthetic oligonucleotide
  Sense Strand Starting at position 1210 of SEQ ID NO: 316096
auugguguuccagaucaaa

SEQ ID NO: 413702 - RNA, 19 nt, Artificial Sequence
  Description of Artificial Sequence: Synthetic oligonucleotide
  Antisense Strand to SEQ ID NO: 413701
uuugaucuggaacaccaau

SEQ ID NO: 413703 - RNA, 19 nt, Artificial Sequence
  Description of Artificial Sequence: Synthetic oligonucleotide
  Sense Strand Starting at position 1210 of SEQ ID NO: 316384
uuuccuuaagauugugauc

SEQ ID NO: 413704 - RNA, 19 nt, Artificial Sequence
  Description of Artificial Sequence: Synthetic oligonucleotide
  Antisense Strand to SEQ ID NO: 413703
gaucacaaucuuaaggaaa

SEQ ID NO: 413705 - RNA, 19 nt, Artificial Sequence
  Description of Artificial Sequence: Synthetic oligonucleotide
  Sense Strand Starting at position 1210 of SEQ ID NO: 316528
agcauccaugcugagauaa

SEQ ID NO: 413706 - RNA, 19 nt, Artificial Sequence
  Description of Artificial Sequence: Synthetic oligonucleotide
  Antisense Strand to SEQ ID NO: 413705
uuaucucagcauggaugcu

SEQ ID NO: 413707 - RNA, 19 nt, Artificial Sequence
  Description of Artificial Sequence: Synthetic oligonucleotide
  Sense Strand Starting at position 1210 of SEQ ID NO: 316575
ggagcuggauaaucaauua

SEQ ID NO: 413708 - RNA, 19 nt, Artificial Sequence
  Description of Artificial Sequence: Synthetic oligonucleotide
  Antisense Strand to SEQ ID NO: 413707
uaauugauuauccagcucc

SEQ ID NO: 413709 - RNA, 19 nt, Artificial Sequence
  Description of Artificial Sequence: Synthetic oligonucleotide
  Sense Strand Starting at position 1210 of SEQ ID NO: 316587
ucaauuaaucagggagguu

SEQ ID NO: 413710 - RNA, 19 nt, Artificial Sequence
  Description of Artificial Sequence: Synthetic oligonucleotide
  Antisense Strand to SEQ ID NO: 413709
aaccucccugauuaauuga

SEQ ID NO: 413711 - RNA, 19 nt, Artificial Sequence
  Description of Artificial Sequence: Synthetic oligonucleotide
  Sense Strand Starting at position 1210 of SEQ ID NO: 316602
gguuaaauagcacauucga

SEQ ID NO: 413712 - RNA, 19 nt, Artificial Sequence
  Description of Artificial Sequence: Synthetic oligonucleotide
  Antisense Strand to SEQ ID NO: 413711
ucgaaugugcuauuuaacc

SEQ ID NO: 413713 - RNA, 19 nt, Artificial Sequence
  Description of Artificial Sequence: Synthetic oligonucleotide
  Sense Strand Starting at position 1210 of SEQ ID NO: 317246
uguuccaaucagggaaaca

SEQ ID NO: 413714 - RNA, 19 nt, Artificial Sequence
  Description of Artificial Sequence: Synthetic oligonucleotide
  Antisense Strand to SEQ ID NO: 413713
uguuucccugauuggaaca

SEQ ID NO: 413715 - RNA, 19 nt, Artificial Sequence
  Description of Artificial Sequence: Synthetic oligonucleotide
  Sense Strand Starting at position 1210 of SEQ ID NO: 317316
ucccuauuugccuggcaga

SEQ ID NO: 413716 - RNA, 19 nt, Artificial Sequence
  Description of Artificial Sequence: Synthetic oligonucleotide
  Antisense Strand to SEQ ID NO: 413715
ucugccaggcaaauaggga

SEQ ID NO: 413717 - RNA, 19 nt, Artificial Sequence
  Description of Artificial Sequence: Synthetic oligonucleotide
  Sense Strand Starting at position 1210 of SEQ ID NO: 317339
uggcaaggacgcugaauua

SEQ ID NO: 413718 - RNA, 19 nt, Artificial Sequence
  Description of Artificial Sequence: Synthetic oligonucleotide
  Antisense Strand to SEQ ID NO: 413717
uaauucagcguccuugcca

SEQ ID NO: 413719 - RNA, 19 nt, Artificial Sequence
  Description of Artificial Sequence: Synthetic oligonucleotide
  Sense Strand Starting at position 1210 of SEQ ID NO: 317349
gcugaauuacuuuaacuug

SEQ ID NO: 413720 - RNA, 19 nt, Artificial Sequence
  Description of Artificial Sequence: Synthetic oligonucleotide
  Antisense Strand to SEQ ID NO: 413719
caaguuaaaguaauucagc

SEQ ID NO: 413721 - RNA, 19 nt, Artificial Sequence
  Description of Artificial Sequence: Synthetic oligonucleotide
  Sense Strand Starting at position 1210 of SEQ ID NO: 317975
gguggagaagcuugaacaa

SEQ ID NO: 413722 - RNA, 19 nt, Artificial Sequence
  Description of Artificial Sequence: Synthetic oligonucleotide
  Antisense Strand to SEQ ID NO: 413721
uuguucaagcuucuccacc

SEQ ID NO: 413723 - RNA, 19 nt, Artificial Sequence
  Description of Artificial Sequence: Synthetic oligonucleotide
  Sense Strand Starting at position 1210 of SEQ ID NO: 318020
gcuugcucugcugauagga

SEQ ID NO: 413724 - RNA, 19 nt, Artificial Sequence
  Description of Artificial Sequence: Synthetic oligonucleotide
  Antisense Strand to SEQ ID NO: 413723
uccuaucagcagagcaagc

SEQ ID NO: 413725 - RNA, 19 nt, Artificial Sequence
  Description of Artificial Sequence: Synthetic oligonucleotide
  Sense Strand Starting at position 1210 of SEQ ID NO: 318118
aagucagguccuggagaaa

SEQ ID NO: 413726 - RNA, 19 nt, Artificial Sequence
  Description of Artificial Sequence: Synthetic oligonucleotide
  Antisense Strand to SEQ ID NO: 413725
uuucuccaggaccugacuu

SEQ ID NO: 413727 - RNA, 19 nt, Artificial Sequence
  Description of Artificial Sequence: Synthetic oligonucleotide
  Sense Strand Starting at position 1210 of SEQ ID NO: 318378
uuccauggcuccucaagaa

SEQ ID NO: 413728 - RNA, 19 nt, Artificial Sequence
  Description of Artificial Sequence: Synthetic oligonucleotide
  Antisense Strand to SEQ ID NO: 413727
uucuugaggagccauggaa

SEQ ID NO: 413729 - RNA, 19 nt, Artificial Sequence
  Description of Artificial Sequence: Synthetic oligonucleotide
  Sense Strand Starting at position 1210 of SEQ ID NO: 318487
gcagcaacagaaugucaaa

SEQ ID NO: 413730 - RNA, 19 nt, Artificial Sequence
  Description of Artificial Sequence: Synthetic oligonucleotide
  Antisense Strand to SEQ ID NO: 413729
uuugacauucuguugcugc

SEQ ID NO: 413731 - RNA, 19 nt, Artificial Sequence
  Description of Artificial Sequence: Synthetic oligonucleotide
  Sense Strand Starting at position 1210 of SEQ ID NO: 318549
uugucauauuuaguguuga

SEQ ID NO: 413732 - RNA, 19 nt, Artificial Sequence
  Description of Artificial Sequence: Synthetic oligonucleotide
  Antisense Strand to SEQ ID NO: 413731
ucaacacuaaauaugacaa

SEQ ID NO: 413733 - RNA, 19 nt, Artificial Sequence
  Description of Artificial Sequence: Synthetic oligonucleotide
  Sense Strand Starting at position 1210 of SEQ ID NO: 318638
aggacaauuugccaauauu

SEQ ID NO: 413734 - RNA, 19 nt, Artificial Sequence
  Description of Artificial Sequence: Synthetic oligonucleotide
  Antisense Strand to SEQ ID NO: 413733
aauauuggcaaauuguccu

SEQ ID NO: 413735 - RNA, 19 nt, Artificial Sequence
  Description of Artificial Sequence: Synthetic oligonucleotide
  Sense Strand Starting at position 1210 of SEQ ID NO: 318691
guaauucccuugccuugaa

SEQ ID NO: 413736 - RNA, 19 nt, Artificial Sequence
  Description of Artificial Sequence: Synthetic oligonucleotide
  Antisense Strand to SEQ ID NO: 413735
uucaaggcaagggaauuac

SEQ ID NO: 413737 - RNA, 19 nt, Artificial Sequence
  Description of Artificial Sequence: Synthetic oligonucleotide
  Sense Strand Starting at position 1210 of SEQ ID NO: 318695
uucccuugccuugaaugua

SEQ ID NO: 413738 - RNA, 19 nt, Artificial Sequence
  Description of Artificial Sequence: Synthetic oligonucleotide
  Antisense Strand to SEQ ID NO: 413737
uacauucaaggcaagggaa

SEQ ID NO: 413739 - RNA, 19 nt, Artificial Sequence
  Description of Artificial Sequence: Synthetic oligonucleotide
  Sense Strand Starting at position 1210 of SEQ ID NO: 318800
aacguaaauguugauaaac

SEQ ID NO: 413740 - RNA, 19 nt, Artificial Sequence
  Description of Artificial Sequence: Synthetic oligonucleotide
  Antisense Strand to SEQ ID NO: 413739
guuuaucaacauuuacguu

SEQ ID NO: 413741 - RNA, 19 nt, Artificial Sequence
  Description of Artificial Sequence: Synthetic oligonucleotide
  Sense Strand Starting at position 1210 of SEQ ID NO: 318902
gugaacagaugucuaaggu

SEQ ID NO: 413742 - RNA, 19 nt, Artificial Sequence
  Description of Artificial Sequence: Synthetic oligonucleotide
  Antisense Strand to SEQ ID NO: 413741
accuuagacaucuguucac

SEQ ID NO: 413743 - RNA, 19 nt, Artificial Sequence
  Description of Artificial Sequence: Synthetic oligonucleotide
  Sense Strand Starting at position 1210 of SEQ ID NO: 318910
augucuaagguauaugcua

SEQ ID NO: 413744 - RNA, 19 nt, Artificial Sequence
  Description of Artificial Sequence: Synthetic oligonucleotide
  Antisense Strand to SEQ ID NO: 413743
uagcauauaccuuagacau

SEQ ID NO: 413745 - RNA, 19 nt, Artificial Sequence
  Description of Artificial Sequence: Synthetic oligonucleotide
  Sense Strand Starting at position 1210 of SEQ ID NO: 318947
ccauauauguauccguaca

SEQ ID NO: 413746 - RNA, 19 nt, Artificial Sequence
  Description of Artificial Sequence: Synthetic oligonucleotide
  Antisense Strand to SEQ ID NO: 413745
uguacggauacauauaugg

SEQ ID NO: 413747 - RNA, 19 nt, Artificial Sequence
  Description of Artificial Sequence: Synthetic oligonucleotide
  Sense Strand Starting at position 1210 of SEQ ID NO: 318985
guguguuacauguauauag

SEQ ID NO: 413748 - RNA, 19 nt, Artificial Sequence
  Description of Artificial Sequence: Synthetic oligonucleotide
  Antisense Strand to SEQ ID NO: 413747
cuauauacauguaacacac

SEQ ID NO: 413749 - RNA, 19 nt, Artificial Sequence
  Description of Artificial Sequence: Synthetic oligonucleotide
  Sense Strand Starting at position 1210 of SEQ ID NO: 318987
guguuacauguauauaggu

SEQ ID NO: 413750 - RNA, 19 nt, Artificial Sequence
  Description of Artificial Sequence: Synthetic oligonucleotide
  Antisense Strand to SEQ ID NO: 413749
accuauauacauguaacac

SEQ ID NO: 413751 - RNA, 19 nt, Artificial Sequence
  Description of Artificial Sequence: Synthetic oligonucleotide
  Sense Strand Starting at position 1210 of SEQ ID NO: 318989
guuacauguauauagguau

SEQ ID NO: 413752 - RNA, 19 nt, Artificial Sequence
  Description of Artificial Sequence: Synthetic oligonucleotide
  Antisense Strand to SEQ ID NO: 413751
auaccuauauacauguaac

SEQ ID NO: 413753 - RNA, 19 nt, Artificial Sequence
  Description of Artificial Sequence: Synthetic oligonucleotide
  Sense Strand Starting at position 1210 of SEQ ID NO: 319003
gguauuuauguauacgugu

SEQ ID NO: 413754 - RNA, 19 nt, Artificial Sequence
  Description of Artificial Sequence: Synthetic oligonucleotide
  Antisense Strand to SEQ ID NO: 413753
acacguauacauaaauacc

SEQ ID NO: 413755 - RNA, 19 nt, Artificial Sequence
  Description of Artificial Sequence: Synthetic oligonucleotide
  Sense Strand Starting at position 1210 of SEQ ID NO: 319017
cguguaugugugcuuguau

SEQ ID NO: 413756 - RNA, 19 nt, Artificial Sequence
  Description of Artificial Sequence: Synthetic oligonucleotide
  Antisense Strand to SEQ ID NO: 413755
auacaagcacacauacacg

SEQ ID NO: 413757 - RNA, 19 nt, Artificial Sequence
  Description of Artificial Sequence: Synthetic oligonucleotide
  Sense Strand Starting at position 1210 of SEQ ID NO: 319100
gaaugauauuuaggauuga

SEQ ID NO: 413758 - RNA, 19 nt, Artificial Sequence
  Description of Artificial Sequence: Synthetic oligonucleotide
  Antisense Strand to SEQ ID NO: 413757
ucaauccuaaauaucauuc

SEQ ID NO: 413759 - RNA, 19 nt, Artificial Sequence
  Description of Artificial Sequence: Synthetic oligonucleotide
  Sense Strand Starting at position 1211 of SEQ ID NO: 315239
aagugaauaugucccugaa

SEQ ID NO: 413760 - RNA, 19 nt, Artificial Sequence
  Description of Artificial Sequence: Synthetic oligonucleotide
  Antisense Strand to SEQ ID NO: 413759
uucagggacauauucacuu

SEQ ID NO: 413761 - RNA, 19 nt, Artificial Sequence
  Description of Artificial Sequence: Synthetic oligonucleotide
  Sense Strand Starting at position 1211 of SEQ ID NO: 315241
gugaauaugucccugaaga

SEQ ID NO: 413762 - RNA, 19 nt, Artificial Sequence
  Description of Artificial Sequence: Synthetic oligonucleotide
  Antisense Strand to SEQ ID NO: 413761
ucuucagggacauauucac

SEQ ID NO: 413763 - RNA, 19 nt, Artificial Sequence
  Description of Artificial Sequence: Synthetic oligonucleotide
  Sense Strand Starting at position 1211 of SEQ ID NO: 315242
ugaauaugucccugaagac

SEQ ID NO: 413764 - RNA, 19 nt, Artificial Sequence
  Description of Artificial Sequence: Synthetic oligonucleotide
  Antisense Strand to SEQ ID NO: 413763
gucuucagggacauauuca

SEQ ID NO: 413765 - RNA, 19 nt, Artificial Sequence
  Description of Artificial Sequence: Synthetic oligonucleotide
  Sense Strand Starting at position 1211 of SEQ ID NO: 315374
ggccaucagcaucaaucaa

SEQ ID NO: 413766 - RNA, 19 nt, Artificial Sequence
  Description of Artificial Sequence: Synthetic oligonucleotide
  Antisense Strand to SEQ ID NO: 413765
uugauugaugcugauggcc

SEQ ID NO: 413767 - RNA, 19 nt, Artificial Sequence
  Description of Artificial Sequence: Synthetic oligonucleotide
  Sense Strand Starting at position 1211 of SEQ ID NO: 315601
aaauuauuacugugggaac

SEQ ID NO: 413768 - RNA, 19 nt, Artificial Sequence
  Description of Artificial Sequence: Synthetic oligonucleotide
  Antisense Strand to SEQ ID NO: 413767
guucccacaguaauaauuu

SEQ ID NO: 413769 - RNA, 19 nt, Artificial Sequence
  Description of Artificial Sequence: Synthetic oligonucleotide
  Sense Strand Starting at position 1211 of SEQ ID NO: 315603
auuauuacugugggaacaa

SEQ ID NO: 413770 - RNA, 19 nt, Artificial Sequence
  Description of Artificial Sequence: Synthetic oligonucleotide
  Antisense Strand to SEQ ID NO: 413769
uuguucccacaguaauaau

SEQ ID NO: 413771 - RNA, 19 nt, Artificial Sequence
  Description of Artificial Sequence: Synthetic oligonucleotide
  Sense Strand Starting at position 1211 of SEQ ID NO: 315612
gugggaacaaguggguauu

SEQ ID NO: 413772 - RNA, 19 nt, Artificial Sequence
  Description of Artificial Sequence: Synthetic oligonucleotide
  Antisense Strand to SEQ ID NO: 413771
aauacccacuuguucccac

SEQ ID NO: 413773 - RNA, 19 nt, Artificial Sequence
  Description of Artificial Sequence: Synthetic oligonucleotide
  Sense Strand Starting at position 1211 of SEQ ID NO: 315735
agaagaacgcgguauccau

SEQ ID NO: 413774 - RNA, 19 nt, Artificial Sequence
  Description of Artificial Sequence: Synthetic oligonucleotide
  Antisense Strand to SEQ ID NO: 413773
auggauaccgcguucuucu

SEQ ID NO: 413775 - RNA, 19 nt, Artificial Sequence
  Description of Artificial Sequence: Synthetic oligonucleotide
  Sense Strand Starting at position 1211 of SEQ ID NO: 315773
uuacuuaaagccugagaga

SEQ ID NO: 413776 - RNA, 19 nt, Artificial Sequence
  Description of Artificial Sequence: Synthetic oligonucleotide
  Antisense Strand to SEQ ID NO: 413775
ucucucaggcuuuaaguaa

SEQ ID NO: 413777 - RNA, 19 nt, Artificial Sequence
  Description of Artificial Sequence: Synthetic oligonucleotide
  Sense Strand Starting at position 1211 of SEQ ID NO: 315900
agcauacuuucugcaggaa

SEQ ID NO: 413778 - RNA, 19 nt, Artificial Sequence
  Description of Artificial Sequence: Synthetic oligonucleotide
  Antisense Strand to SEQ ID NO: 413777
uuccugcagaaaguaugcu

SEQ ID NO: 413779 - RNA, 19 nt, Artificial Sequence
  Description of Artificial Sequence: Synthetic oligonucleotide
  Sense Strand Starting at position 1211 of SEQ ID NO: 315978
auuaaugacucugcacaga

SEQ ID NO: 413780 - RNA, 19 nt, Artificial Sequence
  Description of Artificial Sequence: Synthetic oligonucleotide
  Antisense Strand to SEQ ID NO: 413779
ucugugcagagucauuaau

SEQ ID NO: 413781 - RNA, 19 nt, Artificial Sequence
  Description of Artificial Sequence: Synthetic oligonucleotide
  Sense Strand Starting at position 1211 of SEQ ID NO: 316088
gaaggaugcacacgaugaa

SEQ ID NO: 413782 - RNA, 19 nt, Artificial Sequence
  Description of Artificial Sequence: Synthetic oligonucleotide
  Antisense Strand to SEQ ID NO: 413781
uucaucgugugcauccuuc

SEQ ID NO: 413783 - RNA, 19 nt, Artificial Sequence
  Description of Artificial Sequence: Synthetic oligonucleotide
  Sense Strand Starting at position 1211 of SEQ ID NO: 316361
uggguccuacccugacaaa

SEQ ID NO: 413784 - RNA, 19 nt, Artificial Sequence
  Description of Artificial Sequence: Synthetic oligonucleotide
  Antisense Strand to SEQ ID NO: 413783
uuugucaggguaggaccca

SEQ ID NO: 413785 - RNA, 19 nt, Artificial Sequence
  Description of Artificial Sequence: Synthetic oligonucleotide
  Sense Strand Starting at position 1211 of SEQ ID NO: 316461
gguguugagagggaugcaa

SEQ ID NO: 413786 - RNA, 19 nt, Artificial Sequence
  Description of Artificial Sequence: Synthetic oligonucleotide
  Antisense Strand to SEQ ID NO: 413785
uugcaucccucucaacacc

SEQ ID NO: 413787 - RNA, 19 nt, Artificial Sequence
  Description of Artificial Sequence: Synthetic oligonucleotide
  Sense Strand Starting at position 1211 of SEQ ID NO: 316487
ggauuuaaaugugaacgga

SEQ ID NO: 413788 - RNA, 19 nt, Artificial Sequence
  Description of Artificial Sequence: Synthetic oligonucleotide
  Antisense Strand to SEQ ID NO: 413787
uccguucacauuuaaaucc

SEQ ID NO: 413789 - RNA, 19 nt, Artificial Sequence
  Description of Artificial Sequence: Synthetic oligonucleotide
  Sense Strand Starting at position 1211 of SEQ ID NO: 316490
uuuaaaugugaacggagaa

SEQ ID NO: 413790 - RNA, 19 nt, Artificial Sequence
  Description of Artificial Sequence: Synthetic oligonucleotide
  Antisense Strand to SEQ ID NO: 413789
uucuccguucacauuuaaa

SEQ ID NO: 413791 - RNA, 19 nt, Artificial Sequence
  Description of Artificial Sequence: Synthetic oligonucleotide
  Sense Strand Starting at position 1211 of SEQ ID NO: 316659
guaacaauucgagauggua

SEQ ID NO: 413792 - RNA, 19 nt, Artificial Sequence
  Description of Artificial Sequence: Synthetic oligonucleotide
  Antisense Strand to SEQ ID NO: 413791
uaccaucucgaauuguuac

SEQ ID NO: 413793 - RNA, 19 nt, Artificial Sequence
  Description of Artificial Sequence: Synthetic oligonucleotide
  Sense Strand Starting at position 1211 of SEQ ID NO: 316720
agacguuuaagguggaaag

SEQ ID NO: 413794 - RNA, 19 nt, Artificial Sequence
  Description of Artificial Sequence: Synthetic oligonucleotide
  Antisense Strand to SEQ ID NO: 413793
cuuuccaccuuaaacgucu

SEQ ID NO: 413795 - RNA, 19 nt, Artificial Sequence
  Description of Artificial Sequence: Synthetic oligonucleotide
  Sense Strand Starting at position 1211 of SEQ ID NO: 317444
gaaugagagccugggaauc

SEQ ID NO: 413796 - RNA, 19 nt, Artificial Sequence
  Description of Artificial Sequence: Synthetic oligonucleotide
  Antisense Strand to SEQ ID NO: 413795
gauucccaggcucucauuc

SEQ ID NO: 413797 - RNA, 19 nt, Artificial Sequence
  Description of Artificial Sequence: Synthetic oligonucleotide
  Sense Strand Starting at position 1211 of SEQ ID NO: 317572
acccucagagaucgugauu

SEQ ID NO: 413798 - RNA, 19 nt, Artificial Sequence
  Description of Artificial Sequence: Synthetic oligonucleotide
  Antisense Strand to SEQ ID NO: 413797
aaucacgaucucugagggu

SEQ ID NO: 413799 - RNA, 19 nt, Artificial Sequence
  Description of Artificial Sequence: Synthetic oligonucleotide
  Sense Strand Starting at position 1211 of SEQ ID NO: 317575
cucagagaucgugauucag

SEQ ID NO: 413800 - RNA, 19 nt, Artificial Sequence
  Description of Artificial Sequence: Synthetic oligonucleotide
  Antisense Strand to SEQ ID NO: 413799
cugaaucacgaucucugag

SEQ ID NO: 413801 - RNA, 19 nt, Artificial Sequence
  Description of Artificial Sequence: Synthetic oligonucleotide
  Sense Strand Starting at position 1211 of SEQ ID NO: 317667
gacugaguacaggagucuu

SEQ ID NO: 413802 - RNA, 19 nt, Artificial Sequence
  Description of Artificial Sequence: Synthetic oligonucleotide
  Antisense Strand to SEQ ID NO: 413801
aagacuccuguacucaguc

SEQ ID NO: 413803 - RNA, 19 nt, Artificial Sequence
  Description of Artificial Sequence: Synthetic oligonucleotide
  Sense Strand Starting at position 1211 of SEQ ID NO: 317675
acaggagucuucccuccaa

SEQ ID NO: 413804 - RNA, 19 nt, Artificial Sequence
  Description of Artificial Sequence: Synthetic oligonucleotide
  Antisense Strand to SEQ ID NO: 413803
uuggagggaagacuccugu

SEQ ID NO: 413805 - RNA, 19 nt, Artificial Sequence
  Description of Artificial Sequence: Synthetic oligonucleotide
  Sense Strand Starting at position 1211 of SEQ ID NO: 317778
uuuaaauggucaccugaau

SEQ ID NO: 413806 - RNA, 19 nt, Artificial Sequence
  Description of Artificial Sequence: Synthetic oligonucleotide
  Antisense Strand to SEQ ID NO: 413805
auucaggugaccauuuaaa

SEQ ID NO: 413807 - RNA, 19 nt, Artificial Sequence
  Description of Artificial Sequence: Synthetic oligonucleotide
  Sense Strand Starting at position 1211 of SEQ ID NO: 317901
aagacaaaugguugguauu

SEQ ID NO: 413808 - RNA, 19 nt, Artificial Sequence
  Description of Artificial Sequence: Synthetic oligonucleotide
  Antisense Strand to SEQ ID NO: 413807
aauaccaaccauuugucuu

SEQ ID NO: 413809 - RNA, 19 nt, Artificial Sequence
  Description of Artificial Sequence: Synthetic oligonucleotide
  Sense Strand Starting at position 1211 of SEQ ID NO: 318103
ugcagaaugucagugaaca

SEQ ID NO: 413810 - RNA, 19 nt, Artificial Sequence
  Description of Artificial Sequence: Synthetic oligonucleotide
  Antisense Strand to SEQ ID NO: 413809
uguucacugacauucugca

SEQ ID NO: 413811 - RNA, 19 nt, Artificial Sequence
  Description of Artificial Sequence: Synthetic oligonucleotide
  Sense Strand Starting at position 1211 of SEQ ID NO: 318104
gcagaaugucagugaacac

SEQ ID NO: 413812 - RNA, 19 nt, Artificial Sequence
  Description of Artificial Sequence: Synthetic oligonucleotide
  Antisense Strand to SEQ ID NO: 413811
guguucacugacauucugc

SEQ ID NO: 413813 - RNA, 19 nt, Artificial Sequence
  Description of Artificial Sequence: Synthetic oligonucleotide
  Sense Strand Starting at position 1211 of SEQ ID NO: 318113
cagugaacacaugguguaa

SEQ ID NO: 413814 - RNA, 19 nt, Artificial Sequence
  Description of Artificial Sequence: Synthetic oligonucleotide
  Antisense Strand to SEQ ID NO: 413813
uuacaccauguguucacug

SEQ ID NO: 413815 - RNA, 19 nt, Artificial Sequence
  Description of Artificial Sequence: Synthetic oligonucleotide
  Sense Strand Starting at position 1211 of SEQ ID NO: 318344
gcagaaugucagugaacau

SEQ ID NO: 413816 - RNA, 19 nt, Artificial Sequence
  Description of Artificial Sequence: Synthetic oligonucleotide
  Antisense Strand to SEQ ID NO: 413815
auguucacugacauucugc

SEQ ID NO: 413817 - RNA, 19 nt, Artificial Sequence
  Description of Artificial Sequence: Synthetic oligonucleotide
  Sense Strand Starting at position 1211 of SEQ ID NO: 318403
cgguaaauaucaucucuag

SEQ ID NO: 413818 - RNA, 19 nt, Artificial Sequence
  Description of Artificial Sequence: Synthetic oligonucleotide
  Antisense Strand to SEQ ID NO: 413817
cuagagaugauauuuaccg

SEQ ID NO: 413819 - RNA, 19 nt, Artificial Sequence
  Description of Artificial Sequence: Synthetic oligonucleotide
  Sense Strand Starting at position 1211 of SEQ ID NO: 318458
auuaccuaagaggguuaua

SEQ ID NO: 413820 - RNA, 19 nt, Artificial Sequence
  Description of Artificial Sequence: Synthetic oligonucleotide
  Antisense Strand to SEQ ID NO: 413819
uauaacccucuuagguaau

SEQ ID NO: 413821 - RNA, 19 nt, Artificial Sequence
  Description of Artificial Sequence: Synthetic oligonucleotide
  Sense Strand Starting at position 1211 of SEQ ID NO: 318486
aaagcuuucuuggugaaca

SEQ ID NO: 413822 - RNA, 19 nt, Artificial Sequence
  Description of Artificial Sequence: Synthetic oligonucleotide
  Antisense Strand to SEQ ID NO: 413821
uguucaccaagaaagcuuu

SEQ ID NO: 413823 - RNA, 19 nt, Artificial Sequence
  Description of Artificial Sequence: Synthetic oligonucleotide
  Sense Strand Starting at position 1211 of SEQ ID NO: 318986
uuagucuaagagggaucuu

SEQ ID NO: 413824 - RNA, 19 nt, Artificial Sequence
  Description of Artificial Sequence: Synthetic oligonucleotide
  Antisense Strand to SEQ ID NO: 413823
aagaucccucuuagacuaa

SEQ ID NO: 413825 - RNA, 19 nt, Artificial Sequence
  Description of Artificial Sequence: Synthetic oligonucleotide
  Sense Strand Starting at position 1211 of SEQ ID NO: 319000
aucuuaugaggaugcucaa

SEQ ID NO: 413826 - RNA, 19 nt, Artificial Sequence
  Description of Artificial Sequence: Synthetic oligonucleotide
  Antisense Strand to SEQ ID NO: 413825
uugagcauccucauaagau

SEQ ID NO: 413827 - RNA, 19 nt, Artificial Sequence
  Description of Artificial Sequence: Synthetic oligonucleotide
  Sense Strand Starting at position 1211 of SEQ ID NO: 319024
aacaguacauguuuagaga

SEQ ID NO: 413828 - RNA, 19 nt, Artificial Sequence
  Description of Artificial Sequence: Synthetic oligonucleotide
  Antisense Strand to SEQ ID NO: 413827
ucucuaaacauguacuguu

SEQ ID NO: 413829 - RNA, 19 nt, Artificial Sequence
  Description of Artificial Sequence: Synthetic oligonucleotide
  Sense Strand Starting at position 1211 of SEQ ID NO: 319061
cgucuuaaagcagaauaga

SEQ ID NO: 413830 - RNA, 19 nt, Artificial Sequence
  Description of Artificial Sequence: Synthetic oligonucleotide
  Antisense Strand to SEQ ID NO: 413829
ucuauucugcuuuaagacg

SEQ ID NO: 413831 - RNA, 19 nt, Artificial Sequence
  Description of Artificial Sequence: Synthetic oligonucleotide
  Sense Strand Starting at position 1211 of SEQ ID NO: 319097
gagacuauugauugcuuga

SEQ ID NO: 413832 - RNA, 19 nt, Artificial Sequence
  Description of Artificial Sequence: Synthetic oligonucleotide
  Antisense Strand to SEQ ID NO: 413831
ucaagcaaucaauagucuc

SEQ ID NO: 413833 - RNA, 19 nt, Artificial Sequence
  Description of Artificial Sequence: Synthetic oligonucleotide
  Sense Strand Starting at position 1211 of SEQ ID NO: 319099
gacuauugauugcuugaag

SEQ ID NO: 413834 - RNA, 19 nt, Artificial Sequence
  Description of Artificial Sequence: Synthetic oligonucleotide
  Antisense Strand to SEQ ID NO: 413833
cuucaagcaaucaauaguc

SEQ ID NO: 413835 - RNA, 19 nt, Artificial Sequence
  Description of Artificial Sequence: Synthetic oligonucleotide
  Sense Strand Starting at position 1211 of SEQ ID NO: 319100
acuauugauugcuugaaga

SEQ ID NO: 413836 - RNA, 19 nt, Artificial Sequence
  Description of Artificial Sequence: Synthetic oligonucleotide
  Antisense Strand to SEQ ID NO: 413835
ucuucaagcaaucaauagu

SEQ ID NO: 413837 - RNA, 19 nt, Artificial Sequence
  Description of Artificial Sequence: Synthetic oligonucleotide
  Sense Strand Starting at position 1211 of SEQ ID NO: 319169
gacaaagaauuguucugca

SEQ ID NO: 413838 - RNA, 19 nt, Artificial Sequence
  Description of Artificial Sequence: Synthetic oligonucleotide
  Antisense Strand to SEQ ID NO: 413837
ugcagaacaauucuuuguc

SEQ ID NO: 413839 - RNA, 19 nt, Artificial Sequence
  Description of Artificial Sequence: Synthetic oligonucleotide
  Sense Strand Starting at position 1212 of SEQ ID NO: 315239
aagugaauaugucccugaa

SEQ ID NO: 413840 - RNA, 19 nt, Artificial Sequence
  Description of Artificial Sequence: Synthetic oligonucleotide
  Antisense Strand to SEQ ID NO: 413839
uucagggacauauucacuu

SEQ ID NO: 413841 - RNA, 19 nt, Artificial Sequence
  Description of Artificial Sequence: Synthetic oligonucleotide
  Sense Strand Starting at position 1212 of SEQ ID NO: 315241
gugaauaugucccugaaga

SEQ ID NO: 413842 - RNA, 19 nt, Artificial Sequence
  Description of Artificial Sequence: Synthetic oligonucleotide
  Antisense Strand to SEQ ID NO: 413841
ucuucagggacauauucac

SEQ ID NO: 413843 - RNA, 19 nt, Artificial Sequence
  Description of Artificial Sequence: Synthetic oligonucleotide
  Sense Strand Starting at position 1212 of SEQ ID NO: 315242
ugaauaugucccugaagac

SEQ ID NO: 413844 - RNA, 19 nt, Artificial Sequence
  Description of Artificial Sequence: Synthetic oligonucleotide
  Antisense Strand to SEQ ID NO: 413843
gucuucagggacauauuca

SEQ ID NO: 413845 - RNA, 19 nt, Artificial Sequence
  Description of Artificial Sequence: Synthetic oligonucleotide
  Sense Strand Starting at position 1212 of SEQ ID NO: 315374
ggccaucagcaucaaucaa

SEQ ID NO: 413846 - RNA, 19 nt, Artificial Sequence
  Description of Artificial Sequence: Synthetic oligonucleotide
  Antisense Strand to SEQ ID NO: 413845
uugauugaugcugauggcc

SEQ ID NO: 413847 - RNA, 19 nt, Artificial Sequence
  Description of Artificial Sequence: Synthetic oligonucleotide
  Sense Strand Starting at position 1212 of SEQ ID NO: 315601
aaauuauuacugugggaac

SEQ ID NO: 413848 - RNA, 19 nt, Artificial Sequence
  Description of Artificial Sequence: Synthetic oligonucleotide
  Antisense Strand to SEQ ID NO: 413847
guucccacaguaauaauuu

SEQ ID NO: 413849 - RNA, 19 nt, Artificial Sequence
  Description of Artificial Sequence: Synthetic oligonucleotide
  Sense Strand Starting at position 1212 of SEQ ID NO: 315603
auuauuacugugggaacaa

SEQ ID NO: 413850 - RNA, 19 nt, Artificial Sequence
  Description of Artificial Sequence: Synthetic oligonucleotide
  Antisense Strand to SEQ ID NO: 413849
uuguucccacaguaauaau

SEQ ID NO: 413851 - RNA, 19 nt, Artificial Sequence
  Description of Artificial Sequence: Synthetic oligonucleotide
  Sense Strand Starting at position 1212 of SEQ ID NO: 315612
gugggaacaaguggguauu

SEQ ID NO: 413852 - RNA, 19 nt, Artificial Sequence
  Description of Artificial Sequence: Synthetic oligonucleotide
  Antisense Strand to SEQ ID NO: 413851
aauacccacuuguucccac

SEQ ID NO: 413853 - RNA, 19 nt, Artificial Sequence
  Description of Artificial Sequence: Synthetic oligonucleotide
  Sense Strand Starting at position 1212 of SEQ ID NO: 315735
agaagaacgcgguauccau

SEQ ID NO: 413854 - RNA, 19 nt, Artificial Sequence
  Description of Artificial Sequence: Synthetic oligonucleotide
  Antisense Strand to SEQ ID NO: 413853
auggauaccgcguucuucu

SEQ ID NO: 413855 - RNA, 19 nt, Artificial Sequence
  Description of Artificial Sequence: Synthetic oligonucleotide
  Sense Strand Starting at position 1212 of SEQ ID NO: 315773
uuacuuaaagccugagaga

SEQ ID NO: 413856 - RNA, 19 nt, Artificial Sequence
  Description of Artificial Sequence: Synthetic oligonucleotide
  Antisense Strand to SEQ ID NO: 413855
ucucucaggcuuuaaguaa

SEQ ID NO: 413857 - RNA, 19 nt, Artificial Sequence
  Description of Artificial Sequence: Synthetic oligonucleotide
  Sense Strand Starting at position 1212 of SEQ ID NO: 315900
agcauacuuucugcaggaa

SEQ ID NO: 413858 - RNA, 19 nt, Artificial Sequence
  Description of Artificial Sequence: Synthetic oligonucleotide
  Antisense Strand to SEQ ID NO: 413857
uuccugcagaaaguaugcu

SEQ ID NO: 413859 - RNA, 19 nt, Artificial Sequence
  Description of Artificial Sequence: Synthetic oligonucleotide
  Sense Strand Starting at position 1212 of SEQ ID NO: 315978
auuaaugacucugcacaga

SEQ ID NO: 413860 - RNA, 19 nt, Artificial Sequence
  Description of Artificial Sequence: Synthetic oligonucleotide
  Antisense Strand to SEQ ID NO: 413859
ucugugcagagucauuaau

SEQ ID NO: 413861 - RNA, 19 nt, Artificial Sequence
  Description of Artificial Sequence: Synthetic oligonucleotide
  Sense Strand Starting at position 1212 of SEQ ID NO: 316088
gaaggaugcacacgaugaa

SEQ ID NO: 413862 - RNA, 19 nt, Artificial Sequence
  Description of Artificial Sequence: Synthetic oligonucleotide
  Antisense Strand to SEQ ID NO: 413861
uucaucgugugcauccuuc

SEQ ID NO: 413863 - RNA, 19 nt, Artificial Sequence
  Description of Artificial Sequence: Synthetic oligonucleotide
  Sense Strand Starting at position 1212 of SEQ ID NO: 316361
uggguccuacccugacaaa

SEQ ID NO: 413864 - RNA, 19 nt, Artificial Sequence
  Description of Artificial Sequence: Synthetic oligonucleotide
  Antisense Strand to SEQ ID NO: 413863
uuugucaggguaggaccca

SEQ ID NO: 413865 - RNA, 19 nt, Artificial Sequence
  Description of Artificial Sequence: Synthetic oligonucleotide
  Sense Strand Starting at position 1212 of SEQ ID NO: 316461
gguguugagagggaugcaa

SEQ ID NO: 413866 - RNA, 19 nt, Artificial Sequence
  Description of Artificial Sequence: Synthetic oligonucleotide
  Antisense Strand to SEQ ID NO: 413865
uugcaucccucucaacacc

SEQ ID NO: 413867 - RNA, 19 nt, Artificial Sequence
  Description of Artificial Sequence: Synthetic oligonucleotide
  Sense Strand Starting at position 1212 of SEQ ID NO: 316487
ggauuuaaaugugaacgga

SEQ ID NO: 413868 - RNA, 19 nt, Artificial Sequence
  Description of Artificial Sequence: Synthetic oligonucleotide
  Antisense Strand to SEQ ID NO: 413867
uccguucacauuuaaaucc

SEQ ID NO: 413869 - RNA, 19 nt, Artificial Sequence
  Description of Artificial Sequence: Synthetic oligonucleotide
  Sense Strand Starting at position 1212 of SEQ ID NO: 316490
uuuaaaugugaacggagaa

SEQ ID NO: 413870 - RNA, 19 nt, Artificial Sequence
  Description of Artificial Sequence: Synthetic oligonucleotide
  Antisense Strand to SEQ ID NO: 413869
uucuccguucacauuuaaa

SEQ ID NO: 413871 - RNA, 19 nt, Artificial Sequence
  Description of Artificial Sequence: Synthetic oligonucleotide
  Sense Strand Starting at position 1212 of SEQ ID NO: 316659
guaacaauucgagauggua

SEQ ID NO: 413872 - RNA, 19 nt, Artificial Sequence
  Description of Artificial Sequence: Synthetic oligonucleotide
  Antisense Strand to SEQ ID NO: 413871
uaccaucucgaauuguuac

SEQ ID NO: 413873 - RNA, 19 nt, Artificial Sequence
  Description of Artificial Sequence: Synthetic oligonucleotide
  Sense Strand Starting at position 1212 of SEQ ID NO: 316720
agacguuuaagguggaaag

SEQ ID NO: 413874 - RNA, 19 nt, Artificial Sequence
  Description of Artificial Sequence: Synthetic oligonucleotide
  Antisense Strand to SEQ ID NO: 413873
cuuuccaccuuaaacgucu

SEQ ID NO: 413875 - RNA, 19 nt, Artificial Sequence
  Description of Artificial Sequence: Synthetic oligonucleotide
  Sense Strand Starting at position 1212 of SEQ ID NO: 317444
gaaugagagccugggaauc

SEQ ID NO: 413876 - RNA, 19 nt, Artificial Sequence
  Description of Artificial Sequence: Synthetic oligonucleotide
  Antisense Strand to SEQ ID NO: 413875
gauucccaggcucucauuc

SEQ ID NO: 413877 - RNA, 19 nt, Artificial Sequence
  Description of Artificial Sequence: Synthetic oligonucleotide
  Sense Strand Starting at position 1212 of SEQ ID NO: 317572
acccucagagaucgugauu

SEQ ID NO: 413878 - RNA, 19 nt, Artificial Sequence
  Description of Artificial Sequence: Synthetic oligonucleotide
  Antisense Strand to SEQ ID NO: 413877
aaucacgaucucugagggu

SEQ ID NO: 413879 - RNA, 19 nt, Artificial Sequence
  Description of Artificial Sequence: Synthetic oligonucleotide
  Sense Strand Starting at position 1212 of SEQ ID NO: 317575
cucagagaucgugauucag

SEQ ID NO: 413880 - RNA, 19 nt, Artificial Sequence
  Description of Artificial Sequence: Synthetic oligonucleotide
  Antisense Strand to SEQ ID NO: 413879
cugaaucacgaucucugag

SEQ ID NO: 413881 - RNA, 19 nt, Artificial Sequence
  Description of Artificial Sequence: Synthetic oligonucleotide
  Sense Strand Starting at position 1212 of SEQ ID NO: 317667
gacugaguacaggagucuu

SEQ ID NO: 413882 - RNA, 19 nt, Artificial Sequence
  Description of Artificial Sequence: Synthetic oligonucleotide
  Antisense Strand to SEQ ID NO: 413881
aagacuccuguacucaguc

SEQ ID NO: 413883 - RNA, 19 nt, Artificial Sequence
  Description of Artificial Sequence: Synthetic oligonucleotide
  Sense Strand Starting at position 1212 of SEQ ID NO: 317675
acaggagucuucccuccaa

SEQ ID NO: 413884 - RNA, 19 nt, Artificial Sequence
  Description of Artificial Sequence: Synthetic oligonucleotide
  Antisense Strand to SEQ ID NO: 413883
uuggagggaagacuccugu

SEQ ID NO: 413885 - RNA, 19 nt, Artificial Sequence
  Description of Artificial Sequence: Synthetic oligonucleotide
  Sense Strand Starting at position 1212 of SEQ ID NO: 317778
uuuaaauggucaccugaau

SEQ ID NO: 413886 - RNA, 19 nt, Artificial Sequence
  Description of Artificial Sequence: Synthetic oligonucleotide
  Antisense Strand to SEQ ID NO: 413885
auucaggugaccauuuaaa

SEQ ID NO: 413887 - RNA, 19 nt, Artificial Sequence
  Description of Artificial Sequence: Synthetic oligonucleotide
  Sense Strand Starting at position 1212 of SEQ ID NO: 317901
aagacaaaugguugguauu

SEQ ID NO: 413888 - RNA, 19 nt, Artificial Sequence
  Description of Artificial Sequence: Synthetic oligonucleotide
  Antisense Strand to SEQ ID NO: 413887
aauaccaaccauuugucuu

SEQ ID NO: 413889 - RNA, 19 nt, Artificial Sequence
  Description of Artificial Sequence: Synthetic oligonucleotide
  Sense Strand Starting at position 1212 of SEQ ID NO: 318103
ugcagaaugucagugaaca

SEQ ID NO: 413890 - RNA, 19 nt, Artificial Sequence
  Description of Artificial Sequence: Synthetic oligonucleotide
  Antisense Strand to SEQ ID NO: 413889
uguucacugacauucugca

SEQ ID NO: 413891 - RNA, 19 nt, Artificial Sequence
  Description of Artificial Sequence: Synthetic oligonucleotide
  Sense Strand Starting at position 1212 of SEQ ID NO: 318104
gcagaaugucagugaacac

SEQ ID NO: 413892 - RNA, 19 nt, Artificial Sequence
  Description of Artificial Sequence: Synthetic oligonucleotide
  Antisense Strand to SEQ ID NO: 413891
guguucacugacauucugc

SEQ ID NO: 413893 - RNA, 19 nt, Artificial Sequence
  Description of Artificial Sequence: Synthetic oligonucleotide
  Sense Strand Starting at position 1212 of SEQ ID NO: 318113
cagugaacacaugguguaa

SEQ ID NO: 413894 - RNA, 19 nt, Artificial Sequence
  Description of Artificial Sequence: Synthetic oligonucleotide
  Antisense Strand to SEQ ID NO: 413893
uuacaccauguguucacug

SEQ ID NO: 413895 - RNA, 19 nt, Artificial Sequence
  Description of Artificial Sequence: Synthetic oligonucleotide
  Sense Strand Starting at position 1212 of SEQ ID NO: 318344
gcagaaugucagugaacau

SEQ ID NO: 413896 - RNA, 19 nt, Artificial Sequence
  Description of Artificial Sequence: Synthetic oligonucleotide
  Antisense Strand to SEQ ID NO: 413895
auguucacugacauucugc

SEQ ID NO: 413897 - RNA, 19 nt, Artificial Sequence
  Description of Artificial Sequence: Synthetic oligonucleotide
  Sense Strand Starting at position 1212 of SEQ ID NO: 318403
cgguaaauaucaucucuag

SEQ ID NO: 413898 - RNA, 19 nt, Artificial Sequence
  Description of Artificial Sequence: Synthetic oligonucleotide
  Antisense Strand to SEQ ID NO: 413897
cuagagaugauauuuaccg

SEQ ID NO: 413899 - RNA, 19 nt, Artificial Sequence
  Description of Artificial Sequence: Synthetic oligonucleotide
  Sense Strand Starting at position 1212 of SEQ ID NO: 318458
auuaccuaagaggguuaua

SEQ ID NO: 413900 - RNA, 19 nt, Artificial Sequence
  Description of Artificial Sequence: Synthetic oligonucleotide
  Antisense Strand to SEQ ID NO: 413899
uauaacccucuuagguaau

SEQ ID NO: 413901 - RNA, 19 nt, Artificial Sequence
  Description of Artificial Sequence: Synthetic oligonucleotide
  Sense Strand Starting at position 1212 of SEQ ID NO: 318486
aaagcuuucuuggugaaca

SEQ ID NO: 413902 - RNA, 19 nt, Artificial Sequence
  Description of Artificial Sequence: Synthetic oligonucleotide
  Antisense Strand to SEQ ID NO: 413901
uguucaccaagaaagcuuu

SEQ ID NO: 413903 - RNA, 19 nt, Artificial Sequence
  Description of Artificial Sequence: Synthetic oligonucleotide
  Sense Strand Starting at position 1212 of SEQ ID NO: 318986
uuagucuaagagggaucuu

SEQ ID NO: 413904 - RNA, 19 nt, Artificial Sequence
  Description of Artificial Sequence: Synthetic oligonucleotide
  Antisense Strand to SEQ ID NO: 413903
aagaucccucuuagacuaa

SEQ ID NO: 413905 - RNA, 19 nt, Artificial Sequence
  Description of Artificial Sequence: Synthetic oligonucleotide
  Sense Strand Starting at position 1212 of SEQ ID NO: 319000
aucuuaugaggaugcucaa

SEQ ID NO: 413906 - RNA, 19 nt, Artificial Sequence
  Description of Artificial Sequence: Synthetic oligonucleotide
  Antisense Strand to SEQ ID NO: 413905
uugagcauccucauaagau

SEQ ID NO: 413907 - RNA, 19 nt, Artificial Sequence
  Description of Artificial Sequence: Synthetic oligonucleotide
  Sense Strand Starting at position 1212 of SEQ ID NO: 319024
aacaguacauguuuagaga

SEQ ID NO: 413908 - RNA, 19 nt, Artificial Sequence
  Description of Artificial Sequence: Synthetic oligonucleotide
  Antisense Strand to SEQ ID NO: 413907
ucucuaaacauguacuguu

SEQ ID NO: 413909 - RNA, 19 nt, Artificial Sequence
  Description of Artificial Sequence: Synthetic oligonucleotide
  Sense Strand Starting at position 1212 of SEQ ID NO: 319061
cgucuuaaagcagaauaga

SEQ ID NO: 413910 - RNA, 19 nt, Artificial Sequence
  Description of Artificial Sequence: Synthetic oligonucleotide
  Antisense Strand to SEQ ID NO: 413909
ucuauucugcuuuaagacg

SEQ ID NO: 413911 - RNA, 19 nt, Artificial Sequence
  Description of Artificial Sequence: Synthetic oligonucleotide
  Sense Strand Starting at position 1212 of SEQ ID NO: 319097
gagacuauugauugcuuga

SEQ ID NO: 413912 - RNA, 19 nt, Artificial Sequence
  Description of Artificial Sequence: Synthetic oligonucleotide
  Antisense Strand to SEQ ID NO: 413911
ucaagcaaucaauagucuc

SEQ ID NO: 413913 - RNA, 19 nt, Artificial Sequence
  Description of Artificial Sequence: Synthetic oligonucleotide
  Sense Strand Starting at position 1212 of SEQ ID NO: 319099
gacuauugauugcuugaag

SEQ ID NO: 413914 - RNA, 19 nt, Artificial Sequence
  Description of Artificial Sequence: Synthetic oligonucleotide
  Antisense Strand to SEQ ID NO: 413913
cuucaagcaaucaauaguc

SEQ ID NO: 413915 - RNA, 19 nt, Artificial Sequence
  Description of Artificial Sequence: Synthetic oligonucleotide
  Sense Strand Starting at position 1212 of SEQ ID NO: 319100
acuauugauugcuugaaga

SEQ ID NO: 413916 - RNA, 19 nt, Artificial Sequence
  Description of Artificial Sequence: Synthetic oligonucleotide
  Antisense Strand to SEQ ID NO: 413915
ucuucaagcaaucaauagu

SEQ ID NO: 413917 - RNA, 19 nt, Artificial Sequence
  Description of Artificial Sequence: Synthetic oligonucleotide
  Sense Strand Starting at position 1212 of SEQ ID NO: 319169
gacaaagaauuguucugca

SEQ ID NO: 413918 - RNA, 19 nt, Artificial Sequence
  Description of Artificial Sequence: Synthetic oligonucleotide
  Antisense Strand to SEQ ID NO: 413917
ugcagaacaauucuuuguc

SEQ ID NO: 413919 - RNA, 19 nt, Artificial Sequence
  Description of Artificial Sequence: Synthetic oligonucleotide
  Sense Strand Starting at position 1213 of SEQ ID NO: 315305
guggauagcuugguuuaca

SEQ ID NO: 413920 - RNA, 19 nt, Artificial Sequence
  Description of Artificial Sequence: Synthetic oligonucleotide
  Antisense Strand to SEQ ID NO: 413919
uguaaaccaagcuauccac

SEQ ID NO: 413921 - RNA, 19 nt, Artificial Sequence
  Description of Artificial Sequence: Synthetic oligonucleotide
  Sense Strand Starting at position 1213 of SEQ ID NO: 315306
uggauagcuugguuuacag

SEQ ID NO: 413922 - RNA, 19 nt, Artificial Sequence
  Description of Artificial Sequence: Synthetic oligonucleotide
  Antisense Strand to SEQ ID NO: 413921
cuguaaaccaagcuaucca

SEQ ID NO: 413923 - RNA, 19 nt, Artificial Sequence
  Description of Artificial Sequence: Synthetic oligonucleotide
  Sense Strand Starting at position 1213 of SEQ ID NO: 315308
gauagcuugguuuacagau

SEQ ID NO: 413924 - RNA, 19 nt, Artificial Sequence
  Description of Artificial Sequence: Synthetic oligonucleotide
  Antisense Strand to SEQ ID NO: 413923
aucuguaaaccaagcuauc

SEQ ID NO: 413925 - RNA, 19 nt, Artificial Sequence
  Description of Artificial Sequence: Synthetic oligonucleotide
  Sense Strand Starting at position 1213 of SEQ ID NO: 315403
gacacaugcuugcuggaga

SEQ ID NO: 413926 - RNA, 19 nt, Artificial Sequence
  Description of Artificial Sequence: Synthetic oligonucleotide
  Antisense Strand to SEQ ID NO: 413925
ucuccagcaagcauguguc

SEQ ID NO: 413927 - RNA, 19 nt, Artificial Sequence
  Description of Artificial Sequence: Synthetic oligonucleotide
  Sense Strand Starting at position 1213 of SEQ ID NO: 315414
gcuggagacagagguaaau

SEQ ID NO: 413928 - RNA, 19 nt, Artificial Sequence
  Description of Artificial Sequence: Synthetic oligonucleotide
  Antisense Strand to SEQ ID NO: 413927
auuuaccucugucuccagc

SEQ ID NO: 413929 - RNA, 19 nt, Artificial Sequence
  Description of Artificial Sequence: Synthetic oligonucleotide
  Sense Strand Starting at position 1213 of SEQ ID NO: 315420
gacagagguaaauguggua

SEQ ID NO: 413930 - RNA, 19 nt, Artificial Sequence
  Description of Artificial Sequence: Synthetic oligonucleotide
  Antisense Strand to SEQ ID NO: 413929
uaccacauuuaccucuguc

SEQ ID NO: 413931 - RNA, 19 nt, Artificial Sequence
  Description of Artificial Sequence: Synthetic oligonucleotide
  Sense Strand Starting at position 1213 of SEQ ID NO: 315480
cacagcaucugaguuaaag

SEQ ID NO: 413932 - RNA, 19 nt, Artificial Sequence
  Description of Artificial Sequence: Synthetic oligonucleotide
  Antisense Strand to SEQ ID NO: 413931
cuuuaacucagaugcugug

SEQ ID NO: 413933 - RNA, 19 nt, Artificial Sequence
  Description of Artificial Sequence: Synthetic oligonucleotide
  Sense Strand Starting at position 1213 of SEQ ID NO: 315623
aggcccaaugucuaggauu

SEQ ID NO: 413934 - RNA, 19 nt, Artificial Sequence
  Description of Artificial Sequence: Synthetic oligonucleotide
  Antisense Strand to SEQ ID NO: 413933
aauccuagacauugggccu

SEQ ID NO: 413935 - RNA, 19 nt, Artificial Sequence
  Description of Artificial Sequence: Synthetic oligonucleotide
  Sense Strand Starting at position 1213 of SEQ ID NO: 315625
gcccaaugucuaggauucu

SEQ ID NO: 413936 - RNA, 19 nt, Artificial Sequence
  Description of Artificial Sequence: Synthetic oligonucleotide
  Antisense Strand to SEQ ID NO: 413935
agaauccuagacauugggc

SEQ ID NO: 413937 - RNA, 19 nt, Artificial Sequence
  Description of Artificial Sequence: Synthetic oligonucleotide
  Sense Strand Starting at position 1213 of SEQ ID NO: 315709
ugcauuucuugagacuuau

SEQ ID NO: 413938 - RNA, 19 nt, Artificial Sequence
  Description of Artificial Sequence: Synthetic oligonucleotide
  Antisense Strand to SEQ ID NO: 413937
auaagucucaagaaaugca

SEQ ID NO: 413939 - RNA, 19 nt, Artificial Sequence
  Description of Artificial Sequence: Synthetic oligonucleotide
  Sense Strand Starting at position 1213 of SEQ ID NO: 315715
ucuugagacuuauuaagug

SEQ ID NO: 413940 - RNA, 19 nt, Artificial Sequence
  Description of Artificial Sequence: Synthetic oligonucleotide
  Antisense Strand to SEQ ID NO: 413939
cacuuaauaagucucaaga

SEQ ID NO: 413941 - RNA, 19 nt, Artificial Sequence
  Description of Artificial Sequence: Synthetic oligonucleotide
  Sense Strand Starting at position 1213 of SEQ ID NO: 315837
gacuguaggucuccaccua

SEQ ID NO: 413942 - RNA, 19 nt, Artificial Sequence
  Description of Artificial Sequence: Synthetic oligonucleotide
  Antisense Strand to SEQ ID NO: 413941
uagguggagaccuacaguc

SEQ ID NO: 413943 - RNA, 19 nt, Artificial Sequence
  Description of Artificial Sequence: Synthetic oligonucleotide
  Sense Strand Starting at position 1213 of SEQ ID NO: 315897
guaugcuccuagcuugaca

SEQ ID NO: 413944 - RNA, 19 nt, Artificial Sequence
  Description of Artificial Sequence: Synthetic oligonucleotide
  Antisense Strand to SEQ ID NO: 413943
ugucaagcuaggagcauac

SEQ ID NO: 413945 - RNA, 19 nt, Artificial Sequence
  Description of Artificial Sequence: Synthetic oligonucleotide
  Sense Strand Starting at position 1213 of SEQ ID NO: 316023
cgucuucuggcauaucuuu

SEQ ID NO: 413946 - RNA, 19 nt, Artificial Sequence
  Description of Artificial Sequence: Synthetic oligonucleotide
  Antisense Strand to SEQ ID NO: 413945
aaagauaugccagaagacg

SEQ ID NO: 413947 - RNA, 19 nt, Artificial Sequence
  Description of Artificial Sequence: Synthetic oligonucleotide
  Sense Strand Starting at position 1213 of SEQ ID NO: 316062
caccaaguucgccagcaaa

SEQ ID NO: 413948 - RNA, 19 nt, Artificial Sequence
  Description of Artificial Sequence: Synthetic oligonucleotide
  Antisense Strand to SEQ ID NO: 413947
uuugcuggcgaacuuggug

SEQ ID NO: 413949 - RNA, 19 nt, Artificial Sequence
  Description of Artificial Sequence: Synthetic oligonucleotide
  Sense Strand Starting at position 1213 of SEQ ID NO: 316163
gcugguagaagcgaagaua

SEQ ID NO: 413950 - RNA, 19 nt, Artificial Sequence
  Description of Artificial Sequence: Synthetic oligonucleotide
  Antisense Strand to SEQ ID NO: 413949
uaucuucgcuucuaccagc

SEQ ID NO: 413951 - RNA, 19 nt, Artificial Sequence
  Description of Artificial Sequence: Synthetic oligonucleotide
  Sense Strand Starting at position 1213 of SEQ ID NO: 316616
uccagaaguugggaggaaa

SEQ ID NO: 413952 - RNA, 19 nt, Artificial Sequence
  Description of Artificial Sequence: Synthetic oligonucleotide
  Antisense Strand to SEQ ID NO: 413951
uuuccucccaacuucugga

SEQ ID NO: 413953 - RNA, 19 nt, Artificial Sequence
  Description of Artificial Sequence: Synthetic oligonucleotide
  Sense Strand Starting at position 1213 of SEQ ID NO: 316798
gcggcugucggccugagaa

SEQ ID NO: 413954 - RNA, 19 nt, Artificial Sequence
  Description of Artificial Sequence: Synthetic oligonucleotide
  Antisense Strand to SEQ ID NO: 413953
uucucaggccgacagccgc

SEQ ID NO: 413955 - RNA, 19 nt, Artificial Sequence
  Description of Artificial Sequence: Synthetic oligonucleotide
  Sense Strand Starting at position 1213 of SEQ ID NO: 316899
ggccuauggcccugguaaa

SEQ ID NO: 413956 - RNA, 19 nt, Artificial Sequence
  Description of Artificial Sequence: Synthetic oligonucleotide
  Antisense Strand to SEQ ID NO: 413955
uuuaccagggccauaggcc

SEQ ID NO: 413957 - RNA, 19 nt, Artificial Sequence
  Description of Artificial Sequence: Synthetic oligonucleotide
  Sense Strand Starting at position 1213 of SEQ ID NO: 317154
cguucuguacccgagucaa

SEQ ID NO: 413958 - RNA, 19 nt, Artificial Sequence
  Description of Artificial Sequence: Synthetic oligonucleotide
  Antisense Strand to SEQ ID NO: 413957
uugacucggguacagaacg

SEQ ID NO: 413959 - RNA, 19 nt, Artificial Sequence
  Description of Artificial Sequence: Synthetic oligonucleotide
  Sense Strand Starting at position 1213 of SEQ ID NO: 317360
caggguucuggcuagaacu

SEQ ID NO: 413960 - RNA, 19 nt, Artificial Sequence
  Description of Artificial Sequence: Synthetic oligonucleotide
  Antisense Strand to SEQ ID NO: 413959
aguucuagccagaacccug

SEQ ID NO: 413961 - RNA, 19 nt, Artificial Sequence
  Description of Artificial Sequence: Synthetic oligonucleotide
  Sense Strand Starting at position 1213 of SEQ ID NO: 317430
gggugugcugggaguugua

SEQ ID NO: 413962 - RNA, 19 nt, Artificial Sequence
  Description of Artificial Sequence: Synthetic oligonucleotide
  Antisense Strand to SEQ ID NO: 413961
uacaacucccagcacaccc

SEQ ID NO: 413963 - RNA, 19 nt, Artificial Sequence
  Description of Artificial Sequence: Synthetic oligonucleotide
  Sense Strand Starting at position 1213 of SEQ ID NO: 317446
guaguucucagggaccguu

SEQ ID NO: 413964 - RNA, 19 nt, Artificial Sequence
  Description of Artificial Sequence: Synthetic oligonucleotide
  Antisense Strand to SEQ ID NO: 413963
aacggucccugagaacuac

SEQ ID NO: 413965 - RNA, 19 nt, Artificial Sequence
  Description of Artificial Sequence: Synthetic oligonucleotide
  Sense Strand Starting at position 1213 of SEQ ID NO: 317526
gugaggguucgggaagcaa

SEQ ID NO: 413966 - RNA, 19 nt, Artificial Sequence
  Description of Artificial Sequence: Synthetic oligonucleotide
  Antisense Strand to SEQ ID NO: 413965
uugcuucccgaacccucac

SEQ ID NO: 413967 - RNA, 19 nt, Artificial Sequence
  Description of Artificial Sequence: Synthetic oligonucleotide
  Sense Strand Starting at position 1213 of SEQ ID NO: 317578
uaggaagaguagcucuauu

SEQ ID NO: 413968 - RNA, 19 nt, Artificial Sequence
  Description of Artificial Sequence: Synthetic oligonucleotide
  Antisense Strand to SEQ ID NO: 413967
aauagagcuacucuuccua

SEQ ID NO: 413969 - RNA, 19 nt, Artificial Sequence
  Description of Artificial Sequence: Synthetic oligonucleotide
  Sense Strand Starting at position 1213 of SEQ ID NO: 317588
agcucuauuugugcgugua

SEQ ID NO: 413970 - RNA, 19 nt, Artificial Sequence
  Description of Artificial Sequence: Synthetic oligonucleotide
  Antisense Strand to SEQ ID NO: 413969
uacacgcacaaauagagcu

SEQ ID NO: 413971 - RNA, 19 nt, Artificial Sequence
  Description of Artificial Sequence: Synthetic oligonucleotide
  Sense Strand Starting at position 1213 of SEQ ID NO: 317591
ucuauuugugcguguaccu

SEQ ID NO: 413972 - RNA, 19 nt, Artificial Sequence
  Description of Artificial Sequence: Synthetic oligonucleotide
  Antisense Strand to SEQ ID NO: 413971
agguacacgcacaaauaga

SEQ ID NO: 413973 - RNA, 19 nt, Artificial Sequence
  Description of Artificial Sequence: Synthetic oligonucleotide
  Sense Strand Starting at position 1213 of SEQ ID NO: 317601
cguguaccucugagcgagu

SEQ ID NO: 413974 - RNA, 19 nt, Artificial Sequence
  Description of Artificial Sequence: Synthetic oligonucleotide
  Antisense Strand to SEQ ID NO: 413973
acucgcucagagguacacg

SEQ ID NO: 413975 - RNA, 19 nt, Artificial Sequence
  Description of Artificial Sequence: Synthetic oligonucleotide
  Sense Strand Starting at position 1213 of SEQ ID NO: 317646
aggugucacugugugagaa

SEQ ID NO: 413976 - RNA, 19 nt, Artificial Sequence
  Description of Artificial Sequence: Synthetic oligonucleotide
  Antisense Strand to SEQ ID NO: 413975
uucucacacagugacaccu

SEQ ID NO: 413977 - RNA, 19 nt, Artificial Sequence
  Description of Artificial Sequence: Synthetic oligonucleotide
  Sense Strand Starting at position 1213 of SEQ ID NO: 317647
ggugucacugugugagaaa

SEQ ID NO: 413978 - RNA, 19 nt, Artificial Sequence
  Description of Artificial Sequence: Synthetic oligonucleotide
  Antisense Strand to SEQ ID NO: 413977
uuucucacacagugacacc

SEQ ID NO: 413979 - RNA, 19 nt, Artificial Sequence
  Description of Artificial Sequence: Synthetic oligonucleotide
  Sense Strand Starting at position 1213 of SEQ ID NO: 317735
guggcauugguugguuaag

SEQ ID NO: 413980 - RNA, 19 nt, Artificial Sequence
  Description of Artificial Sequence: Synthetic oligonucleotide
  Antisense Strand to SEQ ID NO: 413979
cuuaaccaaccaaugccac

SEQ ID NO: 413981 - RNA, 19 nt, Artificial Sequence
  Description of Artificial Sequence: Synthetic oligonucleotide
  Sense Strand Starting at position 1213 of SEQ ID NO: 317737
ggcauugguugguuaaguu

SEQ ID NO: 413982 - RNA, 19 nt, Artificial Sequence
  Description of Artificial Sequence: Synthetic oligonucleotide
  Antisense Strand to SEQ ID NO: 413981
aacuuaaccaaccaaugcc

SEQ ID NO: 413983 - RNA, 19 nt, Artificial Sequence
  Description of Artificial Sequence: Synthetic oligonucleotide
  Sense Strand Starting at position 1213 of SEQ ID NO: 317747
gguuaaguuccugaaccuu

SEQ ID NO: 413984 - RNA, 19 nt, Artificial Sequence
  Description of Artificial Sequence: Synthetic oligonucleotide
  Antisense Strand to SEQ ID NO: 413983
aagguucaggaacuuaacc

SEQ ID NO: 413985 - RNA, 19 nt, Artificial Sequence
  Description of Artificial Sequence: Synthetic oligonucleotide
  Sense Strand Starting at position 1213 of SEQ ID NO: 318596
ugauuucagugugugcuga

SEQ ID NO: 413986 - RNA, 19 nt, Artificial Sequence
  Description of Artificial Sequence: Synthetic oligonucleotide
  Antisense Strand to SEQ ID NO: 413985
ucagcacacacugaaauca

SEQ ID NO: 413987 - RNA, 19 nt, Artificial Sequence
  Description of Artificial Sequence: Synthetic oligonucleotide
  Sense Strand Starting at position 1213 of SEQ ID NO: 318680
gguugccacaucuggguaa

SEQ ID NO: 413988 - RNA, 19 nt, Artificial Sequence
  Description of Artificial Sequence: Synthetic oligonucleotide
  Antisense Strand to SEQ ID NO: 413987
uuacccagauguggcaacc

SEQ ID NO: 413989 - RNA, 19 nt, Artificial Sequence
  Description of Artificial Sequence: Synthetic oligonucleotide
  Sense Strand Starting at position 1213 of SEQ ID NO: 318684
gccacaucuggguaagguu

SEQ ID NO: 413990 - RNA, 19 nt, Artificial Sequence
  Description of Artificial Sequence: Synthetic oligonucleotide
  Antisense Strand to SEQ ID NO: 413989
aaccuuacccagauguggc

SEQ ID NO: 413991 - RNA, 19 nt, Artificial Sequence
  Description of Artificial Sequence: Synthetic oligonucleotide
  Sense Strand Starting at position 1213 of SEQ ID NO: 318724
uaaggaugcucagucaaau

SEQ ID NO: 413992 - RNA, 19 nt, Artificial Sequence
  Description of Artificial Sequence: Synthetic oligonucleotide
  Antisense Strand to SEQ ID NO: 413991
auuugacugagcauccuua

SEQ ID NO: 413993 - RNA, 19 nt, Artificial Sequence
  Description of Artificial Sequence: Synthetic oligonucleotide
  Sense Strand Starting at position 1213 of SEQ ID NO: 318761
augaguaaucuucgaguau

SEQ ID NO: 413994 - RNA, 19 nt, Artificial Sequence
  Description of Artificial Sequence: Synthetic oligonucleotide
  Antisense Strand to SEQ ID NO: 413993
auacucgaagauuacucau

SEQ ID NO: 413995 - RNA, 19 nt, Artificial Sequence
  Description of Artificial Sequence: Synthetic oligonucleotide
  Sense Strand Starting at position 1213 of SEQ ID NO: 318765
guaaucuucgaguauaauc

SEQ ID NO: 413996 - RNA, 19 nt, Artificial Sequence
  Description of Artificial Sequence: Synthetic oligonucleotide
  Antisense Strand to SEQ ID NO: 413995
gauuauacucgaagauuac

SEQ ID NO: 413997 - RNA, 19 nt, Artificial Sequence
  Description of Artificial Sequence: Synthetic oligonucleotide
  Sense Strand Starting at position 1213 of SEQ ID NO: 318827
agggucuagcuuuguccaa

SEQ ID NO: 413998 - RNA, 19 nt, Artificial Sequence
  Description of Artificial Sequence: Synthetic oligonucleotide
  Antisense Strand to SEQ ID NO: 413997
uuggacaaagcuagacccu

SEQ ID NO: 413999 - RNA, 19 nt, Artificial Sequence
  Description of Artificial Sequence: Synthetic oligonucleotide
  Sense Strand Starting at position 1214 of SEQ ID NO: 315283
uuauuugccucuguguuaa

SEQ ID NO: 414000 - RNA, 19 nt, Artificial Sequence
  Description of Artificial Sequence: Synthetic oligonucleotide
  Antisense Strand to SEQ ID NO: 413999
uuaacacagaggcaaauaa

SEQ ID NO: 414001 - RNA, 19 nt, Artificial Sequence
  Description of Artificial Sequence: Synthetic oligonucleotide
  Sense Strand Starting at position 1214 of SEQ ID NO: 315285
auuugccucuguguuaaua

SEQ ID NO: 414002 - RNA, 19 nt, Artificial Sequence
  Description of Artificial Sequence: Synthetic oligonucleotide
  Antisense Strand to SEQ ID NO: 414001
uauuaacacagaggcaaau

SEQ ID NO: 414003 - RNA, 19 nt, Artificial Sequence
  Description of Artificial Sequence: Synthetic oligonucleotide
  Sense Strand Starting at position 1214 of SEQ ID NO: 315470
uauggugauuucuugcuuu

SEQ ID NO: 414004 - RNA, 19 nt, Artificial Sequence
  Description of Artificial Sequence: Synthetic oligonucleotide
  Antisense Strand to SEQ ID NO: 414003
aaagcaagaaaucaccaua

SEQ ID NO: 414005 - RNA, 19 nt, Artificial Sequence
  Description of Artificial Sequence: Synthetic oligonucleotide
  Sense Strand Starting at position 1214 of SEQ ID NO: 315473
ggugauuucuugcuuuauu

SEQ ID NO: 414006 - RNA, 19 nt, Artificial Sequence
  Description of Artificial Sequence: Synthetic oligonucleotide
  Antisense Strand to SEQ ID NO: 414005
aauaaagcaagaaaucacc

SEQ ID NO: 414007 - RNA, 19 nt, Artificial Sequence
  Description of Artificial Sequence: Synthetic oligonucleotide
  Sense Strand Starting at position 1214 of SEQ ID NO: 315632
agagaucagcagcaucuua

SEQ ID NO: 414008 - RNA, 19 nt, Artificial Sequence
  Description of Artificial Sequence: Synthetic oligonucleotide
  Antisense Strand to SEQ ID NO: 414007
uaagaugcugcugaucucu

SEQ ID NO: 414009 - RNA, 19 nt, Artificial Sequence
  Description of Artificial Sequence: Synthetic oligonucleotide
  Sense Strand Starting at position 1214 of SEQ ID NO: 316640
uuguaaugacaaugacuga

SEQ ID NO: 414010 - RNA, 19 nt, Artificial Sequence
  Description of Artificial Sequence: Synthetic oligonucleotide
  Antisense Strand to SEQ ID NO: 414009
ucagucauugucauuacaa

SEQ ID NO: 414011 - RNA, 19 nt, Artificial Sequence
  Description of Artificial Sequence: Synthetic oligonucleotide
  Sense Strand Starting at position 1214 of SEQ ID NO: 316644
aaugacaaugacugaguuu

SEQ ID NO: 414012 - RNA, 19 nt, Artificial Sequence
  Description of Artificial Sequence: Synthetic oligonucleotide
  Antisense Strand to SEQ ID NO: 414011
aaacucagucauugucauu

SEQ ID NO: 414013 - RNA, 19 nt, Artificial Sequence
  Description of Artificial Sequence: Synthetic oligonucleotide
  Sense Strand Starting at position 1214 of SEQ ID NO: 316702
auaucagacuaugugaauu

SEQ ID NO: 414014 - RNA, 19 nt, Artificial Sequence
  Description of Artificial Sequence: Synthetic oligonucleotide
  Antisense Strand to SEQ ID NO: 414013
aauucacauagucugauau

SEQ ID NO: 414015 - RNA, 19 nt, Artificial Sequence
  Description of Artificial Sequence: Synthetic oligonucleotide
  Sense Strand Starting at position 1214 of SEQ ID NO: 316704
aucagacuaugugaauuua

SEQ ID NO: 414016 - RNA, 19 nt, Artificial Sequence
  Description of Artificial Sequence: Synthetic oligonucleotide
  Antisense Strand to SEQ ID NO: 414015
uaaauucacauagucugau

SEQ ID NO: 414017 - RNA, 19 nt, Artificial Sequence
  Description of Artificial Sequence: Synthetic oligonucleotide
  Sense Strand Starting at position 1214 of SEQ ID NO: 316753
aguggaaguugggagauuu

SEQ ID NO: 414018 - RNA, 19 nt, Artificial Sequence
  Description of Artificial Sequence: Synthetic oligonucleotide
  Antisense Strand to SEQ ID NO: 414017
aaaucucccaacuuccacu

SEQ ID NO: 414019 - RNA, 19 nt, Artificial Sequence
  Description of Artificial Sequence: Synthetic oligonucleotide
  Sense Strand Starting at position 1214 of SEQ ID NO: 316936
cccagauguaaacgggaga

SEQ ID NO: 414020 - RNA, 19 nt, Artificial Sequence
  Description of Artificial Sequence: Synthetic oligonucleotide
  Antisense Strand to SEQ ID NO: 414019
ucucccguuuacaucuggg

SEQ ID NO: 414021 - RNA, 19 nt, Artificial Sequence
  Description of Artificial Sequence: Synthetic oligonucleotide
  Sense Strand Starting at position 1214 of SEQ ID NO: 316955
acucaaauguuccuuugga

SEQ ID NO: 414022 - RNA, 19 nt, Artificial Sequence
  Description of Artificial Sequence: Synthetic oligonucleotide
  Antisense Strand to SEQ ID NO: 414021
uccaaaggaacauuugagu

SEQ ID NO: 414023 - RNA, 19 nt, Artificial Sequence
  Description of Artificial Sequence: Synthetic oligonucleotide
  Sense Strand Starting at position 1214 of SEQ ID NO: 316956
cucaaauguuccuuuggau

SEQ ID NO: 414024 - RNA, 19 nt, Artificial Sequence
  Description of Artificial Sequence: Synthetic oligonucleotide
  Antisense Strand to SEQ ID NO: 414023
auccaaaggaacauuugag

SEQ ID NO: 414025 - RNA, 19 nt, Artificial Sequence
  Description of Artificial Sequence: Synthetic oligonucleotide
  Sense Strand Starting at position 1214 of SEQ ID NO: 317001
ccugcuaacucacugaaga

SEQ ID NO: 414026 - RNA, 19 nt, Artificial Sequence
  Description of Artificial Sequence: Synthetic oligonucleotide
  Antisense Strand to SEQ ID NO: 414025
ucuucagugaguuagcagg

SEQ ID NO: 414027 - RNA, 19 nt, Artificial Sequence
  Description of Artificial Sequence: Synthetic oligonucleotide
  Sense Strand Starting at position 1214 of SEQ ID NO: 317002
cugcuaacucacugaagaa

SEQ ID NO: 414028 - RNA, 19 nt, Artificial Sequence
  Description of Artificial Sequence: Synthetic oligonucleotide
  Antisense Strand to SEQ ID NO: 414027
uucuucagugaguuagcag

SEQ ID NO: 414029 - RNA, 19 nt, Artificial Sequence
  Description of Artificial Sequence: Synthetic oligonucleotide
  Sense Strand Starting at position 1214 of SEQ ID NO: 317210
ccugaaggucuggguaaau

SEQ ID NO: 414030 - RNA, 19 nt, Artificial Sequence
  Description of Artificial Sequence: Synthetic oligonucleotide
  Antisense Strand to SEQ ID NO: 414029
auuuacccagaccuucagg

SEQ ID NO: 414031 - RNA, 19 nt, Artificial Sequence
  Description of Artificial Sequence: Synthetic oligonucleotide
  Sense Strand Starting at position 1214 of SEQ ID NO: 317318
guuuauucccucuagacuu

SEQ ID NO: 414032 - RNA, 19 nt, Artificial Sequence
  Description of Artificial Sequence: Synthetic oligonucleotide
  Antisense Strand to SEQ ID NO: 414031
aagucuagagggaauaaac

SEQ ID NO: 414033 - RNA, 19 nt, Artificial Sequence
  Description of Artificial Sequence: Synthetic oligonucleotide
  Sense Strand Starting at position 1214 of SEQ ID NO: 317486
ugguuagcauuauuugcaa

SEQ ID NO: 414034 - RNA, 19 nt, Artificial Sequence
  Description of Artificial Sequence: Synthetic oligonucleotide
  Antisense Strand to SEQ ID NO: 414033
uugcaaauaaugcuaacca

SEQ ID NO: 414035 - RNA, 19 nt, Artificial Sequence
  Description of Artificial Sequence: Synthetic oligonucleotide
  Sense Strand Starting at position 1214 of SEQ ID NO: 317489
uuagcauuauuugcaaguu

SEQ ID NO: 414036 - RNA, 19 nt, Artificial Sequence
  Description of Artificial Sequence: Synthetic oligonucleotide
  Antisense Strand to SEQ ID NO: 414035
aacuugcaaauaaugcuaa

SEQ ID NO: 414037 - RNA, 19 nt, Artificial Sequence
  Description of Artificial Sequence: Synthetic oligonucleotide
  Sense Strand Starting at position 1214 of SEQ ID NO: 317497
auuugcaaguuugucuaua

SEQ ID NO: 414038 - RNA, 19 nt, Artificial Sequence
  Description of Artificial Sequence: Synthetic oligonucleotide
  Antisense Strand to SEQ ID NO: 414037
uauagacaaacuugcaaau

SEQ ID NO: 414039 - RNA, 19 nt, Artificial Sequence
  Description of Artificial Sequence: Synthetic oligonucleotide
  Sense Strand Starting at position 1214 of SEQ ID NO: 317502
caaguuugucuauagagug

SEQ ID NO: 414040 - RNA, 19 nt, Artificial Sequence
  Description of Artificial Sequence: Synthetic oligonucleotide
  Antisense Strand to SEQ ID NO: 414039
cacucuauagacaaacuug

SEQ ID NO: 414041 - RNA, 19 nt, Artificial Sequence
  Description of Artificial Sequence: Synthetic oligonucleotide
  Sense Strand Starting at position 1214 of SEQ ID NO: 317548
cuuaaauucccuugggaca

SEQ ID NO: 414042 - RNA, 19 nt, Artificial Sequence
  Description of Artificial Sequence: Synthetic oligonucleotide
  Antisense Strand to SEQ ID NO: 414041
ugucccaagggaauuuaag

SEQ ID NO: 414043 - RNA, 19 nt, Artificial Sequence
  Description of Artificial Sequence: Synthetic oligonucleotide
  Sense Strand Starting at position 1214 of SEQ ID NO: 317549
uuaaauucccuugggacaa

SEQ ID NO: 414044 - RNA, 19 nt, Artificial Sequence
  Description of Artificial Sequence: Synthetic oligonucleotide
  Antisense Strand to SEQ ID NO: 414043
uugucccaagggaauuuaa

SEQ ID NO: 414045 - RNA, 19 nt, Artificial Sequence
  Description of Artificial Sequence: Synthetic oligonucleotide
  Sense Strand Starting at position 1214 of SEQ ID NO: 317598
ugaauucucuuucuuggaa

SEQ ID NO: 414046 - RNA, 19 nt, Artificial Sequence
  Description of Artificial Sequence: Synthetic oligonucleotide
  Antisense Strand to SEQ ID NO: 414045
uuccaagaaagagaauuca

SEQ ID NO: 414047 - RNA, 19 nt, Artificial Sequence
  Description of Artificial Sequence: Synthetic oligonucleotide
  Sense Strand Starting at position 1214 of SEQ ID NO: 317686
ugaaguacuuaaucacuga

SEQ ID NO: 414048 - RNA, 19 nt, Artificial Sequence
  Description of Artificial Sequence: Synthetic oligonucleotide
  Antisense Strand to SEQ ID NO: 414047
ucagugauuaaguacuuca

SEQ ID NO: 414049 - RNA, 19 nt, Artificial Sequence
  Description of Artificial Sequence: Synthetic oligonucleotide
  Sense Strand Starting at position 1214 of SEQ ID NO: 317690
guacuuaaucacugaaagu

SEQ ID NO: 414050 - RNA, 19 nt, Artificial Sequence
  Description of Artificial Sequence: Synthetic oligonucleotide
  Antisense Strand to SEQ ID NO: 414049
acuuucagugauuaaguac

SEQ ID NO: 414051 - RNA, 19 nt, Artificial Sequence
  Description of Artificial Sequence: Synthetic oligonucleotide
  Sense Strand Starting at position 1214 of SEQ ID NO: 317706
aguauuagaagugaguguu

SEQ ID NO: 414052 - RNA, 19 nt, Artificial Sequence
  Description of Artificial Sequence: Synthetic oligonucleotide
  Antisense Strand to SEQ ID NO: 414051
aacacucacuucuaauacu

SEQ ID NO: 414053 - RNA, 19 nt, Artificial Sequence
  Description of Artificial Sequence: Synthetic oligonucleotide
  Sense Strand Starting at position 1214 of SEQ ID NO: 317709
auuagaagugaguguuaau

SEQ ID NO: 414054 - RNA, 19 nt, Artificial Sequence
  Description of Artificial Sequence: Synthetic oligonucleotide
  Antisense Strand to SEQ ID NO: 414053
auuaacacucacuucuaau

SEQ ID NO: 414055 - RNA, 19 nt, Artificial Sequence
  Description of Artificial Sequence: Synthetic oligonucleotide
  Sense Strand Starting at position 1214 of SEQ ID NO: 317943
acgauuauuuccuuuguug

SEQ ID NO: 414056 - RNA, 19 nt, Artificial Sequence
  Description of Artificial Sequence: Synthetic oligonucleotide
  Antisense Strand to SEQ ID NO: 414055
caacaaaggaaauaaucgu

SEQ ID NO: 414057 - RNA, 19 nt, Artificial Sequence
  Description of Artificial Sequence: Synthetic oligonucleotide
  Sense Strand Starting at position 1214 of SEQ ID NO: 317983
uaggcauauccauguagaa

SEQ ID NO: 414058 - RNA, 19 nt, Artificial Sequence
  Description of Artificial Sequence: Synthetic oligonucleotide
  Antisense Strand to SEQ ID NO: 414057
uucuacauggauaugccua

SEQ ID NO: 414059 - RNA, 19 nt, Artificial Sequence
  Description of Artificial Sequence: Synthetic oligonucleotide
  Sense Strand Starting at position 1214 of SEQ ID NO: 318200
augguaguaauguauggau

SEQ ID NO: 414060 - RNA, 19 nt, Artificial Sequence
  Description of Artificial Sequence: Synthetic oligonucleotide
  Antisense Strand to SEQ ID NO: 414059
auccauacauuacuaccau

SEQ ID NO: 414061 - RNA, 19 nt, Artificial Sequence
  Description of Artificial Sequence: Synthetic oligonucleotide
  Sense Strand Starting at position 1214 of SEQ ID NO: 318202
gguaguaauguauggauua

SEQ ID NO: 414062 - RNA, 19 nt, Artificial Sequence
  Description of Artificial Sequence: Synthetic oligonucleotide
  Antisense Strand to SEQ ID NO: 414061
uaauccauacauuacuacc

SEQ ID NO: 414063 - RNA, 19 nt, Artificial Sequence
  Description of Artificial Sequence: Synthetic oligonucleotide
  Sense Strand Starting at position 1214 of SEQ ID NO: 318330
agagaaacuuggccucaca

SEQ ID NO: 414064 - RNA, 19 nt, Artificial Sequence
  Description of Artificial Sequence: Synthetic oligonucleotide
  Antisense Strand to SEQ ID NO: 414063
ugugaggccaaguuucucu

SEQ ID NO: 414065 - RNA, 19 nt, Artificial Sequence
  Description of Artificial Sequence: Synthetic oligonucleotide
  Sense Strand Starting at position 1214 of SEQ ID NO: 318691
gccaauaaauuauugaugu

SEQ ID NO: 414066 - RNA, 19 nt, Artificial Sequence
  Description of Artificial Sequence: Synthetic oligonucleotide
  Antisense Strand to SEQ ID NO: 414065
acaucaauaauuuauuggc

SEQ ID NO: 414067 - RNA, 19 nt, Artificial Sequence
  Description of Artificial Sequence: Synthetic oligonucleotide
  Sense Strand Starting at position 1214 of SEQ ID NO: 318770
aacucugucuuacugggaa

SEQ ID NO: 414068 - RNA, 19 nt, Artificial Sequence
  Description of Artificial Sequence: Synthetic oligonucleotide
  Antisense Strand to SEQ ID NO: 414067
uucccaguaagacagaguu

SEQ ID NO: 414069 - RNA, 19 nt, Artificial Sequence
  Description of Artificial Sequence: Synthetic oligonucleotide
  Sense Strand Starting at position 1214 of SEQ ID NO: 318773
ucugucuuacugggaaacu

SEQ ID NO: 414070 - RNA, 19 nt, Artificial Sequence
  Description of Artificial Sequence: Synthetic oligonucleotide
  Antisense Strand to SEQ ID NO: 414069
aguuucccaguaagacaga

SEQ ID NO: 414071 - RNA, 19 nt, Artificial Sequence
  Description of Artificial Sequence: Synthetic oligonucleotide
  Sense Strand Starting at position 1214 of SEQ ID NO: 318923
aguaaauaaggaugucaug

SEQ ID NO: 414072 - RNA, 19 nt, Artificial Sequence
  Description of Artificial Sequence: Synthetic oligonucleotide
  Antisense Strand to SEQ ID NO: 414071
caugacauccuuauuuacu

SEQ ID NO: 414073 - RNA, 19 nt, Artificial Sequence
  Description of Artificial Sequence: Synthetic oligonucleotide
  Sense Strand Starting at position 1214 of SEQ ID NO: 318938
cauguaugugcugaaggga

SEQ ID NO: 414074 - RNA, 19 nt, Artificial Sequence
  Description of Artificial Sequence: Synthetic oligonucleotide
  Antisense Strand to SEQ ID NO: 414073
ucccuucagcacauacaug

SEQ ID NO: 414075 - RNA, 19 nt, Artificial Sequence
  Description of Artificial Sequence: Synthetic oligonucleotide
  Sense Strand Starting at position 1214 of SEQ ID NO: 318954
ggauaaguagcauaguuua

SEQ ID NO: 414076 - RNA, 19 nt, Artificial Sequence
  Description of Artificial Sequence: Synthetic oligonucleotide
  Antisense Strand to SEQ ID NO: 414075
uaaacuaugcuacuuaucc

SEQ ID NO: 414077 - RNA, 19 nt, Artificial Sequence
  Description of Artificial Sequence: Synthetic oligonucleotide
  Sense Strand Starting at position 1214 of SEQ ID NO: 319085
uugcauuaucauggauaau

SEQ ID NO: 414078 - RNA, 19 nt, Artificial Sequence
  Description of Artificial Sequence: Synthetic oligonucleotide
  Antisense Strand to SEQ ID NO: 414077
auuauccaugauaaugcaa

SEQ ID NO: 414079 - RNA, 19 nt, Artificial Sequence
  Description of Artificial Sequence: Synthetic oligonucleotide
  Sense Strand Starting at position 1215 of SEQ ID NO: 315285
ccgagauucccuugcucag

SEQ ID NO: 414080 - RNA, 19 nt, Artificial Sequence
  Description of Artificial Sequence: Synthetic oligonucleotide
  Antisense Strand to SEQ ID NO: 414079
cugagcaagggaaucucgg

SEQ ID NO: 414081 - RNA, 19 nt, Artificial Sequence
  Description of Artificial Sequence: Synthetic oligonucleotide
  Sense Strand Starting at position 1215 of SEQ ID NO: 315330
gggauucccuuucccaaau

SEQ ID NO: 414082 - RNA, 19 nt, Artificial Sequence
  Description of Artificial Sequence: Synthetic oligonucleotide
  Antisense Strand to SEQ ID NO: 414081
auuugggaaagggaauccc

SEQ ID NO: 414083 - RNA, 19 nt, Artificial Sequence
  Description of Artificial Sequence: Synthetic oligonucleotide
  Sense Strand Starting at position 1215 of SEQ ID NO: 315368
auacacaucucuggaggaa

SEQ ID NO: 414084 - RNA, 19 nt, Artificial Sequence
  Description of Artificial Sequence: Synthetic oligonucleotide
  Antisense Strand to SEQ ID NO: 414083
uuccuccagagauguguau

SEQ ID NO: 414085 - RNA, 19 nt, Artificial Sequence
  Description of Artificial Sequence: Synthetic oligonucleotide
  Sense Strand Starting at position 1215 of SEQ ID NO: 315500
aacaauauaucgguguuaa

SEQ ID NO: 414086 - RNA, 19 nt, Artificial Sequence
  Description of Artificial Sequence: Synthetic oligonucleotide
  Antisense Strand to SEQ ID NO: 414085
uuaacaccgauauauuguu

SEQ ID NO: 414087 - RNA, 19 nt, Artificial Sequence
  Description of Artificial Sequence: Synthetic oligonucleotide
  Sense Strand Starting at position 1215 of SEQ ID NO: 315501
acaauauaucgguguuaaa

SEQ ID NO: 414088 - RNA, 19 nt, Artificial Sequence
  Description of Artificial Sequence: Synthetic oligonucleotide
  Antisense Strand to SEQ ID NO: 414087
uuuaacaccgauauauugu

SEQ ID NO: 414089 - RNA, 19 nt, Artificial Sequence
  Description of Artificial Sequence: Synthetic oligonucleotide
  Sense Strand Starting at position 1215 of SEQ ID NO: 315511
gguguuaaauccuucccau

SEQ ID NO: 414090 - RNA, 19 nt, Artificial Sequence
  Description of Artificial Sequence: Synthetic oligonucleotide
  Antisense Strand to SEQ ID NO: 414089
augggaaggauuuaacacc

SEQ ID NO: 414091 - RNA, 19 nt, Artificial Sequence
  Description of Artificial Sequence: Synthetic oligonucleotide
  Sense Strand Starting at position 1215 of SEQ ID NO: 315833
aguccaagggcuuaaacau

SEQ ID NO: 414092 - RNA, 19 nt, Artificial Sequence
  Description of Artificial Sequence: Synthetic oligonucleotide
  Antisense Strand to SEQ ID NO: 414091
auguuuaagcccuuggacu

SEQ ID NO: 414093 - RNA, 19 nt, Artificial Sequence
  Description of Artificial Sequence: Synthetic oligonucleotide
  Sense Strand Starting at position 1215 of SEQ ID NO: 315969
ccgagucuccggcgggaaa

SEQ ID NO: 414094 - RNA, 19 nt, Artificial Sequence
  Description of Artificial Sequence: Synthetic oligonucleotide
  Antisense Strand to SEQ ID NO: 414093
uuucccgccggagacucgg

SEQ ID NO: 414095 - RNA, 19 nt, Artificial Sequence
  Description of Artificial Sequence: Synthetic oligonucleotide
  Sense Strand Starting at position 1215 of SEQ ID NO: 316336
aagucuaggcagcagaaau

SEQ ID NO: 414096 - RNA, 19 nt, Artificial Sequence
  Description of Artificial Sequence: Synthetic oligonucleotide
  Antisense Strand to SEQ ID NO: 414095
auuucugcugccuagacuu

SEQ ID NO: 414097 - RNA, 19 nt, Artificial Sequence
  Description of Artificial Sequence: Synthetic oligonucleotide
  Sense Strand Starting at position 1215 of SEQ ID NO: 317448
cgggugaaucgcguucuca

SEQ ID NO: 414098 - RNA, 19 nt, Artificial Sequence
  Description of Artificial Sequence: Synthetic oligonucleotide
  Antisense Strand to SEQ ID NO: 414097
ugagaacgcgauucacccg

SEQ ID NO: 414099 - RNA, 19 nt, Artificial Sequence
  Description of Artificial Sequence: Synthetic oligonucleotide
  Sense Strand Starting at position 1215 of SEQ ID NO: 317660
cggugucucuuaccucaaa

SEQ ID NO: 414100 - RNA, 19 nt, Artificial Sequence
  Description of Artificial Sequence: Synthetic oligonucleotide
  Antisense Strand to SEQ ID NO: 414099
uuugagguaagagacaccg

SEQ ID NO: 414101 - RNA, 19 nt, Artificial Sequence
  Description of Artificial Sequence: Synthetic oligonucleotide
  Sense Strand Starting at position 1215 of SEQ ID NO: 317671
accucaaaucuguagaguu

SEQ ID NO: 414102 - RNA, 19 nt, Artificial Sequence
  Description of Artificial Sequence: Synthetic oligonucleotide
  Antisense Strand to SEQ ID NO: 414101
aacucuacagauuugaggu

SEQ ID NO: 414103 - RNA, 19 nt, Artificial Sequence
  Description of Artificial Sequence: Synthetic oligonucleotide
  Sense Strand Starting at position 1215 of SEQ ID NO: 317716
agcagacucacuugggauu

SEQ ID NO: 414104 - RNA, 19 nt, Artificial Sequence
  Description of Artificial Sequence: Synthetic oligonucleotide
  Antisense Strand to SEQ ID NO: 414103
aaucccaagugagucugcu

SEQ ID NO: 414105 - RNA, 19 nt, Artificial Sequence
  Description of Artificial Sequence: Synthetic oligonucleotide
  Sense Strand Starting at position 1215 of SEQ ID NO: 317728
ugggauucuccucgcagca

SEQ ID NO: 414106 - RNA, 19 nt, Artificial Sequence
  Description of Artificial Sequence: Synthetic oligonucleotide
  Antisense Strand to SEQ ID NO: 414105
ugcugcgaggagaauccca

SEQ ID NO: 414107 - RNA, 19 nt, Artificial Sequence
  Description of Artificial Sequence: Synthetic oligonucleotide
  Sense Strand Starting at position 1215 of SEQ ID NO: 317770
uguggaguuucgaguggag

SEQ ID NO: 414108 - RNA, 19 nt, Artificial Sequence
  Description of Artificial Sequence: Synthetic oligonucleotide
  Antisense Strand to SEQ ID NO: 414107
cuccacucgaaacuccaca

SEQ ID NO: 414109 - RNA, 19 nt, Artificial Sequence
  Description of Artificial Sequence: Synthetic oligonucleotide
  Sense Strand Starting at position 1215 of SEQ ID NO: 317772
uggaguuucgaguggagag

SEQ ID NO: 414110 - RNA, 19 nt, Artificial Sequence
  Description of Artificial Sequence: Synthetic oligonucleotide
  Antisense Strand to SEQ ID NO: 414109
cucuccacucgaaacucca

SEQ ID NO: 414111 - RNA, 19 nt, Artificial Sequence
  Description of Artificial Sequence: Synthetic oligonucleotide
  Sense Strand Starting at position 1215 of SEQ ID NO: 317773
ggaguuucgaguggagagu

SEQ ID NO: 414112 - RNA, 19 nt, Artificial Sequence
  Description of Artificial Sequence: Synthetic oligonucleotide
  Antisense Strand to SEQ ID NO: 414111
acucuccacucgaaacucc

SEQ ID NO: 414113 - RNA, 19 nt, Artificial Sequence
  Description of Artificial Sequence: Synthetic oligonucleotide
  Sense Strand Starting at position 1215 of SEQ ID NO: 317805
gaaugugagcccugaagcu

SEQ ID NO: 414114 - RNA, 19 nt, Artificial Sequence
  Description of Artificial Sequence: Synthetic oligonucleotide
  Antisense Strand to SEQ ID NO: 414113
agcuucagggcucacauuc

SEQ ID NO: 414115 - RNA, 19 nt, Artificial Sequence
  Description of Artificial Sequence: Synthetic oligonucleotide
  Sense Strand Starting at position 1215 of SEQ ID NO: 317865
gagugagcgcguguucaug

SEQ ID NO: 414116 - RNA, 19 nt, Artificial Sequence
  Description of Artificial Sequence: Synthetic oligonucleotide
  Antisense Strand to SEQ ID NO: 414115
caugaacacgcgcucacuc

SEQ ID NO: 414117 - RNA, 19 nt, Artificial Sequence
  Description of Artificial Sequence: Synthetic oligonucleotide
  Sense Strand Starting at position 1215 of SEQ ID NO: 317871
gcgcguguucaugaaacag

SEQ ID NO: 414118 - RNA, 19 nt, Artificial Sequence
  Description of Artificial Sequence: Synthetic oligonucleotide
  Antisense Strand to SEQ ID NO: 414117
cuguuucaugaacacgcgc

SEQ ID NO: 414119 - RNA, 19 nt, Artificial Sequence
  Description of Artificial Sequence: Synthetic oligonucleotide
  Sense Strand Starting at position 1215 of SEQ ID NO: 317879
ucaugaaacaguuguaggu

SEQ ID NO: 414120 - RNA, 19 nt, Artificial Sequence
  Description of Artificial Sequence: Synthetic oligonucleotide
  Antisense Strand to SEQ ID NO: 414119
accuacaacuguuucauga

SEQ ID NO: 414121 - RNA, 19 nt, Artificial Sequence
  Description of Artificial Sequence: Synthetic oligonucleotide
  Sense Strand Starting at position 1215 of SEQ ID NO: 317883
gaaacaguuguagguuaga

SEQ ID NO: 414122 - RNA, 19 nt, Artificial Sequence
  Description of Artificial Sequence: Synthetic oligonucleotide
  Antisense Strand to SEQ ID NO: 414121
ucuaaccuacaacuguuuc

SEQ ID NO: 414123 - RNA, 19 nt, Artificial Sequence
  Description of Artificial Sequence: Synthetic oligonucleotide
  Sense Strand Starting at position 1215 of SEQ ID NO: 317933
gggauauuauacgggagga

SEQ ID NO: 414124 - RNA, 19 nt, Artificial Sequence
  Description of Artificial Sequence: Synthetic oligonucleotide
  Antisense Strand to SEQ ID NO: 414123
uccucccguauaauauccc

SEQ ID NO: 414125 - RNA, 19 nt, Artificial Sequence
  Description of Artificial Sequence: Synthetic oligonucleotide
  Sense Strand Starting at position 1215 of SEQ ID NO: 317958
ccaagaauaacgugucaag

SEQ ID NO: 414126 - RNA, 19 nt, Artificial Sequence
  Description of Artificial Sequence: Synthetic oligonucleotide
  Antisense Strand to SEQ ID NO: 414125
cuugacacguuauucuugg

SEQ ID NO: 414127 - RNA, 19 nt, Artificial Sequence
  Description of Artificial Sequence: Synthetic oligonucleotide
  Sense Strand Starting at position 1215 of SEQ ID NO: 318085
ggacauuuauguugaauua

SEQ ID NO: 414128 - RNA, 19 nt, Artificial Sequence
  Description of Artificial Sequence: Synthetic oligonucleotide
  Antisense Strand to SEQ ID NO: 414127
uaauucaacauaaaugucc

SEQ ID NO: 414129 - RNA, 19 nt, Artificial Sequence
  Description of Artificial Sequence: Synthetic oligonucleotide
  Sense Strand Starting at position 1215 of SEQ ID NO: 318150
aaguauuccugauucggag

SEQ ID NO: 414130 - RNA, 19 nt, Artificial Sequence
  Description of Artificial Sequence: Synthetic oligonucleotide
  Antisense Strand to SEQ ID NO: 414129
cuccgaaucaggaauacuu

SEQ ID NO: 414131 - RNA, 19 nt, Artificial Sequence
  Description of Artificial Sequence: Synthetic oligonucleotide
  Sense Strand Starting at position 1215 of SEQ ID NO: 318225
ccagcuaauccugagaggu

SEQ ID NO: 414132 - RNA, 19 nt, Artificial Sequence
  Description of Artificial Sequence: Synthetic oligonucleotide
  Antisense Strand to SEQ ID NO: 414131
accucucaggauuagcugg

SEQ ID NO: 414133 - RNA, 19 nt, Artificial Sequence
  Description of Artificial Sequence: Synthetic oligonucleotide
  Sense Strand Starting at position 1215 of SEQ ID NO: 318268
uaggcauccuggcugauua

SEQ ID NO: 414134 - RNA, 19 nt, Artificial Sequence
  Description of Artificial Sequence: Synthetic oligonucleotide
  Antisense Strand to SEQ ID NO: 414133
uaaucagccaggaugccua

SEQ ID NO: 414135 - RNA, 19 nt, Artificial Sequence
  Description of Artificial Sequence: Synthetic oligonucleotide
  Sense Strand Starting at position 1215 of SEQ ID NO: 318537
cugugaugugguuacuaac

SEQ ID NO: 414136 - RNA, 19 nt, Artificial Sequence
  Description of Artificial Sequence: Synthetic oligonucleotide
  Antisense Strand to SEQ ID NO: 414135
guuaguaaccacaucacag

SEQ ID NO: 414137 - RNA, 19 nt, Artificial Sequence
  Description of Artificial Sequence: Synthetic oligonucleotide
  Sense Strand Starting at position 1215 of SEQ ID NO: 318584
gguccuugguuucuacaga

SEQ ID NO: 414138 - RNA, 19 nt, Artificial Sequence
  Description of Artificial Sequence: Synthetic oligonucleotide
  Antisense Strand to SEQ ID NO: 414137
ucuguagaaaccaaggacc

SEQ ID NO: 414139 - RNA, 19 nt, Artificial Sequence
  Description of Artificial Sequence: Synthetic oligonucleotide
  Sense Strand Starting at position 1215 of SEQ ID NO: 318755
agaagcugcucagugaugu

SEQ ID NO: 414140 - RNA, 19 nt, Artificial Sequence
  Description of Artificial Sequence: Synthetic oligonucleotide
  Antisense Strand to SEQ ID NO: 414139
acaucacugagcagcuucu

SEQ ID NO: 414141 - RNA, 19 nt, Artificial Sequence
  Description of Artificial Sequence: Synthetic oligonucleotide
  Sense Strand Starting at position 1215 of SEQ ID NO: 318761
ugcucagugauguggcaga

SEQ ID NO: 414142 - RNA, 19 nt, Artificial Sequence
  Description of Artificial Sequence: Synthetic oligonucleotide
  Antisense Strand to SEQ ID NO: 414141
ucugccacaucacugagca

SEQ ID NO: 414143 - RNA, 19 nt, Artificial Sequence
  Description of Artificial Sequence: Synthetic oligonucleotide
  Sense Strand Starting at position 1215 of SEQ ID NO: 318766
agugauguggcagaacagu

SEQ ID NO: 414144 - RNA, 19 nt, Artificial Sequence
  Description of Artificial Sequence: Synthetic oligonucleotide
  Antisense Strand to SEQ ID NO: 414143
acuguucugccacaucacu

SEQ ID NO: 414145 - RNA, 19 nt, Artificial Sequence
  Description of Artificial Sequence: Synthetic oligonucleotide
  Sense Strand Starting at position 1215 of SEQ ID NO: 318793
aagccaugugucuggugaa

SEQ ID NO: 414146 - RNA, 19 nt, Artificial Sequence
  Description of Artificial Sequence: Synthetic oligonucleotide
  Antisense Strand to SEQ ID NO: 414145
uucaccagacacauggcuu

SEQ ID NO: 414147 - RNA, 19 nt, Artificial Sequence
  Description of Artificial Sequence: Synthetic oligonucleotide
  Sense Strand Starting at position 1215 of SEQ ID NO: 318830
ucaagugauccugagggcu

SEQ ID NO: 414148 - RNA, 19 nt, Artificial Sequence
  Description of Artificial Sequence: Synthetic oligonucleotide
  Antisense Strand to SEQ ID NO: 414147
agcccucaggaucacuuga

SEQ ID NO: 414149 - RNA, 19 nt, Artificial Sequence
  Description of Artificial Sequence: Synthetic oligonucleotide
  Sense Strand Starting at position 1215 of SEQ ID NO: 318897
ugugacugcagaugacauu

SEQ ID NO: 414150 - RNA, 19 nt, Artificial Sequence
  Description of Artificial Sequence: Synthetic oligonucleotide
  Antisense Strand to SEQ ID NO: 414149
aaugucaucugcagucaca

SEQ ID NO: 414151 - RNA, 19 nt, Artificial Sequence
  Description of Artificial Sequence: Synthetic oligonucleotide
  Sense Strand Starting at position 1215 of SEQ ID NO: 318947
cugagcuuuccugagacac

SEQ ID NO: 414152 - RNA, 19 nt, Artificial Sequence
  Description of Artificial Sequence: Synthetic oligonucleotide
  Antisense Strand to SEQ ID NO: 414151
gugucucaggaaagcucag

SEQ ID NO: 414153 - RNA, 19 nt, Artificial Sequence
  Description of Artificial Sequence: Synthetic oligonucleotide
  Sense Strand Starting at position 1215 of SEQ ID NO: 319034
ccaagcaguucccugcaaa

SEQ ID NO: 414154 - RNA, 19 nt, Artificial Sequence
  Description of Artificial Sequence: Synthetic oligonucleotide
  Antisense Strand to SEQ ID NO: 414153
uuugcagggaacugcuugg

SEQ ID NO: 414155 - RNA, 19 nt, Artificial Sequence
  Description of Artificial Sequence: Synthetic oligonucleotide
  Sense Strand Starting at position 1215 of SEQ ID NO: 319035
caagcaguucccugcaaag

SEQ ID NO: 414156 - RNA, 19 nt, Artificial Sequence
  Description of Artificial Sequence: Synthetic oligonucleotide
  Antisense Strand to SEQ ID NO: 414155
cuuugcagggaacugcuug

SEQ ID NO: 414157 - RNA, 19 nt, Artificial Sequence
  Description of Artificial Sequence: Synthetic oligonucleotide
  Sense Strand Starting at position 1215 of SEQ ID NO: 319037
agcaguucccugcaaaguu

SEQ ID NO: 414158 - RNA, 19 nt, Artificial Sequence
  Description of Artificial Sequence: Synthetic oligonucleotide
  Antisense Strand to SEQ ID NO: 414157
aacuuugcagggaacugcu

SEQ ID NO: 414159 - RNA, 19 nt, Artificial Sequence
  Description of Artificial Sequence: Synthetic oligonucleotide
  Sense Strand Starting at position 1216 of SEQ ID NO: 315264
ugaagaagucuuugugacc

SEQ ID NO: 414160 - RNA, 19 nt, Artificial Sequence
  Description of Artificial Sequence: Synthetic oligonucleotide
  Antisense Strand to SEQ ID NO: 414159
ggucacaaagacuucuuca

SEQ ID NO: 414161 - RNA, 19 nt, Artificial Sequence
  Description of Artificial Sequence: Synthetic oligonucleotide
  Sense Strand Starting at position 1216 of SEQ ID NO: 315265
gaagaagucuuugugaccu

SEQ ID NO: 414162 - RNA, 19 nt, Artificial Sequence
  Description of Artificial Sequence: Synthetic oligonucleotide
  Antisense Strand to SEQ ID NO: 414161
aggucacaaagacuucuuc

SEQ ID NO: 414163 - RNA, 19 nt, Artificial Sequence
  Description of Artificial Sequence: Synthetic oligonucleotide
  Sense Strand Starting at position 1216 of SEQ ID NO: 315291
ggcaaagaauucuuaauua

SEQ ID NO: 414164 - RNA, 19 nt, Artificial Sequence
  Description of Artificial Sequence: Synthetic oligonucleotide
  Antisense Strand to SEQ ID NO: 414163
uaauuaagaauucuuugcc

SEQ ID NO: 414165 - RNA, 19 nt, Artificial Sequence
  Description of Artificial Sequence: Synthetic oligonucleotide
  Sense Strand Starting at position 1216 of SEQ ID NO: 315483
ccaccauaugacugagcua

SEQ ID NO: 414166 - RNA, 19 nt, Artificial Sequence
  Description of Artificial Sequence: Synthetic oligonucleotide
  Antisense Strand to SEQ ID NO: 414165
uagcucagucauauggugg

SEQ ID NO: 414167 - RNA, 19 nt, Artificial Sequence
  Description of Artificial Sequence: Synthetic oligonucleotide
  Sense Strand Starting at position 1216 of SEQ ID NO: 315486
ccauaugacugagcuauug

SEQ ID NO: 414168 - RNA, 19 nt, Artificial Sequence
  Description of Artificial Sequence: Synthetic oligonucleotide
  Antisense Strand to SEQ ID NO: 414167
caauagcucagucauaugg

SEQ ID NO: 414169 - RNA, 19 nt, Artificial Sequence
  Description of Artificial Sequence: Synthetic oligonucleotide
  Sense Strand Starting at position 1216 of SEQ ID NO: 315562
ccugucaccugcuuuauuu

SEQ ID NO: 414170 - RNA, 19 nt, Artificial Sequence
  Description of Artificial Sequence: Synthetic oligonucleotide
  Antisense Strand to SEQ ID NO: 414169
aaauaaagcaggugacagg

SEQ ID NO: 414171 - RNA, 19 nt, Artificial Sequence
  Description of Artificial Sequence: Synthetic oligonucleotide
  Sense Strand Starting at position 1216 of SEQ ID NO: 315665
agguuccucugauccauaa

SEQ ID NO: 414172 - RNA, 19 nt, Artificial Sequence
  Description of Artificial Sequence: Synthetic oligonucleotide
  Antisense Strand to SEQ ID NO: 414171
uuauggaucagaggaaccu

SEQ ID NO: 414173 - RNA, 19 nt, Artificial Sequence
  Description of Artificial Sequence: Synthetic oligonucleotide
  Sense Strand Starting at position 1216 of SEQ ID NO: 315693
gaaacuuccuuguuuggag

SEQ ID NO: 414174 - RNA, 19 nt, Artificial Sequence
  Description of Artificial Sequence: Synthetic oligonucleotide
  Antisense Strand to SEQ ID NO: 414173
cuccaaacaaggaaguuuc

SEQ ID NO: 414175 - RNA, 19 nt, Artificial Sequence
  Description of Artificial Sequence: Synthetic oligonucleotide
  Sense Strand Starting at position 1216 of SEQ ID NO: 315694
aaacuuccuuguuuggaga

SEQ ID NO: 414176 - RNA, 19 nt, Artificial Sequence
  Description of Artificial Sequence: Synthetic oligonucleotide
  Antisense Strand to SEQ ID NO: 414175
ucuccaaacaaggaaguuu

SEQ ID NO: 414177 - RNA, 19 nt, Artificial Sequence
  Description of Artificial Sequence: Synthetic oligonucleotide
  Sense Strand Starting at position 1216 of SEQ ID NO: 316047
cuacgcucucagggagaau

SEQ ID NO: 414178 - RNA, 19 nt, Artificial Sequence
  Description of Artificial Sequence: Synthetic oligonucleotide
  Antisense Strand to SEQ ID NO: 414177
auucucccugagagcguag

SEQ ID NO: 414179 - RNA, 19 nt, Artificial Sequence
  Description of Artificial Sequence: Synthetic oligonucleotide
  Sense Strand Starting at position 1216 of SEQ ID NO: 316072
ugaggaugccaccagucaa

SEQ ID NO: 414180 - RNA, 19 nt, Artificial Sequence
  Description of Artificial Sequence: Synthetic oligonucleotide
  Antisense Strand to SEQ ID NO: 414179
uugacugguggcauccuca

SEQ ID NO: 414181 - RNA, 19 nt, Artificial Sequence
  Description of Artificial Sequence: Synthetic oligonucleotide
  Sense Strand Starting at position 1216 of SEQ ID NO: 316309
uggucuggauugguaugaa

SEQ ID NO: 414182 - RNA, 19 nt, Artificial Sequence
  Description of Artificial Sequence: Synthetic oligonucleotide
  Antisense Strand to SEQ ID NO: 414181
uucauaccaauccagacca

SEQ ID NO: 414183 - RNA, 19 nt, Artificial Sequence
  Description of Artificial Sequence: Synthetic oligonucleotide
  Sense Strand Starting at position 1216 of SEQ ID NO: 316312
ucuggauugguaugaacau

SEQ ID NO: 414184 - RNA, 19 nt, Artificial Sequence
  Description of Artificial Sequence: Synthetic oligonucleotide
  Antisense Strand to SEQ ID NO: 414183
auguucauaccaauccaga

SEQ ID NO: 414185 - RNA, 19 nt, Artificial Sequence
  Description of Artificial Sequence: Synthetic oligonucleotide
  Sense Strand Starting at position 1216 of SEQ ID NO: 316407
guugaauucccacauuggu

SEQ ID NO: 414186 - RNA, 19 nt, Artificial Sequence
  Description of Artificial Sequence: Synthetic oligonucleotide
  Antisense Strand to SEQ ID NO: 414185
accaaugugggaauucaac

SEQ ID NO: 414187 - RNA, 19 nt, Artificial Sequence
  Description of Artificial Sequence: Synthetic oligonucleotide
  Sense Strand Starting at position 1216 of SEQ ID NO: 316520
uggagauucgagcagcaaa

SEQ ID NO: 414188 - RNA, 19 nt, Artificial Sequence
  Description of Artificial Sequence: Synthetic oligonucleotide
  Antisense Strand to SEQ ID NO: 414187
uuugcugcucgaaucucca

SEQ ID NO: 414189 - RNA, 19 nt, Artificial Sequence
  Description of Artificial Sequence: Synthetic oligonucleotide
  Sense Strand Starting at position 1216 of SEQ ID NO: 316630
gaagcauccagcguguagu

SEQ ID NO: 414190 - RNA, 19 nt, Artificial Sequence
  Description of Artificial Sequence: Synthetic oligonucleotide
  Antisense Strand to SEQ ID NO: 414189
acuacacgcuggaugcuuc

SEQ ID NO: 414191 - RNA, 19 nt, Artificial Sequence
  Description of Artificial Sequence: Synthetic oligonucleotide
  Sense Strand Starting at position 1216 of SEQ ID NO: 316730
uguccucaggacggauaua

SEQ ID NO: 414192 - RNA, 19 nt, Artificial Sequence
  Description of Artificial Sequence: Synthetic oligonucleotide
  Antisense Strand to SEQ ID NO: 414191
uauauccguccugaggaca

SEQ ID NO: 414193 - RNA, 19 nt, Artificial Sequence
  Description of Artificial Sequence: Synthetic oligonucleotide
  Sense Strand Starting at position 1216 of SEQ ID NO: 317353
ucagcagagguauggauua

SEQ ID NO: 414194 - RNA, 19 nt, Artificial Sequence
  Description of Artificial Sequence: Synthetic oligonucleotide
  Antisense Strand to SEQ ID NO: 414193
uaauccauaccucugcuga

SEQ ID NO: 414195 - RNA, 19 nt, Artificial Sequence
  Description of Artificial Sequence: Synthetic oligonucleotide
  Sense Strand Starting at position 1216 of SEQ ID NO: 317446
agugaaucauguuuaauga

SEQ ID NO: 414196 - RNA, 19 nt, Artificial Sequence
  Description of Artificial Sequence: Synthetic oligonucleotide
  Antisense Strand to SEQ ID NO: 414195
ucauuaaacaugauucacu

SEQ ID NO: 414197 - RNA, 19 nt, Artificial Sequence
  Description of Artificial Sequence: Synthetic oligonucleotide
  Sense Strand Starting at position 1216 of SEQ ID NO: 317580
acuacacucugguugguaa

SEQ ID NO: 414198 - RNA, 19 nt, Artificial Sequence
  Description of Artificial Sequence: Synthetic oligonucleotide
  Antisense Strand to SEQ ID NO: 414197
uuaccaaccagaguguagu

SEQ ID NO: 414199 - RNA, 19 nt, Artificial Sequence
  Description of Artificial Sequence: Synthetic oligonucleotide
  Sense Strand Starting at position 1216 of SEQ ID NO: 317581
cuacacucugguugguaaa

SEQ ID NO: 414200 - RNA, 19 nt, Artificial Sequence
  Description of Artificial Sequence: Synthetic oligonucleotide
  Antisense Strand to SEQ ID NO: 414199
uuuaccaaccagaguguag

SEQ ID NO: 414201 - RNA, 19 nt, Artificial Sequence
  Description of Artificial Sequence: Synthetic oligonucleotide
  Sense Strand Starting at position 1216 of SEQ ID NO: 317582
uacacucugguugguaaau

SEQ ID NO: 414202 - RNA, 19 nt, Artificial Sequence
  Description of Artificial Sequence: Synthetic oligonucleotide
  Antisense Strand to SEQ ID NO: 414201
auuuaccaaccagagugua

SEQ ID NO: 414203 - RNA, 19 nt, Artificial Sequence
  Description of Artificial Sequence: Synthetic oligonucleotide
  Sense Strand Starting at position 1216 of SEQ ID NO: 317997
ugauuaugucugugaagac

SEQ ID NO: 414204 - RNA, 19 nt, Artificial Sequence
  Description of Artificial Sequence: Synthetic oligonucleotide
  Antisense Strand to SEQ ID NO: 414203
gucuucacagacauaauca

SEQ ID NO: 414205 - RNA, 19 nt, Artificial Sequence
  Description of Artificial Sequence: Synthetic oligonucleotide
  Sense Strand Starting at position 1216 of SEQ ID NO: 318051
gugguuaagacauaggcau

SEQ ID NO: 414206 - RNA, 19 nt, Artificial Sequence
  Description of Artificial Sequence: Synthetic oligonucleotide
  Antisense Strand to SEQ ID NO: 414205
augccuaugucuuaaccac

SEQ ID NO: 414207 - RNA, 19 nt, Artificial Sequence
  Description of Artificial Sequence: Synthetic oligonucleotide
  Sense Strand Starting at position 1216 of SEQ ID NO: 318300
gagaaagaauuugguuauu

SEQ ID NO: 414208 - RNA, 19 nt, Artificial Sequence
  Description of Artificial Sequence: Synthetic oligonucleotide
  Antisense Strand to SEQ ID NO: 414207
aauaaccaaauucuuucuc

SEQ ID NO: 414209 - RNA, 19 nt, Artificial Sequence
  Description of Artificial Sequence: Synthetic oligonucleotide
  Sense Strand Starting at position 1216 of SEQ ID NO: 318473
uggcaaaugcuguacucaa

SEQ ID NO: 414210 - RNA, 19 nt, Artificial Sequence
  Description of Artificial Sequence: Synthetic oligonucleotide
  Antisense Strand to SEQ ID NO: 414209
uugaguacagcauuugcca

SEQ ID NO: 414211 - RNA, 19 nt, Artificial Sequence
  Description of Artificial Sequence: Synthetic oligonucleotide
  Sense Strand Starting at position 1216 of SEQ ID NO: 318632
gcaagaagaucauugcuga

SEQ ID NO: 414212 - RNA, 19 nt, Artificial Sequence
  Description of Artificial Sequence: Synthetic oligonucleotide
  Antisense Strand to SEQ ID NO: 414211
ucagcaaugaucuucuugc

SEQ ID NO: 414213 - RNA, 19 nt, Artificial Sequence
  Description of Artificial Sequence: Synthetic oligonucleotide
  Sense Strand Starting at position 1216 of SEQ ID NO: 318640
aucauugcugacuguggaa

SEQ ID NO: 414214 - RNA, 19 nt, Artificial Sequence
  Description of Artificial Sequence: Synthetic oligonucleotide
  Antisense Strand to SEQ ID NO: 414213
uuccacagucagcaaugau

SEQ ID NO: 414215 - RNA, 19 nt, Artificial Sequence
  Description of Artificial Sequence: Synthetic oligonucleotide
  Sense Strand Starting at position 1216 of SEQ ID NO: 318695
acaagagaauugcuucugu

SEQ ID NO: 414216 - RNA, 19 nt, Artificial Sequence
  Description of Artificial Sequence: Synthetic oligonucleotide
  Antisense Strand to SEQ ID NO: 414215
acagaagcaauucucuugu

SEQ ID NO: 414217 - RNA, 19 nt, Artificial Sequence
  Description of Artificial Sequence: Synthetic oligonucleotide
  Sense Strand Starting at position 1216 of SEQ ID NO: 318815
caugucuagcuggauuaca

SEQ ID NO: 414218 - RNA, 19 nt, Artificial Sequence
  Description of Artificial Sequence: Synthetic oligonucleotide
  Antisense Strand to SEQ ID NO: 414217
uguaauccagcuagacaug

SEQ ID NO: 414219 - RNA, 19 nt, Artificial Sequence
  Description of Artificial Sequence: Synthetic oligonucleotide
  Sense Strand Starting at position 1216 of SEQ ID NO: 318924
ccagguuucucacugacau

SEQ ID NO: 414220 - RNA, 19 nt, Artificial Sequence
  Description of Artificial Sequence: Synthetic oligonucleotide
  Antisense Strand to SEQ ID NO: 414219
augucagugagaaaccugg

SEQ ID NO: 414221 - RNA, 19 nt, Artificial Sequence
  Description of Artificial Sequence: Synthetic oligonucleotide
  Sense Strand Starting at position 1216 of SEQ ID NO: 318925
cagguuucucacugacaug

SEQ ID NO: 414222 - RNA, 19 nt, Artificial Sequence
  Description of Artificial Sequence: Synthetic oligonucleotide
  Antisense Strand to SEQ ID NO: 414221
caugucagugagaaaccug

SEQ ID NO: 414223 - RNA, 19 nt, Artificial Sequence
  Description of Artificial Sequence: Synthetic oligonucleotide
  Sense Strand Starting at position 1216 of SEQ ID NO: 318952
guuacaaaugggcaagagu

SEQ ID NO: 414224 - RNA, 19 nt, Artificial Sequence
  Description of Artificial Sequence: Synthetic oligonucleotide
  Antisense Strand to SEQ ID NO: 414223
acucuugcccauuuguaac

SEQ ID NO: 414225 - RNA, 19 nt, Artificial Sequence
  Description of Artificial Sequence: Synthetic oligonucleotide
  Sense Strand Starting at position 1216 of SEQ ID NO: 318961
gggcaagagugaaagguua

SEQ ID NO: 414226 - RNA, 19 nt, Artificial Sequence
  Description of Artificial Sequence: Synthetic oligonucleotide
  Antisense Strand to SEQ ID NO: 414225
uaaccuuucacucuugccc

SEQ ID NO: 414227 - RNA, 19 nt, Artificial Sequence
  Description of Artificial Sequence: Synthetic oligonucleotide
  Sense Strand Starting at position 1216 of SEQ ID NO: 318963
gcaagagugaaagguuaga

SEQ ID NO: 414228 - RNA, 19 nt, Artificial Sequence
  Description of Artificial Sequence: Synthetic oligonucleotide
  Antisense Strand to SEQ ID NO: 414227
ucuaaccuuucacucuugc

SEQ ID NO: 414229 - RNA, 19 nt, Artificial Sequence
  Description of Artificial Sequence: Synthetic oligonucleotide
  Sense Strand Starting at position 1216 of SEQ ID NO: 318999
ggauuagagucacauuuau

SEQ ID NO: 414230 - RNA, 19 nt, Artificial Sequence
  Description of Artificial Sequence: Synthetic oligonucleotide
  Antisense Strand to SEQ ID NO: 414229
auaaaugugacucuaaucc

SEQ ID NO: 414231 - RNA, 19 nt, Artificial Sequence
  Description of Artificial Sequence: Synthetic oligonucleotide
  Sense Strand Starting at position 1216 of SEQ ID NO: 319014
uuaucagcaugaguuuaua

SEQ ID NO: 414232 - RNA, 19 nt, Artificial Sequence
  Description of Artificial Sequence: Synthetic oligonucleotide
  Antisense Strand to SEQ ID NO: 414231
uauaaacucaugcugauaa

SEQ ID NO: 414233 - RNA, 19 nt, Artificial Sequence
  Description of Artificial Sequence: Synthetic oligonucleotide
  Sense Strand Starting at position 1216 of SEQ ID NO: 319017
ucagcaugaguuuauauua

SEQ ID NO: 414234 - RNA, 19 nt, Artificial Sequence
  Description of Artificial Sequence: Synthetic oligonucleotide
  Antisense Strand to SEQ ID NO: 414233
uaauauaaacucaugcuga

SEQ ID NO: 414235 - RNA, 19 nt, Artificial Sequence
  Description of Artificial Sequence: Synthetic oligonucleotide
  Sense Strand Starting at position 1216 of SEQ ID NO: 319070
auuguagauacauggguua

SEQ ID NO: 414236 - RNA, 19 nt, Artificial Sequence
  Description of Artificial Sequence: Synthetic oligonucleotide
  Antisense Strand to SEQ ID NO: 414235
uaacccauguaucuacaau

SEQ ID NO: 414237 - RNA, 19 nt, Artificial Sequence
  Description of Artificial Sequence: Synthetic oligonucleotide
  Sense Strand Starting at position 1216 of SEQ ID NO: 319073
guagauacauggguuagua

SEQ ID NO: 414238 - RNA, 19 nt, Artificial Sequence
  Description of Artificial Sequence: Synthetic oligonucleotide
  Antisense Strand to SEQ ID NO: 414237
uacuaacccauguaucuac

SEQ ID NO: 414239 - RNA, 19 nt, Artificial Sequence
  Description of Artificial Sequence: Synthetic oligonucleotide
  Sense Strand Starting at position 1217 of SEQ ID NO: 315258
agagacaauguggguuuau

SEQ ID NO: 414240 - RNA, 19 nt, Artificial Sequence
  Description of Artificial Sequence: Synthetic oligonucleotide
  Antisense Strand to SEQ ID NO: 414239
auaaacccacauugucucu

SEQ ID NO: 414241 - RNA, 19 nt, Artificial Sequence
  Description of Artificial Sequence: Synthetic oligonucleotide
  Sense Strand Starting at position 1217 of SEQ ID NO: 315259
gagacaauguggguuuaua

SEQ ID NO: 414242 - RNA, 19 nt, Artificial Sequence
  Description of Artificial Sequence: Synthetic oligonucleotide
  Antisense Strand to SEQ ID NO: 414241
uauaaacccacauugucuc

SEQ ID NO: 414243 - RNA, 19 nt, Artificial Sequence
  Description of Artificial Sequence: Synthetic oligonucleotide
  Sense Strand Starting at position 1217 of SEQ ID NO: 315269
ggguuuauaucauuucguu

SEQ ID NO: 414244 - RNA, 19 nt, Artificial Sequence
  Description of Artificial Sequence: Synthetic oligonucleotide
  Antisense Strand to SEQ ID NO: 414243
aacgaaaugauauaaaccc

SEQ ID NO: 414245 - RNA, 19 nt, Artificial Sequence
  Description of Artificial Sequence: Synthetic oligonucleotide
  Sense Strand Starting at position 1217 of SEQ ID NO: 315375
ucagcaguggcagaagaua

SEQ ID NO: 414246 - RNA, 19 nt, Artificial Sequence
  Description of Artificial Sequence: Synthetic oligonucleotide
  Antisense Strand to SEQ ID NO: 414245
uaucuucugccacugcuga

SEQ ID NO: 414247 - RNA, 19 nt, Artificial Sequence
  Description of Artificial Sequence: Synthetic oligonucleotide
  Sense Strand Starting at position 1217 of SEQ ID NO: 315624
agcauuaaugggcauuaaa

SEQ ID NO: 414248 - RNA, 19 nt, Artificial Sequence
  Description of Artificial Sequence: Synthetic oligonucleotide
  Antisense Strand to SEQ ID NO: 414247
uuuaaugcccauuaaugcu

SEQ ID NO: 414249 - RNA, 19 nt, Artificial Sequence
  Description of Artificial Sequence: Synthetic oligonucleotide
  Sense Strand Starting at position 1217 of SEQ ID NO: 315650
ucaugaaagggcgacuuua

SEQ ID NO: 414250 - RNA, 19 nt, Artificial Sequence
  Description of Artificial Sequence: Synthetic oligonucleotide
  Antisense Strand to SEQ ID NO: 414249
uaaagucgcccuuucauga

SEQ ID NO: 414251 - RNA, 19 nt, Artificial Sequence
  Description of Artificial Sequence: Synthetic oligonucleotide
  Sense Strand Starting at position 1217 of SEQ ID NO: 315835
agugucauagguuacaaca

SEQ ID NO: 414252 - RNA, 19 nt, Artificial Sequence
  Description of Artificial Sequence: Synthetic oligonucleotide
  Antisense Strand to SEQ ID NO: 414251
uguuguaaccuaugacacu

SEQ ID NO: 414253 - RNA, 19 nt, Artificial Sequence
  Description of Artificial Sequence: Synthetic oligonucleotide
  Sense Strand Starting at position 1217 of SEQ ID NO: 315943
uuccuuguacaaggagaaa

SEQ ID NO: 414254 - RNA, 19 nt, Artificial Sequence
  Description of Artificial Sequence: Synthetic oligonucleotide
  Antisense Strand to SEQ ID NO: 414253
uuucuccuuguacaaggaa

SEQ ID NO: 414255 - RNA, 19 nt, Artificial Sequence
  Description of Artificial Sequence: Synthetic oligonucleotide
  Sense Strand Starting at position 1217 of SEQ ID NO: 315954
aggagaaagucuuuaaacg

SEQ ID NO: 414256 - RNA, 19 nt, Artificial Sequence
  Description of Artificial Sequence: Synthetic oligonucleotide
  Antisense Strand to SEQ ID NO: 414255
cguuuaaagacuuucuccu

SEQ ID NO: 414257 - RNA, 19 nt, Artificial Sequence
  Description of Artificial Sequence: Synthetic oligonucleotide
  Sense Strand Starting at position 1217 of SEQ ID NO: 315972
ggcauuuauguguagcucu

SEQ ID NO: 414258 - RNA, 19 nt, Artificial Sequence
  Description of Artificial Sequence: Synthetic oligonucleotide
  Antisense Strand to SEQ ID NO: 414257
agagcuacacauaaaugcc

SEQ ID NO: 414259 - RNA, 19 nt, Artificial Sequence
  Description of Artificial Sequence: Synthetic oligonucleotide
  Sense Strand Starting at position 1217 of SEQ ID NO: 315975
auuuauguguagcucugaa

SEQ ID NO: 414260 - RNA, 19 nt, Artificial Sequence
  Description of Artificial Sequence: Synthetic oligonucleotide
  Antisense Strand to SEQ ID NO: 414259
uucagagcuacacauaaau

SEQ ID NO: 414261 - RNA, 19 nt, Artificial Sequence
  Description of Artificial Sequence: Synthetic oligonucleotide
  Sense Strand Starting at position 1217 of SEQ ID NO: 316081
aagugauagacuugggagu

SEQ ID NO: 414262 - RNA, 19 nt, Artificial Sequence
  Description of Artificial Sequence: Synthetic oligonucleotide
  Antisense Strand to SEQ ID NO: 414261
acucccaagucuaucacuu

SEQ ID NO: 414263 - RNA, 19 nt, Artificial Sequence
  Description of Artificial Sequence: Synthetic oligonucleotide
  Sense Strand Starting at position 1217 of SEQ ID NO: 316082
agugauagacuugggaguu

SEQ ID NO: 414264 - RNA, 19 nt, Artificial Sequence
  Description of Artificial Sequence: Synthetic oligonucleotide
  Antisense Strand to SEQ ID NO: 414263
aacucccaagucuaucacu

SEQ ID NO: 414265 - RNA, 19 nt, Artificial Sequence
  Description of Artificial Sequence: Synthetic oligonucleotide
  Sense Strand Starting at position 1217 of SEQ ID NO: 316172
aaguuuaucugggcaaaga

SEQ ID NO: 414266 - RNA, 19 nt, Artificial Sequence
  Description of Artificial Sequence: Synthetic oligonucleotide
  Antisense Strand to SEQ ID NO: 414265
ucuuugcccagauaaacuu

SEQ ID NO: 414267 - RNA, 19 nt, Artificial Sequence
  Description of Artificial Sequence: Synthetic oligonucleotide
  Sense Strand Starting at position 1217 of SEQ ID NO: 316203
ugcagauggagccaugaau

SEQ ID NO: 414268 - RNA, 19 nt, Artificial Sequence
  Description of Artificial Sequence: Synthetic oligonucleotide
  Antisense Strand to SEQ ID NO: 414267
auucauggcuccaucugca

SEQ ID NO: 414269 - RNA, 19 nt, Artificial Sequence
  Description of Artificial Sequence: Synthetic oligonucleotide
  Sense Strand Starting at position 1217 of SEQ ID NO: 316896
agacuaaugccuuggacau

SEQ ID NO: 414270 - RNA, 19 nt, Artificial Sequence
  Description of Artificial Sequence: Synthetic oligonucleotide
  Antisense Strand to SEQ ID NO: 414269
auguccaaggcauuagucu

SEQ ID NO: 414271 - RNA, 19 nt, Artificial Sequence
  Description of Artificial Sequence: Synthetic oligonucleotide
  Sense Strand Starting at position 1217 of SEQ ID NO: 317038
cucagaguaccucagagua

SEQ ID NO: 414272 - RNA, 19 nt, Artificial Sequence
  Description of Artificial Sequence: Synthetic oligonucleotide
  Antisense Strand to SEQ ID NO: 414271
uacucugagguacucugag

SEQ ID NO: 414273 - RNA, 19 nt, Artificial Sequence
  Description of Artificial Sequence: Synthetic oligonucleotide
  Sense Strand Starting at position 1217 of SEQ ID NO: 317085
gauaguuaccuggaauagc

SEQ ID NO: 414274 - RNA, 19 nt, Artificial Sequence
  Description of Artificial Sequence: Synthetic oligonucleotide
  Antisense Strand to SEQ ID NO: 414273
gcuauuccagguaacuauc

SEQ ID NO: 414275 - RNA, 19 nt, Artificial Sequence
  Description of Artificial Sequence: Synthetic oligonucleotide
  Sense Strand Starting at position 1217 of SEQ ID NO: 317109
acacaagaucccuaucguu

SEQ ID NO: 414276 - RNA, 19 nt, Artificial Sequence
  Description of Artificial Sequence: Synthetic oligonucleotide
  Antisense Strand to SEQ ID NO: 414275
aacgauagggaucuugugu

SEQ ID NO: 414277 - RNA, 19 nt, Artificial Sequence
  Description of Artificial Sequence: Synthetic oligonucleotide
  Sense Strand Starting at position 1217 of SEQ ID NO: 317366
uuaaguuuaaggugagaac

SEQ ID NO: 414278 - RNA, 19 nt, Artificial Sequence
  Description of Artificial Sequence: Synthetic oligonucleotide
  Antisense Strand to SEQ ID NO: 414277
guucucaccuuaaacuuaa

SEQ ID NO: 414279 - RNA, 19 nt, Artificial Sequence
  Description of Artificial Sequence: Synthetic oligonucleotide
  Sense Strand Starting at position 1217 of SEQ ID NO: 317375
aggugagaacuuuagcacu

SEQ ID NO: 414280 - RNA, 19 nt, Artificial Sequence
  Description of Artificial Sequence: Synthetic oligonucleotide
  Antisense Strand to SEQ ID NO: 414279
agugcuaaaguucucaccu

SEQ ID NO: 414281 - RNA, 19 nt, Artificial Sequence
  Description of Artificial Sequence: Synthetic oligonucleotide
  Sense Strand Starting at position 1217 of SEQ ID NO: 317855
gaguuuagaaauggagagu

SEQ ID NO: 414282 - RNA, 19 nt, Artificial Sequence
  Description of Artificial Sequence: Synthetic oligonucleotide
  Antisense Strand to SEQ ID NO: 414281
acucuccauuucuaaacuc

SEQ ID NO: 414283 - RNA, 19 nt, Artificial Sequence
  Description of Artificial Sequence: Synthetic oligonucleotide
  Sense Strand Starting at position 1217 of SEQ ID NO: 317952
ugaagagcuaaaugguuau

SEQ ID NO: 414284 - RNA, 19 nt, Artificial Sequence
  Description of Artificial Sequence: Synthetic oligonucleotide
  Antisense Strand to SEQ ID NO: 414283
auaaccauuuagcucuuca

SEQ ID NO: 414285 - RNA, 19 nt, Artificial Sequence
  Description of Artificial Sequence: Synthetic oligonucleotide
  Sense Strand Starting at position 1217 of SEQ ID NO: 317959
cuaaaugguuauguggaaa

SEQ ID NO: 414286 - RNA, 19 nt, Artificial Sequence
  Description of Artificial Sequence: Synthetic oligonucleotide
  Antisense Strand to SEQ ID NO: 414285
uuuccacauaaccauuuag

SEQ ID NO: 414287 - RNA, 19 nt, Artificial Sequence
  Description of Artificial Sequence: Synthetic oligonucleotide
  Sense Strand Starting at position 1217 of SEQ ID NO: 317982
guaacaaaugauuguuaag

SEQ ID NO: 414288 - RNA, 19 nt, Artificial Sequence
  Description of Artificial Sequence: Synthetic oligonucleotide
  Antisense Strand to SEQ ID NO: 414287
cuuaacaaucauuuguuac

SEQ ID NO: 414289 - RNA, 19 nt, Artificial Sequence
  Description of Artificial Sequence: Synthetic oligonucleotide
  Sense Strand Starting at position 1217 of SEQ ID NO: 318042
uuauaaucagauuggcaag

SEQ ID NO: 414290 - RNA, 19 nt, Artificial Sequence
  Description of Artificial Sequence: Synthetic oligonucleotide
  Antisense Strand to SEQ ID NO: 414289
cuugccaaucugauuauaa

SEQ ID NO: 414291 - RNA, 19 nt, Artificial Sequence
  Description of Artificial Sequence: Synthetic oligonucleotide
  Sense Strand Starting at position 1217 of SEQ ID NO: 318190
augcccuuagagcaagaau

SEQ ID NO: 414292 - RNA, 19 nt, Artificial Sequence
  Description of Artificial Sequence: Synthetic oligonucleotide
  Antisense Strand to SEQ ID NO: 414291
auucuugcucuaagggcau

SEQ ID NO: 414293 - RNA, 19 nt, Artificial Sequence
  Description of Artificial Sequence: Synthetic oligonucleotide
  Sense Strand Starting at position 1217 of SEQ ID NO: 318193
cccuuagagcaagaauucu

SEQ ID NO: 414294 - RNA, 19 nt, Artificial Sequence
  Description of Artificial Sequence: Synthetic oligonucleotide
  Antisense Strand to SEQ ID NO: 414293
agaauucuugcucuaaggg

SEQ ID NO: 414295 - RNA, 19 nt, Artificial Sequence
  Description of Artificial Sequence: Synthetic oligonucleotide
  Sense Strand Starting at position 1217 of SEQ ID NO: 318419
uauagagaggucuguaaua

SEQ ID NO: 414296 - RNA, 19 nt, Artificial Sequence
  Description of Artificial Sequence: Synthetic oligonucleotide
  Antisense Strand to SEQ ID NO: 414295
uauuacagaccucucuaua

SEQ ID NO: 414297 - RNA, 19 nt, Artificial Sequence
  Description of Artificial Sequence: Synthetic oligonucleotide
  Sense Strand Starting at position 1217 of SEQ ID NO: 318421
uagagaggucuguaauagu

SEQ ID NO: 414298 - RNA, 19 nt, Artificial Sequence
  Description of Artificial Sequence: Synthetic oligonucleotide
  Antisense Strand to SEQ ID NO: 414297
acuauuacagaccucucua

SEQ ID NO: 414299 - RNA, 19 nt, Artificial Sequence
  Description of Artificial Sequence: Synthetic oligonucleotide
  Sense Strand Starting at position 1217 of SEQ ID NO: 318509
aagguagagcuauaguauu

SEQ ID NO: 414300 - RNA, 19 nt, Artificial Sequence
  Description of Artificial Sequence: Synthetic oligonucleotide
  Antisense Strand to SEQ ID NO: 414299
aauacuauagcucuaccuu

SEQ ID NO: 414301 - RNA, 19 nt, Artificial Sequence
  Description of Artificial Sequence: Synthetic oligonucleotide
  Sense Strand Starting at position 1217 of SEQ ID NO: 318666
cuguuacuuccuuguauuu

SEQ ID NO: 414302 - RNA, 19 nt, Artificial Sequence
  Description of Artificial Sequence: Synthetic oligonucleotide
  Antisense Strand to SEQ ID NO: 414301
aaauacaaggaaguaacag

SEQ ID NO: 414303 - RNA, 19 nt, Artificial Sequence
  Description of Artificial Sequence: Synthetic oligonucleotide
  Sense Strand Starting at position 1217 of SEQ ID NO: 318695
uuacaaugucuauauguca

SEQ ID NO: 414304 - RNA, 19 nt, Artificial Sequence
  Description of Artificial Sequence: Synthetic oligonucleotide
  Antisense Strand to SEQ ID NO: 414303
ugacauauagacauuguaa

SEQ ID NO: 414305 - RNA, 19 nt, Artificial Sequence
  Description of Artificial Sequence: Synthetic oligonucleotide
  Sense Strand Starting at position 1217 of SEQ ID NO: 318760
ggcaaugauccacaaugca

SEQ ID NO: 414306 - RNA, 19 nt, Artificial Sequence
  Description of Artificial Sequence: Synthetic oligonucleotide
  Antisense Strand to SEQ ID NO: 414305
ugcauuguggaucauugcc

SEQ ID NO: 414307 - RNA, 19 nt, Artificial Sequence
  Description of Artificial Sequence: Synthetic oligonucleotide
  Sense Strand Starting at position 1217 of SEQ ID NO: 318862
acacauagauugcucuaga

SEQ ID NO: 414308 - RNA, 19 nt, Artificial Sequence
  Description of Artificial Sequence: Synthetic oligonucleotide
  Antisense Strand to SEQ ID NO: 414307
ucuagagcaaucuaugugu

SEQ ID NO: 414309 - RNA, 19 nt, Artificial Sequence
  Description of Artificial Sequence: Synthetic oligonucleotide
  Sense Strand Starting at position 1217 of SEQ ID NO: 318930
cgcgguauauggacuaguu

SEQ ID NO: 414310 - RNA, 19 nt, Artificial Sequence
  Description of Artificial Sequence: Synthetic oligonucleotide
  Antisense Strand to SEQ ID NO: 414309
aacuaguccauauaccgcg

SEQ ID NO: 414311 - RNA, 19 nt, Artificial Sequence
  Description of Artificial Sequence: Synthetic oligonucleotide
  Sense Strand Starting at position 1217 of SEQ ID NO: 318932
cgguauauggacuaguuga

SEQ ID NO: 414312 - RNA, 19 nt, Artificial Sequence
  Description of Artificial Sequence: Synthetic oligonucleotide
  Antisense Strand to SEQ ID NO: 414311
ucaacuaguccauauaccg

SEQ ID NO: 414313 - RNA, 19 nt, Artificial Sequence
  Description of Artificial Sequence: Synthetic oligonucleotide
  Sense Strand Starting at position 1217 of SEQ ID NO: 319127
cucugaagccuguaauuaa

SEQ ID NO: 414314 - RNA, 19 nt, Artificial Sequence
  Description of Artificial Sequence: Synthetic oligonucleotide
  Antisense Strand to SEQ ID NO: 414313
uuaauuacaggcuucagag

SEQ ID NO: 414315 - RNA, 19 nt, Artificial Sequence
  Description of Artificial Sequence: Synthetic oligonucleotide
  Sense Strand Starting at position 1217 of SEQ ID NO: 319214
gguggagucaaugaucuua

SEQ ID NO: 414316 - RNA, 19 nt, Artificial Sequence
  Description of Artificial Sequence: Synthetic oligonucleotide
  Antisense Strand to SEQ ID NO: 414315
uaagaucauugacuccacc

SEQ ID NO: 414317 - RNA, 19 nt, Artificial Sequence
  Description of Artificial Sequence: Synthetic oligonucleotide
  Sense Strand Starting at position 1217 of SEQ ID NO: 319216
uggagucaaugaucuuaag

SEQ ID NO: 414318 - RNA, 19 nt, Artificial Sequence
  Description of Artificial Sequence: Synthetic oligonucleotide
  Antisense Strand to SEQ ID NO: 414317
cuuaagaucauugacucca

SEQ ID NO: 414319 - RNA, 19 nt, Artificial Sequence
  Description of Artificial Sequence: Synthetic oligonucleotide
  Sense Strand Starting at position 1218 of SEQ ID NO: 315433
ucugcauuccaguagaacu

SEQ ID NO: 414320 - RNA, 19 nt, Artificial Sequence
  Description of Artificial Sequence: Synthetic oligonucleotide
  Antisense Strand to SEQ ID NO: 414319
aguucuacuggaaugcaga

SEQ ID NO: 414321 - RNA, 19 nt, Artificial Sequence
  Description of Artificial Sequence: Synthetic oligonucleotide
  Sense Strand Starting at position 1218 of SEQ ID NO: 315435
ugcauuccaguagaacuua

SEQ ID NO: 414322 - RNA, 19 nt, Artificial Sequence
  Description of Artificial Sequence: Synthetic oligonucleotide
  Antisense Strand to SEQ ID NO: 414321
uaaguucuacuggaaugca

SEQ ID NO: 414323 - RNA, 19 nt, Artificial Sequence
  Description of Artificial Sequence: Synthetic oligonucleotide
  Sense Strand Starting at position 1218 of SEQ ID NO: 315485
cagguagguguuggagaaa

SEQ ID NO: 414324 - RNA, 19 nt, Artificial Sequence
  Description of Artificial Sequence: Synthetic oligonucleotide
  Antisense Strand to SEQ ID NO: 414323
uuucuccaacaccuaccug

SEQ ID NO: 414325 - RNA, 19 nt, Artificial Sequence
  Description of Artificial Sequence: Synthetic oligonucleotide
  Sense Strand Starting at position 1218 of SEQ ID NO: 315576
gaaagauaacccugugguu

SEQ ID NO: 414326 - RNA, 19 nt, Artificial Sequence
  Description of Artificial Sequence: Synthetic oligonucleotide
  Antisense Strand to SEQ ID NO: 414325
aaccacaggguuaucuuuc

SEQ ID NO: 414327 - RNA, 19 nt, Artificial Sequence
  Description of Artificial Sequence: Synthetic oligonucleotide
  Sense Strand Starting at position 1218 of SEQ ID NO: 315666
agaccaaguuccuuuaaga

SEQ ID NO: 414328 - RNA, 19 nt, Artificial Sequence
  Description of Artificial Sequence: Synthetic oligonucleotide
  Antisense Strand to SEQ ID NO: 414327
ucuuaaaggaacuuggucu

SEQ ID NO: 414329 - RNA, 19 nt, Artificial Sequence
  Description of Artificial Sequence: Synthetic oligonucleotide
  Sense Strand Starting at position 1218 of SEQ ID NO: 315707
auuguaacucaacgacaua

SEQ ID NO: 414330 - RNA, 19 nt, Artificial Sequence
  Description of Artificial Sequence: Synthetic oligonucleotide
  Antisense Strand to SEQ ID NO: 414329
uaugucguugaguuacaau

SEQ ID NO: 414331 - RNA, 19 nt, Artificial Sequence
  Description of Artificial Sequence: Synthetic oligonucleotide
  Sense Strand Starting at position 1218 of SEQ ID NO: 315796
ugguaucucaguuaaaguu

SEQ ID NO: 414332 - RNA, 19 nt, Artificial Sequence
  Description of Artificial Sequence: Synthetic oligonucleotide
  Antisense Strand to SEQ ID NO: 414331
aacuuuaacugagauacca

SEQ ID NO: 414333 - RNA, 19 nt, Artificial Sequence
  Description of Artificial Sequence: Synthetic oligonucleotide
  Sense Strand Starting at position 1218 of SEQ ID NO: 316463
uuccuagugaauugugaag

SEQ ID NO: 414334 - RNA, 19 nt, Artificial Sequence
  Description of Artificial Sequence: Synthetic oligonucleotide
  Antisense Strand to SEQ ID NO: 414333
cuucacaauucacuaggaa

SEQ ID NO: 414335 - RNA, 19 nt, Artificial Sequence
  Description of Artificial Sequence: Synthetic oligonucleotide
  Sense Strand Starting at position 1218 of SEQ ID NO: 316634
caaugaaagcauuaguuug

SEQ ID NO: 414336 - RNA, 19 nt, Artificial Sequence
  Description of Artificial Sequence: Synthetic oligonucleotide
  Antisense Strand to SEQ ID NO: 414335
caaacuaaugcuuucauug

SEQ ID NO: 414337 - RNA, 19 nt, Artificial Sequence
  Description of Artificial Sequence: Synthetic oligonucleotide
  Sense Strand Starting at position 1218 of SEQ ID NO: 316754
auaucaaguuaaguggauu

SEQ ID NO: 414338 - RNA, 19 nt, Artificial Sequence
  Description of Artificial Sequence: Synthetic oligonucleotide
  Antisense Strand to SEQ ID NO: 414337
aauccacuuaacuugauau

SEQ ID NO: 414339 - RNA, 19 nt, Artificial Sequence
  Description of Artificial Sequence: Synthetic oligonucleotide
  Sense Strand Starting at position 1218 of SEQ ID NO: 317260
uaugacaggccucaguaaa

SEQ ID NO: 414340 - RNA, 19 nt, Artificial Sequence
  Description of Artificial Sequence: Synthetic oligonucleotide
  Antisense Strand to SEQ ID NO: 414339
uuuacugaggccugucaua

SEQ ID NO: 414341 - RNA, 19 nt, Artificial Sequence
  Description of Artificial Sequence: Synthetic oligonucleotide
  Sense Strand Starting at position 1218 of SEQ ID NO: 317267
ggccucaguaaauagaagu

SEQ ID NO: 414342 - RNA, 19 nt, Artificial Sequence
  Description of Artificial Sequence: Synthetic oligonucleotide
  Antisense Strand to SEQ ID NO: 414341
acuucuauuuacugaggcc

SEQ ID NO: 414343 - RNA, 19 nt, Artificial Sequence
  Description of Artificial Sequence: Synthetic oligonucleotide
  Sense Strand Starting at position 1218 of SEQ ID NO: 317320
guugaucuacuuggaaaca

SEQ ID NO: 414344 - RNA, 19 nt, Artificial Sequence
  Description of Artificial Sequence: Synthetic oligonucleotide
  Antisense Strand to SEQ ID NO: 414343
uguuuccaaguagaucaac

SEQ ID NO: 414345 - RNA, 19 nt, Artificial Sequence
  Description of Artificial Sequence: Synthetic oligonucleotide
  Sense Strand Starting at position 1218 of SEQ ID NO: 317385
uggcauaaauuugacacaa

SEQ ID NO: 414346 - RNA, 19 nt, Artificial Sequence
  Description of Artificial Sequence: Synthetic oligonucleotide
  Antisense Strand to SEQ ID NO: 414345
uugugucaaauuuaugcca

SEQ ID NO: 414347 - RNA, 19 nt, Artificial Sequence
  Description of Artificial Sequence: Synthetic oligonucleotide
  Sense Strand Starting at position 1218 of SEQ ID NO: 317598
acauccuuuguguacaaua

SEQ ID NO: 414348 - RNA, 19 nt, Artificial Sequence
  Description of Artificial Sequence: Synthetic oligonucleotide
  Antisense Strand to SEQ ID NO: 414347
uauuguacacaaaggaugu

SEQ ID NO: 414349 - RNA, 19 nt, Artificial Sequence
  Description of Artificial Sequence: Synthetic oligonucleotide
  Sense Strand Starting at position 1218 of SEQ ID NO: 317600
auccuuuguguacaauaga

SEQ ID NO: 414350 - RNA, 19 nt, Artificial Sequence
  Description of Artificial Sequence: Synthetic oligonucleotide
  Antisense Strand to SEQ ID NO: 414349
ucuauuguacacaaaggau

SEQ ID NO: 414351 - RNA, 19 nt, Artificial Sequence
  Description of Artificial Sequence: Synthetic oligonucleotide
  Sense Strand Starting at position 1218 of SEQ ID NO: 317798
gcaugaacuuuauuaugga

SEQ ID NO: 414352 - RNA, 19 nt, Artificial Sequence
  Description of Artificial Sequence: Synthetic oligonucleotide
  Antisense Strand to SEQ ID NO: 414351
uccauaauaaaguucaugc

SEQ ID NO: 414353 - RNA, 19 nt, Artificial Sequence
  Description of Artificial Sequence: Synthetic oligonucleotide
  Sense Strand Starting at position 1218 of SEQ ID NO: 317873
ucaauuaaagugugaugau

SEQ ID NO: 414354 - RNA, 19 nt, Artificial Sequence
  Description of Artificial Sequence: Synthetic oligonucleotide
  Antisense Strand to SEQ ID NO: 414353
aucaucacacuuuaauuga

SEQ ID NO: 414355 - RNA, 19 nt, Artificial Sequence
  Description of Artificial Sequence: Synthetic oligonucleotide
  Sense Strand Starting at position 1218 of SEQ ID NO: 317880
aagugugaugauggaaaug

SEQ ID NO: 414356 - RNA, 19 nt, Artificial Sequence
  Description of Artificial Sequence: Synthetic oligonucleotide
  Antisense Strand to SEQ ID NO: 414355
cauuuccaucaucacacuu

SEQ ID NO: 414357 - RNA, 19 nt, Artificial Sequence
  Description of Artificial Sequence: Synthetic oligonucleotide
  Sense Strand Starting at position 1218 of SEQ ID NO: 317890
auggaaauguaugcaguua

SEQ ID NO: 414358 - RNA, 19 nt, Artificial Sequence
  Description of Artificial Sequence: Synthetic oligonucleotide
  Antisense Strand to SEQ ID NO: 414357
uaacugcauacauuuccau

SEQ ID NO: 414359 - RNA, 19 nt, Artificial Sequence
  Description of Artificial Sequence: Synthetic oligonucleotide
  Sense Strand Starting at position 1218 of SEQ ID NO: 317891
uggaaauguaugcaguuau

SEQ ID NO: 414360 - RNA, 19 nt, Artificial Sequence
  Description of Artificial Sequence: Synthetic oligonucleotide
  Antisense Strand to SEQ ID NO: 414359
auaacugcauacauuucca

SEQ ID NO: 414361 - RNA, 19 nt, Artificial Sequence
  Description of Artificial Sequence: Synthetic oligonucleotide
  Sense Strand Starting at position 1218 of SEQ ID NO: 318084
auuggauauauguggaugu

SEQ ID NO: 414362 - RNA, 19 nt, Artificial Sequence
  Description of Artificial Sequence: Synthetic oligonucleotide
  Antisense Strand to SEQ ID NO: 414361
acauccacauauauccaau

SEQ ID NO: 414363 - RNA, 19 nt, Artificial Sequence
  Description of Artificial Sequence: Synthetic oligonucleotide
  Sense Strand Starting at position 1218 of SEQ ID NO: 318086
uggauauauguggaugucu

SEQ ID NO: 414364 - RNA, 19 nt, Artificial Sequence
  Description of Artificial Sequence: Synthetic oligonucleotide
  Antisense Strand to SEQ ID NO: 414363
agacauccacauauaucca

SEQ ID NO: 414365 - RNA, 19 nt, Artificial Sequence
  Description of Artificial Sequence: Synthetic oligonucleotide
  Sense Strand Starting at position 1218 of SEQ ID NO: 318236
agugguuuaggacaucgau

SEQ ID NO: 414366 - RNA, 19 nt, Artificial Sequence
  Description of Artificial Sequence: Synthetic oligonucleotide
  Antisense Strand to SEQ ID NO: 414365
aucgauguccuaaaccacu

SEQ ID NO: 414367 - RNA, 19 nt, Artificial Sequence
  Description of Artificial Sequence: Synthetic oligonucleotide
  Sense Strand Starting at position 1218 of SEQ ID NO: 318343
uaggucuauuuauucguau

SEQ ID NO: 414368 - RNA, 19 nt, Artificial Sequence
  Description of Artificial Sequence: Synthetic oligonucleotide
  Antisense Strand to SEQ ID NO: 414367
auacgaauaaauagaccua

SEQ ID NO: 414369 - RNA, 19 nt, Artificial Sequence
  Description of Artificial Sequence: Synthetic oligonucleotide
  Sense Strand Starting at position 1218 of SEQ ID NO: 318349
uauuuauucguaugcgaaa

SEQ ID NO: 414370 - RNA, 19 nt, Artificial Sequence
  Description of Artificial Sequence: Synthetic oligonucleotide
  Antisense Strand to SEQ ID NO: 414369
uuucgcauacgaauaaaua

SEQ ID NO: 414371 - RNA, 19 nt, Artificial Sequence
  Description of Artificial Sequence: Synthetic oligonucleotide
  Sense Strand Starting at position 1218 of SEQ ID NO: 318350
auuuauucguaugcgaaau

SEQ ID NO: 414372 - RNA, 19 nt, Artificial Sequence
  Description of Artificial Sequence: Synthetic oligonucleotide
  Antisense Strand to SEQ ID NO: 414371
auuucgcauacgaauaaau

SEQ ID NO: 414373 - RNA, 19 nt, Artificial Sequence
  Description of Artificial Sequence: Synthetic oligonucleotide
  Sense Strand Starting at position 1218 of SEQ ID NO: 318382
aguguuuaucuuuaaugga

SEQ ID NO: 414374 - RNA, 19 nt, Artificial Sequence
  Description of Artificial Sequence: Synthetic oligonucleotide
  Antisense Strand to SEQ ID NO: 414373
uccauuaaagauaaacacu

SEQ ID NO: 414375 - RNA, 19 nt, Artificial Sequence
  Description of Artificial Sequence: Synthetic oligonucleotide
  Sense Strand Starting at position 1218 of SEQ ID NO: 318398
ggauuugguugagaggauu

SEQ ID NO: 414376 - RNA, 19 nt, Artificial Sequence
  Description of Artificial Sequence: Synthetic oligonucleotide
  Antisense Strand to SEQ ID NO: 414375
aauccucucaaccaaaucc

SEQ ID NO: 414377 - RNA, 19 nt, Artificial Sequence
  Description of Artificial Sequence: Synthetic oligonucleotide
  Sense Strand Starting at position 1218 of SEQ ID NO: 318446
cagaguuuagcauaacgaa

SEQ ID NO: 414378 - RNA, 19 nt, Artificial Sequence
  Description of Artificial Sequence: Synthetic oligonucleotide
  Antisense Strand to SEQ ID NO: 414377
uucguuaugcuaaacucug

SEQ ID NO: 414379 - RNA, 19 nt, Artificial Sequence
  Description of Artificial Sequence: Synthetic oligonucleotide
  Sense Strand Starting at position 1218 of SEQ ID NO: 318486
guuaaauugggauguucca

SEQ ID NO: 414380 - RNA, 19 nt, Artificial Sequence
  Description of Artificial Sequence: Synthetic oligonucleotide
  Antisense Strand to SEQ ID NO: 414379
uggaacaucccaauuuaac

SEQ ID NO: 414381 - RNA, 19 nt, Artificial Sequence
  Description of Artificial Sequence: Synthetic oligonucleotide
  Sense Strand Starting at position 1218 of SEQ ID NO: 318630
cccauaugugguggaaaga

SEQ ID NO: 414382 - RNA, 19 nt, Artificial Sequence
  Description of Artificial Sequence: Synthetic oligonucleotide
  Antisense Strand to SEQ ID NO: 414381
ucuuuccaccacauauggg

SEQ ID NO: 414383 - RNA, 19 nt, Artificial Sequence
  Description of Artificial Sequence: Synthetic oligonucleotide
  Sense Strand Starting at position 1218 of SEQ ID NO: 318646
agagaagcuucucucugau

SEQ ID NO: 414384 - RNA, 19 nt, Artificial Sequence
  Description of Artificial Sequence: Synthetic oligonucleotide
  Antisense Strand to SEQ ID NO: 414383
aucagagagaagcuucucu

SEQ ID NO: 414385 - RNA, 19 nt, Artificial Sequence
  Description of Artificial Sequence: Synthetic oligonucleotide
  Sense Strand Starting at position 1218 of SEQ ID NO: 318736
guugcauuccuggauauac

SEQ ID NO: 414386 - RNA, 19 nt, Artificial Sequence
  Description of Artificial Sequence: Synthetic oligonucleotide
  Antisense Strand to SEQ ID NO: 414385
guauauccaggaaugcaac

SEQ ID NO: 414387 - RNA, 19 nt, Artificial Sequence
  Description of Artificial Sequence: Synthetic oligonucleotide
  Sense Strand Starting at position 1218 of SEQ ID NO: 318901
cccuuaaauguaugagaua

SEQ ID NO: 414388 - RNA, 19 nt, Artificial Sequence
  Description of Artificial Sequence: Synthetic oligonucleotide
  Antisense Strand to SEQ ID NO: 414387
uaucucauacauuuaaggg

SEQ ID NO: 414389 - RNA, 19 nt, Artificial Sequence
  Description of Artificial Sequence: Synthetic oligonucleotide
  Sense Strand Starting at position 1218 of SEQ ID NO: 319098
guuuguuccacugauaugg

SEQ ID NO: 414390 - RNA, 19 nt, Artificial Sequence
  Description of Artificial Sequence: Synthetic oligonucleotide
  Antisense Strand to SEQ ID NO: 414389
ccauaucaguggaacaaac

SEQ ID NO: 414391 - RNA, 19 nt, Artificial Sequence
  Description of Artificial Sequence: Synthetic oligonucleotide
  Sense Strand Starting at position 1218 of SEQ ID NO: 319136
ugaagaaagacuuguuugu

SEQ ID NO: 414392 - RNA, 19 nt, Artificial Sequence
  Description of Artificial Sequence: Synthetic oligonucleotide
  Antisense Strand to SEQ ID NO: 414391
acaaacaagucuuucuuca

SEQ ID NO: 414393 - RNA, 19 nt, Artificial Sequence
  Description of Artificial Sequence: Synthetic oligonucleotide
  Sense Strand Starting at position 1218 of SEQ ID NO: 319138
aagaaagacuuguuuguau

SEQ ID NO: 414394 - RNA, 19 nt, Artificial Sequence
  Description of Artificial Sequence: Synthetic oligonucleotide
  Antisense Strand to SEQ ID NO: 414393
auacaaacaagucuuucuu

SEQ ID NO: 414395 - RNA, 19 nt, Artificial Sequence
  Description of Artificial Sequence: Synthetic oligonucleotide
  Sense Strand Starting at position 1218 of SEQ ID NO: 319140
gaaagacuuguuuguauua

SEQ ID NO: 414396 - RNA, 19 nt, Artificial Sequence
  Description of Artificial Sequence: Synthetic oligonucleotide
  Antisense Strand to SEQ ID NO: 414395
uaauacaaacaagucuuuc

SEQ ID NO: 414397 - RNA, 19 nt, Artificial Sequence
  Description of Artificial Sequence: Synthetic oligonucleotide
  Sense Strand Starting at position 1218 of SEQ ID NO: 319206
agguuauagcuagauggua

SEQ ID NO: 414398 - RNA, 19 nt, Artificial Sequence
  Description of Artificial Sequence: Synthetic oligonucleotide
  Antisense Strand to SEQ ID NO: 414397
uaccaucuagcuauaaccu

SEQ ID NO: 414399 - RNA, 19 nt, Artificial Sequence
  Description of Artificial Sequence: Synthetic oligonucleotide
  Sense Strand Starting at position 1219 of SEQ ID NO: 315460
uagucuuacugaucaaagg

SEQ ID NO: 414400 - RNA, 19 nt, Artificial Sequence
  Description of Artificial Sequence: Synthetic oligonucleotide
  Antisense Strand to SEQ ID NO: 414399
ccuuugaucaguaagacua

SEQ ID NO: 414401 - RNA, 19 nt, Artificial Sequence
  Description of Artificial Sequence: Synthetic oligonucleotide
  Sense Strand Starting at position 1219 of SEQ ID NO: 315835
cguuauucgaauuaaagga

SEQ ID NO: 414402 - RNA, 19 nt, Artificial Sequence
  Description of Artificial Sequence: Synthetic oligonucleotide
  Antisense Strand to SEQ ID NO: 414401
uccuuuaauucgaauaacg

SEQ ID NO: 414403 - RNA, 19 nt, Artificial Sequence
  Description of Artificial Sequence: Synthetic oligonucleotide
  Sense Strand Starting at position 1219 of SEQ ID NO: 315947
uuguaucaucuguaagaua

SEQ ID NO: 414404 - RNA, 19 nt, Artificial Sequence
  Description of Artificial Sequence: Synthetic oligonucleotide
  Antisense Strand to SEQ ID NO: 414403
uaucuuacagaugauacaa

SEQ ID NO: 414405 - RNA, 19 nt, Artificial Sequence
  Description of Artificial Sequence: Synthetic oligonucleotide
  Sense Strand Starting at position 1219 of SEQ ID NO: 316081
uuuguuaucaagggauaug

SEQ ID NO: 414406 - RNA, 19 nt, Artificial Sequence
  Description of Artificial Sequence: Synthetic oligonucleotide
  Antisense Strand to SEQ ID NO: 414405
cauaucccuugauaacaaa

SEQ ID NO: 414407 - RNA, 19 nt, Artificial Sequence
  Description of Artificial Sequence: Synthetic oligonucleotide
  Sense Strand Starting at position 1219 of SEQ ID NO: 316106
gagcucagauggucacaua

SEQ ID NO: 414408 - RNA, 19 nt, Artificial Sequence
  Description of Artificial Sequence: Synthetic oligonucleotide
  Antisense Strand to SEQ ID NO: 414407
uaugugaccaucugagcuc

SEQ ID NO: 414409 - RNA, 19 nt, Artificial Sequence
  Description of Artificial Sequence: Synthetic oligonucleotide
  Sense Strand Starting at position 1219 of SEQ ID NO: 316107
agcucagauggucacauau

SEQ ID NO: 414410 - RNA, 19 nt, Artificial Sequence
  Description of Artificial Sequence: Synthetic oligonucleotide
  Antisense Strand to SEQ ID NO: 414409
auaugugaccaucugagcu

SEQ ID NO: 414411 - RNA, 19 nt, Artificial Sequence
  Description of Artificial Sequence: Synthetic oligonucleotide
  Sense Strand Starting at position 1219 of SEQ ID NO: 316127
aucugaccuuauccggaua

SEQ ID NO: 414412 - RNA, 19 nt, Artificial Sequence
  Description of Artificial Sequence: Synthetic oligonucleotide
  Antisense Strand to SEQ ID NO: 414411
uauccggauaaggucagau

SEQ ID NO: 414413 - RNA, 19 nt, Artificial Sequence
  Description of Artificial Sequence: Synthetic oligonucleotide
  Sense Strand Starting at position 1219 of SEQ ID NO: 316130
ugaccuuauccggauaagu

SEQ ID NO: 414414 - RNA, 19 nt, Artificial Sequence
  Description of Artificial Sequence: Synthetic oligonucleotide
  Antisense Strand to SEQ ID NO: 414413
acuuauccggauaagguca

SEQ ID NO: 414415 - RNA, 19 nt, Artificial Sequence
  Description of Artificial Sequence: Synthetic oligonucleotide
  Sense Strand Starting at position 1219 of SEQ ID NO: 316132
accuuauccggauaaguua

SEQ ID NO: 414416 - RNA, 19 nt, Artificial Sequence
  Description of Artificial Sequence: Synthetic oligonucleotide
  Antisense Strand to SEQ ID NO: 414415
uaacuuauccggauaaggu

SEQ ID NO: 414417 - RNA, 19 nt, Artificial Sequence
  Description of Artificial Sequence: Synthetic oligonucleotide
  Sense Strand Starting at position 1219 of SEQ ID NO: 316140
cggauaaguuaacuucuga

SEQ ID NO: 414418 - RNA, 19 nt, Artificial Sequence
  Description of Artificial Sequence: Synthetic oligonucleotide
  Antisense Strand to SEQ ID NO: 414417
ucagaaguuaacuuauccg

SEQ ID NO: 414419 - RNA, 19 nt, Artificial Sequence
  Description of Artificial Sequence: Synthetic oligonucleotide
  Sense Strand Starting at position 1219 of SEQ ID NO: 316228
gguugucaggacugaggaa

SEQ ID NO: 414420 - RNA, 19 nt, Artificial Sequence
  Description of Artificial Sequence: Synthetic oligonucleotide
  Antisense Strand to SEQ ID NO: 414419
uuccucaguccugacaacc

SEQ ID NO: 414421 - RNA, 19 nt, Artificial Sequence
  Description of Artificial Sequence: Synthetic oligonucleotide
  Sense Strand Starting at position 1219 of SEQ ID NO: 316506
ggauaccaauguuuccuaa

SEQ ID NO: 414422 - RNA, 19 nt, Artificial Sequence
  Description of Artificial Sequence: Synthetic oligonucleotide
  Antisense Strand to SEQ ID NO: 414421
uuaggaaacauugguaucc

SEQ ID NO: 414423 - RNA, 19 nt, Artificial Sequence
  Description of Artificial Sequence: Synthetic oligonucleotide
  Sense Strand Starting at position 1219 of SEQ ID NO: 316766
ucaacagacuggucccuaa

SEQ ID NO: 414424 - RNA, 19 nt, Artificial Sequence
  Description of Artificial Sequence: Synthetic oligonucleotide
  Antisense Strand to SEQ ID NO: 414423
uuagggaccagucuguuga

SEQ ID NO: 414425 - RNA, 19 nt, Artificial Sequence
  Description of Artificial Sequence: Synthetic oligonucleotide
  Sense Strand Starting at position 1219 of SEQ ID NO: 316781
cuaagagaagucggcagaa

SEQ ID NO: 414426 - RNA, 19 nt, Artificial Sequence
  Description of Artificial Sequence: Synthetic oligonucleotide
  Antisense Strand to SEQ ID NO: 414425
uucugccgacuucucuuag

SEQ ID NO: 414427 - RNA, 19 nt, Artificial Sequence
  Description of Artificial Sequence: Synthetic oligonucleotide
  Sense Strand Starting at position 1219 of SEQ ID NO: 316878
guaauacucacgcauggaa

SEQ ID NO: 414428 - RNA, 19 nt, Artificial Sequence
  Description of Artificial Sequence: Synthetic oligonucleotide
  Antisense Strand to SEQ ID NO: 414427
uuccaugcgugaguauuac

SEQ ID NO: 414429 - RNA, 19 nt, Artificial Sequence
  Description of Artificial Sequence: Synthetic oligonucleotide
  Sense Strand Starting at position 1219 of SEQ ID NO: 316880
aauacucacgcauggaaga

SEQ ID NO: 414430 - RNA, 19 nt, Artificial Sequence
  Description of Artificial Sequence: Synthetic oligonucleotide
  Antisense Strand to SEQ ID NO: 414429
ucuuccaugcgugaguauu

SEQ ID NO: 414431 - RNA, 19 nt, Artificial Sequence
  Description of Artificial Sequence: Synthetic oligonucleotide
  Sense Strand Starting at position 1219 of SEQ ID NO: 317114
gagccagagccugauacuu

SEQ ID NO: 414432 - RNA, 19 nt, Artificial Sequence
  Description of Artificial Sequence: Synthetic oligonucleotide
  Antisense Strand to SEQ ID NO: 414431
aaguaucaggcucuggcuc

SEQ ID NO: 414433 - RNA, 19 nt, Artificial Sequence
  Description of Artificial Sequence: Synthetic oligonucleotide
  Sense Strand Starting at position 1219 of SEQ ID NO: 317292
gcgccuucuccucuuaacu

SEQ ID NO: 414434 - RNA, 19 nt, Artificial Sequence
  Description of Artificial Sequence: Synthetic oligonucleotide
  Antisense Strand to SEQ ID NO: 414433
aguuaagaggagaaggcgc

SEQ ID NO: 414435 - RNA, 19 nt, Artificial Sequence
  Description of Artificial Sequence: Synthetic oligonucleotide
  Sense Strand Starting at position 1219 of SEQ ID NO: 317434
guaguaaccauguacaagu

SEQ ID NO: 414436 - RNA, 19 nt, Artificial Sequence
  Description of Artificial Sequence: Synthetic oligonucleotide
  Antisense Strand to SEQ ID NO: 414435
acuuguacaugguuacuac

SEQ ID NO: 414437 - RNA, 19 nt, Artificial Sequence
  Description of Artificial Sequence: Synthetic oligonucleotide
  Sense Strand Starting at position 1219 of SEQ ID NO: 317465
uuuacagaugaguguagau

SEQ ID NO: 414438 - RNA, 19 nt, Artificial Sequence
  Description of Artificial Sequence: Synthetic oligonucleotide
  Antisense Strand to SEQ ID NO: 414437
aucuacacucaucuguaaa

SEQ ID NO: 414439 - RNA, 19 nt, Artificial Sequence
  Description of Artificial Sequence: Synthetic oligonucleotide
  Sense Strand Starting at position 1219 of SEQ ID NO: 317477
uguagauuaggagguguca

SEQ ID NO: 414440 - RNA, 19 nt, Artificial Sequence
  Description of Artificial Sequence: Synthetic oligonucleotide
  Antisense Strand to SEQ ID NO: 414439
ugacaccuccuaaucuaca

SEQ ID NO: 414441 - RNA, 19 nt, Artificial Sequence
  Description of Artificial Sequence: Synthetic oligonucleotide
  Sense Strand Starting at position 1219 of SEQ ID NO: 317726
uaacgaauucugugggaug

SEQ ID NO: 414442 - RNA, 19 nt, Artificial Sequence
  Description of Artificial Sequence: Synthetic oligonucleotide
  Antisense Strand to SEQ ID NO: 414441
caucccacagaauucguua

SEQ ID NO: 414443 - RNA, 19 nt, Artificial Sequence
  Description of Artificial Sequence: Synthetic oligonucleotide
  Sense Strand Starting at position 1219 of SEQ ID NO: 317834
ggcaguccuccuggagaag

SEQ ID NO: 414444 - RNA, 19 nt, Artificial Sequence
  Description of Artificial Sequence: Synthetic oligonucleotide
  Antisense Strand to SEQ ID NO: 414443
cuucuccaggaggacugcc

SEQ ID NO: 414445 - RNA, 19 nt, Artificial Sequence
  Description of Artificial Sequence: Synthetic oligonucleotide
  Sense Strand Starting at position 1219 of SEQ ID NO: 317835
gcaguccuccuggagaagu

SEQ ID NO: 414446 - RNA, 19 nt, Artificial Sequence
  Description of Artificial Sequence: Synthetic oligonucleotide
  Antisense Strand to SEQ ID NO: 414445
acuucuccaggaggacugc

SEQ ID NO: 414447 - RNA, 19 nt, Artificial Sequence
  Description of Artificial Sequence: Synthetic oligonucleotide
  Sense Strand Starting at position 1219 of SEQ ID NO: 317865
agguaaagaucugugagca

SEQ ID NO: 414448 - RNA, 19 nt, Artificial Sequence
  Description of Artificial Sequence: Synthetic oligonucleotide
  Antisense Strand to SEQ ID NO: 414447
ugcucacagaucuuuaccu

SEQ ID NO: 414449 - RNA, 19 nt, Artificial Sequence
  Description of Artificial Sequence: Synthetic oligonucleotide
  Sense Strand Starting at position 1219 of SEQ ID NO: 317866
gguaaagaucugugagcaa

SEQ ID NO: 414450 - RNA, 19 nt, Artificial Sequence
  Description of Artificial Sequence: Synthetic oligonucleotide
  Antisense Strand to SEQ ID NO: 414449
uugcucacagaucuuuacc

SEQ ID NO: 414451 - RNA, 19 nt, Artificial Sequence
  Description of Artificial Sequence: Synthetic oligonucleotide
  Sense Strand Starting at position 1219 of SEQ ID NO: 317903
aauugacaauaguuuggua

SEQ ID NO: 414452 - RNA, 19 nt, Artificial Sequence
  Description of Artificial Sequence: Synthetic oligonucleotide
  Antisense Strand to SEQ ID NO: 414451
uaccaaacuauugucaauu

SEQ ID NO: 414453 - RNA, 19 nt, Artificial Sequence
  Description of Artificial Sequence: Synthetic oligonucleotide
  Sense Strand Starting at position 1219 of SEQ ID NO: 317905
uugacaauaguuugguauu

SEQ ID NO: 414454 - RNA, 19 nt, Artificial Sequence
  Description of Artificial Sequence: Synthetic oligonucleotide
  Antisense Strand to SEQ ID NO: 414453
aauaccaaacuauugucaa

SEQ ID NO: 414455 - RNA, 19 nt, Artificial Sequence
  Description of Artificial Sequence: Synthetic oligonucleotide
  Sense Strand Starting at position 1219 of SEQ ID NO: 317999
guuguuuguauugauugaa

SEQ ID NO: 414456 - RNA, 19 nt, Artificial Sequence
  Description of Artificial Sequence: Synthetic oligonucleotide
  Antisense Strand to SEQ ID NO: 414455
uucaaucaauacaaacaac

SEQ ID NO: 414457 - RNA, 19 nt, Artificial Sequence
  Description of Artificial Sequence: Synthetic oligonucleotide
  Sense Strand Starting at position 1219 of SEQ ID NO: 318002
guuuguauugauugaauga

SEQ ID NO: 414458 - RNA, 19 nt, Artificial Sequence
  Description of Artificial Sequence: Synthetic oligonucleotide
  Antisense Strand to SEQ ID NO: 414457
ucauucaaucaauacaaac

SEQ ID NO: 414459 - RNA, 19 nt, Artificial Sequence
  Description of Artificial Sequence: Synthetic oligonucleotide
  Sense Strand Starting at position 1219 of SEQ ID NO: 318143
aagagaaguuaaguagcuu

SEQ ID NO: 414460 - RNA, 19 nt, Artificial Sequence
  Description of Artificial Sequence: Synthetic oligonucleotide
  Antisense Strand to SEQ ID NO: 414459
aagcuacuuaacuucucuu

SEQ ID NO: 414461 - RNA, 19 nt, Artificial Sequence
  Description of Artificial Sequence: Synthetic oligonucleotide
  Sense Strand Starting at position 1219 of SEQ ID NO: 318532
gagccagaaugacugauau

SEQ ID NO: 414462 - RNA, 19 nt, Artificial Sequence
  Description of Artificial Sequence: Synthetic oligonucleotide
  Antisense Strand to SEQ ID NO: 414461
auaucagucauucuggcuc

SEQ ID NO: 414463 - RNA, 19 nt, Artificial Sequence
  Description of Artificial Sequence: Synthetic oligonucleotide
  Sense Strand Starting at position 1219 of SEQ ID NO: 318548
uaucgaaaccaguaaaguu

SEQ ID NO: 414464 - RNA, 19 nt, Artificial Sequence
  Description of Artificial Sequence: Synthetic oligonucleotide
  Antisense Strand to SEQ ID NO: 414463
aacuuuacugguuucgaua

SEQ ID NO: 414465 - RNA, 19 nt, Artificial Sequence
  Description of Artificial Sequence: Synthetic oligonucleotide
  Sense Strand Starting at position 1219 of SEQ ID NO: 318607
agagcugucacuuaggaau

SEQ ID NO: 414466 - RNA, 19 nt, Artificial Sequence
  Description of Artificial Sequence: Synthetic oligonucleotide
  Antisense Strand to SEQ ID NO: 414465
auuccuaagugacagcucu

SEQ ID NO: 414467 - RNA, 19 nt, Artificial Sequence
  Description of Artificial Sequence: Synthetic oligonucleotide
  Sense Strand Starting at position 1219 of SEQ ID NO: 318719
ccaguacucguacaaccau

SEQ ID NO: 414468 - RNA, 19 nt, Artificial Sequence
  Description of Artificial Sequence: Synthetic oligonucleotide
  Antisense Strand to SEQ ID NO: 414467
augguuguacgaguacugg

SEQ ID NO: 414469 - RNA, 19 nt, Artificial Sequence
  Description of Artificial Sequence: Synthetic oligonucleotide
  Sense Strand Starting at position 1219 of SEQ ID NO: 318767
ucaugugucccauaaugau

SEQ ID NO: 414470 - RNA, 19 nt, Artificial Sequence
  Description of Artificial Sequence: Synthetic oligonucleotide
  Antisense Strand to SEQ ID NO: 414469
aucauuaugggacacauga

SEQ ID NO: 414471 - RNA, 19 nt, Artificial Sequence
  Description of Artificial Sequence: Synthetic oligonucleotide
  Sense Strand Starting at position 1219 of SEQ ID NO: 318812
uggugagcccaugagagua

SEQ ID NO: 414472 - RNA, 19 nt, Artificial Sequence
  Description of Artificial Sequence: Synthetic oligonucleotide
  Antisense Strand to SEQ ID NO: 414471
uacucucaugggcucacca

SEQ ID NO: 414473 - RNA, 19 nt, Artificial Sequence
  Description of Artificial Sequence: Synthetic oligonucleotide
  Sense Strand Starting at position 1219 of SEQ ID NO: 318868
gcugucuuuauguuguagu

SEQ ID NO: 414474 - RNA, 19 nt, Artificial Sequence
  Description of Artificial Sequence: Synthetic oligonucleotide
  Antisense Strand to SEQ ID NO: 414473
acuacaacauaaagacagc

SEQ ID NO: 414475 - RNA, 19 nt, Artificial Sequence
  Description of Artificial Sequence: Synthetic oligonucleotide
  Sense Strand Starting at position 1219 of SEQ ID NO: 319163
uguucuugacccugaagau

SEQ ID NO: 414476 - RNA, 19 nt, Artificial Sequence
  Description of Artificial Sequence: Synthetic oligonucleotide
  Antisense Strand to SEQ ID NO: 414475
aucuucagggucaagaaca

SEQ ID NO: 414477 - RNA, 19 nt, Artificial Sequence
  Description of Artificial Sequence: Synthetic oligonucleotide
  Sense Strand Starting at position 1219 of SEQ ID NO: 319164
guucuugacccugaagauc

SEQ ID NO: 414478 - RNA, 19 nt, Artificial Sequence
  Description of Artificial Sequence: Synthetic oligonucleotide
  Antisense Strand to SEQ ID NO: 414477
gaucuucagggucaagaac

SEQ ID NO: 414479 - RNA, 19 nt, Artificial Sequence
  Description of Artificial Sequence: Synthetic oligonucleotide
  Sense Strand Starting at position 1220 of SEQ ID NO: 315240
cuucucuacggucaaguau

SEQ ID NO: 414480 - RNA, 19 nt, Artificial Sequence
  Description of Artificial Sequence: Synthetic oligonucleotide
  Antisense Strand to SEQ ID NO: 414479
auacuugaccguagagaag

SEQ ID NO: 414481 - RNA, 19 nt, Artificial Sequence
  Description of Artificial Sequence: Synthetic oligonucleotide
  Sense Strand Starting at position 1220 of SEQ ID NO: 315249
ggucaaguaugagcucuga

SEQ ID NO: 414482 - RNA, 19 nt, Artificial Sequence
  Description of Artificial Sequence: Synthetic oligonucleotide
  Antisense Strand to SEQ ID NO: 414481
ucagagcucauacuugacc

SEQ ID NO: 414483 - RNA, 19 nt, Artificial Sequence
  Description of Artificial Sequence: Synthetic oligonucleotide
  Sense Strand Starting at position 1220 of SEQ ID NO: 315422
gggcaagacuccucugaac

SEQ ID NO: 414484 - RNA, 19 nt, Artificial Sequence
  Description of Artificial Sequence: Synthetic oligonucleotide
  Antisense Strand to SEQ ID NO: 414483
guucagaggagucuugccc

SEQ ID NO: 414485 - RNA, 19 nt, Artificial Sequence
  Description of Artificial Sequence: Synthetic oligonucleotide
  Sense Strand Starting at position 1220 of SEQ ID NO: 315424
gcaagacuccucugaacuc

SEQ ID NO: 414486 - RNA, 19 nt, Artificial Sequence
  Description of Artificial Sequence: Synthetic oligonucleotide
  Antisense Strand to SEQ ID NO: 414485
gaguucagaggagucuugc

SEQ ID NO: 414487 - RNA, 19 nt, Artificial Sequence
  Description of Artificial Sequence: Synthetic oligonucleotide
  Sense Strand Starting at position 1220 of SEQ ID NO: 315660
ccuuauagcuuguccagga

SEQ ID NO: 414488 - RNA, 19 nt, Artificial Sequence
  Description of Artificial Sequence: Synthetic oligonucleotide
  Antisense Strand to SEQ ID NO: 414487
uccuggacaagcuauaagg

SEQ ID NO: 414489 - RNA, 19 nt, Artificial Sequence
  Description of Artificial Sequence: Synthetic oligonucleotide
  Sense Strand Starting at position 1220 of SEQ ID NO: 315661
cuuauagcuuguccaggaa

SEQ ID NO: 414490 - RNA, 19 nt, Artificial Sequence
  Description of Artificial Sequence: Synthetic oligonucleotide
  Antisense Strand to SEQ ID NO: 414489
uuccuggacaagcuauaag

SEQ ID NO: 414491 - RNA, 19 nt, Artificial Sequence
  Description of Artificial Sequence: Synthetic oligonucleotide
  Sense Strand Starting at position 1220 of SEQ ID NO: 315664
auagcuuguccaggaagca

SEQ ID NO: 414492 - RNA, 19 nt, Artificial Sequence
  Description of Artificial Sequence: Synthetic oligonucleotide
  Antisense Strand to SEQ ID NO: 414491
ugcuuccuggacaagcuau

SEQ ID NO: 414493 - RNA, 19 nt, Artificial Sequence
  Description of Artificial Sequence: Synthetic oligonucleotide
  Sense Strand Starting at position 1220 of SEQ ID NO: 315665
uagcuuguccaggaagcaa

SEQ ID NO: 414494 - RNA, 19 nt, Artificial Sequence
  Description of Artificial Sequence: Synthetic oligonucleotide
  Antisense Strand to SEQ ID NO: 414493
uugcuuccuggacaagcua

SEQ ID NO: 414495 - RNA, 19 nt, Artificial Sequence
  Description of Artificial Sequence: Synthetic oligonucleotide
  Sense Strand Starting at position 1220 of SEQ ID NO: 315697
gucauaguuacggacucaa

SEQ ID NO: 414496 - RNA, 19 nt, Artificial Sequence
  Description of Artificial Sequence: Synthetic oligonucleotide
  Antisense Strand to SEQ ID NO: 414495
uugaguccguaacuaugac

SEQ ID NO: 414497 - RNA, 19 nt, Artificial Sequence
  Description of Artificial Sequence: Synthetic oligonucleotide
  Sense Strand Starting at position 1220 of SEQ ID NO: 315761
accacagugugucuggaau

SEQ ID NO: 414498 - RNA, 19 nt, Artificial Sequence
  Description of Artificial Sequence: Synthetic oligonucleotide
  Antisense Strand to SEQ ID NO: 414497
auuccagacacacuguggu

SEQ ID NO: 414499 - RNA, 19 nt, Artificial Sequence
  Description of Artificial Sequence: Synthetic oligonucleotide
  Sense Strand Starting at position 1220 of SEQ ID NO: 315852
ggcguguucggaguuucuu

SEQ ID NO: 414500 - RNA, 19 nt, Artificial Sequence
  Description of Artificial Sequence: Synthetic oligonucleotide
  Antisense Strand to SEQ ID NO: 414499
aagaaacuccgaacacgcc

SEQ ID NO: 414501 - RNA, 19 nt, Artificial Sequence
  Description of Artificial Sequence: Synthetic oligonucleotide
  Sense Strand Starting at position 1220 of SEQ ID NO: 315992
cuaugcuggccucagaagu

SEQ ID NO: 414502 - RNA, 19 nt, Artificial Sequence
  Description of Artificial Sequence: Synthetic oligonucleotide
  Antisense Strand to SEQ ID NO: 414501
acuucugaggccagcauag

SEQ ID NO: 414503 - RNA, 19 nt, Artificial Sequence
  Description of Artificial Sequence: Synthetic oligonucleotide
  Sense Strand Starting at position 1220 of SEQ ID NO: 316398
uuacaaaccugagcuagau

SEQ ID NO: 414504 - RNA, 19 nt, Artificial Sequence
  Description of Artificial Sequence: Synthetic oligonucleotide
  Antisense Strand to SEQ ID NO: 414503
aucuagcucagguuuguaa

SEQ ID NO: 414505 - RNA, 19 nt, Artificial Sequence
  Description of Artificial Sequence: Synthetic oligonucleotide
  Sense Strand Starting at position 1220 of SEQ ID NO: 317205
aggagccacccuuaguuaa

SEQ ID NO: 414506 - RNA, 19 nt, Artificial Sequence
  Description of Artificial Sequence: Synthetic oligonucleotide
  Antisense Strand to SEQ ID NO: 414505
uuaacuaaggguggcuccu

SEQ ID NO: 414507 - RNA, 19 nt, Artificial Sequence
  Description of Artificial Sequence: Synthetic oligonucleotide
  Sense Strand Starting at position 1220 of SEQ ID NO: 317347
gauugauucuggccaagag

SEQ ID NO: 414508 - RNA, 19 nt, Artificial Sequence
  Description of Artificial Sequence: Synthetic oligonucleotide
  Antisense Strand to SEQ ID NO: 414507
cucuuggccagaaucaauc

SEQ ID NO: 414509 - RNA, 19 nt, Artificial Sequence
  Description of Artificial Sequence: Synthetic oligonucleotide
  Sense Strand Starting at position 1220 of SEQ ID NO: 317348
auugauucuggccaagagu

SEQ ID NO: 414510 - RNA, 19 nt, Artificial Sequence
  Description of Artificial Sequence: Synthetic oligonucleotide
  Antisense Strand to SEQ ID NO: 414509
acucuuggccagaaucaau

SEQ ID NO: 414511 - RNA, 19 nt, Artificial Sequence
  Description of Artificial Sequence: Synthetic oligonucleotide
  Sense Strand Starting at position 1220 of SEQ ID NO: 317480
cgagaggaguugguuauga

SEQ ID NO: 414512 - RNA, 19 nt, Artificial Sequence
  Description of Artificial Sequence: Synthetic oligonucleotide
  Antisense Strand to SEQ ID NO: 414511
ucauaaccaacuccucucg

SEQ ID NO: 414513 - RNA, 19 nt, Artificial Sequence
  Description of Artificial Sequence: Synthetic oligonucleotide
  Sense Strand Starting at position 1220 of SEQ ID NO: 317509
gagguuacuccauaggagu

SEQ ID NO: 414514 - RNA, 19 nt, Artificial Sequence
  Description of Artificial Sequence: Synthetic oligonucleotide
  Antisense Strand to SEQ ID NO: 414513
acuccuauggaguaaccuc

SEQ ID NO: 414515 - RNA, 19 nt, Artificial Sequence
  Description of Artificial Sequence: Synthetic oligonucleotide
  Sense Strand Starting at position 1220 of SEQ ID NO: 317640
gggcccuucugauuaagaa

SEQ ID NO: 414516 - RNA, 19 nt, Artificial Sequence
  Description of Artificial Sequence: Synthetic oligonucleotide
  Antisense Strand to SEQ ID NO: 414515
uucuuaaucagaagggccc

SEQ ID NO: 414517 - RNA, 19 nt, Artificial Sequence
  Description of Artificial Sequence: Synthetic oligonucleotide
  Sense Strand Starting at position 1220 of SEQ ID NO: 317641
ggcccuucugauuaagaau

SEQ ID NO: 414518 - RNA, 19 nt, Artificial Sequence
  Description of Artificial Sequence: Synthetic oligonucleotide
  Antisense Strand to SEQ ID NO: 414517
auucuuaaucagaagggcc

SEQ ID NO: 414519 - RNA, 19 nt, Artificial Sequence
  Description of Artificial Sequence: Synthetic oligonucleotide
  Sense Strand Starting at position 1220 of SEQ ID NO: 317653
uaagaauaacaugguguuu

SEQ ID NO: 414520 - RNA, 19 nt, Artificial Sequence
  Description of Artificial Sequence: Synthetic oligonucleotide
  Antisense Strand to SEQ ID NO: 414519
aaacaccauguuauucuua

SEQ ID NO: 414521 - RNA, 19 nt, Artificial Sequence
  Description of Artificial Sequence: Synthetic oligonucleotide
  Sense Strand Starting at position 1220 of SEQ ID NO: 317664
ugguguuuaugacucugga

SEQ ID NO: 414522 - RNA, 19 nt, Artificial Sequence
  Description of Artificial Sequence: Synthetic oligonucleotide
  Antisense Strand to SEQ ID NO: 414521
uccagagucauaaacacca

SEQ ID NO: 414523 - RNA, 19 nt, Artificial Sequence
  Description of Artificial Sequence: Synthetic oligonucleotide
  Sense Strand Starting at position 1220 of SEQ ID NO: 317701
ggauccugacugugacuua

SEQ ID NO: 414524 - RNA, 19 nt, Artificial Sequence
  Description of Artificial Sequence: Synthetic oligonucleotide
  Antisense Strand to SEQ ID NO: 414523
uaagucacagucaggaucc

SEQ ID NO: 414525 - RNA, 19 nt, Artificial Sequence
  Description of Artificial Sequence: Synthetic oligonucleotide
  Sense Strand Starting at position 1220 of SEQ ID NO: 317726
guuugaccucaagaaaguu

SEQ ID NO: 414526 - RNA, 19 nt, Artificial Sequence
  Description of Artificial Sequence: Synthetic oligonucleotide
  Antisense Strand to SEQ ID NO: 414525
aacuuucuugaggucaaac

SEQ ID NO: 414527 - RNA, 19 nt, Artificial Sequence
  Description of Artificial Sequence: Synthetic oligonucleotide
  Sense Strand Starting at position 1220 of SEQ ID NO: 317802
cuaccuuauuggguuguua

SEQ ID NO: 414528 - RNA, 19 nt, Artificial Sequence
  Description of Artificial Sequence: Synthetic oligonucleotide
  Antisense Strand to SEQ ID NO: 414527
uaacaacccaauaagguag

SEQ ID NO: 414529 - RNA, 19 nt, Artificial Sequence
  Description of Artificial Sequence: Synthetic oligonucleotide
  Sense Strand Starting at position 1220 of SEQ ID NO: 317804
accuuauuggguuguuaca

SEQ ID NO: 414530 - RNA, 19 nt, Artificial Sequence
  Description of Artificial Sequence: Synthetic oligonucleotide
  Antisense Strand to SEQ ID NO: 414529
uguaacaacccaauaaggu

SEQ ID NO: 414531 - RNA, 19 nt, Artificial Sequence
  Description of Artificial Sequence: Synthetic oligonucleotide
  Sense Strand Starting at position 1220 of SEQ ID NO: 317806
cuuauuggguuguuacauu

SEQ ID NO: 414532 - RNA, 19 nt, Artificial Sequence
  Description of Artificial Sequence: Synthetic oligonucleotide
  Antisense Strand to SEQ ID NO: 414531
aauguaacaacccaauaag

SEQ ID NO: 414533 - RNA, 19 nt, Artificial Sequence
  Description of Artificial Sequence: Synthetic oligonucleotide
  Sense Strand Starting at position 1220 of SEQ ID NO: 317842
cugcauauuggugacuuau

SEQ ID NO: 414534 - RNA, 19 nt, Artificial Sequence
  Description of Artificial Sequence: Synthetic oligonucleotide
  Antisense Strand to SEQ ID NO: 414533
auaagucaccaauaugcag

SEQ ID NO: 414535 - RNA, 19 nt, Artificial Sequence
  Description of Artificial Sequence: Synthetic oligonucleotide
  Sense Strand Starting at position 1220 of SEQ ID NO: 317844
gcauauuggugacuuauua

SEQ ID NO: 414536 - RNA, 19 nt, Artificial Sequence
  Description of Artificial Sequence: Synthetic oligonucleotide
  Antisense Strand to SEQ ID NO: 414535
uaauaagucaccaauaugc

SEQ ID NO: 414537 - RNA, 19 nt, Artificial Sequence
  Description of Artificial Sequence: Synthetic oligonucleotide
  Sense Strand Starting at position 1220 of SEQ ID NO: 317848
auuggugacuuauuacauc

SEQ ID NO: 414538 - RNA, 19 nt, Artificial Sequence
  Description of Artificial Sequence: Synthetic oligonucleotide
  Antisense Strand to SEQ ID NO: 414537
gauguaauaagucaccaau

SEQ ID NO: 414539 - RNA, 19 nt, Artificial Sequence
  Description of Artificial Sequence: Synthetic oligonucleotide
  Sense Strand Starting at position 1220 of SEQ ID NO: 317868
aggagaaagucucugugua

SEQ ID NO: 414540 - RNA, 19 nt, Artificial Sequence
  Description of Artificial Sequence: Synthetic oligonucleotide
  Antisense Strand to SEQ ID NO: 414539
uacacagagacuuucuccu

SEQ ID NO: 414541 - RNA, 19 nt, Artificial Sequence
  Description of Artificial Sequence: Synthetic oligonucleotide
  Sense Strand Starting at position 1220 of SEQ ID NO: 317869
ggagaaagucucuguguac

SEQ ID NO: 414542 - RNA, 19 nt, Artificial Sequence
  Description of Artificial Sequence: Synthetic oligonucleotide
  Antisense Strand to SEQ ID NO: 414541
guacacagagacuuucucc

SEQ ID NO: 414543 - RNA, 19 nt, Artificial Sequence
  Description of Artificial Sequence: Synthetic oligonucleotide
  Sense Strand Starting at position 1220 of SEQ ID NO: 317870
gagaaagucucuguguacu

SEQ ID NO: 414544 - RNA, 19 nt, Artificial Sequence
  Description of Artificial Sequence: Synthetic oligonucleotide
  Antisense Strand to SEQ ID NO: 414543
aguacacagagacuuucuc

SEQ ID NO: 414545 - RNA, 19 nt, Artificial Sequence
  Description of Artificial Sequence: Synthetic oligonucleotide
  Sense Strand Starting at position 1220 of SEQ ID NO: 317952
gaauguaucucuguggaga

SEQ ID NO: 414546 - RNA, 19 nt, Artificial Sequence
  Description of Artificial Sequence: Synthetic oligonucleotide
  Antisense Strand to SEQ ID NO: 414545
ucuccacagagauacauuc

SEQ ID NO: 414547 - RNA, 19 nt, Artificial Sequence
  Description of Artificial Sequence: Synthetic oligonucleotide
  Sense Strand Starting at position 1220 of SEQ ID NO: 317953
aauguaucucuguggagac

SEQ ID NO: 414548 - RNA, 19 nt, Artificial Sequence
  Description of Artificial Sequence: Synthetic oligonucleotide
  Antisense Strand to SEQ ID NO: 414547
gucuccacagagauacauu

SEQ ID NO: 414549 - RNA, 19 nt, Artificial Sequence
  Description of Artificial Sequence: Synthetic oligonucleotide
  Sense Strand Starting at position 1220 of SEQ ID NO: 318027
uuccacuuuccugguauuu

SEQ ID NO: 414550 - RNA, 19 nt, Artificial Sequence
  Description of Artificial Sequence: Synthetic oligonucleotide
  Antisense Strand to SEQ ID NO: 414549
aaauaccaggaaaguggaa

SEQ ID NO: 414551 - RNA, 19 nt, Artificial Sequence
  Description of Artificial Sequence: Synthetic oligonucleotide
  Sense Strand Starting at position 1220 of SEQ ID NO: 318101
uggguaguaacauaaaguu

SEQ ID NO: 414552 - RNA, 19 nt, Artificial Sequence
  Description of Artificial Sequence: Synthetic oligonucleotide
  Antisense Strand to SEQ ID NO: 414551
aacuuuauguuacuaccca

SEQ ID NO: 414553 - RNA, 19 nt, Artificial Sequence
  Description of Artificial Sequence: Synthetic oligonucleotide
  Sense Strand Starting at position 1220 of SEQ ID NO: 318131
uaaauuauuucgcuuguug

SEQ ID NO: 414554 - RNA, 19 nt, Artificial Sequence
  Description of Artificial Sequence: Synthetic oligonucleotide
  Antisense Strand to SEQ ID NO: 414553
caacaagcgaaauaauuua

SEQ ID NO: 414555 - RNA, 19 nt, Artificial Sequence
  Description of Artificial Sequence: Synthetic oligonucleotide
  Sense Strand Starting at position 1220 of SEQ ID NO: 318777
acacaugaugcuuagcaga

SEQ ID NO: 414556 - RNA, 19 nt, Artificial Sequence
  Description of Artificial Sequence: Synthetic oligonucleotide
  Antisense Strand to SEQ ID NO: 414555
ucugcuaagcaucaugugu

SEQ ID NO: 414557 - RNA, 19 nt, Artificial Sequence
  Description of Artificial Sequence: Synthetic oligonucleotide
  Sense Strand Starting at position 1220 of SEQ ID NO: 319153
uuuaccuaccauuggagau

SEQ ID NO: 414558 - RNA, 19 nt, Artificial Sequence
  Description of Artificial Sequence: Synthetic oligonucleotide
  Antisense Strand to SEQ ID NO: 414557
aucuccaaugguagguaaa

SEQ ID NO: 414559 - RNA, 19 nt, Artificial Sequence
  Description of Artificial Sequence: Synthetic oligonucleotide
  Sense Strand Starting at position 1221 of SEQ ID NO: 315487
gguggcuuaccauaagaca

SEQ ID NO: 414560 - RNA, 19 nt, Artificial Sequence
  Description of Artificial Sequence: Synthetic oligonucleotide
  Antisense Strand to SEQ ID NO: 414559
ugucuuaugguaagccacc

SEQ ID NO: 414561 - RNA, 19 nt, Artificial Sequence
  Description of Artificial Sequence: Synthetic oligonucleotide
  Sense Strand Starting at position 1221 of SEQ ID NO: 315517
acaaguauuggugagggua

SEQ ID NO: 414562 - RNA, 19 nt, Artificial Sequence
  Description of Artificial Sequence: Synthetic oligonucleotide
  Antisense Strand to SEQ ID NO: 414561
uacccucaccaauacuugu

SEQ ID NO: 414563 - RNA, 19 nt, Artificial Sequence
  Description of Artificial Sequence: Synthetic oligonucleotide
  Sense Strand Starting at position 1221 of SEQ ID NO: 315555
auacauugcuggucagauu

SEQ ID NO: 414564 - RNA, 19 nt, Artificial Sequence
  Description of Artificial Sequence: Synthetic oligonucleotide
  Antisense Strand to SEQ ID NO: 414563
aaucugaccagcaauguau

SEQ ID NO: 414565 - RNA, 19 nt, Artificial Sequence
  Description of Artificial Sequence: Synthetic oligonucleotide
  Sense Strand Starting at position 1221 of SEQ ID NO: 315660
ccuaguauauucgcaagag

SEQ ID NO: 414566 - RNA, 19 nt, Artificial Sequence
  Description of Artificial Sequence: Synthetic oligonucleotide
  Antisense Strand to SEQ ID NO: 414565
cucuugcgaauauacuagg

SEQ ID NO: 414567 - RNA, 19 nt, Artificial Sequence
  Description of Artificial Sequence: Synthetic oligonucleotide
  Sense Strand Starting at position 1221 of SEQ ID NO: 315664
guauauucgcaagagaauu

SEQ ID NO: 414568 - RNA, 19 nt, Artificial Sequence
  Description of Artificial Sequence: Synthetic oligonucleotide
  Antisense Strand to SEQ ID NO: 414567
aauucucuugcgaauauac

SEQ ID NO: 414569 - RNA, 19 nt, Artificial Sequence
  Description of Artificial Sequence: Synthetic oligonucleotide
  Sense Strand Starting at position 1221 of SEQ ID NO: 315696
cgaacaaagacuuguaaug

SEQ ID NO: 414570 - RNA, 19 nt, Artificial Sequence
  Description of Artificial Sequence: Synthetic oligonucleotide
  Antisense Strand to SEQ ID NO: 414569
cauuacaagucuuuguucg

SEQ ID NO: 414571 - RNA, 19 nt, Artificial Sequence
  Description of Artificial Sequence: Synthetic oligonucleotide
  Sense Strand Starting at position 1221 of SEQ ID NO: 315918
ggcgccuggcccugaauua

SEQ ID NO: 414572 - RNA, 19 nt, Artificial Sequence
  Description of Artificial Sequence: Synthetic oligonucleotide
  Antisense Strand to SEQ ID NO: 414571
uaauucagggccaggcgcc

SEQ ID NO: 414573 - RNA, 19 nt, Artificial Sequence
  Description of Artificial Sequence: Synthetic oligonucleotide
  Sense Strand Starting at position 1221 of SEQ ID NO: 315919
gcgccuggcccugaauuau

SEQ ID NO: 414574 - RNA, 19 nt, Artificial Sequence
  Description of Artificial Sequence: Synthetic oligonucleotide
  Antisense Strand to SEQ ID NO: 414573
auaauucagggccaggcgc

SEQ ID NO: 414575 - RNA, 19 nt, Artificial Sequence
  Description of Artificial Sequence: Synthetic oligonucleotide
  Sense Strand Starting at position 1221 of SEQ ID NO: 316036
cccacaggauuguugugaa

SEQ ID NO: 414576 - RNA, 19 nt, Artificial Sequence
  Description of Artificial Sequence: Synthetic oligonucleotide
  Antisense Strand to SEQ ID NO: 414575
uucacaacaauccuguggg

SEQ ID NO: 414577 - RNA, 19 nt, Artificial Sequence
  Description of Artificial Sequence: Synthetic oligonucleotide
  Sense Strand Starting at position 1221 of SEQ ID NO: 316174
gugcuuuagggcuacacua

SEQ ID NO: 414578 - RNA, 19 nt, Artificial Sequence
  Description of Artificial Sequence: Synthetic oligonucleotide
  Antisense Strand to SEQ ID NO: 414577
uaguguagcccuaaagcac

SEQ ID NO: 414579 - RNA, 19 nt, Artificial Sequence
  Description of Artificial Sequence: Synthetic oligonucleotide
  Sense Strand Starting at position 1221 of SEQ ID NO: 316229
acuccugacuccuuaguua

SEQ ID NO: 414580 - RNA, 19 nt, Artificial Sequence
  Description of Artificial Sequence: Synthetic oligonucleotide
  Antisense Strand to SEQ ID NO: 414579
uaacuaaggagucaggagu

SEQ ID NO: 414581 - RNA, 19 nt, Artificial Sequence
  Description of Artificial Sequence: Synthetic oligonucleotide
  Sense Strand Starting at position 1221 of SEQ ID NO: 316255
gaacucuucugggcaguuu

SEQ ID NO: 414582 - RNA, 19 nt, Artificial Sequence
  Description of Artificial Sequence: Synthetic oligonucleotide
  Antisense Strand to SEQ ID NO: 414581
aaacugcccagaagaguuc

SEQ ID NO: 414583 - RNA, 19 nt, Artificial Sequence
  Description of Artificial Sequence: Synthetic oligonucleotide
  Sense Strand Starting at position 1221 of SEQ ID NO: 316263
cugggcaguuucuuaacaa

SEQ ID NO: 414584 - RNA, 19 nt, Artificial Sequence
  Description of Artificial Sequence: Synthetic oligonucleotide
  Antisense Strand to SEQ ID NO: 414583
uuguuaagaaacugcccag

SEQ ID NO: 414585 - RNA, 19 nt, Artificial Sequence
  Description of Artificial Sequence: Synthetic oligonucleotide
  Sense Strand Starting at position 1221 of SEQ ID NO: 316517
ggcccagcucucuggcaua

SEQ ID NO: 414586 - RNA, 19 nt, Artificial Sequence
  Description of Artificial Sequence: Synthetic oligonucleotide
  Antisense Strand to SEQ ID NO: 414585
uaugccagagagcugggcc

SEQ ID NO: 414587 - RNA, 19 nt, Artificial Sequence
  Description of Artificial Sequence: Synthetic oligonucleotide
  Sense Strand Starting at position 1221 of SEQ ID NO: 316659
gccuguagucacugauggu

SEQ ID NO: 414588 - RNA, 19 nt, Artificial Sequence
  Description of Artificial Sequence: Synthetic oligonucleotide
  Antisense Strand to SEQ ID NO: 414587
accaucagugacuacaggc

SEQ ID NO: 414589 - RNA, 19 nt, Artificial Sequence
  Description of Artificial Sequence: Synthetic oligonucleotide
  Sense Strand Starting at position 1221 of SEQ ID NO: 316680
ugcagaggcugagacauuu

SEQ ID NO: 414590 - RNA, 19 nt, Artificial Sequence
  Description of Artificial Sequence: Synthetic oligonucleotide
  Antisense Strand to SEQ ID NO: 414589
aaaugucucagccucugca

SEQ ID NO: 414591 - RNA, 19 nt, Artificial Sequence
  Description of Artificial Sequence: Synthetic oligonucleotide
  Sense Strand Starting at position 1221 of SEQ ID NO: 316689
ugagacauuugcgggaaca

SEQ ID NO: 414592 - RNA, 19 nt, Artificial Sequence
  Description of Artificial Sequence: Synthetic oligonucleotide
  Antisense Strand to SEQ ID NO: 414591
uguucccgcaaaugucuca

SEQ ID NO: 414593 - RNA, 19 nt, Artificial Sequence
  Description of Artificial Sequence: Synthetic oligonucleotide
  Sense Strand Starting at position 1221 of SEQ ID NO: 316731
guuccauaacagugagggu

SEQ ID NO: 414594 - RNA, 19 nt, Artificial Sequence
  Description of Artificial Sequence: Synthetic oligonucleotide
  Antisense Strand to SEQ ID NO: 414593
acccucacuguuauggaac

SEQ ID NO: 414595 - RNA, 19 nt, Artificial Sequence
  Description of Artificial Sequence: Synthetic oligonucleotide
  Sense Strand Starting at position 1221 of SEQ ID NO: 316886
caaguauaggcggguggaa

SEQ ID NO: 414596 - RNA, 19 nt, Artificial Sequence
  Description of Artificial Sequence: Synthetic oligonucleotide
  Antisense Strand to SEQ ID NO: 414595
uuccacccgccuauacuug

SEQ ID NO: 414597 - RNA, 19 nt, Artificial Sequence
  Description of Artificial Sequence: Synthetic oligonucleotide
  Sense Strand Starting at position 1221 of SEQ ID NO: 316926
gugaauauuugucauccuc

SEQ ID NO: 414598 - RNA, 19 nt, Artificial Sequence
  Description of Artificial Sequence: Synthetic oligonucleotide
  Antisense Strand to SEQ ID NO: 414597
gaggaugacaaauauucac

SEQ ID NO: 414599 - RNA, 19 nt, Artificial Sequence
  Description of Artificial Sequence: Synthetic oligonucleotide
  Sense Strand Starting at position 1221 of SEQ ID NO: 316954
agagacagguucucacaca

SEQ ID NO: 414600 - RNA, 19 nt, Artificial Sequence
  Description of Artificial Sequence: Synthetic oligonucleotide
  Antisense Strand to SEQ ID NO: 414599
ugugugagaaccugucucu

SEQ ID NO: 414601 - RNA, 19 nt, Artificial Sequence
  Description of Artificial Sequence: Synthetic oligonucleotide
  Sense Strand Starting at position 1221 of SEQ ID NO: 317148
gggagcucuguguagacua

SEQ ID NO: 414602 - RNA, 19 nt, Artificial Sequence
  Description of Artificial Sequence: Synthetic oligonucleotide
  Antisense Strand to SEQ ID NO: 414601
uagucuacacagagcuccc

SEQ ID NO: 414603 - RNA, 19 nt, Artificial Sequence
  Description of Artificial Sequence: Synthetic oligonucleotide
  Sense Strand Starting at position 1221 of SEQ ID NO: 317155
cuguguagacuauguggau

SEQ ID NO: 414604 - RNA, 19 nt, Artificial Sequence
  Description of Artificial Sequence: Synthetic oligonucleotide
  Antisense Strand to SEQ ID NO: 414603
auccacauagucuacacag

SEQ ID NO: 414605 - RNA, 19 nt, Artificial Sequence
  Description of Artificial Sequence: Synthetic oligonucleotide
  Sense Strand Starting at position 1221 of SEQ ID NO: 317677
cuggguuacagcuagaagu

SEQ ID NO: 414606 - RNA, 19 nt, Artificial Sequence
  Description of Artificial Sequence: Synthetic oligonucleotide
  Antisense Strand to SEQ ID NO: 414605
acuucuagcuguaacccag

SEQ ID NO: 414607 - RNA, 19 nt, Artificial Sequence
  Description of Artificial Sequence: Synthetic oligonucleotide
  Sense Strand Starting at position 1221 of SEQ ID NO: 317679
ggguuacagcuagaaguac

SEQ ID NO: 414608 - RNA, 19 nt, Artificial Sequence
  Description of Artificial Sequence: Synthetic oligonucleotide
  Antisense Strand to SEQ ID NO: 414607
guacuucuagcuguaaccc

SEQ ID NO: 414609 - RNA, 19 nt, Artificial Sequence
  Description of Artificial Sequence: Synthetic oligonucleotide
  Sense Strand Starting at position 1221 of SEQ ID NO: 318145
uggcuauucucaucagcca

SEQ ID NO: 414610 - RNA, 19 nt, Artificial Sequence
  Description of Artificial Sequence: Synthetic oligonucleotide
  Antisense Strand to SEQ ID NO: 414609
uggcugaugagaauagcca

SEQ ID NO: 414611 - RNA, 19 nt, Artificial Sequence
  Description of Artificial Sequence: Synthetic oligonucleotide
  Sense Strand Starting at position 1221 of SEQ ID NO: 318508
ugaccauccugcuuaaagu

SEQ ID NO: 414612 - RNA, 19 nt, Artificial Sequence
  Description of Artificial Sequence: Synthetic oligonucleotide
  Antisense Strand to SEQ ID NO: 414611
acuuuaagcaggaugguca

SEQ ID NO: 414613 - RNA, 19 nt, Artificial Sequence
  Description of Artificial Sequence: Synthetic oligonucleotide
  Sense Strand Starting at position 1221 of SEQ ID NO: 318639
uaggaucaugucugacagu

SEQ ID NO: 414614 - RNA, 19 nt, Artificial Sequence
  Description of Artificial Sequence: Synthetic oligonucleotide
  Antisense Strand to SEQ ID NO: 414613
acugucagacaugauccua

SEQ ID NO: 414615 - RNA, 19 nt, Artificial Sequence
  Description of Artificial Sequence: Synthetic oligonucleotide
  Sense Strand Starting at position 1221 of SEQ ID NO: 318640
aggaucaugucugacagua

SEQ ID NO: 414616 - RNA, 19 nt, Artificial Sequence
  Description of Artificial Sequence: Synthetic oligonucleotide
  Antisense Strand to SEQ ID NO: 414615
uacugucagacaugauccu

SEQ ID NO: 414617 - RNA, 19 nt, Artificial Sequence
  Description of Artificial Sequence: Synthetic oligonucleotide
  Sense Strand Starting at position 1221 of SEQ ID NO: 318652
gacaguaggugcucacuaa

SEQ ID NO: 414618 - RNA, 19 nt, Artificial Sequence
  Description of Artificial Sequence: Synthetic oligonucleotide
  Antisense Strand to SEQ ID NO: 414617
uuagugagcaccuacuguc

SEQ ID NO: 414619 - RNA, 19 nt, Artificial Sequence
  Description of Artificial Sequence: Synthetic oligonucleotide
  Sense Strand Starting at position 1221 of SEQ ID NO: 318653
acaguaggugcucacuaau

SEQ ID NO: 414620 - RNA, 19 nt, Artificial Sequence
  Description of Artificial Sequence: Synthetic oligonucleotide
  Antisense Strand to SEQ ID NO: 414619
auuagugagcaccuacugu

SEQ ID NO: 414621 - RNA, 19 nt, Artificial Sequence
  Description of Artificial Sequence: Synthetic oligonucleotide
  Sense Strand Starting at position 1221 of SEQ ID NO: 318921
ccuaaagcucuggauuaua

SEQ ID NO: 414622 - RNA, 19 nt, Artificial Sequence
  Description of Artificial Sequence: Synthetic oligonucleotide
  Antisense Strand to SEQ ID NO: 414621
uauaauccagagcuuuagg

SEQ ID NO: 414623 - RNA, 19 nt, Artificial Sequence
  Description of Artificial Sequence: Synthetic oligonucleotide
  Sense Strand Starting at position 1221 of SEQ ID NO: 318953
gcaucuggcccucaauaca

SEQ ID NO: 414624 - RNA, 19 nt, Artificial Sequence
  Description of Artificial Sequence: Synthetic oligonucleotide
  Antisense Strand to SEQ ID NO: 414623
uguauugagggccagaugc

SEQ ID NO: 414625 - RNA, 19 nt, Artificial Sequence
  Description of Artificial Sequence: Synthetic oligonucleotide
  Sense Strand Starting at position 1221 of SEQ ID NO: 318998
agguuagcccaagaagugu

SEQ ID NO: 414626 - RNA, 19 nt, Artificial Sequence
  Description of Artificial Sequence: Synthetic oligonucleotide
  Antisense Strand to SEQ ID NO: 414625
acacuucuugggcuaaccu

SEQ ID NO: 414627 - RNA, 19 nt, Artificial Sequence
  Description of Artificial Sequence: Synthetic oligonucleotide
  Sense Strand Starting at position 1221 of SEQ ID NO: 319007
caagaaguguuccaaggau

SEQ ID NO: 414628 - RNA, 19 nt, Artificial Sequence
  Description of Artificial Sequence: Synthetic oligonucleotide
  Antisense Strand to SEQ ID NO: 414627
auccuuggaacacuucuug

SEQ ID NO: 414629 - RNA, 19 nt, Artificial Sequence
  Description of Artificial Sequence: Synthetic oligonucleotide
  Sense Strand Starting at position 1221 of SEQ ID NO: 319020
aaggauauuccaugcagag

SEQ ID NO: 414630 - RNA, 19 nt, Artificial Sequence
  Description of Artificial Sequence: Synthetic oligonucleotide
  Antisense Strand to SEQ ID NO: 414629
cucugcauggaauauccuu

SEQ ID NO: 414631 - RNA, 19 nt, Artificial Sequence
  Description of Artificial Sequence: Synthetic oligonucleotide
  Sense Strand Starting at position 1221 of SEQ ID NO: 319069
agcacuauuguguggagga

SEQ ID NO: 414632 - RNA, 19 nt, Artificial Sequence
  Description of Artificial Sequence: Synthetic oligonucleotide
  Antisense Strand to SEQ ID NO: 414631
uccuccacacaauagugcu

SEQ ID NO: 414633 - RNA, 19 nt, Artificial Sequence
  Description of Artificial Sequence: Synthetic oligonucleotide
  Sense Strand Starting at position 1221 of SEQ ID NO: 319079
uguggaggaucugcaaaua

SEQ ID NO: 414634 - RNA, 19 nt, Artificial Sequence
  Description of Artificial Sequence: Synthetic oligonucleotide
  Antisense Strand to SEQ ID NO: 414633
uauuugcagauccuccaca

SEQ ID NO: 414635 - RNA, 19 nt, Artificial Sequence
  Description of Artificial Sequence: Synthetic oligonucleotide
  Sense Strand Starting at position 1221 of SEQ ID NO: 319177
caggcauccugagagggau

SEQ ID NO: 414636 - RNA, 19 nt, Artificial Sequence
  Description of Artificial Sequence: Synthetic oligonucleotide
  Antisense Strand to SEQ ID NO: 414635
aucccucucaggaugccug

SEQ ID NO: 414637 - RNA, 19 nt, Artificial Sequence
  Description of Artificial Sequence: Synthetic oligonucleotide
  Sense Strand Starting at position 1221 of SEQ ID NO: 319218
ugaccaaaccuguguuuaa

SEQ ID NO: 414638 - RNA, 19 nt, Artificial Sequence
  Description of Artificial Sequence: Synthetic oligonucleotide
  Antisense Strand to SEQ ID NO: 414637
uuaaacacagguuugguca

SEQ ID NO: 414639 - RNA, 19 nt, Artificial Sequence
  Description of Artificial Sequence: Synthetic oligonucleotide
  Sense Strand Starting at position 1222 of SEQ ID NO: 315268
aucugaucugcugggaaca

SEQ ID NO: 414640 - RNA, 19 nt, Artificial Sequence
  Description of Artificial Sequence: Synthetic oligonucleotide
  Antisense Strand to SEQ ID NO: 414639
uguucccagcagaucagau

SEQ ID NO: 414641 - RNA, 19 nt, Artificial Sequence
  Description of Artificial Sequence: Synthetic oligonucleotide
  Sense Strand Starting at position 1222 of SEQ ID NO: 315408
uggacuagucccugagucu

SEQ ID NO: 414642 - RNA, 19 nt, Artificial Sequence
  Description of Artificial Sequence: Synthetic oligonucleotide
  Antisense Strand to SEQ ID NO: 414641
agacucagggacuagucca

SEQ ID NO: 414643 - RNA, 19 nt, Artificial Sequence
  Description of Artificial Sequence: Synthetic oligonucleotide
  Sense Strand Starting at position 1222 of SEQ ID NO: 315409
ggacuagucccugagucuc

SEQ ID NO: 414644 - RNA, 19 nt, Artificial Sequence
  Description of Artificial Sequence: Synthetic oligonucleotide
  Antisense Strand to SEQ ID NO: 414643
gagacucagggacuagucc

SEQ ID NO: 414645 - RNA, 19 nt, Artificial Sequence
  Description of Artificial Sequence: Synthetic oligonucleotide
  Sense Strand Starting at position 1222 of SEQ ID NO: 315457
gcuaaacagucauuaaguu

SEQ ID NO: 414646 - RNA, 19 nt, Artificial Sequence
  Description of Artificial Sequence: Synthetic oligonucleotide
  Antisense Strand to SEQ ID NO: 414645
aacuuaaugacuguuuagc

SEQ ID NO: 414647 - RNA, 19 nt, Artificial Sequence
  Description of Artificial Sequence: Synthetic oligonucleotide
  Sense Strand Starting at position 1222 of SEQ ID NO: 315494
uuuagaaucuguucuuaag

SEQ ID NO: 414648 - RNA, 19 nt, Artificial Sequence
  Description of Artificial Sequence: Synthetic oligonucleotide
  Antisense Strand to SEQ ID NO: 414647
cuuaagaacagauucuaaa

SEQ ID NO: 414649 - RNA, 19 nt, Artificial Sequence
  Description of Artificial Sequence: Synthetic oligonucleotide
  Sense Strand Starting at position 1222 of SEQ ID NO: 315538
aguucuaaaugucucaaau

SEQ ID NO: 414650 - RNA, 19 nt, Artificial Sequence
  Description of Artificial Sequence: Synthetic oligonucleotide
  Antisense Strand to SEQ ID NO: 414649
auuugagacauuuagaacu

SEQ ID NO: 414651 - RNA, 19 nt, Artificial Sequence
  Description of Artificial Sequence: Synthetic oligonucleotide
  Sense Strand Starting at position 1222 of SEQ ID NO: 315809
cugcccaaggguuauagua

SEQ ID NO: 414652 - RNA, 19 nt, Artificial Sequence
  Description of Artificial Sequence: Synthetic oligonucleotide
  Antisense Strand to SEQ ID NO: 414651
uacuauaacccuugggcag

SEQ ID NO: 414653 - RNA, 19 nt, Artificial Sequence
  Description of Artificial Sequence: Synthetic oligonucleotide
  Sense Strand Starting at position 1222 of SEQ ID NO: 315851
ucugaacaguccuugaauc

SEQ ID NO: 414654 - RNA, 19 nt, Artificial Sequence
  Description of Artificial Sequence: Synthetic oligonucleotide
  Antisense Strand to SEQ ID NO: 414653
gauucaaggacuguucaga

SEQ ID NO: 414655 - RNA, 19 nt, Artificial Sequence
  Description of Artificial Sequence: Synthetic oligonucleotide
  Sense Strand Starting at position 1222 of SEQ ID NO: 315898
ccuacuucucacgagaguu

SEQ ID NO: 414656 - RNA, 19 nt, Artificial Sequence
  Description of Artificial Sequence: Synthetic oligonucleotide
  Antisense Strand to SEQ ID NO: 414655
aacucucgugagaaguagg

SEQ ID NO: 414657 - RNA, 19 nt, Artificial Sequence
  Description of Artificial Sequence: Synthetic oligonucleotide
  Sense Strand Starting at position 1222 of SEQ ID NO: 316122
cgaccagucguucauuaga

SEQ ID NO: 414658 - RNA, 19 nt, Artificial Sequence
  Description of Artificial Sequence: Synthetic oligonucleotide
  Antisense Strand to SEQ ID NO: 414657
ucuaaugaacgacuggucg

SEQ ID NO: 414659 - RNA, 19 nt, Artificial Sequence
  Description of Artificial Sequence: Synthetic oligonucleotide
  Sense Strand Starting at position 1222 of SEQ ID NO: 316324
ucccaauuacuugggaaac

SEQ ID NO: 414660 - RNA, 19 nt, Artificial Sequence
  Description of Artificial Sequence: Synthetic oligonucleotide
  Antisense Strand to SEQ ID NO: 414659
guuucccaaguaauuggga

SEQ ID NO: 414661 - RNA, 19 nt, Artificial Sequence
  Description of Artificial Sequence: Synthetic oligonucleotide
  Sense Strand Starting at position 1222 of SEQ ID NO: 316486
acgggcagagucgauaauu

SEQ ID NO: 414662 - RNA, 19 nt, Artificial Sequence
  Description of Artificial Sequence: Synthetic oligonucleotide
  Antisense Strand to SEQ ID NO: 414661
aauuaucgacucugcccgu

SEQ ID NO: 414663 - RNA, 19 nt, Artificial Sequence
  Description of Artificial Sequence: Synthetic oligonucleotide
  Sense Strand Starting at position 1222 of SEQ ID NO: 316497
cgauaauuaauucgugaau

SEQ ID NO: 414664 - RNA, 19 nt, Artificial Sequence
  Description of Artificial Sequence: Synthetic oligonucleotide
  Antisense Strand to SEQ ID NO: 414663
auucacgaauuaauuaucg

SEQ ID NO: 414665 - RNA, 19 nt, Artificial Sequence
  Description of Artificial Sequence: Synthetic oligonucleotide
  Sense Strand Starting at position 1222 of SEQ ID NO: 316518
uuuaaaguugucuaugcaa

SEQ ID NO: 414666 - RNA, 19 nt, Artificial Sequence
  Description of Artificial Sequence: Synthetic oligonucleotide
  Antisense Strand to SEQ ID NO: 414665
uugcauagacaacuuuaaa

SEQ ID NO: 414667 - RNA, 19 nt, Artificial Sequence
  Description of Artificial Sequence: Synthetic oligonucleotide
  Sense Strand Starting at position 1222 of SEQ ID NO: 316549
agaucuaaugucuaaaguc

SEQ ID NO: 414668 - RNA, 19 nt, Artificial Sequence
  Description of Artificial Sequence: Synthetic oligonucleotide
  Antisense Strand to SEQ ID NO: 414667
gacuuuagacauuagaucu

SEQ ID NO: 414669 - RNA, 19 nt, Artificial Sequence
  Description of Artificial Sequence: Synthetic oligonucleotide
  Sense Strand Starting at position 1222 of SEQ ID NO: 316884
auuccaguccgauaaguga

SEQ ID NO: 414670 - RNA, 19 nt, Artificial Sequence
  Description of Artificial Sequence: Synthetic oligonucleotide
  Antisense Strand to SEQ ID NO: 414669
ucacuuaucggacuggaau

SEQ ID NO: 414671 - RNA, 19 nt, Artificial Sequence
  Description of Artificial Sequence: Synthetic oligonucleotide
  Sense Strand Starting at position 1222 of SEQ ID NO: 317409
cguuuaucccugucgcuuu

SEQ ID NO: 414672 - RNA, 19 nt, Artificial Sequence
  Description of Artificial Sequence: Synthetic oligonucleotide
  Antisense Strand to SEQ ID NO: 414671
aaagcgacagggauaaacg

SEQ ID NO: 414673 - RNA, 19 nt, Artificial Sequence
  Description of Artificial Sequence: Synthetic oligonucleotide
  Sense Strand Starting at position 1222 of SEQ ID NO: 317430
ccacuuauucugcaggcau

SEQ ID NO: 414674 - RNA, 19 nt, Artificial Sequence
  Description of Artificial Sequence: Synthetic oligonucleotide
  Antisense Strand to SEQ ID NO: 414673
augccugcagaauaagugg

SEQ ID NO: 414675 - RNA, 19 nt, Artificial Sequence
  Description of Artificial Sequence: Synthetic oligonucleotide
  Sense Strand Starting at position 1222 of SEQ ID NO: 317521
gagcuugcagucuagagau

SEQ ID NO: 414676 - RNA, 19 nt, Artificial Sequence
  Description of Artificial Sequence: Synthetic oligonucleotide
  Antisense Strand to SEQ ID NO: 414675
aucucuagacugcaagcuc

SEQ ID NO: 414677 - RNA, 19 nt, Artificial Sequence
  Description of Artificial Sequence: Synthetic oligonucleotide
  Sense Strand Starting at position 1222 of SEQ ID NO: 317523
gcuugcagucuagagauca

SEQ ID NO: 414678 - RNA, 19 nt, Artificial Sequence
  Description of Artificial Sequence: Synthetic oligonucleotide
  Antisense Strand to SEQ ID NO: 414677
ugaucucuagacugcaagc

SEQ ID NO: 414679 - RNA, 19 nt, Artificial Sequence
  Description of Artificial Sequence: Synthetic oligonucleotide
  Sense Strand Starting at position 1222 of SEQ ID NO: 317626
ggcaauagugaccacggaa

SEQ ID NO: 414680 - RNA, 19 nt, Artificial Sequence
  Description of Artificial Sequence: Synthetic oligonucleotide
  Antisense Strand to SEQ ID NO: 414679
uuccguggucacuauugcc

SEQ ID NO: 414681 - RNA, 19 nt, Artificial Sequence
  Description of Artificial Sequence: Synthetic oligonucleotide
  Sense Strand Starting at position 1222 of SEQ ID NO: 317629
aauagugaccacggaaaua

SEQ ID NO: 414682 - RNA, 19 nt, Artificial Sequence
  Description of Artificial Sequence: Synthetic oligonucleotide
  Antisense Strand to SEQ ID NO: 414681
uauuuccguggucacuauu

SEQ ID NO: 414683 - RNA, 19 nt, Artificial Sequence
  Description of Artificial Sequence: Synthetic oligonucleotide
  Sense Strand Starting at position 1222 of SEQ ID NO: 317863
ggacauggaguuuaaguuu

SEQ ID NO: 414684 - RNA, 19 nt, Artificial Sequence
  Description of Artificial Sequence: Synthetic oligonucleotide
  Antisense Strand to SEQ ID NO: 414683
aaacuuaaacuccaugucc

SEQ ID NO: 414685 - RNA, 19 nt, Artificial Sequence
  Description of Artificial Sequence: Synthetic oligonucleotide
  Sense Strand Starting at position 1222 of SEQ ID NO: 317978
gccuaagguauaugagaaa

SEQ ID NO: 414686 - RNA, 19 nt, Artificial Sequence
  Description of Artificial Sequence: Synthetic oligonucleotide
  Antisense Strand to SEQ ID NO: 414685
uuucucauauaccuuaggc

SEQ ID NO: 414687 - RNA, 19 nt, Artificial Sequence
  Description of Artificial Sequence: Synthetic oligonucleotide
  Sense Strand Starting at position 1222 of SEQ ID NO: 318081
agagguguuuaaguaagag

SEQ ID NO: 414688 - RNA, 19 nt, Artificial Sequence
  Description of Artificial Sequence: Synthetic oligonucleotide
  Antisense Strand to SEQ ID NO: 414687
cucuuacuuaaacaccucu

SEQ ID NO: 414689 - RNA, 19 nt, Artificial Sequence
  Description of Artificial Sequence: Synthetic oligonucleotide
  Sense Strand Starting at position 1222 of SEQ ID NO: 318131
uuuggcagaugauuagaau

SEQ ID NO: 414690 - RNA, 19 nt, Artificial Sequence
  Description of Artificial Sequence: Synthetic oligonucleotide
  Antisense Strand to SEQ ID NO: 414689
auucuaaucaucugccaaa

SEQ ID NO: 414691 - RNA, 19 nt, Artificial Sequence
  Description of Artificial Sequence: Synthetic oligonucleotide
  Sense Strand Starting at position 1222 of SEQ ID NO: 318158
acuugauagccacaacugu

SEQ ID NO: 414692 - RNA, 19 nt, Artificial Sequence
  Description of Artificial Sequence: Synthetic oligonucleotide
  Antisense Strand to SEQ ID NO: 414691
acaguuguggcuaucaagu

SEQ ID NO: 414693 - RNA, 19 nt, Artificial Sequence
  Description of Artificial Sequence: Synthetic oligonucleotide
  Sense Strand Starting at position 1222 of SEQ ID NO: 318165
agccacaacuguccugaua

SEQ ID NO: 414694 - RNA, 19 nt, Artificial Sequence
  Description of Artificial Sequence: Synthetic oligonucleotide
  Antisense Strand to SEQ ID NO: 414693
uaucaggacaguuguggcu

SEQ ID NO: 414695 - RNA, 19 nt, Artificial Sequence
  Description of Artificial Sequence: Synthetic oligonucleotide
  Sense Strand Starting at position 1222 of SEQ ID NO: 318426
uuacuuucccgacauugca

SEQ ID NO: 414696 - RNA, 19 nt, Artificial Sequence
  Description of Artificial Sequence: Synthetic oligonucleotide
  Antisense Strand to SEQ ID NO: 414695
ugcaaugucgggaaaguaa

SEQ ID NO: 414697 - RNA, 19 nt, Artificial Sequence
  Description of Artificial Sequence: Synthetic oligonucleotide
  Sense Strand Starting at position 1222 of SEQ ID NO: 318560
gguaguuggauugguauga

SEQ ID NO: 414698 - RNA, 19 nt, Artificial Sequence
  Description of Artificial Sequence: Synthetic oligonucleotide
  Antisense Strand to SEQ ID NO: 414697
ucauaccaauccaacuacc

SEQ ID NO: 414699 - RNA, 19 nt, Artificial Sequence
  Description of Artificial Sequence: Synthetic oligonucleotide
  Sense Strand Starting at position 1222 of SEQ ID NO: 318561
guaguuggauugguaugau

SEQ ID NO: 414700 - RNA, 19 nt, Artificial Sequence
  Description of Artificial Sequence: Synthetic oligonucleotide
  Antisense Strand to SEQ ID NO: 414699
aucauaccaauccaacuac

SEQ ID NO: 414701 - RNA, 19 nt, Artificial Sequence
  Description of Artificial Sequence: Synthetic oligonucleotide
  Sense Strand Starting at position 1222 of SEQ ID NO: 318564
guuggauugguaugauaug

SEQ ID NO: 414702 - RNA, 19 nt, Artificial Sequence
  Description of Artificial Sequence: Synthetic oligonucleotide
  Antisense Strand to SEQ ID NO: 414701
cauaucauaccaauccaac

SEQ ID NO: 414703 - RNA, 19 nt, Artificial Sequence
  Description of Artificial Sequence: Synthetic oligonucleotide
  Sense Strand Starting at position 1222 of SEQ ID NO: 318574
uaugauaugucacugagua

SEQ ID NO: 414704 - RNA, 19 nt, Artificial Sequence
  Description of Artificial Sequence: Synthetic oligonucleotide
  Antisense Strand to SEQ ID NO: 414703
uacucagugacauaucaua

SEQ ID NO: 414705 - RNA, 19 nt, Artificial Sequence
  Description of Artificial Sequence: Synthetic oligonucleotide
  Sense Strand Starting at position 1222 of SEQ ID NO: 318575
augauaugucacugaguaa

SEQ ID NO: 414706 - RNA, 19 nt, Artificial Sequence
  Description of Artificial Sequence: Synthetic oligonucleotide
  Antisense Strand to SEQ ID NO: 414705
uuacucagugacauaucau

SEQ ID NO: 414707 - RNA, 19 nt, Artificial Sequence
  Description of Artificial Sequence: Synthetic oligonucleotide
  Sense Strand Starting at position 1222 of SEQ ID NO: 318737
uucuacguccaagaaugua

SEQ ID NO: 414708 - RNA, 19 nt, Artificial Sequence
  Description of Artificial Sequence: Synthetic oligonucleotide
  Antisense Strand to SEQ ID NO: 414707
uacauucuuggacguagaa

SEQ ID NO: 414709 - RNA, 19 nt, Artificial Sequence
  Description of Artificial Sequence: Synthetic oligonucleotide
  Sense Strand Starting at position 1222 of SEQ ID NO: 318806
auagguagcaaagauguau

SEQ ID NO: 414710 - RNA, 19 nt, Artificial Sequence
  Description of Artificial Sequence: Synthetic oligonucleotide
  Antisense Strand to SEQ ID NO: 414709
auacaucuuugcuaccuau

SEQ ID NO: 414711 - RNA, 19 nt, Artificial Sequence
  Description of Artificial Sequence: Synthetic oligonucleotide
  Sense Strand Starting at position 1222 of SEQ ID NO: 318987
ccagauagauggcuaagau

SEQ ID NO: 414712 - RNA, 19 nt, Artificial Sequence
  Description of Artificial Sequence: Synthetic oligonucleotide
  Antisense Strand to SEQ ID NO: 414711
aucuuagccaucuaucugg

SEQ ID NO: 414713 - RNA, 19 nt, Artificial Sequence
  Description of Artificial Sequence: Synthetic oligonucleotide
  Sense Strand Starting at position 1222 of SEQ ID NO: 319135
auuguuauagcauguagaa

SEQ ID NO: 414714 - RNA, 19 nt, Artificial Sequence
  Description of Artificial Sequence: Synthetic oligonucleotide
  Antisense Strand to SEQ ID NO: 414713
uucuacaugcuauaacaau

SEQ ID NO: 414715 - RNA, 19 nt, Artificial Sequence
  Description of Artificial Sequence: Synthetic oligonucleotide
  Sense Strand Starting at position 1222 of SEQ ID NO: 319184
augucugagauuuguguca

SEQ ID NO: 414716 - RNA, 19 nt, Artificial Sequence
  Description of Artificial Sequence: Synthetic oligonucleotide
  Antisense Strand to SEQ ID NO: 414715
ugacacaaaucucagacau

SEQ ID NO: 414717 - RNA, 19 nt, Artificial Sequence
  Description of Artificial Sequence: Synthetic oligonucleotide
  Sense Strand Starting at position 1222 of SEQ ID NO: 319217
ggguuuagugaguaagcau

SEQ ID NO: 414718 - RNA, 19 nt, Artificial Sequence
  Description of Artificial Sequence: Synthetic oligonucleotide
  Antisense Strand to SEQ ID NO: 414717
augcuuacucacuaaaccc

SEQ ID NO: 414719 - RNA, 19 nt, Artificial Sequence
  Description of Artificial Sequence: Synthetic oligonucleotide
  Sense Strand Starting at position 1223 of SEQ ID NO: 315269
cacaaugaccagugcuuga

SEQ ID NO: 414720 - RNA, 19 nt, Artificial Sequence
  Description of Artificial Sequence: Synthetic oligonucleotide
  Antisense Strand to SEQ ID NO: 414719
ucaagcacuggucauugug

SEQ ID NO: 414721 - RNA, 19 nt, Artificial Sequence
  Description of Artificial Sequence: Synthetic oligonucleotide
  Sense Strand Starting at position 1223 of SEQ ID NO: 315273
augaccagugcuugaagau

SEQ ID NO: 414722 - RNA, 19 nt, Artificial Sequence
  Description of Artificial Sequence: Synthetic oligonucleotide
  Antisense Strand to SEQ ID NO: 414721
aucuucaagcacuggucau

SEQ ID NO: 414723 - RNA, 19 nt, Artificial Sequence
  Description of Artificial Sequence: Synthetic oligonucleotide
  Sense Strand Starting at position 1223 of SEQ ID NO: 315274
ugaccagugcuugaagauc

SEQ ID NO: 414724 - RNA, 19 nt, Artificial Sequence
  Description of Artificial Sequence: Synthetic oligonucleotide
  Antisense Strand to SEQ ID NO: 414723
gaucuucaagcacugguca

SEQ ID NO: 414725 - RNA, 19 nt, Artificial Sequence
  Description of Artificial Sequence: Synthetic oligonucleotide
  Sense Strand Starting at position 1223 of SEQ ID NO: 315363
ucaggcaaagcaugaauua

SEQ ID NO: 414726 - RNA, 19 nt, Artificial Sequence
  Description of Artificial Sequence: Synthetic oligonucleotide
  Antisense Strand to SEQ ID NO: 414725
uaauucaugcuuugccuga

SEQ ID NO: 414727 - RNA, 19 nt, Artificial Sequence
  Description of Artificial Sequence: Synthetic oligonucleotide
  Sense Strand Starting at position 1223 of SEQ ID NO: 315450
cuggguauucuugagcuuu

SEQ ID NO: 414728 - RNA, 19 nt, Artificial Sequence
  Description of Artificial Sequence: Synthetic oligonucleotide
  Antisense Strand to SEQ ID NO: 414727
aaagcucaagaauacccag

SEQ ID NO: 414729 - RNA, 19 nt, Artificial Sequence
  Description of Artificial Sequence: Synthetic oligonucleotide
  Sense Strand Starting at position 1223 of SEQ ID NO: 315849
gggugcggaaucuaaauau

SEQ ID NO: 414730 - RNA, 19 nt, Artificial Sequence
  Description of Artificial Sequence: Synthetic oligonucleotide
  Antisense Strand to SEQ ID NO: 414729
auauuuagauuccgcaccc

SEQ ID NO: 414731 - RNA, 19 nt, Artificial Sequence
  Description of Artificial Sequence: Synthetic oligonucleotide
  Sense Strand Starting at position 1223 of SEQ ID NO: 315900
aacacauagugucuugaga

SEQ ID NO: 414732 - RNA, 19 nt, Artificial Sequence
  Description of Artificial Sequence: Synthetic oligonucleotide
  Antisense Strand to SEQ ID NO: 414731
ucucaagacacuauguguu

SEQ ID NO: 414733 - RNA, 19 nt, Artificial Sequence
  Description of Artificial Sequence: Synthetic oligonucleotide
  Sense Strand Starting at position 1223 of SEQ ID NO: 316107
guuggacaaccuugucuua

SEQ ID NO: 414734 - RNA, 19 nt, Artificial Sequence
  Description of Artificial Sequence: Synthetic oligonucleotide
  Antisense Strand to SEQ ID NO: 414733
uaagacaagguuguccaac

SEQ ID NO: 414735 - RNA, 19 nt, Artificial Sequence
  Description of Artificial Sequence: Synthetic oligonucleotide
  Sense Strand Starting at position 1223 of SEQ ID NO: 316109
uggacaaccuugucuuaca

SEQ ID NO: 414736 - RNA, 19 nt, Artificial Sequence
  Description of Artificial Sequence: Synthetic oligonucleotide
  Antisense Strand to SEQ ID NO: 414735
uguaagacaagguugucca

SEQ ID NO: 414737 - RNA, 19 nt, Artificial Sequence
  Description of Artificial Sequence: Synthetic oligonucleotide
  Sense Strand Starting at position 1223 of SEQ ID NO: 316172
aaggucuaguuccugacaa

SEQ ID NO: 414738 - RNA, 19 nt, Artificial Sequence
  Description of Artificial Sequence: Synthetic oligonucleotide
  Antisense Strand to SEQ ID NO: 414737
uugucaggaacuagaccuu

SEQ ID NO: 414739 - RNA, 19 nt, Artificial Sequence
  Description of Artificial Sequence: Synthetic oligonucleotide
  Sense Strand Starting at position 1223 of SEQ ID NO: 316174
ggucuaguuccugacaaca

SEQ ID NO: 414740 - RNA, 19 nt, Artificial Sequence
  Description of Artificial Sequence: Synthetic oligonucleotide
  Antisense Strand to SEQ ID NO: 414739
uguugucaggaacuagacc

SEQ ID NO: 414741 - RNA, 19 nt, Artificial Sequence
  Description of Artificial Sequence: Synthetic oligonucleotide
  Sense Strand Starting at position 1223 of SEQ ID NO: 316331
gaccacuguccaggucaga

SEQ ID NO: 414742 - RNA, 19 nt, Artificial Sequence
  Description of Artificial Sequence: Synthetic oligonucleotide
  Antisense Strand to SEQ ID NO: 414741
ucugaccuggacagugguc

SEQ ID NO: 414743 - RNA, 19 nt, Artificial Sequence
  Description of Artificial Sequence: Synthetic oligonucleotide
  Sense Strand Starting at position 1223 of SEQ ID NO: 316465
aguucucagcgucaggaaa

SEQ ID NO: 414744 - RNA, 19 nt, Artificial Sequence
  Description of Artificial Sequence: Synthetic oligonucleotide
  Antisense Strand to SEQ ID NO: 414743
uuuccugacgcugagaacu

SEQ ID NO: 414745 - RNA, 19 nt, Artificial Sequence
  Description of Artificial Sequence: Synthetic oligonucleotide
  Sense Strand Starting at position 1223 of SEQ ID NO: 316508
uccucuuaugccuacagua

SEQ ID NO: 414746 - RNA, 19 nt, Artificial Sequence
  Description of Artificial Sequence: Synthetic oligonucleotide
  Antisense Strand to SEQ ID NO: 414745
uacuguaggcauaagagga

SEQ ID NO: 414747 - RNA, 19 nt, Artificial Sequence
  Description of Artificial Sequence: Synthetic oligonucleotide
  Sense Strand Starting at position 1223 of SEQ ID NO: 316563
uggucaucuggucacaaca

SEQ ID NO: 414748 - RNA, 19 nt, Artificial Sequence
  Description of Artificial Sequence: Synthetic oligonucleotide
  Antisense Strand to SEQ ID NO: 414747
uguugugaccagaugacca

SEQ ID NO: 414749 - RNA, 19 nt, Artificial Sequence
  Description of Artificial Sequence: Synthetic oligonucleotide
  Sense Strand Starting at position 1223 of SEQ ID NO: 316583
ccguuaauuacggaguaaa

SEQ ID NO: 414750 - RNA, 19 nt, Artificial Sequence
  Description of Artificial Sequence: Synthetic oligonucleotide
  Antisense Strand to SEQ ID NO: 414749
uuuacuccguaauuaacgg

SEQ ID NO: 414751 - RNA, 19 nt, Artificial Sequence
  Description of Artificial Sequence: Synthetic oligonucleotide
  Sense Strand Starting at position 1223 of SEQ ID NO: 316615
ggcuucucaccuuaagagu

SEQ ID NO: 414752 - RNA, 19 nt, Artificial Sequence
  Description of Artificial Sequence: Synthetic oligonucleotide
  Antisense Strand to SEQ ID NO: 414751
acucuuaaggugagaagcc

SEQ ID NO: 414753 - RNA, 19 nt, Artificial Sequence
  Description of Artificial Sequence: Synthetic oligonucleotide
  Sense Strand Starting at position 1223 of SEQ ID NO: 316626
uuaagagucacguggagag

SEQ ID NO: 414754 - RNA, 19 nt, Artificial Sequence
  Description of Artificial Sequence: Synthetic oligonucleotide
  Antisense Strand to SEQ ID NO: 414753
cucuccacgugacucuuaa

SEQ ID NO: 414755 - RNA, 19 nt, Artificial Sequence
  Description of Artificial Sequence: Synthetic oligonucleotide
  Sense Strand Starting at position 1223 of SEQ ID NO: 316807
aggguuuggcgugauuaga

SEQ ID NO: 414756 - RNA, 19 nt, Artificial Sequence
  Description of Artificial Sequence: Synthetic oligonucleotide
  Antisense Strand to SEQ ID NO: 414755
ucuaaucacgccaaacccu

SEQ ID NO: 414757 - RNA, 19 nt, Artificial Sequence
  Description of Artificial Sequence: Synthetic oligonucleotide
  Sense Strand Starting at position 1223 of SEQ ID NO: 316816
cgugauuagaggcgaaaca

SEQ ID NO: 414758 - RNA, 19 nt, Artificial Sequence
  Description of Artificial Sequence: Synthetic oligonucleotide
  Antisense Strand to SEQ ID NO: 414757
uguuucgccucuaaucacg

SEQ ID NO: 414759 - RNA, 19 nt, Artificial Sequence
  Description of Artificial Sequence: Synthetic oligonucleotide
  Sense Strand Starting at position 1223 of SEQ ID NO: 317496
ugugguagaagguaaacuu

SEQ ID NO: 414760 - RNA, 19 nt, Artificial Sequence
  Description of Artificial Sequence: Synthetic oligonucleotide
  Antisense Strand to SEQ ID NO: 414759
aaguuuaccuucuaccaca

SEQ ID NO: 414761 - RNA, 19 nt, Artificial Sequence
  Description of Artificial Sequence: Synthetic oligonucleotide
  Sense Strand Starting at position 1223 of SEQ ID NO: 317506
gguaaacuucucgcggcuu

SEQ ID NO: 414762 - RNA, 19 nt, Artificial Sequence
  Description of Artificial Sequence: Synthetic oligonucleotide
  Antisense Strand to SEQ ID NO: 414761
aagccgcgagaaguuuacc

SEQ ID NO: 414763 - RNA, 19 nt, Artificial Sequence
  Description of Artificial Sequence: Synthetic oligonucleotide
  Sense Strand Starting at position 1223 of SEQ ID NO: 317518
gcggcuuagccgucuccau

SEQ ID NO: 414764 - RNA, 19 nt, Artificial Sequence
  Description of Artificial Sequence: Synthetic oligonucleotide
  Antisense Strand to SEQ ID NO: 414763
auggagacggcuaagccgc

SEQ ID NO: 414765 - RNA, 19 nt, Artificial Sequence
  Description of Artificial Sequence: Synthetic oligonucleotide
  Sense Strand Starting at position 1223 of SEQ ID NO: 317554
cggugaaacuuauuaaaga

SEQ ID NO: 414766 - RNA, 19 nt, Artificial Sequence
  Description of Artificial Sequence: Synthetic oligonucleotide
  Antisense Strand to SEQ ID NO: 414765
ucuuuaauaaguuucaccg

SEQ ID NO: 414767 - RNA, 19 nt, Artificial Sequence
  Description of Artificial Sequence: Synthetic oligonucleotide
  Sense Strand Starting at position 1223 of SEQ ID NO: 317835
auacuuacguauguuuaga

SEQ ID NO: 414768 - RNA, 19 nt, Artificial Sequence
  Description of Artificial Sequence: Synthetic oligonucleotide
  Antisense Strand to SEQ ID NO: 414767
ucuaaacauacguaaguau

SEQ ID NO: 414769 - RNA, 19 nt, Artificial Sequence
  Description of Artificial Sequence: Synthetic oligonucleotide
  Sense Strand Starting at position 1223 of SEQ ID NO: 317837
acuuacguauguuuagaau

SEQ ID NO: 414770 - RNA, 19 nt, Artificial Sequence
  Description of Artificial Sequence: Synthetic oligonucleotide
  Antisense Strand to SEQ ID NO: 414769
auucuaaacauacguaagu

SEQ ID NO: 414771 - RNA, 19 nt, Artificial Sequence
  Description of Artificial Sequence: Synthetic oligonucleotide
  Sense Strand Starting at position 1223 of SEQ ID NO: 318204
uguugaaauguauaaagug

SEQ ID NO: 414772 - RNA, 19 nt, Artificial Sequence
  Description of Artificial Sequence: Synthetic oligonucleotide
  Antisense Strand to SEQ ID NO: 414771
cacuuuauacauuucaaca

SEQ ID NO: 414773 - RNA, 19 nt, Artificial Sequence
  Description of Artificial Sequence: Synthetic oligonucleotide
  Sense Strand Starting at position 1223 of SEQ ID NO: 318386
guaucuucuguuuagcaag

SEQ ID NO: 414774 - RNA, 19 nt, Artificial Sequence
  Description of Artificial Sequence: Synthetic oligonucleotide
  Antisense Strand to SEQ ID NO: 414773
cuugcuaaacagaagauac

SEQ ID NO: 414775 - RNA, 19 nt, Artificial Sequence
  Description of Artificial Sequence: Synthetic oligonucleotide
  Sense Strand Starting at position 1223 of SEQ ID NO: 318526
gccaaagguggguggauua

SEQ ID NO: 414776 - RNA, 19 nt, Artificial Sequence
  Description of Artificial Sequence: Synthetic oligonucleotide
  Antisense Strand to SEQ ID NO: 414775
uaauccacccaccuuuggc

SEQ ID NO: 414777 - RNA, 19 nt, Artificial Sequence
  Description of Artificial Sequence: Synthetic oligonucleotide
  Sense Strand Starting at position 1223 of SEQ ID NO: 318568
auuggucaagauggugaaa

SEQ ID NO: 414778 - RNA, 19 nt, Artificial Sequence
  Description of Artificial Sequence: Synthetic oligonucleotide
  Antisense Strand to SEQ ID NO: 414777
uuucaccaucuugaccaau

SEQ ID NO: 414779 - RNA, 19 nt, Artificial Sequence
  Description of Artificial Sequence: Synthetic oligonucleotide
  Sense Strand Starting at position 1223 of SEQ ID NO: 318785
caguaacgccaauauggua

SEQ ID NO: 414780 - RNA, 19 nt, Artificial Sequence
  Description of Artificial Sequence: Synthetic oligonucleotide
  Antisense Strand to SEQ ID NO: 414779
uaccauauuggcguuacug

SEQ ID NO: 414781 - RNA, 19 nt, Artificial Sequence
  Description of Artificial Sequence: Synthetic oligonucleotide
  Sense Strand Starting at position 1223 of SEQ ID NO: 318854
gcaccacuccauugaguaa

SEQ ID NO: 414782 - RNA, 19 nt, Artificial Sequence
  Description of Artificial Sequence: Synthetic oligonucleotide
  Antisense Strand to SEQ ID NO: 414781
uuacucaauggaguggugc

SEQ ID NO: 414783 - RNA, 19 nt, Artificial Sequence
  Description of Artificial Sequence: Synthetic oligonucleotide
  Sense Strand Starting at position 1223 of SEQ ID NO: 318870
uaaggagcugcucaaagau

SEQ ID NO: 414784 - RNA, 19 nt, Artificial Sequence
  Description of Artificial Sequence: Synthetic oligonucleotide
  Antisense Strand to SEQ ID NO: 414783
aucuuugagcagcuccuua

SEQ ID NO: 414785 - RNA, 19 nt, Artificial Sequence
  Description of Artificial Sequence: Synthetic oligonucleotide
  Sense Strand Starting at position 1223 of SEQ ID NO: 318923
agguguugcauugaucaac

SEQ ID NO: 414786 - RNA, 19 nt, Artificial Sequence
  Description of Artificial Sequence: Synthetic oligonucleotide
  Antisense Strand to SEQ ID NO: 414785
guugaucaaugcaacaccu

SEQ ID NO: 414787 - RNA, 19 nt, Artificial Sequence
  Description of Artificial Sequence: Synthetic oligonucleotide
  Sense Strand Starting at position 1223 of SEQ ID NO: 318934
ugaucaacucugcaugcuu

SEQ ID NO: 414788 - RNA, 19 nt, Artificial Sequence
  Description of Artificial Sequence: Synthetic oligonucleotide
  Antisense Strand to SEQ ID NO: 414787
aagcaugcagaguugauca

SEQ ID NO: 414789 - RNA, 19 nt, Artificial Sequence
  Description of Artificial Sequence: Synthetic oligonucleotide
  Sense Strand Starting at position 1223 of SEQ ID NO: 318941
cucugcaugcuuuaaagaa

SEQ ID NO: 414790 - RNA, 19 nt, Artificial Sequence
  Description of Artificial Sequence: Synthetic oligonucleotide
  Antisense Strand to SEQ ID NO: 414789
uucuuuaaagcaugcagag

SEQ ID NO: 414791 - RNA, 19 nt, Artificial Sequence
  Description of Artificial Sequence: Synthetic oligonucleotide
  Sense Strand Starting at position 1223 of SEQ ID NO: 318948
ugcuuuaaagaauguaaag

SEQ ID NO: 414792 - RNA, 19 nt, Artificial Sequence
  Description of Artificial Sequence: Synthetic oligonucleotide
  Antisense Strand to SEQ ID NO: 414791
cuuuacauucuuuaaagca

SEQ ID NO: 414793 - RNA, 19 nt, Artificial Sequence
  Description of Artificial Sequence: Synthetic oligonucleotide
  Sense Strand Starting at position 1223 of SEQ ID NO: 319035
uguaaagccgucucugcua

SEQ ID NO: 414794 - RNA, 19 nt, Artificial Sequence
  Description of Artificial Sequence: Synthetic oligonucleotide
  Antisense Strand to SEQ ID NO: 414793
uagcagagacggcuuuaca

SEQ ID NO: 414795 - RNA, 19 nt, Artificial Sequence
  Description of Artificial Sequence: Synthetic oligonucleotide
  Sense Strand Starting at position 1223 of SEQ ID NO: 319134
gggacuacaucguuguuaa

SEQ ID NO: 414796 - RNA, 19 nt, Artificial Sequence
  Description of Artificial Sequence: Synthetic oligonucleotide
  Antisense Strand to SEQ ID NO: 414795
uuaacaacgauguaguccc

SEQ ID NO: 414797 - RNA, 19 nt, Artificial Sequence
  Description of Artificial Sequence: Synthetic oligonucleotide
  Sense Strand Starting at position 1223 of SEQ ID NO: 319171
uggugaugauggcugaagu

SEQ ID NO: 414798 - RNA, 19 nt, Artificial Sequence
  Description of Artificial Sequence: Synthetic oligonucleotide
  Antisense Strand to SEQ ID NO: 414797
acuucagccaucaucacca

SEQ ID NO: 414799 - RNA, 19 nt, Artificial Sequence
  Description of Artificial Sequence: Synthetic oligonucleotide
  Sense Strand Starting at position 1224 of SEQ ID NO: 315299
ugcuguacugauugagaau

SEQ ID NO: 414800 - RNA, 19 nt, Artificial Sequence
  Description of Artificial Sequence: Synthetic oligonucleotide
  Antisense Strand to SEQ ID NO: 414799
auucucaaucaguacagca

SEQ ID NO: 414801 - RNA, 19 nt, Artificial Sequence
  Description of Artificial Sequence: Synthetic oligonucleotide
  Sense Strand Starting at position 1224 of SEQ ID NO: 315300
gcuguacugauugagaauu

SEQ ID NO: 414802 - RNA, 19 nt, Artificial Sequence
  Description of Artificial Sequence: Synthetic oligonucleotide
  Antisense Strand to SEQ ID NO: 414801
aauucucaaucaguacagc

SEQ ID NO: 414803 - RNA, 19 nt, Artificial Sequence
  Description of Artificial Sequence: Synthetic oligonucleotide
  Sense Strand Starting at position 1224 of SEQ ID NO: 315388
ucagcuacuggaugaauca

SEQ ID NO: 414804 - RNA, 19 nt, Artificial Sequence
  Description of Artificial Sequence: Synthetic oligonucleotide
  Antisense Strand to SEQ ID NO: 414803
ugauucauccaguagcuga

SEQ ID NO: 414805 - RNA, 19 nt, Artificial Sequence
  Description of Artificial Sequence: Synthetic oligonucleotide
  Sense Strand Starting at position 1224 of SEQ ID NO: 315440
auguauauuccuuggugag

SEQ ID NO: 414806 - RNA, 19 nt, Artificial Sequence
  Description of Artificial Sequence: Synthetic oligonucleotide
  Antisense Strand to SEQ ID NO: 414805
cucaccaaggaauauacau

SEQ ID NO: 414807 - RNA, 19 nt, Artificial Sequence
  Description of Artificial Sequence: Synthetic oligonucleotide
  Sense Strand Starting at position 1224 of SEQ ID NO: 315441
uguauauuccuuggugagg

SEQ ID NO: 414808 - RNA, 19 nt, Artificial Sequence
  Description of Artificial Sequence: Synthetic oligonucleotide
  Antisense Strand to SEQ ID NO: 414807
ccucaccaaggaauauaca

SEQ ID NO: 414809 - RNA, 19 nt, Artificial Sequence
  Description of Artificial Sequence: Synthetic oligonucleotide
  Sense Strand Starting at position 1224 of SEQ ID NO: 315466
gucucaauguacccaagau

SEQ ID NO: 414810 - RNA, 19 nt, Artificial Sequence
  Description of Artificial Sequence: Synthetic oligonucleotide
  Antisense Strand to SEQ ID NO: 414809
aucuuggguacauugagac

SEQ ID NO: 414811 - RNA, 19 nt, Artificial Sequence
  Description of Artificial Sequence: Synthetic oligonucleotide
  Sense Strand Starting at position 1224 of SEQ ID NO: 315600
guaacugauccaugaggcu

SEQ ID NO: 414812 - RNA, 19 nt, Artificial Sequence
  Description of Artificial Sequence: Synthetic oligonucleotide
  Antisense Strand to SEQ ID NO: 414811
agccucauggaucaguuac

SEQ ID NO: 414813 - RNA, 19 nt, Artificial Sequence
  Description of Artificial Sequence: Synthetic oligonucleotide
  Sense Strand Starting at position 1224 of SEQ ID NO: 315712
agcauauuuccgugucaca

SEQ ID NO: 414814 - RNA, 19 nt, Artificial Sequence
  Description of Artificial Sequence: Synthetic oligonucleotide
  Antisense Strand to SEQ ID NO: 414813
ugugacacggaaauaugcu

SEQ ID NO: 414815 - RNA, 19 nt, Artificial Sequence
  Description of Artificial Sequence: Synthetic oligonucleotide
  Sense Strand Starting at position 1224 of SEQ ID NO: 316271
aaugaauguugggcuuaaa

SEQ ID NO: 414816 - RNA, 19 nt, Artificial Sequence
  Description of Artificial Sequence: Synthetic oligonucleotide
  Antisense Strand to SEQ ID NO: 414815
uuuaagcccaacauucauu

SEQ ID NO: 414817 - RNA, 19 nt, Artificial Sequence
  Description of Artificial Sequence: Synthetic oligonucleotide
  Sense Strand Starting at position 1224 of SEQ ID NO: 316284
cuuaaauaguuucccgaga

SEQ ID NO: 414818 - RNA, 19 nt, Artificial Sequence
  Description of Artificial Sequence: Synthetic oligonucleotide
  Antisense Strand to SEQ ID NO: 414817
ucucgggaaacuauuuaag

SEQ ID NO: 414819 - RNA, 19 nt, Artificial Sequence
  Description of Artificial Sequence: Synthetic oligonucleotide
  Sense Strand Starting at position 1224 of SEQ ID NO: 316285
uuaaauaguuucccgagaa

SEQ ID NO: 414820 - RNA, 19 nt, Artificial Sequence
  Description of Artificial Sequence: Synthetic oligonucleotide
  Antisense Strand to SEQ ID NO: 414819
uucucgggaaacuauuuaa

SEQ ID NO: 414821 - RNA, 19 nt, Artificial Sequence
  Description of Artificial Sequence: Synthetic oligonucleotide
  Sense Strand Starting at position 1224 of SEQ ID NO: 316304
aggcuaguugcagggagaa

SEQ ID NO: 414822 - RNA, 19 nt, Artificial Sequence
  Description of Artificial Sequence: Synthetic oligonucleotide
  Antisense Strand to SEQ ID NO: 414821
uucucccugcaacuagccu

SEQ ID NO: 414823 - RNA, 19 nt, Artificial Sequence
  Description of Artificial Sequence: Synthetic oligonucleotide
  Sense Strand Starting at position 1224 of SEQ ID NO: 316306
gcuaguugcagggagaaga

SEQ ID NO: 414824 - RNA, 19 nt, Artificial Sequence
  Description of Artificial Sequence: Synthetic oligonucleotide
  Antisense Strand to SEQ ID NO: 414823
ucuucucccugcaacuagc

SEQ ID NO: 414825 - RNA, 19 nt, Artificial Sequence
  Description of Artificial Sequence: Synthetic oligonucleotide
  Sense Strand Starting at position 1224 of SEQ ID NO: 316461
aucacagacucgguuuaca

SEQ ID NO: 414826 - RNA, 19 nt, Artificial Sequence
  Description of Artificial Sequence: Synthetic oligonucleotide
  Antisense Strand to SEQ ID NO: 414825
uguaaaccgagucugugau

SEQ ID NO: 414827 - RNA, 19 nt, Artificial Sequence
  Description of Artificial Sequence: Synthetic oligonucleotide
  Sense Strand Starting at position 1224 of SEQ ID NO: 316602
ucgcguccagcucucauaa

SEQ ID NO: 414828 - RNA, 19 nt, Artificial Sequence
  Description of Artificial Sequence: Synthetic oligonucleotide
  Antisense Strand to SEQ ID NO: 414827
uuaugagagcuggacgcga

SEQ ID NO: 414829 - RNA, 19 nt, Artificial Sequence
  Description of Artificial Sequence: Synthetic oligonucleotide
  Sense Strand Starting at position 1224 of SEQ ID NO: 316603
cgcguccagcucucauaau

SEQ ID NO: 414830 - RNA, 19 nt, Artificial Sequence
  Description of Artificial Sequence: Synthetic oligonucleotide
  Antisense Strand to SEQ ID NO: 414829
auuaugagagcuggacgcg

SEQ ID NO: 414831 - RNA, 19 nt, Artificial Sequence
  Description of Artificial Sequence: Synthetic oligonucleotide
  Sense Strand Starting at position 1224 of SEQ ID NO: 316795
gcgagaugagcagagggau

SEQ ID NO: 414832 - RNA, 19 nt, Artificial Sequence
  Description of Artificial Sequence: Synthetic oligonucleotide
  Antisense Strand to SEQ ID NO: 414831
aucccucugcucaucucgc

SEQ ID NO: 414833 - RNA, 19 nt, Artificial Sequence
  Description of Artificial Sequence: Synthetic oligonucleotide
  Sense Strand Starting at position 1224 of SEQ ID NO: 317303
uguaguuuccggcugaggu

SEQ ID NO: 414834 - RNA, 19 nt, Artificial Sequence
  Description of Artificial Sequence: Synthetic oligonucleotide
  Antisense Strand to SEQ ID NO: 414833
accucagccggaaacuaca

SEQ ID NO: 414835 - RNA, 19 nt, Artificial Sequence
  Description of Artificial Sequence: Synthetic oligonucleotide
  Sense Strand Starting at position 1224 of SEQ ID NO: 317774
gugcguaggaagucguaaa

SEQ ID NO: 414836 - RNA, 19 nt, Artificial Sequence
  Description of Artificial Sequence: Synthetic oligonucleotide
  Antisense Strand to SEQ ID NO: 414835
uuuacgacuuccuacgcac

SEQ ID NO: 414837 - RNA, 19 nt, Artificial Sequence
  Description of Artificial Sequence: Synthetic oligonucleotide
  Sense Strand Starting at position 1224 of SEQ ID NO: 317852
auguauggugguuaauuau

SEQ ID NO: 414838 - RNA, 19 nt, Artificial Sequence
  Description of Artificial Sequence: Synthetic oligonucleotide
  Antisense Strand to SEQ ID NO: 414837
auaauuaaccaccauacau

SEQ ID NO: 414839 - RNA, 19 nt, Artificial Sequence
  Description of Artificial Sequence: Synthetic oligonucleotide
  Sense Strand Starting at position 1224 of SEQ ID NO: 317858
ggugguuaauuaucacuac

SEQ ID NO: 414840 - RNA, 19 nt, Artificial Sequence
  Description of Artificial Sequence: Synthetic oligonucleotide
  Antisense Strand to SEQ ID NO: 414839
guagugauaauuaaccacc

SEQ ID NO: 414841 - RNA, 19 nt, Artificial Sequence
  Description of Artificial Sequence: Synthetic oligonucleotide
  Sense Strand Starting at position 1224 of SEQ ID NO: 318065
cucgcugcgaccuuuguaa

SEQ ID NO: 414842 - RNA, 19 nt, Artificial Sequence
  Description of Artificial Sequence: Synthetic oligonucleotide
  Antisense Strand to SEQ ID NO: 414841
uuacaaaggucgcagcgag

SEQ ID NO: 414843 - RNA, 19 nt, Artificial Sequence
  Description of Artificial Sequence: Synthetic oligonucleotide
  Sense Strand Starting at position 1224 of SEQ ID NO: 318091
ucuguuguuggucacauuu

SEQ ID NO: 414844 - RNA, 19 nt, Artificial Sequence
  Description of Artificial Sequence: Synthetic oligonucleotide
  Antisense Strand to SEQ ID NO: 414843
aaaugugaccaacaacaga

SEQ ID NO: 414845 - RNA, 19 nt, Artificial Sequence
  Description of Artificial Sequence: Synthetic oligonucleotide
  Sense Strand Starting at position 1224 of SEQ ID NO: 318204
agaagagccuuauccaauc

SEQ ID NO: 414846 - RNA, 19 nt, Artificial Sequence
  Description of Artificial Sequence: Synthetic oligonucleotide
  Antisense Strand to SEQ ID NO: 414845
gauuggauaaggcucuucu

SEQ ID NO: 414847 - RNA, 19 nt, Artificial Sequence
  Description of Artificial Sequence: Synthetic oligonucleotide
  Sense Strand Starting at position 1224 of SEQ ID NO: 318436
augagauguugggcuucau

SEQ ID NO: 414848 - RNA, 19 nt, Artificial Sequence
  Description of Artificial Sequence: Synthetic oligonucleotide
  Antisense Strand to SEQ ID NO: 414847
augaagcccaacaucucau

SEQ ID NO: 414849 - RNA, 19 nt, Artificial Sequence
  Description of Artificial Sequence: Synthetic oligonucleotide
  Sense Strand Starting at position 1224 of SEQ ID NO: 318542
cccagaaauucuuugguga

SEQ ID NO: 414850 - RNA, 19 nt, Artificial Sequence
  Description of Artificial Sequence: Synthetic oligonucleotide
  Antisense Strand to SEQ ID NO: 414849
ucaccaaagaauuucuggg

SEQ ID NO: 414851 - RNA, 19 nt, Artificial Sequence
  Description of Artificial Sequence: Synthetic oligonucleotide
  Sense Strand Starting at position 1224 of SEQ ID NO: 318543
ccagaaauucuuuggugaa

SEQ ID NO: 414852 - RNA, 19 nt, Artificial Sequence
  Description of Artificial Sequence: Synthetic oligonucleotide
  Antisense Strand to SEQ ID NO: 414851
uucaccaaagaauuucugg

SEQ ID NO: 414853 - RNA, 19 nt, Artificial Sequence
  Description of Artificial Sequence: Synthetic oligonucleotide
  Sense Strand Starting at position 1224 of SEQ ID NO: 318545
agaaauucuuuggugaaua

SEQ ID NO: 414854 - RNA, 19 nt, Artificial Sequence
  Description of Artificial Sequence: Synthetic oligonucleotide
  Antisense Strand to SEQ ID NO: 414853
uauucaccaaagaauuucu

SEQ ID NO: 414855 - RNA, 19 nt, Artificial Sequence
  Description of Artificial Sequence: Synthetic oligonucleotide
  Sense Strand Starting at position 1224 of SEQ ID NO: 318685
cgcugucugcuucuagaac

SEQ ID NO: 414856 - RNA, 19 nt, Artificial Sequence
  Description of Artificial Sequence: Synthetic oligonucleotide
  Antisense Strand to SEQ ID NO: 414855
guucuagaagcagacagcg

SEQ ID NO: 414857 - RNA, 19 nt, Artificial Sequence
  Description of Artificial Sequence: Synthetic oligonucleotide
  Sense Strand Starting at position 1224 of SEQ ID NO: 318718
gucguaaagccauaagacu

SEQ ID NO: 414858 - RNA, 19 nt, Artificial Sequence
  Description of Artificial Sequence: Synthetic oligonucleotide
  Antisense Strand to SEQ ID NO: 414857
agucuuauggcuuuacgac

SEQ ID NO: 414859 - RNA, 19 nt, Artificial Sequence
  Description of Artificial Sequence: Synthetic oligonucleotide
  Sense Strand Starting at position 1224 of SEQ ID NO: 318756
uuauauuuccgcugauuac

SEQ ID NO: 414860 - RNA, 19 nt, Artificial Sequence
  Description of Artificial Sequence: Synthetic oligonucleotide
  Antisense Strand to SEQ ID NO: 414859
guaaucagcggaaauauaa

SEQ ID NO: 414861 - RNA, 19 nt, Artificial Sequence
  Description of Artificial Sequence: Synthetic oligonucleotide
  Sense Strand Starting at position 1224 of SEQ ID NO: 318832
ucgagucuuucucuaauuu

SEQ ID NO: 414862 - RNA, 19 nt, Artificial Sequence
  Description of Artificial Sequence: Synthetic oligonucleotide
  Antisense Strand to SEQ ID NO: 414861
aaauuagagaaagacucga

SEQ ID NO: 414863 - RNA, 19 nt, Artificial Sequence
  Description of Artificial Sequence: Synthetic oligonucleotide
  Sense Strand Starting at position 1224 of SEQ ID NO: 318873
ugagccuuuggguauaaug

SEQ ID NO: 414864 - RNA, 19 nt, Artificial Sequence
  Description of Artificial Sequence: Synthetic oligonucleotide
  Antisense Strand to SEQ ID NO: 414863
cauuauacccaaaggcuca

SEQ ID NO: 414865 - RNA, 19 nt, Artificial Sequence
  Description of Artificial Sequence: Synthetic oligonucleotide
  Sense Strand Starting at position 1224 of SEQ ID NO: 318911
gacccuccucuuugaggau

SEQ ID NO: 414866 - RNA, 19 nt, Artificial Sequence
  Description of Artificial Sequence: Synthetic oligonucleotide
  Antisense Strand to SEQ ID NO: 414865
auccucaaagaggaggguc

SEQ ID NO: 414867 - RNA, 19 nt, Artificial Sequence
  Description of Artificial Sequence: Synthetic oligonucleotide
  Sense Strand Starting at position 1224 of SEQ ID NO: 319026
uucggagaggagugagaau

SEQ ID NO: 414868 - RNA, 19 nt, Artificial Sequence
  Description of Artificial Sequence: Synthetic oligonucleotide
  Antisense Strand to SEQ ID NO: 414867
auucucacuccucuccgaa

SEQ ID NO: 414869 - RNA, 19 nt, Artificial Sequence
  Description of Artificial Sequence: Synthetic oligonucleotide
  Sense Strand Starting at position 1224 of SEQ ID NO: 319060
auaggccuuccuuaguauu

SEQ ID NO: 414870 - RNA, 19 nt, Artificial Sequence
  Description of Artificial Sequence: Synthetic oligonucleotide
  Antisense Strand to SEQ ID NO: 414869
aauacuaaggaaggccuau

SEQ ID NO: 414871 - RNA, 19 nt, Artificial Sequence
  Description of Artificial Sequence: Synthetic oligonucleotide
  Sense Strand Starting at position 1224 of SEQ ID NO: 319062
aggccuuccuuaguauuua

SEQ ID NO: 414872 - RNA, 19 nt, Artificial Sequence
  Description of Artificial Sequence: Synthetic oligonucleotide
  Antisense Strand to SEQ ID NO: 414871
uaaauacuaaggaaggccu

SEQ ID NO: 414873 - RNA, 19 nt, Artificial Sequence
  Description of Artificial Sequence: Synthetic oligonucleotide
  Sense Strand Starting at position 1224 of SEQ ID NO: 319103
guaagaagucccuaacuuc

SEQ ID NO: 414874 - RNA, 19 nt, Artificial Sequence
  Description of Artificial Sequence: Synthetic oligonucleotide
  Antisense Strand to SEQ ID NO: 414873
gaaguuagggacuucuuac

SEQ ID NO: 414875 - RNA, 19 nt, Artificial Sequence
  Description of Artificial Sequence: Synthetic oligonucleotide
  Sense Strand Starting at position 1224 of SEQ ID NO: 319147
uuaugcuucccauaggauu

SEQ ID NO: 414876 - RNA, 19 nt, Artificial Sequence
  Description of Artificial Sequence: Synthetic oligonucleotide
  Antisense Strand to SEQ ID NO: 414875
aauccuaugggaagcauaa

SEQ ID NO: 414877 - RNA, 19 nt, Artificial Sequence
  Description of Artificial Sequence: Synthetic oligonucleotide
  Sense Strand Starting at position 1224 of SEQ ID NO: 319193
uguaucagagcuuauguga

SEQ ID NO: 414878 - RNA, 19 nt, Artificial Sequence
  Description of Artificial Sequence: Synthetic oligonucleotide
  Antisense Strand to SEQ ID NO: 414877
ucacauaagcucugauaca

SEQ ID NO: 414879 - RNA, 19 nt, Artificial Sequence
  Description of Artificial Sequence: Synthetic oligonucleotide
  Sense Strand Starting at position 1225 of SEQ ID NO: 315250
gagggcucuuggcuuucua

SEQ ID NO: 414880 - RNA, 19 nt, Artificial Sequence
  Description of Artificial Sequence: Synthetic oligonucleotide
  Antisense Strand to SEQ ID NO: 414879
uagaaagccaagagcccuc

SEQ ID NO: 414881 - RNA, 19 nt, Artificial Sequence
  Description of Artificial Sequence: Synthetic oligonucleotide
  Sense Strand Starting at position 1225 of SEQ ID NO: 315254
gcucuuggcuuucuaaaca

SEQ ID NO: 414882 - RNA, 19 nt, Artificial Sequence
  Description of Artificial Sequence: Synthetic oligonucleotide
  Antisense Strand to SEQ ID NO: 414881
uguuuagaaagccaagagc

SEQ ID NO: 414883 - RNA, 19 nt, Artificial Sequence
  Description of Artificial Sequence: Synthetic oligonucleotide
  Sense Strand Starting at position 1225 of SEQ ID NO: 315464
gugagaaggugaguuaaug

SEQ ID NO: 414884 - RNA, 19 nt, Artificial Sequence
  Description of Artificial Sequence: Synthetic oligonucleotide
  Antisense Strand to SEQ ID NO: 414883
cauuaacucaccuucucac

SEQ ID NO: 414885 - RNA, 19 nt, Artificial Sequence
  Description of Artificial Sequence: Synthetic oligonucleotide
  Sense Strand Starting at position 1225 of SEQ ID NO: 315606
acauucuucuaagagaaag

SEQ ID NO: 414886 - RNA, 19 nt, Artificial Sequence
  Description of Artificial Sequence: Synthetic oligonucleotide
  Antisense Strand to SEQ ID NO: 414885
cuuucucuuagaagaaugu

SEQ ID NO: 414887 - RNA, 19 nt, Artificial Sequence
  Description of Artificial Sequence: Synthetic oligonucleotide
  Sense Strand Starting at position 1225 of SEQ ID NO: 315668
uggguauguccagauccca

SEQ ID NO: 414888 - RNA, 19 nt, Artificial Sequence
  Description of Artificial Sequence: Synthetic oligonucleotide
  Antisense Strand to SEQ ID NO: 414887
ugggaucuggacauaccca

SEQ ID NO: 414889 - RNA, 19 nt, Artificial Sequence
  Description of Artificial Sequence: Synthetic oligonucleotide
  Sense Strand Starting at position 1225 of SEQ ID NO: 315699
agcagaggcucacucuuaa

SEQ ID NO: 414890 - RNA, 19 nt, Artificial Sequence
  Description of Artificial Sequence: Synthetic oligonucleotide
  Antisense Strand to SEQ ID NO: 414889
uuaagagugagccucugcu

SEQ ID NO: 414891 - RNA, 19 nt, Artificial Sequence
  Description of Artificial Sequence: Synthetic oligonucleotide
  Sense Strand Starting at position 1225 of SEQ ID NO: 315730
uggcaaagugccuaacagu

SEQ ID NO: 414892 - RNA, 19 nt, Artificial Sequence
  Description of Artificial Sequence: Synthetic oligonucleotide
  Antisense Strand to SEQ ID NO: 414891
acuguuaggcacuuugcca

SEQ ID NO: 414893 - RNA, 19 nt, Artificial Sequence
  Description of Artificial Sequence: Synthetic oligonucleotide
  Sense Strand Starting at position 1225 of SEQ ID NO: 315816
cucugaucugaacaguuua

SEQ ID NO: 414894 - RNA, 19 nt, Artificial Sequence
  Description of Artificial Sequence: Synthetic oligonucleotide
  Antisense Strand to SEQ ID NO: 414893
uaaacuguucagaucagag

SEQ ID NO: 414895 - RNA, 19 nt, Artificial Sequence
  Description of Artificial Sequence: Synthetic oligonucleotide
  Sense Strand Starting at position 1225 of SEQ ID NO: 315981
gugaguggcaggcauugaa

SEQ ID NO: 414896 - RNA, 19 nt, Artificial Sequence
  Description of Artificial Sequence: Synthetic oligonucleotide
  Antisense Strand to SEQ ID NO: 414895
uucaaugccugccacucac

SEQ ID NO: 414897 - RNA, 19 nt, Artificial Sequence
  Description of Artificial Sequence: Synthetic oligonucleotide
  Sense Strand Starting at position 1225 of SEQ ID NO: 315988
gcaggcauugaaugaguua

SEQ ID NO: 414898 - RNA, 19 nt, Artificial Sequence
  Description of Artificial Sequence: Synthetic oligonucleotide
  Antisense Strand to SEQ ID NO: 414897
uaacucauucaaugccugc

SEQ ID NO: 414899 - RNA, 19 nt, Artificial Sequence
  Description of Artificial Sequence: Synthetic oligonucleotide
  Sense Strand Starting at position 1225 of SEQ ID NO: 316000
ugaguuaaugaaugcaaca

SEQ ID NO: 414900 - RNA, 19 nt, Artificial Sequence
  Description of Artificial Sequence: Synthetic oligonucleotide
  Antisense Strand to SEQ ID NO: 414899
uguugcauucauuaacuca

SEQ ID NO: 414901 - RNA, 19 nt, Artificial Sequence
  Description of Artificial Sequence: Synthetic oligonucleotide
  Sense Strand Starting at position 1225 of SEQ ID NO: 316080
gcugcagaaucucugcaau

SEQ ID NO: 414902 - RNA, 19 nt, Artificial Sequence
  Description of Artificial Sequence: Synthetic oligonucleotide
  Antisense Strand to SEQ ID NO: 414901
auugcagagauucugcagc

SEQ ID NO: 414903 - RNA, 19 nt, Artificial Sequence
  Description of Artificial Sequence: Synthetic oligonucleotide
  Sense Strand Starting at position 1225 of SEQ ID NO: 316082
ugcagaaucucugcaauac

SEQ ID NO: 414904 - RNA, 19 nt, Artificial Sequence
  Description of Artificial Sequence: Synthetic oligonucleotide
  Antisense Strand to SEQ ID NO: 414903
guauugcagagauucugca

SEQ ID NO: 414905 - RNA, 19 nt, Artificial Sequence
  Description of Artificial Sequence: Synthetic oligonucleotide
  Sense Strand Starting at position 1225 of SEQ ID NO: 316083
gcagaaucucugcaauacg

SEQ ID NO: 414906 - RNA, 19 nt, Artificial Sequence
  Description of Artificial Sequence: Synthetic oligonucleotide
  Antisense Strand to SEQ ID NO: 414905
cguauugcagagauucugc

SEQ ID NO: 414907 - RNA, 19 nt, Artificial Sequence
  Description of Artificial Sequence: Synthetic oligonucleotide
  Sense Strand Starting at position 1225 of SEQ ID NO: 316216
gagcacugcuaguggauuu

SEQ ID NO: 414908 - RNA, 19 nt, Artificial Sequence
  Description of Artificial Sequence: Synthetic oligonucleotide
  Antisense Strand to SEQ ID NO: 414907
aaauccacuagcagugcuc

SEQ ID NO: 414909 - RNA, 19 nt, Artificial Sequence
  Description of Artificial Sequence: Synthetic oligonucleotide
  Sense Strand Starting at position 1225 of SEQ ID NO: 316253
ggcugaggaccuggagauu

SEQ ID NO: 414910 - RNA, 19 nt, Artificial Sequence
  Description of Artificial Sequence: Synthetic oligonucleotide
  Antisense Strand to SEQ ID NO: 414909
aaucuccagguccucagcc

SEQ ID NO: 414911 - RNA, 19 nt, Artificial Sequence
  Description of Artificial Sequence: Synthetic oligonucleotide
  Sense Strand Starting at position 1225 of SEQ ID NO: 316494
gugcuuuaacgguacugau

SEQ ID NO: 414912 - RNA, 19 nt, Artificial Sequence
  Description of Artificial Sequence: Synthetic oligonucleotide
  Antisense Strand to SEQ ID NO: 414911
aucaguaccguuaaagcac

SEQ ID NO: 414913 - RNA, 19 nt, Artificial Sequence
  Description of Artificial Sequence: Synthetic oligonucleotide
  Sense Strand Starting at position 1225 of SEQ ID NO: 316525
cccaucauccuaugaggua

SEQ ID NO: 414914 - RNA, 19 nt, Artificial Sequence
  Description of Artificial Sequence: Synthetic oligonucleotide
  Antisense Strand to SEQ ID NO: 414913
uaccucauaggaugauggg

SEQ ID NO: 414915 - RNA, 19 nt, Artificial Sequence
  Description of Artificial Sequence: Synthetic oligonucleotide
  Sense Strand Starting at position 1225 of SEQ ID NO: 316526
ccaucauccuaugagguau

SEQ ID NO: 414916 - RNA, 19 nt, Artificial Sequence
  Description of Artificial Sequence: Synthetic oligonucleotide
  Antisense Strand to SEQ ID NO: 414915
auaccucauaggaugaugg

SEQ ID NO: 414917 - RNA, 19 nt, Artificial Sequence
  Description of Artificial Sequence: Synthetic oligonucleotide
  Sense Strand Starting at position 1225 of SEQ ID NO: 316528
aucauccuaugagguauua

SEQ ID NO: 414918 - RNA, 19 nt, Artificial Sequence
  Description of Artificial Sequence: Synthetic oligonucleotide
  Antisense Strand to SEQ ID NO: 414917
uaauaccucauaggaugau

SEQ ID NO: 414919 - RNA, 19 nt, Artificial Sequence
  Description of Artificial Sequence: Synthetic oligonucleotide
  Sense Strand Starting at position 1225 of SEQ ID NO: 316538
gagguauuaucuccgguca

SEQ ID NO: 414920 - RNA, 19 nt, Artificial Sequence
  Description of Artificial Sequence: Synthetic oligonucleotide
  Antisense Strand to SEQ ID NO: 414919
ugaccggagauaauaccuc

SEQ ID NO: 414921 - RNA, 19 nt, Artificial Sequence
  Description of Artificial Sequence: Synthetic oligonucleotide
  Sense Strand Starting at position 1225 of SEQ ID NO: 316539
agguauuaucuccggucau

SEQ ID NO: 414922 - RNA, 19 nt, Artificial Sequence
  Description of Artificial Sequence: Synthetic oligonucleotide
  Antisense Strand to SEQ ID NO: 414921
augaccggagauaauaccu

SEQ ID NO: 414923 - RNA, 19 nt, Artificial Sequence
  Description of Artificial Sequence: Synthetic oligonucleotide
  Sense Strand Starting at position 1225 of SEQ ID NO: 316543
auuaucuccggucauagga

SEQ ID NO: 414924 - RNA, 19 nt, Artificial Sequence
  Description of Artificial Sequence: Synthetic oligonucleotide
  Antisense Strand to SEQ ID NO: 414923
uccuaugaccggagauaau

SEQ ID NO: 414925 - RNA, 19 nt, Artificial Sequence
  Description of Artificial Sequence: Synthetic oligonucleotide
  Sense Strand Starting at position 1225 of SEQ ID NO: 316578
ggagcuugcccaggucaca

SEQ ID NO: 414926 - RNA, 19 nt, Artificial Sequence
  Description of Artificial Sequence: Synthetic oligonucleotide
  Antisense Strand to SEQ ID NO: 414925
ugugaccugggcaagcucc

SEQ ID NO: 414927 - RNA, 19 nt, Artificial Sequence
  Description of Artificial Sequence: Synthetic oligonucleotide
  Sense Strand Starting at position 1225 of SEQ ID NO: 316608
uggcgaagggcugacaaua

SEQ ID NO: 414928 - RNA, 19 nt, Artificial Sequence
  Description of Artificial Sequence: Synthetic oligonucleotide
  Antisense Strand to SEQ ID NO: 414927
uauugucagcccuucgcca

SEQ ID NO: 414929 - RNA, 19 nt, Artificial Sequence
  Description of Artificial Sequence: Synthetic oligonucleotide
  Sense Strand Starting at position 1225 of SEQ ID NO: 316712
gcgugggauccggaaagaa

SEQ ID NO: 414930 - RNA, 19 nt, Artificial Sequence
  Description of Artificial Sequence: Synthetic oligonucleotide
  Antisense Strand to SEQ ID NO: 414929
uucuuuccggaucccacgc

SEQ ID NO: 414931 - RNA, 19 nt, Artificial Sequence
  Description of Artificial Sequence: Synthetic oligonucleotide
  Sense Strand Starting at position 1225 of SEQ ID NO: 316749
agagcaauguuccauugga

SEQ ID NO: 414932 - RNA, 19 nt, Artificial Sequence
  Description of Artificial Sequence: Synthetic oligonucleotide
  Antisense Strand to SEQ ID NO: 414931
uccaauggaacauugcucu

SEQ ID NO: 414933 - RNA, 19 nt, Artificial Sequence
  Description of Artificial Sequence: Synthetic oligonucleotide
  Sense Strand Starting at position 1225 of SEQ ID NO: 317465
cugcguauuguccacauuu

SEQ ID NO: 414934 - RNA, 19 nt, Artificial Sequence
  Description of Artificial Sequence: Synthetic oligonucleotide
  Antisense Strand to SEQ ID NO: 414933
aaauguggacaauacgcag

SEQ ID NO: 414935 - RNA, 19 nt, Artificial Sequence
  Description of Artificial Sequence: Synthetic oligonucleotide
  Sense Strand Starting at position 1225 of SEQ ID NO: 317474
guccacauuuccugagcca

SEQ ID NO: 414936 - RNA, 19 nt, Artificial Sequence
  Description of Artificial Sequence: Synthetic oligonucleotide
  Antisense Strand to SEQ ID NO: 414935
uggcucaggaaauguggac

SEQ ID NO: 414937 - RNA, 19 nt, Artificial Sequence
  Description of Artificial Sequence: Synthetic oligonucleotide
  Sense Strand Starting at position 1225 of SEQ ID NO: 317497
caauuaguugcgcugcuga

SEQ ID NO: 414938 - RNA, 19 nt, Artificial Sequence
  Description of Artificial Sequence: Synthetic oligonucleotide
  Antisense Strand to SEQ ID NO: 414937
ucagcagcgcaacuaauug

SEQ ID NO: 414939 - RNA, 19 nt, Artificial Sequence
  Description of Artificial Sequence: Synthetic oligonucleotide
  Sense Strand Starting at position 1225 of SEQ ID NO: 317749
ccaagagcugguuaucucu

SEQ ID NO: 414940 - RNA, 19 nt, Artificial Sequence
  Description of Artificial Sequence: Synthetic oligonucleotide
  Antisense Strand to SEQ ID NO: 414939
agagauaaccagcucuugg

SEQ ID NO: 414941 - RNA, 19 nt, Artificial Sequence
  Description of Artificial Sequence: Synthetic oligonucleotide
  Sense Strand Starting at position 1225 of SEQ ID NO: 317875
uuaguagguuuguuuaaag

SEQ ID NO: 414942 - RNA, 19 nt, Artificial Sequence
  Description of Artificial Sequence: Synthetic oligonucleotide
  Antisense Strand to SEQ ID NO: 414941
cuuuaaacaaaccuacuaa

SEQ ID NO: 414943 - RNA, 19 nt, Artificial Sequence
  Description of Artificial Sequence: Synthetic oligonucleotide
  Sense Strand Starting at position 1225 of SEQ ID NO: 318340
guacaauucuggccaggca

SEQ ID NO: 414944 - RNA, 19 nt, Artificial Sequence
  Description of Artificial Sequence: Synthetic oligonucleotide
  Antisense Strand to SEQ ID NO: 414943
ugccuggccagaauuguac

SEQ ID NO: 414945 - RNA, 19 nt, Artificial Sequence
  Description of Artificial Sequence: Synthetic oligonucleotide
  Sense Strand Starting at position 1225 of SEQ ID NO: 318812
uauccauagcguugugcaa

SEQ ID NO: 414946 - RNA, 19 nt, Artificial Sequence
  Description of Artificial Sequence: Synthetic oligonucleotide
  Antisense Strand to SEQ ID NO: 414945
uugcacaacgcuauggaua

SEQ ID NO: 414947 - RNA, 19 nt, Artificial Sequence
  Description of Artificial Sequence: Synthetic oligonucleotide
  Sense Strand Starting at position 1225 of SEQ ID NO: 319009
augaccuuucugugacuuu

SEQ ID NO: 414948 - RNA, 19 nt, Artificial Sequence
  Description of Artificial Sequence: Synthetic oligonucleotide
  Antisense Strand to SEQ ID NO: 414947
aaagucacagaaaggucau

SEQ ID NO: 414949 - RNA, 19 nt, Artificial Sequence
  Description of Artificial Sequence: Synthetic oligonucleotide
  Sense Strand Starting at position 1225 of SEQ ID NO: 319063
gcguguuaucaguacuuca

SEQ ID NO: 414950 - RNA, 19 nt, Artificial Sequence
  Description of Artificial Sequence: Synthetic oligonucleotide
  Antisense Strand to SEQ ID NO: 414949
ugaaguacugauaacacgc

SEQ ID NO: 414951 - RNA, 19 nt, Artificial Sequence
  Description of Artificial Sequence: Synthetic oligonucleotide
  Sense Strand Starting at position 1225 of SEQ ID NO: 319085
cuguuuauggcucaucaua

SEQ ID NO: 414952 - RNA, 19 nt, Artificial Sequence
  Description of Artificial Sequence: Synthetic oligonucleotide
  Antisense Strand to SEQ ID NO: 414951
uaugaugagccauaaacag

SEQ ID NO: 414953 - RNA, 19 nt, Artificial Sequence
  Description of Artificial Sequence: Synthetic oligonucleotide
  Sense Strand Starting at position 1225 of SEQ ID NO: 319087
guuuauggcucaucauaau

SEQ ID NO: 414954 - RNA, 19 nt, Artificial Sequence
  Description of Artificial Sequence: Synthetic oligonucleotide
  Antisense Strand to SEQ ID NO: 414953
auuaugaugagccauaaac

SEQ ID NO: 414955 - RNA, 19 nt, Artificial Sequence
  Description of Artificial Sequence: Synthetic oligonucleotide
  Sense Strand Starting at position 1225 of SEQ ID NO: 319144
cacucauuagugggauguu

SEQ ID NO: 414956 - RNA, 19 nt, Artificial Sequence
  Description of Artificial Sequence: Synthetic oligonucleotide
  Antisense Strand to SEQ ID NO: 414955
aacaucccacuaaugagug

SEQ ID NO: 414957 - RNA, 19 nt, Artificial Sequence
  Description of Artificial Sequence: Synthetic oligonucleotide
  Sense Strand Starting at position 1225 of SEQ ID NO: 319145
acucauuagugggauguuu

SEQ ID NO: 414958 - RNA, 19 nt, Artificial Sequence
  Description of Artificial Sequence: Synthetic oligonucleotide
  Antisense Strand to SEQ ID NO: 414957
aaacaucccacuaaugagu

SEQ ID NO: 414959 - RNA, 19 nt, Artificial Sequence
  Description of Artificial Sequence: Synthetic oligonucleotide
  Sense Strand Starting at position 1226 of SEQ ID NO: 315302
gucucuuggguucaagagu

SEQ ID NO: 414960 - RNA, 19 nt, Artificial Sequence
  Description of Artificial Sequence: Synthetic oligonucleotide
  Antisense Strand to SEQ ID NO: 414959
acucuugaacccaagagac

SEQ ID NO: 414961 - RNA, 19 nt, Artificial Sequence
  Description of Artificial Sequence: Synthetic oligonucleotide
  Sense Strand Starting at position 1226 of SEQ ID NO: 315552
cuuucugagccggaaauua

SEQ ID NO: 414962 - RNA, 19 nt, Artificial Sequence
  Description of Artificial Sequence: Synthetic oligonucleotide
  Antisense Strand to SEQ ID NO: 414961
uaauuuccggcucagaaag

SEQ ID NO: 414963 - RNA, 19 nt, Artificial Sequence
  Description of Artificial Sequence: Synthetic oligonucleotide
  Sense Strand Starting at position 1226 of SEQ ID NO: 315724
uucuaaauccuguaaugua

SEQ ID NO: 414964 - RNA, 19 nt, Artificial Sequence
  Description of Artificial Sequence: Synthetic oligonucleotide
  Antisense Strand to SEQ ID NO: 414963
uacauuacaggauuuagaa

SEQ ID NO: 414965 - RNA, 19 nt, Artificial Sequence
  Description of Artificial Sequence: Synthetic oligonucleotide
  Sense Strand Starting at position 1226 of SEQ ID NO: 315731
uccuguaauguauaccgga

SEQ ID NO: 414966 - RNA, 19 nt, Artificial Sequence
  Description of Artificial Sequence: Synthetic oligonucleotide
  Antisense Strand to SEQ ID NO: 414965
uccgguauacauuacagga

SEQ ID NO: 414967 - RNA, 19 nt, Artificial Sequence
  Description of Artificial Sequence: Synthetic oligonucleotide
  Sense Strand Starting at position 1226 of SEQ ID NO: 315736
uaauguauaccggaacuau

SEQ ID NO: 414968 - RNA, 19 nt, Artificial Sequence
  Description of Artificial Sequence: Synthetic oligonucleotide
  Antisense Strand to SEQ ID NO: 414967
auaguuccgguauacauua

SEQ ID NO: 414969 - RNA, 19 nt, Artificial Sequence
  Description of Artificial Sequence: Synthetic oligonucleotide
  Sense Strand Starting at position 1226 of SEQ ID NO: 315746
cggaacuaucugcaagcau

SEQ ID NO: 414970 - RNA, 19 nt, Artificial Sequence
  Description of Artificial Sequence: Synthetic oligonucleotide
  Antisense Strand to SEQ ID NO: 414969
augcuugcagauaguuccg

SEQ ID NO: 414971 - RNA, 19 nt, Artificial Sequence
  Description of Artificial Sequence: Synthetic oligonucleotide
  Sense Strand Starting at position 1226 of SEQ ID NO: 316147
gcguauauagaguauacua

SEQ ID NO: 414972 - RNA, 19 nt, Artificial Sequence
  Description of Artificial Sequence: Synthetic oligonucleotide
  Antisense Strand to SEQ ID NO: 414971
uaguauacucuauauacgc

SEQ ID NO: 414973 - RNA, 19 nt, Artificial Sequence
  Description of Artificial Sequence: Synthetic oligonucleotide
  Sense Strand Starting at position 1226 of SEQ ID NO: 316204
guauacauagcauguauau

SEQ ID NO: 414974 - RNA, 19 nt, Artificial Sequence
  Description of Artificial Sequence: Synthetic oligonucleotide
  Antisense Strand to SEQ ID NO: 414973
auauacaugcuauguauac

SEQ ID NO: 414975 - RNA, 19 nt, Artificial Sequence
  Description of Artificial Sequence: Synthetic oligonucleotide
  Sense Strand Starting at position 1226 of SEQ ID NO: 316293
acacaaguggucugucaca

SEQ ID NO: 414976 - RNA, 19 nt, Artificial Sequence
  Description of Artificial Sequence: Synthetic oligonucleotide
  Antisense Strand to SEQ ID NO: 414975
ugugacagaccacuugugu

SEQ ID NO: 414977 - RNA, 19 nt, Artificial Sequence
  Description of Artificial Sequence: Synthetic oligonucleotide
  Sense Strand Starting at position 1226 of SEQ ID NO: 316345
caggucucccacuauggau

SEQ ID NO: 414978 - RNA, 19 nt, Artificial Sequence
  Description of Artificial Sequence: Synthetic oligonucleotide
  Antisense Strand to SEQ ID NO: 414977
auccauagugggagaccug

SEQ ID NO: 414979 - RNA, 19 nt, Artificial Sequence
  Description of Artificial Sequence: Synthetic oligonucleotide
  Sense Strand Starting at position 1226 of SEQ ID NO: 316354
cacuauggauaggagaaua

SEQ ID NO: 414980 - RNA, 19 nt, Artificial Sequence
  Description of Artificial Sequence: Synthetic oligonucleotide
  Antisense Strand to SEQ ID NO: 414979
uauucuccuauccauagug

SEQ ID NO: 414981 - RNA, 19 nt, Artificial Sequence
  Description of Artificial Sequence: Synthetic oligonucleotide
  Sense Strand Starting at position 1226 of SEQ ID NO: 316874
gauagagaucacggcaaga

SEQ ID NO: 414982 - RNA, 19 nt, Artificial Sequence
  Description of Artificial Sequence: Synthetic oligonucleotide
  Antisense Strand to SEQ ID NO: 414981
ucuugccgugaucucuauc

SEQ ID NO: 414983 - RNA, 19 nt, Artificial Sequence
  Description of Artificial Sequence: Synthetic oligonucleotide
  Sense Strand Starting at position 1226 of SEQ ID NO: 316890
agagaaauaugauauccag

SEQ ID NO: 414984 - RNA, 19 nt, Artificial Sequence
  Description of Artificial Sequence: Synthetic oligonucleotide
  Antisense Strand to SEQ ID NO: 414983
cuggauaucauauuucucu

SEQ ID NO: 414985 - RNA, 19 nt, Artificial Sequence
  Description of Artificial Sequence: Synthetic oligonucleotide
  Sense Strand Starting at position 1226 of SEQ ID NO: 316897
uaugauauccagcacguau

SEQ ID NO: 414986 - RNA, 19 nt, Artificial Sequence
  Description of Artificial Sequence: Synthetic oligonucleotide
  Antisense Strand to SEQ ID NO: 414985
auacgugcuggauaucaua

SEQ ID NO: 414987 - RNA, 19 nt, Artificial Sequence
  Description of Artificial Sequence: Synthetic oligonucleotide
  Sense Strand Starting at position 1226 of SEQ ID NO: 317722
ucacuuucuccagggagca

SEQ ID NO: 414988 - RNA, 19 nt, Artificial Sequence
  Description of Artificial Sequence: Synthetic oligonucleotide
  Antisense Strand to SEQ ID NO: 414987
ugcucccuggagaaaguga

SEQ ID NO: 414989 - RNA, 19 nt, Artificial Sequence
  Description of Artificial Sequence: Synthetic oligonucleotide
  Sense Strand Starting at position 1226 of SEQ ID NO: 317818
cguugaaguccuuauuaac

SEQ ID NO: 414990 - RNA, 19 nt, Artificial Sequence
  Description of Artificial Sequence: Synthetic oligonucleotide
  Antisense Strand to SEQ ID NO: 414989
guuaauaaggacuucaacg

SEQ ID NO: 414991 - RNA, 19 nt, Artificial Sequence
  Description of Artificial Sequence: Synthetic oligonucleotide
  Sense Strand Starting at position 1226 of SEQ ID NO: 317878
augagagugguuuggcaga

SEQ ID NO: 414992 - RNA, 19 nt, Artificial Sequence
  Description of Artificial Sequence: Synthetic oligonucleotide
  Antisense Strand to SEQ ID NO: 414991
ucugccaaaccacucucau

SEQ ID NO: 414993 - RNA, 19 nt, Artificial Sequence
  Description of Artificial Sequence: Synthetic oligonucleotide
  Sense Strand Starting at position 1226 of SEQ ID NO: 317957
uugugugagaauugagaaa

SEQ ID NO: 414994 - RNA, 19 nt, Artificial Sequence
  Description of Artificial Sequence: Synthetic oligonucleotide
  Antisense Strand to SEQ ID NO: 414993
uuucucaauucucacacaa

SEQ ID NO: 414995 - RNA, 19 nt, Artificial Sequence
  Description of Artificial Sequence: Synthetic oligonucleotide
  Sense Strand Starting at position 1226 of SEQ ID NO: 318033
uuugauuagugaguuagaa

SEQ ID NO: 414996 - RNA, 19 nt, Artificial Sequence
  Description of Artificial Sequence: Synthetic oligonucleotide
  Antisense Strand to SEQ ID NO: 414995
uucuaacucacuaaucaaa

SEQ ID NO: 414997 - RNA, 19 nt, Artificial Sequence
  Description of Artificial Sequence: Synthetic oligonucleotide
  Sense Strand Starting at position 1226 of SEQ ID NO: 318109
acagaaccguucccucauu

SEQ ID NO: 414998 - RNA, 19 nt, Artificial Sequence
  Description of Artificial Sequence: Synthetic oligonucleotide
  Antisense Strand to SEQ ID NO: 414997
aaugagggaacgguucugu

SEQ ID NO: 414999 - RNA, 19 nt, Artificial Sequence
  Description of Artificial Sequence: Synthetic oligonucleotide
  Sense Strand Starting at position 1226 of SEQ ID NO: 318114
accguucccucauugaaau

SEQ ID NO: 415000 - RNA, 19 nt, Artificial Sequence
  Description of Artificial Sequence: Synthetic oligonucleotide
  Antisense Strand to SEQ ID NO: 414999
auuucaaugagggaacggu

SEQ ID NO: 415001 - RNA, 19 nt, Artificial Sequence
  Description of Artificial Sequence: Synthetic oligonucleotide
  Sense Strand Starting at position 1226 of SEQ ID NO: 318115
ccguucccucauugaaaua

SEQ ID NO: 415002 - RNA, 19 nt, Artificial Sequence
  Description of Artificial Sequence: Synthetic oligonucleotide
  Antisense Strand to SEQ ID NO: 415001
uauuucaaugagggaacgg

SEQ ID NO: 415003 - RNA, 19 nt, Artificial Sequence
  Description of Artificial Sequence: Synthetic oligonucleotide
  Sense Strand Starting at position 1226 of SEQ ID NO: 318127
ugaaauauuaagugggcaa

SEQ ID NO: 415004 - RNA, 19 nt, Artificial Sequence
  Description of Artificial Sequence: Synthetic oligonucleotide
  Antisense Strand to SEQ ID NO: 415003
uugcccacuuaauauuuca

SEQ ID NO: 415005 - RNA, 19 nt, Artificial Sequence
  Description of Artificial Sequence: Synthetic oligonucleotide
  Sense Strand Starting at position 1226 of SEQ ID NO: 318129
aaauauuaagugggcaaga

SEQ ID NO: 415006 - RNA, 19 nt, Artificial Sequence
  Description of Artificial Sequence: Synthetic oligonucleotide
  Antisense Strand to SEQ ID NO: 415005
ucuugcccacuuaauauuu

SEQ ID NO: 415007 - RNA, 19 nt, Artificial Sequence
  Description of Artificial Sequence: Synthetic oligonucleotide
  Sense Strand Starting at position 1226 of SEQ ID NO: 318320
gcagcacuccaucauagau

SEQ ID NO: 415008 - RNA, 19 nt, Artificial Sequence
  Description of Artificial Sequence: Synthetic oligonucleotide
  Antisense Strand to SEQ ID NO: 415007
aucuaugauggagugcugc

SEQ ID NO: 415009 - RNA, 19 nt, Artificial Sequence
  Description of Artificial Sequence: Synthetic oligonucleotide
  Sense Strand Starting at position 1226 of SEQ ID NO: 318375
gucagaauuuauuaugagu

SEQ ID NO: 415010 - RNA, 19 nt, Artificial Sequence
  Description of Artificial Sequence: Synthetic oligonucleotide
  Antisense Strand to SEQ ID NO: 415009
acucauaauaaauucugac

SEQ ID NO: 415011 - RNA, 19 nt, Artificial Sequence
  Description of Artificial Sequence: Synthetic oligonucleotide
  Sense Strand Starting at position 1226 of SEQ ID NO: 318434
guguauuugucaucuauug

SEQ ID NO: 415012 - RNA, 19 nt, Artificial Sequence
  Description of Artificial Sequence: Synthetic oligonucleotide
  Antisense Strand to SEQ ID NO: 415011
caauagaugacaaauacac

SEQ ID NO: 415013 - RNA, 19 nt, Artificial Sequence
  Description of Artificial Sequence: Synthetic oligonucleotide
  Sense Strand Starting at position 1226 of SEQ ID NO: 318456
cgcaacagauucccacaaa

SEQ ID NO: 415014 - RNA, 19 nt, Artificial Sequence
  Description of Artificial Sequence: Synthetic oligonucleotide
  Antisense Strand to SEQ ID NO: 415013
uuugugggaaucuguugcg

SEQ ID NO: 415015 - RNA, 19 nt, Artificial Sequence
  Description of Artificial Sequence: Synthetic oligonucleotide
  Sense Strand Starting at position 1226 of SEQ ID NO: 318493
acauguauaucacugcaca

SEQ ID NO: 415016 - RNA, 19 nt, Artificial Sequence
  Description of Artificial Sequence: Synthetic oligonucleotide
  Antisense Strand to SEQ ID NO: 415015
ugugcagugauauacaugu

SEQ ID NO: 415017 - RNA, 19 nt, Artificial Sequence
  Description of Artificial Sequence: Synthetic oligonucleotide
  Sense Strand Starting at position 1226 of SEQ ID NO: 318496
uguauaucacugcacaguu

SEQ ID NO: 415018 - RNA, 19 nt, Artificial Sequence
  Description of Artificial Sequence: Synthetic oligonucleotide
  Antisense Strand to SEQ ID NO: 415017
aacugugcagugauauaca

SEQ ID NO: 415019 - RNA, 19 nt, Artificial Sequence
  Description of Artificial Sequence: Synthetic oligonucleotide
  Sense Strand Starting at position 1226 of SEQ ID NO: 318545
acuagauccucugcuuaug

SEQ ID NO: 415020 - RNA, 19 nt, Artificial Sequence
  Description of Artificial Sequence: Synthetic oligonucleotide
  Antisense Strand to SEQ ID NO: 415019
cauaagcagaggaucuagu

SEQ ID NO: 415021 - RNA, 19 nt, Artificial Sequence
  Description of Artificial Sequence: Synthetic oligonucleotide
  Sense Strand Starting at position 1226 of SEQ ID NO: 318646
uucucaggucauugacaga

SEQ ID NO: 415022 - RNA, 19 nt, Artificial Sequence
  Description of Artificial Sequence: Synthetic oligonucleotide
  Antisense Strand to SEQ ID NO: 415021
ucugucaaugaccugagaa

SEQ ID NO: 415023 - RNA, 19 nt, Artificial Sequence
  Description of Artificial Sequence: Synthetic oligonucleotide
  Sense Strand Starting at position 1226 of SEQ ID NO: 318699
aguuucuuucuagauguga

SEQ ID NO: 415024 - RNA, 19 nt, Artificial Sequence
  Description of Artificial Sequence: Synthetic oligonucleotide
  Antisense Strand to SEQ ID NO: 415023
ucacaucuagaaagaaacu

SEQ ID NO: 415025 - RNA, 19 nt, Artificial Sequence
  Description of Artificial Sequence: Synthetic oligonucleotide
  Sense Strand Starting at position 1226 of SEQ ID NO: 318876
auguuaucauaacucugua

SEQ ID NO: 415026 - RNA, 19 nt, Artificial Sequence
  Description of Artificial Sequence: Synthetic oligonucleotide
  Antisense Strand to SEQ ID NO: 415025
uacagaguuaugauaacau

SEQ ID NO: 415027 - RNA, 19 nt, Artificial Sequence
  Description of Artificial Sequence: Synthetic oligonucleotide
  Sense Strand Starting at position 1226 of SEQ ID NO: 318996
ggagcaacauuugaaugua

SEQ ID NO: 415028 - RNA, 19 nt, Artificial Sequence
  Description of Artificial Sequence: Synthetic oligonucleotide
  Antisense Strand to SEQ ID NO: 415027
uacauucaaauguugcucc

SEQ ID NO: 415029 - RNA, 19 nt, Artificial Sequence
  Description of Artificial Sequence: Synthetic oligonucleotide
  Sense Strand Starting at position 1226 of SEQ ID NO: 319008
gaauguagcccuugaaagu

SEQ ID NO: 415030 - RNA, 19 nt, Artificial Sequence
  Description of Artificial Sequence: Synthetic oligonucleotide
  Antisense Strand to SEQ ID NO: 415029
acuuucaagggcuacauuc

SEQ ID NO: 415031 - RNA, 19 nt, Artificial Sequence
  Description of Artificial Sequence: Synthetic oligonucleotide
  Sense Strand Starting at position 1226 of SEQ ID NO: 319009
aauguagcccuugaaagua

SEQ ID NO: 415032 - RNA, 19 nt, Artificial Sequence
  Description of Artificial Sequence: Synthetic oligonucleotide
  Antisense Strand to SEQ ID NO: 415031
uacuuucaagggcuacauu

SEQ ID NO: 415033 - RNA, 19 nt, Artificial Sequence
  Description of Artificial Sequence: Synthetic oligonucleotide
  Sense Strand Starting at position 1226 of SEQ ID NO: 319019
uugaaaguaaugugucaug

SEQ ID NO: 415034 - RNA, 19 nt, Artificial Sequence
  Description of Artificial Sequence: Synthetic oligonucleotide
  Antisense Strand to SEQ ID NO: 415033
caugacacauuacuuucaa

SEQ ID NO: 415035 - RNA, 19 nt, Artificial Sequence
  Description of Artificial Sequence: Synthetic oligonucleotide
  Sense Strand Starting at position 1226 of SEQ ID NO: 319106
ugggcugauagucaaggua

SEQ ID NO: 415036 - RNA, 19 nt, Artificial Sequence
  Description of Artificial Sequence: Synthetic oligonucleotide
  Antisense Strand to SEQ ID NO: 415035
uaccuugacuaucagccca

SEQ ID NO: 415037 - RNA, 19 nt, Artificial Sequence
  Description of Artificial Sequence: Synthetic oligonucleotide
  Sense Strand Starting at position 1226 of SEQ ID NO: 319109
gcugauagucaagguauug

SEQ ID NO: 415038 - RNA, 19 nt, Artificial Sequence
  Description of Artificial Sequence: Synthetic oligonucleotide
  Antisense Strand to SEQ ID NO: 415037
caauaccuugacuaucagc

SEQ ID NO: 415039 - RNA, 19 nt, Artificial Sequence
  Description of Artificial Sequence: Synthetic oligonucleotide
  Sense Strand Starting at position 1227 of SEQ ID NO: 315412
aucagagauccucagcauc

SEQ ID NO: 415040 - RNA, 19 nt, Artificial Sequence
  Description of Artificial Sequence: Synthetic oligonucleotide
  Antisense Strand to SEQ ID NO: 415039
gaugcugaggaucucugau

SEQ ID NO: 415041 - RNA, 19 nt, Artificial Sequence
  Description of Artificial Sequence: Synthetic oligonucleotide
  Sense Strand Starting at position 1227 of SEQ ID NO: 315721
guugguaaguccucuccca

SEQ ID NO: 415042 - RNA, 19 nt, Artificial Sequence
  Description of Artificial Sequence: Synthetic oligonucleotide
  Antisense Strand to SEQ ID NO: 415041
ugggagaggacuuaccaac

SEQ ID NO: 415043 - RNA, 19 nt, Artificial Sequence
  Description of Artificial Sequence: Synthetic oligonucleotide
  Sense Strand Starting at position 1227 of SEQ ID NO: 316102
gcaguugugucuccaggag

SEQ ID NO: 415044 - RNA, 19 nt, Artificial Sequence
  Description of Artificial Sequence: Synthetic oligonucleotide
  Antisense Strand to SEQ ID NO: 415043
cuccuggagacacaacugc

SEQ ID NO: 415045 - RNA, 19 nt, Artificial Sequence
  Description of Artificial Sequence: Synthetic oligonucleotide
  Sense Strand Starting at position 1227 of SEQ ID NO: 316106
uugugucuccaggagggau

SEQ ID NO: 415046 - RNA, 19 nt, Artificial Sequence
  Description of Artificial Sequence: Synthetic oligonucleotide
  Antisense Strand to SEQ ID NO: 415045
aucccuccuggagacacaa

SEQ ID NO: 415047 - RNA, 19 nt, Artificial Sequence
  Description of Artificial Sequence: Synthetic oligonucleotide
  Sense Strand Starting at position 1227 of SEQ ID NO: 316118
gagggauccuuagggagga

SEQ ID NO: 415048 - RNA, 19 nt, Artificial Sequence
  Description of Artificial Sequence: Synthetic oligonucleotide
  Antisense Strand to SEQ ID NO: 415047
uccucccuaaggaucccuc

SEQ ID NO: 415049 - RNA, 19 nt, Artificial Sequence
  Description of Artificial Sequence: Synthetic oligonucleotide
  Sense Strand Starting at position 1227 of SEQ ID NO: 316438
caggguguggucugagauu

SEQ ID NO: 415050 - RNA, 19 nt, Artificial Sequence
  Description of Artificial Sequence: Synthetic oligonucleotide
  Antisense Strand to SEQ ID NO: 415049
aaucucagaccacacccug

SEQ ID NO: 415051 - RNA, 19 nt, Artificial Sequence
  Description of Artificial Sequence: Synthetic oligonucleotide
  Sense Strand Starting at position 1227 of SEQ ID NO: 316533
ugagaauggugggcagaga

SEQ ID NO: 415052 - RNA, 19 nt, Artificial Sequence
  Description of Artificial Sequence: Synthetic oligonucleotide
  Antisense Strand to SEQ ID NO: 415051
ucucugcccaccauucuca

SEQ ID NO: 415053 - RNA, 19 nt, Artificial Sequence
  Description of Artificial Sequence: Synthetic oligonucleotide
  Sense Strand Starting at position 1227 of SEQ ID NO: 316627
gagggagacucagggugau

SEQ ID NO: 415054 - RNA, 19 nt, Artificial Sequence
  Description of Artificial Sequence: Synthetic oligonucleotide
  Antisense Strand to SEQ ID NO: 415053
aucacccugagucucccuc

SEQ ID NO: 415055 - RNA, 19 nt, Artificial Sequence
  Description of Artificial Sequence: Synthetic oligonucleotide
  Sense Strand Starting at position 1227 of SEQ ID NO: 316883
cacugagcguacguauauu

SEQ ID NO: 415056 - RNA, 19 nt, Artificial Sequence
  Description of Artificial Sequence: Synthetic oligonucleotide
  Antisense Strand to SEQ ID NO: 415055
aauauacguacgcucagug

SEQ ID NO: 415057 - RNA, 19 nt, Artificial Sequence
  Description of Artificial Sequence: Synthetic oligonucleotide
  Sense Strand Starting at position 1227 of SEQ ID NO: 316976
ugcaguaucuugcggcaga

SEQ ID NO: 415058 - RNA, 19 nt, Artificial Sequence
  Description of Artificial Sequence: Synthetic oligonucleotide
  Antisense Strand to SEQ ID NO: 415057
ucugccgcaagauacugca

SEQ ID NO: 415059 - RNA, 19 nt, Artificial Sequence
  Description of Artificial Sequence: Synthetic oligonucleotide
  Sense Strand Starting at position 1227 of SEQ ID NO: 316977
gcaguaucuugcggcagau

SEQ ID NO: 415060 - RNA, 19 nt, Artificial Sequence
  Description of Artificial Sequence: Synthetic oligonucleotide
  Antisense Strand to SEQ ID NO: 415059
aucugccgcaagauacugc

SEQ ID NO: 415061 - RNA, 19 nt, Artificial Sequence
  Description of Artificial Sequence: Synthetic oligonucleotide
  Sense Strand Starting at position 1227 of SEQ ID NO: 316979
aguaucuugcggcagauca

SEQ ID NO: 415062 - RNA, 19 nt, Artificial Sequence
  Description of Artificial Sequence: Synthetic oligonucleotide
  Antisense Strand to SEQ ID NO: 415061
ugaucugccgcaagauacu

SEQ ID NO: 415063 - RNA, 19 nt, Artificial Sequence
  Description of Artificial Sequence: Synthetic oligonucleotide
  Sense Strand Starting at position 1227 of SEQ ID NO: 319146
ccaggaggucaaugcugua

SEQ ID NO: 415064 - RNA, 19 nt, Artificial Sequence
  Description of Artificial Sequence: Synthetic oligonucleotide
  Antisense Strand to SEQ ID NO: 415063
uacagcauugaccuccugg

SEQ ID NO: 415065 - RNA, 19 nt, Artificial Sequence
  Description of Artificial Sequence: Synthetic oligonucleotide
  Sense Strand Starting at position 1227 of SEQ ID NO: 319152
ggucaaugcuguagugagu

SEQ ID NO: 415066 - RNA, 19 nt, Artificial Sequence
  Description of Artificial Sequence: Synthetic oligonucleotide
  Antisense Strand to SEQ ID NO: 415065
acucacuacagcauugacc

SEQ ID NO: 415067 - RNA, 19 nt, Artificial Sequence
  Description of Artificial Sequence: Synthetic oligonucleotide
  Sense Strand Starting at position 1227 of SEQ ID NO: 319158
ugcuguagugaguggugau

SEQ ID NO: 415068 - RNA, 19 nt, Artificial Sequence
  Description of Artificial Sequence: Synthetic oligonucleotide
  Antisense Strand to SEQ ID NO: 415067
aucaccacucacuacagca

SEQ ID NO: 415069 - RNA, 19 nt, Artificial Sequence
  Description of Artificial Sequence: Synthetic oligonucleotide
  Sense Strand Starting at position 1228 of SEQ ID NO: 315253
ucaguuuggaggcauaguu

SEQ ID NO: 415070 - RNA, 19 nt, Artificial Sequence
  Description of Artificial Sequence: Synthetic oligonucleotide
  Antisense Strand to SEQ ID NO: 415069
aacuaugccuccaaacuga

SEQ ID NO: 415071 - RNA, 19 nt, Artificial Sequence
  Description of Artificial Sequence: Synthetic oligonucleotide
  Sense Strand Starting at position 1228 of SEQ ID NO: 315263
ggcauaguucuacacauuc

SEQ ID NO: 415072 - RNA, 19 nt, Artificial Sequence
  Description of Artificial Sequence: Synthetic oligonucleotide
  Antisense Strand to SEQ ID NO: 415071
gaauguguagaacuaugcc

SEQ ID NO: 415073 - RNA, 19 nt, Artificial Sequence
  Description of Artificial Sequence: Synthetic oligonucleotide
  Sense Strand Starting at position 1228 of SEQ ID NO: 315336
ccaagauuaugucugauua

SEQ ID NO: 415074 - RNA, 19 nt, Artificial Sequence
  Description of Artificial Sequence: Synthetic oligonucleotide
  Antisense Strand to SEQ ID NO: 415073
uaaucagacauaaucuugg

SEQ ID NO: 415075 - RNA, 19 nt, Artificial Sequence
  Description of Artificial Sequence: Synthetic oligonucleotide
  Sense Strand Starting at position 1228 of SEQ ID NO: 315390
uugccucuuggagaauacu

SEQ ID NO: 415076 - RNA, 19 nt, Artificial Sequence
  Description of Artificial Sequence: Synthetic oligonucleotide
  Antisense Strand to SEQ ID NO: 415075
aguauucuccaagaggcaa

SEQ ID NO: 415077 - RNA, 19 nt, Artificial Sequence
  Description of Artificial Sequence: Synthetic oligonucleotide
  Sense Strand Starting at position 1228 of SEQ ID NO: 315411
auauaaucccaggguuauu

SEQ ID NO: 415078 - RNA, 19 nt, Artificial Sequence
  Description of Artificial Sequence: Synthetic oligonucleotide
  Antisense Strand to SEQ ID NO: 415077
aauaacccugggauuauau

SEQ ID NO: 415079 - RNA, 19 nt, Artificial Sequence
  Description of Artificial Sequence: Synthetic oligonucleotide
  Sense Strand Starting at position 1228 of SEQ ID NO: 315566
gaguuacuccagcaagguu

SEQ ID NO: 415080 - RNA, 19 nt, Artificial Sequence
  Description of Artificial Sequence: Synthetic oligonucleotide
  Antisense Strand to SEQ ID NO: 415079
aaccuugcuggaguaacuc

SEQ ID NO: 415081 - RNA, 19 nt, Artificial Sequence
  Description of Artificial Sequence: Synthetic oligonucleotide
  Sense Strand Starting at position 1228 of SEQ ID NO: 315569
uuacuccagcaagguuaua

SEQ ID NO: 415082 - RNA, 19 nt, Artificial Sequence
  Description of Artificial Sequence: Synthetic oligonucleotide
  Antisense Strand to SEQ ID NO: 415081
uauaaccuugcuggaguaa

SEQ ID NO: 415083 - RNA, 19 nt, Artificial Sequence
  Description of Artificial Sequence: Synthetic oligonucleotide
  Sense Strand Starting at position 1228 of SEQ ID NO: 315714
ggaguagucaaguacaucu

SEQ ID NO: 415084 - RNA, 19 nt, Artificial Sequence
  Description of Artificial Sequence: Synthetic oligonucleotide
  Antisense Strand to SEQ ID NO: 415083
agauguacuugacuacucc

SEQ ID NO: 415085 - RNA, 19 nt, Artificial Sequence
  Description of Artificial Sequence: Synthetic oligonucleotide
  Sense Strand Starting at position 1228 of SEQ ID NO: 315800
gcugaacuguuccuuagac

SEQ ID NO: 415086 - RNA, 19 nt, Artificial Sequence
  Description of Artificial Sequence: Synthetic oligonucleotide
  Antisense Strand to SEQ ID NO: 415085
gucuaaggaacaguucagc

SEQ ID NO: 415087 - RNA, 19 nt, Artificial Sequence
  Description of Artificial Sequence: Synthetic oligonucleotide
  Sense Strand Starting at position 1228 of SEQ ID NO: 315801
cugaacuguuccuuagacu

SEQ ID NO: 415088 - RNA, 19 nt, Artificial Sequence
  Description of Artificial Sequence: Synthetic oligonucleotide
  Antisense Strand to SEQ ID NO: 415087
agucuaaggaacaguucag

SEQ ID NO: 415089 - RNA, 19 nt, Artificial Sequence
  Description of Artificial Sequence: Synthetic oligonucleotide
  Sense Strand Starting at position 1228 of SEQ ID NO: 315802
ugaacuguuccuuagacuu

SEQ ID NO: 415090 - RNA, 19 nt, Artificial Sequence
  Description of Artificial Sequence: Synthetic oligonucleotide
  Antisense Strand to SEQ ID NO: 415089
aagucuaaggaacaguuca

SEQ ID NO: 415091 - RNA, 19 nt, Artificial Sequence
  Description of Artificial Sequence: Synthetic oligonucleotide
  Sense Strand Starting at position 1228 of SEQ ID NO: 315850
cugaaagauuaagcucaau

SEQ ID NO: 415092 - RNA, 19 nt, Artificial Sequence
  Description of Artificial Sequence: Synthetic oligonucleotide
  Antisense Strand to SEQ ID NO: 415091
auugagcuuaaucuuucag

SEQ ID NO: 415093 - RNA, 19 nt, Artificial Sequence
  Description of Artificial Sequence: Synthetic oligonucleotide
  Sense Strand Starting at position 1228 of SEQ ID NO: 315917
uccagaaaucuugggucac

SEQ ID NO: 415094 - RNA, 19 nt, Artificial Sequence
  Description of Artificial Sequence: Synthetic oligonucleotide
  Antisense Strand to SEQ ID NO: 415093
gugacccaagauuucugga

SEQ ID NO: 415095 - RNA, 19 nt, Artificial Sequence
  Description of Artificial Sequence: Synthetic oligonucleotide
  Sense Strand Starting at position 1228 of SEQ ID NO: 316151
gguggaucgccuuaaguca

SEQ ID NO: 415096 - RNA, 19 nt, Artificial Sequence
  Description of Artificial Sequence: Synthetic oligonucleotide
  Antisense Strand to SEQ ID NO: 415095
ugacuuaaggcgauccacc

SEQ ID NO: 415097 - RNA, 19 nt, Artificial Sequence
  Description of Artificial Sequence: Synthetic oligonucleotide
  Sense Strand Starting at position 1228 of SEQ ID NO: 316413
gcgaaauguucacugacug

SEQ ID NO: 415098 - RNA, 19 nt, Artificial Sequence
  Description of Artificial Sequence: Synthetic oligonucleotide
  Antisense Strand to SEQ ID NO: 415097
cagucagugaacauuucgc

SEQ ID NO: 415099 - RNA, 19 nt, Artificial Sequence
  Description of Artificial Sequence: Synthetic oligonucleotide
  Sense Strand Starting at position 1228 of SEQ ID NO: 316901
uguccagaacccugucaau

SEQ ID NO: 415100 - RNA, 19 nt, Artificial Sequence
  Description of Artificial Sequence: Synthetic oligonucleotide
  Antisense Strand to SEQ ID NO: 415099
auugacaggguucuggaca

SEQ ID NO: 415101 - RNA, 19 nt, Artificial Sequence
  Description of Artificial Sequence: Synthetic oligonucleotide
  Sense Strand Starting at position 1228 of SEQ ID NO: 316921
gacuucugggccugggaca

SEQ ID NO: 415102 - RNA, 19 nt, Artificial Sequence
  Description of Artificial Sequence: Synthetic oligonucleotide
  Antisense Strand to SEQ ID NO: 415101
ugucccaggcccagaaguc

SEQ ID NO: 415103 - RNA, 19 nt, Artificial Sequence
  Description of Artificial Sequence: Synthetic oligonucleotide
  Sense Strand Starting at position 1228 of SEQ ID NO: 317306
ccguuaguuaccgaggaac

SEQ ID NO: 415104 - RNA, 19 nt, Artificial Sequence
  Description of Artificial Sequence: Synthetic oligonucleotide
  Antisense Strand to SEQ ID NO: 415103
guuccucgguaacuaacgg

SEQ ID NO: 415105 - RNA, 19 nt, Artificial Sequence
  Description of Artificial Sequence: Synthetic oligonucleotide
  Sense Strand Starting at position 1228 of SEQ ID NO: 317325
gcggaaggguuucuauuga

SEQ ID NO: 415106 - RNA, 19 nt, Artificial Sequence
  Description of Artificial Sequence: Synthetic oligonucleotide
  Antisense Strand to SEQ ID NO: 415105
ucaauagaaacccuuccgc

SEQ ID NO: 415107 - RNA, 19 nt, Artificial Sequence
  Description of Artificial Sequence: Synthetic oligonucleotide
  Sense Strand Starting at position 1228 of SEQ ID NO: 317342
gaugucgauuucgugcuua

SEQ ID NO: 415108 - RNA, 19 nt, Artificial Sequence
  Description of Artificial Sequence: Synthetic oligonucleotide
  Antisense Strand to SEQ ID NO: 415107
uaagcacgaaaucgacauc

SEQ ID NO: 415109 - RNA, 19 nt, Artificial Sequence
  Description of Artificial Sequence: Synthetic oligonucleotide
  Sense Strand Starting at position 1228 of SEQ ID NO: 317347
cgauuucgugcuuacagca

SEQ ID NO: 415110 - RNA, 19 nt, Artificial Sequence
  Description of Artificial Sequence: Synthetic oligonucleotide
  Antisense Strand to SEQ ID NO: 415109
ugcuguaagcacgaaaucg

SEQ ID NO: 415111 - RNA, 19 nt, Artificial Sequence
  Description of Artificial Sequence: Synthetic oligonucleotide
  Sense Strand Starting at position 1228 of SEQ ID NO: 317380
ggaagcuauggcuaccgau

SEQ ID NO: 415112 - RNA, 19 nt, Artificial Sequence
  Description of Artificial Sequence: Synthetic oligonucleotide
  Antisense Strand to SEQ ID NO: 415111
aucgguagccauagcuucc

SEQ ID NO: 415113 - RNA, 19 nt, Artificial Sequence
  Description of Artificial Sequence: Synthetic oligonucleotide
  Sense Strand Starting at position 1228 of SEQ ID NO: 317479
gcaccuugccagcaauaau

SEQ ID NO: 415114 - RNA, 19 nt, Artificial Sequence
  Description of Artificial Sequence: Synthetic oligonucleotide
  Antisense Strand to SEQ ID NO: 415113
auuauugcuggcaaggugc

SEQ ID NO: 415115 - RNA, 19 nt, Artificial Sequence
  Description of Artificial Sequence: Synthetic oligonucleotide
  Sense Strand Starting at position 1228 of SEQ ID NO: 317622
guaugaacacuguguccaa

SEQ ID NO: 415116 - RNA, 19 nt, Artificial Sequence
  Description of Artificial Sequence: Synthetic oligonucleotide
  Antisense Strand to SEQ ID NO: 415115
uuggacacaguguucauac

SEQ ID NO: 415117 - RNA, 19 nt, Artificial Sequence
  Description of Artificial Sequence: Synthetic oligonucleotide
  Sense Strand Starting at position 1228 of SEQ ID NO: 318203
uugguuugggcccaaguua

SEQ ID NO: 415118 - RNA, 19 nt, Artificial Sequence
  Description of Artificial Sequence: Synthetic oligonucleotide
  Antisense Strand to SEQ ID NO: 415117
uaacuugggcccaaaccaa

SEQ ID NO: 415119 - RNA, 19 nt, Artificial Sequence
  Description of Artificial Sequence: Synthetic oligonucleotide
  Sense Strand Starting at position 1228 of SEQ ID NO: 318306
ggaauagucagccagagug

SEQ ID NO: 415120 - RNA, 19 nt, Artificial Sequence
  Description of Artificial Sequence: Synthetic oligonucleotide
  Antisense Strand to SEQ ID NO: 415119
cacucuggcugacuauucc

SEQ ID NO: 415121 - RNA, 19 nt, Artificial Sequence
  Description of Artificial Sequence: Synthetic oligonucleotide
  Sense Strand Starting at position 1228 of SEQ ID NO: 318314
cagccagaguggucaccaa

SEQ ID NO: 415122 - RNA, 19 nt, Artificial Sequence
  Description of Artificial Sequence: Synthetic oligonucleotide
  Antisense Strand to SEQ ID NO: 415121
uuggugaccacucuggcug

SEQ ID NO: 415123 - RNA, 19 nt, Artificial Sequence
  Description of Artificial Sequence: Synthetic oligonucleotide
  Sense Strand Starting at position 1228 of SEQ ID NO: 318394
ugcugugauuauuuaccuu

SEQ ID NO: 415124 - RNA, 19 nt, Artificial Sequence
  Description of Artificial Sequence: Synthetic oligonucleotide
  Antisense Strand to SEQ ID NO: 415123
aagguaaauaaucacagca

SEQ ID NO: 415125 - RNA, 19 nt, Artificial Sequence
  Description of Artificial Sequence: Synthetic oligonucleotide
  Sense Strand Starting at position 1228 of SEQ ID NO: 318578
uuuagucauguacacaagu

SEQ ID NO: 415126 - RNA, 19 nt, Artificial Sequence
  Description of Artificial Sequence: Synthetic oligonucleotide
  Antisense Strand to SEQ ID NO: 415125
acuuguguacaugacuaaa

SEQ ID NO: 415127 - RNA, 19 nt, Artificial Sequence
  Description of Artificial Sequence: Synthetic oligonucleotide
  Sense Strand Starting at position 1228 of SEQ ID NO: 318628
cuaaguagucugcagagga

SEQ ID NO: 415128 - RNA, 19 nt, Artificial Sequence
  Description of Artificial Sequence: Synthetic oligonucleotide
  Antisense Strand to SEQ ID NO: 415127
uccucugcagacuacuuag

SEQ ID NO: 415129 - RNA, 19 nt, Artificial Sequence
  Description of Artificial Sequence: Synthetic oligonucleotide
  Sense Strand Starting at position 1228 of SEQ ID NO: 318632
guagucugcagaggagauu

SEQ ID NO: 415130 - RNA, 19 nt, Artificial Sequence
  Description of Artificial Sequence: Synthetic oligonucleotide
  Antisense Strand to SEQ ID NO: 415129
aaucuccucugcagacuac

SEQ ID NO: 415131 - RNA, 19 nt, Artificial Sequence
  Description of Artificial Sequence: Synthetic oligonucleotide
  Sense Strand Starting at position 1228 of SEQ ID NO: 318655
gcagauucggguugaaauu

SEQ ID NO: 415132 - RNA, 19 nt, Artificial Sequence
  Description of Artificial Sequence: Synthetic oligonucleotide
  Antisense Strand to SEQ ID NO: 415131
aauuucaacccgaaucugc

SEQ ID NO: 415133 - RNA, 19 nt, Artificial Sequence
  Description of Artificial Sequence: Synthetic oligonucleotide
  Sense Strand Starting at position 1228 of SEQ ID NO: 318664
gguugaaauuagcuguaca

SEQ ID NO: 415134 - RNA, 19 nt, Artificial Sequence
  Description of Artificial Sequence: Synthetic oligonucleotide
  Antisense Strand to SEQ ID NO: 415133
uguacagcuaauuucaacc

SEQ ID NO: 415135 - RNA, 19 nt, Artificial Sequence
  Description of Artificial Sequence: Synthetic oligonucleotide
  Sense Strand Starting at position 1228 of SEQ ID NO: 318665
guugaaauuagcuguacag

SEQ ID NO: 415136 - RNA, 19 nt, Artificial Sequence
  Description of Artificial Sequence: Synthetic oligonucleotide
  Antisense Strand to SEQ ID NO: 415135
cuguacagcuaauuucaac

SEQ ID NO: 415137 - RNA, 19 nt, Artificial Sequence
  Description of Artificial Sequence: Synthetic oligonucleotide
  Sense Strand Starting at position 1228 of SEQ ID NO: 318667
ugaaauuagcuguacaguu

SEQ ID NO: 415138 - RNA, 19 nt, Artificial Sequence
  Description of Artificial Sequence: Synthetic oligonucleotide
  Antisense Strand to SEQ ID NO: 415137
aacuguacagcuaauuuca

SEQ ID NO: 415139 - RNA, 19 nt, Artificial Sequence
  Description of Artificial Sequence: Synthetic oligonucleotide
  Sense Strand Starting at position 1228 of SEQ ID NO: 318708
uacagcuuuggugaaauga

SEQ ID NO: 415140 - RNA, 19 nt, Artificial Sequence
  Description of Artificial Sequence: Synthetic oligonucleotide
  Antisense Strand to SEQ ID NO: 415139
ucauuucaccaaagcugua

SEQ ID NO: 415141 - RNA, 19 nt, Artificial Sequence
  Description of Artificial Sequence: Synthetic oligonucleotide
  Sense Strand Starting at position 1228 of SEQ ID NO: 318780
uuacaaugcuacuuugaga

SEQ ID NO: 415142 - RNA, 19 nt, Artificial Sequence
  Description of Artificial Sequence: Synthetic oligonucleotide
  Antisense Strand to SEQ ID NO: 415141
ucucaaaguagcauuguaa

SEQ ID NO: 415143 - RNA, 19 nt, Artificial Sequence
  Description of Artificial Sequence: Synthetic oligonucleotide
  Sense Strand Starting at position 1228 of SEQ ID NO: 318873
ucagguagagcuuauaaau

SEQ ID NO: 415144 - RNA, 19 nt, Artificial Sequence
  Description of Artificial Sequence: Synthetic oligonucleotide
  Antisense Strand to SEQ ID NO: 415143
auuuauaagcucuaccuga

SEQ ID NO: 415145 - RNA, 19 nt, Artificial Sequence
  Description of Artificial Sequence: Synthetic oligonucleotide
  Sense Strand Starting at position 1228 of SEQ ID NO: 318887
uaaauuuauuccguauggu

SEQ ID NO: 415146 - RNA, 19 nt, Artificial Sequence
  Description of Artificial Sequence: Synthetic oligonucleotide
  Antisense Strand to SEQ ID NO: 415145
accauacggaauaaauuua

SEQ ID NO: 415147 - RNA, 19 nt, Artificial Sequence
  Description of Artificial Sequence: Synthetic oligonucleotide
  Sense Strand Starting at position 1228 of SEQ ID NO: 318925
gucaauauguagcuagaaa

SEQ ID NO: 415148 - RNA, 19 nt, Artificial Sequence
  Description of Artificial Sequence: Synthetic oligonucleotide
  Antisense Strand to SEQ ID NO: 415147
uuucuagcuacauauugac

SEQ ID NO: 415149 - RNA, 19 nt, Artificial Sequence
  Description of Artificial Sequence: Synthetic oligonucleotide
  Sense Strand Starting at position 1229 of SEQ ID NO: 315252
ggccuacucuuacugauag

SEQ ID NO: 415150 - RNA, 19 nt, Artificial Sequence
  Description of Artificial Sequence: Synthetic oligonucleotide
  Antisense Strand to SEQ ID NO: 415149
cuaucaguaagaguaggcc

SEQ ID NO: 415151 - RNA, 19 nt, Artificial Sequence
  Description of Artificial Sequence: Synthetic oligonucleotide
  Sense Strand Starting at position 1229 of SEQ ID NO: 315457
uggugcuuccgugagggaa

SEQ ID NO: 415152 - RNA, 19 nt, Artificial Sequence
  Description of Artificial Sequence: Synthetic oligonucleotide
  Antisense Strand to SEQ ID NO: 415151
uucccucacggaagcacca

SEQ ID NO: 415153 - RNA, 19 nt, Artificial Sequence
  Description of Artificial Sequence: Synthetic oligonucleotide
  Sense Strand Starting at position 1229 of SEQ ID NO: 315574
ggagaagaguccuuggcug

SEQ ID NO: 415154 - RNA, 19 nt, Artificial Sequence
  Description of Artificial Sequence: Synthetic oligonucleotide
  Antisense Strand to SEQ ID NO: 415153
cagccaaggacucuucucc

SEQ ID NO: 415155 - RNA, 19 nt, Artificial Sequence
  Description of Artificial Sequence: Synthetic oligonucleotide
  Sense Strand Starting at position 1229 of SEQ ID NO: 315576
agaagaguccuuggcugag

SEQ ID NO: 415156 - RNA, 19 nt, Artificial Sequence
  Description of Artificial Sequence: Synthetic oligonucleotide
  Antisense Strand to SEQ ID NO: 415155
cucagccaaggacucuucu

SEQ ID NO: 415157 - RNA, 19 nt, Artificial Sequence
  Description of Artificial Sequence: Synthetic oligonucleotide
  Sense Strand Starting at position 1229 of SEQ ID NO: 315578
aagaguccuuggcugagaa

SEQ ID NO: 415158 - RNA, 19 nt, Artificial Sequence
  Description of Artificial Sequence: Synthetic oligonucleotide
  Antisense Strand to SEQ ID NO: 415157
uucucagccaaggacucuu

SEQ ID NO: 415159 - RNA, 19 nt, Artificial Sequence
  Description of Artificial Sequence: Synthetic oligonucleotide
  Sense Strand Starting at position 1229 of SEQ ID NO: 315579
agaguccuuggcugagaac

SEQ ID NO: 415160 - RNA, 19 nt, Artificial Sequence
  Description of Artificial Sequence: Synthetic oligonucleotide
  Antisense Strand to SEQ ID NO: 415159
guucucagccaaggacucu

SEQ ID NO: 415161 - RNA, 19 nt, Artificial Sequence
  Description of Artificial Sequence: Synthetic oligonucleotide
  Sense Strand Starting at position 1229 of SEQ ID NO: 315580
gaguccuuggcugagaacu

SEQ ID NO: 415162 - RNA, 19 nt, Artificial Sequence
  Description of Artificial Sequence: Synthetic oligonucleotide
  Antisense Strand to SEQ ID NO: 415161
aguucucagccaaggacuc

SEQ ID NO: 415163 - RNA, 19 nt, Artificial Sequence
  Description of Artificial Sequence: Synthetic oligonucleotide
  Sense Strand Starting at position 1229 of SEQ ID NO: 315586
uuggcugagaacugacuua

SEQ ID NO: 415164 - RNA, 19 nt, Artificial Sequence
  Description of Artificial Sequence: Synthetic oligonucleotide
  Antisense Strand to SEQ ID NO: 415163
uaagucaguucucagccaa

SEQ ID NO: 415165 - RNA, 19 nt, Artificial Sequence
  Description of Artificial Sequence: Synthetic oligonucleotide
  Sense Strand Starting at position 1229 of SEQ ID NO: 316301
caugacuugucccugagca

SEQ ID NO: 415166 - RNA, 19 nt, Artificial Sequence
  Description of Artificial Sequence: Synthetic oligonucleotide
  Antisense Strand to SEQ ID NO: 415165
ugcucagggacaagucaug

SEQ ID NO: 415167 - RNA, 19 nt, Artificial Sequence
  Description of Artificial Sequence: Synthetic oligonucleotide
  Sense Strand Starting at position 1229 of SEQ ID NO: 316302
augacuugucccugagcag

SEQ ID NO: 415168 - RNA, 19 nt, Artificial Sequence
  Description of Artificial Sequence: Synthetic oligonucleotide
  Antisense Strand to SEQ ID NO: 415167
cugcucagggacaagucau

SEQ ID NO: 415169 - RNA, 19 nt, Artificial Sequence
  Description of Artificial Sequence: Synthetic oligonucleotide
  Sense Strand Starting at position 1229 of SEQ ID NO: 316303
ugacuugucccugagcaga

SEQ ID NO: 415170 - RNA, 19 nt, Artificial Sequence
  Description of Artificial Sequence: Synthetic oligonucleotide
  Antisense Strand to SEQ ID NO: 415169
ucugcucagggacaaguca

SEQ ID NO: 415171 - RNA, 19 nt, Artificial Sequence
  Description of Artificial Sequence: Synthetic oligonucleotide
  Sense Strand Starting at position 1229 of SEQ ID NO: 316305
acuugucccugagcagaaa

SEQ ID NO: 415172 - RNA, 19 nt, Artificial Sequence
  Description of Artificial Sequence: Synthetic oligonucleotide
  Antisense Strand to SEQ ID NO: 415171
uuucugcucagggacaagu

SEQ ID NO: 415173 - RNA, 19 nt, Artificial Sequence
  Description of Artificial Sequence: Synthetic oligonucleotide
  Sense Strand Starting at position 1229 of SEQ ID NO: 316338
cgguuaucaccaggaccaa

SEQ ID NO: 415174 - RNA, 19 nt, Artificial Sequence
  Description of Artificial Sequence: Synthetic oligonucleotide
  Antisense Strand to SEQ ID NO: 415173
uugguccuggugauaaccg

SEQ ID NO: 415175 - RNA, 19 nt, Artificial Sequence
  Description of Artificial Sequence: Synthetic oligonucleotide
  Sense Strand Starting at position 1229 of SEQ ID NO: 316401
gaccuagugcuccacauag

SEQ ID NO: 415176 - RNA, 19 nt, Artificial Sequence
  Description of Artificial Sequence: Synthetic oligonucleotide
  Antisense Strand to SEQ ID NO: 415175
cuauguggagcacuagguc

SEQ ID NO: 415177 - RNA, 19 nt, Artificial Sequence
  Description of Artificial Sequence: Synthetic oligonucleotide
  Sense Strand Starting at position 1229 of SEQ ID NO: 316547
ggcuguugccuccagaaga

SEQ ID NO: 415178 - RNA, 19 nt, Artificial Sequence
  Description of Artificial Sequence: Synthetic oligonucleotide
  Antisense Strand to SEQ ID NO: 415177
ucuucuggaggcaacagcc

SEQ ID NO: 415179 - RNA, 19 nt, Artificial Sequence
  Description of Artificial Sequence: Synthetic oligonucleotide
  Sense Strand Starting at position 1229 of SEQ ID NO: 316583
guuccaucagacuagaggu

SEQ ID NO: 415180 - RNA, 19 nt, Artificial Sequence
  Description of Artificial Sequence: Synthetic oligonucleotide
  Antisense Strand to SEQ ID NO: 415179
accucuagucugauggaac

SEQ ID NO: 415181 - RNA, 19 nt, Artificial Sequence
  Description of Artificial Sequence: Synthetic oligonucleotide
  Sense Strand Starting at position 1229 of SEQ ID NO: 316744
ucagacuaauguuccagaa

SEQ ID NO: 415182 - RNA, 19 nt, Artificial Sequence
  Description of Artificial Sequence: Synthetic oligonucleotide
  Antisense Strand to SEQ ID NO: 415181
uucuggaacauuagucuga

SEQ ID NO: 415183 - RNA, 19 nt, Artificial Sequence
  Description of Artificial Sequence: Synthetic oligonucleotide
  Sense Strand Starting at position 1229 of SEQ ID NO: 316757
ccagaaaucggguacugug

SEQ ID NO: 415184 - RNA, 19 nt, Artificial Sequence
  Description of Artificial Sequence: Synthetic oligonucleotide
  Antisense Strand to SEQ ID NO: 415183
cacaguacccgauuucugg

SEQ ID NO: 415185 - RNA, 19 nt, Artificial Sequence
  Description of Artificial Sequence: Synthetic oligonucleotide
  Sense Strand Starting at position 1229 of SEQ ID NO: 316867
uggaucucucagggcaaga

SEQ ID NO: 415186 - RNA, 19 nt, Artificial Sequence
  Description of Artificial Sequence: Synthetic oligonucleotide
  Antisense Strand to SEQ ID NO: 415185
ucuugcccugagagaucca

SEQ ID NO: 415187 - RNA, 19 nt, Artificial Sequence
  Description of Artificial Sequence: Synthetic oligonucleotide
  Sense Strand Starting at position 1229 of SEQ ID NO: 316869
gaucucucagggcaagagu

SEQ ID NO: 415188 - RNA, 19 nt, Artificial Sequence
  Description of Artificial Sequence: Synthetic oligonucleotide
  Antisense Strand to SEQ ID NO: 415187
acucuugcccugagagauc

SEQ ID NO: 415189 - RNA, 19 nt, Artificial Sequence
  Description of Artificial Sequence: Synthetic oligonucleotide
  Sense Strand Starting at position 1229 of SEQ ID NO: 317374
gggccaggucccuaaucaa

SEQ ID NO: 415190 - RNA, 19 nt, Artificial Sequence
  Description of Artificial Sequence: Synthetic oligonucleotide
  Antisense Strand to SEQ ID NO: 415189
uugauuagggaccuggccc

SEQ ID NO: 415191 - RNA, 19 nt, Artificial Sequence
  Description of Artificial Sequence: Synthetic oligonucleotide
  Sense Strand Starting at position 1229 of SEQ ID NO: 317456
ggaaucugcugaucuagga

SEQ ID NO: 415192 - RNA, 19 nt, Artificial Sequence
  Description of Artificial Sequence: Synthetic oligonucleotide
  Antisense Strand to SEQ ID NO: 415191
uccuagaucagcagauucc

SEQ ID NO: 415193 - RNA, 19 nt, Artificial Sequence
  Description of Artificial Sequence: Synthetic oligonucleotide
  Sense Strand Starting at position 1229 of SEQ ID NO: 317571
cagggauguccugggcuuu

SEQ ID NO: 415194 - RNA, 19 nt, Artificial Sequence
  Description of Artificial Sequence: Synthetic oligonucleotide
  Antisense Strand to SEQ ID NO: 415193
aaagcccaggacaucccug

SEQ ID NO: 415195 - RNA, 19 nt, Artificial Sequence
  Description of Artificial Sequence: Synthetic oligonucleotide
  Sense Strand Starting at position 1229 of SEQ ID NO: 317679
ggcaguguuauggaggguu

SEQ ID NO: 415196 - RNA, 19 nt, Artificial Sequence
  Description of Artificial Sequence: Synthetic oligonucleotide
  Antisense Strand to SEQ ID NO: 415195
aacccuccauaacacugcc

SEQ ID NO: 415197 - RNA, 19 nt, Artificial Sequence
  Description of Artificial Sequence: Synthetic oligonucleotide
  Sense Strand Starting at position 1229 of SEQ ID NO: 317682
aguguuauggaggguucca

SEQ ID NO: 415198 - RNA, 19 nt, Artificial Sequence
  Description of Artificial Sequence: Synthetic oligonucleotide
  Antisense Strand to SEQ ID NO: 415197
uggaacccuccauaacacu

SEQ ID NO: 415199 - RNA, 19 nt, Artificial Sequence
  Description of Artificial Sequence: Synthetic oligonucleotide
  Sense Strand Starting at position 1229 of SEQ ID NO: 317888
cauguugagccuugacaac

SEQ ID NO: 415200 - RNA, 19 nt, Artificial Sequence
  Description of Artificial Sequence: Synthetic oligonucleotide
  Antisense Strand to SEQ ID NO: 415199
guugucaaggcucaacaug

SEQ ID NO: 415201 - RNA, 19 nt, Artificial Sequence
  Description of Artificial Sequence: Synthetic oligonucleotide
  Sense Strand Starting at position 1229 of SEQ ID NO: 317916
gagggagguucugaggaga

SEQ ID NO: 415202 - RNA, 19 nt, Artificial Sequence
  Description of Artificial Sequence: Synthetic oligonucleotide
  Antisense Strand to SEQ ID NO: 415201
ucuccucagaaccucccuc

SEQ ID NO: 415203 - RNA, 19 nt, Artificial Sequence
  Description of Artificial Sequence: Synthetic oligonucleotide
  Sense Strand Starting at position 1229 of SEQ ID NO: 318195
gagguucuggccuggacau

SEQ ID NO: 415204 - RNA, 19 nt, Artificial Sequence
  Description of Artificial Sequence: Synthetic oligonucleotide
  Antisense Strand to SEQ ID NO: 415203
auguccaggccagaaccuc

SEQ ID NO: 415205 - RNA, 19 nt, Artificial Sequence
  Description of Artificial Sequence: Synthetic oligonucleotide
  Sense Strand Starting at position 1229 of SEQ ID NO: 318358
cgaggaaacgcucaacagu

SEQ ID NO: 415206 - RNA, 19 nt, Artificial Sequence
  Description of Artificial Sequence: Synthetic oligonucleotide
  Antisense Strand to SEQ ID NO: 415205
acuguugagcguuuccucg

SEQ ID NO: 415207 - RNA, 19 nt, Artificial Sequence
  Description of Artificial Sequence: Synthetic oligonucleotide
  Sense Strand Starting at position 1229 of SEQ ID NO: 318608
ugagccugucaguaaugca

SEQ ID NO: 415208 - RNA, 19 nt, Artificial Sequence
  Description of Artificial Sequence: Synthetic oligonucleotide
  Antisense Strand to SEQ ID NO: 415207
ugcauuacugacaggcuca

SEQ ID NO: 415209 - RNA, 19 nt, Artificial Sequence
  Description of Artificial Sequence: Synthetic oligonucleotide
  Sense Strand Starting at position 1229 of SEQ ID NO: 318616
ucaguaaugcacugagcaa

SEQ ID NO: 415210 - RNA, 19 nt, Artificial Sequence
  Description of Artificial Sequence: Synthetic oligonucleotide
  Antisense Strand to SEQ ID NO: 415209
uugcucagugcauuacuga

SEQ ID NO: 415211 - RNA, 19 nt, Artificial Sequence
  Description of Artificial Sequence: Synthetic oligonucleotide
  Sense Strand Starting at position 1229 of SEQ ID NO: 318680
gugagacucccaugauuga

SEQ ID NO: 415212 - RNA, 19 nt, Artificial Sequence
  Description of Artificial Sequence: Synthetic oligonucleotide
  Antisense Strand to SEQ ID NO: 415211
ucaaucaugggagucucac

SEQ ID NO: 415213 - RNA, 19 nt, Artificial Sequence
  Description of Artificial Sequence: Synthetic oligonucleotide
  Sense Strand Starting at position 1229 of SEQ ID NO: 318689
ccaugauugaugugaggau

SEQ ID NO: 415214 - RNA, 19 nt, Artificial Sequence
  Description of Artificial Sequence: Synthetic oligonucleotide
  Antisense Strand to SEQ ID NO: 415213
auccucacaucaaucaugg

SEQ ID NO: 415215 - RNA, 19 nt, Artificial Sequence
  Description of Artificial Sequence: Synthetic oligonucleotide
  Sense Strand Starting at position 1229 of SEQ ID NO: 318701
ugaggaugauaugaauuaa

SEQ ID NO: 415216 - RNA, 19 nt, Artificial Sequence
  Description of Artificial Sequence: Synthetic oligonucleotide
  Antisense Strand to SEQ ID NO: 415215
uuaauucauaucauccuca

SEQ ID NO: 415217 - RNA, 19 nt, Artificial Sequence
  Description of Artificial Sequence: Synthetic oligonucleotide
  Sense Strand Starting at position 1229 of SEQ ID NO: 318755
ggcagugcucugcugcuua

SEQ ID NO: 415218 - RNA, 19 nt, Artificial Sequence
  Description of Artificial Sequence: Synthetic oligonucleotide
  Antisense Strand to SEQ ID NO: 415217
uaagcagcagagcacugcc

SEQ ID NO: 415219 - RNA, 19 nt, Artificial Sequence
  Description of Artificial Sequence: Synthetic oligonucleotide
  Sense Strand Starting at position 1229 of SEQ ID NO: 318757
cagugcucugcugcuuaca

SEQ ID NO: 415220 - RNA, 19 nt, Artificial Sequence
  Description of Artificial Sequence: Synthetic oligonucleotide
  Antisense Strand to SEQ ID NO: 415219
uguaagcagcagagcacug

SEQ ID NO: 415221 - RNA, 19 nt, Artificial Sequence
  Description of Artificial Sequence: Synthetic oligonucleotide
  Sense Strand Starting at position 1229 of SEQ ID NO: 318980
guacacuauuucuaguaua

SEQ ID NO: 415222 - RNA, 19 nt, Artificial Sequence
  Description of Artificial Sequence: Synthetic oligonucleotide
  Antisense Strand to SEQ ID NO: 415221
uauacuagaaauaguguac

SEQ ID NO: 415223 - RNA, 19 nt, Artificial Sequence
  Description of Artificial Sequence: Synthetic oligonucleotide
  Sense Strand Starting at position 1229 of SEQ ID NO: 319139
aguuguaagcuuuaauaac

SEQ ID NO: 415224 - RNA, 19 nt, Artificial Sequence
  Description of Artificial Sequence: Synthetic oligonucleotide
  Antisense Strand to SEQ ID NO: 415223
guuauuaaagcuuacaacu

SEQ ID NO: 415225 - RNA, 19 nt, Artificial Sequence
  Description of Artificial Sequence: Synthetic oligonucleotide
  Sense Strand Starting at position 1229 of SEQ ID NO: 319164
aguauaaagcuacaaaugu

SEQ ID NO: 415226 - RNA, 19 nt, Artificial Sequence
  Description of Artificial Sequence: Synthetic oligonucleotide
  Antisense Strand to SEQ ID NO: 415225
acauuuguagcuuuauacu

SEQ ID NO: 415227 - RNA, 19 nt, Artificial Sequence
  Description of Artificial Sequence: Synthetic oligonucleotide
  Sense Strand Starting at position 1229 of SEQ ID NO: 319172
gcuacaaauguaugagaaa

SEQ ID NO: 415228 - RNA, 19 nt, Artificial Sequence
  Description of Artificial Sequence: Synthetic oligonucleotide
  Antisense Strand to SEQ ID NO: 415227
uuucucauacauuuguagc

SEQ ID NO: 415229 - RNA, 19 nt, Artificial Sequence
  Description of Artificial Sequence: Synthetic oligonucleotide
  Sense Strand Starting at position 1230 of SEQ ID NO: 315304
uguuuauuaacguguaaug

SEQ ID NO: 415230 - RNA, 19 nt, Artificial Sequence
  Description of Artificial Sequence: Synthetic oligonucleotide
  Antisense Strand to SEQ ID NO: 415229
cauuacacguuaauaaaca

SEQ ID NO: 415231 - RNA, 19 nt, Artificial Sequence
  Description of Artificial Sequence: Synthetic oligonucleotide
  Sense Strand Starting at position 1230 of SEQ ID NO: 315314
cguguaaugauguaguauu

SEQ ID NO: 415232 - RNA, 19 nt, Artificial Sequence
  Description of Artificial Sequence: Synthetic oligonucleotide
  Antisense Strand to SEQ ID NO: 415231
aauacuacaucauuacacg

SEQ ID NO: 415233 - RNA, 19 nt, Artificial Sequence
  Description of Artificial Sequence: Synthetic oligonucleotide
  Sense Strand Starting at position 1230 of SEQ ID NO: 315873
uggcgugaacccuaaagaa

SEQ ID NO: 415234 - RNA, 19 nt, Artificial Sequence
  Description of Artificial Sequence: Synthetic oligonucleotide
  Antisense Strand to SEQ ID NO: 415233
uucuuuaggguucacgcca

SEQ ID NO: 415235 - RNA, 19 nt, Artificial Sequence
  Description of Artificial Sequence: Synthetic oligonucleotide
  Sense Strand Starting at position 1230 of SEQ ID NO: 316159
cccagauacugguuaagau

SEQ ID NO: 415236 - RNA, 19 nt, Artificial Sequence
  Description of Artificial Sequence: Synthetic oligonucleotide
  Antisense Strand to SEQ ID NO: 415235
aucuuaaccaguaucuggg

SEQ ID NO: 415237 - RNA, 19 nt, Artificial Sequence
  Description of Artificial Sequence: Synthetic oligonucleotide
  Sense Strand Starting at position 1230 of SEQ ID NO: 316202
cugccacuguucuccugaa

SEQ ID NO: 415238 - RNA, 19 nt, Artificial Sequence
  Description of Artificial Sequence: Synthetic oligonucleotide
  Antisense Strand to SEQ ID NO: 415237
uucaggagaacaguggcag

SEQ ID NO: 415239 - RNA, 19 nt, Artificial Sequence
  Description of Artificial Sequence: Synthetic oligonucleotide
  Sense Strand Starting at position 1230 of SEQ ID NO: 316359
agcaaauaaucugugcuga

SEQ ID NO: 415240 - RNA, 19 nt, Artificial Sequence
  Description of Artificial Sequence: Synthetic oligonucleotide
  Antisense Strand to SEQ ID NO: 415239
ucagcacagauuauuugcu

SEQ ID NO: 415241 - RNA, 19 nt, Artificial Sequence
  Description of Artificial Sequence: Synthetic oligonucleotide
  Sense Strand Starting at position 1230 of SEQ ID NO: 316360
gcaaauaaucugugcugac

SEQ ID NO: 415242 - RNA, 19 nt, Artificial Sequence
  Description of Artificial Sequence: Synthetic oligonucleotide
  Antisense Strand to SEQ ID NO: 415241
gucagcacagauuauuugc

SEQ ID NO: 415243 - RNA, 19 nt, Artificial Sequence
  Description of Artificial Sequence: Synthetic oligonucleotide
  Sense Strand Starting at position 1230 of SEQ ID NO: 316438
cuugguuguagauaaaugu

SEQ ID NO: 415244 - RNA, 19 nt, Artificial Sequence
  Description of Artificial Sequence: Synthetic oligonucleotide
  Antisense Strand to SEQ ID NO: 415243
acauuuaucuacaaccaag

SEQ ID NO: 415245 - RNA, 19 nt, Artificial Sequence
  Description of Artificial Sequence: Synthetic oligonucleotide
  Sense Strand Starting at position 1230 of SEQ ID NO: 316493
guuauuaaaggguguaacu

SEQ ID NO: 415246 - RNA, 19 nt, Artificial Sequence
  Description of Artificial Sequence: Synthetic oligonucleotide
  Antisense Strand to SEQ ID NO: 415245
aguuacacccuuuaauaac

SEQ ID NO: 415247 - RNA, 19 nt, Artificial Sequence
  Description of Artificial Sequence: Synthetic oligonucleotide
  Sense Strand Starting at position 1230 of SEQ ID NO: 316513
acaagucaacggugucaaa

SEQ ID NO: 415248 - RNA, 19 nt, Artificial Sequence
  Description of Artificial Sequence: Synthetic oligonucleotide
  Antisense Strand to SEQ ID NO: 415247
uuugacaccguugacuugu

SEQ ID NO: 415249 - RNA, 19 nt, Artificial Sequence
  Description of Artificial Sequence: Synthetic oligonucleotide
  Sense Strand Starting at position 1230 of SEQ ID NO: 316722
gagugaagcuguccuuccu

SEQ ID NO: 415250 - RNA, 19 nt, Artificial Sequence
  Description of Artificial Sequence: Synthetic oligonucleotide
  Antisense Strand to SEQ ID NO: 415249
aggaaggacagcuucacuc

SEQ ID NO: 415251 - RNA, 19 nt, Artificial Sequence
  Description of Artificial Sequence: Synthetic oligonucleotide
  Sense Strand Starting at position 1230 of SEQ ID NO: 317156
gucucaacaccucguuaca

SEQ ID NO: 415252 - RNA, 19 nt, Artificial Sequence
  Description of Artificial Sequence: Synthetic oligonucleotide
  Antisense Strand to SEQ ID NO: 415251
uguaacgagguguugagac

SEQ ID NO: 415253 - RNA, 19 nt, Artificial Sequence
  Description of Artificial Sequence: Synthetic oligonucleotide
  Sense Strand Starting at position 1230 of SEQ ID NO: 317158
cucaacaccucguuacaga

SEQ ID NO: 415254 - RNA, 19 nt, Artificial Sequence
  Description of Artificial Sequence: Synthetic oligonucleotide
  Antisense Strand to SEQ ID NO: 415253
ucuguaacgagguguugag

SEQ ID NO: 415255 - RNA, 19 nt, Artificial Sequence
  Description of Artificial Sequence: Synthetic oligonucleotide
  Sense Strand Starting at position 1230 of SEQ ID NO: 317159
ucaacaccucguuacagau

SEQ ID NO: 415256 - RNA, 19 nt, Artificial Sequence
  Description of Artificial Sequence: Synthetic oligonucleotide
  Antisense Strand to SEQ ID NO: 415255
aucuguaacgagguguuga

SEQ ID NO: 415257 - RNA, 19 nt, Artificial Sequence
  Description of Artificial Sequence: Synthetic oligonucleotide
  Sense Strand Starting at position 1230 of SEQ ID NO: 317709
gcgugacuccaggauagua

SEQ ID NO: 415258 - RNA, 19 nt, Artificial Sequence
  Description of Artificial Sequence: Synthetic oligonucleotide
  Antisense Strand to SEQ ID NO: 415257
uacuauccuggagucacgc

SEQ ID NO: 415259 - RNA, 19 nt, Artificial Sequence
  Description of Artificial Sequence: Synthetic oligonucleotide
  Sense Strand Starting at position 1230 of SEQ ID NO: 317743
aggcgucuucccugggaag

SEQ ID NO: 415260 - RNA, 19 nt, Artificial Sequence
  Description of Artificial Sequence: Synthetic oligonucleotide
  Antisense Strand to SEQ ID NO: 415259
cuucccagggaagacgccu

SEQ ID NO: 415261 - RNA, 19 nt, Artificial Sequence
  Description of Artificial Sequence: Synthetic oligonucleotide
  Sense Strand Starting at position 1230 of SEQ ID NO: 317833
gaaucauggucucccuguu

SEQ ID NO: 415262 - RNA, 19 nt, Artificial Sequence
  Description of Artificial Sequence: Synthetic oligonucleotide
  Antisense Strand to SEQ ID NO: 415261
aacagggagaccaugauuc

SEQ ID NO: 415263 - RNA, 19 nt, Artificial Sequence
  Description of Artificial Sequence: Synthetic oligonucleotide
  Sense Strand Starting at position 1230 of SEQ ID NO: 317936
gggcucuuugaauaacucu

SEQ ID NO: 415264 - RNA, 19 nt, Artificial Sequence
  Description of Artificial Sequence: Synthetic oligonucleotide
  Antisense Strand to SEQ ID NO: 415263
agaguuauucaaagagccc

SEQ ID NO: 415265 - RNA, 19 nt, Artificial Sequence
  Description of Artificial Sequence: Synthetic oligonucleotide
  Sense Strand Starting at position 1230 of SEQ ID NO: 317996
uguaucaacucaccuggaa

SEQ ID NO: 415266 - RNA, 19 nt, Artificial Sequence
  Description of Artificial Sequence: Synthetic oligonucleotide
  Antisense Strand to SEQ ID NO: 415265
uuccaggugaguugauaca

SEQ ID NO: 415267 - RNA, 19 nt, Artificial Sequence
  Description of Artificial Sequence: Synthetic oligonucleotide
  Sense Strand Starting at position 1230 of SEQ ID NO: 318424
ccggacauguccuugagag

SEQ ID NO: 415268 - RNA, 19 nt, Artificial Sequence
  Description of Artificial Sequence: Synthetic oligonucleotide
  Antisense Strand to SEQ ID NO: 415267
cucucaaggacauguccgg

SEQ ID NO: 415269 - RNA, 19 nt, Artificial Sequence
  Description of Artificial Sequence: Synthetic oligonucleotide
  Sense Strand Starting at position 1230 of SEQ ID NO: 318425
cggacauguccuugagaga

SEQ ID NO: 415270 - RNA, 19 nt, Artificial Sequence
  Description of Artificial Sequence: Synthetic oligonucleotide
  Antisense Strand to SEQ ID NO: 415269
ucucucaaggacauguccg

SEQ ID NO: 415271 - RNA, 19 nt, Artificial Sequence
  Description of Artificial Sequence: Synthetic oligonucleotide
  Sense Strand Starting at position 1230 of SEQ ID NO: 318436
uugagagauugagaaagua

SEQ ID NO: 415272 - RNA, 19 nt, Artificial Sequence
  Description of Artificial Sequence: Synthetic oligonucleotide
  Antisense Strand to SEQ ID NO: 415271
uacuuucucaaucucucaa

SEQ ID NO: 415273 - RNA, 19 nt, Artificial Sequence
  Description of Artificial Sequence: Synthetic oligonucleotide
  Sense Strand Starting at position 1230 of SEQ ID NO: 318444
uugagaaaguaucagaaag

SEQ ID NO: 415274 - RNA, 19 nt, Artificial Sequence
  Description of Artificial Sequence: Synthetic oligonucleotide
  Antisense Strand to SEQ ID NO: 415273
cuuucugauacuuucucaa

SEQ ID NO: 415275 - RNA, 19 nt, Artificial Sequence
  Description of Artificial Sequence: Synthetic oligonucleotide
  Sense Strand Starting at position 1230 of SEQ ID NO: 318446
gagaaaguaucagaaagga

SEQ ID NO: 415276 - RNA, 19 nt, Artificial Sequence
  Description of Artificial Sequence: Synthetic oligonucleotide
  Antisense Strand to SEQ ID NO: 415275
uccuuucugauacuuucuc

SEQ ID NO: 415277 - RNA, 19 nt, Artificial Sequence
  Description of Artificial Sequence: Synthetic oligonucleotide
  Sense Strand Starting at position 1230 of SEQ ID NO: 318482
gagaaaguaucaguuacug

SEQ ID NO: 415278 - RNA, 19 nt, Artificial Sequence
  Description of Artificial Sequence: Synthetic oligonucleotide
  Antisense Strand to SEQ ID NO: 415277
caguaacugauacuuucuc

SEQ ID NO: 415279 - RNA, 19 nt, Artificial Sequence
  Description of Artificial Sequence: Synthetic oligonucleotide
  Sense Strand Starting at position 1230 of SEQ ID NO: 318762
cuugaaguucugggaucaa

SEQ ID NO: 415280 - RNA, 19 nt, Artificial Sequence
  Description of Artificial Sequence: Synthetic oligonucleotide
  Antisense Strand to SEQ ID NO: 415279
uugaucccagaacuucaag

SEQ ID NO: 415281 - RNA, 19 nt, Artificial Sequence
  Description of Artificial Sequence: Synthetic oligonucleotide
  Sense Strand Starting at position 1230 of SEQ ID NO: 318871
cguguccuugcacugugaa

SEQ ID NO: 415282 - RNA, 19 nt, Artificial Sequence
  Description of Artificial Sequence: Synthetic oligonucleotide
  Antisense Strand to SEQ ID NO: 415281
uucacagugcaaggacacg

SEQ ID NO: 415283 - RNA, 19 nt, Artificial Sequence
  Description of Artificial Sequence: Synthetic oligonucleotide
  Sense Strand Starting at position 1230 of SEQ ID NO: 318948
guacacuugaguuggaauu

SEQ ID NO: 415284 - RNA, 19 nt, Artificial Sequence
  Description of Artificial Sequence: Synthetic oligonucleotide
  Antisense Strand to SEQ ID NO: 415283
aauuccaacucaaguguac

SEQ ID NO: 415285 - RNA, 19 nt, Artificial Sequence
  Description of Artificial Sequence: Synthetic oligonucleotide
  Sense Strand Starting at position 1230 of SEQ ID NO: 318976
ccacuuacugucuguguaa

SEQ ID NO: 415286 - RNA, 19 nt, Artificial Sequence
  Description of Artificial Sequence: Synthetic oligonucleotide
  Antisense Strand to SEQ ID NO: 415285
uuacacagacaguaagugg

SEQ ID NO: 415287 - RNA, 19 nt, Artificial Sequence
  Description of Artificial Sequence: Synthetic oligonucleotide
  Sense Strand Starting at position 1230 of SEQ ID NO: 318978
acuuacugucuguguaacu

SEQ ID NO: 415288 - RNA, 19 nt, Artificial Sequence
  Description of Artificial Sequence: Synthetic oligonucleotide
  Antisense Strand to SEQ ID NO: 415287
aguuacacagacaguaagu

SEQ ID NO: 415289 - RNA, 19 nt, Artificial Sequence
  Description of Artificial Sequence: Synthetic oligonucleotide
  Sense Strand Starting at position 1230 of SEQ ID NO: 319025
uuaguuucuuuguugguaa

SEQ ID NO: 415290 - RNA, 19 nt, Artificial Sequence
  Description of Artificial Sequence: Synthetic oligonucleotide
  Antisense Strand to SEQ ID NO: 415289
uuaccaacaaagaaacuaa

SEQ ID NO: 415291 - RNA, 19 nt, Artificial Sequence
  Description of Artificial Sequence: Synthetic oligonucleotide
  Sense Strand Starting at position 1230 of SEQ ID NO: 319027
aguuucuuuguugguaaag

SEQ ID NO: 415292 - RNA, 19 nt, Artificial Sequence
  Description of Artificial Sequence: Synthetic oligonucleotide
  Antisense Strand to SEQ ID NO: 415291
cuuuaccaacaaagaaacu

SEQ ID NO: 415293 - RNA, 19 nt, Artificial Sequence
  Description of Artificial Sequence: Synthetic oligonucleotide
  Sense Strand Starting at position 1230 of SEQ ID NO: 319102
cgauaagaagcuugguaua

SEQ ID NO: 415294 - RNA, 19 nt, Artificial Sequence
  Description of Artificial Sequence: Synthetic oligonucleotide
  Antisense Strand to SEQ ID NO: 415293
uauaccaagcuucuuaucg

SEQ ID NO: 415295 - RNA, 19 nt, Artificial Sequence
  Description of Artificial Sequence: Synthetic oligonucleotide
  Sense Strand Starting at position 1230 of SEQ ID NO: 319104
auaagaagcuugguauaua

SEQ ID NO: 415296 - RNA, 19 nt, Artificial Sequence
  Description of Artificial Sequence: Synthetic oligonucleotide
  Antisense Strand to SEQ ID NO: 415295
uauauaccaagcuucuuau

SEQ ID NO: 415297 - RNA, 19 nt, Artificial Sequence
  Description of Artificial Sequence: Synthetic oligonucleotide
  Sense Strand Starting at position 1230 of SEQ ID NO: 319113
uugguauauacaggauguu

SEQ ID NO: 415298 - RNA, 19 nt, Artificial Sequence
  Description of Artificial Sequence: Synthetic oligonucleotide
  Antisense Strand to SEQ ID NO: 415297
aacauccuguauauaccaa

SEQ ID NO: 415299 - RNA, 19 nt, Artificial Sequence
  Description of Artificial Sequence: Synthetic oligonucleotide
  Sense Strand Starting at position 1230 of SEQ ID NO: 319116
guauauacaggauguuagu

SEQ ID NO: 415300 - RNA, 19 nt, Artificial Sequence
  Description of Artificial Sequence: Synthetic oligonucleotide
  Antisense Strand to SEQ ID NO: 415299
acuaacauccuguauauac

SEQ ID NO: 415301 - RNA, 19 nt, Artificial Sequence
  Description of Artificial Sequence: Synthetic oligonucleotide
  Sense Strand Starting at position 1230 of SEQ ID NO: 319156
auuagacuuguagguuaga

SEQ ID NO: 415302 - RNA, 19 nt, Artificial Sequence
  Description of Artificial Sequence: Synthetic oligonucleotide
  Antisense Strand to SEQ ID NO: 415301
ucuaaccuacaagucuaau

SEQ ID NO: 415303 - RNA, 19 nt, Artificial Sequence
  Description of Artificial Sequence: Synthetic oligonucleotide
  Sense Strand Starting at position 1230 of SEQ ID NO: 319157
uuagacuuguagguuagau

SEQ ID NO: 415304 - RNA, 19 nt, Artificial Sequence
  Description of Artificial Sequence: Synthetic oligonucleotide
  Antisense Strand to SEQ ID NO: 415303
aucuaaccuacaagucuaa

SEQ ID NO: 415305 - RNA, 19 nt, Artificial Sequence
  Description of Artificial Sequence: Synthetic oligonucleotide
  Sense Strand Starting at position 1230 of SEQ ID NO: 319166
uagguuagauuaguaccau

SEQ ID NO: 415306 - RNA, 19 nt, Artificial Sequence
  Description of Artificial Sequence: Synthetic oligonucleotide
  Antisense Strand to SEQ ID NO: 415305
augguacuaaucuaaccua

SEQ ID NO: 415307 - RNA, 19 nt, Artificial Sequence
  Description of Artificial Sequence: Synthetic oligonucleotide
  Sense Strand Starting at position 1230 of SEQ ID NO: 319172
agauuaguaccaugcauca

SEQ ID NO: 415308 - RNA, 19 nt, Artificial Sequence
  Description of Artificial Sequence: Synthetic oligonucleotide
  Antisense Strand to SEQ ID NO: 415307
ugaugcaugguacuaaucu

SEQ ID NO: 415309 - RNA, 19 nt, Artificial Sequence
  Description of Artificial Sequence: Synthetic oligonucleotide
  Sense Strand Starting at position 1231 of SEQ ID NO: 315260
gggcucucugaaggaauaa

SEQ ID NO: 415310 - RNA, 19 nt, Artificial Sequence
  Description of Artificial Sequence: Synthetic oligonucleotide
  Antisense Strand to SEQ ID NO: 415309
uuauuccuucagagagccc

SEQ ID NO: 415311 - RNA, 19 nt, Artificial Sequence
  Description of Artificial Sequence: Synthetic oligonucleotide
  Sense Strand Starting at position 1231 of SEQ ID NO: 315330
agcuuugaagcucaauaaa

SEQ ID NO: 415312 - RNA, 19 nt, Artificial Sequence
  Description of Artificial Sequence: Synthetic oligonucleotide
  Antisense Strand to SEQ ID NO: 415311
uuuauugagcuucaaagcu

SEQ ID NO: 415313 - RNA, 19 nt, Artificial Sequence
  Description of Artificial Sequence: Synthetic oligonucleotide
  Sense Strand Starting at position 1231 of SEQ ID NO: 315470
auaaaugauggcugaauua

SEQ ID NO: 415314 - RNA, 19 nt, Artificial Sequence
  Description of Artificial Sequence: Synthetic oligonucleotide
  Antisense Strand to SEQ ID NO: 415313
uaauucagccaucauuuau

SEQ ID NO: 415315 - RNA, 19 nt, Artificial Sequence
  Description of Artificial Sequence: Synthetic oligonucleotide
  Sense Strand Starting at position 1231 of SEQ ID NO: 315506
cugugagugauaggaaaca

SEQ ID NO: 415316 - RNA, 19 nt, Artificial Sequence
  Description of Artificial Sequence: Synthetic oligonucleotide
  Antisense Strand to SEQ ID NO: 415315
uguuuccuaucacucacag

SEQ ID NO: 415317 - RNA, 19 nt, Artificial Sequence
  Description of Artificial Sequence: Synthetic oligonucleotide
  Sense Strand Starting at position 1231 of SEQ ID NO: 315551
ucacuuuagcccuaggaag

SEQ ID NO: 415318 - RNA, 19 nt, Artificial Sequence
  Description of Artificial Sequence: Synthetic oligonucleotide
  Antisense Strand to SEQ ID NO: 415317
cuuccuagggcuaaaguga

SEQ ID NO: 415319 - RNA, 19 nt, Artificial Sequence
  Description of Artificial Sequence: Synthetic oligonucleotide
  Sense Strand Starting at position 1231 of SEQ ID NO: 315650
cagguaaugugaccuugga

SEQ ID NO: 415320 - RNA, 19 nt, Artificial Sequence
  Description of Artificial Sequence: Synthetic oligonucleotide
  Antisense Strand to SEQ ID NO: 415319
uccaaggucacauuaccug

SEQ ID NO: 415321 - RNA, 19 nt, Artificial Sequence
  Description of Artificial Sequence: Synthetic oligonucleotide
  Sense Strand Starting at position 1231 of SEQ ID NO: 315654
uaaugugaccuuggacuga

SEQ ID NO: 415322 - RNA, 19 nt, Artificial Sequence
  Description of Artificial Sequence: Synthetic oligonucleotide
  Antisense Strand to SEQ ID NO: 415321
ucaguccaaggucacauua

SEQ ID NO: 415323 - RNA, 19 nt, Artificial Sequence
  Description of Artificial Sequence: Synthetic oligonucleotide
  Sense Strand Starting at position 1231 of SEQ ID NO: 315836
cuucucauaucaguaagua

SEQ ID NO: 415324 - RNA, 19 nt, Artificial Sequence
  Description of Artificial Sequence: Synthetic oligonucleotide
  Antisense Strand to SEQ ID NO: 415323
uacuuacugauaugagaag

SEQ ID NO: 415325 - RNA, 19 nt, Artificial Sequence
  Description of Artificial Sequence: Synthetic oligonucleotide
  Sense Strand Starting at position 1231 of SEQ ID NO: 315837
uucucauaucaguaaguac

SEQ ID NO: 415326 - RNA, 19 nt, Artificial Sequence
  Description of Artificial Sequence: Synthetic oligonucleotide
  Antisense Strand to SEQ ID NO: 415325
guacuuacugauaugagaa

SEQ ID NO: 415327 - RNA, 19 nt, Artificial Sequence
  Description of Artificial Sequence: Synthetic oligonucleotide
  Sense Strand Starting at position 1231 of SEQ ID NO: 316099
acugaucuguuuccaugaa

SEQ ID NO: 415328 - RNA, 19 nt, Artificial Sequence
  Description of Artificial Sequence: Synthetic oligonucleotide
  Antisense Strand to SEQ ID NO: 415327
uucauggaaacagaucagu

SEQ ID NO: 415329 - RNA, 19 nt, Artificial Sequence
  Description of Artificial Sequence: Synthetic oligonucleotide
  Sense Strand Starting at position 1231 of SEQ ID NO: 316309
ccaccaguuuccucaagga

SEQ ID NO: 415330 - RNA, 19 nt, Artificial Sequence
  Description of Artificial Sequence: Synthetic oligonucleotide
  Antisense Strand to SEQ ID NO: 415329
uccuugaggaaacuggugg

SEQ ID NO: 415331 - RNA, 19 nt, Artificial Sequence
  Description of Artificial Sequence: Synthetic oligonucleotide
  Sense Strand Starting at position 1231 of SEQ ID NO: 316313
caguuuccucaaggacaga

SEQ ID NO: 415332 - RNA, 19 nt, Artificial Sequence
  Description of Artificial Sequence: Synthetic oligonucleotide
  Antisense Strand to SEQ ID NO: 415331
ucuguccuugaggaaacug

SEQ ID NO: 415333 - RNA, 19 nt, Artificial Sequence
  Description of Artificial Sequence: Synthetic oligonucleotide
  Sense Strand Starting at position 1231 of SEQ ID NO: 316407
ucaaaugaauguucgggaa

SEQ ID NO: 415334 - RNA, 19 nt, Artificial Sequence
  Description of Artificial Sequence: Synthetic oligonucleotide
  Antisense Strand to SEQ ID NO: 415333
uucccgaacauucauuuga

SEQ ID NO: 415335 - RNA, 19 nt, Artificial Sequence
  Description of Artificial Sequence: Synthetic oligonucleotide
  Sense Strand Starting at position 1231 of SEQ ID NO: 316448
gaugccaucccugggcaau

SEQ ID NO: 415336 - RNA, 19 nt, Artificial Sequence
  Description of Artificial Sequence: Synthetic oligonucleotide
  Antisense Strand to SEQ ID NO: 415335
auugcccagggauggcauc

SEQ ID NO: 415337 - RNA, 19 nt, Artificial Sequence
  Description of Artificial Sequence: Synthetic oligonucleotide
  Sense Strand Starting at position 1231 of SEQ ID NO: 316532
agcacugaacucugaacuu

SEQ ID NO: 415338 - RNA, 19 nt, Artificial Sequence
  Description of Artificial Sequence: Synthetic oligonucleotide
  Antisense Strand to SEQ ID NO: 415337
aaguucagaguucagugcu

SEQ ID NO: 415339 - RNA, 19 nt, Artificial Sequence
  Description of Artificial Sequence: Synthetic oligonucleotide
  Sense Strand Starting at position 1231 of SEQ ID NO: 316575
gagcuuucugaagguagga

SEQ ID NO: 415340 - RNA, 19 nt, Artificial Sequence
  Description of Artificial Sequence: Synthetic oligonucleotide
  Antisense Strand to SEQ ID NO: 415339
uccuaccuucagaaagcuc

SEQ ID NO: 415341 - RNA, 19 nt, Artificial Sequence
  Description of Artificial Sequence: Synthetic oligonucleotide
  Sense Strand Starting at position 1231 of SEQ ID NO: 316577
gcuuucugaagguaggaga

SEQ ID NO: 415342 - RNA, 19 nt, Artificial Sequence
  Description of Artificial Sequence: Synthetic oligonucleotide
  Antisense Strand to SEQ ID NO: 415341
ucuccuaccuucagaaagc

SEQ ID NO: 415343 - RNA, 19 nt, Artificial Sequence
  Description of Artificial Sequence: Synthetic oligonucleotide
  Sense Strand Starting at position 1231 of SEQ ID NO: 316593
agaugcaucgugguguguu

SEQ ID NO: 415344 - RNA, 19 nt, Artificial Sequence
  Description of Artificial Sequence: Synthetic oligonucleotide
  Antisense Strand to SEQ ID NO: 415343
aacacaccacgaugcaucu

SEQ ID NO: 415345 - RNA, 19 nt, Artificial Sequence
  Description of Artificial Sequence: Synthetic oligonucleotide
  Sense Strand Starting at position 1231 of SEQ ID NO: 316659
gcauauaagugaccugaac

SEQ ID NO: 415346 - RNA, 19 nt, Artificial Sequence
  Description of Artificial Sequence: Synthetic oligonucleotide
  Antisense Strand to SEQ ID NO: 415345
guucaggucacuuauaugc

SEQ ID NO: 415347 - RNA, 19 nt, Artificial Sequence
  Description of Artificial Sequence: Synthetic oligonucleotide
  Sense Strand Starting at position 1231 of SEQ ID NO: 316933
ggcacauucuuacuagacu

SEQ ID NO: 415348 - RNA, 19 nt, Artificial Sequence
  Description of Artificial Sequence: Synthetic oligonucleotide
  Antisense Strand to SEQ ID NO: 415347
agucuaguaagaaugugcc

SEQ ID NO: 415349 - RNA, 19 nt, Artificial Sequence
  Description of Artificial Sequence: Synthetic oligonucleotide
  Sense Strand Starting at position 1231 of SEQ ID NO: 317009
guccaaauuggcuacaaau

SEQ ID NO: 415350 - RNA, 19 nt, Artificial Sequence
  Description of Artificial Sequence: Synthetic oligonucleotide
  Antisense Strand to SEQ ID NO: 415349
auuuguagccaauuuggac

SEQ ID NO: 415351 - RNA, 19 nt, Artificial Sequence
  Description of Artificial Sequence: Synthetic oligonucleotide
  Sense Strand Starting at position 1231 of SEQ ID NO: 317037
ucauaaagcccucagguuu

SEQ ID NO: 415352 - RNA, 19 nt, Artificial Sequence
  Description of Artificial Sequence: Synthetic oligonucleotide
  Antisense Strand to SEQ ID NO: 415351
aaaccugagggcuuuauga

SEQ ID NO: 415353 - RNA, 19 nt, Artificial Sequence
  Description of Artificial Sequence: Synthetic oligonucleotide
  Sense Strand Starting at position 1231 of SEQ ID NO: 317303
cgugauuaagcucaaucuu

SEQ ID NO: 415354 - RNA, 19 nt, Artificial Sequence
  Description of Artificial Sequence: Synthetic oligonucleotide
  Antisense Strand to SEQ ID NO: 415353
aagauugagcuuaaucacg

SEQ ID NO: 415355 - RNA, 19 nt, Artificial Sequence
  Description of Artificial Sequence: Synthetic oligonucleotide
  Sense Strand Starting at position 1231 of SEQ ID NO: 317394
accagucacuuuguuaaua

SEQ ID NO: 415356 - RNA, 19 nt, Artificial Sequence
  Description of Artificial Sequence: Synthetic oligonucleotide
  Antisense Strand to SEQ ID NO: 415355
uauuaacaaagugacuggu

SEQ ID NO: 415357 - RNA, 19 nt, Artificial Sequence
  Description of Artificial Sequence: Synthetic oligonucleotide
  Sense Strand Starting at position 1231 of SEQ ID NO: 317395
ccagucacuuuguuaauau

SEQ ID NO: 415358 - RNA, 19 nt, Artificial Sequence
  Description of Artificial Sequence: Synthetic oligonucleotide
  Antisense Strand to SEQ ID NO: 415357
auauuaacaaagugacugg

SEQ ID NO: 415359 - RNA, 19 nt, Artificial Sequence
  Description of Artificial Sequence: Synthetic oligonucleotide
  Sense Strand Starting at position 1231 of SEQ ID NO: 317527
gaaguuacagaauguuaga

SEQ ID NO: 415360 - RNA, 19 nt, Artificial Sequence
  Description of Artificial Sequence: Synthetic oligonucleotide
  Antisense Strand to SEQ ID NO: 415359
ucuaacauucuguaacuuc

SEQ ID NO: 415361 - RNA, 19 nt, Artificial Sequence
  Description of Artificial Sequence: Synthetic oligonucleotide
  Sense Strand Starting at position 1231 of SEQ ID NO: 317546
agcucugagccagaaaucu

SEQ ID NO: 415362 - RNA, 19 nt, Artificial Sequence
  Description of Artificial Sequence: Synthetic oligonucleotide
  Antisense Strand to SEQ ID NO: 415361
agauuucuggcucagagcu

SEQ ID NO: 415363 - RNA, 19 nt, Artificial Sequence
  Description of Artificial Sequence: Synthetic oligonucleotide
  Sense Strand Starting at position 1231 of SEQ ID NO: 317554
gccagaaaucuagggcaca

SEQ ID NO: 415364 - RNA, 19 nt, Artificial Sequence
  Description of Artificial Sequence: Synthetic oligonucleotide
  Antisense Strand to SEQ ID NO: 415363
ugugcccuagauuucuggc

SEQ ID NO: 415365 - RNA, 19 nt, Artificial Sequence
  Description of Artificial Sequence: Synthetic oligonucleotide
  Sense Strand Starting at position 1231 of SEQ ID NO: 317590
acauuauaucauggugcau

SEQ ID NO: 415366 - RNA, 19 nt, Artificial Sequence
  Description of Artificial Sequence: Synthetic oligonucleotide
  Antisense Strand to SEQ ID NO: 415365
augcaccaugauauaaugu

SEQ ID NO: 415367 - RNA, 19 nt, Artificial Sequence
  Description of Artificial Sequence: Synthetic oligonucleotide
  Sense Strand Starting at position 1231 of SEQ ID NO: 317594
uauaucauggugcaugauu

SEQ ID NO: 415368 - RNA, 19 nt, Artificial Sequence
  Description of Artificial Sequence: Synthetic oligonucleotide
  Antisense Strand to SEQ ID NO: 415367
aaucaugcaccaugauaua

SEQ ID NO: 415369 - RNA, 19 nt, Artificial Sequence
  Description of Artificial Sequence: Synthetic oligonucleotide
  Sense Strand Starting at position 1231 of SEQ ID NO: 317641
uggcaacuccgauacaagu

SEQ ID NO: 415370 - RNA, 19 nt, Artificial Sequence
  Description of Artificial Sequence: Synthetic oligonucleotide
  Antisense Strand to SEQ ID NO: 415369
acuuguaucggaguugcca

SEQ ID NO: 415371 - RNA, 19 nt, Artificial Sequence
  Description of Artificial Sequence: Synthetic oligonucleotide
  Sense Strand Starting at position 1231 of SEQ ID NO: 317679
aguguugcauaagugagaa

SEQ ID NO: 415372 - RNA, 19 nt, Artificial Sequence
  Description of Artificial Sequence: Synthetic oligonucleotide
  Antisense Strand to SEQ ID NO: 415371
uucucacuuaugcaacacu

SEQ ID NO: 415373 - RNA, 19 nt, Artificial Sequence
  Description of Artificial Sequence: Synthetic oligonucleotide
  Sense Strand Starting at position 1231 of SEQ ID NO: 317774
gagaaagaugcaugugcaa

SEQ ID NO: 415374 - RNA, 19 nt, Artificial Sequence
  Description of Artificial Sequence: Synthetic oligonucleotide
  Antisense Strand to SEQ ID NO: 415373
uugcacaugcaucuuucuc

SEQ ID NO: 415375 - RNA, 19 nt, Artificial Sequence
  Description of Artificial Sequence: Synthetic oligonucleotide
  Sense Strand Starting at position 1231 of SEQ ID NO: 318033
agagaauucuggcuuaugu

SEQ ID NO: 415376 - RNA, 19 nt, Artificial Sequence
  Description of Artificial Sequence: Synthetic oligonucleotide
  Antisense Strand to SEQ ID NO: 415375
acauaagccagaauucucu

SEQ ID NO: 415377 - RNA, 19 nt, Artificial Sequence
  Description of Artificial Sequence: Synthetic oligonucleotide
  Sense Strand Starting at position 1231 of SEQ ID NO: 318035
agaauucuggcuuaugucu

SEQ ID NO: 415378 - RNA, 19 nt, Artificial Sequence
  Description of Artificial Sequence: Synthetic oligonucleotide
  Antisense Strand to SEQ ID NO: 415377
agacauaagccagaauucu

SEQ ID NO: 415379 - RNA, 19 nt, Artificial Sequence
  Description of Artificial Sequence: Synthetic oligonucleotide
  Sense Strand Starting at position 1231 of SEQ ID NO: 318400
uuggaaaugguguauccau

SEQ ID NO: 415380 - RNA, 19 nt, Artificial Sequence
  Description of Artificial Sequence: Synthetic oligonucleotide
  Antisense Strand to SEQ ID NO: 415379
auggauacaccauuuccaa

SEQ ID NO: 415381 - RNA, 19 nt, Artificial Sequence
  Description of Artificial Sequence: Synthetic oligonucleotide
  Sense Strand Starting at position 1231 of SEQ ID NO: 318471
uugcuaaugcuggacucau

SEQ ID NO: 415382 - RNA, 19 nt, Artificial Sequence
  Description of Artificial Sequence: Synthetic oligonucleotide
  Antisense Strand to SEQ ID NO: 415381
augaguccagcauuagcaa

SEQ ID NO: 415383 - RNA, 19 nt, Artificial Sequence
  Description of Artificial Sequence: Synthetic oligonucleotide
  Sense Strand Starting at position 1231 of SEQ ID NO: 318544
cacagaaguguccaggcua

SEQ ID NO: 415384 - RNA, 19 nt, Artificial Sequence
  Description of Artificial Sequence: Synthetic oligonucleotide
  Antisense Strand to SEQ ID NO: 415383
uagccuggacacuucugug

SEQ ID NO: 415385 - RNA, 19 nt, Artificial Sequence
  Description of Artificial Sequence: Synthetic oligonucleotide
  Sense Strand Starting at position 1231 of SEQ ID NO: 318560
cuaugacugcuaggaugaa

SEQ ID NO: 415386 - RNA, 19 nt, Artificial Sequence
  Description of Artificial Sequence: Synthetic oligonucleotide
  Antisense Strand to SEQ ID NO: 415385
uucauccuagcagucauag

SEQ ID NO: 415387 - RNA, 19 nt, Artificial Sequence
  Description of Artificial Sequence: Synthetic oligonucleotide
  Sense Strand Starting at position 1231 of SEQ ID NO: 318851
ucaggagauguugguacua

SEQ ID NO: 415388 - RNA, 19 nt, Artificial Sequence
  Description of Artificial Sequence: Synthetic oligonucleotide
  Antisense Strand to SEQ ID NO: 415387
uaguaccaacaucuccuga

SEQ ID NO: 415389 - RNA, 19 nt, Artificial Sequence
  Description of Artificial Sequence: Synthetic oligonucleotide
  Sense Strand Starting at position 1232 of SEQ ID NO: 315369
gcaauuccucaaggaacca

SEQ ID NO: 415390 - RNA, 19 nt, Artificial Sequence
  Description of Artificial Sequence: Synthetic oligonucleotide
  Antisense Strand to SEQ ID NO: 415389
ugguuccuugaggaauugc

SEQ ID NO: 415391 - RNA, 19 nt, Artificial Sequence
  Description of Artificial Sequence: Synthetic oligonucleotide
  Sense Strand Starting at position 1232 of SEQ ID NO: 315476
uguuuauuccagcaccauu

SEQ ID NO: 415392 - RNA, 19 nt, Artificial Sequence
  Description of Artificial Sequence: Synthetic oligonucleotide
  Antisense Strand to SEQ ID NO: 415391
aauggugcuggaauaaaca

SEQ ID NO: 415393 - RNA, 19 nt, Artificial Sequence
  Description of Artificial Sequence: Synthetic oligonucleotide
  Sense Strand Starting at position 1232 of SEQ ID NO: 315953
aaagaaaucuguuugccag

SEQ ID NO: 415394 - RNA, 19 nt, Artificial Sequence
  Description of Artificial Sequence: Synthetic oligonucleotide
  Antisense Strand to SEQ ID NO: 415393
cuggcaaacagauuucuuu

SEQ ID NO: 415395 - RNA, 19 nt, Artificial Sequence
  Description of Artificial Sequence: Synthetic oligonucleotide
  Sense Strand Starting at position 1232 of SEQ ID NO: 315954
aagaaaucuguuugccaga

SEQ ID NO: 415396 - RNA, 19 nt, Artificial Sequence
  Description of Artificial Sequence: Synthetic oligonucleotide
  Antisense Strand to SEQ ID NO: 415395
ucuggcaaacagauuucuu

SEQ ID NO: 415397 - RNA, 19 nt, Artificial Sequence
  Description of Artificial Sequence: Synthetic oligonucleotide
  Sense Strand Starting at position 1232 of SEQ ID NO: 315955
agaaaucuguuugccagaa

SEQ ID NO: 415398 - RNA, 19 nt, Artificial Sequence
  Description of Artificial Sequence: Synthetic oligonucleotide
  Antisense Strand to SEQ ID NO: 415397
uucuggcaaacagauuucu

SEQ ID NO: 415399 - RNA, 19 nt, Artificial Sequence
  Description of Artificial Sequence: Synthetic oligonucleotide
  Sense Strand Starting at position 1232 of SEQ ID NO: 315983
agcaauagaccucauguga

SEQ ID NO: 415400 - RNA, 19 nt, Artificial Sequence
  Description of Artificial Sequence: Synthetic oligonucleotide
  Antisense Strand to SEQ ID NO: 415399
ucacaugaggucuauugcu

SEQ ID NO: 415401 - RNA, 19 nt, Artificial Sequence
  Description of Artificial Sequence: Synthetic oligonucleotide
  Sense Strand Starting at position 1232 of SEQ ID NO: 315990
gaccucaugugaguuauga

SEQ ID NO: 415402 - RNA, 19 nt, Artificial Sequence
  Description of Artificial Sequence: Synthetic oligonucleotide
  Antisense Strand to SEQ ID NO: 415401
ucauaacucacaugagguc

SEQ ID NO: 415403 - RNA, 19 nt, Artificial Sequence
  Description of Artificial Sequence: Synthetic oligonucleotide
  Sense Strand Starting at position 1232 of SEQ ID NO: 316029
ugugcuauuggauaaagac

SEQ ID NO: 415404 - RNA, 19 nt, Artificial Sequence
  Description of Artificial Sequence: Synthetic oligonucleotide
  Antisense Strand to SEQ ID NO: 415403
gucuuuauccaauagcaca

SEQ ID NO: 415405 - RNA, 19 nt, Artificial Sequence
  Description of Artificial Sequence: Synthetic oligonucleotide
  Sense Strand Starting at position 1232 of SEQ ID NO: 316677
guugcaauggcugauauua

SEQ ID NO: 415406 - RNA, 19 nt, Artificial Sequence
  Description of Artificial Sequence: Synthetic oligonucleotide
  Antisense Strand to SEQ ID NO: 415405
uaauaucagccauugcaac

SEQ ID NO: 415407 - RNA, 19 nt, Artificial Sequence
  Description of Artificial Sequence: Synthetic oligonucleotide
  Sense Strand Starting at position 1232 of SEQ ID NO: 316830
cucaguuguuaugugauuu

SEQ ID NO: 415408 - RNA, 19 nt, Artificial Sequence
  Description of Artificial Sequence: Synthetic oligonucleotide
  Antisense Strand to SEQ ID NO: 415407
aaaucacauaacaacugag

SEQ ID NO: 415409 - RNA, 19 nt, Artificial Sequence
  Description of Artificial Sequence: Synthetic oligonucleotide
  Sense Strand Starting at position 1232 of SEQ ID NO: 316831
ucaguuguuaugugauuua

SEQ ID NO: 415410 - RNA, 19 nt, Artificial Sequence
  Description of Artificial Sequence: Synthetic oligonucleotide
  Antisense Strand to SEQ ID NO: 415409
uaaaucacauaacaacuga

SEQ ID NO: 415411 - RNA, 19 nt, Artificial Sequence
  Description of Artificial Sequence: Synthetic oligonucleotide
  Sense Strand Starting at position 1232 of SEQ ID NO: 316834
guuguuaugugauuuagca

SEQ ID NO: 415412 - RNA, 19 nt, Artificial Sequence
  Description of Artificial Sequence: Synthetic oligonucleotide
  Antisense Strand to SEQ ID NO: 415411
ugcuaaaucacauaacaac

SEQ ID NO: 415413 - RNA, 19 nt, Artificial Sequence
  Description of Artificial Sequence: Synthetic oligonucleotide
  Sense Strand Starting at position 1232 of SEQ ID NO: 316836
uguuaugugauuuagcagu

SEQ ID NO: 415414 - RNA, 19 nt, Artificial Sequence
  Description of Artificial Sequence: Synthetic oligonucleotide
  Antisense Strand to SEQ ID NO: 415413
acugcuaaaucacauaaca

SEQ ID NO: 415415 - RNA, 19 nt, Artificial Sequence
  Description of Artificial Sequence: Synthetic oligonucleotide
  Sense Strand Starting at position 1232 of SEQ ID NO: 316838
uuaugugauuuagcaguua

SEQ ID NO: 415416 - RNA, 19 nt, Artificial Sequence
  Description of Artificial Sequence: Synthetic oligonucleotide
  Antisense Strand to SEQ ID NO: 415415
uaacugcuaaaucacauaa

SEQ ID NO: 415417 - RNA, 19 nt, Artificial Sequence
  Description of Artificial Sequence: Synthetic oligonucleotide
  Sense Strand Starting at position 1232 of SEQ ID NO: 316853
guuagaguguacccacaga

SEQ ID NO: 415418 - RNA, 19 nt, Artificial Sequence
  Description of Artificial Sequence: Synthetic oligonucleotide
  Antisense Strand to SEQ ID NO: 415417
ucuguggguacacucuaac

SEQ ID NO: 415419 - RNA, 19 nt, Artificial Sequence
  Description of Artificial Sequence: Synthetic oligonucleotide
  Sense Strand Starting at position 1232 of SEQ ID NO: 316938
uugcuaagcgccucgaaga

SEQ ID NO: 415420 - RNA, 19 nt, Artificial Sequence
  Description of Artificial Sequence: Synthetic oligonucleotide
  Antisense Strand to SEQ ID NO: 415419
ucuucgaggcgcuuagcaa

SEQ ID NO: 415421 - RNA, 19 nt, Artificial Sequence
  Description of Artificial Sequence: Synthetic oligonucleotide
  Sense Strand Starting at position 1232 of SEQ ID NO: 317034
gcaggagcacugugaagau

SEQ ID NO: 415422 - RNA, 19 nt, Artificial Sequence
  Description of Artificial Sequence: Synthetic oligonucleotide
  Antisense Strand to SEQ ID NO: 415421
aucuucacagugcuccugc

SEQ ID NO: 415423 - RNA, 19 nt, Artificial Sequence
  Description of Artificial Sequence: Synthetic oligonucleotide
  Sense Strand Starting at position 1232 of SEQ ID NO: 317313
caaaguagucguuggaaag

SEQ ID NO: 415424 - RNA, 19 nt, Artificial Sequence
  Description of Artificial Sequence: Synthetic oligonucleotide
  Antisense Strand to SEQ ID NO: 415423
cuuuccaacgacuacuuug

SEQ ID NO: 415425 - RNA, 19 nt, Artificial Sequence
  Description of Artificial Sequence: Synthetic oligonucleotide
  Sense Strand Starting at position 1232 of SEQ ID NO: 317435
uugauaauguccucagcca

SEQ ID NO: 415426 - RNA, 19 nt, Artificial Sequence
  Description of Artificial Sequence: Synthetic oligonucleotide
  Antisense Strand to SEQ ID NO: 415425
uggcugaggacauuaucaa

SEQ ID NO: 415427 - RNA, 19 nt, Artificial Sequence
  Description of Artificial Sequence: Synthetic oligonucleotide
  Sense Strand Starting at position 1232 of SEQ ID NO: 317436
ugauaauguccucagccaa

SEQ ID NO: 415428 - RNA, 19 nt, Artificial Sequence
  Description of Artificial Sequence: Synthetic oligonucleotide
  Antisense Strand to SEQ ID NO: 415427
uuggcugaggacauuauca

SEQ ID NO: 415429 - RNA, 19 nt, Artificial Sequence
  Description of Artificial Sequence: Synthetic oligonucleotide
  Sense Strand Starting at position 1232 of SEQ ID NO: 317680
auggucuugcuacauaauu

SEQ ID NO: 415430 - RNA, 19 nt, Artificial Sequence
  Description of Artificial Sequence: Synthetic oligonucleotide
  Antisense Strand to SEQ ID NO: 415429
aauuauguagcaagaccau

SEQ ID NO: 415431 - RNA, 19 nt, Artificial Sequence
  Description of Artificial Sequence: Synthetic oligonucleotide
  Sense Strand Starting at position 1232 of SEQ ID NO: 317697
uuccaucuugaaugucaga

SEQ ID NO: 415432 - RNA, 19 nt, Artificial Sequence
  Description of Artificial Sequence: Synthetic oligonucleotide
  Antisense Strand to SEQ ID NO: 415431
ucugacauucaagauggaa

SEQ ID NO: 415433 - RNA, 19 nt, Artificial Sequence
  Description of Artificial Sequence: Synthetic oligonucleotide
  Sense Strand Starting at position 1232 of SEQ ID NO: 317829
guaggaaguaguugacaca

SEQ ID NO: 415434 - RNA, 19 nt, Artificial Sequence
  Description of Artificial Sequence: Synthetic oligonucleotide
  Antisense Strand to SEQ ID NO: 415433
ugugucaacuacuuccuac

SEQ ID NO: 415435 - RNA, 19 nt, Artificial Sequence
  Description of Artificial Sequence: Synthetic oligonucleotide
  Sense Strand Starting at position 1232 of SEQ ID NO: 317955
ggaguuaauuacccucaga

SEQ ID NO: 415436 - RNA, 19 nt, Artificial Sequence
  Description of Artificial Sequence: Synthetic oligonucleotide
  Antisense Strand to SEQ ID NO: 415435
ucugaggguaauuaacucc

SEQ ID NO: 415437 - RNA, 19 nt, Artificial Sequence
  Description of Artificial Sequence: Synthetic oligonucleotide
  Sense Strand Starting at position 1232 of SEQ ID NO: 318029
guauguugucucuauaucu

SEQ ID NO: 415438 - RNA, 19 nt, Artificial Sequence
  Description of Artificial Sequence: Synthetic oligonucleotide
  Antisense Strand to SEQ ID NO: 415437
agauauagagacaacauac

SEQ ID NO: 415439 - RNA, 19 nt, Artificial Sequence
  Description of Artificial Sequence: Synthetic oligonucleotide
  Sense Strand Starting at position 1232 of SEQ ID NO: 318621
acaguuacauuccugaguu

SEQ ID NO: 415440 - RNA, 19 nt, Artificial Sequence
  Description of Artificial Sequence: Synthetic oligonucleotide
  Antisense Strand to SEQ ID NO: 415439
aacucaggaauguaacugu

SEQ ID NO: 415441 - RNA, 19 nt, Artificial Sequence
  Description of Artificial Sequence: Synthetic oligonucleotide
  Sense Strand Starting at position 1232 of SEQ ID NO: 318678
gccuucuaucuguaaauga

SEQ ID NO: 415442 - RNA, 19 nt, Artificial Sequence
  Description of Artificial Sequence: Synthetic oligonucleotide
  Antisense Strand to SEQ ID NO: 415441
ucauuuacagauagaaggc

SEQ ID NO: 415443 - RNA, 19 nt, Artificial Sequence
  Description of Artificial Sequence: Synthetic oligonucleotide
  Sense Strand Starting at position 1232 of SEQ ID NO: 318685
aucuguaaaugagucuaua

SEQ ID NO: 415444 - RNA, 19 nt, Artificial Sequence
  Description of Artificial Sequence: Synthetic oligonucleotide
  Antisense Strand to SEQ ID NO: 415443
uauagacucauuuacagau

SEQ ID NO: 415445 - RNA, 19 nt, Artificial Sequence
  Description of Artificial Sequence: Synthetic oligonucleotide
  Sense Strand Starting at position 1232 of SEQ ID NO: 318866
uaaguccuagacugaauga

SEQ ID NO: 415446 - RNA, 19 nt, Artificial Sequence
  Description of Artificial Sequence: Synthetic oligonucleotide
  Antisense Strand to SEQ ID NO: 415445
ucauucagucuaggacuua

SEQ ID NO: 415447 - RNA, 19 nt, Artificial Sequence
  Description of Artificial Sequence: Synthetic oligonucleotide
  Sense Strand Starting at position 1232 of SEQ ID NO: 318907
ugaguaggauaaccguaau

SEQ ID NO: 415448 - RNA, 19 nt, Artificial Sequence
  Description of Artificial Sequence: Synthetic oligonucleotide
  Antisense Strand to SEQ ID NO: 415447
auuacgguuauccuacuca

SEQ ID NO: 415449 - RNA, 19 nt, Artificial Sequence
  Description of Artificial Sequence: Synthetic oligonucleotide
  Sense Strand Starting at position 1232 of SEQ ID NO: 318910
guaggauaaccguaaugca

SEQ ID NO: 415450 - RNA, 19 nt, Artificial Sequence
  Description of Artificial Sequence: Synthetic oligonucleotide
  Antisense Strand to SEQ ID NO: 415449
ugcauuacgguuauccuac

SEQ ID NO: 415451 - RNA, 19 nt, Artificial Sequence
  Description of Artificial Sequence: Synthetic oligonucleotide
  Sense Strand Starting at position 1232 of SEQ ID NO: 319040
aaacauuacggcuaugaug

SEQ ID NO: 415452 - RNA, 19 nt, Artificial Sequence
  Description of Artificial Sequence: Synthetic oligonucleotide
  Antisense Strand to SEQ ID NO: 415451
caucauagccguaauguuu

SEQ ID NO: 415453 - RNA, 19 nt, Artificial Sequence
  Description of Artificial Sequence: Synthetic oligonucleotide
  Sense Strand Starting at position 1232 of SEQ ID NO: 319042
acauuacggcuaugaugua

SEQ ID NO: 415454 - RNA, 19 nt, Artificial Sequence
  Description of Artificial Sequence: Synthetic oligonucleotide
  Antisense Strand to SEQ ID NO: 415453
uacaucauagccguaaugu

SEQ ID NO: 415455 - RNA, 19 nt, Artificial Sequence
  Description of Artificial Sequence: Synthetic oligonucleotide
  Sense Strand Starting at position 1232 of SEQ ID NO: 319048
cggcuaugauguacgugaa

SEQ ID NO: 415456 - RNA, 19 nt, Artificial Sequence
  Description of Artificial Sequence: Synthetic oligonucleotide
  Antisense Strand to SEQ ID NO: 415455
uucacguacaucauagccg

SEQ ID NO: 415457 - RNA, 19 nt, Artificial Sequence
  Description of Artificial Sequence: Synthetic oligonucleotide
  Sense Strand Starting at position 1232 of SEQ ID NO: 319051
cuaugauguacgugaaagg

SEQ ID NO: 415458 - RNA, 19 nt, Artificial Sequence
  Description of Artificial Sequence: Synthetic oligonucleotide
  Antisense Strand to SEQ ID NO: 415457
ccuuucacguacaucauag

SEQ ID NO: 415459 - RNA, 19 nt, Artificial Sequence
  Description of Artificial Sequence: Synthetic oligonucleotide
  Sense Strand Starting at position 1232 of SEQ ID NO: 319058
guacgugaaaggcaugaaa

SEQ ID NO: 415460 - RNA, 19 nt, Artificial Sequence
  Description of Artificial Sequence: Synthetic oligonucleotide
  Antisense Strand to SEQ ID NO: 415459
uuucaugccuuucacguac

SEQ ID NO: 415461 - RNA, 19 nt, Artificial Sequence
  Description of Artificial Sequence: Synthetic oligonucleotide
  Sense Strand Starting at position 1232 of SEQ ID NO: 319095
gcaggaagucaacaucucu

SEQ ID NO: 415462 - RNA, 19 nt, Artificial Sequence
  Description of Artificial Sequence: Synthetic oligonucleotide
  Antisense Strand to SEQ ID NO: 415461
agagauguugacuuccugc

SEQ ID NO: 415463 - RNA, 19 nt, Artificial Sequence
  Description of Artificial Sequence: Synthetic oligonucleotide
  Sense Strand Starting at position 1232 of SEQ ID NO: 319114
aucuuauaagcacguaaga

SEQ ID NO: 415464 - RNA, 19 nt, Artificial Sequence
  Description of Artificial Sequence: Synthetic oligonucleotide
  Antisense Strand to SEQ ID NO: 415463
ucuuacgugcuuauaagau

SEQ ID NO: 415465 - RNA, 19 nt, Artificial Sequence
  Description of Artificial Sequence: Synthetic oligonucleotide
  Sense Strand Starting at position 1232 of SEQ ID NO: 319131
gaaagucuagaguguggaa

SEQ ID NO: 415466 - RNA, 19 nt, Artificial Sequence
  Description of Artificial Sequence: Synthetic oligonucleotide
  Antisense Strand to SEQ ID NO: 415465
uuccacacucuagacuuuc

SEQ ID NO: 415467 - RNA, 19 nt, Artificial Sequence
  Description of Artificial Sequence: Synthetic oligonucleotide
  Sense Strand Starting at position 1232 of SEQ ID NO: 319133
aagucuagaguguggaaau

SEQ ID NO: 415468 - RNA, 19 nt, Artificial Sequence
  Description of Artificial Sequence: Synthetic oligonucleotide
  Antisense Strand to SEQ ID NO: 415467
auuuccacacucuagacuu

SEQ ID NO: 415469 - RNA, 19 nt, Artificial Sequence
  Description of Artificial Sequence: Synthetic oligonucleotide
  Sense Strand Starting at position 1233 of SEQ ID NO: 315401
gcaauuccucaaggaacca

SEQ ID NO: 415470 - RNA, 19 nt, Artificial Sequence
  Description of Artificial Sequence: Synthetic oligonucleotide
  Antisense Strand to SEQ ID NO: 415469
ugguuccuugaggaauugc

SEQ ID NO: 415471 - RNA, 19 nt, Artificial Sequence
  Description of Artificial Sequence: Synthetic oligonucleotide
  Sense Strand Starting at position 1233 of SEQ ID NO: 315508
uguuuauuccagcaccauu

SEQ ID NO: 415472 - RNA, 19 nt, Artificial Sequence
  Description of Artificial Sequence: Synthetic oligonucleotide
  Antisense Strand to SEQ ID NO: 415471
aauggugcuggaauaaaca

SEQ ID NO: 415473 - RNA, 19 nt, Artificial Sequence
  Description of Artificial Sequence: Synthetic oligonucleotide
  Sense Strand Starting at position 1233 of SEQ ID NO: 315985
aaagaaaucuguuugccag

SEQ ID NO: 415474 - RNA, 19 nt, Artificial Sequence
  Description of Artificial Sequence: Synthetic oligonucleotide
  Antisense Strand to SEQ ID NO: 415473
cuggcaaacagauuucuuu

SEQ ID NO: 415475 - RNA, 19 nt, Artificial Sequence
  Description of Artificial Sequence: Synthetic oligonucleotide
  Sense Strand Starting at position 1233 of SEQ ID NO: 315986
aagaaaucuguuugccaga

SEQ ID NO: 415476 - RNA, 19 nt, Artificial Sequence
  Description of Artificial Sequence: Synthetic oligonucleotide
  Antisense Strand to SEQ ID NO: 415475
ucuggcaaacagauuucuu

SEQ ID NO: 415477 - RNA, 19 nt, Artificial Sequence
  Description of Artificial Sequence: Synthetic oligonucleotide
  Sense Strand Starting at position 1233 of SEQ ID NO: 315987
agaaaucuguuugccagaa

SEQ ID NO: 415478 - RNA, 19 nt, Artificial Sequence
  Description of Artificial Sequence: Synthetic oligonucleotide
  Antisense Strand to SEQ ID NO: 415477
uucuggcaaacagauuucu

SEQ ID NO: 415479 - RNA, 19 nt, Artificial Sequence
  Description of Artificial Sequence: Synthetic oligonucleotide
  Sense Strand Starting at position 1233 of SEQ ID NO: 316015
agcaauagaccucauguga

SEQ ID NO: 415480 - RNA, 19 nt, Artificial Sequence
  Description of Artificial Sequence: Synthetic oligonucleotide
  Antisense Strand to SEQ ID NO: 415479
ucacaugaggucuauugcu

SEQ ID NO: 415481 - RNA, 19 nt, Artificial Sequence
  Description of Artificial Sequence: Synthetic oligonucleotide
  Sense Strand Starting at position 1233 of SEQ ID NO: 316022
gaccucaugugaguuauga

SEQ ID NO: 415482 - RNA, 19 nt, Artificial Sequence
  Description of Artificial Sequence: Synthetic oligonucleotide
  Antisense Strand to SEQ ID NO: 415481
ucauaacucacaugagguc

SEQ ID NO: 415483 - RNA, 19 nt, Artificial Sequence
  Description of Artificial Sequence: Synthetic oligonucleotide
  Sense Strand Starting at position 1233 of SEQ ID NO: 316061
ugugcuauuggauaaagac

SEQ ID NO: 415484 - RNA, 19 nt, Artificial Sequence
  Description of Artificial Sequence: Synthetic oligonucleotide
  Antisense Strand to SEQ ID NO: 415483
gucuuuauccaauagcaca

SEQ ID NO: 415485 - RNA, 19 nt, Artificial Sequence
  Description of Artificial Sequence: Synthetic oligonucleotide
  Sense Strand Starting at position 1233 of SEQ ID NO: 316709
guugcaauggcugauauua

SEQ ID NO: 415486 - RNA, 19 nt, Artificial Sequence
  Description of Artificial Sequence: Synthetic oligonucleotide
  Antisense Strand to SEQ ID NO: 415485
uaauaucagccauugcaac

SEQ ID NO: 415487 - RNA, 19 nt, Artificial Sequence
  Description of Artificial Sequence: Synthetic oligonucleotide
  Sense Strand Starting at position 1233 of SEQ ID NO: 316862
cucaguuguuaugugauuu

SEQ ID NO: 415488 - RNA, 19 nt, Artificial Sequence
  Description of Artificial Sequence: Synthetic oligonucleotide
  Antisense Strand to SEQ ID NO: 415487
aaaucacauaacaacugag

SEQ ID NO: 415489 - RNA, 19 nt, Artificial Sequence
  Description of Artificial Sequence: Synthetic oligonucleotide
  Sense Strand Starting at position 1233 of SEQ ID NO: 316863
ucaguuguuaugugauuua

SEQ ID NO: 415490 - RNA, 19 nt, Artificial Sequence
  Description of Artificial Sequence: Synthetic oligonucleotide
  Antisense Strand to SEQ ID NO: 415489
uaaaucacauaacaacuga

SEQ ID NO: 415491 - RNA, 19 nt, Artificial Sequence
  Description of Artificial Sequence: Synthetic oligonucleotide
  Sense Strand Starting at position 1233 of SEQ ID NO: 316866
guuguuaugugauuuagca

SEQ ID NO: 415492 - RNA, 19 nt, Artificial Sequence
  Description of Artificial Sequence: Synthetic oligonucleotide
  Antisense Strand to SEQ ID NO: 415491
ugcuaaaucacauaacaac

SEQ ID NO: 415493 - RNA, 19 nt, Artificial Sequence
  Description of Artificial Sequence: Synthetic oligonucleotide
  Sense Strand Starting at position 1233 of SEQ ID NO: 316868
uguuaugugauuuagcagu

SEQ ID NO: 415494 - RNA, 19 nt, Artificial Sequence
  Description of Artificial Sequence: Synthetic oligonucleotide
  Antisense Strand to SEQ ID NO: 415493
acugcuaaaucacauaaca

SEQ ID NO: 415495 - RNA, 19 nt, Artificial Sequence
  Description of Artificial Sequence: Synthetic oligonucleotide
  Sense Strand Starting at position 1233 of SEQ ID NO: 316870
uuaugugauuuagcaguua

SEQ ID NO: 415496 - RNA, 19 nt, Artificial Sequence
  Description of Artificial Sequence: Synthetic oligonucleotide
  Antisense Strand to SEQ ID NO: 415495
uaacugcuaaaucacauaa

SEQ ID NO: 415497 - RNA, 19 nt, Artificial Sequence
  Description of Artificial Sequence: Synthetic oligonucleotide
  Sense Strand Starting at position 1233 of SEQ ID NO: 316885
guuagaguguacccacaga

SEQ ID NO: 415498 - RNA, 19 nt, Artificial Sequence
  Description of Artificial Sequence: Synthetic oligonucleotide
  Antisense Strand to SEQ ID NO: 415497
ucuguggguacacucuaac

SEQ ID NO: 415499 - RNA, 19 nt, Artificial Sequence
  Description of Artificial Sequence: Synthetic oligonucleotide
  Sense Strand Starting at position 1233 of SEQ ID NO: 316970
uugcuaagcgccucgaaga

SEQ ID NO: 415500 - RNA, 19 nt, Artificial Sequence
  Description of Artificial Sequence: Synthetic oligonucleotide
  Antisense Strand to SEQ ID NO: 415499
ucuucgaggcgcuuagcaa

SEQ ID NO: 415501 - RNA, 19 nt, Artificial Sequence
  Description of Artificial Sequence: Synthetic oligonucleotide
  Sense Strand Starting at position 1233 of SEQ ID NO: 317066
gcaggagcacugugaagau

SEQ ID NO: 415502 - RNA, 19 nt, Artificial Sequence
  Description of Artificial Sequence: Synthetic oligonucleotide
  Antisense Strand to SEQ ID NO: 415501
aucuucacagugcuccugc

SEQ ID NO: 415503 - RNA, 19 nt, Artificial Sequence
  Description of Artificial Sequence: Synthetic oligonucleotide
  Sense Strand Starting at position 1233 of SEQ ID NO: 317345
caaaguagucguuggaaag

SEQ ID NO: 415504 - RNA, 19 nt, Artificial Sequence
  Description of Artificial Sequence: Synthetic oligonucleotide
  Antisense Strand to SEQ ID NO: 415503
cuuuccaacgacuacuuug

SEQ ID NO: 415505 - RNA, 19 nt, Artificial Sequence
  Description of Artificial Sequence: Synthetic oligonucleotide
  Sense Strand Starting at position 1233 of SEQ ID NO: 317467
uugauaauguccucagcca

SEQ ID NO: 415506 - RNA, 19 nt, Artificial Sequence
  Description of Artificial Sequence: Synthetic oligonucleotide
  Antisense Strand to SEQ ID NO: 415505
uggcugaggacauuaucaa

SEQ ID NO: 415507 - RNA, 19 nt, Artificial Sequence
  Description of Artificial Sequence: Synthetic oligonucleotide
  Sense Strand Starting at position 1233 of SEQ ID NO: 317468
ugauaauguccucagccaa

SEQ ID NO: 415508 - RNA, 19 nt, Artificial Sequence
  Description of Artificial Sequence: Synthetic oligonucleotide
  Antisense Strand to SEQ ID NO: 415507
uuggcugaggacauuauca

SEQ ID NO: 415509 - RNA, 19 nt, Artificial Sequence
  Description of Artificial Sequence: Synthetic oligonucleotide
  Sense Strand Starting at position 1233 of SEQ ID NO: 317712
auggucuugcuacauaauu

SEQ ID NO: 415510 - RNA, 19 nt, Artificial Sequence
  Description of Artificial Sequence: Synthetic oligonucleotide
  Antisense Strand to SEQ ID NO: 415509
aauuauguagcaagaccau

SEQ ID NO: 415511 - RNA, 19 nt, Artificial Sequence
  Description of Artificial Sequence: Synthetic oligonucleotide
  Sense Strand Starting at position 1233 of SEQ ID NO: 317729
uuccaucuugaaugucaga

SEQ ID NO: 415512 - RNA, 19 nt, Artificial Sequence
  Description of Artificial Sequence: Synthetic oligonucleotide
  Antisense Strand to SEQ ID NO: 415511
ucugacauucaagauggaa

SEQ ID NO: 415513 - RNA, 19 nt, Artificial Sequence
  Description of Artificial Sequence: Synthetic oligonucleotide
  Sense Strand Starting at position 1233 of SEQ ID NO: 317861
guaggaaguaguugacaca

SEQ ID NO: 415514 - RNA, 19 nt, Artificial Sequence
  Description of Artificial Sequence: Synthetic oligonucleotide
  Antisense Strand to SEQ ID NO: 415513
ugugucaacuacuuccuac

SEQ ID NO: 415515 - RNA, 19 nt, Artificial Sequence
  Description of Artificial Sequence: Synthetic oligonucleotide
  Sense Strand Starting at position 1233 of SEQ ID NO: 317987
ggaguuaauuacccucaga

SEQ ID NO: 415516 - RNA, 19 nt, Artificial Sequence
  Description of Artificial Sequence: Synthetic oligonucleotide
  Antisense Strand to SEQ ID NO: 415515
ucugaggguaauuaacucc

SEQ ID NO: 415517 - RNA, 19 nt, Artificial Sequence
  Description of Artificial Sequence: Synthetic oligonucleotide
  Sense Strand Starting at position 1233 of SEQ ID NO: 318061
guauguugucucuauaucu

SEQ ID NO: 415518 - RNA, 19 nt, Artificial Sequence
  Description of Artificial Sequence: Synthetic oligonucleotide
  Antisense Strand to SEQ ID NO: 415517
agauauagagacaacauac

SEQ ID NO: 415519 - RNA, 19 nt, Artificial Sequence
  Description of Artificial Sequence: Synthetic oligonucleotide
  Sense Strand Starting at position 1233 of SEQ ID NO: 318653
acaguuacauuccugaguu

SEQ ID NO: 415520 - RNA, 19 nt, Artificial Sequence
  Description of Artificial Sequence: Synthetic oligonucleotide
  Antisense Strand to SEQ ID NO: 415519
aacucaggaauguaacugu

SEQ ID NO: 415521 - RNA, 19 nt, Artificial Sequence
  Description of Artificial Sequence: Synthetic oligonucleotide
  Sense Strand Starting at position 1233 of SEQ ID NO: 318710
gccuucuaucuguaaauga

SEQ ID NO: 415522 - RNA, 19 nt, Artificial Sequence
  Description of Artificial Sequence: Synthetic oligonucleotide
  Antisense Strand to SEQ ID NO: 415521
ucauuuacagauagaaggc

SEQ ID NO: 415523 - RNA, 19 nt, Artificial Sequence
  Description of Artificial Sequence: Synthetic oligonucleotide
  Sense Strand Starting at position 1233 of SEQ ID NO: 318717
aucuguaaaugagucuaua

SEQ ID NO: 415524 - RNA, 19 nt, Artificial Sequence
  Description of Artificial Sequence: Synthetic oligonucleotide
  Antisense Strand to SEQ ID NO: 415523
uauagacucauuuacagau

SEQ ID NO: 415525 - RNA, 19 nt, Artificial Sequence
  Description of Artificial Sequence: Synthetic oligonucleotide
  Sense Strand Starting at position 1233 of SEQ ID NO: 318898
uaaguccuagacugaauga

SEQ ID NO: 415526 - RNA, 19 nt, Artificial Sequence
  Description of Artificial Sequence: Synthetic oligonucleotide
  Antisense Strand to SEQ ID NO: 415525
ucauucagucuaggacuua

SEQ ID NO: 415527 - RNA, 19 nt, Artificial Sequence
  Description of Artificial Sequence: Synthetic oligonucleotide
  Sense Strand Starting at position 1233 of SEQ ID NO: 318939
ugaguaggauaaccguaau

SEQ ID NO: 415528 - RNA, 19 nt, Artificial Sequence
  Description of Artificial Sequence: Synthetic oligonucleotide
  Antisense Strand to SEQ ID NO: 415527
auuacgguuauccuacuca

SEQ ID NO: 415529 - RNA, 19 nt, Artificial Sequence
  Description of Artificial Sequence: Synthetic oligonucleotide
  Sense Strand Starting at position 1233 of SEQ ID NO: 318942
guaggauaaccguaaugca

SEQ ID NO: 415530 - RNA, 19 nt, Artificial Sequence
  Description of Artificial Sequence: Synthetic oligonucleotide
  Antisense Strand to SEQ ID NO: 415529
ugcauuacgguuauccuac

SEQ ID NO: 415531 - RNA, 19 nt, Artificial Sequence
  Description of Artificial Sequence: Synthetic oligonucleotide
  Sense Strand Starting at position 1233 of SEQ ID NO: 319072
aaacauuacggcuaugaug

SEQ ID NO: 415532 - RNA, 19 nt, Artificial Sequence
  Description of Artificial Sequence: Synthetic oligonucleotide
  Antisense Strand to SEQ ID NO: 415531
caucauagccguaauguuu

SEQ ID NO: 415533 - RNA, 19 nt, Artificial Sequence
  Description of Artificial Sequence: Synthetic oligonucleotide
  Sense Strand Starting at position 1233 of SEQ ID NO: 319074
acauuacggcuaugaugua

SEQ ID NO: 415534 - RNA, 19 nt, Artificial Sequence
  Description of Artificial Sequence: Synthetic oligonucleotide
  Antisense Strand to SEQ ID NO: 415533
uacaucauagccguaaugu

SEQ ID NO: 415535 - RNA, 19 nt, Artificial Sequence
  Description of Artificial Sequence: Synthetic oligonucleotide
  Sense Strand Starting at position 1233 of SEQ ID NO: 319080
cggcuaugauguacgugaa

SEQ ID NO: 415536 - RNA, 19 nt, Artificial Sequence
  Description of Artificial Sequence: Synthetic oligonucleotide
  Antisense Strand to SEQ ID NO: 415535
uucacguacaucauagccg

SEQ ID NO: 415537 - RNA, 19 nt, Artificial Sequence
  Description of Artificial Sequence: Synthetic oligonucleotide
  Sense Strand Starting at position 1233 of SEQ ID NO: 319083
cuaugauguacgugaaagg

SEQ ID NO: 415538 - RNA, 19 nt, Artificial Sequence
  Description of Artificial Sequence: Synthetic oligonucleotide
  Antisense Strand to SEQ ID NO: 415537
ccuuucacguacaucauag

SEQ ID NO: 415539 - RNA, 19 nt, Artificial Sequence
  Description of Artificial Sequence: Synthetic oligonucleotide
  Sense Strand Starting at position 1233 of SEQ ID NO: 319090
guacgugaaaggcaugaaa

SEQ ID NO: 415540 - RNA, 19 nt, Artificial Sequence
  Description of Artificial Sequence: Synthetic oligonucleotide
  Antisense Strand to SEQ ID NO: 415539
uuucaugccuuucacguac

SEQ ID NO: 415541 - RNA, 19 nt, Artificial Sequence
  Description of Artificial Sequence: Synthetic oligonucleotide
  Sense Strand Starting at position 1233 of SEQ ID NO: 319127
gcaggaagucaacaucucu

SEQ ID NO: 415542 - RNA, 19 nt, Artificial Sequence
  Description of Artificial Sequence: Synthetic oligonucleotide
  Antisense Strand to SEQ ID NO: 415541
agagauguugacuuccugc

SEQ ID NO: 415543 - RNA, 19 nt, Artificial Sequence
  Description of Artificial Sequence: Synthetic oligonucleotide
  Sense Strand Starting at position 1233 of SEQ ID NO: 319146
aucuuauaagcacguaaga

SEQ ID NO: 415544 - RNA, 19 nt, Artificial Sequence
  Description of Artificial Sequence: Synthetic oligonucleotide
  Antisense Strand to SEQ ID NO: 415543
ucuuacgugcuuauaagau

SEQ ID NO: 415545 - RNA, 19 nt, Artificial Sequence
  Description of Artificial Sequence: Synthetic oligonucleotide
  Sense Strand Starting at position 1233 of SEQ ID NO: 319163
gaaagucuagaguguggaa

SEQ ID NO: 415546 - RNA, 19 nt, Artificial Sequence
  Description of Artificial Sequence: Synthetic oligonucleotide
  Antisense Strand to SEQ ID NO: 415545
uuccacacucuagacuuuc

SEQ ID NO: 415547 - RNA, 19 nt, Artificial Sequence
  Description of Artificial Sequence: Synthetic oligonucleotide
  Sense Strand Starting at position 1233 of SEQ ID NO: 319165
aagucuagaguguggaaau

SEQ ID NO: 415548 - RNA, 19 nt, Artificial Sequence
  Description of Artificial Sequence: Synthetic oligonucleotide
  Antisense Strand to SEQ ID NO: 415547
auuuccacacucuagacuu

SEQ ID NO: 415549 - RNA, 19 nt, Artificial Sequence
  Description of Artificial Sequence: Synthetic oligonucleotide
  Sense Strand Starting at position 1234 of SEQ ID NO: 315448
uuuaauauaucagugcaga

SEQ ID NO: 415550 - RNA, 19 nt, Artificial Sequence
  Description of Artificial Sequence: Synthetic oligonucleotide
  Antisense Strand to SEQ ID NO: 415549
ucugcacugauauauuaaa

SEQ ID NO: 415551 - RNA, 19 nt, Artificial Sequence
  Description of Artificial Sequence: Synthetic oligonucleotide
  Sense Strand Starting at position 1234 of SEQ ID NO: 315449
uuaauauaucagugcagau

SEQ ID NO: 415552 - RNA, 19 nt, Artificial Sequence
  Description of Artificial Sequence: Synthetic oligonucleotide
  Antisense Strand to SEQ ID NO: 415551
aucugcacugauauauuaa

SEQ ID NO: 415553 - RNA, 19 nt, Artificial Sequence
  Description of Artificial Sequence: Synthetic oligonucleotide
  Sense Strand Starting at position 1234 of SEQ ID NO: 315687
agaagcaguccuuaaauug

SEQ ID NO: 415554 - RNA, 19 nt, Artificial Sequence
  Description of Artificial Sequence: Synthetic oligonucleotide
  Antisense Strand to SEQ ID NO: 415553
caauuuaaggacugcuucu

SEQ ID NO: 415555 - RNA, 19 nt, Artificial Sequence
  Description of Artificial Sequence: Synthetic oligonucleotide
  Sense Strand Starting at position 1234 of SEQ ID NO: 315876
cugguauucugaucucaaa

SEQ ID NO: 415556 - RNA, 19 nt, Artificial Sequence
  Description of Artificial Sequence: Synthetic oligonucleotide
  Antisense Strand to SEQ ID NO: 415555
uuugagaucagaauaccag

SEQ ID NO: 415557 - RNA, 19 nt, Artificial Sequence
  Description of Artificial Sequence: Synthetic oligonucleotide
  Sense Strand Starting at position 1234 of SEQ ID NO: 315909
gauucuauaucagugaugu

SEQ ID NO: 415558 - RNA, 19 nt, Artificial Sequence
  Description of Artificial Sequence: Synthetic oligonucleotide
  Antisense Strand to SEQ ID NO: 415557
acaucacugauauagaauc

SEQ ID NO: 415559 - RNA, 19 nt, Artificial Sequence
  Description of Artificial Sequence: Synthetic oligonucleotide
  Sense Strand Starting at position 1234 of SEQ ID NO: 315910
auucuauaucagugauguc

SEQ ID NO: 415560 - RNA, 19 nt, Artificial Sequence
  Description of Artificial Sequence: Synthetic oligonucleotide
  Antisense Strand to SEQ ID NO: 415559
gacaucacugauauagaau

SEQ ID NO: 415561 - RNA, 19 nt, Artificial Sequence
  Description of Artificial Sequence: Synthetic oligonucleotide
  Sense Strand Starting at position 1234 of SEQ ID NO: 315920
agugaugucuuagucaaua

SEQ ID NO: 415562 - RNA, 19 nt, Artificial Sequence
  Description of Artificial Sequence: Synthetic oligonucleotide
  Antisense Strand to SEQ ID NO: 415561
uauugacuaagacaucacu

SEQ ID NO: 415563 - RNA, 19 nt, Artificial Sequence
  Description of Artificial Sequence: Synthetic oligonucleotide
  Sense Strand Starting at position 1234 of SEQ ID NO: 315925
ugucuuagucaauacaaug

SEQ ID NO: 415564 - RNA, 19 nt, Artificial Sequence
  Description of Artificial Sequence: Synthetic oligonucleotide
  Antisense Strand to SEQ ID NO: 415563
cauuguauugacuaagaca

SEQ ID NO: 415565 - RNA, 19 nt, Artificial Sequence
  Description of Artificial Sequence: Synthetic oligonucleotide
  Sense Strand Starting at position 1234 of SEQ ID NO: 315957
gguaauucacgugaaggua

SEQ ID NO: 415566 - RNA, 19 nt, Artificial Sequence
  Description of Artificial Sequence: Synthetic oligonucleotide
  Antisense Strand to SEQ ID NO: 415565
uaccuucacgugaauuacc

SEQ ID NO: 415567 - RNA, 19 nt, Artificial Sequence
  Description of Artificial Sequence: Synthetic oligonucleotide
  Sense Strand Starting at position 1234 of SEQ ID NO: 316091
uccggucugauugaggaaa

SEQ ID NO: 415568 - RNA, 19 nt, Artificial Sequence
  Description of Artificial Sequence: Synthetic oligonucleotide
  Antisense Strand to SEQ ID NO: 415567
uuuccucaaucagaccgga

SEQ ID NO: 415569 - RNA, 19 nt, Artificial Sequence
  Description of Artificial Sequence: Synthetic oligonucleotide
  Sense Strand Starting at position 1234 of SEQ ID NO: 316206
gccauaaauaaaggugagu

SEQ ID NO: 415570 - RNA, 19 nt, Artificial Sequence
  Description of Artificial Sequence: Synthetic oligonucleotide
  Antisense Strand to SEQ ID NO: 415569
acucaccuuuauuuauggc

SEQ ID NO: 415571 - RNA, 19 nt, Artificial Sequence
  Description of Artificial Sequence: Synthetic oligonucleotide
  Sense Strand Starting at position 1234 of SEQ ID NO: 316555
cucuuacaccgguauaaga

SEQ ID NO: 415572 - RNA, 19 nt, Artificial Sequence
  Description of Artificial Sequence: Synthetic oligonucleotide
  Antisense Strand to SEQ ID NO: 415571
ucuuauaccgguguaagag

SEQ ID NO: 415573 - RNA, 19 nt, Artificial Sequence
  Description of Artificial Sequence: Synthetic oligonucleotide
  Sense Strand Starting at position 1234 of SEQ ID NO: 316562
accgguauaagaugaaacu

SEQ ID NO: 415574 - RNA, 19 nt, Artificial Sequence
  Description of Artificial Sequence: Synthetic oligonucleotide
  Antisense Strand to SEQ ID NO: 415573
aguuucaucuuauaccggu

SEQ ID NO: 415575 - RNA, 19 nt, Artificial Sequence
  Description of Artificial Sequence: Synthetic oligonucleotide
  Sense Strand Starting at position 1234 of SEQ ID NO: 316894
uacuucuucgcuggagaaa

SEQ ID NO: 415576 - RNA, 19 nt, Artificial Sequence
  Description of Artificial Sequence: Synthetic oligonucleotide
  Antisense Strand to SEQ ID NO: 415575
uuucuccagcgaagaagua

SEQ ID NO: 415577 - RNA, 19 nt, Artificial Sequence
  Description of Artificial Sequence: Synthetic oligonucleotide
  Sense Strand Starting at position 1234 of SEQ ID NO: 316895
acuucuucgcuggagaaau

SEQ ID NO: 415578 - RNA, 19 nt, Artificial Sequence
  Description of Artificial Sequence: Synthetic oligonucleotide
  Antisense Strand to SEQ ID NO: 415577
auuucuccagcgaagaagu

SEQ ID NO: 415579 - RNA, 19 nt, Artificial Sequence
  Description of Artificial Sequence: Synthetic oligonucleotide
  Sense Strand Starting at position 1234 of SEQ ID NO: 317224
ggcuguuauaaugagacac

SEQ ID NO: 415580 - RNA, 19 nt, Artificial Sequence
  Description of Artificial Sequence: Synthetic oligonucleotide
  Antisense Strand to SEQ ID NO: 415579
gugucucauuauaacagcc

SEQ ID NO: 415581 - RNA, 19 nt, Artificial Sequence
  Description of Artificial Sequence: Synthetic oligonucleotide
  Sense Strand Starting at position 1234 of SEQ ID NO: 317482
ccugaaccuugacuuguua

SEQ ID NO: 415582 - RNA, 19 nt, Artificial Sequence
  Description of Artificial Sequence: Synthetic oligonucleotide
  Antisense Strand to SEQ ID NO: 415581
uaacaagucaagguucagg

SEQ ID NO: 415583 - RNA, 19 nt, Artificial Sequence
  Description of Artificial Sequence: Synthetic oligonucleotide
  Sense Strand Starting at position 1234 of SEQ ID NO: 317593
aaaugcucucgcgcugaga

SEQ ID NO: 415584 - RNA, 19 nt, Artificial Sequence
  Description of Artificial Sequence: Synthetic oligonucleotide
  Antisense Strand to SEQ ID NO: 415583
ucucagcgcgagagcauuu

SEQ ID NO: 415585 - RNA, 19 nt, Artificial Sequence
  Description of Artificial Sequence: Synthetic oligonucleotide
  Sense Strand Starting at position 1234 of SEQ ID NO: 317594
aaugcucucgcgcugagaa

SEQ ID NO: 415586 - RNA, 19 nt, Artificial Sequence
  Description of Artificial Sequence: Synthetic oligonucleotide
  Antisense Strand to SEQ ID NO: 415585
uucucagcgcgagagcauu

SEQ ID NO: 415587 - RNA, 19 nt, Artificial Sequence
  Description of Artificial Sequence: Synthetic oligonucleotide
  Sense Strand Starting at position 1234 of SEQ ID NO: 317705
ggacuugugugcaaggaag

SEQ ID NO: 415588 - RNA, 19 nt, Artificial Sequence
  Description of Artificial Sequence: Synthetic oligonucleotide
  Antisense Strand to SEQ ID NO: 415587
cuuccuugcacacaagucc

SEQ ID NO: 415589 - RNA, 19 nt, Artificial Sequence
  Description of Artificial Sequence: Synthetic oligonucleotide
  Sense Strand Starting at position 1234 of SEQ ID NO: 317888
cugggaagguuugccagaa

SEQ ID NO: 415590 - RNA, 19 nt, Artificial Sequence
  Description of Artificial Sequence: Synthetic oligonucleotide
  Antisense Strand to SEQ ID NO: 415589
uucuggcaaaccuucccag

SEQ ID NO: 415591 - RNA, 19 nt, Artificial Sequence
  Description of Artificial Sequence: Synthetic oligonucleotide
  Sense Strand Starting at position 1234 of SEQ ID NO: 318176
ggaagauguguacgugaga

SEQ ID NO: 415592 - RNA, 19 nt, Artificial Sequence
  Description of Artificial Sequence: Synthetic oligonucleotide
  Antisense Strand to SEQ ID NO: 415591
ucucacguacacaucuucc

SEQ ID NO: 415593 - RNA, 19 nt, Artificial Sequence
  Description of Artificial Sequence: Synthetic oligonucleotide
  Sense Strand Starting at position 1234 of SEQ ID NO: 318182
uguguacgugagagcgauu

SEQ ID NO: 415594 - RNA, 19 nt, Artificial Sequence
  Description of Artificial Sequence: Synthetic oligonucleotide
  Antisense Strand to SEQ ID NO: 415593
aaucgcucucacguacaca

SEQ ID NO: 415595 - RNA, 19 nt, Artificial Sequence
  Description of Artificial Sequence: Synthetic oligonucleotide
  Sense Strand Starting at position 1234 of SEQ ID NO: 318185
guacgugagagcgauuuca

SEQ ID NO: 415596 - RNA, 19 nt, Artificial Sequence
  Description of Artificial Sequence: Synthetic oligonucleotide
  Antisense Strand to SEQ ID NO: 415595
ugaaaucgcucucacguac

SEQ ID NO: 415597 - RNA, 19 nt, Artificial Sequence
  Description of Artificial Sequence: Synthetic oligonucleotide
  Sense Strand Starting at position 1234 of SEQ ID NO: 318237
uuuacagugguauacauga

SEQ ID NO: 415598 - RNA, 19 nt, Artificial Sequence
  Description of Artificial Sequence: Synthetic oligonucleotide
  Antisense Strand to SEQ ID NO: 415597
ucauguauaccacuguaaa

SEQ ID NO: 415599 - RNA, 19 nt, Artificial Sequence
  Description of Artificial Sequence: Synthetic oligonucleotide
  Sense Strand Starting at position 1234 of SEQ ID NO: 318250
acaugauucuccuucugua

SEQ ID NO: 415600 - RNA, 19 nt, Artificial Sequence
  Description of Artificial Sequence: Synthetic oligonucleotide
  Antisense Strand to SEQ ID NO: 415599
uacagaaggagaaucaugu

SEQ ID NO: 415601 - RNA, 19 nt, Artificial Sequence
  Description of Artificial Sequence: Synthetic oligonucleotide
  Sense Strand Starting at position 1234 of SEQ ID NO: 318258
cuccuucuguaaucaagag

SEQ ID NO: 415602 - RNA, 19 nt, Artificial Sequence
  Description of Artificial Sequence: Synthetic oligonucleotide
  Antisense Strand to SEQ ID NO: 415601
cucuugauuacagaaggag

SEQ ID NO: 415603 - RNA, 19 nt, Artificial Sequence
  Description of Artificial Sequence: Synthetic oligonucleotide
  Sense Strand Starting at position 1234 of SEQ ID NO: 318412
cuguuaacagcagaaugua

SEQ ID NO: 415604 - RNA, 19 nt, Artificial Sequence
  Description of Artificial Sequence: Synthetic oligonucleotide
  Antisense Strand to SEQ ID NO: 415603
uacauucugcuguuaacag

SEQ ID NO: 415605 - RNA, 19 nt, Artificial Sequence
  Description of Artificial Sequence: Synthetic oligonucleotide
  Sense Strand Starting at position 1234 of SEQ ID NO: 318415
uuaacagcagaauguaauu

SEQ ID NO: 415606 - RNA, 19 nt, Artificial Sequence
  Description of Artificial Sequence: Synthetic oligonucleotide
  Antisense Strand to SEQ ID NO: 415605
aauuacauucugcuguuaa

SEQ ID NO: 415607 - RNA, 19 nt, Artificial Sequence
  Description of Artificial Sequence: Synthetic oligonucleotide
  Sense Strand Starting at position 1234 of SEQ ID NO: 318445
acugaugguuucuuaauca

SEQ ID NO: 415608 - RNA, 19 nt, Artificial Sequence
  Description of Artificial Sequence: Synthetic oligonucleotide
  Antisense Strand to SEQ ID NO: 415607
ugauuaagaaaccaucagu

SEQ ID NO: 415609 - RNA, 19 nt, Artificial Sequence
  Description of Artificial Sequence: Synthetic oligonucleotide
  Sense Strand Starting at position 1234 of SEQ ID NO: 318457
uuaaucaugcaguaugaag

SEQ ID NO: 415610 - RNA, 19 nt, Artificial Sequence
  Description of Artificial Sequence: Synthetic oligonucleotide
  Antisense Strand to SEQ ID NO: 415609
cuucauacugcaugauuaa

SEQ ID NO: 415611 - RNA, 19 nt, Artificial Sequence
  Description of Artificial Sequence: Synthetic oligonucleotide
  Sense Strand Starting at position 1234 of SEQ ID NO: 318459
aaucaugcaguaugaagau

SEQ ID NO: 415612 - RNA, 19 nt, Artificial Sequence
  Description of Artificial Sequence: Synthetic oligonucleotide
  Antisense Strand to SEQ ID NO: 415611
aucuucauacugcaugauu

SEQ ID NO: 415613 - RNA, 19 nt, Artificial Sequence
  Description of Artificial Sequence: Synthetic oligonucleotide
  Sense Strand Starting at position 1234 of SEQ ID NO: 318530
ucaucaugacugcagacau

SEQ ID NO: 415614 - RNA, 19 nt, Artificial Sequence
  Description of Artificial Sequence: Synthetic oligonucleotide
  Antisense Strand to SEQ ID NO: 415613
augucugcagucaugauga

SEQ ID NO: 415615 - RNA, 19 nt, Artificial Sequence
  Description of Artificial Sequence: Synthetic oligonucleotide
  Sense Strand Starting at position 1234 of SEQ ID NO: 318541
gcagacauuagaggacuuu

SEQ ID NO: 415616 - RNA, 19 nt, Artificial Sequence
  Description of Artificial Sequence: Synthetic oligonucleotide
  Antisense Strand to SEQ ID NO: 415615
aaaguccucuaaugucugc

SEQ ID NO: 415617 - RNA, 19 nt, Artificial Sequence
  Description of Artificial Sequence: Synthetic oligonucleotide
  Sense Strand Starting at position 1234 of SEQ ID NO: 318559
ugaaacaaccuuuggugua

SEQ ID NO: 415618 - RNA, 19 nt, Artificial Sequence
  Description of Artificial Sequence: Synthetic oligonucleotide
  Antisense Strand to SEQ ID NO: 415617
uacaccaaagguuguuuca

SEQ ID NO: 415619 - RNA, 19 nt, Artificial Sequence
  Description of Artificial Sequence: Synthetic oligonucleotide
  Sense Strand Starting at position 1234 of SEQ ID NO: 318596
acugauauuguauguauuc

SEQ ID NO: 415620 - RNA, 19 nt, Artificial Sequence
  Description of Artificial Sequence: Synthetic oligonucleotide
  Antisense Strand to SEQ ID NO: 415619
gaauacauacaauaucagu

SEQ ID NO: 415621 - RNA, 19 nt, Artificial Sequence
  Description of Artificial Sequence: Synthetic oligonucleotide
  Sense Strand Starting at position 1234 of SEQ ID NO: 318761
aaucaucugguucgacaua

SEQ ID NO: 415622 - RNA, 19 nt, Artificial Sequence
  Description of Artificial Sequence: Synthetic oligonucleotide
  Antisense Strand to SEQ ID NO: 415621
uaugucgaaccagaugauu

SEQ ID NO: 415623 - RNA, 19 nt, Artificial Sequence
  Description of Artificial Sequence: Synthetic oligonucleotide
  Sense Strand Starting at position 1234 of SEQ ID NO: 318766
ucugguucgacauaguaag

SEQ ID NO: 415624 - RNA, 19 nt, Artificial Sequence
  Description of Artificial Sequence: Synthetic oligonucleotide
  Antisense Strand to SEQ ID NO: 415623
cuuacuaugucgaaccaga

SEQ ID NO: 415625 - RNA, 19 nt, Artificial Sequence
  Description of Artificial Sequence: Synthetic oligonucleotide
  Sense Strand Starting at position 1234 of SEQ ID NO: 318912
uugucucaggguugaaaga

SEQ ID NO: 415626 - RNA, 19 nt, Artificial Sequence
  Description of Artificial Sequence: Synthetic oligonucleotide
  Antisense Strand to SEQ ID NO: 415625
ucuuucaacccugagacaa

SEQ ID NO: 415627 - RNA, 19 nt, Artificial Sequence
  Description of Artificial Sequence: Synthetic oligonucleotide
  Sense Strand Starting at position 1234 of SEQ ID NO: 319201
uccuaagagccugagaagu

SEQ ID NO: 415628 - RNA, 19 nt, Artificial Sequence
  Description of Artificial Sequence: Synthetic oligonucleotide
  Antisense Strand to SEQ ID NO: 415627
acuucucaggcucuuagga

SEQ ID NO: 415629 - RNA, 19 nt, Artificial Sequence
  Description of Artificial Sequence: Synthetic oligonucleotide
  Sense Strand Starting at position 1235 of SEQ ID NO: 315242
gggcccucauguuucuaga

SEQ ID NO: 415630 - RNA, 19 nt, Artificial Sequence
  Description of Artificial Sequence: Synthetic oligonucleotide
  Antisense Strand to SEQ ID NO: 415629
ucuagaaacaugagggccc

SEQ ID NO: 415631 - RNA, 19 nt, Artificial Sequence
  Description of Artificial Sequence: Synthetic oligonucleotide
  Sense Strand Starting at position 1235 of SEQ ID NO: 315244
gcccucauguuucuagaac

SEQ ID NO: 415632 - RNA, 19 nt, Artificial Sequence
  Description of Artificial Sequence: Synthetic oligonucleotide
  Antisense Strand to SEQ ID NO: 415631
guucuagaaacaugagggc

SEQ ID NO: 415633 - RNA, 19 nt, Artificial Sequence
  Description of Artificial Sequence: Synthetic oligonucleotide
  Sense Strand Starting at position 1235 of SEQ ID NO: 315556
acuugaccucccugaugau

SEQ ID NO: 415634 - RNA, 19 nt, Artificial Sequence
  Description of Artificial Sequence: Synthetic oligonucleotide
  Antisense Strand to SEQ ID NO: 415633
aucaucagggaggucaagu

SEQ ID NO: 415635 - RNA, 19 nt, Artificial Sequence
  Description of Artificial Sequence: Synthetic oligonucleotide
  Sense Strand Starting at position 1235 of SEQ ID NO: 315585
acagccauuuccuggucua

SEQ ID NO: 415636 - RNA, 19 nt, Artificial Sequence
  Description of Artificial Sequence: Synthetic oligonucleotide
  Antisense Strand to SEQ ID NO: 415635
uagaccaggaaauggcugu

SEQ ID NO: 415637 - RNA, 19 nt, Artificial Sequence
  Description of Artificial Sequence: Synthetic oligonucleotide
  Sense Strand Starting at position 1235 of SEQ ID NO: 315588
gccauuuccuggucuaacu

SEQ ID NO: 415638 - RNA, 19 nt, Artificial Sequence
  Description of Artificial Sequence: Synthetic oligonucleotide
  Antisense Strand to SEQ ID NO: 415637
aguuagaccaggaaauggc

SEQ ID NO: 415639 - RNA, 19 nt, Artificial Sequence
  Description of Artificial Sequence: Synthetic oligonucleotide
  Sense Strand Starting at position 1235 of SEQ ID NO: 315672
ccacaaagcuuguggagau

SEQ ID NO: 415640 - RNA, 19 nt, Artificial Sequence
  Description of Artificial Sequence: Synthetic oligonucleotide
  Antisense Strand to SEQ ID NO: 415639
aucuccacaagcuuugugg

SEQ ID NO: 415641 - RNA, 19 nt, Artificial Sequence
  Description of Artificial Sequence: Synthetic oligonucleotide
  Sense Strand Starting at position 1235 of SEQ ID NO: 315729
caagaucaggccugcguua

SEQ ID NO: 415642 - RNA, 19 nt, Artificial Sequence
  Description of Artificial Sequence: Synthetic oligonucleotide
  Antisense Strand to SEQ ID NO: 415641
uaacgcaggccugaucuug

SEQ ID NO: 415643 - RNA, 19 nt, Artificial Sequence
  Description of Artificial Sequence: Synthetic oligonucleotide
  Sense Strand Starting at position 1235 of SEQ ID NO: 315784
gugcccuugcaucagagaa

SEQ ID NO: 415644 - RNA, 19 nt, Artificial Sequence
  Description of Artificial Sequence: Synthetic oligonucleotide
  Antisense Strand to SEQ ID NO: 415643
uucucugaugcaagggcac

SEQ ID NO: 415645 - RNA, 19 nt, Artificial Sequence
  Description of Artificial Sequence: Synthetic oligonucleotide
  Sense Strand Starting at position 1235 of SEQ ID NO: 315901
augggucugcuggaucaga

SEQ ID NO: 415646 - RNA, 19 nt, Artificial Sequence
  Description of Artificial Sequence: Synthetic oligonucleotide
  Antisense Strand to SEQ ID NO: 415645
ucugauccagcagacccau

SEQ ID NO: 415647 - RNA, 19 nt, Artificial Sequence
  Description of Artificial Sequence: Synthetic oligonucleotide
  Sense Strand Starting at position 1235 of SEQ ID NO: 315912
ggaucagaauggccagauu

SEQ ID NO: 415648 - RNA, 19 nt, Artificial Sequence
  Description of Artificial Sequence: Synthetic oligonucleotide
  Antisense Strand to SEQ ID NO: 415647
aaucuggccauucugaucc

SEQ ID NO: 415649 - RNA, 19 nt, Artificial Sequence
  Description of Artificial Sequence: Synthetic oligonucleotide
  Sense Strand Starting at position 1235 of SEQ ID NO: 315947
ccagaaauaugugucucaa

SEQ ID NO: 415650 - RNA, 19 nt, Artificial Sequence
  Description of Artificial Sequence: Synthetic oligonucleotide
  Antisense Strand to SEQ ID NO: 415649
uugagacacauauuucugg

SEQ ID NO: 415651 - RNA, 19 nt, Artificial Sequence
  Description of Artificial Sequence: Synthetic oligonucleotide
  Sense Strand Starting at position 1235 of SEQ ID NO: 315949
agaaauaugugucucaaag

SEQ ID NO: 415652 - RNA, 19 nt, Artificial Sequence
  Description of Artificial Sequence: Synthetic oligonucleotide
  Antisense Strand to SEQ ID NO: 415651
cuuugagacacauauuucu

SEQ ID NO: 415653 - RNA, 19 nt, Artificial Sequence
  Description of Artificial Sequence: Synthetic oligonucleotide
  Sense Strand Starting at position 1235 of SEQ ID NO: 315987
gaccuuggauguccaguaa

SEQ ID NO: 415654 - RNA, 19 nt, Artificial Sequence
  Description of Artificial Sequence: Synthetic oligonucleotide
  Antisense Strand to SEQ ID NO: 415653
uuacuggacauccaagguc

SEQ ID NO: 415655 - RNA, 19 nt, Artificial Sequence
  Description of Artificial Sequence: Synthetic oligonucleotide
  Sense Strand Starting at position 1235 of SEQ ID NO: 316015
cuguaacuggcccaguaau

SEQ ID NO: 415656 - RNA, 19 nt, Artificial Sequence
  Description of Artificial Sequence: Synthetic oligonucleotide
  Antisense Strand to SEQ ID NO: 415655
auuacugggccaguuacag

SEQ ID NO: 415657 - RNA, 19 nt, Artificial Sequence
  Description of Artificial Sequence: Synthetic oligonucleotide
  Sense Strand Starting at position 1235 of SEQ ID NO: 316027
caguaauccagcugcggga

SEQ ID NO: 415658 - RNA, 19 nt, Artificial Sequence
  Description of Artificial Sequence: Synthetic oligonucleotide
  Antisense Strand to SEQ ID NO: 415657
ucccgcagcuggauuacug

SEQ ID NO: 415659 - RNA, 19 nt, Artificial Sequence
  Description of Artificial Sequence: Synthetic oligonucleotide
  Sense Strand Starting at position 1235 of SEQ ID NO: 316149
gcgcgaucccggguucaag

SEQ ID NO: 415660 - RNA, 19 nt, Artificial Sequence
  Description of Artificial Sequence: Synthetic oligonucleotide
  Antisense Strand to SEQ ID NO: 415659
cuugaacccgggaucgcgc

SEQ ID NO: 415661 - RNA, 19 nt, Artificial Sequence
  Description of Artificial Sequence: Synthetic oligonucleotide
  Sense Strand Starting at position 1235 of SEQ ID NO: 316474
ggaagugcguucucuccaa

SEQ ID NO: 415662 - RNA, 19 nt, Artificial Sequence
  Description of Artificial Sequence: Synthetic oligonucleotide
  Antisense Strand to SEQ ID NO: 415661
uuggagagaacgcacuucc

SEQ ID NO: 415663 - RNA, 19 nt, Artificial Sequence
  Description of Artificial Sequence: Synthetic oligonucleotide
  Sense Strand Starting at position 1235 of SEQ ID NO: 316551
ggacaucuggcuugauauu

SEQ ID NO: 415664 - RNA, 19 nt, Artificial Sequence
  Description of Artificial Sequence: Synthetic oligonucleotide
  Antisense Strand to SEQ ID NO: 415663
aauaucaagccagaugucc

SEQ ID NO: 415665 - RNA, 19 nt, Artificial Sequence
  Description of Artificial Sequence: Synthetic oligonucleotide
  Sense Strand Starting at position 1235 of SEQ ID NO: 316552
gacaucuggcuugauauuc

SEQ ID NO: 415666 - RNA, 19 nt, Artificial Sequence
  Description of Artificial Sequence: Synthetic oligonucleotide
  Antisense Strand to SEQ ID NO: 415665
gaauaucaagccagauguc

SEQ ID NO: 415667 - RNA, 19 nt, Artificial Sequence
  Description of Artificial Sequence: Synthetic oligonucleotide
  Sense Strand Starting at position 1235 of SEQ ID NO: 316591
cgggaaugcccaggacaua

SEQ ID NO: 415668 - RNA, 19 nt, Artificial Sequence
  Description of Artificial Sequence: Synthetic oligonucleotide
  Antisense Strand to SEQ ID NO: 415667
uauguccugggcauucccg

SEQ ID NO: 415669 - RNA, 19 nt, Artificial Sequence
  Description of Artificial Sequence: Synthetic oligonucleotide
  Sense Strand Starting at position 1235 of SEQ ID NO: 316732
ggcagaugccagcaucacu

SEQ ID NO: 415670 - RNA, 19 nt, Artificial Sequence
  Description of Artificial Sequence: Synthetic oligonucleotide
  Antisense Strand to SEQ ID NO: 415669
agugaugcuggcaucugcc

SEQ ID NO: 415671 - RNA, 19 nt, Artificial Sequence
  Description of Artificial Sequence: Synthetic oligonucleotide
  Sense Strand Starting at position 1235 of SEQ ID NO: 316881
ggcccagguaucuggcuau

SEQ ID NO: 415672 - RNA, 19 nt, Artificial Sequence
  Description of Artificial Sequence: Synthetic oligonucleotide
  Antisense Strand to SEQ ID NO: 415671
auagccagauaccugggcc

SEQ ID NO: 415673 - RNA, 19 nt, Artificial Sequence
  Description of Artificial Sequence: Synthetic oligonucleotide
  Sense Strand Starting at position 1235 of SEQ ID NO: 317083
ucgagcauccuccagaagu

SEQ ID NO: 415674 - RNA, 19 nt, Artificial Sequence
  Description of Artificial Sequence: Synthetic oligonucleotide
  Antisense Strand to SEQ ID NO: 415673
acuucuggaggaugcucga

SEQ ID NO: 415675 - RNA, 19 nt, Artificial Sequence
  Description of Artificial Sequence: Synthetic oligonucleotide
  Sense Strand Starting at position 1235 of SEQ ID NO: 317920
gccacugacucuuuaguac

SEQ ID NO: 415676 - RNA, 19 nt, Artificial Sequence
  Description of Artificial Sequence: Synthetic oligonucleotide
  Antisense Strand to SEQ ID NO: 415675
guacuaaagagucaguggc

SEQ ID NO: 415677 - RNA, 19 nt, Artificial Sequence
  Description of Artificial Sequence: Synthetic oligonucleotide
  Sense Strand Starting at position 1235 of SEQ ID NO: 317927
acucuuuaguaccagguau

SEQ ID NO: 415678 - RNA, 19 nt, Artificial Sequence
  Description of Artificial Sequence: Synthetic oligonucleotide
  Antisense Strand to SEQ ID NO: 415677
auaccugguacuaaagagu

SEQ ID NO: 415679 - RNA, 19 nt, Artificial Sequence
  Description of Artificial Sequence: Synthetic oligonucleotide
  Sense Strand Starting at position 1235 of SEQ ID NO: 318159
gcuucuaugcuguacagaa

SEQ ID NO: 415680 - RNA, 19 nt, Artificial Sequence
  Description of Artificial Sequence: Synthetic oligonucleotide
  Antisense Strand to SEQ ID NO: 415679
uucuguacagcauagaagc

SEQ ID NO: 415681 - RNA, 19 nt, Artificial Sequence
  Description of Artificial Sequence: Synthetic oligonucleotide
  Sense Strand Starting at position 1235 of SEQ ID NO: 318208
acauacuagucuugggagu

SEQ ID NO: 415682 - RNA, 19 nt, Artificial Sequence
  Description of Artificial Sequence: Synthetic oligonucleotide
  Antisense Strand to SEQ ID NO: 415681
acucccaagacuaguaugu

SEQ ID NO: 415683 - RNA, 19 nt, Artificial Sequence
  Description of Artificial Sequence: Synthetic oligonucleotide
  Sense Strand Starting at position 1235 of SEQ ID NO: 318209
cauacuagucuugggagua

SEQ ID NO: 415684 - RNA, 19 nt, Artificial Sequence
  Description of Artificial Sequence: Synthetic oligonucleotide
  Antisense Strand to SEQ ID NO: 415683
uacucccaagacuaguaug

SEQ ID NO: 415685 - RNA, 19 nt, Artificial Sequence
  Description of Artificial Sequence: Synthetic oligonucleotide
  Sense Strand Starting at position 1235 of SEQ ID NO: 318210
auacuagucuugggaguag

SEQ ID NO: 415686 - RNA, 19 nt, Artificial Sequence
  Description of Artificial Sequence: Synthetic oligonucleotide
  Antisense Strand to SEQ ID NO: 415685
cuacucccaagacuaguau

SEQ ID NO: 415687 - RNA, 19 nt, Artificial Sequence
  Description of Artificial Sequence: Synthetic oligonucleotide
  Sense Strand Starting at position 1235 of SEQ ID NO: 318374
cuaguaccauccuaucgua

SEQ ID NO: 415688 - RNA, 19 nt, Artificial Sequence
  Description of Artificial Sequence: Synthetic oligonucleotide
  Antisense Strand to SEQ ID NO: 415687
uacgauaggaugguacuag

SEQ ID NO: 415689 - RNA, 19 nt, Artificial Sequence
  Description of Artificial Sequence: Synthetic oligonucleotide
  Sense Strand Starting at position 1235 of SEQ ID NO: 318377
guaccauccuaucguaaga

SEQ ID NO: 415690 - RNA, 19 nt, Artificial Sequence
  Description of Artificial Sequence: Synthetic oligonucleotide
  Antisense Strand to SEQ ID NO: 415689
ucuuacgauaggaugguac

SEQ ID NO: 415691 - RNA, 19 nt, Artificial Sequence
  Description of Artificial Sequence: Synthetic oligonucleotide
  Sense Strand Starting at position 1235 of SEQ ID NO: 318379
accauccuaucguaagaca

SEQ ID NO: 415692 - RNA, 19 nt, Artificial Sequence
  Description of Artificial Sequence: Synthetic oligonucleotide
  Antisense Strand to SEQ ID NO: 415691
ugucuuacgauaggauggu

SEQ ID NO: 415693 - RNA, 19 nt, Artificial Sequence
  Description of Artificial Sequence: Synthetic oligonucleotide
  Sense Strand Starting at position 1235 of SEQ ID NO: 318416
ccucuaggaguucgagaau

SEQ ID NO: 415694 - RNA, 19 nt, Artificial Sequence
  Description of Artificial Sequence: Synthetic oligonucleotide
  Antisense Strand to SEQ ID NO: 415693
auucucgaacuccuagagg

SEQ ID NO: 415695 - RNA, 19 nt, Artificial Sequence
  Description of Artificial Sequence: Synthetic oligonucleotide
  Sense Strand Starting at position 1235 of SEQ ID NO: 318564
cugcaugcgaagugacaaa

SEQ ID NO: 415696 - RNA, 19 nt, Artificial Sequence
  Description of Artificial Sequence: Synthetic oligonucleotide
  Antisense Strand to SEQ ID NO: 415695
uuugucacuucgcaugcag

SEQ ID NO: 415697 - RNA, 19 nt, Artificial Sequence
  Description of Artificial Sequence: Synthetic oligonucleotide
  Sense Strand Starting at position 1235 of SEQ ID NO: 318596
gcagacaugacaggcaauu

SEQ ID NO: 415698 - RNA, 19 nt, Artificial Sequence
  Description of Artificial Sequence: Synthetic oligonucleotide
  Antisense Strand to SEQ ID NO: 415697
aauugccugucaugucugc

SEQ ID NO: 415699 - RNA, 19 nt, Artificial Sequence
  Description of Artificial Sequence: Synthetic oligonucleotide
  Sense Strand Starting at position 1235 of SEQ ID NO: 318646
accguauucucaggaauau

SEQ ID NO: 415700 - RNA, 19 nt, Artificial Sequence
  Description of Artificial Sequence: Synthetic oligonucleotide
  Antisense Strand to SEQ ID NO: 415699
auauuccugagaauacggu

SEQ ID NO: 415701 - RNA, 19 nt, Artificial Sequence
  Description of Artificial Sequence: Synthetic oligonucleotide
  Sense Strand Starting at position 1235 of SEQ ID NO: 318647
ccguauucucaggaauaua

SEQ ID NO: 415702 - RNA, 19 nt, Artificial Sequence
  Description of Artificial Sequence: Synthetic oligonucleotide
  Antisense Strand to SEQ ID NO: 415701
uauauuccugagaauacgg

SEQ ID NO: 415703 - RNA, 19 nt, Artificial Sequence
  Description of Artificial Sequence: Synthetic oligonucleotide
  Sense Strand Starting at position 1235 of SEQ ID NO: 318786
ggauuaucuugcuuccaca

SEQ ID NO: 415704 - RNA, 19 nt, Artificial Sequence
  Description of Artificial Sequence: Synthetic oligonucleotide
  Antisense Strand to SEQ ID NO: 415703
uguggaagcaagauaaucc

SEQ ID NO: 415705 - RNA, 19 nt, Artificial Sequence
  Description of Artificial Sequence: Synthetic oligonucleotide
  Sense Strand Starting at position 1235 of SEQ ID NO: 319005
gggagugauucagacacac

SEQ ID NO: 415706 - RNA, 19 nt, Artificial Sequence
  Description of Artificial Sequence: Synthetic oligonucleotide
  Antisense Strand to SEQ ID NO: 415705
gugugucugaaucacuccc

SEQ ID NO: 415707 - RNA, 19 nt, Artificial Sequence
  Description of Artificial Sequence: Synthetic oligonucleotide
  Sense Strand Starting at position 1235 of SEQ ID NO: 319023
cgccaugacuguccauagu

SEQ ID NO: 415708 - RNA, 19 nt, Artificial Sequence
  Description of Artificial Sequence: Synthetic oligonucleotide
  Antisense Strand to SEQ ID NO: 415707
acuauggacagucauggcg

SEQ ID NO: 415709 - RNA, 19 nt, Artificial Sequence
  Description of Artificial Sequence: Synthetic oligonucleotide
  Sense Strand Starting at position 1236 of SEQ ID NO: 315249
cacagcuuguaagcgauau

SEQ ID NO: 415710 - RNA, 19 nt, Artificial Sequence
  Description of Artificial Sequence: Synthetic oligonucleotide
  Antisense Strand to SEQ ID NO: 415709
auaucgcuuacaagcugug

SEQ ID NO: 415711 - RNA, 19 nt, Artificial Sequence
  Description of Artificial Sequence: Synthetic oligonucleotide
  Sense Strand Starting at position 1236 of SEQ ID NO: 315250
acagcuuguaagcgauaua

SEQ ID NO: 415712 - RNA, 19 nt, Artificial Sequence
  Description of Artificial Sequence: Synthetic oligonucleotide
  Antisense Strand to SEQ ID NO: 415711
uauaucgcuuacaagcugu

SEQ ID NO: 415713 - RNA, 19 nt, Artificial Sequence
  Description of Artificial Sequence: Synthetic oligonucleotide
  Sense Strand Starting at position 1236 of SEQ ID NO: 315253
gcuuguaagcgauauaacc

SEQ ID NO: 415714 - RNA, 19 nt, Artificial Sequence
  Description of Artificial Sequence: Synthetic oligonucleotide
  Antisense Strand to SEQ ID NO: 415713
gguuauaucgcuuacaagc

SEQ ID NO: 415715 - RNA, 19 nt, Artificial Sequence
  Description of Artificial Sequence: Synthetic oligonucleotide
  Sense Strand Starting at position 1236 of SEQ ID NO: 315288
gugugaugccaaggccuuu

SEQ ID NO: 415716 - RNA, 19 nt, Artificial Sequence
  Description of Artificial Sequence: Synthetic oligonucleotide
  Antisense Strand to SEQ ID NO: 415715
aaaggccuuggcaucacac

SEQ ID NO: 415717 - RNA, 19 nt, Artificial Sequence
  Description of Artificial Sequence: Synthetic oligonucleotide
  Sense Strand Starting at position 1236 of SEQ ID NO: 315354
aggugaagauuguguguau

SEQ ID NO: 415718 - RNA, 19 nt, Artificial Sequence
  Description of Artificial Sequence: Synthetic oligonucleotide
  Antisense Strand to SEQ ID NO: 415717
auacacacaaucuucaccu

SEQ ID NO: 415719 - RNA, 19 nt, Artificial Sequence
  Description of Artificial Sequence: Synthetic oligonucleotide
  Sense Strand Starting at position 1236 of SEQ ID NO: 315355
ggugaagauuguguguaug

SEQ ID NO: 415720 - RNA, 19 nt, Artificial Sequence
  Description of Artificial Sequence: Synthetic oligonucleotide
  Antisense Strand to SEQ ID NO: 415719
cauacacacaaucuucacc

SEQ ID NO: 415721 - RNA, 19 nt, Artificial Sequence
  Description of Artificial Sequence: Synthetic oligonucleotide
  Sense Strand Starting at position 1236 of SEQ ID NO: 315385
gaccguucucuccacugaa

SEQ ID NO: 415722 - RNA, 19 nt, Artificial Sequence
  Description of Artificial Sequence: Synthetic oligonucleotide
  Antisense Strand to SEQ ID NO: 415721
uucaguggagagaacgguc

SEQ ID NO: 415723 - RNA, 19 nt, Artificial Sequence
  Description of Artificial Sequence: Synthetic oligonucleotide
  Sense Strand Starting at position 1236 of SEQ ID NO: 315527
cggguuugaguuugucuga

SEQ ID NO: 415724 - RNA, 19 nt, Artificial Sequence
  Description of Artificial Sequence: Synthetic oligonucleotide
  Antisense Strand to SEQ ID NO: 415723
ucagacaaacucaaacccg

SEQ ID NO: 415725 - RNA, 19 nt, Artificial Sequence
  Description of Artificial Sequence: Synthetic oligonucleotide
  Sense Strand Starting at position 1236 of SEQ ID NO: 315530
guuugaguuugucugagga

SEQ ID NO: 415726 - RNA, 19 nt, Artificial Sequence
  Description of Artificial Sequence: Synthetic oligonucleotide
  Antisense Strand to SEQ ID NO: 415725
uccucagacaaacucaaac

SEQ ID NO: 415727 - RNA, 19 nt, Artificial Sequence
  Description of Artificial Sequence: Synthetic oligonucleotide
  Sense Strand Starting at position 1236 of SEQ ID NO: 315781
ggcgaacagcucuaggaga

SEQ ID NO: 415728 - RNA, 19 nt, Artificial Sequence
  Description of Artificial Sequence: Synthetic oligonucleotide
  Antisense Strand to SEQ ID NO: 415727
ucuccuagagcuguucgcc

SEQ ID NO: 415729 - RNA, 19 nt, Artificial Sequence
  Description of Artificial Sequence: Synthetic oligonucleotide
  Sense Strand Starting at position 1236 of SEQ ID NO: 315783
cgaacagcucuaggagagu

SEQ ID NO: 415730 - RNA, 19 nt, Artificial Sequence
  Description of Artificial Sequence: Synthetic oligonucleotide
  Antisense Strand to SEQ ID NO: 415729
acucuccuagagcuguucg

SEQ ID NO: 415731 - RNA, 19 nt, Artificial Sequence
  Description of Artificial Sequence: Synthetic oligonucleotide
  Sense Strand Starting at position 1236 of SEQ ID NO: 315942
gggagcuccuguccugaca

SEQ ID NO: 415732 - RNA, 19 nt, Artificial Sequence
  Description of Artificial Sequence: Synthetic oligonucleotide
  Antisense Strand to SEQ ID NO: 415731
ugucaggacaggagcuccc

SEQ ID NO: 415733 - RNA, 19 nt, Artificial Sequence
  Description of Artificial Sequence: Synthetic oligonucleotide
  Sense Strand Starting at position 1236 of SEQ ID NO: 315960
aggugcagagcccaugaua

SEQ ID NO: 415734 - RNA, 19 nt, Artificial Sequence
  Description of Artificial Sequence: Synthetic oligonucleotide
  Antisense Strand to SEQ ID NO: 415733
uaucaugggcucugcaccu

SEQ ID NO: 415735 - RNA, 19 nt, Artificial Sequence
  Description of Artificial Sequence: Synthetic oligonucleotide
  Sense Strand Starting at position 1236 of SEQ ID NO: 316161
caggguaaaucagcuguga

SEQ ID NO: 415736 - RNA, 19 nt, Artificial Sequence
  Description of Artificial Sequence: Synthetic oligonucleotide
  Antisense Strand to SEQ ID NO: 415735
ucacagcugauuuacccug

SEQ ID NO: 415737 - RNA, 19 nt, Artificial Sequence
  Description of Artificial Sequence: Synthetic oligonucleotide
  Sense Strand Starting at position 1236 of SEQ ID NO: 316163
ggguaaaucagcugugaca

SEQ ID NO: 415738 - RNA, 19 nt, Artificial Sequence
  Description of Artificial Sequence: Synthetic oligonucleotide
  Antisense Strand to SEQ ID NO: 415737
ugucacagcugauuuaccc

SEQ ID NO: 415739 - RNA, 19 nt, Artificial Sequence
  Description of Artificial Sequence: Synthetic oligonucleotide
  Sense Strand Starting at position 1236 of SEQ ID NO: 316259
ccaacaggguuacaagaua

SEQ ID NO: 415740 - RNA, 19 nt, Artificial Sequence
  Description of Artificial Sequence: Synthetic oligonucleotide
  Antisense Strand to SEQ ID NO: 415739
uaucuuguaacccuguugg

SEQ ID NO: 415741 - RNA, 19 nt, Artificial Sequence
  Description of Artificial Sequence: Synthetic oligonucleotide
  Sense Strand Starting at position 1236 of SEQ ID NO: 316272
aagauaagguucuguuaau

SEQ ID NO: 415742 - RNA, 19 nt, Artificial Sequence
  Description of Artificial Sequence: Synthetic oligonucleotide
  Antisense Strand to SEQ ID NO: 415741
auuaacagaaccuuaucuu

SEQ ID NO: 415743 - RNA, 19 nt, Artificial Sequence
  Description of Artificial Sequence: Synthetic oligonucleotide
  Sense Strand Starting at position 1236 of SEQ ID NO: 316273
agauaagguucuguuaauc

SEQ ID NO: 415744 - RNA, 19 nt, Artificial Sequence
  Description of Artificial Sequence: Synthetic oligonucleotide
  Antisense Strand to SEQ ID NO: 415743
gauuaacagaaccuuaucu

SEQ ID NO: 415745 - RNA, 19 nt, Artificial Sequence
  Description of Artificial Sequence: Synthetic oligonucleotide
  Sense Strand Starting at position 1236 of SEQ ID NO: 316327
ugaggacuuguguguugac

SEQ ID NO: 415746 - RNA, 19 nt, Artificial Sequence
  Description of Artificial Sequence: Synthetic oligonucleotide
  Antisense Strand to SEQ ID NO: 415745
gucaacacacaaguccuca

SEQ ID NO: 415747 - RNA, 19 nt, Artificial Sequence
  Description of Artificial Sequence: Synthetic oligonucleotide
  Sense Strand Starting at position 1236 of SEQ ID NO: 316328
gaggacuuguguguugacu

SEQ ID NO: 415748 - RNA, 19 nt, Artificial Sequence
  Description of Artificial Sequence: Synthetic oligonucleotide
  Antisense Strand to SEQ ID NO: 415747
agucaacacacaaguccuc

SEQ ID NO: 415749 - RNA, 19 nt, Artificial Sequence
  Description of Artificial Sequence: Synthetic oligonucleotide
  Sense Strand Starting at position 1236 of SEQ ID NO: 316493
ccuagacucuaagaagaug

SEQ ID NO: 415750 - RNA, 19 nt, Artificial Sequence
  Description of Artificial Sequence: Synthetic oligonucleotide
  Antisense Strand to SEQ ID NO: 415749
caucuucuuagagucuagg

SEQ ID NO: 415751 - RNA, 19 nt, Artificial Sequence
  Description of Artificial Sequence: Synthetic oligonucleotide
  Sense Strand Starting at position 1236 of SEQ ID NO: 317002
cagguagguuuccuggaca

SEQ ID NO: 415752 - RNA, 19 nt, Artificial Sequence
  Description of Artificial Sequence: Synthetic oligonucleotide
  Antisense Strand to SEQ ID NO: 415751
uguccaggaaaccuaccug

SEQ ID NO: 415753 - RNA, 19 nt, Artificial Sequence
  Description of Artificial Sequence: Synthetic oligonucleotide
  Sense Strand Starting at position 1236 of SEQ ID NO: 317210
cccaguucgccggaacuuu

SEQ ID NO: 415754 - RNA, 19 nt, Artificial Sequence
  Description of Artificial Sequence: Synthetic oligonucleotide
  Antisense Strand to SEQ ID NO: 415753
aaaguuccggcgaacuggg

SEQ ID NO: 415755 - RNA, 19 nt, Artificial Sequence
  Description of Artificial Sequence: Synthetic oligonucleotide
  Sense Strand Starting at position 1236 of SEQ ID NO: 318252
ugcacugugcgaguguaaa

SEQ ID NO: 415756 - RNA, 19 nt, Artificial Sequence
  Description of Artificial Sequence: Synthetic oligonucleotide
  Antisense Strand to SEQ ID NO: 415755
uuuacacucgcacagugca

SEQ ID NO: 415757 - RNA, 19 nt, Artificial Sequence
  Description of Artificial Sequence: Synthetic oligonucleotide
  Sense Strand Starting at position 1236 of SEQ ID NO: 318454
ggagggaggguuugucuca

SEQ ID NO: 415758 - RNA, 19 nt, Artificial Sequence
  Description of Artificial Sequence: Synthetic oligonucleotide
  Antisense Strand to SEQ ID NO: 415757
ugagacaaacccucccucc

SEQ ID NO: 415759 - RNA, 19 nt, Artificial Sequence
  Description of Artificial Sequence: Synthetic oligonucleotide
  Sense Strand Starting at position 1236 of SEQ ID NO: 318461
ggguuugucucaggccuga

SEQ ID NO: 415760 - RNA, 19 nt, Artificial Sequence
  Description of Artificial Sequence: Synthetic oligonucleotide
  Antisense Strand to SEQ ID NO: 415759
ucaggccugagacaaaccc

SEQ ID NO: 415761 - RNA, 19 nt, Artificial Sequence
  Description of Artificial Sequence: Synthetic oligonucleotide
  Sense Strand Starting at position 1236 of SEQ ID NO: 318466
ugucucaggccugacgauu

SEQ ID NO: 415762 - RNA, 19 nt, Artificial Sequence
  Description of Artificial Sequence: Synthetic oligonucleotide
  Antisense Strand to SEQ ID NO: 415761
aaucgucaggccugagaca

SEQ ID NO: 415763 - RNA, 19 nt, Artificial Sequence
  Description of Artificial Sequence: Synthetic oligonucleotide
  Sense Strand Starting at position 1236 of SEQ ID NO: 318474
gccugacgauuccugauga

SEQ ID NO: 415764 - RNA, 19 nt, Artificial Sequence
  Description of Artificial Sequence: Synthetic oligonucleotide
  Antisense Strand to SEQ ID NO: 415763
ucaucaggaaucgucaggc

SEQ ID NO: 415765 - RNA, 19 nt, Artificial Sequence
  Description of Artificial Sequence: Synthetic oligonucleotide
  Sense Strand Starting at position 1236 of SEQ ID NO: 318478
gacgauuccugaugaggac

SEQ ID NO: 415766 - RNA, 19 nt, Artificial Sequence
  Description of Artificial Sequence: Synthetic oligonucleotide
  Antisense Strand to SEQ ID NO: 415765
guccucaucaggaaucguc

SEQ ID NO: 415767 - RNA, 19 nt, Artificial Sequence
  Description of Artificial Sequence: Synthetic oligonucleotide
  Sense Strand Starting at position 1236 of SEQ ID NO: 318772
guggcaagaucagacacau

SEQ ID NO: 415768 - RNA, 19 nt, Artificial Sequence
  Description of Artificial Sequence: Synthetic oligonucleotide
  Antisense Strand to SEQ ID NO: 415767
augugucugaucuugccac

SEQ ID NO: 415769 - RNA, 19 nt, Artificial Sequence
  Description of Artificial Sequence: Synthetic oligonucleotide
  Sense Strand Starting at position 1236 of SEQ ID NO: 318809
ggcucuuucugcgcucaca

SEQ ID NO: 415770 - RNA, 19 nt, Artificial Sequence
  Description of Artificial Sequence: Synthetic oligonucleotide
  Antisense Strand to SEQ ID NO: 415769
ugugagcgcagaaagagcc

SEQ ID NO: 415771 - RNA, 19 nt, Artificial Sequence
  Description of Artificial Sequence: Synthetic oligonucleotide
  Sense Strand Starting at position 1236 of SEQ ID NO: 318864
gcaguagggcaaugagaaa

SEQ ID NO: 415772 - RNA, 19 nt, Artificial Sequence
  Description of Artificial Sequence: Synthetic oligonucleotide
  Antisense Strand to SEQ ID NO: 415771
uuucucauugcccuacugc

SEQ ID NO: 415773 - RNA, 19 nt, Artificial Sequence
  Description of Artificial Sequence: Synthetic oligonucleotide
  Sense Strand Starting at position 1236 of SEQ ID NO: 318909
ggcccagucuggguggauu

SEQ ID NO: 415774 - RNA, 19 nt, Artificial Sequence
  Description of Artificial Sequence: Synthetic oligonucleotide
  Antisense Strand to SEQ ID NO: 415773
aauccacccagacugggcc

SEQ ID NO: 415775 - RNA, 19 nt, Artificial Sequence
  Description of Artificial Sequence: Synthetic oligonucleotide
  Sense Strand Starting at position 1236 of SEQ ID NO: 318959
agggcaacuuucuacuaaa

SEQ ID NO: 415776 - RNA, 19 nt, Artificial Sequence
  Description of Artificial Sequence: Synthetic oligonucleotide
  Antisense Strand to SEQ ID NO: 415775
uuuaguagaaaguugcccu

SEQ ID NO: 415777 - RNA, 19 nt, Artificial Sequence
  Description of Artificial Sequence: Synthetic oligonucleotide
  Sense Strand Starting at position 1237 of SEQ ID NO: 315647
gucucccacaugugugaua

SEQ ID NO: 415778 - RNA, 19 nt, Artificial Sequence
  Description of Artificial Sequence: Synthetic oligonucleotide
  Antisense Strand to SEQ ID NO: 415777
uaucacacaugugggagac

SEQ ID NO: 415779 - RNA, 19 nt, Artificial Sequence
  Description of Artificial Sequence: Synthetic oligonucleotide
  Sense Strand Starting at position 1237 of SEQ ID NO: 315652
ccacaugugugauagggau

SEQ ID NO: 415780 - RNA, 19 nt, Artificial Sequence
  Description of Artificial Sequence: Synthetic oligonucleotide
  Antisense Strand to SEQ ID NO: 415779
aucccuaucacacaugugg

SEQ ID NO: 415781 - RNA, 19 nt, Artificial Sequence
  Description of Artificial Sequence: Synthetic oligonucleotide
  Sense Strand Starting at position 1237 of SEQ ID NO: 315940
aggugacccucaguaacaa

SEQ ID NO: 415782 - RNA, 19 nt, Artificial Sequence
  Description of Artificial Sequence: Synthetic oligonucleotide
  Antisense Strand to SEQ ID NO: 415781
uuguuacugagggucaccu

SEQ ID NO: 415783 - RNA, 19 nt, Artificial Sequence
  Description of Artificial Sequence: Synthetic oligonucleotide
  Sense Strand Starting at position 1237 of SEQ ID NO: 315941
ggugacccucaguaacaau

SEQ ID NO: 415784 - RNA, 19 nt, Artificial Sequence
  Description of Artificial Sequence: Synthetic oligonucleotide
  Antisense Strand to SEQ ID NO: 415783
auuguuacugagggucacc

SEQ ID NO: 415785 - RNA, 19 nt, Artificial Sequence
  Description of Artificial Sequence: Synthetic oligonucleotide
  Sense Strand Starting at position 1237 of SEQ ID NO: 316029
ucccucaaguugggauaau

SEQ ID NO: 415786 - RNA, 19 nt, Artificial Sequence
  Description of Artificial Sequence: Synthetic oligonucleotide
  Antisense Strand to SEQ ID NO: 415785
auuaucccaacuugaggga

SEQ ID NO: 415787 - RNA, 19 nt, Artificial Sequence
  Description of Artificial Sequence: Synthetic oligonucleotide
  Sense Strand Starting at position 1237 of SEQ ID NO: 316030
cccucaaguugggauaaua

SEQ ID NO: 415788 - RNA, 19 nt, Artificial Sequence
  Description of Artificial Sequence: Synthetic oligonucleotide
  Antisense Strand to SEQ ID NO: 415787
uauuaucccaacuugaggg

SEQ ID NO: 415789 - RNA, 19 nt, Artificial Sequence
  Description of Artificial Sequence: Synthetic oligonucleotide
  Sense Strand Starting at position 1237 of SEQ ID NO: 316125
aaaguuaaaccuggugauu

SEQ ID NO: 415790 - RNA, 19 nt, Artificial Sequence
  Description of Artificial Sequence: Synthetic oligonucleotide
  Antisense Strand to SEQ ID NO: 415789
aaucaccagguuuaacuuu

SEQ ID NO: 415791 - RNA, 19 nt, Artificial Sequence
  Description of Artificial Sequence: Synthetic oligonucleotide
  Sense Strand Starting at position 1237 of SEQ ID NO: 316127
aguuaaaccuggugauugu

SEQ ID NO: 415792 - RNA, 19 nt, Artificial Sequence
  Description of Artificial Sequence: Synthetic oligonucleotide
  Antisense Strand to SEQ ID NO: 415791
acaaucaccagguuuaacu

SEQ ID NO: 415793 - RNA, 19 nt, Artificial Sequence
  Description of Artificial Sequence: Synthetic oligonucleotide
  Sense Strand Starting at position 1237 of SEQ ID NO: 316128
guuaaaccuggugauuguu

SEQ ID NO: 415794 - RNA, 19 nt, Artificial Sequence
  Description of Artificial Sequence: Synthetic oligonucleotide
  Antisense Strand to SEQ ID NO: 415793
aacaaucaccagguuuaac

SEQ ID NO: 415795 - RNA, 19 nt, Artificial Sequence
  Description of Artificial Sequence: Synthetic oligonucleotide
  Sense Strand Starting at position 1237 of SEQ ID NO: 316895
gagacauguggcugagcga

SEQ ID NO: 415796 - RNA, 19 nt, Artificial Sequence
  Description of Artificial Sequence: Synthetic oligonucleotide
  Antisense Strand to SEQ ID NO: 415795
ucgcucagccacaugucuc

SEQ ID NO: 415797 - RNA, 19 nt, Artificial Sequence
  Description of Artificial Sequence: Synthetic oligonucleotide
  Sense Strand Starting at position 1237 of SEQ ID NO: 317191
ccuuguagaugucauccau

SEQ ID NO: 415798 - RNA, 19 nt, Artificial Sequence
  Description of Artificial Sequence: Synthetic oligonucleotide
  Antisense Strand to SEQ ID NO: 415797
auggaugacaucuacaagg

SEQ ID NO: 415799 - RNA, 19 nt, Artificial Sequence
  Description of Artificial Sequence: Synthetic oligonucleotide
  Sense Strand Starting at position 1237 of SEQ ID NO: 317339
cuccucuggucccagugau

SEQ ID NO: 415800 - RNA, 19 nt, Artificial Sequence
  Description of Artificial Sequence: Synthetic oligonucleotide
  Antisense Strand to SEQ ID NO: 415799
aucacugggaccagaggag

SEQ ID NO: 415801 - RNA, 19 nt, Artificial Sequence
  Description of Artificial Sequence: Synthetic oligonucleotide
  Sense Strand Starting at position 1237 of SEQ ID NO: 317643
ugacuugcccaagaucuga

SEQ ID NO: 415802 - RNA, 19 nt, Artificial Sequence
  Description of Artificial Sequence: Synthetic oligonucleotide
  Antisense Strand to SEQ ID NO: 415801
ucagaucuugggcaaguca

SEQ ID NO: 415803 - RNA, 19 nt, Artificial Sequence
  Description of Artificial Sequence: Synthetic oligonucleotide
  Sense Strand Starting at position 1237 of SEQ ID NO: 317651
ccaagaucugacugacuug

SEQ ID NO: 415804 - RNA, 19 nt, Artificial Sequence
  Description of Artificial Sequence: Synthetic oligonucleotide
  Antisense Strand to SEQ ID NO: 415803
caagucagucagaucuugg

SEQ ID NO: 415805 - RNA, 19 nt, Artificial Sequence
  Description of Artificial Sequence: Synthetic oligonucleotide
  Sense Strand Starting at position 1237 of SEQ ID NO: 317654
agaucugacugacuuggua

SEQ ID NO: 415806 - RNA, 19 nt, Artificial Sequence
  Description of Artificial Sequence: Synthetic oligonucleotide
  Antisense Strand to SEQ ID NO: 415805
uaccaagucagucagaucu

SEQ ID NO: 415807 - RNA, 19 nt, Artificial Sequence
  Description of Artificial Sequence: Synthetic oligonucleotide
  Sense Strand Starting at position 1237 of SEQ ID NO: 317686
acuaaaccucucuggaaug

SEQ ID NO: 415808 - RNA, 19 nt, Artificial Sequence
  Description of Artificial Sequence: Synthetic oligonucleotide
  Antisense Strand to SEQ ID NO: 415807
cauuccagagagguuuagu

SEQ ID NO: 415809 - RNA, 19 nt, Artificial Sequence
  Description of Artificial Sequence: Synthetic oligonucleotide
  Sense Strand Starting at position 1237 of SEQ ID NO: 317774
auaguaagaugcuguggaa

SEQ ID NO: 415810 - RNA, 19 nt, Artificial Sequence
  Description of Artificial Sequence: Synthetic oligonucleotide
  Antisense Strand to SEQ ID NO: 415809
uuccacagcaucuuacuau

SEQ ID NO: 415811 - RNA, 19 nt, Artificial Sequence
  Description of Artificial Sequence: Synthetic oligonucleotide
  Sense Strand Starting at position 1237 of SEQ ID NO: 317912
gucagcugcucucaguuau

SEQ ID NO: 415812 - RNA, 19 nt, Artificial Sequence
  Description of Artificial Sequence: Synthetic oligonucleotide
  Antisense Strand to SEQ ID NO: 415811
auaacugagagcagcugac

SEQ ID NO: 415813 - RNA, 19 nt, Artificial Sequence
  Description of Artificial Sequence: Synthetic oligonucleotide
  Sense Strand Starting at position 1237 of SEQ ID NO: 318048
uguaguuccuggguccaga

SEQ ID NO: 415814 - RNA, 19 nt, Artificial Sequence
  Description of Artificial Sequence: Synthetic oligonucleotide
  Antisense Strand to SEQ ID NO: 415813
ucuggacccaggaacuaca

SEQ ID NO: 415815 - RNA, 19 nt, Artificial Sequence
  Description of Artificial Sequence: Synthetic oligonucleotide
  Sense Strand Starting at position 1237 of SEQ ID NO: 318154
acaccuuccuucguacaga

SEQ ID NO: 415816 - RNA, 19 nt, Artificial Sequence
  Description of Artificial Sequence: Synthetic oligonucleotide
  Antisense Strand to SEQ ID NO: 415815
ucuguacgaaggaaggugu

SEQ ID NO: 415817 - RNA, 19 nt, Artificial Sequence
  Description of Artificial Sequence: Synthetic oligonucleotide
  Sense Strand Starting at position 1237 of SEQ ID NO: 318157
ccuuccuucguacagaguu

SEQ ID NO: 415818 - RNA, 19 nt, Artificial Sequence
  Description of Artificial Sequence: Synthetic oligonucleotide
  Antisense Strand to SEQ ID NO: 415817
aacucuguacgaaggaagg

SEQ ID NO: 415819 - RNA, 19 nt, Artificial Sequence
  Description of Artificial Sequence: Synthetic oligonucleotide
  Sense Strand Starting at position 1237 of SEQ ID NO: 318165
cguacagaguucguaucaa

SEQ ID NO: 415820 - RNA, 19 nt, Artificial Sequence
  Description of Artificial Sequence: Synthetic oligonucleotide
  Antisense Strand to SEQ ID NO: 415819
uugauacgaacucuguacg

SEQ ID NO: 415821 - RNA, 19 nt, Artificial Sequence
  Description of Artificial Sequence: Synthetic oligonucleotide
  Sense Strand Starting at position 1237 of SEQ ID NO: 318169
cagaguucguaucaaguuu

SEQ ID NO: 415822 - RNA, 19 nt, Artificial Sequence
  Description of Artificial Sequence: Synthetic oligonucleotide
  Antisense Strand to SEQ ID NO: 415821
aaacuugauacgaacucug

SEQ ID NO: 415823 - RNA, 19 nt, Artificial Sequence
  Description of Artificial Sequence: Synthetic oligonucleotide
  Sense Strand Starting at position 1237 of SEQ ID NO: 318281
acaagagaucuccgaaucu

SEQ ID NO: 415824 - RNA, 19 nt, Artificial Sequence
  Description of Artificial Sequence: Synthetic oligonucleotide
  Antisense Strand to SEQ ID NO: 415823
agauucggagaucucuugu

SEQ ID NO: 415825 - RNA, 19 nt, Artificial Sequence
  Description of Artificial Sequence: Synthetic oligonucleotide
  Sense Strand Starting at position 1237 of SEQ ID NO: 318290
cuccgaaucucagagaggu

SEQ ID NO: 415826 - RNA, 19 nt, Artificial Sequence
  Description of Artificial Sequence: Synthetic oligonucleotide
  Antisense Strand to SEQ ID NO: 415825
accucucugagauucggag

SEQ ID NO: 415827 - RNA, 19 nt, Artificial Sequence
  Description of Artificial Sequence: Synthetic oligonucleotide
  Sense Strand Starting at position 1237 of SEQ ID NO: 318480
cuucguguggccugggaga

SEQ ID NO: 415828 - RNA, 19 nt, Artificial Sequence
  Description of Artificial Sequence: Synthetic oligonucleotide
  Antisense Strand to SEQ ID NO: 415827
ucucccaggccacacgaag

SEQ ID NO: 415829 - RNA, 19 nt, Artificial Sequence
  Description of Artificial Sequence: Synthetic oligonucleotide
  Sense Strand Starting at position 1237 of SEQ ID NO: 319032
gguagaagggucugcgauu

SEQ ID NO: 415830 - RNA, 19 nt, Artificial Sequence
  Description of Artificial Sequence: Synthetic oligonucleotide
  Antisense Strand to SEQ ID NO: 415829
aaucgcagacccuucuacc

SEQ ID NO: 415831 - RNA, 19 nt, Artificial Sequence
  Description of Artificial Sequence: Synthetic oligonucleotide
  Sense Strand Starting at position 1238 of SEQ ID NO: 315284
ugguacuaccauugaacaa

SEQ ID NO: 415832 - RNA, 19 nt, Artificial Sequence
  Description of Artificial Sequence: Synthetic oligonucleotide
  Antisense Strand to SEQ ID NO: 415831
uuguucaaugguaguacca

SEQ ID NO: 415833 - RNA, 19 nt, Artificial Sequence
  Description of Artificial Sequence: Synthetic oligonucleotide
  Sense Strand Starting at position 1238 of SEQ ID NO: 315334
aucccaguauugucaaaug

SEQ ID NO: 415834 - RNA, 19 nt, Artificial Sequence
  Description of Artificial Sequence: Synthetic oligonucleotide
  Antisense Strand to SEQ ID NO: 415833
cauuugacaauacugggau

SEQ ID NO: 415835 - RNA, 19 nt, Artificial Sequence
  Description of Artificial Sequence: Synthetic oligonucleotide
  Sense Strand Starting at position 1238 of SEQ ID NO: 315358
agacuaauucucugcacag

SEQ ID NO: 415836 - RNA, 19 nt, Artificial Sequence
  Description of Artificial Sequence: Synthetic oligonucleotide
  Antisense Strand to SEQ ID NO: 415835
cugugcagagaauuagucu

SEQ ID NO: 415837 - RNA, 19 nt, Artificial Sequence
  Description of Artificial Sequence: Synthetic oligonucleotide
  Sense Strand Starting at position 1238 of SEQ ID NO: 315480
gcauauuaggcuuggucau

SEQ ID NO: 415838 - RNA, 19 nt, Artificial Sequence
  Description of Artificial Sequence: Synthetic oligonucleotide
  Antisense Strand to SEQ ID NO: 415837
augaccaagccuaauaugc

SEQ ID NO: 415839 - RNA, 19 nt, Artificial Sequence
  Description of Artificial Sequence: Synthetic oligonucleotide
  Sense Strand Starting at position 1238 of SEQ ID NO: 315842
cuugacaguucugcuuaca

SEQ ID NO: 415840 - RNA, 19 nt, Artificial Sequence
  Description of Artificial Sequence: Synthetic oligonucleotide
  Antisense Strand to SEQ ID NO: 415839
uguaagcagaacugucaag

SEQ ID NO: 415841 - RNA, 19 nt, Artificial Sequence
  Description of Artificial Sequence: Synthetic oligonucleotide
  Sense Strand Starting at position 1238 of SEQ ID NO: 315845
gacaguucugcuuacaguu

SEQ ID NO: 415842 - RNA, 19 nt, Artificial Sequence
  Description of Artificial Sequence: Synthetic oligonucleotide
  Antisense Strand to SEQ ID NO: 415841
aacuguaagcagaacuguc

SEQ ID NO: 415843 - RNA, 19 nt, Artificial Sequence
  Description of Artificial Sequence: Synthetic oligonucleotide
  Sense Strand Starting at position 1238 of SEQ ID NO: 315905
uuuagaaccuguguagucu

SEQ ID NO: 415844 - RNA, 19 nt, Artificial Sequence
  Description of Artificial Sequence: Synthetic oligonucleotide
  Antisense Strand to SEQ ID NO: 415843
agacuacacagguucuaaa

SEQ ID NO: 415845 - RNA, 19 nt, Artificial Sequence
  Description of Artificial Sequence: Synthetic oligonucleotide
  Sense Strand Starting at position 1238 of SEQ ID NO: 315978
ucaacuaaccgucacugua

SEQ ID NO: 415846 - RNA, 19 nt, Artificial Sequence
  Description of Artificial Sequence: Synthetic oligonucleotide
  Antisense Strand to SEQ ID NO: 415845
uacagugacgguuaguuga

SEQ ID NO: 415847 - RNA, 19 nt, Artificial Sequence
  Description of Artificial Sequence: Synthetic oligonucleotide
  Sense Strand Starting at position 1238 of SEQ ID NO: 316036
gggaguggcucauuauuaa

SEQ ID NO: 415848 - RNA, 19 nt, Artificial Sequence
  Description of Artificial Sequence: Synthetic oligonucleotide
  Antisense Strand to SEQ ID NO: 415847
uuaauaaugagccacuccc

SEQ ID NO: 415849 - RNA, 19 nt, Artificial Sequence
  Description of Artificial Sequence: Synthetic oligonucleotide
  Sense Strand Starting at position 1238 of SEQ ID NO: 316072
gguuguaggcuuuggaaau

SEQ ID NO: 415850 - RNA, 19 nt, Artificial Sequence
  Description of Artificial Sequence: Synthetic oligonucleotide
  Antisense Strand to SEQ ID NO: 415849
auuuccaaagccuacaacc

SEQ ID NO: 415851 - RNA, 19 nt, Artificial Sequence
  Description of Artificial Sequence: Synthetic oligonucleotide
  Sense Strand Starting at position 1238 of SEQ ID NO: 316092
acagaaacaguucguauca

SEQ ID NO: 415852 - RNA, 19 nt, Artificial Sequence
  Description of Artificial Sequence: Synthetic oligonucleotide
  Antisense Strand to SEQ ID NO: 415851
ugauacgaacuguuucugu

SEQ ID NO: 415853 - RNA, 19 nt, Artificial Sequence
  Description of Artificial Sequence: Synthetic oligonucleotide
  Sense Strand Starting at position 1238 of SEQ ID NO: 316117
accaauuguuaaucgaauu

SEQ ID NO: 415854 - RNA, 19 nt, Artificial Sequence
  Description of Artificial Sequence: Synthetic oligonucleotide
  Antisense Strand to SEQ ID NO: 415853
aauucgauuaacaauuggu

SEQ ID NO: 415855 - RNA, 19 nt, Artificial Sequence
  Description of Artificial Sequence: Synthetic oligonucleotide
  Sense Strand Starting at position 1238 of SEQ ID NO: 316192
cuacaacacuagggauaaa

SEQ ID NO: 415856 - RNA, 19 nt, Artificial Sequence
  Description of Artificial Sequence: Synthetic oligonucleotide
  Antisense Strand to SEQ ID NO: 415855
uuuaucccuaguguuguag

SEQ ID NO: 415857 - RNA, 19 nt, Artificial Sequence
  Description of Artificial Sequence: Synthetic oligonucleotide
  Sense Strand Starting at position 1238 of SEQ ID NO: 316204
ggauaaaugcugugucacu

SEQ ID NO: 415858 - RNA, 19 nt, Artificial Sequence
  Description of Artificial Sequence: Synthetic oligonucleotide
  Antisense Strand to SEQ ID NO: 415857
agugacacagcauuuaucc

SEQ ID NO: 415859 - RNA, 19 nt, Artificial Sequence
  Description of Artificial Sequence: Synthetic oligonucleotide
  Sense Strand Starting at position 1238 of SEQ ID NO: 316205
gauaaaugcugugucacug

SEQ ID NO: 415860 - RNA, 19 nt, Artificial Sequence
  Description of Artificial Sequence: Synthetic oligonucleotide
  Antisense Strand to SEQ ID NO: 415859
cagugacacagcauuuauc

SEQ ID NO: 415861 - RNA, 19 nt, Artificial Sequence
  Description of Artificial Sequence: Synthetic oligonucleotide
  Sense Strand Starting at position 1238 of SEQ ID NO: 316209
aaugcugugucacugagaa

SEQ ID NO: 415862 - RNA, 19 nt, Artificial Sequence
  Description of Artificial Sequence: Synthetic oligonucleotide
  Antisense Strand to SEQ ID NO: 415861
uucucagugacacagcauu

SEQ ID NO: 415863 - RNA, 19 nt, Artificial Sequence
  Description of Artificial Sequence: Synthetic oligonucleotide
  Sense Strand Starting at position 1238 of SEQ ID NO: 316211
ugcugugucacugagaaga

SEQ ID NO: 415864 - RNA, 19 nt, Artificial Sequence
  Description of Artificial Sequence: Synthetic oligonucleotide
  Antisense Strand to SEQ ID NO: 415863
ucuucucagugacacagca

SEQ ID NO: 415865 - RNA, 19 nt, Artificial Sequence
  Description of Artificial Sequence: Synthetic oligonucleotide
  Sense Strand Starting at position 1238 of SEQ ID NO: 316213
cugugucacugagaagaaa

SEQ ID NO: 415866 - RNA, 19 nt, Artificial Sequence
  Description of Artificial Sequence: Synthetic oligonucleotide
  Antisense Strand to SEQ ID NO: 415865
uuucuucucagugacacag

SEQ ID NO: 415867 - RNA, 19 nt, Artificial Sequence
  Description of Artificial Sequence: Synthetic oligonucleotide
  Sense Strand Starting at position 1238 of SEQ ID NO: 316279
guaaccugucaucgagcua

SEQ ID NO: 415868 - RNA, 19 nt, Artificial Sequence
  Description of Artificial Sequence: Synthetic oligonucleotide
  Antisense Strand to SEQ ID NO: 415867
uagcucgaugacagguuac

SEQ ID NO: 415869 - RNA, 19 nt, Artificial Sequence
  Description of Artificial Sequence: Synthetic oligonucleotide
  Sense Strand Starting at position 1238 of SEQ ID NO: 316603
gccgacuccacagguauau

SEQ ID NO: 415870 - RNA, 19 nt, Artificial Sequence
  Description of Artificial Sequence: Synthetic oligonucleotide
  Antisense Strand to SEQ ID NO: 415869
auauaccuguggagucggc

SEQ ID NO: 415871 - RNA, 19 nt, Artificial Sequence
  Description of Artificial Sequence: Synthetic oligonucleotide
  Sense Strand Starting at position 1238 of SEQ ID NO: 316786
ugacaaguguccucugcca

SEQ ID NO: 415872 - RNA, 19 nt, Artificial Sequence
  Description of Artificial Sequence: Synthetic oligonucleotide
  Antisense Strand to SEQ ID NO: 415871
uggcagaggacacuuguca

SEQ ID NO: 415873 - RNA, 19 nt, Artificial Sequence
  Description of Artificial Sequence: Synthetic oligonucleotide
  Sense Strand Starting at position 1238 of SEQ ID NO: 317018
aaaucacuuccggguuaag

SEQ ID NO: 415874 - RNA, 19 nt, Artificial Sequence
  Description of Artificial Sequence: Synthetic oligonucleotide
  Antisense Strand to SEQ ID NO: 415873
cuuaacccggaagugauuu

SEQ ID NO: 415875 - RNA, 19 nt, Artificial Sequence
  Description of Artificial Sequence: Synthetic oligonucleotide
  Sense Strand Starting at position 1238 of SEQ ID NO: 318273
ucauguaaguuccuauuag

SEQ ID NO: 415876 - RNA, 19 nt, Artificial Sequence
  Description of Artificial Sequence: Synthetic oligonucleotide
  Antisense Strand to SEQ ID NO: 415875
cuaauaggaacuuacauga

SEQ ID NO: 415877 - RNA, 19 nt, Artificial Sequence
  Description of Artificial Sequence: Synthetic oligonucleotide
  Sense Strand Starting at position 1238 of SEQ ID NO: 318306
gcaauaggguuucuuagca

SEQ ID NO: 415878 - RNA, 19 nt, Artificial Sequence
  Description of Artificial Sequence: Synthetic oligonucleotide
  Antisense Strand to SEQ ID NO: 415877
ugcuaagaaacccuauugc

SEQ ID NO: 415879 - RNA, 19 nt, Artificial Sequence
  Description of Artificial Sequence: Synthetic oligonucleotide
  Sense Strand Starting at position 1238 of SEQ ID NO: 318314
guuucuuagcaacagacua

SEQ ID NO: 415880 - RNA, 19 nt, Artificial Sequence
  Description of Artificial Sequence: Synthetic oligonucleotide
  Antisense Strand to SEQ ID NO: 415879
uagucuguugcuaagaaac

SEQ ID NO: 415881 - RNA, 19 nt, Artificial Sequence
  Description of Artificial Sequence: Synthetic oligonucleotide
  Sense Strand Starting at position 1238 of SEQ ID NO: 318355
guggaauugaguugaucgu

SEQ ID NO: 415882 - RNA, 19 nt, Artificial Sequence
  Description of Artificial Sequence: Synthetic oligonucleotide
  Antisense Strand to SEQ ID NO: 415881
acgaucaacucaauuccac

SEQ ID NO: 415883 - RNA, 19 nt, Artificial Sequence
  Description of Artificial Sequence: Synthetic oligonucleotide
  Sense Strand Starting at position 1238 of SEQ ID NO: 318356
uggaauugaguugaucguu

SEQ ID NO: 415884 - RNA, 19 nt, Artificial Sequence
  Description of Artificial Sequence: Synthetic oligonucleotide
  Antisense Strand to SEQ ID NO: 415883
aacgaucaacucaauucca

SEQ ID NO: 415885 - RNA, 19 nt, Artificial Sequence
  Description of Artificial Sequence: Synthetic oligonucleotide
  Sense Strand Starting at position 1238 of SEQ ID NO: 318359
aauugaguugaucguugca

SEQ ID NO: 415886 - RNA, 19 nt, Artificial Sequence
  Description of Artificial Sequence: Synthetic oligonucleotide
  Antisense Strand to SEQ ID NO: 415885
ugcaacgaucaacucaauu

SEQ ID NO: 415887 - RNA, 19 nt, Artificial Sequence
  Description of Artificial Sequence: Synthetic oligonucleotide
  Sense Strand Starting at position 1238 of SEQ ID NO: 318366
uugaucguugcaggcaaua

SEQ ID NO: 415888 - RNA, 19 nt, Artificial Sequence
  Description of Artificial Sequence: Synthetic oligonucleotide
  Antisense Strand to SEQ ID NO: 415887
uauugccugcaacgaucaa

SEQ ID NO: 415889 - RNA, 19 nt, Artificial Sequence
  Description of Artificial Sequence: Synthetic oligonucleotide
  Sense Strand Starting at position 1238 of SEQ ID NO: 318515
ggccucuuggaggauugua

SEQ ID NO: 415890 - RNA, 19 nt, Artificial Sequence
  Description of Artificial Sequence: Synthetic oligonucleotide
  Antisense Strand to SEQ ID NO: 415889
uacaauccuccaagaggcc

SEQ ID NO: 415891 - RNA, 19 nt, Artificial Sequence
  Description of Artificial Sequence: Synthetic oligonucleotide
  Sense Strand Starting at position 1238 of SEQ ID NO: 318523
ggaggauuguagagugcua

SEQ ID NO: 415892 - RNA, 19 nt, Artificial Sequence
  Description of Artificial Sequence: Synthetic oligonucleotide
  Antisense Strand to SEQ ID NO: 415891
uagcacucuacaauccucc

SEQ ID NO: 415893 - RNA, 19 nt, Artificial Sequence
  Description of Artificial Sequence: Synthetic oligonucleotide
  Sense Strand Starting at position 1238 of SEQ ID NO: 318600
ucuuauuuauuggaguaag

SEQ ID NO: 415894 - RNA, 19 nt, Artificial Sequence
  Description of Artificial Sequence: Synthetic oligonucleotide
  Antisense Strand to SEQ ID NO: 415893
cuuacuccaauaaauaaga

SEQ ID NO: 415895 - RNA, 19 nt, Artificial Sequence
  Description of Artificial Sequence: Synthetic oligonucleotide
  Sense Strand Starting at position 1238 of SEQ ID NO: 318624
cacuguuacgguuaaacuc

SEQ ID NO: 415896 - RNA, 19 nt, Artificial Sequence
  Description of Artificial Sequence: Synthetic oligonucleotide
  Antisense Strand to SEQ ID NO: 415895
gaguuuaaccguaacagug

SEQ ID NO: 415897 - RNA, 19 nt, Artificial Sequence
  Description of Artificial Sequence: Synthetic oligonucleotide
  Sense Strand Starting at position 1238 of SEQ ID NO: 318795
uaagguuggcauuaguaaa

SEQ ID NO: 415898 - RNA, 19 nt, Artificial Sequence
  Description of Artificial Sequence: Synthetic oligonucleotide
  Antisense Strand to SEQ ID NO: 415897
uuuacuaaugccaaccuua

SEQ ID NO: 415899 - RNA, 19 nt, Artificial Sequence
  Description of Artificial Sequence: Synthetic oligonucleotide
  Sense Strand Starting at position 1238 of SEQ ID NO: 318802
ggcauuaguaaacgaaucu

SEQ ID NO: 415900 - RNA, 19 nt, Artificial Sequence
  Description of Artificial Sequence: Synthetic oligonucleotide
  Antisense Strand to SEQ ID NO: 415899
agauucguuuacuaaugcc

SEQ ID NO: 415901 - RNA, 19 nt, Artificial Sequence
  Description of Artificial Sequence: Synthetic oligonucleotide
  Sense Strand Starting at position 1238 of SEQ ID NO: 318811
aaacgaaucuguucugguu

SEQ ID NO: 415902 - RNA, 19 nt, Artificial Sequence
  Description of Artificial Sequence: Synthetic oligonucleotide
  Antisense Strand to SEQ ID NO: 415901
aaccagaacagauucguuu

SEQ ID NO: 415903 - RNA, 19 nt, Artificial Sequence
  Description of Artificial Sequence: Synthetic oligonucleotide
  Sense Strand Starting at position 1238 of SEQ ID NO: 318952
ggaccuuacugaucugaug

SEQ ID NO: 415904 - RNA, 19 nt, Artificial Sequence
  Description of Artificial Sequence: Synthetic oligonucleotide
  Antisense Strand to SEQ ID NO: 415903
caucagaucaguaaggucc

SEQ ID NO: 415905 - RNA, 19 nt, Artificial Sequence
  Description of Artificial Sequence: Synthetic oligonucleotide
  Sense Strand Starting at position 1238 of SEQ ID NO: 319008
ccucucaggcuauaguaaa

SEQ ID NO: 415906 - RNA, 19 nt, Artificial Sequence
  Description of Artificial Sequence: Synthetic oligonucleotide
  Antisense Strand to SEQ ID NO: 415905
uuuacuauagccugagagg

SEQ ID NO: 415907 - RNA, 19 nt, Artificial Sequence
  Description of Artificial Sequence: Synthetic oligonucleotide
  Sense Strand Starting at position 1238 of SEQ ID NO: 319157
uaaaguucuguauauguga

SEQ ID NO: 415908 - RNA, 19 nt, Artificial Sequence
  Description of Artificial Sequence: Synthetic oligonucleotide
  Antisense Strand to SEQ ID NO: 415907
ucacauauacagaacuuua

SEQ ID NO: 415909 - RNA, 19 nt, Artificial Sequence
  Description of Artificial Sequence: Synthetic oligonucleotide
  Sense Strand Starting at position 1238 of SEQ ID NO: 319160
aguucuguauaugugaaca

SEQ ID NO: 415910 - RNA, 19 nt, Artificial Sequence
  Description of Artificial Sequence: Synthetic oligonucleotide
  Antisense Strand to SEQ ID NO: 415909
uguucacauauacagaacu

SEQ ID NO: 415911 - RNA, 19 nt, Artificial Sequence
  Description of Artificial Sequence: Synthetic oligonucleotide
  Sense Strand Starting at position 1239 of SEQ ID NO: 315241
auaaccuuagaguaagcau

SEQ ID NO: 415912 - RNA, 19 nt, Artificial Sequence
  Description of Artificial Sequence: Synthetic oligonucleotide
  Antisense Strand to SEQ ID NO: 415911
augcuuacucuaagguuau

SEQ ID NO: 415913 - RNA, 19 nt, Artificial Sequence
  Description of Artificial Sequence: Synthetic oligonucleotide
  Sense Strand Starting at position 1239 of SEQ ID NO: 315244
accuuagaguaagcaucaa

SEQ ID NO: 415914 - RNA, 19 nt, Artificial Sequence
  Description of Artificial Sequence: Synthetic oligonucleotide
  Antisense Strand to SEQ ID NO: 415913
uugaugcuuacucuaaggu

SEQ ID NO: 415915 - RNA, 19 nt, Artificial Sequence
  Description of Artificial Sequence: Synthetic oligonucleotide
  Sense Strand Starting at position 1239 of SEQ ID NO: 315274
gacuuacaggagugauuau

SEQ ID NO: 415916 - RNA, 19 nt, Artificial Sequence
  Description of Artificial Sequence: Synthetic oligonucleotide
  Antisense Strand to SEQ ID NO: 415915
auaaucacuccuguaaguc

SEQ ID NO: 415917 - RNA, 19 nt, Artificial Sequence
  Description of Artificial Sequence: Synthetic oligonucleotide
  Sense Strand Starting at position 1239 of SEQ ID NO: 315454
uucuaucuugaaugagaug

SEQ ID NO: 415918 - RNA, 19 nt, Artificial Sequence
  Description of Artificial Sequence: Synthetic oligonucleotide
  Antisense Strand to SEQ ID NO: 415917
caucucauucaagauagaa

SEQ ID NO: 415919 - RNA, 19 nt, Artificial Sequence
  Description of Artificial Sequence: Synthetic oligonucleotide
  Sense Strand Starting at position 1239 of SEQ ID NO: 315485
cuaaauuagcaaugaguuu

SEQ ID NO: 415920 - RNA, 19 nt, Artificial Sequence
  Description of Artificial Sequence: Synthetic oligonucleotide
  Antisense Strand to SEQ ID NO: 415919
aaacucauugcuaauuuag

SEQ ID NO: 415921 - RNA, 19 nt, Artificial Sequence
  Description of Artificial Sequence: Synthetic oligonucleotide
  Sense Strand Starting at position 1239 of SEQ ID NO: 315496
augaguuuccuauggagcu

SEQ ID NO: 415922 - RNA, 19 nt, Artificial Sequence
  Description of Artificial Sequence: Synthetic oligonucleotide
  Antisense Strand to SEQ ID NO: 415921
agcuccauaggaaacucau

SEQ ID NO: 415923 - RNA, 19 nt, Artificial Sequence
  Description of Artificial Sequence: Synthetic oligonucleotide
  Sense Strand Starting at position 1239 of SEQ ID NO: 315503
uccuauggagcuugaaaga

SEQ ID NO: 415924 - RNA, 19 nt, Artificial Sequence
  Description of Artificial Sequence: Synthetic oligonucleotide
  Antisense Strand to SEQ ID NO: 415923
ucuuucaagcuccauagga

SEQ ID NO: 415925 - RNA, 19 nt, Artificial Sequence
  Description of Artificial Sequence: Synthetic oligonucleotide
  Sense Strand Starting at position 1239 of SEQ ID NO: 315988
acgcaaacauaagugauua

SEQ ID NO: 415926 - RNA, 19 nt, Artificial Sequence
  Description of Artificial Sequence: Synthetic oligonucleotide
  Antisense Strand to SEQ ID NO: 415925
uaaucacuuauguuugcgu

SEQ ID NO: 415927 - RNA, 19 nt, Artificial Sequence
  Description of Artificial Sequence: Synthetic oligonucleotide
  Sense Strand Starting at position 1239 of SEQ ID NO: 316046
agcaguugucaauauagca

SEQ ID NO: 415928 - RNA, 19 nt, Artificial Sequence
  Description of Artificial Sequence: Synthetic oligonucleotide
  Antisense Strand to SEQ ID NO: 415927
ugcuauauugacaacugcu

SEQ ID NO: 415929 - RNA, 19 nt, Artificial Sequence
  Description of Artificial Sequence: Synthetic oligonucleotide
  Sense Strand Starting at position 1239 of SEQ ID NO: 316139
gaaagcucccuugagguau

SEQ ID NO: 415930 - RNA, 19 nt, Artificial Sequence
  Description of Artificial Sequence: Synthetic oligonucleotide
  Antisense Strand to SEQ ID NO: 415929
auaccucaagggagcuuuc

SEQ ID NO: 415931 - RNA, 19 nt, Artificial Sequence
  Description of Artificial Sequence: Synthetic oligonucleotide
  Sense Strand Starting at position 1239 of SEQ ID NO: 316248
ggaaaugacccuggucuga

SEQ ID NO: 415932 - RNA, 19 nt, Artificial Sequence
  Description of Artificial Sequence: Synthetic oligonucleotide
  Antisense Strand to SEQ ID NO: 415931
ucagaccagggucauuucc

SEQ ID NO: 415933 - RNA, 19 nt, Artificial Sequence
  Description of Artificial Sequence: Synthetic oligonucleotide
  Sense Strand Starting at position 1239 of SEQ ID NO: 316284
ugaaaugccggcgaauuau

SEQ ID NO: 415934 - RNA, 19 nt, Artificial Sequence
  Description of Artificial Sequence: Synthetic oligonucleotide
  Antisense Strand to SEQ ID NO: 415933
auaauucgccggcauuuca

SEQ ID NO: 415935 - RNA, 19 nt, Artificial Sequence
  Description of Artificial Sequence: Synthetic oligonucleotide
  Sense Strand Starting at position 1239 of SEQ ID NO: 316377
gucgaaauccuuuaacuuc

SEQ ID NO: 415936 - RNA, 19 nt, Artificial Sequence
  Description of Artificial Sequence: Synthetic oligonucleotide
  Antisense Strand to SEQ ID NO: 415935
gaaguuaaaggauuucgac

SEQ ID NO: 415937 - RNA, 19 nt, Artificial Sequence
  Description of Artificial Sequence: Synthetic oligonucleotide
  Sense Strand Starting at position 1239 of SEQ ID NO: 316555
cucaauugagcgcauugaa

SEQ ID NO: 415938 - RNA, 19 nt, Artificial Sequence
  Description of Artificial Sequence: Synthetic oligonucleotide
  Antisense Strand to SEQ ID NO: 415937
uucaaugcgcucaauugag

SEQ ID NO: 415939 - RNA, 19 nt, Artificial Sequence
  Description of Artificial Sequence: Synthetic oligonucleotide
  Sense Strand Starting at position 1239 of SEQ ID NO: 316558
aauugagcgcauugaauga

SEQ ID NO: 415940 - RNA, 19 nt, Artificial Sequence
  Description of Artificial Sequence: Synthetic oligonucleotide
  Antisense Strand to SEQ ID NO: 415939
ucauucaaugcgcucaauu

SEQ ID NO: 415941 - RNA, 19 nt, Artificial Sequence
  Description of Artificial Sequence: Synthetic oligonucleotide
  Sense Strand Starting at position 1239 of SEQ ID NO: 316617
augcauucuucuuugagau

SEQ ID NO: 415942 - RNA, 19 nt, Artificial Sequence
  Description of Artificial Sequence: Synthetic oligonucleotide
  Antisense Strand to SEQ ID NO: 415941
aucucaaagaagaaugcau

SEQ ID NO: 415943 - RNA, 19 nt, Artificial Sequence
  Description of Artificial Sequence: Synthetic oligonucleotide
  Sense Strand Starting at position 1239 of SEQ ID NO: 316782
cccggaagagucugguuaa

SEQ ID NO: 415944 - RNA, 19 nt, Artificial Sequence
  Description of Artificial Sequence: Synthetic oligonucleotide
  Antisense Strand to SEQ ID NO: 415943
uuaaccagacucuuccggg

SEQ ID NO: 415945 - RNA, 19 nt, Artificial Sequence
  Description of Artificial Sequence: Synthetic oligonucleotide
  Sense Strand Starting at position 1239 of SEQ ID NO: 316886
ucaggacuuccagagacgu

SEQ ID NO: 415946 - RNA, 19 nt, Artificial Sequence
  Description of Artificial Sequence: Synthetic oligonucleotide
  Antisense Strand to SEQ ID NO: 415945
acgucucuggaaguccuga

SEQ ID NO: 415947 - RNA, 19 nt, Artificial Sequence
  Description of Artificial Sequence: Synthetic oligonucleotide
  Sense Strand Starting at position 1239 of SEQ ID NO: 317921
acgucauugcggguagcaa

SEQ ID NO: 415948 - RNA, 19 nt, Artificial Sequence
  Description of Artificial Sequence: Synthetic oligonucleotide
  Antisense Strand to SEQ ID NO: 415947
uugcuacccgcaaugacgu

SEQ ID NO: 415949 - RNA, 19 nt, Artificial Sequence
  Description of Artificial Sequence: Synthetic oligonucleotide
  Sense Strand Starting at position 1239 of SEQ ID NO: 318057
ggccucgggucgauuguaa

SEQ ID NO: 415950 - RNA, 19 nt, Artificial Sequence
  Description of Artificial Sequence: Synthetic oligonucleotide
  Antisense Strand to SEQ ID NO: 415949
uuacaaucgacccgaggcc

SEQ ID NO: 415951 - RNA, 19 nt, Artificial Sequence
  Description of Artificial Sequence: Synthetic oligonucleotide
  Sense Strand Starting at position 1239 of SEQ ID NO: 318077
ccuccaagcgugcuguuua

SEQ ID NO: 415952 - RNA, 19 nt, Artificial Sequence
  Description of Artificial Sequence: Synthetic oligonucleotide
  Antisense Strand to SEQ ID NO: 415951
uaaacagcacgcuuggagg

SEQ ID NO: 415953 - RNA, 19 nt, Artificial Sequence
  Description of Artificial Sequence: Synthetic oligonucleotide
  Sense Strand Starting at position 1239 of SEQ ID NO: 318109
ccgggaauccgaagcguuu

SEQ ID NO: 415954 - RNA, 19 nt, Artificial Sequence
  Description of Artificial Sequence: Synthetic oligonucleotide
  Antisense Strand to SEQ ID NO: 415953
aaacgcuucggauucccgg

SEQ ID NO: 415955 - RNA, 19 nt, Artificial Sequence
  Description of Artificial Sequence: Synthetic oligonucleotide
  Sense Strand Starting at position 1239 of SEQ ID NO: 318377
aagagcauauggucaguuu

SEQ ID NO: 415956 - RNA, 19 nt, Artificial Sequence
  Description of Artificial Sequence: Synthetic oligonucleotide
  Antisense Strand to SEQ ID NO: 415955
aaacugaccauaugcucuu

SEQ ID NO: 415957 - RNA, 19 nt, Artificial Sequence
  Description of Artificial Sequence: Synthetic oligonucleotide
  Sense Strand Starting at position 1239 of SEQ ID NO: 318468
uggguugaguguucuauuu

SEQ ID NO: 415958 - RNA, 19 nt, Artificial Sequence
  Description of Artificial Sequence: Synthetic oligonucleotide
  Antisense Strand to SEQ ID NO: 415957
aaauagaacacucaaccca

SEQ ID NO: 415959 - RNA, 19 nt, Artificial Sequence
  Description of Artificial Sequence: Synthetic oligonucleotide
  Sense Strand Starting at position 1239 of SEQ ID NO: 318521
cagagaugucacugucacu

SEQ ID NO: 415960 - RNA, 19 nt, Artificial Sequence
  Description of Artificial Sequence: Synthetic oligonucleotide
  Antisense Strand to SEQ ID NO: 415959
agugacagugacaucucug

SEQ ID NO: 415961 - RNA, 19 nt, Artificial Sequence
  Description of Artificial Sequence: Synthetic oligonucleotide
  Sense Strand Starting at position 1239 of SEQ ID NO: 318543
cucaucuguccagaacugu

SEQ ID NO: 415962 - RNA, 19 nt, Artificial Sequence
  Description of Artificial Sequence: Synthetic oligonucleotide
  Antisense Strand to SEQ ID NO: 415961
acaguucuggacagaugag

SEQ ID NO: 415963 - RNA, 19 nt, Artificial Sequence
  Description of Artificial Sequence: Synthetic oligonucleotide
  Sense Strand Starting at position 1239 of SEQ ID NO: 318689
caucacagucuuuggcaga

SEQ ID NO: 415964 - RNA, 19 nt, Artificial Sequence
  Description of Artificial Sequence: Synthetic oligonucleotide
  Antisense Strand to SEQ ID NO: 415963
ucugccaaagacugugaug

SEQ ID NO: 415965 - RNA, 19 nt, Artificial Sequence
  Description of Artificial Sequence: Synthetic oligonucleotide
  Sense Strand Starting at position 1239 of SEQ ID NO: 318694
cagucuuuggcagauggaa

SEQ ID NO: 415966 - RNA, 19 nt, Artificial Sequence
  Description of Artificial Sequence: Synthetic oligonucleotide
  Antisense Strand to SEQ ID NO: 415965
uuccaucugccaaagacug

SEQ ID NO: 415967 - RNA, 19 nt, Artificial Sequence
  Description of Artificial Sequence: Synthetic oligonucleotide
  Sense Strand Starting at position 1239 of SEQ ID NO: 318696
gucuuuggcagauggaaga

SEQ ID NO: 415968 - RNA, 19 nt, Artificial Sequence
  Description of Artificial Sequence: Synthetic oligonucleotide
  Antisense Strand to SEQ ID NO: 415967
ucuuccaucugccaaagac

SEQ ID NO: 415969 - RNA, 19 nt, Artificial Sequence
  Description of Artificial Sequence: Synthetic oligonucleotide
  Sense Strand Starting at position 1239 of SEQ ID NO: 318706
gauggaagauggcuuuacu

SEQ ID NO: 415970 - RNA, 19 nt, Artificial Sequence
  Description of Artificial Sequence: Synthetic oligonucleotide
  Antisense Strand to SEQ ID NO: 415969
aguaaagccaucuuccauc

SEQ ID NO: 415971 - RNA, 19 nt, Artificial Sequence
  Description of Artificial Sequence: Synthetic oligonucleotide
  Sense Strand Starting at position 1239 of SEQ ID NO: 318709
ggaagauggcuuuacuucu

SEQ ID NO: 415972 - RNA, 19 nt, Artificial Sequence
  Description of Artificial Sequence: Synthetic oligonucleotide
  Antisense Strand to SEQ ID NO: 415971
agaaguaaagccaucuucc

SEQ ID NO: 415973 - RNA, 19 nt, Artificial Sequence
  Description of Artificial Sequence: Synthetic oligonucleotide
  Sense Strand Starting at position 1239 of SEQ ID NO: 318755
aguauuuauugggcgcaca

SEQ ID NO: 415974 - RNA, 19 nt, Artificial Sequence
  Description of Artificial Sequence: Synthetic oligonucleotide
  Antisense Strand to SEQ ID NO: 415973
ugugcgcccaauaaauacu

SEQ ID NO: 415975 - RNA, 19 nt, Artificial Sequence
  Description of Artificial Sequence: Synthetic oligonucleotide
  Sense Strand Starting at position 1239 of SEQ ID NO: 318796
cugcgauggguucaaagua

SEQ ID NO: 415976 - RNA, 19 nt, Artificial Sequence
  Description of Artificial Sequence: Synthetic oligonucleotide
  Antisense Strand to SEQ ID NO: 415975
uacuuugaacccaucgcag

SEQ ID NO: 415977 - RNA, 19 nt, Artificial Sequence
  Description of Artificial Sequence: Synthetic oligonucleotide
  Sense Strand Starting at position 1239 of SEQ ID NO: 318843
uauaaccuggcuugugaga

SEQ ID NO: 415978 - RNA, 19 nt, Artificial Sequence
  Description of Artificial Sequence: Synthetic oligonucleotide
  Antisense Strand to SEQ ID NO: 415977
ucucacaagccagguuaua

SEQ ID NO: 415979 - RNA, 19 nt, Artificial Sequence
  Description of Artificial Sequence: Synthetic oligonucleotide
  Sense Strand Starting at position 1239 of SEQ ID NO: 318850
uggcuugugagacagacua

SEQ ID NO: 415980 - RNA, 19 nt, Artificial Sequence
  Description of Artificial Sequence: Synthetic oligonucleotide
  Antisense Strand to SEQ ID NO: 415979
uagucugucucacaagcca

SEQ ID NO: 415981 - RNA, 19 nt, Artificial Sequence
  Description of Artificial Sequence: Synthetic oligonucleotide
  Sense Strand Starting at position 1239 of SEQ ID NO: 318916
ccaccaaagaguugugaug

SEQ ID NO: 415982 - RNA, 19 nt, Artificial Sequence
  Description of Artificial Sequence: Synthetic oligonucleotide
  Antisense Strand to SEQ ID NO: 415981
caucacaacucuuuggugg

SEQ ID NO: 415983 - RNA, 19 nt, Artificial Sequence
  Description of Artificial Sequence: Synthetic oligonucleotide
  Sense Strand Starting at position 1239 of SEQ ID NO: 319053
acugcauucugagucuaga

SEQ ID NO: 415984 - RNA, 19 nt, Artificial Sequence
  Description of Artificial Sequence: Synthetic oligonucleotide
  Antisense Strand to SEQ ID NO: 415983
ucuagacucagaaugcagu

SEQ ID NO: 415985 - RNA, 19 nt, Artificial Sequence
  Description of Artificial Sequence: Synthetic oligonucleotide
  Sense Strand Starting at position 1239 of SEQ ID NO: 319056
gcauucugagucuagaggu

SEQ ID NO: 415986 - RNA, 19 nt, Artificial Sequence
  Description of Artificial Sequence: Synthetic oligonucleotide
  Antisense Strand to SEQ ID NO: 415985
accucuagacucagaaugc

SEQ ID NO: 415987 - RNA, 19 nt, Artificial Sequence
  Description of Artificial Sequence: Synthetic oligonucleotide
  Sense Strand Starting at position 1239 of SEQ ID NO: 319062
ugagucuagagguggagaa

SEQ ID NO: 415988 - RNA, 19 nt, Artificial Sequence
  Description of Artificial Sequence: Synthetic oligonucleotide
  Antisense Strand to SEQ ID NO: 415987
uucuccaccucuagacuca

SEQ ID NO: 415989 - RNA, 19 nt, Artificial Sequence
  Description of Artificial Sequence: Synthetic oligonucleotide
  Sense Strand Starting at position 1239 of SEQ ID NO: 319124
cucucugauggccauguaa

SEQ ID NO: 415990 - RNA, 19 nt, Artificial Sequence
  Description of Artificial Sequence: Synthetic oligonucleotide
  Antisense Strand to SEQ ID NO: 415989
uuacauggccaucagagag

SEQ ID NO: 415991 - RNA, 19 nt, Artificial Sequence
  Description of Artificial Sequence: Synthetic oligonucleotide
  Sense Strand Starting at position 1240 of SEQ ID NO: 316370
ccugaacagcuguauguaa

SEQ ID NO: 415992 - RNA, 19 nt, Artificial Sequence
  Description of Artificial Sequence: Synthetic oligonucleotide
  Antisense Strand to SEQ ID NO: 415991
uuacauacagcuguucagg

SEQ ID NO: 415993 - RNA, 19 nt, Artificial Sequence
  Description of Artificial Sequence: Synthetic oligonucleotide
  Sense Strand Starting at position 1240 of SEQ ID NO: 316372
ugaacagcuguauguaaau

SEQ ID NO: 415994 - RNA, 19 nt, Artificial Sequence
  Description of Artificial Sequence: Synthetic oligonucleotide
  Antisense Strand to SEQ ID NO: 415993
auuuacauacagcuguuca

SEQ ID NO: 415995 - RNA, 19 nt, Artificial Sequence
  Description of Artificial Sequence: Synthetic oligonucleotide
  Sense Strand Starting at position 1240 of SEQ ID NO: 316415
cuuaauuucuguuaaggaa

SEQ ID NO: 415996 - RNA, 19 nt, Artificial Sequence
  Description of Artificial Sequence: Synthetic oligonucleotide
  Antisense Strand to SEQ ID NO: 415995
uuccuuaacagaaauuaag

SEQ ID NO: 415997 - RNA, 19 nt, Artificial Sequence
  Description of Artificial Sequence: Synthetic oligonucleotide
  Sense Strand Starting at position 1240 of SEQ ID NO: 316548
aaggauuccuaacagggaa

SEQ ID NO: 415998 - RNA, 19 nt, Artificial Sequence
  Description of Artificial Sequence: Synthetic oligonucleotide
  Antisense Strand to SEQ ID NO: 415997
uucccuguuaggaauccuu

SEQ ID NO: 415999 - RNA, 19 nt, Artificial Sequence
  Description of Artificial Sequence: Synthetic oligonucleotide
  Sense Strand Starting at position 1240 of SEQ ID NO: 316604
gucaacuaugugcaucaga

SEQ ID NO: 416000 - RNA, 19 nt, Artificial Sequence
  Description of Artificial Sequence: Synthetic oligonucleotide
  Antisense Strand to SEQ ID NO: 415999
ucugaugcacauaguugac

SEQ ID NO: 416001 - RNA, 19 nt, Artificial Sequence
  Description of Artificial Sequence: Synthetic oligonucleotide
  Sense Strand Starting at position 1240 of SEQ ID NO: 316619
cagaaauaaccaugcaggu

SEQ ID NO: 416002 - RNA, 19 nt, Artificial Sequence
  Description of Artificial Sequence: Synthetic oligonucleotide
  Antisense Strand to SEQ ID NO: 416001
accugcaugguuauuucug

SEQ ID NO: 416003 - RNA, 19 nt, Artificial Sequence
  Description of Artificial Sequence: Synthetic oligonucleotide
  Sense Strand Starting at position 1240 of SEQ ID NO: 316693
aaagguaagugaucgugga

SEQ ID NO: 416004 - RNA, 19 nt, Artificial Sequence
  Description of Artificial Sequence: Synthetic oligonucleotide
  Antisense Strand to SEQ ID NO: 416003
uccacgaucacuuaccuuu

SEQ ID NO: 416005 - RNA, 19 nt, Artificial Sequence
  Description of Artificial Sequence: Synthetic oligonucleotide
  Sense Strand Starting at position 1240 of SEQ ID NO: 316694
aagguaagugaucguggau

SEQ ID NO: 416006 - RNA, 19 nt, Artificial Sequence
  Description of Artificial Sequence: Synthetic oligonucleotide
  Antisense Strand to SEQ ID NO: 416005
auccacgaucacuuaccuu

SEQ ID NO: 416007 - RNA, 19 nt, Artificial Sequence
  Description of Artificial Sequence: Synthetic oligonucleotide
  Sense Strand Starting at position 1240 of SEQ ID NO: 317550
gucuaacugucuuccugau

SEQ ID NO: 416008 - RNA, 19 nt, Artificial Sequence
  Description of Artificial Sequence: Synthetic oligonucleotide
  Antisense Strand to SEQ ID NO: 416007
aucaggaagacaguuagac

SEQ ID NO: 416009 - RNA, 19 nt, Artificial Sequence
  Description of Artificial Sequence: Synthetic oligonucleotide
  Sense Strand Starting at position 1240 of SEQ ID NO: 317577
ccggauauuccauauucca

SEQ ID NO: 416010 - RNA, 19 nt, Artificial Sequence
  Description of Artificial Sequence: Synthetic oligonucleotide
  Antisense Strand to SEQ ID NO: 416009
uggaauauggaauauccgg

SEQ ID NO: 416011 - RNA, 19 nt, Artificial Sequence
  Description of Artificial Sequence: Synthetic oligonucleotide
  Sense Strand Starting at position 1240 of SEQ ID NO: 317759
cuagaucuacuugacugua

SEQ ID NO: 416012 - RNA, 19 nt, Artificial Sequence
  Description of Artificial Sequence: Synthetic oligonucleotide
  Antisense Strand to SEQ ID NO: 416011
uacagucaaguagaucuag

SEQ ID NO: 416013 - RNA, 19 nt, Artificial Sequence
  Description of Artificial Sequence: Synthetic oligonucleotide
  Sense Strand Starting at position 1240 of SEQ ID NO: 317761
agaucuacuugacuguauu

SEQ ID NO: 416014 - RNA, 19 nt, Artificial Sequence
  Description of Artificial Sequence: Synthetic oligonucleotide
  Antisense Strand to SEQ ID NO: 416013
aauacagucaaguagaucu

SEQ ID NO: 416015 - RNA, 19 nt, Artificial Sequence
  Description of Artificial Sequence: Synthetic oligonucleotide
  Sense Strand Starting at position 1240 of SEQ ID NO: 317863
ugaauccauccuugagcua

SEQ ID NO: 416016 - RNA, 19 nt, Artificial Sequence
  Description of Artificial Sequence: Synthetic oligonucleotide
  Antisense Strand to SEQ ID NO: 416015
uagcucaaggauggauuca

SEQ ID NO: 416017 - RNA, 19 nt, Artificial Sequence
  Description of Artificial Sequence: Synthetic oligonucleotide
  Sense Strand Starting at position 1240 of SEQ ID NO: 318087
aaaguugugcuuugaugga

SEQ ID NO: 416018 - RNA, 19 nt, Artificial Sequence
  Description of Artificial Sequence: Synthetic oligonucleotide
  Antisense Strand to SEQ ID NO: 416017
uccaucaaagcacaacuuu

SEQ ID NO: 416019 - RNA, 19 nt, Artificial Sequence
  Description of Artificial Sequence: Synthetic oligonucleotide
  Sense Strand Starting at position 1240 of SEQ ID NO: 318142
ucugauucuaugggaguua

SEQ ID NO: 416020 - RNA, 19 nt, Artificial Sequence
  Description of Artificial Sequence: Synthetic oligonucleotide
  Antisense Strand to SEQ ID NO: 416019
uaacucccauagaaucaga

SEQ ID NO: 416021 - RNA, 19 nt, Artificial Sequence
  Description of Artificial Sequence: Synthetic oligonucleotide
  Sense Strand Starting at position 1240 of SEQ ID NO: 318173
guaaauuauagauaagcga

SEQ ID NO: 416022 - RNA, 19 nt, Artificial Sequence
  Description of Artificial Sequence: Synthetic oligonucleotide
  Antisense Strand to SEQ ID NO: 416021
ucgcuuaucuauaauuuac

SEQ ID NO: 416023 - RNA, 19 nt, Artificial Sequence
  Description of Artificial Sequence: Synthetic oligonucleotide
  Sense Strand Starting at position 1240 of SEQ ID NO: 318306
ucauuccuggucuagaaug

SEQ ID NO: 416024 - RNA, 19 nt, Artificial Sequence
  Description of Artificial Sequence: Synthetic oligonucleotide
  Antisense Strand to SEQ ID NO: 416023
cauucuagaccaggaauga

SEQ ID NO: 416025 - RNA, 19 nt, Artificial Sequence
  Description of Artificial Sequence: Synthetic oligonucleotide
  Sense Strand Starting at position 1240 of SEQ ID NO: 318308
auuccuggucuagaauguu

SEQ ID NO: 416026 - RNA, 19 nt, Artificial Sequence
  Description of Artificial Sequence: Synthetic oligonucleotide
  Antisense Strand to SEQ ID NO: 416025
aacauucuagaccaggaau

SEQ ID NO: 416027 - RNA, 19 nt, Artificial Sequence
  Description of Artificial Sequence: Synthetic oligonucleotide
  Sense Strand Starting at position 1240 of SEQ ID NO: 318317
cuagaauguuuguuguuug

SEQ ID NO: 416028 - RNA, 19 nt, Artificial Sequence
  Description of Artificial Sequence: Synthetic oligonucleotide
  Antisense Strand to SEQ ID NO: 416027
caaacaacaaacauucuag

SEQ ID NO: 416029 - RNA, 19 nt, Artificial Sequence
  Description of Artificial Sequence: Synthetic oligonucleotide
  Sense Strand Starting at position 1240 of SEQ ID NO: 318320
gaauguuuguuguuuggac

SEQ ID NO: 416030 - RNA, 19 nt, Artificial Sequence
  Description of Artificial Sequence: Synthetic oligonucleotide
  Antisense Strand to SEQ ID NO: 416029
guccaaacaacaaacauuc

SEQ ID NO: 416031 - RNA, 19 nt, Artificial Sequence
  Description of Artificial Sequence: Synthetic oligonucleotide
  Sense Strand Starting at position 1240 of SEQ ID NO: 318335
ggacuuacccuuugaacca

SEQ ID NO: 416032 - RNA, 19 nt, Artificial Sequence
  Description of Artificial Sequence: Synthetic oligonucleotide
  Antisense Strand to SEQ ID NO: 416031
ugguucaaaggguaagucc

SEQ ID NO: 416033 - RNA, 19 nt, Artificial Sequence
  Description of Artificial Sequence: Synthetic oligonucleotide
  Sense Strand Starting at position 1240 of SEQ ID NO: 318540
ccugacaguccuggaaagu

SEQ ID NO: 416034 - RNA, 19 nt, Artificial Sequence
  Description of Artificial Sequence: Synthetic oligonucleotide
  Antisense Strand to SEQ ID NO: 416033
acuuuccaggacugucagg

SEQ ID NO: 416035 - RNA, 19 nt, Artificial Sequence
  Description of Artificial Sequence: Synthetic oligonucleotide
  Sense Strand Starting at position 1240 of SEQ ID NO: 318541
cugacaguccuggaaaguc

SEQ ID NO: 416036 - RNA, 19 nt, Artificial Sequence
  Description of Artificial Sequence: Synthetic oligonucleotide
  Antisense Strand to SEQ ID NO: 416035
gacuuuccaggacugucag

SEQ ID NO: 416037 - RNA, 19 nt, Artificial Sequence
  Description of Artificial Sequence: Synthetic oligonucleotide
  Sense Strand Starting at position 1240 of SEQ ID NO: 318551
uggaaagucuuccuuugcu

SEQ ID NO: 416038 - RNA, 19 nt, Artificial Sequence
  Description of Artificial Sequence: Synthetic oligonucleotide
  Antisense Strand to SEQ ID NO: 416037
agcaaaggaagacuuucca

SEQ ID NO: 416039 - RNA, 19 nt, Artificial Sequence
  Description of Artificial Sequence: Synthetic oligonucleotide
  Sense Strand Starting at position 1240 of SEQ ID NO: 318772
cuuucuguguguuuaaaga

SEQ ID NO: 416040 - RNA, 19 nt, Artificial Sequence
  Description of Artificial Sequence: Synthetic oligonucleotide
  Antisense Strand to SEQ ID NO: 416039
ucuuuaaacacacagaaag

SEQ ID NO: 416041 - RNA, 19 nt, Artificial Sequence
  Description of Artificial Sequence: Synthetic oligonucleotide
  Sense Strand Starting at position 1240 of SEQ ID NO: 318795
ccuggugaauuugaauaca

SEQ ID NO: 416042 - RNA, 19 nt, Artificial Sequence
  Description of Artificial Sequence: Synthetic oligonucleotide
  Antisense Strand to SEQ ID NO: 416041
uguauucaaauucaccagg

SEQ ID NO: 416043 - RNA, 19 nt, Artificial Sequence
  Description of Artificial Sequence: Synthetic oligonucleotide
  Sense Strand Starting at position 1240 of SEQ ID NO: 318816
gcauuaaagaaugguaggu

SEQ ID NO: 416044 - RNA, 19 nt, Artificial Sequence
  Description of Artificial Sequence: Synthetic oligonucleotide
  Antisense Strand to SEQ ID NO: 416043
accuaccauucuuuaaugc

SEQ ID NO: 416045 - RNA, 19 nt, Artificial Sequence
  Description of Artificial Sequence: Synthetic oligonucleotide
  Sense Strand Starting at position 1240 of SEQ ID NO: 318829
guagguaugaugcauagag

SEQ ID NO: 416046 - RNA, 19 nt, Artificial Sequence
  Description of Artificial Sequence: Synthetic oligonucleotide
  Antisense Strand to SEQ ID NO: 416045
cucuaugcaucauaccuac

SEQ ID NO: 416047 - RNA, 19 nt, Artificial Sequence
  Description of Artificial Sequence: Synthetic oligonucleotide
  Sense Strand Starting at position 1240 of SEQ ID NO: 318831
agguaugaugcauagagug

SEQ ID NO: 416048 - RNA, 19 nt, Artificial Sequence
  Description of Artificial Sequence: Synthetic oligonucleotide
  Antisense Strand to SEQ ID NO: 416047
cacucuaugcaucauaccu

SEQ ID NO: 416049 - RNA, 19 nt, Artificial Sequence
  Description of Artificial Sequence: Synthetic oligonucleotide
  Sense Strand Starting at position 1240 of SEQ ID NO: 318838
augcauagagugugacuaa

SEQ ID NO: 416050 - RNA, 19 nt, Artificial Sequence
  Description of Artificial Sequence: Synthetic oligonucleotide
  Antisense Strand to SEQ ID NO: 416049
uuagucacacucuaugcau

SEQ ID NO: 416051 - RNA, 19 nt, Artificial Sequence
  Description of Artificial Sequence: Synthetic oligonucleotide
  Sense Strand Starting at position 1240 of SEQ ID NO: 318841
cauagagugugacuaauau

SEQ ID NO: 416052 - RNA, 19 nt, Artificial Sequence
  Description of Artificial Sequence: Synthetic oligonucleotide
  Antisense Strand to SEQ ID NO: 416051
auauuagucacacucuaug

SEQ ID NO: 416053 - RNA, 19 nt, Artificial Sequence
  Description of Artificial Sequence: Synthetic oligonucleotide
  Sense Strand Starting at position 1240 of SEQ ID NO: 318996
ucaguuuaagacuagcaga

SEQ ID NO: 416054 - RNA, 19 nt, Artificial Sequence
  Description of Artificial Sequence: Synthetic oligonucleotide
  Antisense Strand to SEQ ID NO: 416053
ucugcuagucuuaaacuga

SEQ ID NO: 416055 - RNA, 19 nt, Artificial Sequence
  Description of Artificial Sequence: Synthetic oligonucleotide
  Sense Strand Starting at position 1240 of SEQ ID NO: 319102
augaaauaguguguccuca

SEQ ID NO: 416056 - RNA, 19 nt, Artificial Sequence
  Description of Artificial Sequence: Synthetic oligonucleotide
  Antisense Strand to SEQ ID NO: 416055
ugaggacacacuauuucau

SEQ ID NO: 416057 - RNA, 19 nt, Artificial Sequence
  Description of Artificial Sequence: Synthetic oligonucleotide
  Sense Strand Starting at position 1240 of SEQ ID NO: 319104
gaaauaguguguccucaga

SEQ ID NO: 416058 - RNA, 19 nt, Artificial Sequence
  Description of Artificial Sequence: Synthetic oligonucleotide
  Antisense Strand to SEQ ID NO: 416057
ucugaggacacacuauuuc

SEQ ID NO: 416059 - RNA, 19 nt, Artificial Sequence
  Description of Artificial Sequence: Synthetic oligonucleotide
  Sense Strand Starting at position 1240 of SEQ ID NO: 319106
aauaguguguccucagagu

SEQ ID NO: 416060 - RNA, 19 nt, Artificial Sequence
  Description of Artificial Sequence: Synthetic oligonucleotide
  Antisense Strand to SEQ ID NO: 416059
acucugaggacacacuauu

SEQ ID NO: 416061 - RNA, 19 nt, Artificial Sequence
  Description of Artificial Sequence: Synthetic oligonucleotide
  Sense Strand Starting at position 1240 of SEQ ID NO: 319129
augagaauuagaugugcca

SEQ ID NO: 416062 - RNA, 19 nt, Artificial Sequence
  Description of Artificial Sequence: Synthetic oligonucleotide
  Antisense Strand to SEQ ID NO: 416061
uggcacaucuaauucucau

SEQ ID NO: 416063 - RNA, 19 nt, Artificial Sequence
  Description of Artificial Sequence: Synthetic oligonucleotide
  Sense Strand Starting at position 1240 of SEQ ID NO: 319132
agaauuagaugugccaaua

SEQ ID NO: 416064 - RNA, 19 nt, Artificial Sequence
  Description of Artificial Sequence: Synthetic oligonucleotide
  Antisense Strand to SEQ ID NO: 416063
uauuggcacaucuaauucu

SEQ ID NO: 416065 - RNA, 19 nt, Artificial Sequence
  Description of Artificial Sequence: Synthetic oligonucleotide
  Sense Strand Starting at position 1240 of SEQ ID NO: 319164
uagaauaaugccuaguuga

SEQ ID NO: 416066 - RNA, 19 nt, Artificial Sequence
  Description of Artificial Sequence: Synthetic oligonucleotide
  Antisense Strand to SEQ ID NO: 416065
ucaacuaggcauuauucua

SEQ ID NO: 416067 - RNA, 19 nt, Artificial Sequence
  Description of Artificial Sequence: Synthetic oligonucleotide
  Sense Strand Starting at position 1240 of SEQ ID NO: 319171
augccuaguugauuauaaa

SEQ ID NO: 416068 - RNA, 19 nt, Artificial Sequence
  Description of Artificial Sequence: Synthetic oligonucleotide
  Antisense Strand to SEQ ID NO: 416067
uuuauaaucaacuaggcau

SEQ ID NO: 416069 - RNA, 19 nt, Artificial Sequence
  Description of Artificial Sequence: Synthetic oligonucleotide
  Sense Strand Starting at position 1240 of SEQ ID NO: 319172
ugccuaguugauuauaaac

SEQ ID NO: 416070 - RNA, 19 nt, Artificial Sequence
  Description of Artificial Sequence: Synthetic oligonucleotide
  Antisense Strand to SEQ ID NO: 416069
guuuauaaucaacuaggca

SEQ ID NO: 416071 - RNA, 19 nt, Artificial Sequence
  Description of Artificial Sequence: Synthetic oligonucleotide
  Sense Strand Starting at position 1241 of SEQ ID NO: 315258
gucagaucauguuuacucu

SEQ ID NO: 416072 - RNA, 19 nt, Artificial Sequence
  Description of Artificial Sequence: Synthetic oligonucleotide
  Antisense Strand to SEQ ID NO: 416071
agaguaaacaugaucugac

SEQ ID NO: 416073 - RNA, 19 nt, Artificial Sequence
  Description of Artificial Sequence: Synthetic oligonucleotide
  Sense Strand Starting at position 1241 of SEQ ID NO: 315296
auggcucuccacugagaga

SEQ ID NO: 416074 - RNA, 19 nt, Artificial Sequence
  Description of Artificial Sequence: Synthetic oligonucleotide
  Antisense Strand to SEQ ID NO: 416073
ucucucaguggagagccau

SEQ ID NO: 416075 - RNA, 19 nt, Artificial Sequence
  Description of Artificial Sequence: Synthetic oligonucleotide
  Sense Strand Starting at position 1241 of SEQ ID NO: 315489
uccagauaucugcaaggcu

SEQ ID NO: 416076 - RNA, 19 nt, Artificial Sequence
  Description of Artificial Sequence: Synthetic oligonucleotide
  Antisense Strand to SEQ ID NO: 416075
agccuugcagauaucugga

SEQ ID NO: 416077 - RNA, 19 nt, Artificial Sequence
  Description of Artificial Sequence: Synthetic oligonucleotide
  Sense Strand Starting at position 1241 of SEQ ID NO: 315691
gcuagaauguaagcucuga

SEQ ID NO: 416078 - RNA, 19 nt, Artificial Sequence
  Description of Artificial Sequence: Synthetic oligonucleotide
  Antisense Strand to SEQ ID NO: 416077
ucagagcuuacauucuagc

SEQ ID NO: 416079 - RNA, 19 nt, Artificial Sequence
  Description of Artificial Sequence: Synthetic oligonucleotide
  Sense Strand Starting at position 1241 of SEQ ID NO: 315695
gaauguaagcucugaaaga

SEQ ID NO: 416080 - RNA, 19 nt, Artificial Sequence
  Description of Artificial Sequence: Synthetic oligonucleotide
  Antisense Strand to SEQ ID NO: 416079
ucuuucagagcuuacauuc

SEQ ID NO: 416081 - RNA, 19 nt, Artificial Sequence
  Description of Artificial Sequence: Synthetic oligonucleotide
  Sense Strand Starting at position 1241 of SEQ ID NO: 315714
acagaaaucuuugccuguu

SEQ ID NO: 416082 - RNA, 19 nt, Artificial Sequence
  Description of Artificial Sequence: Synthetic oligonucleotide
  Antisense Strand to SEQ ID NO: 416081
aacaggcaaagauuucugu

SEQ ID NO: 416083 - RNA, 19 nt, Artificial Sequence
  Description of Artificial Sequence: Synthetic oligonucleotide
  Sense Strand Starting at position 1241 of SEQ ID NO: 315716
agaaaucuuugccuguucu

SEQ ID NO: 416084 - RNA, 19 nt, Artificial Sequence
  Description of Artificial Sequence: Synthetic oligonucleotide
  Antisense Strand to SEQ ID NO: 416083
agaacaggcaaagauuucu

SEQ ID NO: 416085 - RNA, 19 nt, Artificial Sequence
  Description of Artificial Sequence: Synthetic oligonucleotide
  Sense Strand Starting at position 1241 of SEQ ID NO: 315726
gccuguucucaucacugau

SEQ ID NO: 416086 - RNA, 19 nt, Artificial Sequence
  Description of Artificial Sequence: Synthetic oligonucleotide
  Antisense Strand to SEQ ID NO: 416085
aucagugaugagaacaggc

SEQ ID NO: 416087 - RNA, 19 nt, Artificial Sequence
  Description of Artificial Sequence: Synthetic oligonucleotide
  Sense Strand Starting at position 1241 of SEQ ID NO: 315754
guacuagagaagugccuau

SEQ ID NO: 416088 - RNA, 19 nt, Artificial Sequence
  Description of Artificial Sequence: Synthetic oligonucleotide
  Antisense Strand to SEQ ID NO: 416087
auaggcacuucucuaguac

SEQ ID NO: 416089 - RNA, 19 nt, Artificial Sequence
  Description of Artificial Sequence: Synthetic oligonucleotide
  Sense Strand Starting at position 1241 of SEQ ID NO: 315800
ugcugaaugaaugaaguuu

SEQ ID NO: 416090 - RNA, 19 nt, Artificial Sequence
  Description of Artificial Sequence: Synthetic oligonucleotide
  Antisense Strand to SEQ ID NO: 416089
aaacuucauucauucagca

SEQ ID NO: 416091 - RNA, 19 nt, Artificial Sequence
  Description of Artificial Sequence: Synthetic oligonucleotide
  Sense Strand Starting at position 1241 of SEQ ID NO: 315884
auucuaagucuggguugga

SEQ ID NO: 416092 - RNA, 19 nt, Artificial Sequence
  Description of Artificial Sequence: Synthetic oligonucleotide
  Antisense Strand to SEQ ID NO: 416091
uccaacccagacuuagaau

SEQ ID NO: 416093 - RNA, 19 nt, Artificial Sequence
  Description of Artificial Sequence: Synthetic oligonucleotide
  Sense Strand Starting at position 1241 of SEQ ID NO: 315894
uggguuggaggccaagauu

SEQ ID NO: 416094 - RNA, 19 nt, Artificial Sequence
  Description of Artificial Sequence: Synthetic oligonucleotide
  Antisense Strand to SEQ ID NO: 416093
aaucuuggccuccaaccca

SEQ ID NO: 416095 - RNA, 19 nt, Artificial Sequence
  Description of Artificial Sequence: Synthetic oligonucleotide
  Sense Strand Starting at position 1241 of SEQ ID NO: 316147
aacuguaggucagccauau

SEQ ID NO: 416096 - RNA, 19 nt, Artificial Sequence
  Description of Artificial Sequence: Synthetic oligonucleotide
  Antisense Strand to SEQ ID NO: 416095
auauggcugaccuacaguu

SEQ ID NO: 416097 - RNA, 19 nt, Artificial Sequence
  Description of Artificial Sequence: Synthetic oligonucleotide
  Sense Strand Starting at position 1241 of SEQ ID NO: 316151
guaggucagccauauuaaa

SEQ ID NO: 416098 - RNA, 19 nt, Artificial Sequence
  Description of Artificial Sequence: Synthetic oligonucleotide
  Antisense Strand to SEQ ID NO: 416097
uuuaauauggcugaccuac

SEQ ID NO: 416099 - RNA, 19 nt, Artificial Sequence
  Description of Artificial Sequence: Synthetic oligonucleotide
  Sense Strand Starting at position 1241 of SEQ ID NO: 316379
cucuuaccucgagagcuuu

SEQ ID NO: 416100 - RNA, 19 nt, Artificial Sequence
  Description of Artificial Sequence: Synthetic oligonucleotide
  Antisense Strand to SEQ ID NO: 416099
aaagcucucgagguaagag

SEQ ID NO: 416101 - RNA, 19 nt, Artificial Sequence
  Description of Artificial Sequence: Synthetic oligonucleotide
  Sense Strand Starting at position 1241 of SEQ ID NO: 316407
uuuggaauugucugaagac

SEQ ID NO: 416102 - RNA, 19 nt, Artificial Sequence
  Description of Artificial Sequence: Synthetic oligonucleotide
  Antisense Strand to SEQ ID NO: 416101
gucuucagacaauuccaaa

SEQ ID NO: 416103 - RNA, 19 nt, Artificial Sequence
  Description of Artificial Sequence: Synthetic oligonucleotide
  Sense Strand Starting at position 1241 of SEQ ID NO: 316587
cuggcucugcccgugaauu

SEQ ID NO: 416104 - RNA, 19 nt, Artificial Sequence
  Description of Artificial Sequence: Synthetic oligonucleotide
  Antisense Strand to SEQ ID NO: 416103
aauucacgggcagagccag

SEQ ID NO: 416105 - RNA, 19 nt, Artificial Sequence
  Description of Artificial Sequence: Synthetic oligonucleotide
  Sense Strand Starting at position 1241 of SEQ ID NO: 316598
cgugaauucgucaacggca

SEQ ID NO: 416106 - RNA, 19 nt, Artificial Sequence
  Description of Artificial Sequence: Synthetic oligonucleotide
  Antisense Strand to SEQ ID NO: 416105
ugccguugacgaauucacg

SEQ ID NO: 416107 - RNA, 19 nt, Artificial Sequence
  Description of Artificial Sequence: Synthetic oligonucleotide
  Sense Strand Starting at position 1241 of SEQ ID NO: 317245
gcuggagaacccggaaauu

SEQ ID NO: 416108 - RNA, 19 nt, Artificial Sequence
  Description of Artificial Sequence: Synthetic oligonucleotide
  Antisense Strand to SEQ ID NO: 416107
aauuuccggguucuccagc

SEQ ID NO: 416109 - RNA, 19 nt, Artificial Sequence
  Description of Artificial Sequence: Synthetic oligonucleotide
  Sense Strand Starting at position 1241 of SEQ ID NO: 317513
ggaauacuccuuuacuguu

SEQ ID NO: 416110 - RNA, 19 nt, Artificial Sequence
  Description of Artificial Sequence: Synthetic oligonucleotide
  Antisense Strand to SEQ ID NO: 416109
aacaguaaaggaguauucc

SEQ ID NO: 416111 - RNA, 19 nt, Artificial Sequence
  Description of Artificial Sequence: Synthetic oligonucleotide
  Sense Strand Starting at position 1241 of SEQ ID NO: 317622
aaacaauuccgugaggcaa

SEQ ID NO: 416112 - RNA, 19 nt, Artificial Sequence
  Description of Artificial Sequence: Synthetic oligonucleotide
  Antisense Strand to SEQ ID NO: 416111
uugccucacggaauuguuu

SEQ ID NO: 416113 - RNA, 19 nt, Artificial Sequence
  Description of Artificial Sequence: Synthetic oligonucleotide
  Sense Strand Starting at position 1241 of SEQ ID NO: 317634
gaggcaaauagugguaguu

SEQ ID NO: 416114 - RNA, 19 nt, Artificial Sequence
  Description of Artificial Sequence: Synthetic oligonucleotide
  Antisense Strand to SEQ ID NO: 416113
aacuaccacuauuugccuc

SEQ ID NO: 416115 - RNA, 19 nt, Artificial Sequence
  Description of Artificial Sequence: Synthetic oligonucleotide
  Sense Strand Starting at position 1241 of SEQ ID NO: 317681
guuaaaugauggguucaag

SEQ ID NO: 416116 - RNA, 19 nt, Artificial Sequence
  Description of Artificial Sequence: Synthetic oligonucleotide
  Antisense Strand to SEQ ID NO: 416115
cuugaacccaucauuuaac

SEQ ID NO: 416117 - RNA, 19 nt, Artificial Sequence
  Description of Artificial Sequence: Synthetic oligonucleotide
  Sense Strand Starting at position 1241 of SEQ ID NO: 317761
gugguuucccuccaacaca

SEQ ID NO: 416118 - RNA, 19 nt, Artificial Sequence
  Description of Artificial Sequence: Synthetic oligonucleotide
  Antisense Strand to SEQ ID NO: 416117
uguguuggagggaaaccac

SEQ ID NO: 416119 - RNA, 19 nt, Artificial Sequence
  Description of Artificial Sequence: Synthetic oligonucleotide
  Sense Strand Starting at position 1241 of SEQ ID NO: 317857
aagggaucuuugucaagau

SEQ ID NO: 416120 - RNA, 19 nt, Artificial Sequence
  Description of Artificial Sequence: Synthetic oligonucleotide
  Antisense Strand to SEQ ID NO: 416119
aucuugacaaagaucccuu

SEQ ID NO: 416121 - RNA, 19 nt, Artificial Sequence
  Description of Artificial Sequence: Synthetic oligonucleotide
  Sense Strand Starting at position 1241 of SEQ ID NO: 317950
gggagauucugggacugaa

SEQ ID NO: 416122 - RNA, 19 nt, Artificial Sequence
  Description of Artificial Sequence: Synthetic oligonucleotide
  Antisense Strand to SEQ ID NO: 416121
uucagucccagaaucuccc

SEQ ID NO: 416123 - RNA, 19 nt, Artificial Sequence
  Description of Artificial Sequence: Synthetic oligonucleotide
  Sense Strand Starting at position 1241 of SEQ ID NO: 318015
gccugcaaaccuuagugau

SEQ ID NO: 416124 - RNA, 19 nt, Artificial Sequence
  Description of Artificial Sequence: Synthetic oligonucleotide
  Antisense Strand to SEQ ID NO: 416123
aucacuaagguuugcaggc

SEQ ID NO: 416125 - RNA, 19 nt, Artificial Sequence
  Description of Artificial Sequence: Synthetic oligonucleotide
  Sense Strand Starting at position 1241 of SEQ ID NO: 318017
cugcaaaccuuagugauaa

SEQ ID NO: 416126 - RNA, 19 nt, Artificial Sequence
  Description of Artificial Sequence: Synthetic oligonucleotide
  Antisense Strand to SEQ ID NO: 416125
uuaucacuaagguuugcag

SEQ ID NO: 416127 - RNA, 19 nt, Artificial Sequence
  Description of Artificial Sequence: Synthetic oligonucleotide
  Sense Strand Starting at position 1241 of SEQ ID NO: 318291
gauggaaggugacaaagau

SEQ ID NO: 416128 - RNA, 19 nt, Artificial Sequence
  Description of Artificial Sequence: Synthetic oligonucleotide
  Antisense Strand to SEQ ID NO: 416127
aucuuugucaccuuccauc

SEQ ID NO: 416129 - RNA, 19 nt, Artificial Sequence
  Description of Artificial Sequence: Synthetic oligonucleotide
  Sense Strand Starting at position 1241 of SEQ ID NO: 318353
uagguuuaucugugcauuu

SEQ ID NO: 416130 - RNA, 19 nt, Artificial Sequence
  Description of Artificial Sequence: Synthetic oligonucleotide
  Antisense Strand to SEQ ID NO: 416129
aaaugcacagauaaaccua

SEQ ID NO: 416131 - RNA, 19 nt, Artificial Sequence
  Description of Artificial Sequence: Synthetic oligonucleotide
  Sense Strand Starting at position 1241 of SEQ ID NO: 318447
gucugaucaccuugaccua

SEQ ID NO: 416132 - RNA, 19 nt, Artificial Sequence
  Description of Artificial Sequence: Synthetic oligonucleotide
  Antisense Strand to SEQ ID NO: 416131
uaggucaaggugaucagac

SEQ ID NO: 416133 - RNA, 19 nt, Artificial Sequence
  Description of Artificial Sequence: Synthetic oligonucleotide
  Sense Strand Starting at position 1241 of SEQ ID NO: 318492
ugaaguuccuucuuaguaa

SEQ ID NO: 416134 - RNA, 19 nt, Artificial Sequence
  Description of Artificial Sequence: Synthetic oligonucleotide
  Antisense Strand to SEQ ID NO: 416133
uuacuaagaaggaacuuca

SEQ ID NO: 416135 - RNA, 19 nt, Artificial Sequence
  Description of Artificial Sequence: Synthetic oligonucleotide
  Sense Strand Starting at position 1241 of SEQ ID NO: 318536
uuuguuccuuggcuauaaa

SEQ ID NO: 416136 - RNA, 19 nt, Artificial Sequence
  Description of Artificial Sequence: Synthetic oligonucleotide
  Antisense Strand to SEQ ID NO: 416135
uuuauagccaaggaacaaa

SEQ ID NO: 416137 - RNA, 19 nt, Artificial Sequence
  Description of Artificial Sequence: Synthetic oligonucleotide
  Sense Strand Starting at position 1241 of SEQ ID NO: 318718
agaaaugagucagaaucaa

SEQ ID NO: 416138 - RNA, 19 nt, Artificial Sequence
  Description of Artificial Sequence: Synthetic oligonucleotide
  Antisense Strand to SEQ ID NO: 416137
uugauucugacucauuucu

SEQ ID NO: 416139 - RNA, 19 nt, Artificial Sequence
  Description of Artificial Sequence: Synthetic oligonucleotide
  Sense Strand Starting at position 1241 of SEQ ID NO: 318858
gugcaaaucugaccugaau

SEQ ID NO: 416140 - RNA, 19 nt, Artificial Sequence
  Description of Artificial Sequence: Synthetic oligonucleotide
  Antisense Strand to SEQ ID NO: 416139
auucaggucagauuugcac

SEQ ID NO: 416141 - RNA, 19 nt, Artificial Sequence
  Description of Artificial Sequence: Synthetic oligonucleotide
  Sense Strand Starting at position 1241 of SEQ ID NO: 318921
gggacuccugcucacacua

SEQ ID NO: 416142 - RNA, 19 nt, Artificial Sequence
  Description of Artificial Sequence: Synthetic oligonucleotide
  Antisense Strand to SEQ ID NO: 416141
uagugugagcaggaguccc

SEQ ID NO: 416143 - RNA, 19 nt, Artificial Sequence
  Description of Artificial Sequence: Synthetic oligonucleotide
  Sense Strand Starting at position 1241 of SEQ ID NO: 318966
uauaauagauggguaucau

SEQ ID NO: 416144 - RNA, 19 nt, Artificial Sequence
  Description of Artificial Sequence: Synthetic oligonucleotide
  Antisense Strand to SEQ ID NO: 416143
augauacccaucuauuaua

SEQ ID NO: 416145 - RNA, 19 nt, Artificial Sequence
  Description of Artificial Sequence: Synthetic oligonucleotide
  Sense Strand Starting at position 1241 of SEQ ID NO: 318975
uggguaucauugucucaug

SEQ ID NO: 416146 - RNA, 19 nt, Artificial Sequence
  Description of Artificial Sequence: Synthetic oligonucleotide
  Antisense Strand to SEQ ID NO: 416145
caugagacaaugauaccca

SEQ ID NO: 416147 - RNA, 19 nt, Artificial Sequence
  Description of Artificial Sequence: Synthetic oligonucleotide
  Sense Strand Starting at position 1241 of SEQ ID NO: 319119
gagcccauuccuggcauuu

SEQ ID NO: 416148 - RNA, 19 nt, Artificial Sequence
  Description of Artificial Sequence: Synthetic oligonucleotide
  Antisense Strand to SEQ ID NO: 416147
aaaugccaggaaugggcuc

SEQ ID NO: 416149 - RNA, 19 nt, Artificial Sequence
  Description of Artificial Sequence: Synthetic oligonucleotide
  Sense Strand Starting at position 1241 of SEQ ID NO: 319130
uggcauuucugggccaagu

SEQ ID NO: 416150 - RNA, 19 nt, Artificial Sequence
  Description of Artificial Sequence: Synthetic oligonucleotide
  Antisense Strand to SEQ ID NO: 416149
acuuggcccagaaaugcca

SEQ ID NO: 416151 - RNA, 19 nt, Artificial Sequence
  Description of Artificial Sequence: Synthetic oligonucleotide
  Sense Strand Starting at position 1242 of SEQ ID NO: 315446
auacuaugauugcuuagaa

SEQ ID NO: 416152 - RNA, 19 nt, Artificial Sequence
  Description of Artificial Sequence: Synthetic oligonucleotide
  Antisense Strand to SEQ ID NO: 416151
uucuaagcaaucauaguau

SEQ ID NO: 416153 - RNA, 19 nt, Artificial Sequence
  Description of Artificial Sequence: Synthetic oligonucleotide
  Sense Strand Starting at position 1242 of SEQ ID NO: 315505
gaacuaauagaucgucaag

SEQ ID NO: 416154 - RNA, 19 nt, Artificial Sequence
  Description of Artificial Sequence: Synthetic oligonucleotide
  Antisense Strand to SEQ ID NO: 416153
cuugacgaucuauuaguuc

SEQ ID NO: 416155 - RNA, 19 nt, Artificial Sequence
  Description of Artificial Sequence: Synthetic oligonucleotide
  Sense Strand Starting at position 1242 of SEQ ID NO: 315508
cuaauagaucgucaaggua

SEQ ID NO: 416156 - RNA, 19 nt, Artificial Sequence
  Description of Artificial Sequence: Synthetic oligonucleotide
  Antisense Strand to SEQ ID NO: 416155
uaccuugacgaucuauuag

SEQ ID NO: 416157 - RNA, 19 nt, Artificial Sequence
  Description of Artificial Sequence: Synthetic oligonucleotide
  Sense Strand Starting at position 1242 of SEQ ID NO: 315511
auagaucgucaagguaaua

SEQ ID NO: 416158 - RNA, 19 nt, Artificial Sequence
  Description of Artificial Sequence: Synthetic oligonucleotide
  Antisense Strand to SEQ ID NO: 416157
uauuaccuugacgaucuau

SEQ ID NO: 416159 - RNA, 19 nt, Artificial Sequence
  Description of Artificial Sequence: Synthetic oligonucleotide
  Sense Strand Starting at position 1242 of SEQ ID NO: 315587
cuucuagagagguauguau

SEQ ID NO: 416160 - RNA, 19 nt, Artificial Sequence
  Description of Artificial Sequence: Synthetic oligonucleotide
  Antisense Strand to SEQ ID NO: 416159
auacauaccucucuagaag

SEQ ID NO: 416161 - RNA, 19 nt, Artificial Sequence
  Description of Artificial Sequence: Synthetic oligonucleotide
  Sense Strand Starting at position 1242 of SEQ ID NO: 315598
guauguaugcaggauugaa

SEQ ID NO: 416162 - RNA, 19 nt, Artificial Sequence
  Description of Artificial Sequence: Synthetic oligonucleotide
  Antisense Strand to SEQ ID NO: 416161
uucaauccugcauacauac

SEQ ID NO: 416163 - RNA, 19 nt, Artificial Sequence
  Description of Artificial Sequence: Synthetic oligonucleotide
  Sense Strand Starting at position 1242 of SEQ ID NO: 315608
aggauugaaguguggguua

SEQ ID NO: 416164 - RNA, 19 nt, Artificial Sequence
  Description of Artificial Sequence: Synthetic oligonucleotide
  Antisense Strand to SEQ ID NO: 416163
uaacccacacuucaauccu

SEQ ID NO: 416165 - RNA, 19 nt, Artificial Sequence
  Description of Artificial Sequence: Synthetic oligonucleotide
  Sense Strand Starting at position 1242 of SEQ ID NO: 316146
guguucuacguuguagcaa

SEQ ID NO: 416166 - RNA, 19 nt, Artificial Sequence
  Description of Artificial Sequence: Synthetic oligonucleotide
  Antisense Strand to SEQ ID NO: 416165
uugcuacaacguagaacac

SEQ ID NO: 416167 - RNA, 19 nt, Artificial Sequence
  Description of Artificial Sequence: Synthetic oligonucleotide
  Sense Strand Starting at position 1242 of SEQ ID NO: 316160
agcaaaucacguuaaagga

SEQ ID NO: 416168 - RNA, 19 nt, Artificial Sequence
  Description of Artificial Sequence: Synthetic oligonucleotide
  Antisense Strand to SEQ ID NO: 416167
uccuuuaacgugauuugcu

SEQ ID NO: 416169 - RNA, 19 nt, Artificial Sequence
  Description of Artificial Sequence: Synthetic oligonucleotide
  Sense Strand Starting at position 1242 of SEQ ID NO: 316197
acucuacuagucuacagua

SEQ ID NO: 416170 - RNA, 19 nt, Artificial Sequence
  Description of Artificial Sequence: Synthetic oligonucleotide
  Antisense Strand to SEQ ID NO: 416169
uacuguagacuaguagagu

SEQ ID NO: 416171 - RNA, 19 nt, Artificial Sequence
  Description of Artificial Sequence: Synthetic oligonucleotide
  Sense Strand Starting at position 1242 of SEQ ID NO: 316202
acuagucuacaguaaguga

SEQ ID NO: 416172 - RNA, 19 nt, Artificial Sequence
  Description of Artificial Sequence: Synthetic oligonucleotide
  Antisense Strand to SEQ ID NO: 416171
ucacuuacuguagacuagu

SEQ ID NO: 416173 - RNA, 19 nt, Artificial Sequence
  Description of Artificial Sequence: Synthetic oligonucleotide
  Sense Strand Starting at position 1242 of SEQ ID NO: 316393
ugcuacauaugacuugaau

SEQ ID NO: 416174 - RNA, 19 nt, Artificial Sequence
  Description of Artificial Sequence: Synthetic oligonucleotide
  Antisense Strand to SEQ ID NO: 416173
auucaagucauauguagca

SEQ ID NO: 416175 - RNA, 19 nt, Artificial Sequence
  Description of Artificial Sequence: Synthetic oligonucleotide
  Sense Strand Starting at position 1242 of SEQ ID NO: 316535
cuaggcaaauguuucuaaa

SEQ ID NO: 416176 - RNA, 19 nt, Artificial Sequence
  Description of Artificial Sequence: Synthetic oligonucleotide
  Antisense Strand to SEQ ID NO: 416175
uuuagaaacauuugccuag

SEQ ID NO: 416177 - RNA, 19 nt, Artificial Sequence
  Description of Artificial Sequence: Synthetic oligonucleotide
  Sense Strand Starting at position 1242 of SEQ ID NO: 316537
aggcaaauguuucuaaaua

SEQ ID NO: 416178 - RNA, 19 nt, Artificial Sequence
  Description of Artificial Sequence: Synthetic oligonucleotide
  Antisense Strand to SEQ ID NO: 416177
uauuuagaaacauuugccu

SEQ ID NO: 416179 - RNA, 19 nt, Artificial Sequence
  Description of Artificial Sequence: Synthetic oligonucleotide
  Sense Strand Starting at position 1242 of SEQ ID NO: 316659
aucuguuugguacaacaau

SEQ ID NO: 416180 - RNA, 19 nt, Artificial Sequence
  Description of Artificial Sequence: Synthetic oligonucleotide
  Antisense Strand to SEQ ID NO: 416179
auuguuguaccaaacagau

SEQ ID NO: 416181 - RNA, 19 nt, Artificial Sequence
  Description of Artificial Sequence: Synthetic oligonucleotide
  Sense Strand Starting at position 1242 of SEQ ID NO: 316769
agugaaauuucuuauugag

SEQ ID NO: 416182 - RNA, 19 nt, Artificial Sequence
  Description of Artificial Sequence: Synthetic oligonucleotide
  Antisense Strand to SEQ ID NO: 416181
cucaauaagaaauuucacu

SEQ ID NO: 416183 - RNA, 19 nt, Artificial Sequence
  Description of Artificial Sequence: Synthetic oligonucleotide
  Sense Strand Starting at position 1242 of SEQ ID NO: 316830
cuuaaauggcgugauaauu

SEQ ID NO: 416184 - RNA, 19 nt, Artificial Sequence
  Description of Artificial Sequence: Synthetic oligonucleotide
  Antisense Strand to SEQ ID NO: 416183
aauuaucacgccauuuaag

SEQ ID NO: 416185 - RNA, 19 nt, Artificial Sequence
  Description of Artificial Sequence: Synthetic oligonucleotide
  Sense Strand Starting at position 1242 of SEQ ID NO: 317057
gagagaaguuaugucacau

SEQ ID NO: 416186 - RNA, 19 nt, Artificial Sequence
  Description of Artificial Sequence: Synthetic oligonucleotide
  Antisense Strand to SEQ ID NO: 416185
augugacauaacuucucuc

SEQ ID NO: 416187 - RNA, 19 nt, Artificial Sequence
  Description of Artificial Sequence: Synthetic oligonucleotide
  Sense Strand Starting at position 1242 of SEQ ID NO: 317531
caugaauggcaucagaguu

SEQ ID NO: 416188 - RNA, 19 nt, Artificial Sequence
  Description of Artificial Sequence: Synthetic oligonucleotide
  Antisense Strand to SEQ ID NO: 416187
aacucugaugccauucaug

SEQ ID NO: 416189 - RNA, 19 nt, Artificial Sequence
  Description of Artificial Sequence: Synthetic oligonucleotide
  Sense Strand Starting at position 1242 of SEQ ID NO: 317632
ucuggauacugguuugauu

SEQ ID NO: 416190 - RNA, 19 nt, Artificial Sequence
  Description of Artificial Sequence: Synthetic oligonucleotide
  Antisense Strand to SEQ ID NO: 416189
aaucaaaccaguauccaga

SEQ ID NO: 416191 - RNA, 19 nt, Artificial Sequence
  Description of Artificial Sequence: Synthetic oligonucleotide
  Sense Strand Starting at position 1242 of SEQ ID NO: 317689
uguagagcugcuuagggaa

SEQ ID NO: 416192 - RNA, 19 nt, Artificial Sequence
  Description of Artificial Sequence: Synthetic oligonucleotide
  Antisense Strand to SEQ ID NO: 416191
uucccuaagcagcucuaca

SEQ ID NO: 416193 - RNA, 19 nt, Artificial Sequence
  Description of Artificial Sequence: Synthetic oligonucleotide
  Sense Strand Starting at position 1242 of SEQ ID NO: 317901
uuugccugacccgaauaaa

SEQ ID NO: 416194 - RNA, 19 nt, Artificial Sequence
  Description of Artificial Sequence: Synthetic oligonucleotide
  Antisense Strand to SEQ ID NO: 416193
uuuauucgggucaggcaaa

SEQ ID NO: 416195 - RNA, 19 nt, Artificial Sequence
  Description of Artificial Sequence: Synthetic oligonucleotide
  Sense Strand Starting at position 1242 of SEQ ID NO: 318028
auuguagaauauucugaag

SEQ ID NO: 416196 - RNA, 19 nt, Artificial Sequence
  Description of Artificial Sequence: Synthetic oligonucleotide
  Antisense Strand to SEQ ID NO: 416195
cuucagaauauucuacaau

SEQ ID NO: 416197 - RNA, 19 nt, Artificial Sequence
  Description of Artificial Sequence: Synthetic oligonucleotide
  Sense Strand Starting at position 1242 of SEQ ID NO: 318039
uucugaagugcacaaauua

SEQ ID NO: 416198 - RNA, 19 nt, Artificial Sequence
  Description of Artificial Sequence: Synthetic oligonucleotide
  Antisense Strand to SEQ ID NO: 416197
uaauuugugcacuucagaa

SEQ ID NO: 416199 - RNA, 19 nt, Artificial Sequence
  Description of Artificial Sequence: Synthetic oligonucleotide
  Sense Strand Starting at position 1242 of SEQ ID NO: 318206
auucccaaaucaguguaau

SEQ ID NO: 416200 - RNA, 19 nt, Artificial Sequence
  Description of Artificial Sequence: Synthetic oligonucleotide
  Antisense Strand to SEQ ID NO: 416199
auuacacugauuugggaau

SEQ ID NO: 416201 - RNA, 19 nt, Artificial Sequence
  Description of Artificial Sequence: Synthetic oligonucleotide
  Sense Strand Starting at position 1242 of SEQ ID NO: 318207
uucccaaaucaguguaaua

SEQ ID NO: 416202 - RNA, 19 nt, Artificial Sequence
  Description of Artificial Sequence: Synthetic oligonucleotide
  Antisense Strand to SEQ ID NO: 416201
uauuacacugauuugggaa

SEQ ID NO: 416203 - RNA, 19 nt, Artificial Sequence
  Description of Artificial Sequence: Synthetic oligonucleotide
  Sense Strand Starting at position 1242 of SEQ ID NO: 318209
cccaaaucaguguaauauc

SEQ ID NO: 416204 - RNA, 19 nt, Artificial Sequence
  Description of Artificial Sequence: Synthetic oligonucleotide
  Antisense Strand to SEQ ID NO: 416203
gauauuacacugauuuggg

SEQ ID NO: 416205 - RNA, 19 nt, Artificial Sequence
  Description of Artificial Sequence: Synthetic oligonucleotide
  Sense Strand Starting at position 1242 of SEQ ID NO: 318218
guguaauaucaggaaaguc

SEQ ID NO: 416206 - RNA, 19 nt, Artificial Sequence
  Description of Artificial Sequence: Synthetic oligonucleotide
  Antisense Strand to SEQ ID NO: 416205
gacuuuccugauauuacac

SEQ ID NO: 416207 - RNA, 19 nt, Artificial Sequence
  Description of Artificial Sequence: Synthetic oligonucleotide
  Sense Strand Starting at position 1242 of SEQ ID NO: 318263
cugaauaugggcuguaaac

SEQ ID NO: 416208 - RNA, 19 nt, Artificial Sequence
  Description of Artificial Sequence: Synthetic oligonucleotide
  Antisense Strand to SEQ ID NO: 416207
guuuacagcccauauucag

SEQ ID NO: 416209 - RNA, 19 nt, Artificial Sequence
  Description of Artificial Sequence: Synthetic oligonucleotide
  Sense Strand Starting at position 1242 of SEQ ID NO: 318265
gaauaugggcuguaaacuu

SEQ ID NO: 416210 - RNA, 19 nt, Artificial Sequence
  Description of Artificial Sequence: Synthetic oligonucleotide
  Antisense Strand to SEQ ID NO: 416209
aaguuuacagcccauauuc

SEQ ID NO: 416211 - RNA, 19 nt, Artificial Sequence
  Description of Artificial Sequence: Synthetic oligonucleotide
  Sense Strand Starting at position 1242 of SEQ ID NO: 318378
aucuaacggucacuaacau

SEQ ID NO: 416212 - RNA, 19 nt, Artificial Sequence
  Description of Artificial Sequence: Synthetic oligonucleotide
  Antisense Strand to SEQ ID NO: 416211
auguuagugaccguuagau

SEQ ID NO: 416213 - RNA, 19 nt, Artificial Sequence
  Description of Artificial Sequence: Synthetic oligonucleotide
  Sense Strand Starting at position 1242 of SEQ ID NO: 318449
aggugacaucaguagaugu

SEQ ID NO: 416214 - RNA, 19 nt, Artificial Sequence
  Description of Artificial Sequence: Synthetic oligonucleotide
  Antisense Strand to SEQ ID NO: 416213
acaucuacugaugucaccu

SEQ ID NO: 416215 - RNA, 19 nt, Artificial Sequence
  Description of Artificial Sequence: Synthetic oligonucleotide
  Sense Strand Starting at position 1242 of SEQ ID NO: 318451
gugacaucaguagauguca

SEQ ID NO: 416216 - RNA, 19 nt, Artificial Sequence
  Description of Artificial Sequence: Synthetic oligonucleotide
  Antisense Strand to SEQ ID NO: 416215
ugacaucuacugaugucac

SEQ ID NO: 416217 - RNA, 19 nt, Artificial Sequence
  Description of Artificial Sequence: Synthetic oligonucleotide
  Sense Strand Starting at position 1242 of SEQ ID NO: 318462
agaugucaaaguugugaga

SEQ ID NO: 416218 - RNA, 19 nt, Artificial Sequence
  Description of Artificial Sequence: Synthetic oligonucleotide
  Antisense Strand to SEQ ID NO: 416217
ucucacaacuuugacaucu

SEQ ID NO: 416219 - RNA, 19 nt, Artificial Sequence
  Description of Artificial Sequence: Synthetic oligonucleotide
  Sense Strand Starting at position 1242 of SEQ ID NO: 318728
aagggaagauugcuuaacu

SEQ ID NO: 416220 - RNA, 19 nt, Artificial Sequence
  Description of Artificial Sequence: Synthetic oligonucleotide
  Antisense Strand to SEQ ID NO: 416219
aguuaagcaaucuucccuu

SEQ ID NO: 416221 - RNA, 19 nt, Artificial Sequence
  Description of Artificial Sequence: Synthetic oligonucleotide
  Sense Strand Starting at position 1242 of SEQ ID NO: 318729
agggaagauugcuuaacua

SEQ ID NO: 416222 - RNA, 19 nt, Artificial Sequence
  Description of Artificial Sequence: Synthetic oligonucleotide
  Antisense Strand to SEQ ID NO: 416221
uaguuaagcaaucuucccu

SEQ ID NO: 416223 - RNA, 19 nt, Artificial Sequence
  Description of Artificial Sequence: Synthetic oligonucleotide
  Sense Strand Starting at position 1242 of SEQ ID NO: 318756
uagauuuguuaauugcagu

SEQ ID NO: 416224 - RNA, 19 nt, Artificial Sequence
  Description of Artificial Sequence: Synthetic oligonucleotide
  Antisense Strand to SEQ ID NO: 416223
acugcaauuaacaaaucua

SEQ ID NO: 416225 - RNA, 19 nt, Artificial Sequence
  Description of Artificial Sequence: Synthetic oligonucleotide
  Sense Strand Starting at position 1242 of SEQ ID NO: 318763
guuaauugcaguuaaagag

SEQ ID NO: 416226 - RNA, 19 nt, Artificial Sequence
  Description of Artificial Sequence: Synthetic oligonucleotide
  Antisense Strand to SEQ ID NO: 416225
cucuuuaacugcaauuaac

SEQ ID NO: 416227 - RNA, 19 nt, Artificial Sequence
  Description of Artificial Sequence: Synthetic oligonucleotide
  Sense Strand Starting at position 1242 of SEQ ID NO: 318942
ccgugaggcaccuagaaau

SEQ ID NO: 416228 - RNA, 19 nt, Artificial Sequence
  Description of Artificial Sequence: Synthetic oligonucleotide
  Antisense Strand to SEQ ID NO: 416227
auuucuaggugccucacgg

SEQ ID NO: 416229 - RNA, 19 nt, Artificial Sequence
  Description of Artificial Sequence: Synthetic oligonucleotide
  Sense Strand Starting at position 1242 of SEQ ID NO: 319112
auucgacgucucuaggaaa

SEQ ID NO: 416230 - RNA, 19 nt, Artificial Sequence
  Description of Artificial Sequence: Synthetic oligonucleotide
  Antisense Strand to SEQ ID NO: 416229
uuuccuagagacgucgaau

SEQ ID NO: 416231 - RNA, 19 nt, Artificial Sequence
  Description of Artificial Sequence: Synthetic oligonucleotide
  Sense Strand Starting at position 1243 of SEQ ID NO: 315338
uuuguagcucuugauuaca

SEQ ID NO: 416232 - RNA, 19 nt, Artificial Sequence
  Description of Artificial Sequence: Synthetic oligonucleotide
  Antisense Strand to SEQ ID NO: 416231
uguaaucaagagcuacaaa

SEQ ID NO: 416233 - RNA, 19 nt, Artificial Sequence
  Description of Artificial Sequence: Synthetic oligonucleotide
  Sense Strand Starting at position 1243 of SEQ ID NO: 315340
uguagcucuugauuacaua

SEQ ID NO: 416234 - RNA, 19 nt, Artificial Sequence
  Description of Artificial Sequence: Synthetic oligonucleotide
  Antisense Strand to SEQ ID NO: 416233
uauguaaucaagagcuaca

SEQ ID NO: 416235 - RNA, 19 nt, Artificial Sequence
  Description of Artificial Sequence: Synthetic oligonucleotide
  Sense Strand Starting at position 1243 of SEQ ID NO: 315341
guagcucuugauuacauau

SEQ ID NO: 416236 - RNA, 19 nt, Artificial Sequence
  Description of Artificial Sequence: Synthetic oligonucleotide
  Antisense Strand to SEQ ID NO: 416235
auauguaaucaagagcuac

SEQ ID NO: 416237 - RNA, 19 nt, Artificial Sequence
  Description of Artificial Sequence: Synthetic oligonucleotide
  Sense Strand Starting at position 1243 of SEQ ID NO: 315917
uucuuuagauaacucgaua

SEQ ID NO: 416238 - RNA, 19 nt, Artificial Sequence
  Description of Artificial Sequence: Synthetic oligonucleotide
  Antisense Strand to SEQ ID NO: 416237
uaucgaguuaucuaaagaa

SEQ ID NO: 416239 - RNA, 19 nt, Artificial Sequence
  Description of Artificial Sequence: Synthetic oligonucleotide
  Sense Strand Starting at position 1243 of SEQ ID NO: 315981
uggucaauacgauagcaca

SEQ ID NO: 416240 - RNA, 19 nt, Artificial Sequence
  Description of Artificial Sequence: Synthetic oligonucleotide
  Antisense Strand to SEQ ID NO: 416239
ugugcuaucguauugacca

SEQ ID NO: 416241 - RNA, 19 nt, Artificial Sequence
  Description of Artificial Sequence: Synthetic oligonucleotide
  Sense Strand Starting at position 1243 of SEQ ID NO: 316186
ccaaucugauuagugucaa

SEQ ID NO: 416242 - RNA, 19 nt, Artificial Sequence
  Description of Artificial Sequence: Synthetic oligonucleotide
  Antisense Strand to SEQ ID NO: 416241
uugacacuaaucagauugg

SEQ ID NO: 416243 - RNA, 19 nt, Artificial Sequence
  Description of Artificial Sequence: Synthetic oligonucleotide
  Sense Strand Starting at position 1243 of SEQ ID NO: 316216
cauucugaggaauguaaac

SEQ ID NO: 416244 - RNA, 19 nt, Artificial Sequence
  Description of Artificial Sequence: Synthetic oligonucleotide
  Antisense Strand to SEQ ID NO: 416243
guuuacauuccucagaaug

SEQ ID NO: 416245 - RNA, 19 nt, Artificial Sequence
  Description of Artificial Sequence: Synthetic oligonucleotide
  Sense Strand Starting at position 1243 of SEQ ID NO: 316474
gucaucacacgugaaagua

SEQ ID NO: 416246 - RNA, 19 nt, Artificial Sequence
  Description of Artificial Sequence: Synthetic oligonucleotide
  Antisense Strand to SEQ ID NO: 416245
uacuuucacgugugaugac

SEQ ID NO: 416247 - RNA, 19 nt, Artificial Sequence
  Description of Artificial Sequence: Synthetic oligonucleotide
  Sense Strand Starting at position 1243 of SEQ ID NO: 316541
uuaggugggucucuggauu

SEQ ID NO: 416248 - RNA, 19 nt, Artificial Sequence
  Description of Artificial Sequence: Synthetic oligonucleotide
  Antisense Strand to SEQ ID NO: 416247
aauccagagacccaccuaa

SEQ ID NO: 416249 - RNA, 19 nt, Artificial Sequence
  Description of Artificial Sequence: Synthetic oligonucleotide
  Sense Strand Starting at position 1243 of SEQ ID NO: 316547
gggucucuggauugacaga

SEQ ID NO: 416250 - RNA, 19 nt, Artificial Sequence
  Description of Artificial Sequence: Synthetic oligonucleotide
  Antisense Strand to SEQ ID NO: 416249
ucugucaauccagagaccc

SEQ ID NO: 416251 - RNA, 19 nt, Artificial Sequence
  Description of Artificial Sequence: Synthetic oligonucleotide
  Sense Strand Starting at position 1243 of SEQ ID NO: 316571
aaacgaagauggcuuuaaa

SEQ ID NO: 416252 - RNA, 19 nt, Artificial Sequence
  Description of Artificial Sequence: Synthetic oligonucleotide
  Antisense Strand to SEQ ID NO: 416251
uuuaaagccaucuucguuu

SEQ ID NO: 416253 - RNA, 19 nt, Artificial Sequence
  Description of Artificial Sequence: Synthetic oligonucleotide
  Sense Strand Starting at position 1243 of SEQ ID NO: 316689
uucuuacugguacaugaau

SEQ ID NO: 416254 - RNA, 19 nt, Artificial Sequence
  Description of Artificial Sequence: Synthetic oligonucleotide
  Antisense Strand to SEQ ID NO: 416253
auucauguaccaguaagaa

SEQ ID NO: 416255 - RNA, 19 nt, Artificial Sequence
  Description of Artificial Sequence: Synthetic oligonucleotide
  Sense Strand Starting at position 1243 of SEQ ID NO: 317020
cucuaaauggagugcuaaa

SEQ ID NO: 416256 - RNA, 19 nt, Artificial Sequence
  Description of Artificial Sequence: Synthetic oligonucleotide
  Antisense Strand to SEQ ID NO: 416255
uuuagcacuccauuuagag

SEQ ID NO: 416257 - RNA, 19 nt, Artificial Sequence
  Description of Artificial Sequence: Synthetic oligonucleotide
  Sense Strand Starting at position 1243 of SEQ ID NO: 317368
cucauuaaguaguuagaau

SEQ ID NO: 416258 - RNA, 19 nt, Artificial Sequence
  Description of Artificial Sequence: Synthetic oligonucleotide
  Antisense Strand to SEQ ID NO: 416257
auucuaacuacuuaaugag

SEQ ID NO: 416259 - RNA, 19 nt, Artificial Sequence
  Description of Artificial Sequence: Synthetic oligonucleotide
  Sense Strand Starting at position 1243 of SEQ ID NO: 317733
acugccugauagcuaaaga

SEQ ID NO: 416260 - RNA, 19 nt, Artificial Sequence
  Description of Artificial Sequence: Synthetic oligonucleotide
  Antisense Strand to SEQ ID NO: 416259
ucuuuagcuaucaggcagu

SEQ ID NO: 416261 - RNA, 19 nt, Artificial Sequence
  Description of Artificial Sequence: Synthetic oligonucleotide
  Sense Strand Starting at position 1243 of SEQ ID NO: 317892
ccauauuauguacgggaaa

SEQ ID NO: 416262 - RNA, 19 nt, Artificial Sequence
  Description of Artificial Sequence: Synthetic oligonucleotide
  Antisense Strand to SEQ ID NO: 416261
uuucccguacauaauaugg

SEQ ID NO: 416263 - RNA, 19 nt, Artificial Sequence
  Description of Artificial Sequence: Synthetic oligonucleotide
  Sense Strand Starting at position 1243 of SEQ ID NO: 317894
auauuauguacgggaaaua

SEQ ID NO: 416264 - RNA, 19 nt, Artificial Sequence
  Description of Artificial Sequence: Synthetic oligonucleotide
  Antisense Strand to SEQ ID NO: 416263
uauuucccguacauaauau

SEQ ID NO: 416265 - RNA, 19 nt, Artificial Sequence
  Description of Artificial Sequence: Synthetic oligonucleotide
  Sense Strand Starting at position 1243 of SEQ ID NO: 318026
uuugcuugugaauagguaa

SEQ ID NO: 416266 - RNA, 19 nt, Artificial Sequence
  Description of Artificial Sequence: Synthetic oligonucleotide
  Antisense Strand to SEQ ID NO: 416265
uuaccuauucacaagcaaa

SEQ ID NO: 416267 - RNA, 19 nt, Artificial Sequence
  Description of Artificial Sequence: Synthetic oligonucleotide
  Sense Strand Starting at position 1243 of SEQ ID NO: 318029
gcuugugaauagguaauaa

SEQ ID NO: 416268 - RNA, 19 nt, Artificial Sequence
  Description of Artificial Sequence: Synthetic oligonucleotide
  Antisense Strand to SEQ ID NO: 416267
uuauuaccuauucacaagc

SEQ ID NO: 416269 - RNA, 19 nt, Artificial Sequence
  Description of Artificial Sequence: Synthetic oligonucleotide
  Sense Strand Starting at position 1243 of SEQ ID NO: 318048
aaaugauuacugcacguga

SEQ ID NO: 416270 - RNA, 19 nt, Artificial Sequence
  Description of Artificial Sequence: Synthetic oligonucleotide
  Antisense Strand to SEQ ID NO: 416269
ucacgugcaguaaucauuu

SEQ ID NO: 416271 - RNA, 19 nt, Artificial Sequence
  Description of Artificial Sequence: Synthetic oligonucleotide
  Sense Strand Starting at position 1243 of SEQ ID NO: 318059
gcacgugaugcaucuaugu

SEQ ID NO: 416272 - RNA, 19 nt, Artificial Sequence
  Description of Artificial Sequence: Synthetic oligonucleotide
  Antisense Strand to SEQ ID NO: 416271
acauagaugcaucacgugc

SEQ ID NO: 416273 - RNA, 19 nt, Artificial Sequence
  Description of Artificial Sequence: Synthetic oligonucleotide
  Sense Strand Starting at position 1243 of SEQ ID NO: 318061
acgugaugcaucuauguaa

SEQ ID NO: 416274 - RNA, 19 nt, Artificial Sequence
  Description of Artificial Sequence: Synthetic oligonucleotide
  Antisense Strand to SEQ ID NO: 416273
uuacauagaugcaucacgu

SEQ ID NO: 416275 - RNA, 19 nt, Artificial Sequence
  Description of Artificial Sequence: Synthetic oligonucleotide
  Sense Strand Starting at position 1243 of SEQ ID NO: 318064
ugaugcaucuauguaaaug

SEQ ID NO: 416276 - RNA, 19 nt, Artificial Sequence
  Description of Artificial Sequence: Synthetic oligonucleotide
  Antisense Strand to SEQ ID NO: 416275
cauuuacauagaugcauca

SEQ ID NO: 416277 - RNA, 19 nt, Artificial Sequence
  Description of Artificial Sequence: Synthetic oligonucleotide
  Sense Strand Starting at position 1243 of SEQ ID NO: 318075
uguaaaugauuaguggaau

SEQ ID NO: 416278 - RNA, 19 nt, Artificial Sequence
  Description of Artificial Sequence: Synthetic oligonucleotide
  Antisense Strand to SEQ ID NO: 416277
auuccacuaaucauuuaca

SEQ ID NO: 416279 - RNA, 19 nt, Artificial Sequence
  Description of Artificial Sequence: Synthetic oligonucleotide
  Sense Strand Starting at position 1243 of SEQ ID NO: 318255
ugcugaguauuuguaauuc

SEQ ID NO: 416280 - RNA, 19 nt, Artificial Sequence
  Description of Artificial Sequence: Synthetic oligonucleotide
  Antisense Strand to SEQ ID NO: 416279
gaauuacaaauacucagca

SEQ ID NO: 416281 - RNA, 19 nt, Artificial Sequence
  Description of Artificial Sequence: Synthetic oligonucleotide
  Sense Strand Starting at position 1243 of SEQ ID NO: 318353
guuguaaguggccaagaua

SEQ ID NO: 416282 - RNA, 19 nt, Artificial Sequence
  Description of Artificial Sequence: Synthetic oligonucleotide
  Antisense Strand to SEQ ID NO: 416281
uaucuuggccacuuacaac

SEQ ID NO: 416283 - RNA, 19 nt, Artificial Sequence
  Description of Artificial Sequence: Synthetic oligonucleotide
  Sense Strand Starting at position 1243 of SEQ ID NO: 318356
guaaguggccaagauaacu

SEQ ID NO: 416284 - RNA, 19 nt, Artificial Sequence
  Description of Artificial Sequence: Synthetic oligonucleotide
  Antisense Strand to SEQ ID NO: 416283
aguuaucuuggccacuuac

SEQ ID NO: 416285 - RNA, 19 nt, Artificial Sequence
  Description of Artificial Sequence: Synthetic oligonucleotide
  Sense Strand Starting at position 1243 of SEQ ID NO: 318550
aaaggaugacguggucauu

SEQ ID NO: 416286 - RNA, 19 nt, Artificial Sequence
  Description of Artificial Sequence: Synthetic oligonucleotide
  Antisense Strand to SEQ ID NO: 416285
aaugaccacgucauccuuu

SEQ ID NO: 416287 - RNA, 19 nt, Artificial Sequence
  Description of Artificial Sequence: Synthetic oligonucleotide
  Sense Strand Starting at position 1243 of SEQ ID NO: 318561
uggucauuggcugauauau

SEQ ID NO: 416288 - RNA, 19 nt, Artificial Sequence
  Description of Artificial Sequence: Synthetic oligonucleotide
  Antisense Strand to SEQ ID NO: 416287
auauaucagccaaugacca

SEQ ID NO: 416289 - RNA, 19 nt, Artificial Sequence
  Description of Artificial Sequence: Synthetic oligonucleotide
  Sense Strand Starting at position 1243 of SEQ ID NO: 318652
uuugaucuugaguaugcaa

SEQ ID NO: 416290 - RNA, 19 nt, Artificial Sequence
  Description of Artificial Sequence: Synthetic oligonucleotide
  Antisense Strand to SEQ ID NO: 416289
uugcauacucaagaucaaa

SEQ ID NO: 416291 - RNA, 19 nt, Artificial Sequence
  Description of Artificial Sequence: Synthetic oligonucleotide
  Sense Strand Starting at position 1243 of SEQ ID NO: 318654
ugaucuugaguaugcaaga

SEQ ID NO: 416292 - RNA, 19 nt, Artificial Sequence
  Description of Artificial Sequence: Synthetic oligonucleotide
  Antisense Strand to SEQ ID NO: 416291
ucuugcauacucaagauca

SEQ ID NO: 416293 - RNA, 19 nt, Artificial Sequence
  Description of Artificial Sequence: Synthetic oligonucleotide
  Sense Strand Starting at position 1243 of SEQ ID NO: 318655
gaucuugaguaugcaagaa

SEQ ID NO: 416294 - RNA, 19 nt, Artificial Sequence
  Description of Artificial Sequence: Synthetic oligonucleotide
  Antisense Strand to SEQ ID NO: 416293
uucuugcauacucaagauc

SEQ ID NO: 416295 - RNA, 19 nt, Artificial Sequence
  Description of Artificial Sequence: Synthetic oligonucleotide
  Sense Strand Starting at position 1243 of SEQ ID NO: 318673
auaugacaguacucuguaa

SEQ ID NO: 416296 - RNA, 19 nt, Artificial Sequence
  Description of Artificial Sequence: Synthetic oligonucleotide
  Antisense Strand to SEQ ID NO: 416295
uuacagaguacugucauau

SEQ ID NO: 416297 - RNA, 19 nt, Artificial Sequence
  Description of Artificial Sequence: Synthetic oligonucleotide
  Sense Strand Starting at position 1243 of SEQ ID NO: 318675
augacaguacucuguaaca

SEQ ID NO: 416298 - RNA, 19 nt, Artificial Sequence
  Description of Artificial Sequence: Synthetic oligonucleotide
  Antisense Strand to SEQ ID NO: 416297
uguuacagaguacugucau

SEQ ID NO: 416299 - RNA, 19 nt, Artificial Sequence
  Description of Artificial Sequence: Synthetic oligonucleotide
  Sense Strand Starting at position 1243 of SEQ ID NO: 318841
guacaaugugucuaaauuc

SEQ ID NO: 416300 - RNA, 19 nt, Artificial Sequence
  Description of Artificial Sequence: Synthetic oligonucleotide
  Antisense Strand to SEQ ID NO: 416299
gaauuuagacacauuguac

SEQ ID NO: 416301 - RNA, 19 nt, Artificial Sequence
  Description of Artificial Sequence: Synthetic oligonucleotide
  Sense Strand Starting at position 1243 of SEQ ID NO: 318899
gaugguuacuuccuuaaag

SEQ ID NO: 416302 - RNA, 19 nt, Artificial Sequence
  Description of Artificial Sequence: Synthetic oligonucleotide
  Antisense Strand to SEQ ID NO: 416301
cuuuaaggaaguaaccauc

SEQ ID NO: 416303 - RNA, 19 nt, Artificial Sequence
  Description of Artificial Sequence: Synthetic oligonucleotide
  Sense Strand Starting at position 1243 of SEQ ID NO: 318901
ugguuacuuccuuaaaggu

SEQ ID NO: 416304 - RNA, 19 nt, Artificial Sequence
  Description of Artificial Sequence: Synthetic oligonucleotide
  Antisense Strand to SEQ ID NO: 416303
accuuuaaggaaguaacca

SEQ ID NO: 416305 - RNA, 19 nt, Artificial Sequence
  Description of Artificial Sequence: Synthetic oligonucleotide
  Sense Strand Starting at position 1243 of SEQ ID NO: 318909
uccuuaaagguaugcauaa

SEQ ID NO: 416306 - RNA, 19 nt, Artificial Sequence
  Description of Artificial Sequence: Synthetic oligonucleotide
  Antisense Strand to SEQ ID NO: 416305
uuaugcauaccuuuaagga

SEQ ID NO: 416307 - RNA, 19 nt, Artificial Sequence
  Description of Artificial Sequence: Synthetic oligonucleotide
  Sense Strand Starting at position 1243 of SEQ ID NO: 318910
ccuuaaagguaugcauaau

SEQ ID NO: 416308 - RNA, 19 nt, Artificial Sequence
  Description of Artificial Sequence: Synthetic oligonucleotide
  Antisense Strand to SEQ ID NO: 416307
auuaugcauaccuuuaagg

SEQ ID NO: 416309 - RNA, 19 nt, Artificial Sequence
  Description of Artificial Sequence: Synthetic oligonucleotide
  Sense Strand Starting at position 1243 of SEQ ID NO: 319089
acgcuugggaaucaaugau

SEQ ID NO: 416310 - RNA, 19 nt, Artificial Sequence
  Description of Artificial Sequence: Synthetic oligonucleotide
  Antisense Strand to SEQ ID NO: 416309
aucauugauucccaagcgu

SEQ ID NO: 416311 - RNA, 19 nt, Artificial Sequence
  Description of Artificial Sequence: Synthetic oligonucleotide
  Sense Strand Starting at position 1244 of SEQ ID NO: 315242
cauggugcucagugcuuua

SEQ ID NO: 416312 - RNA, 19 nt, Artificial Sequence
  Description of Artificial Sequence: Synthetic oligonucleotide
  Antisense Strand to SEQ ID NO: 416311
uaaagcacugagcaccaug

SEQ ID NO: 416313 - RNA, 19 nt, Artificial Sequence
  Description of Artificial Sequence: Synthetic oligonucleotide
  Sense Strand Starting at position 1244 of SEQ ID NO: 315254
ugcuuuacacguggugaca

SEQ ID NO: 416314 - RNA, 19 nt, Artificial Sequence
  Description of Artificial Sequence: Synthetic oligonucleotide
  Antisense Strand to SEQ ID NO: 416313
ugucaccacguguaaagca

SEQ ID NO: 416315 - RNA, 19 nt, Artificial Sequence
  Description of Artificial Sequence: Synthetic oligonucleotide
  Sense Strand Starting at position 1244 of SEQ ID NO: 315288
ucgccuucuaagggagaga

SEQ ID NO: 416316 - RNA, 19 nt, Artificial Sequence
  Description of Artificial Sequence: Synthetic oligonucleotide
  Antisense Strand to SEQ ID NO: 416315
ucucucccuuagaaggcga

SEQ ID NO: 416317 - RNA, 19 nt, Artificial Sequence
  Description of Artificial Sequence: Synthetic oligonucleotide
  Sense Strand Starting at position 1244 of SEQ ID NO: 315372
ucuacuuaguucucuuaga

SEQ ID NO: 416318 - RNA, 19 nt, Artificial Sequence
  Description of Artificial Sequence: Synthetic oligonucleotide
  Antisense Strand to SEQ ID NO: 416317
ucuaagagaacuaaguaga

SEQ ID NO: 416319 - RNA, 19 nt, Artificial Sequence
  Description of Artificial Sequence: Synthetic oligonucleotide
  Sense Strand Starting at position 1244 of SEQ ID NO: 315373
cuacuuaguucucuuagac

SEQ ID NO: 416320 - RNA, 19 nt, Artificial Sequence
  Description of Artificial Sequence: Synthetic oligonucleotide
  Antisense Strand to SEQ ID NO: 416319
gucuaagagaacuaaguag

SEQ ID NO: 416321 - RNA, 19 nt, Artificial Sequence
  Description of Artificial Sequence: Synthetic oligonucleotide
  Sense Strand Starting at position 1244 of SEQ ID NO: 315377
uuaguucucuuagacugau

SEQ ID NO: 416322 - RNA, 19 nt, Artificial Sequence
  Description of Artificial Sequence: Synthetic oligonucleotide
  Antisense Strand to SEQ ID NO: 416321
aucagucuaagagaacuaa

SEQ ID NO: 416323 - RNA, 19 nt, Artificial Sequence
  Description of Artificial Sequence: Synthetic oligonucleotide
  Sense Strand Starting at position 1244 of SEQ ID NO: 315493
gggugauucucagaggagg

SEQ ID NO: 416324 - RNA, 19 nt, Artificial Sequence
  Description of Artificial Sequence: Synthetic oligonucleotide
  Antisense Strand to SEQ ID NO: 416323
ccuccucugagaaucaccc

SEQ ID NO: 416325 - RNA, 19 nt, Artificial Sequence
  Description of Artificial Sequence: Synthetic oligonucleotide
  Sense Strand Starting at position 1244 of SEQ ID NO: 315508
gaggaauuccugcggugca

SEQ ID NO: 416326 - RNA, 19 nt, Artificial Sequence
  Description of Artificial Sequence: Synthetic oligonucleotide
  Antisense Strand to SEQ ID NO: 416325
ugcaccgcaggaauuccuc

SEQ ID NO: 416327 - RNA, 19 nt, Artificial Sequence
  Description of Artificial Sequence: Synthetic oligonucleotide
  Sense Strand Starting at position 1244 of SEQ ID NO: 315594
ggaggagucucccagacuc

SEQ ID NO: 416328 - RNA, 19 nt, Artificial Sequence
  Description of Artificial Sequence: Synthetic oligonucleotide
  Antisense Strand to SEQ ID NO: 416327
gagucugggagacuccucc

SEQ ID NO: 416329 - RNA, 19 nt, Artificial Sequence
  Description of Artificial Sequence: Synthetic oligonucleotide
  Sense Strand Starting at position 1244 of SEQ ID NO: 315769
ucaucugugcaacaggauu

SEQ ID NO: 416330 - RNA, 19 nt, Artificial Sequence
  Description of Artificial Sequence: Synthetic oligonucleotide
  Antisense Strand to SEQ ID NO: 416329
aauccuguugcacagauga

SEQ ID NO: 416331 - RNA, 19 nt, Artificial Sequence
  Description of Artificial Sequence: Synthetic oligonucleotide
  Sense Strand Starting at position 1244 of SEQ ID NO: 315858
acggguuguugagcuuaca

SEQ ID NO: 416332 - RNA, 19 nt, Artificial Sequence
  Description of Artificial Sequence: Synthetic oligonucleotide
  Antisense Strand to SEQ ID NO: 416331
uguaagcucaacaacccgu

SEQ ID NO: 416333 - RNA, 19 nt, Artificial Sequence
  Description of Artificial Sequence: Synthetic oligonucleotide
  Sense Strand Starting at position 1244 of SEQ ID NO: 315861
gguuguugagcuuacaaac

SEQ ID NO: 416334 - RNA, 19 nt, Artificial Sequence
  Description of Artificial Sequence: Synthetic oligonucleotide
  Antisense Strand to SEQ ID NO: 416333
guuuguaagcucaacaacc

SEQ ID NO: 416335 - RNA, 19 nt, Artificial Sequence
  Description of Artificial Sequence: Synthetic oligonucleotide
  Sense Strand Starting at position 1244 of SEQ ID NO: 316007
gcguguggucccuguccua

SEQ ID NO: 416336 - RNA, 19 nt, Artificial Sequence
  Description of Artificial Sequence: Synthetic oligonucleotide
  Antisense Strand to SEQ ID NO: 416335
uaggacagggaccacacgc

SEQ ID NO: 416337 - RNA, 19 nt, Artificial Sequence
  Description of Artificial Sequence: Synthetic oligonucleotide
  Sense Strand Starting at position 1244 of SEQ ID NO: 316300
gguuguuaugacgggaaca

SEQ ID NO: 416338 - RNA, 19 nt, Artificial Sequence
  Description of Artificial Sequence: Synthetic oligonucleotide
  Antisense Strand to SEQ ID NO: 416337
uguucccgucauaacaacc

SEQ ID NO: 416339 - RNA, 19 nt, Artificial Sequence
  Description of Artificial Sequence: Synthetic oligonucleotide
  Sense Strand Starting at position 1244 of SEQ ID NO: 316301
guuguuaugacgggaacaa

SEQ ID NO: 416340 - RNA, 19 nt, Artificial Sequence
  Description of Artificial Sequence: Synthetic oligonucleotide
  Antisense Strand to SEQ ID NO: 416339
uuguucccgucauaacaac

SEQ ID NO: 416341 - RNA, 19 nt, Artificial Sequence
  Description of Artificial Sequence: Synthetic oligonucleotide
  Sense Strand Starting at position 1244 of SEQ ID NO: 317222
gucccagagucccuguuau

SEQ ID NO: 416342 - RNA, 19 nt, Artificial Sequence
  Description of Artificial Sequence: Synthetic oligonucleotide
  Antisense Strand to SEQ ID NO: 416341
auaacagggacucugggac

SEQ ID NO: 416343 - RNA, 19 nt, Artificial Sequence
  Description of Artificial Sequence: Synthetic oligonucleotide
  Sense Strand Starting at position 1244 of SEQ ID NO: 317422
cugcguuucucacucggaa

SEQ ID NO: 416344 - RNA, 19 nt, Artificial Sequence
  Description of Artificial Sequence: Synthetic oligonucleotide
  Antisense Strand to SEQ ID NO: 416343
uuccgagugagaaacgcag

SEQ ID NO: 416345 - RNA, 19 nt, Artificial Sequence
  Description of Artificial Sequence: Synthetic oligonucleotide
  Sense Strand Starting at position 1244 of SEQ ID NO: 317424
gcguuucucacucggaaag

SEQ ID NO: 416346 - RNA, 19 nt, Artificial Sequence
  Description of Artificial Sequence: Synthetic oligonucleotide
  Antisense Strand to SEQ ID NO: 416345
cuuuccgagugagaaacgc

SEQ ID NO: 416347 - RNA, 19 nt, Artificial Sequence
  Description of Artificial Sequence: Synthetic oligonucleotide
  Sense Strand Starting at position 1244 of SEQ ID NO: 317948
ccugauugcgccugucuua

SEQ ID NO: 416348 - RNA, 19 nt, Artificial Sequence
  Description of Artificial Sequence: Synthetic oligonucleotide
  Antisense Strand to SEQ ID NO: 416347
uaagacaggcgcaaucagg

SEQ ID NO: 416349 - RNA, 19 nt, Artificial Sequence
  Description of Artificial Sequence: Synthetic oligonucleotide
  Sense Strand Starting at position 1244 of SEQ ID NO: 317949
cugauugcgccugucuuau

SEQ ID NO: 416350 - RNA, 19 nt, Artificial Sequence
  Description of Artificial Sequence: Synthetic oligonucleotide
  Antisense Strand to SEQ ID NO: 416349
auaagacaggcgcaaucag

SEQ ID NO: 416351 - RNA, 19 nt, Artificial Sequence
  Description of Artificial Sequence: Synthetic oligonucleotide
  Sense Strand Starting at position 1244 of SEQ ID NO: 318099
ucauguccucuagaggguu

SEQ ID NO: 416352 - RNA, 19 nt, Artificial Sequence
  Description of Artificial Sequence: Synthetic oligonucleotide
  Antisense Strand to SEQ ID NO: 416351
aacccucuagaggacauga

SEQ ID NO: 416353 - RNA, 19 nt, Artificial Sequence
  Description of Artificial Sequence: Synthetic oligonucleotide
  Sense Strand Starting at position 1244 of SEQ ID NO: 318138
gcggcuguccagucucauu

SEQ ID NO: 416354 - RNA, 19 nt, Artificial Sequence
  Description of Artificial Sequence: Synthetic oligonucleotide
  Antisense Strand to SEQ ID NO: 416353
aaugagacuggacagccgc

SEQ ID NO: 416355 - RNA, 19 nt, Artificial Sequence
  Description of Artificial Sequence: Synthetic oligonucleotide
  Sense Strand Starting at position 1244 of SEQ ID NO: 318151
cucauuuccuuccgagcau

SEQ ID NO: 416356 - RNA, 19 nt, Artificial Sequence
  Description of Artificial Sequence: Synthetic oligonucleotide
  Antisense Strand to SEQ ID NO: 416355
augcucggaaggaaaugag

SEQ ID NO: 416357 - RNA, 19 nt, Artificial Sequence
  Description of Artificial Sequence: Synthetic oligonucleotide
  Sense Strand Starting at position 1244 of SEQ ID NO: 318231
auagaauuccagcgucaug

SEQ ID NO: 416358 - RNA, 19 nt, Artificial Sequence
  Description of Artificial Sequence: Synthetic oligonucleotide
  Antisense Strand to SEQ ID NO: 416357
caugacgcuggaauucuau

SEQ ID NO: 416359 - RNA, 19 nt, Artificial Sequence
  Description of Artificial Sequence: Synthetic oligonucleotide
  Sense Strand Starting at position 1244 of SEQ ID NO: 318311
gagccucgugcagauugua

SEQ ID NO: 416360 - RNA, 19 nt, Artificial Sequence
  Description of Artificial Sequence: Synthetic oligonucleotide
  Antisense Strand to SEQ ID NO: 416359
uacaaucugcacgaggcuc

SEQ ID NO: 416361 - RNA, 19 nt, Artificial Sequence
  Description of Artificial Sequence: Synthetic oligonucleotide
  Sense Strand Starting at position 1244 of SEQ ID NO: 318389
gaaugagauugggucccau

SEQ ID NO: 416362 - RNA, 19 nt, Artificial Sequence
  Description of Artificial Sequence: Synthetic oligonucleotide
  Antisense Strand to SEQ ID NO: 416361
augggacccaaucucauuc

SEQ ID NO: 416363 - RNA, 19 nt, Artificial Sequence
  Description of Artificial Sequence: Synthetic oligonucleotide
  Sense Strand Starting at position 1244 of SEQ ID NO: 318393
gagauugggucccauucuu

SEQ ID NO: 416364 - RNA, 19 nt, Artificial Sequence
  Description of Artificial Sequence: Synthetic oligonucleotide
  Antisense Strand to SEQ ID NO: 416363
aagaaugggacccaaucuc

SEQ ID NO: 416365 - RNA, 19 nt, Artificial Sequence
  Description of Artificial Sequence: Synthetic oligonucleotide
  Sense Strand Starting at position 1244 of SEQ ID NO: 318462
ugugauccucugggacuuu

SEQ ID NO: 416366 - RNA, 19 nt, Artificial Sequence
  Description of Artificial Sequence: Synthetic oligonucleotide
  Antisense Strand to SEQ ID NO: 416365
aaagucccagaggaucaca

SEQ ID NO: 416367 - RNA, 19 nt, Artificial Sequence
  Description of Artificial Sequence: Synthetic oligonucleotide
  Sense Strand Starting at position 1244 of SEQ ID NO: 318515
aguuuaggcuucuauauuc

SEQ ID NO: 416368 - RNA, 19 nt, Artificial Sequence
  Description of Artificial Sequence: Synthetic oligonucleotide
  Antisense Strand to SEQ ID NO: 416367
gaauauagaagccuaaacu

SEQ ID NO: 416369 - RNA, 19 nt, Artificial Sequence
  Description of Artificial Sequence: Synthetic oligonucleotide
  Sense Strand Starting at position 1244 of SEQ ID NO: 318521
ggcuucuauauucgccaga

SEQ ID NO: 416370 - RNA, 19 nt, Artificial Sequence
  Description of Artificial Sequence: Synthetic oligonucleotide
  Antisense Strand to SEQ ID NO: 416369
ucuggcgaauauagaagcc

SEQ ID NO: 416371 - RNA, 19 nt, Artificial Sequence
  Description of Artificial Sequence: Synthetic oligonucleotide
  Sense Strand Starting at position 1244 of SEQ ID NO: 318523
cuucuauauucgccagaga

SEQ ID NO: 416372 - RNA, 19 nt, Artificial Sequence
  Description of Artificial Sequence: Synthetic oligonucleotide
  Antisense Strand to SEQ ID NO: 416371
ucucuggcgaauauagaag

SEQ ID NO: 416373 - RNA, 19 nt, Artificial Sequence
  Description of Artificial Sequence: Synthetic oligonucleotide
  Sense Strand Starting at position 1244 of SEQ ID NO: 318524
uucuauauucgccagagag

SEQ ID NO: 416374 - RNA, 19 nt, Artificial Sequence
  Description of Artificial Sequence: Synthetic oligonucleotide
  Antisense Strand to SEQ ID NO: 416373
cucucuggcgaauauagaa

SEQ ID NO: 416375 - RNA, 19 nt, Artificial Sequence
  Description of Artificial Sequence: Synthetic oligonucleotide
  Sense Strand Starting at position 1244 of SEQ ID NO: 318559
cugcguaaucacgaaugac

SEQ ID NO: 416376 - RNA, 19 nt, Artificial Sequence
  Description of Artificial Sequence: Synthetic oligonucleotide
  Antisense Strand to SEQ ID NO: 416375
gucauucgugauuacgcag

SEQ ID NO: 416377 - RNA, 19 nt, Artificial Sequence
  Description of Artificial Sequence: Synthetic oligonucleotide
  Sense Strand Starting at position 1244 of SEQ ID NO: 318603
uccaguggcuccucaaguu

SEQ ID NO: 416378 - RNA, 19 nt, Artificial Sequence
  Description of Artificial Sequence: Synthetic oligonucleotide
  Antisense Strand to SEQ ID NO: 416377
aacuugaggagccacugga

SEQ ID NO: 416379 - RNA, 19 nt, Artificial Sequence
  Description of Artificial Sequence: Synthetic oligonucleotide
  Sense Strand Starting at position 1244 of SEQ ID NO: 318615
ucaaguuccucccagaaag

SEQ ID NO: 416380 - RNA, 19 nt, Artificial Sequence
  Description of Artificial Sequence: Synthetic oligonucleotide
  Antisense Strand to SEQ ID NO: 416379
cuuucugggaggaacuuga

SEQ ID NO: 416381 - RNA, 19 nt, Artificial Sequence
  Description of Artificial Sequence: Synthetic oligonucleotide
  Sense Strand Starting at position 1244 of SEQ ID NO: 318707
uaccaugugccaggaagua

SEQ ID NO: 416382 - RNA, 19 nt, Artificial Sequence
  Description of Artificial Sequence: Synthetic oligonucleotide
  Antisense Strand to SEQ ID NO: 416381
uacuuccuggcacauggua

SEQ ID NO: 416383 - RNA, 19 nt, Artificial Sequence
  Description of Artificial Sequence: Synthetic oligonucleotide
  Sense Strand Starting at position 1244 of SEQ ID NO: 318722
aguagaagucaugggacau

SEQ ID NO: 416384 - RNA, 19 nt, Artificial Sequence
  Description of Artificial Sequence: Synthetic oligonucleotide
  Antisense Strand to SEQ ID NO: 416383
augucccaugacuucuacu

SEQ ID NO: 416385 - RNA, 19 nt, Artificial Sequence
  Description of Artificial Sequence: Synthetic oligonucleotide
  Sense Strand Starting at position 1244 of SEQ ID NO: 318723
guagaagucaugggacaug

SEQ ID NO: 416386 - RNA, 19 nt, Artificial Sequence
  Description of Artificial Sequence: Synthetic oligonucleotide
  Antisense Strand to SEQ ID NO: 416385
caugucccaugacuucuac

SEQ ID NO: 416387 - RNA, 19 nt, Artificial Sequence
  Description of Artificial Sequence: Synthetic oligonucleotide
  Sense Strand Starting at position 1244 of SEQ ID NO: 318728
agucaugggacauguguga

SEQ ID NO: 416388 - RNA, 19 nt, Artificial Sequence
  Description of Artificial Sequence: Synthetic oligonucleotide
  Antisense Strand to SEQ ID NO: 416387
ucacacaugucccaugacu

SEQ ID NO: 416389 - RNA, 19 nt, Artificial Sequence
  Description of Artificial Sequence: Synthetic oligonucleotide
  Sense Strand Starting at position 1244 of SEQ ID NO: 318766
ucuguaagguucuuguauc

SEQ ID NO: 416390 - RNA, 19 nt, Artificial Sequence
  Description of Artificial Sequence: Synthetic oligonucleotide
  Antisense Strand to SEQ ID NO: 416389
gauacaagaaccuuacaga

SEQ ID NO: 416391 - RNA, 19 nt, Artificial Sequence
  Description of Artificial Sequence: Synthetic oligonucleotide
  Sense Strand Starting at position 1245 of SEQ ID NO: 315247
cgaagcaaauauuccagaa

SEQ ID NO: 416392 - RNA, 19 nt, Artificial Sequence
  Description of Artificial Sequence: Synthetic oligonucleotide
  Antisense Strand to SEQ ID NO: 416391
uucuggaauauuugcuucg

SEQ ID NO: 416393 - RNA, 19 nt, Artificial Sequence
  Description of Artificial Sequence: Synthetic oligonucleotide
  Sense Strand Starting at position 1245 of SEQ ID NO: 315282
gagagaggcuucucugaca

SEQ ID NO: 416394 - RNA, 19 nt, Artificial Sequence
  Description of Artificial Sequence: Synthetic oligonucleotide
  Antisense Strand to SEQ ID NO: 416393
ugucagagaagccucucuc

SEQ ID NO: 416395 - RNA, 19 nt, Artificial Sequence
  Description of Artificial Sequence: Synthetic oligonucleotide
  Sense Strand Starting at position 1245 of SEQ ID NO: 315309
ugcucuaaagggcaugaua

SEQ ID NO: 416396 - RNA, 19 nt, Artificial Sequence
  Description of Artificial Sequence: Synthetic oligonucleotide
  Antisense Strand to SEQ ID NO: 416395
uaucaugcccuuuagagca

SEQ ID NO: 416397 - RNA, 19 nt, Artificial Sequence
  Description of Artificial Sequence: Synthetic oligonucleotide
  Sense Strand Starting at position 1245 of SEQ ID NO: 315393
aaggacaucuaguuacagu

SEQ ID NO: 416398 - RNA, 19 nt, Artificial Sequence
  Description of Artificial Sequence: Synthetic oligonucleotide
  Antisense Strand to SEQ ID NO: 416397
acuguaacuagauguccuu

SEQ ID NO: 416399 - RNA, 19 nt, Artificial Sequence
  Description of Artificial Sequence: Synthetic oligonucleotide
  Sense Strand Starting at position 1245 of SEQ ID NO: 315464
uacauauugugggcaauga

SEQ ID NO: 416400 - RNA, 19 nt, Artificial Sequence
  Description of Artificial Sequence: Synthetic oligonucleotide
  Antisense Strand to SEQ ID NO: 416399
ucauugcccacaauaugua

SEQ ID NO: 416401 - RNA, 19 nt, Artificial Sequence
  Description of Artificial Sequence: Synthetic oligonucleotide
  Sense Strand Starting at position 1245 of SEQ ID NO: 315468
uauugugggcaaugaaaga

SEQ ID NO: 416402 - RNA, 19 nt, Artificial Sequence
  Description of Artificial Sequence: Synthetic oligonucleotide
  Antisense Strand to SEQ ID NO: 416401
ucuuucauugcccacaaua

SEQ ID NO: 416403 - RNA, 19 nt, Artificial Sequence
  Description of Artificial Sequence: Synthetic oligonucleotide
  Sense Strand Starting at position 1245 of SEQ ID NO: 315955
ggaugacuaucaguacugu

SEQ ID NO: 416404 - RNA, 19 nt, Artificial Sequence
  Description of Artificial Sequence: Synthetic oligonucleotide
  Antisense Strand to SEQ ID NO: 416403
acaguacugauagucaucc

SEQ ID NO: 416405 - RNA, 19 nt, Artificial Sequence
  Description of Artificial Sequence: Synthetic oligonucleotide
  Sense Strand Starting at position 1245 of SEQ ID NO: 316192
aggaaauugcaugagugua

SEQ ID NO: 416406 - RNA, 19 nt, Artificial Sequence
  Description of Artificial Sequence: Synthetic oligonucleotide
  Antisense Strand to SEQ ID NO: 416405
uacacucaugcaauuuccu

SEQ ID NO: 416407 - RNA, 19 nt, Artificial Sequence
  Description of Artificial Sequence: Synthetic oligonucleotide
  Sense Strand Starting at position 1245 of SEQ ID NO: 316202
augaguguauuugaaagga

SEQ ID NO: 416408 - RNA, 19 nt, Artificial Sequence
  Description of Artificial Sequence: Synthetic oligonucleotide
  Antisense Strand to SEQ ID NO: 416407
uccuuucaaauacacucau

SEQ ID NO: 416409 - RNA, 19 nt, Artificial Sequence
  Description of Artificial Sequence: Synthetic oligonucleotide
  Sense Strand Starting at position 1245 of SEQ ID NO: 316411
guagucaucgcugucucau

SEQ ID NO: 416410 - RNA, 19 nt, Artificial Sequence
  Description of Artificial Sequence: Synthetic oligonucleotide
  Antisense Strand to SEQ ID NO: 416409
augagacagcgaugacuac

SEQ ID NO: 416411 - RNA, 19 nt, Artificial Sequence
  Description of Artificial Sequence: Synthetic oligonucleotide
  Sense Strand Starting at position 1245 of SEQ ID NO: 316497
cccuguuugaugggaccua

SEQ ID NO: 416412 - RNA, 19 nt, Artificial Sequence
  Description of Artificial Sequence: Synthetic oligonucleotide
  Antisense Strand to SEQ ID NO: 416411
uaggucccaucaaacaggg

SEQ ID NO: 416413 - RNA, 19 nt, Artificial Sequence
  Description of Artificial Sequence: Synthetic oligonucleotide
  Sense Strand Starting at position 1245 of SEQ ID NO: 316839
uauagauaaguaugucaag

SEQ ID NO: 416414 - RNA, 19 nt, Artificial Sequence
  Description of Artificial Sequence: Synthetic oligonucleotide
  Antisense Strand to SEQ ID NO: 416413
cuugacauacuuaucuaua

SEQ ID NO: 416415 - RNA, 19 nt, Artificial Sequence
  Description of Artificial Sequence: Synthetic oligonucleotide
  Sense Strand Starting at position 1245 of SEQ ID NO: 316840
auagauaaguaugucaagu

SEQ ID NO: 416416 - RNA, 19 nt, Artificial Sequence
  Description of Artificial Sequence: Synthetic oligonucleotide
  Antisense Strand to SEQ ID NO: 416415
acuugacauacuuaucuau

SEQ ID NO: 416417 - RNA, 19 nt, Artificial Sequence
  Description of Artificial Sequence: Synthetic oligonucleotide
  Sense Strand Starting at position 1245 of SEQ ID NO: 317287
ggauguuuacaggguggaa

SEQ ID NO: 416418 - RNA, 19 nt, Artificial Sequence
  Description of Artificial Sequence: Synthetic oligonucleotide
  Antisense Strand to SEQ ID NO: 416417
uuccacccuguaaacaucc

SEQ ID NO: 416419 - RNA, 19 nt, Artificial Sequence
  Description of Artificial Sequence: Synthetic oligonucleotide
  Sense Strand Starting at position 1245 of SEQ ID NO: 317312
ccgucagaggcagagaauu

SEQ ID NO: 416420 - RNA, 19 nt, Artificial Sequence
  Description of Artificial Sequence: Synthetic oligonucleotide
  Antisense Strand to SEQ ID NO: 416419
aauucucugccucugacgg

SEQ ID NO: 416421 - RNA, 19 nt, Artificial Sequence
  Description of Artificial Sequence: Synthetic oligonucleotide
  Sense Strand Starting at position 1245 of SEQ ID NO: 317318
gaggcagagaauuggguuu

SEQ ID NO: 416422 - RNA, 19 nt, Artificial Sequence
  Description of Artificial Sequence: Synthetic oligonucleotide
  Antisense Strand to SEQ ID NO: 416421
aaacccaauucucugccuc

SEQ ID NO: 416423 - RNA, 19 nt, Artificial Sequence
  Description of Artificial Sequence: Synthetic oligonucleotide
  Sense Strand Starting at position 1245 of SEQ ID NO: 317664
acaaucucuggucaguauu

SEQ ID NO: 416424 - RNA, 19 nt, Artificial Sequence
  Description of Artificial Sequence: Synthetic oligonucleotide
  Antisense Strand to SEQ ID NO: 416423
aauacugaccagagauugu

SEQ ID NO: 416425 - RNA, 19 nt, Artificial Sequence
  Description of Artificial Sequence: Synthetic oligonucleotide
  Sense Strand Starting at position 1245 of SEQ ID NO: 317701
acaugauauugucucuaug

SEQ ID NO: 416426 - RNA, 19 nt, Artificial Sequence
  Description of Artificial Sequence: Synthetic oligonucleotide
  Antisense Strand to SEQ ID NO: 416425
cauagagacaauaucaugu

SEQ ID NO: 416427 - RNA, 19 nt, Artificial Sequence
  Description of Artificial Sequence: Synthetic oligonucleotide
  Sense Strand Starting at position 1245 of SEQ ID NO: 317704
ugauauugucucuauguaa

SEQ ID NO: 416428 - RNA, 19 nt, Artificial Sequence
  Description of Artificial Sequence: Synthetic oligonucleotide
  Antisense Strand to SEQ ID NO: 416427
uuacauagagacaauauca

SEQ ID NO: 416429 - RNA, 19 nt, Artificial Sequence
  Description of Artificial Sequence: Synthetic oligonucleotide
  Sense Strand Starting at position 1245 of SEQ ID NO: 317758
agggcaaugcuacaucuua

SEQ ID NO: 416430 - RNA, 19 nt, Artificial Sequence
  Description of Artificial Sequence: Synthetic oligonucleotide
  Antisense Strand to SEQ ID NO: 416429
uaagauguagcauugcccu

SEQ ID NO: 416431 - RNA, 19 nt, Artificial Sequence
  Description of Artificial Sequence: Synthetic oligonucleotide
  Sense Strand Starting at position 1245 of SEQ ID NO: 317804
agcagauaguagguaauaa

SEQ ID NO: 416432 - RNA, 19 nt, Artificial Sequence
  Description of Artificial Sequence: Synthetic oligonucleotide
  Antisense Strand to SEQ ID NO: 416431
uuauuaccuacuaucugcu

SEQ ID NO: 416433 - RNA, 19 nt, Artificial Sequence
  Description of Artificial Sequence: Synthetic oligonucleotide
  Sense Strand Starting at position 1245 of SEQ ID NO: 317881
gucauuuaauggcuuugca

SEQ ID NO: 416434 - RNA, 19 nt, Artificial Sequence
  Description of Artificial Sequence: Synthetic oligonucleotide
  Antisense Strand to SEQ ID NO: 416433
ugcaaagccauuaaaugac

SEQ ID NO: 416435 - RNA, 19 nt, Artificial Sequence
  Description of Artificial Sequence: Synthetic oligonucleotide
  Sense Strand Starting at position 1245 of SEQ ID NO: 317953
guaaguugagaguaucauu

SEQ ID NO: 416436 - RNA, 19 nt, Artificial Sequence
  Description of Artificial Sequence: Synthetic oligonucleotide
  Antisense Strand to SEQ ID NO: 416435
aaugauacucucaacuuac

SEQ ID NO: 416437 - RNA, 19 nt, Artificial Sequence
  Description of Artificial Sequence: Synthetic oligonucleotide
  Sense Strand Starting at position 1245 of SEQ ID NO: 318100
aaguguguucuacauacag

SEQ ID NO: 416438 - RNA, 19 nt, Artificial Sequence
  Description of Artificial Sequence: Synthetic oligonucleotide
  Antisense Strand to SEQ ID NO: 416437
cuguauguagaacacacuu

SEQ ID NO: 416439 - RNA, 19 nt, Artificial Sequence
  Description of Artificial Sequence: Synthetic oligonucleotide
  Sense Strand Starting at position 1245 of SEQ ID NO: 318102
guguguucuacauacagag

SEQ ID NO: 416440 - RNA, 19 nt, Artificial Sequence
  Description of Artificial Sequence: Synthetic oligonucleotide
  Antisense Strand to SEQ ID NO: 416439
cucuguauguagaacacac

SEQ ID NO: 416441 - RNA, 19 nt, Artificial Sequence
  Description of Artificial Sequence: Synthetic oligonucleotide
  Sense Strand Starting at position 1245 of SEQ ID NO: 318104
guguucuacauacagaguu

SEQ ID NO: 416442 - RNA, 19 nt, Artificial Sequence
  Description of Artificial Sequence: Synthetic oligonucleotide
  Antisense Strand to SEQ ID NO: 416441
aacucuguauguagaacac

SEQ ID NO: 416443 - RNA, 19 nt, Artificial Sequence
  Description of Artificial Sequence: Synthetic oligonucleotide
  Sense Strand Starting at position 1245 of SEQ ID NO: 318111
acauacagaguugguauaa

SEQ ID NO: 416444 - RNA, 19 nt, Artificial Sequence
  Description of Artificial Sequence: Synthetic oligonucleotide
  Antisense Strand to SEQ ID NO: 416443
uuauaccaacucuguaugu

SEQ ID NO: 416445 - RNA, 19 nt, Artificial Sequence
  Description of Artificial Sequence: Synthetic oligonucleotide
  Sense Strand Starting at position 1245 of SEQ ID NO: 318112
cauacagaguugguauaaa

SEQ ID NO: 416446 - RNA, 19 nt, Artificial Sequence
  Description of Artificial Sequence: Synthetic oligonucleotide
  Antisense Strand to SEQ ID NO: 416445
uuuauaccaacucuguaug

SEQ ID NO: 416447 - RNA, 19 nt, Artificial Sequence
  Description of Artificial Sequence: Synthetic oligonucleotide
  Sense Strand Starting at position 1245 of SEQ ID NO: 318314
aaguaaauugguugaauuc

SEQ ID NO: 416448 - RNA, 19 nt, Artificial Sequence
  Description of Artificial Sequence: Synthetic oligonucleotide
  Antisense Strand to SEQ ID NO: 416447
gaauucaaccaauuuacuu

SEQ ID NO: 416449 - RNA, 19 nt, Artificial Sequence
  Description of Artificial Sequence: Synthetic oligonucleotide
  Sense Strand Starting at position 1245 of SEQ ID NO: 318382
uuuaaaguuccaggaauac

SEQ ID NO: 416450 - RNA, 19 nt, Artificial Sequence
  Description of Artificial Sequence: Synthetic oligonucleotide
  Antisense Strand to SEQ ID NO: 416449
guauuccuggaacuuuaaa

SEQ ID NO: 416451 - RNA, 19 nt, Artificial Sequence
  Description of Artificial Sequence: Synthetic oligonucleotide
  Sense Strand Starting at position 1245 of SEQ ID NO: 318412
agcgauuccacaggaaaug

SEQ ID NO: 416452 - RNA, 19 nt, Artificial Sequence
  Description of Artificial Sequence: Synthetic oligonucleotide
  Antisense Strand to SEQ ID NO: 416451
cauuuccuguggaaucgcu

SEQ ID NO: 416453 - RNA, 19 nt, Artificial Sequence
  Description of Artificial Sequence: Synthetic oligonucleotide
  Sense Strand Starting at position 1245 of SEQ ID NO: 318507
gaggacgucauguauacua

SEQ ID NO: 416454 - RNA, 19 nt, Artificial Sequence
  Description of Artificial Sequence: Synthetic oligonucleotide
  Antisense Strand to SEQ ID NO: 416453
uaguauacaugacguccuc

SEQ ID NO: 416455 - RNA, 19 nt, Artificial Sequence
  Description of Artificial Sequence: Synthetic oligonucleotide
  Sense Strand Starting at position 1245 of SEQ ID NO: 318509
ggacgucauguauacuaac

SEQ ID NO: 416456 - RNA, 19 nt, Artificial Sequence
  Description of Artificial Sequence: Synthetic oligonucleotide
  Antisense Strand to SEQ ID NO: 416455
guuaguauacaugacgucc

SEQ ID NO: 416457 - RNA, 19 nt, Artificial Sequence
  Description of Artificial Sequence: Synthetic oligonucleotide
  Sense Strand Starting at position 1245 of SEQ ID NO: 318655
agcauugcacgauauagaa

SEQ ID NO: 416458 - RNA, 19 nt, Artificial Sequence
  Description of Artificial Sequence: Synthetic oligonucleotide
  Antisense Strand to SEQ ID NO: 416457
uucuauaucgugcaaugcu

SEQ ID NO: 416459 - RNA, 19 nt, Artificial Sequence
  Description of Artificial Sequence: Synthetic oligonucleotide
  Sense Strand Starting at position 1245 of SEQ ID NO: 318706
guacuaugguaauccagag

SEQ ID NO: 416460 - RNA, 19 nt, Artificial Sequence
  Description of Artificial Sequence: Synthetic oligonucleotide
  Antisense Strand to SEQ ID NO: 416459
cucuggauuaccauaguac

SEQ ID NO: 416461 - RNA, 19 nt, Artificial Sequence
  Description of Artificial Sequence: Synthetic oligonucleotide
  Sense Strand Starting at position 1245 of SEQ ID NO: 318812
gaugguagaguuggguaua

SEQ ID NO: 416462 - RNA, 19 nt, Artificial Sequence
  Description of Artificial Sequence: Synthetic oligonucleotide
  Antisense Strand to SEQ ID NO: 416461
uauacccaacucuaccauc

SEQ ID NO: 416463 - RNA, 19 nt, Artificial Sequence
  Description of Artificial Sequence: Synthetic oligonucleotide
  Sense Strand Starting at position 1245 of SEQ ID NO: 318815
gguagaguuggguauaaau

SEQ ID NO: 416464 - RNA, 19 nt, Artificial Sequence
  Description of Artificial Sequence: Synthetic oligonucleotide
  Antisense Strand to SEQ ID NO: 416463
auuuauacccaacucuacc

SEQ ID NO: 416465 - RNA, 19 nt, Artificial Sequence
  Description of Artificial Sequence: Synthetic oligonucleotide
  Sense Strand Starting at position 1245 of SEQ ID NO: 318817
uagaguuggguauaaaugu

SEQ ID NO: 416466 - RNA, 19 nt, Artificial Sequence
  Description of Artificial Sequence: Synthetic oligonucleotide
  Antisense Strand to SEQ ID NO: 416465
acauuuauacccaacucua

SEQ ID NO: 416467 - RNA, 19 nt, Artificial Sequence
  Description of Artificial Sequence: Synthetic oligonucleotide
  Sense Strand Starting at position 1245 of SEQ ID NO: 318828
auaaauguuauuggugaga

SEQ ID NO: 416468 - RNA, 19 nt, Artificial Sequence
  Description of Artificial Sequence: Synthetic oligonucleotide
  Antisense Strand to SEQ ID NO: 416467
ucucaccaauaacauuuau

SEQ ID NO: 416469 - RNA, 19 nt, Artificial Sequence
  Description of Artificial Sequence: Synthetic oligonucleotide
  Sense Strand Starting at position 1245 of SEQ ID NO: 318983
aaauaauugcgaggcaaau

SEQ ID NO: 416470 - RNA, 19 nt, Artificial Sequence
  Description of Artificial Sequence: Synthetic oligonucleotide
  Antisense Strand to SEQ ID NO: 416469
auuugccucgcaauuauuu

SEQ ID NO: 416471 - RNA, 19 nt, Artificial Sequence
  Description of Artificial Sequence: Synthetic oligonucleotide
  Sense Strand Starting at position 1246 of SEQ ID NO: 315489
gucaaucggcuucgggaaa

SEQ ID NO: 416472 - RNA, 19 nt, Artificial Sequence
  Description of Artificial Sequence: Synthetic oligonucleotide
  Antisense Strand to SEQ ID NO: 416471
uuucccgaagccgauugac

SEQ ID NO: 416473 - RNA, 19 nt, Artificial Sequence
  Description of Artificial Sequence: Synthetic oligonucleotide
  Sense Strand Starting at position 1246 of SEQ ID NO: 315525
acucuaugcucauccgagu

SEQ ID NO: 416474 - RNA, 19 nt, Artificial Sequence
  Description of Artificial Sequence: Synthetic oligonucleotide
  Antisense Strand to SEQ ID NO: 416473
acucggaugagcauagagu

SEQ ID NO: 416475 - RNA, 19 nt, Artificial Sequence
  Description of Artificial Sequence: Synthetic oligonucleotide
  Sense Strand Starting at position 1246 of SEQ ID NO: 315531
ugcucauccgaguauguaa

SEQ ID NO: 416476 - RNA, 19 nt, Artificial Sequence
  Description of Artificial Sequence: Synthetic oligonucleotide
  Antisense Strand to SEQ ID NO: 416475
uuacauacucggaugagca

SEQ ID NO: 416477 - RNA, 19 nt, Artificial Sequence
  Description of Artificial Sequence: Synthetic oligonucleotide
  Sense Strand Starting at position 1246 of SEQ ID NO: 315873
cuagcaagccucguauguu

SEQ ID NO: 416478 - RNA, 19 nt, Artificial Sequence
  Description of Artificial Sequence: Synthetic oligonucleotide
  Antisense Strand to SEQ ID NO: 416477
aacauacgaggcuugcuag

SEQ ID NO: 416479 - RNA, 19 nt, Artificial Sequence
  Description of Artificial Sequence: Synthetic oligonucleotide
  Sense Strand Starting at position 1246 of SEQ ID NO: 315953
guuuaaacccuagaacugu

SEQ ID NO: 416480 - RNA, 19 nt, Artificial Sequence
  Description of Artificial Sequence: Synthetic oligonucleotide
  Antisense Strand to SEQ ID NO: 416479
acaguucuaggguuuaaac

SEQ ID NO: 416481 - RNA, 19 nt, Artificial Sequence
  Description of Artificial Sequence: Synthetic oligonucleotide
  Sense Strand Starting at position 1246 of SEQ ID NO: 315969
ugucuuguucccgcaauuc

SEQ ID NO: 416482 - RNA, 19 nt, Artificial Sequence
  Description of Artificial Sequence: Synthetic oligonucleotide
  Antisense Strand to SEQ ID NO: 416481
gaauugcgggaacaagaca

SEQ ID NO: 416483 - RNA, 19 nt, Artificial Sequence
  Description of Artificial Sequence: Synthetic oligonucleotide
  Sense Strand Starting at position 1246 of SEQ ID NO: 316007
ccuuuaagagguggaaacu

SEQ ID NO: 416484 - RNA, 19 nt, Artificial Sequence
  Description of Artificial Sequence: Synthetic oligonucleotide
  Antisense Strand to SEQ ID NO: 416483
aguuuccaccucuuaaagg

SEQ ID NO: 416485 - RNA, 19 nt, Artificial Sequence
  Description of Artificial Sequence: Synthetic oligonucleotide
  Sense Strand Starting at position 1246 of SEQ ID NO: 316057
ugugguucuaaguauuaga

SEQ ID NO: 416486 - RNA, 19 nt, Artificial Sequence
  Description of Artificial Sequence: Synthetic oligonucleotide
  Antisense Strand to SEQ ID NO: 416485
ucuaauacuuagaaccaca

SEQ ID NO: 416487 - RNA, 19 nt, Artificial Sequence
  Description of Artificial Sequence: Synthetic oligonucleotide
  Sense Strand Starting at position 1246 of SEQ ID NO: 316133
ucacaaucccguggaaaug

SEQ ID NO: 416488 - RNA, 19 nt, Artificial Sequence
  Description of Artificial Sequence: Synthetic oligonucleotide
  Antisense Strand to SEQ ID NO: 416487
cauuuccacgggauuguga

SEQ ID NO: 416489 - RNA, 19 nt, Artificial Sequence
  Description of Artificial Sequence: Synthetic oligonucleotide
  Sense Strand Starting at position 1246 of SEQ ID NO: 316195
auagaauacugauacagau

SEQ ID NO: 416490 - RNA, 19 nt, Artificial Sequence
  Description of Artificial Sequence: Synthetic oligonucleotide
  Antisense Strand to SEQ ID NO: 416489
aucuguaucaguauucuau

SEQ ID NO: 416491 - RNA, 19 nt, Artificial Sequence
  Description of Artificial Sequence: Synthetic oligonucleotide
  Sense Strand Starting at position 1246 of SEQ ID NO: 316225
aagcccuuucggcaucaga

SEQ ID NO: 416492 - RNA, 19 nt, Artificial Sequence
  Description of Artificial Sequence: Synthetic oligonucleotide
  Antisense Strand to SEQ ID NO: 416491
ucugaugccgaaagggcuu

SEQ ID NO: 416493 - RNA, 19 nt, Artificial Sequence
  Description of Artificial Sequence: Synthetic oligonucleotide
  Sense Strand Starting at position 1246 of SEQ ID NO: 316228
cccuuucggcaucagagaa

SEQ ID NO: 416494 - RNA, 19 nt, Artificial Sequence
  Description of Artificial Sequence: Synthetic oligonucleotide
  Antisense Strand to SEQ ID NO: 416493
uucucugaugccgaaaggg

SEQ ID NO: 416495 - RNA, 19 nt, Artificial Sequence
  Description of Artificial Sequence: Synthetic oligonucleotide
  Sense Strand Starting at position 1246 of SEQ ID NO: 316311
cuuagucggccuuggauua

SEQ ID NO: 416496 - RNA, 19 nt, Artificial Sequence
  Description of Artificial Sequence: Synthetic oligonucleotide
  Antisense Strand to SEQ ID NO: 416495
uaauccaaggccgacuaag

SEQ ID NO: 416497 - RNA, 19 nt, Artificial Sequence
  Description of Artificial Sequence: Synthetic oligonucleotide
  Sense Strand Starting at position 1246 of SEQ ID NO: 316322
uuggauuaguuuccaucuu

SEQ ID NO: 416498 - RNA, 19 nt, Artificial Sequence
  Description of Artificial Sequence: Synthetic oligonucleotide
  Antisense Strand to SEQ ID NO: 416497
aagauggaaacuaauccaa

SEQ ID NO: 416499 - RNA, 19 nt, Artificial Sequence
  Description of Artificial Sequence: Synthetic oligonucleotide
  Sense Strand Starting at position 1246 of SEQ ID NO: 316385
caaagacgguccuucguua

SEQ ID NO: 416500 - RNA, 19 nt, Artificial Sequence
  Description of Artificial Sequence: Synthetic oligonucleotide
  Antisense Strand to SEQ ID NO: 416499
uaacgaaggaccgucuuug

SEQ ID NO: 416501 - RNA, 19 nt, Artificial Sequence
  Description of Artificial Sequence: Synthetic oligonucleotide
  Sense Strand Starting at position 1246 of SEQ ID NO: 316390
acgguccuucguuaaccua

SEQ ID NO: 416502 - RNA, 19 nt, Artificial Sequence
  Description of Artificial Sequence: Synthetic oligonucleotide
  Antisense Strand to SEQ ID NO: 416501
uagguuaacgaaggaccgu

SEQ ID NO: 416503 - RNA, 19 nt, Artificial Sequence
  Description of Artificial Sequence: Synthetic oligonucleotide
  Sense Strand Starting at position 1246 of SEQ ID NO: 316589
gagagcaacgccgaaauaa

SEQ ID NO: 416504 - RNA, 19 nt, Artificial Sequence
  Description of Artificial Sequence: Synthetic oligonucleotide
  Antisense Strand to SEQ ID NO: 416503
uuauuucggcguugcucuc

SEQ ID NO: 416505 - RNA, 19 nt, Artificial Sequence
  Description of Artificial Sequence: Synthetic oligonucleotide
  Sense Strand Starting at position 1246 of SEQ ID NO: 316598
gccgaaauaagauaucgcu

SEQ ID NO: 416506 - RNA, 19 nt, Artificial Sequence
  Description of Artificial Sequence: Synthetic oligonucleotide
  Antisense Strand to SEQ ID NO: 416505
agcgauaucuuauuucggc

SEQ ID NO: 416507 - RNA, 19 nt, Artificial Sequence
  Description of Artificial Sequence: Synthetic oligonucleotide
  Sense Strand Starting at position 1246 of SEQ ID NO: 316981
gucgaugugcuucaaucga

SEQ ID NO: 416508 - RNA, 19 nt, Artificial Sequence
  Description of Artificial Sequence: Synthetic oligonucleotide
  Antisense Strand to SEQ ID NO: 416507
ucgauugaagcacaucgac

SEQ ID NO: 416509 - RNA, 19 nt, Artificial Sequence
  Description of Artificial Sequence: Synthetic oligonucleotide
  Sense Strand Starting at position 1246 of SEQ ID NO: 317112
cuaacucuaccggauguga

SEQ ID NO: 416510 - RNA, 19 nt, Artificial Sequence
  Description of Artificial Sequence: Synthetic oligonucleotide
  Antisense Strand to SEQ ID NO: 416509
ucacauccgguagaguuag

SEQ ID NO: 416511 - RNA, 19 nt, Artificial Sequence
  Description of Artificial Sequence: Synthetic oligonucleotide
  Sense Strand Starting at position 1246 of SEQ ID NO: 317285
gccucuaugaggcgggaaa

SEQ ID NO: 416512 - RNA, 19 nt, Artificial Sequence
  Description of Artificial Sequence: Synthetic oligonucleotide
  Antisense Strand to SEQ ID NO: 416511
uuucccgccucauagaggc

SEQ ID NO: 416513 - RNA, 19 nt, Artificial Sequence
  Description of Artificial Sequence: Synthetic oligonucleotide
  Sense Strand Starting at position 1246 of SEQ ID NO: 317300
gaaagcuagcgugucguuu

SEQ ID NO: 416514 - RNA, 19 nt, Artificial Sequence
  Description of Artificial Sequence: Synthetic oligonucleotide
  Antisense Strand to SEQ ID NO: 416513
aaacgacacgcuagcuuuc

SEQ ID NO: 416515 - RNA, 19 nt, Artificial Sequence
  Description of Artificial Sequence: Synthetic oligonucleotide
  Sense Strand Starting at position 1246 of SEQ ID NO: 317378
ucuagaacuuuccagggaa

SEQ ID NO: 416516 - RNA, 19 nt, Artificial Sequence
  Description of Artificial Sequence: Synthetic oligonucleotide
  Antisense Strand to SEQ ID NO: 416515
uucccuggaaaguucuaga

SEQ ID NO: 416517 - RNA, 19 nt, Artificial Sequence
  Description of Artificial Sequence: Synthetic oligonucleotide
  Sense Strand Starting at position 1246 of SEQ ID NO: 317479
ugucuuuccuuuguuagag

SEQ ID NO: 416518 - RNA, 19 nt, Artificial Sequence
  Description of Artificial Sequence: Synthetic oligonucleotide
  Antisense Strand to SEQ ID NO: 416517
cucuaacaaaggaaagaca

SEQ ID NO: 416519 - RNA, 19 nt, Artificial Sequence
  Description of Artificial Sequence: Synthetic oligonucleotide
  Sense Strand Starting at position 1246 of SEQ ID NO: 317480
gucuuuccuuuguuagaga

SEQ ID NO: 416520 - RNA, 19 nt, Artificial Sequence
  Description of Artificial Sequence: Synthetic oligonucleotide
  Antisense Strand to SEQ ID NO: 416519
ucucuaacaaaggaaagac

SEQ ID NO: 416521 - RNA, 19 nt, Artificial Sequence
  Description of Artificial Sequence: Synthetic oligonucleotide
  Sense Strand Starting at position 1246 of SEQ ID NO: 317485
uccuuuguuagagaaguga

SEQ ID NO: 416522 - RNA, 19 nt, Artificial Sequence
  Description of Artificial Sequence: Synthetic oligonucleotide
  Antisense Strand to SEQ ID NO: 416521
ucacuucucuaacaaagga

SEQ ID NO: 416523 - RNA, 19 nt, Artificial Sequence
  Description of Artificial Sequence: Synthetic oligonucleotide
  Sense Strand Starting at position 1246 of SEQ ID NO: 317493
uagagaagugaauguucgu

SEQ ID NO: 416524 - RNA, 19 nt, Artificial Sequence
  Description of Artificial Sequence: Synthetic oligonucleotide
  Antisense Strand to SEQ ID NO: 416523
acgaacauucacuucucua

SEQ ID NO: 416525 - RNA, 19 nt, Artificial Sequence
  Description of Artificial Sequence: Synthetic oligonucleotide
  Sense Strand Starting at position 1246 of SEQ ID NO: 317496
agaagugaauguucguaca

SEQ ID NO: 416526 - RNA, 19 nt, Artificial Sequence
  Description of Artificial Sequence: Synthetic oligonucleotide
  Antisense Strand to SEQ ID NO: 416525
uguacgaacauucacuucu

SEQ ID NO: 416527 - RNA, 19 nt, Artificial Sequence
  Description of Artificial Sequence: Synthetic oligonucleotide
  Sense Strand Starting at position 1246 of SEQ ID NO: 317498
aagugaauguucguacauu

SEQ ID NO: 416528 - RNA, 19 nt, Artificial Sequence
  Description of Artificial Sequence: Synthetic oligonucleotide
  Antisense Strand to SEQ ID NO: 416527
aauguacgaacauucacuu

SEQ ID NO: 416529 - RNA, 19 nt, Artificial Sequence
  Description of Artificial Sequence: Synthetic oligonucleotide
  Sense Strand Starting at position 1246 of SEQ ID NO: 318273
augugcuagaaccguuaaa

SEQ ID NO: 416530 - RNA, 19 nt, Artificial Sequence
  Description of Artificial Sequence: Synthetic oligonucleotide
  Antisense Strand to SEQ ID NO: 416529
uuuaacgguucuagcacau

SEQ ID NO: 416531 - RNA, 19 nt, Artificial Sequence
  Description of Artificial Sequence: Synthetic oligonucleotide
  Sense Strand Starting at position 1246 of SEQ ID NO: 318310
uuguaagugccagaggcau

SEQ ID NO: 416532 - RNA, 19 nt, Artificial Sequence
  Description of Artificial Sequence: Synthetic oligonucleotide
  Antisense Strand to SEQ ID NO: 416531
augccucuggcacuuacaa

SEQ ID NO: 416533 - RNA, 19 nt, Artificial Sequence
  Description of Artificial Sequence: Synthetic oligonucleotide
  Sense Strand Starting at position 1246 of SEQ ID NO: 318316
gugccagaggcauguauaa

SEQ ID NO: 416534 - RNA, 19 nt, Artificial Sequence
  Description of Artificial Sequence: Synthetic oligonucleotide
  Antisense Strand to SEQ ID NO: 416533
uuauacaugccucuggcac

SEQ ID NO: 416535 - RNA, 19 nt, Artificial Sequence
  Description of Artificial Sequence: Synthetic oligonucleotide
  Sense Strand Starting at position 1246 of SEQ ID NO: 318318
gccagaggcauguauaacu

SEQ ID NO: 416536 - RNA, 19 nt, Artificial Sequence
  Description of Artificial Sequence: Synthetic oligonucleotide
  Antisense Strand to SEQ ID NO: 416535
aguuauacaugccucuggc

SEQ ID NO: 416537 - RNA, 19 nt, Artificial Sequence
  Description of Artificial Sequence: Synthetic oligonucleotide
  Sense Strand Starting at position 1246 of SEQ ID NO: 318370
gccauuucguaagagaaua

SEQ ID NO: 416538 - RNA, 19 nt, Artificial Sequence
  Description of Artificial Sequence: Synthetic oligonucleotide
  Antisense Strand to SEQ ID NO: 416537
uauucucuuacgaaauggc

SEQ ID NO: 416539 - RNA, 19 nt, Artificial Sequence
  Description of Artificial Sequence: Synthetic oligonucleotide
  Sense Strand Starting at position 1246 of SEQ ID NO: 318375
uucguaagagaauauaguu

SEQ ID NO: 416540 - RNA, 19 nt, Artificial Sequence
  Description of Artificial Sequence: Synthetic oligonucleotide
  Antisense Strand to SEQ ID NO: 416539
aacuauauucucuuacgaa

SEQ ID NO: 416541 - RNA, 19 nt, Artificial Sequence
  Description of Artificial Sequence: Synthetic oligonucleotide
  Sense Strand Starting at position 1246 of SEQ ID NO: 318423
gucggauacuuucuuucuu

SEQ ID NO: 416542 - RNA, 19 nt, Artificial Sequence
  Description of Artificial Sequence: Synthetic oligonucleotide
  Antisense Strand to SEQ ID NO: 416541
aagaaagaaaguauccgac

SEQ ID NO: 416543 - RNA, 19 nt, Artificial Sequence
  Description of Artificial Sequence: Synthetic oligonucleotide
  Sense Strand Starting at position 1246 of SEQ ID NO: 318780
ggugguaccuggcugauga

SEQ ID NO: 416544 - RNA, 19 nt, Artificial Sequence
  Description of Artificial Sequence: Synthetic oligonucleotide
  Antisense Strand to SEQ ID NO: 416543
ucaucagccagguaccacc

SEQ ID NO: 416545 - RNA, 19 nt, Artificial Sequence
  Description of Artificial Sequence: Synthetic oligonucleotide
  Sense Strand Starting at position 1246 of SEQ ID NO: 318968
gcuuuauugagauacgacu

SEQ ID NO: 416546 - RNA, 19 nt, Artificial Sequence
  Description of Artificial Sequence: Synthetic oligonucleotide
  Antisense Strand to SEQ ID NO: 416545
agucguaucucaauaaagc

SEQ ID NO: 416547 - RNA, 19 nt, Artificial Sequence
  Description of Artificial Sequence: Synthetic oligonucleotide
  Sense Strand Starting at position 1246 of SEQ ID NO: 318993
cuaugcaguucccuuauuu

SEQ ID NO: 416548 - RNA, 19 nt, Artificial Sequence
  Description of Artificial Sequence: Synthetic oligonucleotide
  Antisense Strand to SEQ ID NO: 416547
aaauaagggaacugcauag

SEQ ID NO: 416549 - RNA, 19 nt, Artificial Sequence
  Description of Artificial Sequence: Synthetic oligonucleotide
  Sense Strand Starting at position 1246 of SEQ ID NO: 319071
agaguagucucaucacauu

SEQ ID NO: 416550 - RNA, 19 nt, Artificial Sequence
  Description of Artificial Sequence: Synthetic oligonucleotide
  Antisense Strand to SEQ ID NO: 416549
aaugugaugagacuacucu

SEQ ID NO: 416551 - RNA, 19 nt, Artificial Sequence
  Description of Artificial Sequence: Synthetic oligonucleotide
  Sense Strand Starting at position 1247 of SEQ ID NO: 315280
aggagacaauaagauauaa

SEQ ID NO: 416552 - RNA, 19 nt, Artificial Sequence
  Description of Artificial Sequence: Synthetic oligonucleotide
  Antisense Strand to SEQ ID NO: 416551
uuauaucuuauugucuccu

SEQ ID NO: 416553 - RNA, 19 nt, Artificial Sequence
  Description of Artificial Sequence: Synthetic oligonucleotide
  Sense Strand Starting at position 1247 of SEQ ID NO: 315375
uagacuaaaugguccaguu

SEQ ID NO: 416554 - RNA, 19 nt, Artificial Sequence
  Description of Artificial Sequence: Synthetic oligonucleotide
  Antisense Strand to SEQ ID NO: 416553
aacuggaccauuuagucua

SEQ ID NO: 416555 - RNA, 19 nt, Artificial Sequence
  Description of Artificial Sequence: Synthetic oligonucleotide
  Sense Strand Starting at position 1247 of SEQ ID NO: 315757
agaucuuugcaguaagcua

SEQ ID NO: 416556 - RNA, 19 nt, Artificial Sequence
  Description of Artificial Sequence: Synthetic oligonucleotide
  Antisense Strand to SEQ ID NO: 416555
uagcuuacugcaaagaucu

SEQ ID NO: 416557 - RNA, 19 nt, Artificial Sequence
  Description of Artificial Sequence: Synthetic oligonucleotide
  Sense Strand Starting at position 1247 of SEQ ID NO: 315945
gagaaacccugucuaugaa

SEQ ID NO: 416558 - RNA, 19 nt, Artificial Sequence
  Description of Artificial Sequence: Synthetic oligonucleotide
  Antisense Strand to SEQ ID NO: 416557
uucauagacaggguuucuc

SEQ ID NO: 416559 - RNA, 19 nt, Artificial Sequence
  Description of Artificial Sequence: Synthetic oligonucleotide
  Sense Strand Starting at position 1247 of SEQ ID NO: 316362
cccacaagacccugugauu

SEQ ID NO: 416560 - RNA, 19 nt, Artificial Sequence
  Description of Artificial Sequence: Synthetic oligonucleotide
  Antisense Strand to SEQ ID NO: 416559
aaucacagggucuuguggg

SEQ ID NO: 416561 - RNA, 19 nt, Artificial Sequence
  Description of Artificial Sequence: Synthetic oligonucleotide
  Sense Strand Starting at position 1247 of SEQ ID NO: 316373
cugugauuauuaucaccca

SEQ ID NO: 416562 - RNA, 19 nt, Artificial Sequence
  Description of Artificial Sequence: Synthetic oligonucleotide
  Antisense Strand to SEQ ID NO: 416561
ugggugauaauaaucacag

SEQ ID NO: 416563 - RNA, 19 nt, Artificial Sequence
  Description of Artificial Sequence: Synthetic oligonucleotide
  Sense Strand Starting at position 1247 of SEQ ID NO: 316604
gugagaugacucuggguag

SEQ ID NO: 416564 - RNA, 19 nt, Artificial Sequence
  Description of Artificial Sequence: Synthetic oligonucleotide
  Antisense Strand to SEQ ID NO: 416563
cuacccagagucaucucac

SEQ ID NO: 416565 - RNA, 19 nt, Artificial Sequence
  Description of Artificial Sequence: Synthetic oligonucleotide
  Sense Strand Starting at position 1247 of SEQ ID NO: 316681
gcagguuucuaucuggaag

SEQ ID NO: 416566 - RNA, 19 nt, Artificial Sequence
  Description of Artificial Sequence: Synthetic oligonucleotide
  Antisense Strand to SEQ ID NO: 416565
cuuccagauagaaaccugc

SEQ ID NO: 416567 - RNA, 19 nt, Artificial Sequence
  Description of Artificial Sequence: Synthetic oligonucleotide
  Sense Strand Starting at position 1247 of SEQ ID NO: 316760
aucacaucuguuuguauag

SEQ ID NO: 416568 - RNA, 19 nt, Artificial Sequence
  Description of Artificial Sequence: Synthetic oligonucleotide
  Antisense Strand to SEQ ID NO: 416567
cuauacaaacagaugugau

SEQ ID NO: 416569 - RNA, 19 nt, Artificial Sequence
  Description of Artificial Sequence: Synthetic oligonucleotide
  Sense Strand Starting at position 1247 of SEQ ID NO: 316769
guuuguauaggugaucaag

SEQ ID NO: 416570 - RNA, 19 nt, Artificial Sequence
  Description of Artificial Sequence: Synthetic oligonucleotide
  Antisense Strand to SEQ ID NO: 416569
cuugaucaccuauacaaac

SEQ ID NO: 416571 - RNA, 19 nt, Artificial Sequence
  Description of Artificial Sequence: Synthetic oligonucleotide
  Sense Strand Starting at position 1247 of SEQ ID NO: 316771
uuguauaggugaucaagga

SEQ ID NO: 416572 - RNA, 19 nt, Artificial Sequence
  Description of Artificial Sequence: Synthetic oligonucleotide
  Antisense Strand to SEQ ID NO: 416571
uccuugaucaccuauacaa

SEQ ID NO: 416573 - RNA, 19 nt, Artificial Sequence
  Description of Artificial Sequence: Synthetic oligonucleotide
  Sense Strand Starting at position 1247 of SEQ ID NO: 316775
auaggugaucaaggaagca

SEQ ID NO: 416574 - RNA, 19 nt, Artificial Sequence
  Description of Artificial Sequence: Synthetic oligonucleotide
  Antisense Strand to SEQ ID NO: 416573
ugcuuccuugaucaccuau

SEQ ID NO: 416575 - RNA, 19 nt, Artificial Sequence
  Description of Artificial Sequence: Synthetic oligonucleotide
  Sense Strand Starting at position 1247 of SEQ ID NO: 316913
ggaggaagguucucaucac

SEQ ID NO: 416576 - RNA, 19 nt, Artificial Sequence
  Description of Artificial Sequence: Synthetic oligonucleotide
  Antisense Strand to SEQ ID NO: 416575
gugaugagaaccuuccucc

SEQ ID NO: 416577 - RNA, 19 nt, Artificial Sequence
  Description of Artificial Sequence: Synthetic oligonucleotide
  Sense Strand Starting at position 1247 of SEQ ID NO: 316917
gaagguucucaucacuugu

SEQ ID NO: 416578 - RNA, 19 nt, Artificial Sequence
  Description of Artificial Sequence: Synthetic oligonucleotide
  Antisense Strand to SEQ ID NO: 416577
acaagugaugagaaccuuc

SEQ ID NO: 416579 - RNA, 19 nt, Artificial Sequence
  Description of Artificial Sequence: Synthetic oligonucleotide
  Sense Strand Starting at position 1247 of SEQ ID NO: 316923
ucucaucacuugucuggau

SEQ ID NO: 416580 - RNA, 19 nt, Artificial Sequence
  Description of Artificial Sequence: Synthetic oligonucleotide
  Antisense Strand to SEQ ID NO: 416579
auccagacaagugaugaga

SEQ ID NO: 416581 - RNA, 19 nt, Artificial Sequence
  Description of Artificial Sequence: Synthetic oligonucleotide
  Sense Strand Starting at position 1247 of SEQ ID NO: 316924
cucaucacuugucuggauu

SEQ ID NO: 416582 - RNA, 19 nt, Artificial Sequence
  Description of Artificial Sequence: Synthetic oligonucleotide
  Antisense Strand to SEQ ID NO: 416581
aauccagacaagugaugag

SEQ ID NO: 416583 - RNA, 19 nt, Artificial Sequence
  Description of Artificial Sequence: Synthetic oligonucleotide
  Sense Strand Starting at position 1247 of SEQ ID NO: 317076
gcgggagugaucgaagaag

SEQ ID NO: 416584 - RNA, 19 nt, Artificial Sequence
  Description of Artificial Sequence: Synthetic oligonucleotide
  Antisense Strand to SEQ ID NO: 416583
cuucuucgaucacucccgc

SEQ ID NO: 416585 - RNA, 19 nt, Artificial Sequence
  Description of Artificial Sequence: Synthetic oligonucleotide
  Sense Strand Starting at position 1247 of SEQ ID NO: 317126
gcaugauggcuggacucaa

SEQ ID NO: 416586 - RNA, 19 nt, Artificial Sequence
  Description of Artificial Sequence: Synthetic oligonucleotide
  Antisense Strand to SEQ ID NO: 416585
uugaguccagccaucaugc

SEQ ID NO: 416587 - RNA, 19 nt, Artificial Sequence
  Description of Artificial Sequence: Synthetic oligonucleotide
  Sense Strand Starting at position 1247 of SEQ ID NO: 317760
auaugacuauccuugaguu

SEQ ID NO: 416588 - RNA, 19 nt, Artificial Sequence
  Description of Artificial Sequence: Synthetic oligonucleotide
  Antisense Strand to SEQ ID NO: 416587
aacucaaggauagucauau

SEQ ID NO: 416589 - RNA, 19 nt, Artificial Sequence
  Description of Artificial Sequence: Synthetic oligonucleotide
  Sense Strand Starting at position 1247 of SEQ ID NO: 317764
gacuauccuugaguuugga

SEQ ID NO: 416590 - RNA, 19 nt, Artificial Sequence
  Description of Artificial Sequence: Synthetic oligonucleotide
  Antisense Strand to SEQ ID NO: 416589
uccaaacucaaggauaguc

SEQ ID NO: 416591 - RNA, 19 nt, Artificial Sequence
  Description of Artificial Sequence: Synthetic oligonucleotide
  Sense Strand Starting at position 1247 of SEQ ID NO: 317829
aucaguuaugcuugagacu

SEQ ID NO: 416592 - RNA, 19 nt, Artificial Sequence
  Description of Artificial Sequence: Synthetic oligonucleotide
  Antisense Strand to SEQ ID NO: 416591
agucucaagcauaacugau

SEQ ID NO: 416593 - RNA, 19 nt, Artificial Sequence
  Description of Artificial Sequence: Synthetic oligonucleotide
  Sense Strand Starting at position 1247 of SEQ ID NO: 317830
ucaguuaugcuugagacug

SEQ ID NO: 416594 - RNA, 19 nt, Artificial Sequence
  Description of Artificial Sequence: Synthetic oligonucleotide
  Antisense Strand to SEQ ID NO: 416593
cagucucaagcauaacuga

SEQ ID NO: 416595 - RNA, 19 nt, Artificial Sequence
  Description of Artificial Sequence: Synthetic oligonucleotide
  Sense Strand Starting at position 1247 of SEQ ID NO: 317925
cagagaaguuaucuuugag

SEQ ID NO: 416596 - RNA, 19 nt, Artificial Sequence
  Description of Artificial Sequence: Synthetic oligonucleotide
  Antisense Strand to SEQ ID NO: 416595
cucaaagauaacuucucug

SEQ ID NO: 416597 - RNA, 19 nt, Artificial Sequence
  Description of Artificial Sequence: Synthetic oligonucleotide
  Sense Strand Starting at position 1247 of SEQ ID NO: 317932
guuaucuuugaggagguua

SEQ ID NO: 416598 - RNA, 19 nt, Artificial Sequence
  Description of Artificial Sequence: Synthetic oligonucleotide
  Antisense Strand to SEQ ID NO: 416597
uaaccuccucaaagauaac

SEQ ID NO: 416599 - RNA, 19 nt, Artificial Sequence
  Description of Artificial Sequence: Synthetic oligonucleotide
  Sense Strand Starting at position 1247 of SEQ ID NO: 317937
cuuugaggagguuaucuuu

SEQ ID NO: 416600 - RNA, 19 nt, Artificial Sequence
  Description of Artificial Sequence: Synthetic oligonucleotide
  Antisense Strand to SEQ ID NO: 416599
aaagauaaccuccucaaag

SEQ ID NO: 416601 - RNA, 19 nt, Artificial Sequence
  Description of Artificial Sequence: Synthetic oligonucleotide
  Sense Strand Starting at position 1247 of SEQ ID NO: 317943
ggagguuaucuuugagguc

SEQ ID NO: 416602 - RNA, 19 nt, Artificial Sequence
  Description of Artificial Sequence: Synthetic oligonucleotide
  Antisense Strand to SEQ ID NO: 416601
gaccucaaagauaaccucc

SEQ ID NO: 416603 - RNA, 19 nt, Artificial Sequence
  Description of Artificial Sequence: Synthetic oligonucleotide
  Sense Strand Starting at position 1247 of SEQ ID NO: 318008
gcuggaguaagucaacuuu

SEQ ID NO: 416604 - RNA, 19 nt, Artificial Sequence
  Description of Artificial Sequence: Synthetic oligonucleotide
  Antisense Strand to SEQ ID NO: 416603
aaaguugacuuacuccagc

SEQ ID NO: 416605 - RNA, 19 nt, Artificial Sequence
  Description of Artificial Sequence: Synthetic oligonucleotide
  Sense Strand Starting at position 1247 of SEQ ID NO: 318074
gaagaaacccugugcauag

SEQ ID NO: 416606 - RNA, 19 nt, Artificial Sequence
  Description of Artificial Sequence: Synthetic oligonucleotide
  Antisense Strand to SEQ ID NO: 416605
cuaugcacaggguuucuuc

SEQ ID NO: 416607 - RNA, 19 nt, Artificial Sequence
  Description of Artificial Sequence: Synthetic oligonucleotide
  Sense Strand Starting at position 1247 of SEQ ID NO: 318398
gggaguauuccuuggucca

SEQ ID NO: 416608 - RNA, 19 nt, Artificial Sequence
  Description of Artificial Sequence: Synthetic oligonucleotide
  Antisense Strand to SEQ ID NO: 416607
uggaccaaggaauacuccc

SEQ ID NO: 416609 - RNA, 19 nt, Artificial Sequence
  Description of Artificial Sequence: Synthetic oligonucleotide
  Sense Strand Starting at position 1247 of SEQ ID NO: 318399
ggaguauuccuugguccaa

SEQ ID NO: 416610 - RNA, 19 nt, Artificial Sequence
  Description of Artificial Sequence: Synthetic oligonucleotide
  Antisense Strand to SEQ ID NO: 416609
uuggaccaaggaauacucc

SEQ ID NO: 416611 - RNA, 19 nt, Artificial Sequence
  Description of Artificial Sequence: Synthetic oligonucleotide
  Sense Strand Starting at position 1247 of SEQ ID NO: 318400
gaguauuccuugguccaaa

SEQ ID NO: 416612 - RNA, 19 nt, Artificial Sequence
  Description of Artificial Sequence: Synthetic oligonucleotide
  Antisense Strand to SEQ ID NO: 416611
uuuggaccaaggaauacuc

SEQ ID NO: 416613 - RNA, 19 nt, Artificial Sequence
  Description of Artificial Sequence: Synthetic oligonucleotide
  Sense Strand Starting at position 1247 of SEQ ID NO: 318401
aguauuccuugguccaaau

SEQ ID NO: 416614 - RNA, 19 nt, Artificial Sequence
  Description of Artificial Sequence: Synthetic oligonucleotide
  Antisense Strand to SEQ ID NO: 416613
auuuggaccaaggaauacu

SEQ ID NO: 416615 - RNA, 19 nt, Artificial Sequence
  Description of Artificial Sequence: Synthetic oligonucleotide
  Sense Strand Starting at position 1247 of SEQ ID NO: 318674
gggugauguuuauuugcca

SEQ ID NO: 416616 - RNA, 19 nt, Artificial Sequence
  Description of Artificial Sequence: Synthetic oligonucleotide
  Antisense Strand to SEQ ID NO: 416615
uggcaaauaaacaucaccc

SEQ ID NO: 416617 - RNA, 19 nt, Artificial Sequence
  Description of Artificial Sequence: Synthetic oligonucleotide
  Sense Strand Starting at position 1247 of SEQ ID NO: 318678
gauguuuauuugccagguu

SEQ ID NO: 416618 - RNA, 19 nt, Artificial Sequence
  Description of Artificial Sequence: Synthetic oligonucleotide
  Antisense Strand to SEQ ID NO: 416617
aaccuggcaaauaaacauc

SEQ ID NO: 416619 - RNA, 19 nt, Artificial Sequence
  Description of Artificial Sequence: Synthetic oligonucleotide
  Sense Strand Starting at position 1247 of SEQ ID NO: 318825
ugugguagggucugacaaa

SEQ ID NO: 416620 - RNA, 19 nt, Artificial Sequence
  Description of Artificial Sequence: Synthetic oligonucleotide
  Antisense Strand to SEQ ID NO: 416619
uuugucagacccuaccaca

SEQ ID NO: 416621 - RNA, 19 nt, Artificial Sequence
  Description of Artificial Sequence: Synthetic oligonucleotide
  Sense Strand Starting at position 1247 of SEQ ID NO: 318938
gggccucugauagaaguga

SEQ ID NO: 416622 - RNA, 19 nt, Artificial Sequence
  Description of Artificial Sequence: Synthetic oligonucleotide
  Antisense Strand to SEQ ID NO: 416621
ucacuucuaucagaggccc

SEQ ID NO: 416623 - RNA, 19 nt, Artificial Sequence
  Description of Artificial Sequence: Synthetic oligonucleotide
  Sense Strand Starting at position 1247 of SEQ ID NO: 318947
auagaagugagcuguagaa

SEQ ID NO: 416624 - RNA, 19 nt, Artificial Sequence
  Description of Artificial Sequence: Synthetic oligonucleotide
  Antisense Strand to SEQ ID NO: 416623
uucuacagcucacuucuau

SEQ ID NO: 416625 - RNA, 19 nt, Artificial Sequence
  Description of Artificial Sequence: Synthetic oligonucleotide
  Sense Strand Starting at position 1247 of SEQ ID NO: 319041
gauuaugaguuauugccau

SEQ ID NO: 416626 - RNA, 19 nt, Artificial Sequence
  Description of Artificial Sequence: Synthetic oligonucleotide
  Antisense Strand to SEQ ID NO: 416625
auggcaauaacucauaauc

SEQ ID NO: 416627 - RNA, 19 nt, Artificial Sequence
  Description of Artificial Sequence: Synthetic oligonucleotide
  Sense Strand Starting at position 1247 of SEQ ID NO: 319082
gaggacuugugggcugaga

SEQ ID NO: 416628 - RNA, 19 nt, Artificial Sequence
  Description of Artificial Sequence: Synthetic oligonucleotide
  Antisense Strand to SEQ ID NO: 416627
ucucagcccacaaguccuc

SEQ ID NO: 416629 - RNA, 19 nt, Artificial Sequence
  Description of Artificial Sequence: Synthetic oligonucleotide
  Sense Strand Starting at position 1247 of SEQ ID NO: 319084
ggacuugugggcugagauu

SEQ ID NO: 416630 - RNA, 19 nt, Artificial Sequence
  Description of Artificial Sequence: Synthetic oligonucleotide
  Antisense Strand to SEQ ID NO: 416629
aaucucagcccacaagucc

SEQ ID NO: 416631 - RNA, 19 nt, Artificial Sequence
  Description of Artificial Sequence: Synthetic oligonucleotide
  Sense Strand Starting at position 1248 of SEQ ID NO: 315309
auguguuauucccuacauu

SEQ ID NO: 416632 - RNA, 19 nt, Artificial Sequence
  Description of Artificial Sequence: Synthetic oligonucleotide
  Antisense Strand to SEQ ID NO: 416631
aauguagggaauaacacau

SEQ ID NO: 416633 - RNA, 19 nt, Artificial Sequence
  Description of Artificial Sequence: Synthetic oligonucleotide
  Sense Strand Starting at position 1248 of SEQ ID NO: 315310
uguguuauucccuacauug

SEQ ID NO: 416634 - RNA, 19 nt, Artificial Sequence
  Description of Artificial Sequence: Synthetic oligonucleotide
  Antisense Strand to SEQ ID NO: 416633
caauguagggaauaacaca

SEQ ID NO: 416635 - RNA, 19 nt, Artificial Sequence
  Description of Artificial Sequence: Synthetic oligonucleotide
  Sense Strand Starting at position 1248 of SEQ ID NO: 315312
uguuauucccuacauugua

SEQ ID NO: 416636 - RNA, 19 nt, Artificial Sequence
  Description of Artificial Sequence: Synthetic oligonucleotide
  Antisense Strand to SEQ ID NO: 416635
uacaauguagggaauaaca

SEQ ID NO: 416637 - RNA, 19 nt, Artificial Sequence
  Description of Artificial Sequence: Synthetic oligonucleotide
  Sense Strand Starting at position 1248 of SEQ ID NO: 315509
guaagaauuccauaauguu

SEQ ID NO: 416638 - RNA, 19 nt, Artificial Sequence
  Description of Artificial Sequence: Synthetic oligonucleotide
  Antisense Strand to SEQ ID NO: 416637
aacauuauggaauucuuac

SEQ ID NO: 416639 - RNA, 19 nt, Artificial Sequence
  Description of Artificial Sequence: Synthetic oligonucleotide
  Sense Strand Starting at position 1248 of SEQ ID NO: 315569
uggcuuaaaucagugauag

SEQ ID NO: 416640 - RNA, 19 nt, Artificial Sequence
  Description of Artificial Sequence: Synthetic oligonucleotide
  Antisense Strand to SEQ ID NO: 416639
cuaucacugauuuaagcca

SEQ ID NO: 416641 - RNA, 19 nt, Artificial Sequence
  Description of Artificial Sequence: Synthetic oligonucleotide
  Sense Strand Starting at position 1248 of SEQ ID NO: 315835
uggcccuuugaugaagagu

SEQ ID NO: 416642 - RNA, 19 nt, Artificial Sequence
  Description of Artificial Sequence: Synthetic oligonucleotide
  Antisense Strand to SEQ ID NO: 416641
acucuucaucaaagggcca

SEQ ID NO: 416643 - RNA, 19 nt, Artificial Sequence
  Description of Artificial Sequence: Synthetic oligonucleotide
  Sense Strand Starting at position 1248 of SEQ ID NO: 315868
cuacuccuguuagcagauu

SEQ ID NO: 416644 - RNA, 19 nt, Artificial Sequence
  Description of Artificial Sequence: Synthetic oligonucleotide
  Antisense Strand to SEQ ID NO: 416643
aaucugcuaacaggaguag

SEQ ID NO: 416645 - RNA, 19 nt, Artificial Sequence
  Description of Artificial Sequence: Synthetic oligonucleotide
  Sense Strand Starting at position 1248 of SEQ ID NO: 316049
guacgauugccucaguaag

SEQ ID NO: 416646 - RNA, 19 nt, Artificial Sequence
  Description of Artificial Sequence: Synthetic oligonucleotide
  Antisense Strand to SEQ ID NO: 416645
cuuacugaggcaaucguac

SEQ ID NO: 416647 - RNA, 19 nt, Artificial Sequence
  Description of Artificial Sequence: Synthetic oligonucleotide
  Sense Strand Starting at position 1248 of SEQ ID NO: 316051
acgauugccucaguaagau

SEQ ID NO: 416648 - RNA, 19 nt, Artificial Sequence
  Description of Artificial Sequence: Synthetic oligonucleotide
  Antisense Strand to SEQ ID NO: 416647
aucuuacugaggcaaucgu

SEQ ID NO: 416649 - RNA, 19 nt, Artificial Sequence
  Description of Artificial Sequence: Synthetic oligonucleotide
  Sense Strand Starting at position 1248 of SEQ ID NO: 316061
caguaagaugcauguuuga

SEQ ID NO: 416650 - RNA, 19 nt, Artificial Sequence
  Description of Artificial Sequence: Synthetic oligonucleotide
  Antisense Strand to SEQ ID NO: 416649
ucaaacaugcaucuuacug

SEQ ID NO: 416651 - RNA, 19 nt, Artificial Sequence
  Description of Artificial Sequence: Synthetic oligonucleotide
  Sense Strand Starting at position 1248 of SEQ ID NO: 316064
uaagaugcauguuugaagu

SEQ ID NO: 416652 - RNA, 19 nt, Artificial Sequence
  Description of Artificial Sequence: Synthetic oligonucleotide
  Antisense Strand to SEQ ID NO: 416651
acuucaaacaugcaucuua

SEQ ID NO: 416653 - RNA, 19 nt, Artificial Sequence
  Description of Artificial Sequence: Synthetic oligonucleotide
  Sense Strand Starting at position 1248 of SEQ ID NO: 316224
ccagaugggucaucaacca

SEQ ID NO: 416654 - RNA, 19 nt, Artificial Sequence
  Description of Artificial Sequence: Synthetic oligonucleotide
  Antisense Strand to SEQ ID NO: 416653
ugguugaugacccaucugg

SEQ ID NO: 416655 - RNA, 19 nt, Artificial Sequence
  Description of Artificial Sequence: Synthetic oligonucleotide
  Sense Strand Starting at position 1248 of SEQ ID NO: 316307
agcagaucugauuagcaag

SEQ ID NO: 416656 - RNA, 19 nt, Artificial Sequence
  Description of Artificial Sequence: Synthetic oligonucleotide
  Antisense Strand to SEQ ID NO: 416655
cuugcuaaucagaucugcu

SEQ ID NO: 416657 - RNA, 19 nt, Artificial Sequence
  Description of Artificial Sequence: Synthetic oligonucleotide
  Sense Strand Starting at position 1248 of SEQ ID NO: 316362
ccaagcauuuaguaaagga

SEQ ID NO: 416658 - RNA, 19 nt, Artificial Sequence
  Description of Artificial Sequence: Synthetic oligonucleotide
  Antisense Strand to SEQ ID NO: 416657
uccuuuacuaaaugcuugg

SEQ ID NO: 416659 - RNA, 19 nt, Artificial Sequence
  Description of Artificial Sequence: Synthetic oligonucleotide
  Sense Strand Starting at position 1248 of SEQ ID NO: 316520
gacauaggauuagagaaau

SEQ ID NO: 416660 - RNA, 19 nt, Artificial Sequence
  Description of Artificial Sequence: Synthetic oligonucleotide
  Antisense Strand to SEQ ID NO: 416659
auuucucuaauccuauguc

SEQ ID NO: 416661 - RNA, 19 nt, Artificial Sequence
  Description of Artificial Sequence: Synthetic oligonucleotide
  Sense Strand Starting at position 1248 of SEQ ID NO: 317271
augugauaccucuagguug

SEQ ID NO: 416662 - RNA, 19 nt, Artificial Sequence
  Description of Artificial Sequence: Synthetic oligonucleotide
  Antisense Strand to SEQ ID NO: 416661
caaccuagagguaucacau

SEQ ID NO: 416663 - RNA, 19 nt, Artificial Sequence
  Description of Artificial Sequence: Synthetic oligonucleotide
  Sense Strand Starting at position 1248 of SEQ ID NO: 317446
ugagacugcacuuggcaaa

SEQ ID NO: 416664 - RNA, 19 nt, Artificial Sequence
  Description of Artificial Sequence: Synthetic oligonucleotide
  Antisense Strand to SEQ ID NO: 416663
uuugccaagugcagucuca

SEQ ID NO: 416665 - RNA, 19 nt, Artificial Sequence
  Description of Artificial Sequence: Synthetic oligonucleotide
  Sense Strand Starting at position 1248 of SEQ ID NO: 317503
aggucucucggagaacuuu

SEQ ID NO: 416666 - RNA, 19 nt, Artificial Sequence
  Description of Artificial Sequence: Synthetic oligonucleotide
  Antisense Strand to SEQ ID NO: 416665
aaaguucuccgagagaccu

SEQ ID NO: 416667 - RNA, 19 nt, Artificial Sequence
  Description of Artificial Sequence: Synthetic oligonucleotide
  Sense Strand Starting at position 1248 of SEQ ID NO: 317563
cuuuaauccgagcauguuc

SEQ ID NO: 416668 - RNA, 19 nt, Artificial Sequence
  Description of Artificial Sequence: Synthetic oligonucleotide
  Antisense Strand to SEQ ID NO: 416667
gaacaugcucggauuaaag

SEQ ID NO: 416669 - RNA, 19 nt, Artificial Sequence
  Description of Artificial Sequence: Synthetic oligonucleotide
  Sense Strand Starting at position 1248 of SEQ ID NO: 317602
cccuuaaacgcauaagagu

SEQ ID NO: 416670 - RNA, 19 nt, Artificial Sequence
  Description of Artificial Sequence: Synthetic oligonucleotide
  Antisense Strand to SEQ ID NO: 416669
acucuuaugcguuuaaggg

SEQ ID NO: 416671 - RNA, 19 nt, Artificial Sequence
  Description of Artificial Sequence: Synthetic oligonucleotide
  Sense Strand Starting at position 1248 of SEQ ID NO: 317610
cgcauaagagugucugugu

SEQ ID NO: 416672 - RNA, 19 nt, Artificial Sequence
  Description of Artificial Sequence: Synthetic oligonucleotide
  Antisense Strand to SEQ ID NO: 416671
acacagacacucuuaugcg

SEQ ID NO: 416673 - RNA, 19 nt, Artificial Sequence
  Description of Artificial Sequence: Synthetic oligonucleotide
  Sense Strand Starting at position 1248 of SEQ ID NO: 317726
uccuauaggguuugaaguu

SEQ ID NO: 416674 - RNA, 19 nt, Artificial Sequence
  Description of Artificial Sequence: Synthetic oligonucleotide
  Antisense Strand to SEQ ID NO: 416673
aacuucaaacccuauagga

SEQ ID NO: 416675 - RNA, 19 nt, Artificial Sequence
  Description of Artificial Sequence: Synthetic oligonucleotide
  Sense Strand Starting at position 1248 of SEQ ID NO: 318098
gcgguacauucugccauuu

SEQ ID NO: 416676 - RNA, 19 nt, Artificial Sequence
  Description of Artificial Sequence: Synthetic oligonucleotide
  Antisense Strand to SEQ ID NO: 416675
aaauggcagaauguaccgc

SEQ ID NO: 416677 - RNA, 19 nt, Artificial Sequence
  Description of Artificial Sequence: Synthetic oligonucleotide
  Sense Strand Starting at position 1248 of SEQ ID NO: 318415
cuaaauucuuaggcagcaa

SEQ ID NO: 416678 - RNA, 19 nt, Artificial Sequence
  Description of Artificial Sequence: Synthetic oligonucleotide
  Antisense Strand to SEQ ID NO: 416677
uugcugccuaagaauuuag

SEQ ID NO: 416679 - RNA, 19 nt, Artificial Sequence
  Description of Artificial Sequence: Synthetic oligonucleotide
  Sense Strand Starting at position 1248 of SEQ ID NO: 318419
auucuuaggcagcaaagaa

SEQ ID NO: 416680 - RNA, 19 nt, Artificial Sequence
  Description of Artificial Sequence: Synthetic oligonucleotide
  Antisense Strand to SEQ ID NO: 416679
uucuuugcugccuaagaau

SEQ ID NO: 416681 - RNA, 19 nt, Artificial Sequence
  Description of Artificial Sequence: Synthetic oligonucleotide
  Sense Strand Starting at position 1248 of SEQ ID NO: 318509
uuucgagauuuagacucuu

SEQ ID NO: 416682 - RNA, 19 nt, Artificial Sequence
  Description of Artificial Sequence: Synthetic oligonucleotide
  Antisense Strand to SEQ ID NO: 416681
aagagucuaaaucucgaaa

SEQ ID NO: 416683 - RNA, 19 nt, Artificial Sequence
  Description of Artificial Sequence: Synthetic oligonucleotide
  Sense Strand Starting at position 1248 of SEQ ID NO: 318635
uggauucaggagugugcaa

SEQ ID NO: 416684 - RNA, 19 nt, Artificial Sequence
  Description of Artificial Sequence: Synthetic oligonucleotide
  Antisense Strand to SEQ ID NO: 416683
uugcacacuccugaaucca

SEQ ID NO: 416685 - RNA, 19 nt, Artificial Sequence
  Description of Artificial Sequence: Synthetic oligonucleotide
  Sense Strand Starting at position 1248 of SEQ ID NO: 318662
cagaguuugcccuccgcga

SEQ ID NO: 416686 - RNA, 19 nt, Artificial Sequence
  Description of Artificial Sequence: Synthetic oligonucleotide
  Antisense Strand to SEQ ID NO: 416685
ucgcggagggcaaacucug

SEQ ID NO: 416687 - RNA, 19 nt, Artificial Sequence
  Description of Artificial Sequence: Synthetic oligonucleotide
  Sense Strand Starting at position 1248 of SEQ ID NO: 318682
uuuagucuacugcaaguuu

SEQ ID NO: 416688 - RNA, 19 nt, Artificial Sequence
  Description of Artificial Sequence: Synthetic oligonucleotide
  Antisense Strand to SEQ ID NO: 416687
aaacuugcaguagacuaaa

SEQ ID NO: 416689 - RNA, 19 nt, Artificial Sequence
  Description of Artificial Sequence: Synthetic oligonucleotide
  Sense Strand Starting at position 1248 of SEQ ID NO: 318727
ucagcagaugguuaaguuu

SEQ ID NO: 416690 - RNA, 19 nt, Artificial Sequence
  Description of Artificial Sequence: Synthetic oligonucleotide
  Antisense Strand to SEQ ID NO: 416689
aaacuuaaccaucugcuga

SEQ ID NO: 416691 - RNA, 19 nt, Artificial Sequence
  Description of Artificial Sequence: Synthetic oligonucleotide
  Sense Strand Starting at position 1248 of SEQ ID NO: 318788
ggcagaucacucuguauug

SEQ ID NO: 416692 - RNA, 19 nt, Artificial Sequence
  Description of Artificial Sequence: Synthetic oligonucleotide
  Antisense Strand to SEQ ID NO: 416691
caauacagagugaucugcc

SEQ ID NO: 416693 - RNA, 19 nt, Artificial Sequence
  Description of Artificial Sequence: Synthetic oligonucleotide
  Sense Strand Starting at position 1248 of SEQ ID NO: 318862
ucauaaggauaucuggagu

SEQ ID NO: 416694 - RNA, 19 nt, Artificial Sequence
  Description of Artificial Sequence: Synthetic oligonucleotide
  Antisense Strand to SEQ ID NO: 416693
acuccagauauccuuauga

SEQ ID NO: 416695 - RNA, 19 nt, Artificial Sequence
  Description of Artificial Sequence: Synthetic oligonucleotide
  Sense Strand Starting at position 1248 of SEQ ID NO: 318916
uggugaguucaagguuaag

SEQ ID NO: 416696 - RNA, 19 nt, Artificial Sequence
  Description of Artificial Sequence: Synthetic oligonucleotide
  Antisense Strand to SEQ ID NO: 416695
cuuaaccuugaacucacca

SEQ ID NO: 416697 - RNA, 19 nt, Artificial Sequence
  Description of Artificial Sequence: Synthetic oligonucleotide
  Sense Strand Starting at position 1248 of SEQ ID NO: 318919
ugaguucaagguuaaguga

SEQ ID NO: 416698 - RNA, 19 nt, Artificial Sequence
  Description of Artificial Sequence: Synthetic oligonucleotide
  Antisense Strand to SEQ ID NO: 416697
ucacuuaaccuugaacuca

SEQ ID NO: 416699 - RNA, 19 nt, Artificial Sequence
  Description of Artificial Sequence: Synthetic oligonucleotide
  Sense Strand Starting at position 1248 of SEQ ID NO: 319021
ccuuacaggucucuauaga

SEQ ID NO: 416700 - RNA, 19 nt, Artificial Sequence
  Description of Artificial Sequence: Synthetic oligonucleotide
  Antisense Strand to SEQ ID NO: 416699
ucuauagagaccuguaagg

SEQ ID NO: 416701 - RNA, 19 nt, Artificial Sequence
  Description of Artificial Sequence: Synthetic oligonucleotide
  Sense Strand Starting at position 1248 of SEQ ID NO: 319042
gggagcucacuggaaguuu

SEQ ID NO: 416702 - RNA, 19 nt, Artificial Sequence
  Description of Artificial Sequence: Synthetic oligonucleotide
  Antisense Strand to SEQ ID NO: 416701
aaacuuccagugagcuccc

SEQ ID NO: 416703 - RNA, 19 nt, Artificial Sequence
  Description of Artificial Sequence: Synthetic oligonucleotide
  Sense Strand Starting at position 1248 of SEQ ID NO: 319052
uggaaguuuggaggagagu

SEQ ID NO: 416704 - RNA, 19 nt, Artificial Sequence
  Description of Artificial Sequence: Synthetic oligonucleotide
  Antisense Strand to SEQ ID NO: 416703
acucuccuccaaacuucca

SEQ ID NO: 416705 - RNA, 19 nt, Artificial Sequence
  Description of Artificial Sequence: Synthetic oligonucleotide
  Sense Strand Starting at position 1248 of SEQ ID NO: 319208
acaguaaaugcuggguaga

SEQ ID NO: 416706 - RNA, 19 nt, Artificial Sequence
  Description of Artificial Sequence: Synthetic oligonucleotide
  Antisense Strand to SEQ ID NO: 416705
ucuacccagcauuuacugu

SEQ ID NO: 416707 - RNA, 19 nt, Artificial Sequence
  Description of Artificial Sequence: Synthetic oligonucleotide
  Sense Strand Starting at position 1248 of SEQ ID NO: 319209
caguaaaugcuggguagau

SEQ ID NO: 416708 - RNA, 19 nt, Artificial Sequence
  Description of Artificial Sequence: Synthetic oligonucleotide
  Antisense Strand to SEQ ID NO: 416707
aucuacccagcauuuacug

SEQ ID NO: 416709 - RNA, 19 nt, Artificial Sequence
  Description of Artificial Sequence: Synthetic oligonucleotide
  Sense Strand Starting at position 1248 of SEQ ID NO: 319210
aguaaaugcuggguagauu

SEQ ID NO: 416710 - RNA, 19 nt, Artificial Sequence
  Description of Artificial Sequence: Synthetic oligonucleotide
  Antisense Strand to SEQ ID NO: 416709
aaucuacccagcauuuacu

SEQ ID NO: 416711 - RNA, 19 nt, Artificial Sequence
  Description of Artificial Sequence: Synthetic oligonucleotide
  Sense Strand Starting at position 1249 of SEQ ID NO: 315470
gaaggaggucaaugauggu

SEQ ID NO: 416712 - RNA, 19 nt, Artificial Sequence
  Description of Artificial Sequence: Synthetic oligonucleotide
  Antisense Strand to SEQ ID NO: 416711
accaucauugaccuccuuc

SEQ ID NO: 416713 - RNA, 19 nt, Artificial Sequence
  Description of Artificial Sequence: Synthetic oligonucleotide
  Sense Strand Starting at position 1249 of SEQ ID NO: 315476
ggucaaugaugguuuccaa

SEQ ID NO: 416714 - RNA, 19 nt, Artificial Sequence
  Description of Artificial Sequence: Synthetic oligonucleotide
  Antisense Strand to SEQ ID NO: 416713
uuggaaaccaucauugacc

SEQ ID NO: 416715 - RNA, 19 nt, Artificial Sequence
  Description of Artificial Sequence: Synthetic oligonucleotide
  Sense Strand Starting at position 1249 of SEQ ID NO: 315665
augacaaugucugcaucua

SEQ ID NO: 416716 - RNA, 19 nt, Artificial Sequence
  Description of Artificial Sequence: Synthetic oligonucleotide
  Antisense Strand to SEQ ID NO: 416715
uagaugcagacauugucau

SEQ ID NO: 416717 - RNA, 19 nt, Artificial Sequence
  Description of Artificial Sequence: Synthetic oligonucleotide
  Sense Strand Starting at position 1249 of SEQ ID NO: 315666
ugacaaugucugcaucuaa

SEQ ID NO: 416718 - RNA, 19 nt, Artificial Sequence
  Description of Artificial Sequence: Synthetic oligonucleotide
  Antisense Strand to SEQ ID NO: 416717
uuagaugcagacauuguca

SEQ ID NO: 416719 - RNA, 19 nt, Artificial Sequence
  Description of Artificial Sequence: Synthetic oligonucleotide
  Sense Strand Starting at position 1249 of SEQ ID NO: 315697
gugagauugaacuggcaua

SEQ ID NO: 416720 - RNA, 19 nt, Artificial Sequence
  Description of Artificial Sequence: Synthetic oligonucleotide
  Antisense Strand to SEQ ID NO: 416719
uaugccaguucaaucucac

SEQ ID NO: 416721 - RNA, 19 nt, Artificial Sequence
  Description of Artificial Sequence: Synthetic oligonucleotide
  Sense Strand Starting at position 1249 of SEQ ID NO: 315922
cuauuaauggcucauauag

SEQ ID NO: 416722 - RNA, 19 nt, Artificial Sequence
  Description of Artificial Sequence: Synthetic oligonucleotide
  Antisense Strand to SEQ ID NO: 416721
cuauaugagccauuaauag

SEQ ID NO: 416723 - RNA, 19 nt, Artificial Sequence
  Description of Artificial Sequence: Synthetic oligonucleotide
  Sense Strand Starting at position 1249 of SEQ ID NO: 315971
acccucaaaguguauauau

SEQ ID NO: 416724 - RNA, 19 nt, Artificial Sequence
  Description of Artificial Sequence: Synthetic oligonucleotide
  Antisense Strand to SEQ ID NO: 416723
auauauacacuuugagggu

SEQ ID NO: 416725 - RNA, 19 nt, Artificial Sequence
  Description of Artificial Sequence: Synthetic oligonucleotide
  Sense Strand Starting at position 1249 of SEQ ID NO: 315973
ccucaaaguguauauauua

SEQ ID NO: 416726 - RNA, 19 nt, Artificial Sequence
  Description of Artificial Sequence: Synthetic oligonucleotide
  Antisense Strand to SEQ ID NO: 416725
uaauauauacacuuugagg

SEQ ID NO: 416727 - RNA, 19 nt, Artificial Sequence
  Description of Artificial Sequence: Synthetic oligonucleotide
  Sense Strand Starting at position 1249 of SEQ ID NO: 316007
ugugaaggcaugugauaug

SEQ ID NO: 416728 - RNA, 19 nt, Artificial Sequence
  Description of Artificial Sequence: Synthetic oligonucleotide
  Antisense Strand to SEQ ID NO: 416727
cauaucacaugccuucaca

SEQ ID NO: 416729 - RNA, 19 nt, Artificial Sequence
  Description of Artificial Sequence: Synthetic oligonucleotide
  Sense Strand Starting at position 1249 of SEQ ID NO: 316016
augugauaugagggucacu

SEQ ID NO: 416730 - RNA, 19 nt, Artificial Sequence
  Description of Artificial Sequence: Synthetic oligonucleotide
  Antisense Strand to SEQ ID NO: 416729
agugacccucauaucacau

SEQ ID NO: 416731 - RNA, 19 nt, Artificial Sequence
  Description of Artificial Sequence: Synthetic oligonucleotide
  Sense Strand Starting at position 1249 of SEQ ID NO: 316050
aagacagauuaacugugua

SEQ ID NO: 416732 - RNA, 19 nt, Artificial Sequence
  Description of Artificial Sequence: Synthetic oligonucleotide
  Antisense Strand to SEQ ID NO: 416731
uacacaguuaaucugucuu

SEQ ID NO: 416733 - RNA, 19 nt, Artificial Sequence
  Description of Artificial Sequence: Synthetic oligonucleotide
  Sense Strand Starting at position 1249 of SEQ ID NO: 316053
acagauuaacuguguaaua

SEQ ID NO: 416734 - RNA, 19 nt, Artificial Sequence
  Description of Artificial Sequence: Synthetic oligonucleotide
  Antisense Strand to SEQ ID NO: 416733
uauuacacaguuaaucugu

SEQ ID NO: 416735 - RNA, 19 nt, Artificial Sequence
  Description of Artificial Sequence: Synthetic oligonucleotide
  Sense Strand Starting at position 1249 of SEQ ID NO: 316117
cugugaugucucugagaac

SEQ ID NO: 416736 - RNA, 19 nt, Artificial Sequence
  Description of Artificial Sequence: Synthetic oligonucleotide
  Antisense Strand to SEQ ID NO: 416735
guucucagagacaucacag

SEQ ID NO: 416737 - RNA, 19 nt, Artificial Sequence
  Description of Artificial Sequence: Synthetic oligonucleotide
  Sense Strand Starting at position 1249 of SEQ ID NO: 316152
uucugugugcuugaaaccu

SEQ ID NO: 416738 - RNA, 19 nt, Artificial Sequence
  Description of Artificial Sequence: Synthetic oligonucleotide
  Antisense Strand to SEQ ID NO: 416737
agguuucaagcacacagaa

SEQ ID NO: 416739 - RNA, 19 nt, Artificial Sequence
  Description of Artificial Sequence: Synthetic oligonucleotide
  Sense Strand Starting at position 1249 of SEQ ID NO: 316671
ggagucuuucacgguaaag

SEQ ID NO: 416740 - RNA, 19 nt, Artificial Sequence
  Description of Artificial Sequence: Synthetic oligonucleotide
  Antisense Strand to SEQ ID NO: 416739
cuuuaccgugaaagacucc

SEQ ID NO: 416741 - RNA, 19 nt, Artificial Sequence
  Description of Artificial Sequence: Synthetic oligonucleotide
  Sense Strand Starting at position 1249 of SEQ ID NO: 316673
agucuuucacgguaaagag

SEQ ID NO: 416742 - RNA, 19 nt, Artificial Sequence
  Description of Artificial Sequence: Synthetic oligonucleotide
  Antisense Strand to SEQ ID NO: 416741
cucuuuaccgugaaagacu

SEQ ID NO: 416743 - RNA, 19 nt, Artificial Sequence
  Description of Artificial Sequence: Synthetic oligonucleotide
  Sense Strand Starting at position 1249 of SEQ ID NO: 316714
ccaccaugccuuuggaauu

SEQ ID NO: 416744 - RNA, 19 nt, Artificial Sequence
  Description of Artificial Sequence: Synthetic oligonucleotide
  Antisense Strand to SEQ ID NO: 416743
aauuccaaaggcauggugg

SEQ ID NO: 416745 - RNA, 19 nt, Artificial Sequence
  Description of Artificial Sequence: Synthetic oligonucleotide
  Sense Strand Starting at position 1249 of SEQ ID NO: 316868
uuaccauccgagcauucuu

SEQ ID NO: 416746 - RNA, 19 nt, Artificial Sequence
  Description of Artificial Sequence: Synthetic oligonucleotide
  Antisense Strand to SEQ ID NO: 416745
aagaaugcucggaugguaa

SEQ ID NO: 416747 - RNA, 19 nt, Artificial Sequence
  Description of Artificial Sequence: Synthetic oligonucleotide
  Sense Strand Starting at position 1249 of SEQ ID NO: 317538
ccuacuuugggucacgaua

SEQ ID NO: 416748 - RNA, 19 nt, Artificial Sequence
  Description of Artificial Sequence: Synthetic oligonucleotide
  Antisense Strand to SEQ ID NO: 416747
uaucgugacccaaaguagg

SEQ ID NO: 416749 - RNA, 19 nt, Artificial Sequence
  Description of Artificial Sequence: Synthetic oligonucleotide
  Sense Strand Starting at position 1249 of SEQ ID NO: 317558
aaagaagacucuggauuug

SEQ ID NO: 416750 - RNA, 19 nt, Artificial Sequence
  Description of Artificial Sequence: Synthetic oligonucleotide
  Antisense Strand to SEQ ID NO: 416749
caaauccagagucuucuuu

SEQ ID NO: 416751 - RNA, 19 nt, Artificial Sequence
  Description of Artificial Sequence: Synthetic oligonucleotide
  Sense Strand Starting at position 1249 of SEQ ID NO: 317812
gggcuugugcaguacaaua

SEQ ID NO: 416752 - RNA, 19 nt, Artificial Sequence
  Description of Artificial Sequence: Synthetic oligonucleotide
  Antisense Strand to SEQ ID NO: 416751
uauuguacugcacaagccc

SEQ ID NO: 416753 - RNA, 19 nt, Artificial Sequence
  Description of Artificial Sequence: Synthetic oligonucleotide
  Sense Strand Starting at position 1249 of SEQ ID NO: 317841
uggacacguacauguguaa

SEQ ID NO: 416754 - RNA, 19 nt, Artificial Sequence
  Description of Artificial Sequence: Synthetic oligonucleotide
  Antisense Strand to SEQ ID NO: 416753
uuacacauguacgugucca

SEQ ID NO: 416755 - RNA, 19 nt, Artificial Sequence
  Description of Artificial Sequence: Synthetic oligonucleotide
  Sense Strand Starting at position 1249 of SEQ ID NO: 317844
acacguacauguguaauca

SEQ ID NO: 416756 - RNA, 19 nt, Artificial Sequence
  Description of Artificial Sequence: Synthetic oligonucleotide
  Antisense Strand to SEQ ID NO: 416755
ugauuacacauguacgugu

SEQ ID NO: 416757 - RNA, 19 nt, Artificial Sequence
  Description of Artificial Sequence: Synthetic oligonucleotide
  Sense Strand Starting at position 1249 of SEQ ID NO: 317845
cacguacauguguaaucaa

SEQ ID NO: 416758 - RNA, 19 nt, Artificial Sequence
  Description of Artificial Sequence: Synthetic oligonucleotide
  Antisense Strand to SEQ ID NO: 416757
uugauuacacauguacgug

SEQ ID NO: 416759 - RNA, 19 nt, Artificial Sequence
  Description of Artificial Sequence: Synthetic oligonucleotide
  Sense Strand Starting at position 1249 of SEQ ID NO: 317854
guguaaucaaggcguuaaa

SEQ ID NO: 416760 - RNA, 19 nt, Artificial Sequence
  Description of Artificial Sequence: Synthetic oligonucleotide
  Antisense Strand to SEQ ID NO: 416759
uuuaacgccuugauuacac

SEQ ID NO: 416761 - RNA, 19 nt, Artificial Sequence
  Description of Artificial Sequence: Synthetic oligonucleotide
  Sense Strand Starting at position 1249 of SEQ ID NO: 317857
uaaucaaggcguuaaagug

SEQ ID NO: 416762 - RNA, 19 nt, Artificial Sequence
  Description of Artificial Sequence: Synthetic oligonucleotide
  Antisense Strand to SEQ ID NO: 416761
cacuuuaacgccuugauua

SEQ ID NO: 416763 - RNA, 19 nt, Artificial Sequence
  Description of Artificial Sequence: Synthetic oligonucleotide
  Sense Strand Starting at position 1249 of SEQ ID NO: 318009
guucuaaauguuugauaug

SEQ ID NO: 416764 - RNA, 19 nt, Artificial Sequence
  Description of Artificial Sequence: Synthetic oligonucleotide
  Antisense Strand to SEQ ID NO: 416763
cauaucaaacauuuagaac

SEQ ID NO: 416765 - RNA, 19 nt, Artificial Sequence
  Description of Artificial Sequence: Synthetic oligonucleotide
  Sense Strand Starting at position 1249 of SEQ ID NO: 318055
aguggauaauaagacagau

SEQ ID NO: 416766 - RNA, 19 nt, Artificial Sequence
  Description of Artificial Sequence: Synthetic oligonucleotide
  Antisense Strand to SEQ ID NO: 416765
aucugucuuauuauccacu

SEQ ID NO: 416767 - RNA, 19 nt, Artificial Sequence
  Description of Artificial Sequence: Synthetic oligonucleotide
  Sense Strand Starting at position 1249 of SEQ ID NO: 318078
ggcuauccuauagguugaa

SEQ ID NO: 416768 - RNA, 19 nt, Artificial Sequence
  Description of Artificial Sequence: Synthetic oligonucleotide
  Antisense Strand to SEQ ID NO: 416767
uucaaccuauaggauagcc

SEQ ID NO: 416769 - RNA, 19 nt, Artificial Sequence
  Description of Artificial Sequence: Synthetic oligonucleotide
  Sense Strand Starting at position 1249 of SEQ ID NO: 318079
gcuauccuauagguugaau

SEQ ID NO: 416770 - RNA, 19 nt, Artificial Sequence
  Description of Artificial Sequence: Synthetic oligonucleotide
  Antisense Strand to SEQ ID NO: 416769
auucaaccuauaggauagc

SEQ ID NO: 416771 - RNA, 19 nt, Artificial Sequence
  Description of Artificial Sequence: Synthetic oligonucleotide
  Sense Strand Starting at position 1249 of SEQ ID NO: 318151
agguaauucuugcugugga

SEQ ID NO: 416772 - RNA, 19 nt, Artificial Sequence
  Description of Artificial Sequence: Synthetic oligonucleotide
  Antisense Strand to SEQ ID NO: 416771
uccacagcaagaauuaccu

SEQ ID NO: 416773 - RNA, 19 nt, Artificial Sequence
  Description of Artificial Sequence: Synthetic oligonucleotide
  Sense Strand Starting at position 1249 of SEQ ID NO: 318316
gguugagaaccuugcccua

SEQ ID NO: 416774 - RNA, 19 nt, Artificial Sequence
  Description of Artificial Sequence: Synthetic oligonucleotide
  Antisense Strand to SEQ ID NO: 416773
uagggcaagguucucaacc

SEQ ID NO: 416775 - RNA, 19 nt, Artificial Sequence
  Description of Artificial Sequence: Synthetic oligonucleotide
  Sense Strand Starting at position 1249 of SEQ ID NO: 318318
uugagaaccuugcccuaaa

SEQ ID NO: 416776 - RNA, 19 nt, Artificial Sequence
  Description of Artificial Sequence: Synthetic oligonucleotide
  Antisense Strand to SEQ ID NO: 416775
uuuagggcaagguucucaa

SEQ ID NO: 416777 - RNA, 19 nt, Artificial Sequence
  Description of Artificial Sequence: Synthetic oligonucleotide
  Sense Strand Starting at position 1249 of SEQ ID NO: 318382
aaguaucuguuggugucaa

SEQ ID NO: 416778 - RNA, 19 nt, Artificial Sequence
  Description of Artificial Sequence: Synthetic oligonucleotide
  Antisense Strand to SEQ ID NO: 416777
uugacaccaacagauacuu

SEQ ID NO: 416779 - RNA, 19 nt, Artificial Sequence
  Description of Artificial Sequence: Synthetic oligonucleotide
  Sense Strand Starting at position 1249 of SEQ ID NO: 318526
uagagaaucuuagauggaa

SEQ ID NO: 416780 - RNA, 19 nt, Artificial Sequence
  Description of Artificial Sequence: Synthetic oligonucleotide
  Antisense Strand to SEQ ID NO: 416779
uuccaucuaagauucucua

SEQ ID NO: 416781 - RNA, 19 nt, Artificial Sequence
  Description of Artificial Sequence: Synthetic oligonucleotide
  Sense Strand Starting at position 1249 of SEQ ID NO: 318597
gagccuguaacguuguguu

SEQ ID NO: 416782 - RNA, 19 nt, Artificial Sequence
  Description of Artificial Sequence: Synthetic oligonucleotide
  Antisense Strand to SEQ ID NO: 416781
aacacaacguuacaggcuc

SEQ ID NO: 416783 - RNA, 19 nt, Artificial Sequence
  Description of Artificial Sequence: Synthetic oligonucleotide
  Sense Strand Starting at position 1249 of SEQ ID NO: 318651
guacccucuccucauguua

SEQ ID NO: 416784 - RNA, 19 nt, Artificial Sequence
  Description of Artificial Sequence: Synthetic oligonucleotide
  Antisense Strand to SEQ ID NO: 416783
uaacaugaggagaggguac

SEQ ID NO: 416785 - RNA, 19 nt, Artificial Sequence
  Description of Artificial Sequence: Synthetic oligonucleotide
  Sense Strand Starting at position 1249 of SEQ ID NO: 318675
augucuggcccuuaucauu

SEQ ID NO: 416786 - RNA, 19 nt, Artificial Sequence
  Description of Artificial Sequence: Synthetic oligonucleotide
  Antisense Strand to SEQ ID NO: 416785
aaugauaagggccagacau

SEQ ID NO: 416787 - RNA, 19 nt, Artificial Sequence
  Description of Artificial Sequence: Synthetic oligonucleotide
  Sense Strand Starting at position 1249 of SEQ ID NO: 318829
uggcacucacuauggauaa

SEQ ID NO: 416788 - RNA, 19 nt, Artificial Sequence
  Description of Artificial Sequence: Synthetic oligonucleotide
  Antisense Strand to SEQ ID NO: 416787
uuauccauagugagugcca

SEQ ID NO: 416789 - RNA, 19 nt, Artificial Sequence
  Description of Artificial Sequence: Synthetic oligonucleotide
  Sense Strand Starting at position 1249 of SEQ ID NO: 319134
auucuuucuggucaaagua

SEQ ID NO: 416790 - RNA, 19 nt, Artificial Sequence
  Description of Artificial Sequence: Synthetic oligonucleotide
  Antisense Strand to SEQ ID NO: 416789
uacuuugaccagaaagaau

SEQ ID NO: 416791 - RNA, 19 nt, Artificial Sequence
  Description of Artificial Sequence: Synthetic oligonucleotide
  Sense Strand Starting at position 1250 of SEQ ID NO: 315329
cuggacaucuuguuacaag

SEQ ID NO: 416792 - RNA, 19 nt, Artificial Sequence
  Description of Artificial Sequence: Synthetic oligonucleotide
  Antisense Strand to SEQ ID NO: 416791
cuuguaacaagauguccag

SEQ ID NO: 416793 - RNA, 19 nt, Artificial Sequence
  Description of Artificial Sequence: Synthetic oligonucleotide
  Sense Strand Starting at position 1250 of SEQ ID NO: 315433
cuugaagcagcagagauua

SEQ ID NO: 416794 - RNA, 19 nt, Artificial Sequence
  Description of Artificial Sequence: Synthetic oligonucleotide
  Antisense Strand to SEQ ID NO: 416793
uaaucucugcugcuucaag

SEQ ID NO: 416795 - RNA, 19 nt, Artificial Sequence
  Description of Artificial Sequence: Synthetic oligonucleotide
  Sense Strand Starting at position 1250 of SEQ ID NO: 315510
uggauaccuuucuccugau

SEQ ID NO: 416796 - RNA, 19 nt, Artificial Sequence
  Description of Artificial Sequence: Synthetic oligonucleotide
  Antisense Strand to SEQ ID NO: 416795
aucaggagaaagguaucca

SEQ ID NO: 416797 - RNA, 19 nt, Artificial Sequence
  Description of Artificial Sequence: Synthetic oligonucleotide
  Sense Strand Starting at position 1250 of SEQ ID NO: 315762
ucaguauauggcugauuau

SEQ ID NO: 416798 - RNA, 19 nt, Artificial Sequence
  Description of Artificial Sequence: Synthetic oligonucleotide
  Antisense Strand to SEQ ID NO: 416797
auaaucagccauauacuga

SEQ ID NO: 416799 - RNA, 19 nt, Artificial Sequence
  Description of Artificial Sequence: Synthetic oligonucleotide
  Sense Strand Starting at position 1250 of SEQ ID NO: 315763
caguauauggcugauuaua

SEQ ID NO: 416800 - RNA, 19 nt, Artificial Sequence
  Description of Artificial Sequence: Synthetic oligonucleotide
  Antisense Strand to SEQ ID NO: 416799
uauaaucagccauauacug

SEQ ID NO: 416801 - RNA, 19 nt, Artificial Sequence
  Description of Artificial Sequence: Synthetic oligonucleotide
  Sense Strand Starting at position 1250 of SEQ ID NO: 315765
guauauggcugauuauaaa

SEQ ID NO: 416802 - RNA, 19 nt, Artificial Sequence
  Description of Artificial Sequence: Synthetic oligonucleotide
  Antisense Strand to SEQ ID NO: 416801
uuuauaaucagccauauac

SEQ ID NO: 416803 - RNA, 19 nt, Artificial Sequence
  Description of Artificial Sequence: Synthetic oligonucleotide
  Sense Strand Starting at position 1250 of SEQ ID NO: 316220
ugggccuaucuuuaccuaa

SEQ ID NO: 416804 - RNA, 19 nt, Artificial Sequence
  Description of Artificial Sequence: Synthetic oligonucleotide
  Antisense Strand to SEQ ID NO: 416803
uuagguaaagauaggccca

SEQ ID NO: 416805 - RNA, 19 nt, Artificial Sequence
  Description of Artificial Sequence: Synthetic oligonucleotide
  Sense Strand Starting at position 1250 of SEQ ID NO: 316260
aggagcaucucuuuaagag

SEQ ID NO: 416806 - RNA, 19 nt, Artificial Sequence
  Description of Artificial Sequence: Synthetic oligonucleotide
  Antisense Strand to SEQ ID NO: 416805
cucuuaaagagaugcuccu

SEQ ID NO: 416807 - RNA, 19 nt, Artificial Sequence
  Description of Artificial Sequence: Synthetic oligonucleotide
  Sense Strand Starting at position 1250 of SEQ ID NO: 316425
uaauaagacuggucucuug

SEQ ID NO: 416808 - RNA, 19 nt, Artificial Sequence
  Description of Artificial Sequence: Synthetic oligonucleotide
  Antisense Strand to SEQ ID NO: 416807
caagagaccagucuuauua

SEQ ID NO: 416809 - RNA, 19 nt, Artificial Sequence
  Description of Artificial Sequence: Synthetic oligonucleotide
  Sense Strand Starting at position 1250 of SEQ ID NO: 316432
acuggucucuuguccauua

SEQ ID NO: 416810 - RNA, 19 nt, Artificial Sequence
  Description of Artificial Sequence: Synthetic oligonucleotide
  Antisense Strand to SEQ ID NO: 416809
uaauggacaagagaccagu

SEQ ID NO: 416811 - RNA, 19 nt, Artificial Sequence
  Description of Artificial Sequence: Synthetic oligonucleotide
  Sense Strand Starting at position 1250 of SEQ ID NO: 316433
cuggucucuuguccauuaa

SEQ ID NO: 416812 - RNA, 19 nt, Artificial Sequence
  Description of Artificial Sequence: Synthetic oligonucleotide
  Antisense Strand to SEQ ID NO: 416811
uuaauggacaagagaccag

SEQ ID NO: 416813 - RNA, 19 nt, Artificial Sequence
  Description of Artificial Sequence: Synthetic oligonucleotide
  Sense Strand Starting at position 1250 of SEQ ID NO: 316600
aggaauacacccuguuuga

SEQ ID NO: 416814 - RNA, 19 nt, Artificial Sequence
  Description of Artificial Sequence: Synthetic oligonucleotide
  Antisense Strand to SEQ ID NO: 416813
ucaaacaggguguauuccu

SEQ ID NO: 416815 - RNA, 19 nt, Artificial Sequence
  Description of Artificial Sequence: Synthetic oligonucleotide
  Sense Strand Starting at position 1250 of SEQ ID NO: 316623
auuacaaagaucgggaagu

SEQ ID NO: 416816 - RNA, 19 nt, Artificial Sequence
  Description of Artificial Sequence: Synthetic oligonucleotide
  Antisense Strand to SEQ ID NO: 416815
acuucccgaucuuuguaau

SEQ ID NO: 416817 - RNA, 19 nt, Artificial Sequence
  Description of Artificial Sequence: Synthetic oligonucleotide
  Sense Strand Starting at position 1250 of SEQ ID NO: 316881
uuuagauacuaacaaggaa

SEQ ID NO: 416818 - RNA, 19 nt, Artificial Sequence
  Description of Artificial Sequence: Synthetic oligonucleotide
  Antisense Strand to SEQ ID NO: 416817
uuccuuguuaguaucuaaa

SEQ ID NO: 416819 - RNA, 19 nt, Artificial Sequence
  Description of Artificial Sequence: Synthetic oligonucleotide
  Sense Strand Starting at position 1250 of SEQ ID NO: 316902
gaucaaaucugagccaagu

SEQ ID NO: 416820 - RNA, 19 nt, Artificial Sequence
  Description of Artificial Sequence: Synthetic oligonucleotide
  Antisense Strand to SEQ ID NO: 416819
acuuggcucagauuugauc

SEQ ID NO: 416821 - RNA, 19 nt, Artificial Sequence
  Description of Artificial Sequence: Synthetic oligonucleotide
  Sense Strand Starting at position 1250 of SEQ ID NO: 317430
agugguagcuuccuagaag

SEQ ID NO: 416822 - RNA, 19 nt, Artificial Sequence
  Description of Artificial Sequence: Synthetic oligonucleotide
  Antisense Strand to SEQ ID NO: 416821
cuucuaggaagcuaccacu

SEQ ID NO: 416823 - RNA, 19 nt, Artificial Sequence
  Description of Artificial Sequence: Synthetic oligonucleotide
  Sense Strand Starting at position 1250 of SEQ ID NO: 317433
gguagcuuccuagaagucu

SEQ ID NO: 416824 - RNA, 19 nt, Artificial Sequence
  Description of Artificial Sequence: Synthetic oligonucleotide
  Antisense Strand to SEQ ID NO: 416823
agacuucuaggaagcuacc

SEQ ID NO: 416825 - RNA, 19 nt, Artificial Sequence
  Description of Artificial Sequence: Synthetic oligonucleotide
  Sense Strand Starting at position 1250 of SEQ ID NO: 317598
agacaaaucugacugugac

SEQ ID NO: 416826 - RNA, 19 nt, Artificial Sequence
  Description of Artificial Sequence: Synthetic oligonucleotide
  Antisense Strand to SEQ ID NO: 416825
gucacagucagauuugucu

SEQ ID NO: 416827 - RNA, 19 nt, Artificial Sequence
  Description of Artificial Sequence: Synthetic oligonucleotide
  Sense Strand Starting at position 1250 of SEQ ID NO: 317599
gacaaaucugacugugaca

SEQ ID NO: 416828 - RNA, 19 nt, Artificial Sequence
  Description of Artificial Sequence: Synthetic oligonucleotide
  Antisense Strand to SEQ ID NO: 416827
ugucacagucagauuuguc

SEQ ID NO: 416829 - RNA, 19 nt, Artificial Sequence
  Description of Artificial Sequence: Synthetic oligonucleotide
  Sense Strand Starting at position 1250 of SEQ ID NO: 317689
ugaccauuaccucguuaaa

SEQ ID NO: 416830 - RNA, 19 nt, Artificial Sequence
  Description of Artificial Sequence: Synthetic oligonucleotide
  Antisense Strand to SEQ ID NO: 416829
uuuaacgagguaaugguca

SEQ ID NO: 416831 - RNA, 19 nt, Artificial Sequence
  Description of Artificial Sequence: Synthetic oligonucleotide
  Sense Strand Starting at position 1250 of SEQ ID NO: 317788
cccuaaaucuguguuucca

SEQ ID NO: 416832 - RNA, 19 nt, Artificial Sequence
  Description of Artificial Sequence: Synthetic oligonucleotide
  Antisense Strand to SEQ ID NO: 416831
uggaaacacagauuuaggg

SEQ ID NO: 416833 - RNA, 19 nt, Artificial Sequence
  Description of Artificial Sequence: Synthetic oligonucleotide
  Sense Strand Starting at position 1250 of SEQ ID NO: 317790
cuaaaucuguguuuccaca

SEQ ID NO: 416834 - RNA, 19 nt, Artificial Sequence
  Description of Artificial Sequence: Synthetic oligonucleotide
  Antisense Strand to SEQ ID NO: 416833
uguggaaacacagauuuag

SEQ ID NO: 416835 - RNA, 19 nt, Artificial Sequence
  Description of Artificial Sequence: Synthetic oligonucleotide
  Sense Strand Starting at position 1250 of SEQ ID NO: 317864
agccuaauagcuugcaaag

SEQ ID NO: 416836 - RNA, 19 nt, Artificial Sequence
  Description of Artificial Sequence: Synthetic oligonucleotide
  Antisense Strand to SEQ ID NO: 416835
cuuugcaagcuauuaggcu

SEQ ID NO: 416837 - RNA, 19 nt, Artificial Sequence
  Description of Artificial Sequence: Synthetic oligonucleotide
  Sense Strand Starting at position 1250 of SEQ ID NO: 317878
caaaguugccugcagaaag

SEQ ID NO: 416838 - RNA, 19 nt, Artificial Sequence
  Description of Artificial Sequence: Synthetic oligonucleotide
  Antisense Strand to SEQ ID NO: 416837
cuuucugcaggcaacuuug

SEQ ID NO: 416839 - RNA, 19 nt, Artificial Sequence
  Description of Artificial Sequence: Synthetic oligonucleotide
  Sense Strand Starting at position 1250 of SEQ ID NO: 318009
ggugcuagcgucucggaga

SEQ ID NO: 416840 - RNA, 19 nt, Artificial Sequence
  Description of Artificial Sequence: Synthetic oligonucleotide
  Antisense Strand to SEQ ID NO: 416839
ucuccgagacgcuagcacc

SEQ ID NO: 416841 - RNA, 19 nt, Artificial Sequence
  Description of Artificial Sequence: Synthetic oligonucleotide
  Sense Strand Starting at position 1250 of SEQ ID NO: 318220
auaucucauucgucuuuga

SEQ ID NO: 416842 - RNA, 19 nt, Artificial Sequence
  Description of Artificial Sequence: Synthetic oligonucleotide
  Antisense Strand to SEQ ID NO: 416841
ucaaagacgaaugagauau

SEQ ID NO: 416843 - RNA, 19 nt, Artificial Sequence
  Description of Artificial Sequence: Synthetic oligonucleotide
  Sense Strand Starting at position 1250 of SEQ ID NO: 318238
aauccuuagggccgagaau

SEQ ID NO: 416844 - RNA, 19 nt, Artificial Sequence
  Description of Artificial Sequence: Synthetic oligonucleotide
  Antisense Strand to SEQ ID NO: 416843
auucucggcccuaaggauu

SEQ ID NO: 416845 - RNA, 19 nt, Artificial Sequence
  Description of Artificial Sequence: Synthetic oligonucleotide
  Sense Strand Starting at position 1250 of SEQ ID NO: 318239
auccuuagggccgagaauu

SEQ ID NO: 416846 - RNA, 19 nt, Artificial Sequence
  Description of Artificial Sequence: Synthetic oligonucleotide
  Antisense Strand to SEQ ID NO: 416845
aauucucggcccuaaggau

SEQ ID NO: 416847 - RNA, 19 nt, Artificial Sequence
  Description of Artificial Sequence: Synthetic oligonucleotide
  Sense Strand Starting at position 1250 of SEQ ID NO: 318250
cgagaauucugcucaggug

SEQ ID NO: 416848 - RNA, 19 nt, Artificial Sequence
  Description of Artificial Sequence: Synthetic oligonucleotide
  Antisense Strand to SEQ ID NO: 416847
caccugagcagaauucucg

SEQ ID NO: 416849 - RNA, 19 nt, Artificial Sequence
  Description of Artificial Sequence: Synthetic oligonucleotide
  Sense Strand Starting at position 1250 of SEQ ID NO: 318788
ccauguuaaagauguguuc

SEQ ID NO: 416850 - RNA, 19 nt, Artificial Sequence
  Description of Artificial Sequence: Synthetic oligonucleotide
  Antisense Strand to SEQ ID NO: 416849
gaacacaucuuuaacaugg

SEQ ID NO: 416851 - RNA, 19 nt, Artificial Sequence
  Description of Artificial Sequence: Synthetic oligonucleotide
  Sense Strand Starting at position 1250 of SEQ ID NO: 318790
auguuaaagauguguucuu

SEQ ID NO: 416852 - RNA, 19 nt, Artificial Sequence
  Description of Artificial Sequence: Synthetic oligonucleotide
  Antisense Strand to SEQ ID NO: 416851
aagaacacaucuuuaacau

SEQ ID NO: 416853 - RNA, 19 nt, Artificial Sequence
  Description of Artificial Sequence: Synthetic oligonucleotide
  Sense Strand Starting at position 1250 of SEQ ID NO: 318791
uguuaaagauguguucuua

SEQ ID NO: 416854 - RNA, 19 nt, Artificial Sequence
  Description of Artificial Sequence: Synthetic oligonucleotide
  Antisense Strand to SEQ ID NO: 416853
uaagaacacaucuuuaaca

SEQ ID NO: 416855 - RNA, 19 nt, Artificial Sequence
  Description of Artificial Sequence: Synthetic oligonucleotide
  Sense Strand Starting at position 1250 of SEQ ID NO: 318795
aaagauguguucuuagcca

SEQ ID NO: 416856 - RNA, 19 nt, Artificial Sequence
  Description of Artificial Sequence: Synthetic oligonucleotide
  Antisense Strand to SEQ ID NO: 416855
uggcuaagaacacaucuuu

SEQ ID NO: 416857 - RNA, 19 nt, Artificial Sequence
  Description of Artificial Sequence: Synthetic oligonucleotide
  Sense Strand Starting at position 1250 of SEQ ID NO: 318872
ugaaauacugcauaagcuu

SEQ ID NO: 416858 - RNA, 19 nt, Artificial Sequence
  Description of Artificial Sequence: Synthetic oligonucleotide
  Antisense Strand to SEQ ID NO: 416857
aagcuuaugcaguauuuca

SEQ ID NO: 416859 - RNA, 19 nt, Artificial Sequence
  Description of Artificial Sequence: Synthetic oligonucleotide
  Sense Strand Starting at position 1250 of SEQ ID NO: 318926
auuaauaagcuuuaucgga

SEQ ID NO: 416860 - RNA, 19 nt, Artificial Sequence
  Description of Artificial Sequence: Synthetic oligonucleotide
  Antisense Strand to SEQ ID NO: 416859
uccgauaaagcuuauuaau

SEQ ID NO: 416861 - RNA, 19 nt, Artificial Sequence
  Description of Artificial Sequence: Synthetic oligonucleotide
  Sense Strand Starting at position 1250 of SEQ ID NO: 318934
gcuuuaucggauuagacua

SEQ ID NO: 416862 - RNA, 19 nt, Artificial Sequence
  Description of Artificial Sequence: Synthetic oligonucleotide
  Antisense Strand to SEQ ID NO: 416861
uagucuaauccgauaaagc

SEQ ID NO: 416863 - RNA, 19 nt, Artificial Sequence
  Description of Artificial Sequence: Synthetic oligonucleotide
  Sense Strand Starting at position 1250 of SEQ ID NO: 318985
agguguugugaaugacaca

SEQ ID NO: 416864 - RNA, 19 nt, Artificial Sequence
  Description of Artificial Sequence: Synthetic oligonucleotide
  Antisense Strand to SEQ ID NO: 416863
ugugucauucacaacaccu

SEQ ID NO: 416865 - RNA, 19 nt, Artificial Sequence
  Description of Artificial Sequence: Synthetic oligonucleotide
  Sense Strand Starting at position 1250 of SEQ ID NO: 318986
gguguugugaaugacacaa

SEQ ID NO: 416866 - RNA, 19 nt, Artificial Sequence
  Description of Artificial Sequence: Synthetic oligonucleotide
  Antisense Strand to SEQ ID NO: 416865
uugugucauucacaacacc

SEQ ID NO: 416867 - RNA, 19 nt, Artificial Sequence
  Description of Artificial Sequence: Synthetic oligonucleotide
  Sense Strand Starting at position 1250 of SEQ ID NO: 319001
acaaaugguuauucugaac

SEQ ID NO: 416868 - RNA, 19 nt, Artificial Sequence
  Description of Artificial Sequence: Synthetic oligonucleotide
  Antisense Strand to SEQ ID NO: 416867
guucagaauaaccauuugu

SEQ ID NO: 416869 - RNA, 19 nt, Artificial Sequence
  Description of Artificial Sequence: Synthetic oligonucleotide
  Sense Strand Starting at position 1250 of SEQ ID NO: 319074
caaguaucagauugacgau

SEQ ID NO: 416870 - RNA, 19 nt, Artificial Sequence
  Description of Artificial Sequence: Synthetic oligonucleotide
  Antisense Strand to SEQ ID NO: 416869
aucgucaaucugauacuug

SEQ ID NO: 416871 - RNA, 19 nt, Artificial Sequence
  Description of Artificial Sequence: Synthetic oligonucleotide
  Sense Strand Starting at position 1251 of SEQ ID NO: 315409
ugugccucacccuguagaa

SEQ ID NO: 416872 - RNA, 19 nt, Artificial Sequence
  Description of Artificial Sequence: Synthetic oligonucleotide
  Antisense Strand to SEQ ID NO: 416871
uucuacagggugaggcaca

SEQ ID NO: 416873 - RNA, 19 nt, Artificial Sequence
  Description of Artificial Sequence: Synthetic oligonucleotide
  Sense Strand Starting at position 1251 of SEQ ID NO: 315551
ggugugggucuugaucgaa

SEQ ID NO: 416874 - RNA, 19 nt, Artificial Sequence
  Description of Artificial Sequence: Synthetic oligonucleotide
  Antisense Strand to SEQ ID NO: 416873
uucgaucaagacccacacc

SEQ ID NO: 416875 - RNA, 19 nt, Artificial Sequence
  Description of Artificial Sequence: Synthetic oligonucleotide
  Sense Strand Starting at position 1251 of SEQ ID NO: 315610
augcgacucugggagugaa

SEQ ID NO: 416876 - RNA, 19 nt, Artificial Sequence
  Description of Artificial Sequence: Synthetic oligonucleotide
  Antisense Strand to SEQ ID NO: 416875
uucacucccagagucgcau

SEQ ID NO: 416877 - RNA, 19 nt, Artificial Sequence
  Description of Artificial Sequence: Synthetic oligonucleotide
  Sense Strand Starting at position 1251 of SEQ ID NO: 315844
ggaugccauccggauaaca

SEQ ID NO: 416878 - RNA, 19 nt, Artificial Sequence
  Description of Artificial Sequence: Synthetic oligonucleotide
  Antisense Strand to SEQ ID NO: 416877
uguuauccggauggcaucc

SEQ ID NO: 416879 - RNA, 19 nt, Artificial Sequence
  Description of Artificial Sequence: Synthetic oligonucleotide
  Sense Strand Starting at position 1251 of SEQ ID NO: 315955
agcuauuccuucccgcaua

SEQ ID NO: 416880 - RNA, 19 nt, Artificial Sequence
  Description of Artificial Sequence: Synthetic oligonucleotide
  Antisense Strand to SEQ ID NO: 416879
uaugcgggaaggaauagcu

SEQ ID NO: 416881 - RNA, 19 nt, Artificial Sequence
  Description of Artificial Sequence: Synthetic oligonucleotide
  Sense Strand Starting at position 1251 of SEQ ID NO: 316169
ugagcugcaccucaaagau

SEQ ID NO: 416882 - RNA, 19 nt, Artificial Sequence
  Description of Artificial Sequence: Synthetic oligonucleotide
  Antisense Strand to SEQ ID NO: 416881
aucuuugaggugcagcuca

SEQ ID NO: 416883 - RNA, 19 nt, Artificial Sequence
  Description of Artificial Sequence: Synthetic oligonucleotide
  Sense Strand Starting at position 1251 of SEQ ID NO: 316178
ccucaaagaugggcucuau

SEQ ID NO: 416884 - RNA, 19 nt, Artificial Sequence
  Description of Artificial Sequence: Synthetic oligonucleotide
  Antisense Strand to SEQ ID NO: 416883
auagagcccaucuuugagg

SEQ ID NO: 416885 - RNA, 19 nt, Artificial Sequence
  Description of Artificial Sequence: Synthetic oligonucleotide
  Sense Strand Starting at position 1251 of SEQ ID NO: 316561
ccagguuucugcccgccaa

SEQ ID NO: 416886 - RNA, 19 nt, Artificial Sequence
  Description of Artificial Sequence: Synthetic oligonucleotide
  Antisense Strand to SEQ ID NO: 416885
uuggcgggcagaaaccugg

SEQ ID NO: 416887 - RNA, 19 nt, Artificial Sequence
  Description of Artificial Sequence: Synthetic oligonucleotide
  Sense Strand Starting at position 1251 of SEQ ID NO: 316565
guuucugcccgccaagaau

SEQ ID NO: 416888 - RNA, 19 nt, Artificial Sequence
  Description of Artificial Sequence: Synthetic oligonucleotide
  Antisense Strand to SEQ ID NO: 416887
auucuuggcgggcagaaac

SEQ ID NO: 416889 - RNA, 19 nt, Artificial Sequence
  Description of Artificial Sequence: Synthetic oligonucleotide
  Sense Strand Starting at position 1251 of SEQ ID NO: 317290
gggaggagguguuugucau

SEQ ID NO: 416890 - RNA, 19 nt, Artificial Sequence
  Description of Artificial Sequence: Synthetic oligonucleotide
  Antisense Strand to SEQ ID NO: 416889
augacaaacaccuccuccc

SEQ ID NO: 416891 - RNA, 19 nt, Artificial Sequence
  Description of Artificial Sequence: Synthetic oligonucleotide
  Sense Strand Starting at position 1251 of SEQ ID NO: 317300
guuugucaucgcguucaaa

SEQ ID NO: 416892 - RNA, 19 nt, Artificial Sequence
  Description of Artificial Sequence: Synthetic oligonucleotide
  Antisense Strand to SEQ ID NO: 416891
uuugaacgcgaugacaaac

SEQ ID NO: 416893 - RNA, 19 nt, Artificial Sequence
  Description of Artificial Sequence: Synthetic oligonucleotide
  Sense Strand Starting at position 1251 of SEQ ID NO: 317329
cggugucucccgucaugca

SEQ ID NO: 416894 - RNA, 19 nt, Artificial Sequence
  Description of Artificial Sequence: Synthetic oligonucleotide
  Antisense Strand to SEQ ID NO: 416893
ugcaugacgggagacaccg

SEQ ID NO: 416895 - RNA, 19 nt, Artificial Sequence
  Description of Artificial Sequence: Synthetic oligonucleotide
  Sense Strand Starting at position 1251 of SEQ ID NO: 317330
ggugucucccgucaugcaa

SEQ ID NO: 416896 - RNA, 19 nt, Artificial Sequence
  Description of Artificial Sequence: Synthetic oligonucleotide
  Antisense Strand to SEQ ID NO: 416895
uugcaugacgggagacacc

SEQ ID NO: 416897 - RNA, 19 nt, Artificial Sequence
  Description of Artificial Sequence: Synthetic oligonucleotide
  Sense Strand Starting at position 1251 of SEQ ID NO: 317478
ccaucaauguuguccggga

SEQ ID NO: 416898 - RNA, 19 nt, Artificial Sequence
  Description of Artificial Sequence: Synthetic oligonucleotide
  Antisense Strand to SEQ ID NO: 416897
ucccggacaacauugaugg

SEQ ID NO: 416899 - RNA, 19 nt, Artificial Sequence
  Description of Artificial Sequence: Synthetic oligonucleotide
  Sense Strand Starting at position 1251 of SEQ ID NO: 317482
caauguuguccgggaggua

SEQ ID NO: 416900 - RNA, 19 nt, Artificial Sequence
  Description of Artificial Sequence: Synthetic oligonucleotide
  Antisense Strand to SEQ ID NO: 416899
uaccucccggacaacauug

SEQ ID NO: 416901 - RNA, 19 nt, Artificial Sequence
  Description of Artificial Sequence: Synthetic oligonucleotide
  Sense Strand Starting at position 1251 of SEQ ID NO: 317483
aauguuguccgggagguaa

SEQ ID NO: 416902 - RNA, 19 nt, Artificial Sequence
  Description of Artificial Sequence: Synthetic oligonucleotide
  Antisense Strand to SEQ ID NO: 416901
uuaccucccggacaacauu

SEQ ID NO: 416903 - RNA, 19 nt, Artificial Sequence
  Description of Artificial Sequence: Synthetic oligonucleotide
  Sense Strand Starting at position 1251 of SEQ ID NO: 317500
aaagaaagugaucggccaa

SEQ ID NO: 416904 - RNA, 19 nt, Artificial Sequence
  Description of Artificial Sequence: Synthetic oligonucleotide
  Antisense Strand to SEQ ID NO: 416903
uuggccgaucacuuucuuu

SEQ ID NO: 416905 - RNA, 19 nt, Artificial Sequence
  Description of Artificial Sequence: Synthetic oligonucleotide
  Sense Strand Starting at position 1251 of SEQ ID NO: 317611
ucaggagucgggcgaauau

SEQ ID NO: 416906 - RNA, 19 nt, Artificial Sequence
  Description of Artificial Sequence: Synthetic oligonucleotide
  Antisense Strand to SEQ ID NO: 416905
auauucgcccgacuccuga

SEQ ID NO: 416907 - RNA, 19 nt, Artificial Sequence
  Description of Artificial Sequence: Synthetic oligonucleotide
  Sense Strand Starting at position 1251 of SEQ ID NO: 317724
cgucguguccauggagagu

SEQ ID NO: 416908 - RNA, 19 nt, Artificial Sequence
  Description of Artificial Sequence: Synthetic oligonucleotide
  Antisense Strand to SEQ ID NO: 416907
acucuccauggacacgacg

SEQ ID NO: 416909 - RNA, 19 nt, Artificial Sequence
  Description of Artificial Sequence: Synthetic oligonucleotide
  Sense Strand Starting at position 1251 of SEQ ID NO: 317776
aggaucuugccuugucuuu

SEQ ID NO: 416910 - RNA, 19 nt, Artificial Sequence
  Description of Artificial Sequence: Synthetic oligonucleotide
  Antisense Strand to SEQ ID NO: 416909
aaagacaaggcaagauccu

SEQ ID NO: 416911 - RNA, 19 nt, Artificial Sequence
  Description of Artificial Sequence: Synthetic oligonucleotide
  Sense Strand Starting at position 1251 of SEQ ID NO: 317802
cccagugaugaucgacaga

SEQ ID NO: 416912 - RNA, 19 nt, Artificial Sequence
  Description of Artificial Sequence: Synthetic oligonucleotide
  Antisense Strand to SEQ ID NO: 416911
ucugucgaucaucacuggg

SEQ ID NO: 416913 - RNA, 19 nt, Artificial Sequence
  Description of Artificial Sequence: Synthetic oligonucleotide
  Sense Strand Starting at position 1251 of SEQ ID NO: 317805
agugaugaucgacagagua

SEQ ID NO: 416914 - RNA, 19 nt, Artificial Sequence
  Description of Artificial Sequence: Synthetic oligonucleotide
  Antisense Strand to SEQ ID NO: 416913
uacucugucgaucaucacu

SEQ ID NO: 416915 - RNA, 19 nt, Artificial Sequence
  Description of Artificial Sequence: Synthetic oligonucleotide
  Sense Strand Starting at position 1251 of SEQ ID NO: 317807
ugaugaucgacagaguagu

SEQ ID NO: 416916 - RNA, 19 nt, Artificial Sequence
  Description of Artificial Sequence: Synthetic oligonucleotide
  Antisense Strand to SEQ ID NO: 416915
acuacucugucgaucauca

SEQ ID NO: 416917 - RNA, 19 nt, Artificial Sequence
  Description of Artificial Sequence: Synthetic oligonucleotide
  Sense Strand Starting at position 1251 of SEQ ID NO: 317914
gggaguacuuuccuacaca

SEQ ID NO: 416918 - RNA, 19 nt, Artificial Sequence
  Description of Artificial Sequence: Synthetic oligonucleotide
  Antisense Strand to SEQ ID NO: 416917
uguguaggaaaguacuccc

SEQ ID NO: 416919 - RNA, 19 nt, Artificial Sequence
  Description of Artificial Sequence: Synthetic oligonucleotide
  Sense Strand Starting at position 1251 of SEQ ID NO: 317915
ggaguacuuuccuacacac

SEQ ID NO: 416920 - RNA, 19 nt, Artificial Sequence
  Description of Artificial Sequence: Synthetic oligonucleotide
  Antisense Strand to SEQ ID NO: 416919
guguguaggaaaguacucc

SEQ ID NO: 416921 - RNA, 19 nt, Artificial Sequence
  Description of Artificial Sequence: Synthetic oligonucleotide
  Sense Strand Starting at position 1251 of SEQ ID NO: 318111
cagagaggcuuugguaaca

SEQ ID NO: 416922 - RNA, 19 nt, Artificial Sequence
  Description of Artificial Sequence: Synthetic oligonucleotide
  Antisense Strand to SEQ ID NO: 416921
uguuaccaaagccucucug

SEQ ID NO: 416923 - RNA, 19 nt, Artificial Sequence
  Description of Artificial Sequence: Synthetic oligonucleotide
  Sense Strand Starting at position 1251 of SEQ ID NO: 318169
uggucauucugcguuguga

SEQ ID NO: 416924 - RNA, 19 nt, Artificial Sequence
  Description of Artificial Sequence: Synthetic oligonucleotide
  Antisense Strand to SEQ ID NO: 416923
ucacaacgcagaaugacca

SEQ ID NO: 416925 - RNA, 19 nt, Artificial Sequence
  Description of Artificial Sequence: Synthetic oligonucleotide
  Sense Strand Starting at position 1251 of SEQ ID NO: 318171
gucauucugcguugugaac

SEQ ID NO: 416926 - RNA, 19 nt, Artificial Sequence
  Description of Artificial Sequence: Synthetic oligonucleotide
  Antisense Strand to SEQ ID NO: 416925
guucacaacgcagaaugac

SEQ ID NO: 416927 - RNA, 19 nt, Artificial Sequence
  Description of Artificial Sequence: Synthetic oligonucleotide
  Sense Strand Starting at position 1251 of SEQ ID NO: 318203
gcuaguggucuccuugcuu

SEQ ID NO: 416928 - RNA, 19 nt, Artificial Sequence
  Description of Artificial Sequence: Synthetic oligonucleotide
  Antisense Strand to SEQ ID NO: 416927
aagcaaggagaccacuagc

SEQ ID NO: 416929 - RNA, 19 nt, Artificial Sequence
  Description of Artificial Sequence: Synthetic oligonucleotide
  Sense Strand Starting at position 1251 of SEQ ID NO: 318221
ucuagaaucucacagagau

SEQ ID NO: 416930 - RNA, 19 nt, Artificial Sequence
  Description of Artificial Sequence: Synthetic oligonucleotide
  Antisense Strand to SEQ ID NO: 416929
aucucugugagauucuaga

SEQ ID NO: 416931 - RNA, 19 nt, Artificial Sequence
  Description of Artificial Sequence: Synthetic oligonucleotide
  Sense Strand Starting at position 1251 of SEQ ID NO: 318231
cacagagauuucugugcau

SEQ ID NO: 416932 - RNA, 19 nt, Artificial Sequence
  Description of Artificial Sequence: Synthetic oligonucleotide
  Antisense Strand to SEQ ID NO: 416931
augcacagaaaucucugug

SEQ ID NO: 416933 - RNA, 19 nt, Artificial Sequence
  Description of Artificial Sequence: Synthetic oligonucleotide
  Sense Strand Starting at position 1251 of SEQ ID NO: 318269
ggaugaaucacguacaguu

SEQ ID NO: 416934 - RNA, 19 nt, Artificial Sequence
  Description of Artificial Sequence: Synthetic oligonucleotide
  Antisense Strand to SEQ ID NO: 416933
aacuguacgugauucaucc

SEQ ID NO: 416935 - RNA, 19 nt, Artificial Sequence
  Description of Artificial Sequence: Synthetic oligonucleotide
  Sense Strand Starting at position 1251 of SEQ ID NO: 318307
uccauugucuccuagagau

SEQ ID NO: 416936 - RNA, 19 nt, Artificial Sequence
  Description of Artificial Sequence: Synthetic oligonucleotide
  Antisense Strand to SEQ ID NO: 416935
aucucuaggagacaaugga

SEQ ID NO: 416937 - RNA, 19 nt, Artificial Sequence
  Description of Artificial Sequence: Synthetic oligonucleotide
  Sense Strand Starting at position 1251 of SEQ ID NO: 318338
ccgggcauuugagauucuu

SEQ ID NO: 416938 - RNA, 19 nt, Artificial Sequence
  Description of Artificial Sequence: Synthetic oligonucleotide
  Antisense Strand to SEQ ID NO: 416937
aagaaucucaaaugcccgg

SEQ ID NO: 416939 - RNA, 19 nt, Artificial Sequence
  Description of Artificial Sequence: Synthetic oligonucleotide
  Sense Strand Starting at position 1251 of SEQ ID NO: 318658
gucuaauugacaugggcgu

SEQ ID NO: 416940 - RNA, 19 nt, Artificial Sequence
  Description of Artificial Sequence: Synthetic oligonucleotide
  Antisense Strand to SEQ ID NO: 416939
acgcccaugucaauuagac

SEQ ID NO: 416941 - RNA, 19 nt, Artificial Sequence
  Description of Artificial Sequence: Synthetic oligonucleotide
  Sense Strand Starting at position 1251 of SEQ ID NO: 318665
ugacaugggcgucaggaau

SEQ ID NO: 416942 - RNA, 19 nt, Artificial Sequence
  Description of Artificial Sequence: Synthetic oligonucleotide
  Antisense Strand to SEQ ID NO: 416941
auuccugacgcccauguca

SEQ ID NO: 416943 - RNA, 19 nt, Artificial Sequence
  Description of Artificial Sequence: Synthetic oligonucleotide
  Sense Strand Starting at position 1251 of SEQ ID NO: 318780
cgccuugcccggcugaauu

SEQ ID NO: 416944 - RNA, 19 nt, Artificial Sequence
  Description of Artificial Sequence: Synthetic oligonucleotide
  Antisense Strand to SEQ ID NO: 416943
aauucagccgggcaaggcg

SEQ ID NO: 416945 - RNA, 19 nt, Artificial Sequence
  Description of Artificial Sequence: Synthetic oligonucleotide
  Sense Strand Starting at position 1251 of SEQ ID NO: 318968
guuugagaaucacugcuag

SEQ ID NO: 416946 - RNA, 19 nt, Artificial Sequence
  Description of Artificial Sequence: Synthetic oligonucleotide
  Antisense Strand to SEQ ID NO: 416945
cuagcagugauucucaaac

SEQ ID NO: 416947 - RNA, 19 nt, Artificial Sequence
  Description of Artificial Sequence: Synthetic oligonucleotide
  Sense Strand Starting at position 1251 of SEQ ID NO: 319093
uucuauauuuaggaaagca

SEQ ID NO: 416948 - RNA, 19 nt, Artificial Sequence
  Description of Artificial Sequence: Synthetic oligonucleotide
  Antisense Strand to SEQ ID NO: 416947
ugcuuuccuaaauauagaa

SEQ ID NO: 416949 - RNA, 19 nt, Artificial Sequence
  Description of Artificial Sequence: Synthetic oligonucleotide
  Sense Strand Starting at position 1251 of SEQ ID NO: 319133
ccucuuucuguuggugauu

SEQ ID NO: 416950 - RNA, 19 nt, Artificial Sequence
  Description of Artificial Sequence: Synthetic oligonucleotide
  Antisense Strand to SEQ ID NO: 416949
aaucaccaacagaaagagg

SEQ ID NO: 416951 - RNA, 19 nt, Artificial Sequence
  Description of Artificial Sequence: Synthetic oligonucleotide
  Sense Strand Starting at position 1252 of SEQ ID NO: 315328
uauggucccugugugauuu

SEQ ID NO: 416952 - RNA, 19 nt, Artificial Sequence
  Description of Artificial Sequence: Synthetic oligonucleotide
  Antisense Strand to SEQ ID NO: 416951
aaaucacacagggaccaua

SEQ ID NO: 416953 - RNA, 19 nt, Artificial Sequence
  Description of Artificial Sequence: Synthetic oligonucleotide
  Sense Strand Starting at position 1252 of SEQ ID NO: 315329
auggucccugugugauuua

SEQ ID NO: 416954 - RNA, 19 nt, Artificial Sequence
  Description of Artificial Sequence: Synthetic oligonucleotide
  Antisense Strand to SEQ ID NO: 416953
uaaaucacacagggaccau

SEQ ID NO: 416955 - RNA, 19 nt, Artificial Sequence
  Description of Artificial Sequence: Synthetic oligonucleotide
  Sense Strand Starting at position 1252 of SEQ ID NO: 315332
gucccugugugauuuaugu

SEQ ID NO: 416956 - RNA, 19 nt, Artificial Sequence
  Description of Artificial Sequence: Synthetic oligonucleotide
  Antisense Strand to SEQ ID NO: 416955
acauaaaucacacagggac

SEQ ID NO: 416957 - RNA, 19 nt, Artificial Sequence
  Description of Artificial Sequence: Synthetic oligonucleotide
  Sense Strand Starting at position 1252 of SEQ ID NO: 315431
auagcuggccuauacaaau

SEQ ID NO: 416958 - RNA, 19 nt, Artificial Sequence
  Description of Artificial Sequence: Synthetic oligonucleotide
  Antisense Strand to SEQ ID NO: 416957
auuuguauaggccagcuau

SEQ ID NO: 416959 - RNA, 19 nt, Artificial Sequence
  Description of Artificial Sequence: Synthetic oligonucleotide
  Sense Strand Starting at position 1252 of SEQ ID NO: 315630
aggagaucagccugugaag

SEQ ID NO: 416960 - RNA, 19 nt, Artificial Sequence
  Description of Artificial Sequence: Synthetic oligonucleotide
  Antisense Strand to SEQ ID NO: 416959
cuucacaggcugaucuccu

SEQ ID NO: 416961 - RNA, 19 nt, Artificial Sequence
  Description of Artificial Sequence: Synthetic oligonucleotide
  Sense Strand Starting at position 1252 of SEQ ID NO: 315632
gagaucagccugugaagga

SEQ ID NO: 416962 - RNA, 19 nt, Artificial Sequence
  Description of Artificial Sequence: Synthetic oligonucleotide
  Antisense Strand to SEQ ID NO: 416961
uccuucacaggcugaucuc

SEQ ID NO: 416963 - RNA, 19 nt, Artificial Sequence
  Description of Artificial Sequence: Synthetic oligonucleotide
  Sense Strand Starting at position 1252 of SEQ ID NO: 315671
gggaauuggcaucacucuu

SEQ ID NO: 416964 - RNA, 19 nt, Artificial Sequence
  Description of Artificial Sequence: Synthetic oligonucleotide
  Antisense Strand to SEQ ID NO: 416963
aagagugaugccaauuccc

SEQ ID NO: 416965 - RNA, 19 nt, Artificial Sequence
  Description of Artificial Sequence: Synthetic oligonucleotide
  Sense Strand Starting at position 1252 of SEQ ID NO: 316546
ucauaacagugagucaaua

SEQ ID NO: 416966 - RNA, 19 nt, Artificial Sequence
  Description of Artificial Sequence: Synthetic oligonucleotide
  Antisense Strand to SEQ ID NO: 416965
uauugacucacuguuauga

SEQ ID NO: 416967 - RNA, 19 nt, Artificial Sequence
  Description of Artificial Sequence: Synthetic oligonucleotide
  Sense Strand Starting at position 1252 of SEQ ID NO: 316580
cacaacagcgagugaauau

SEQ ID NO: 416968 - RNA, 19 nt, Artificial Sequence
  Description of Artificial Sequence: Synthetic oligonucleotide
  Antisense Strand to SEQ ID NO: 416967
auauucacucgcuguugug

SEQ ID NO: 416969 - RNA, 19 nt, Artificial Sequence
  Description of Artificial Sequence: Synthetic oligonucleotide
  Sense Strand Starting at position 1252 of SEQ ID NO: 316709
gugccuaaucucugaggaa

SEQ ID NO: 416970 - RNA, 19 nt, Artificial Sequence
  Description of Artificial Sequence: Synthetic oligonucleotide
  Antisense Strand to SEQ ID NO: 416969
uuccucagagauuaggcac

SEQ ID NO: 416971 - RNA, 19 nt, Artificial Sequence
  Description of Artificial Sequence: Synthetic oligonucleotide
  Sense Strand Starting at position 1252 of SEQ ID NO: 316823
auggcauaauuaucaguga

SEQ ID NO: 416972 - RNA, 19 nt, Artificial Sequence
  Description of Artificial Sequence: Synthetic oligonucleotide
  Antisense Strand to SEQ ID NO: 416971
ucacugauaauuaugccau

SEQ ID NO: 416973 - RNA, 19 nt, Artificial Sequence
  Description of Artificial Sequence: Synthetic oligonucleotide
  Sense Strand Starting at position 1252 of SEQ ID NO: 316826
gcauaauuaucagugaaca

SEQ ID NO: 416974 - RNA, 19 nt, Artificial Sequence
  Description of Artificial Sequence: Synthetic oligonucleotide
  Antisense Strand to SEQ ID NO: 416973
uguucacugauaauuaugc

SEQ ID NO: 416975 - RNA, 19 nt, Artificial Sequence
  Description of Artificial Sequence: Synthetic oligonucleotide
  Sense Strand Starting at position 1252 of SEQ ID NO: 317014
cucguuaggacuuagaaau

SEQ ID NO: 416976 - RNA, 19 nt, Artificial Sequence
  Description of Artificial Sequence: Synthetic oligonucleotide
  Antisense Strand to SEQ ID NO: 416975
auuucuaaguccuaacgag

SEQ ID NO: 416977 - RNA, 19 nt, Artificial Sequence
  Description of Artificial Sequence: Synthetic oligonucleotide
  Sense Strand Starting at position 1252 of SEQ ID NO: 317469
ggaucuuccuaucucugga

SEQ ID NO: 416978 - RNA, 19 nt, Artificial Sequence
  Description of Artificial Sequence: Synthetic oligonucleotide
  Antisense Strand to SEQ ID NO: 416977
uccagagauaggaagaucc

SEQ ID NO: 416979 - RNA, 19 nt, Artificial Sequence
  Description of Artificial Sequence: Synthetic oligonucleotide
  Sense Strand Starting at position 1252 of SEQ ID NO: 317577
gugugcucagcuguuguau

SEQ ID NO: 416980 - RNA, 19 nt, Artificial Sequence
  Description of Artificial Sequence: Synthetic oligonucleotide
  Antisense Strand to SEQ ID NO: 416979
auacaacagcugagcacac

SEQ ID NO: 416981 - RNA, 19 nt, Artificial Sequence
  Description of Artificial Sequence: Synthetic oligonucleotide
  Sense Strand Starting at position 1252 of SEQ ID NO: 317578
ugugcucagcuguuguauu

SEQ ID NO: 416982 - RNA, 19 nt, Artificial Sequence
  Description of Artificial Sequence: Synthetic oligonucleotide
  Antisense Strand to SEQ ID NO: 416981
aauacaacagcugagcaca

SEQ ID NO: 416983 - RNA, 19 nt, Artificial Sequence
  Description of Artificial Sequence: Synthetic oligonucleotide
  Sense Strand Starting at position 1252 of SEQ ID NO: 317596
uuucuugagccaugaugga

SEQ ID NO: 416984 - RNA, 19 nt, Artificial Sequence
  Description of Artificial Sequence: Synthetic oligonucleotide
  Antisense Strand to SEQ ID NO: 416983
uccaucauggcucaagaaa

SEQ ID NO: 416985 - RNA, 19 nt, Artificial Sequence
  Description of Artificial Sequence: Synthetic oligonucleotide
  Sense Strand Starting at position 1252 of SEQ ID NO: 317687
cuagaugccugccuuauuu

SEQ ID NO: 416986 - RNA, 19 nt, Artificial Sequence
  Description of Artificial Sequence: Synthetic oligonucleotide
  Antisense Strand to SEQ ID NO: 416985
aaauaaggcaggcaucuag

SEQ ID NO: 416987 - RNA, 19 nt, Artificial Sequence
  Description of Artificial Sequence: Synthetic oligonucleotide
  Sense Strand Starting at position 1252 of SEQ ID NO: 317717
ucaccuuaucaguaugagu

SEQ ID NO: 416988 - RNA, 19 nt, Artificial Sequence
  Description of Artificial Sequence: Synthetic oligonucleotide
  Antisense Strand to SEQ ID NO: 416987
acucauacugauaagguga

SEQ ID NO: 416989 - RNA, 19 nt, Artificial Sequence
  Description of Artificial Sequence: Synthetic oligonucleotide
  Sense Strand Starting at position 1252 of SEQ ID NO: 317733
aguuucucuguccaaucua

SEQ ID NO: 416990 - RNA, 19 nt, Artificial Sequence
  Description of Artificial Sequence: Synthetic oligonucleotide
  Antisense Strand to SEQ ID NO: 416989
uagauuggacagagaaacu

SEQ ID NO: 416991 - RNA, 19 nt, Artificial Sequence
  Description of Artificial Sequence: Synthetic oligonucleotide
  Sense Strand Starting at position 1252 of SEQ ID NO: 317827
guacauaaguaugcuauaa

SEQ ID NO: 416992 - RNA, 19 nt, Artificial Sequence
  Description of Artificial Sequence: Synthetic oligonucleotide
  Antisense Strand to SEQ ID NO: 416991
uuauagcauacuuauguac

SEQ ID NO: 416993 - RNA, 19 nt, Artificial Sequence
  Description of Artificial Sequence: Synthetic oligonucleotide
  Sense Strand Starting at position 1252 of SEQ ID NO: 318099
gacuuacucucagugauug

SEQ ID NO: 416994 - RNA, 19 nt, Artificial Sequence
  Description of Artificial Sequence: Synthetic oligonucleotide
  Antisense Strand to SEQ ID NO: 416993
caaucacugagaguaaguc

SEQ ID NO: 416995 - RNA, 19 nt, Artificial Sequence
  Description of Artificial Sequence: Synthetic oligonucleotide
  Sense Strand Starting at position 1252 of SEQ ID NO: 318100
acuuacucucagugauuga

SEQ ID NO: 416996 - RNA, 19 nt, Artificial Sequence
  Description of Artificial Sequence: Synthetic oligonucleotide
  Antisense Strand to SEQ ID NO: 416995
ucaaucacugagaguaagu

SEQ ID NO: 416997 - RNA, 19 nt, Artificial Sequence
  Description of Artificial Sequence: Synthetic oligonucleotide
  Sense Strand Starting at position 1252 of SEQ ID NO: 318104
acucucagugauugaacaa

SEQ ID NO: 416998 - RNA, 19 nt, Artificial Sequence
  Description of Artificial Sequence: Synthetic oligonucleotide
  Antisense Strand to SEQ ID NO: 416997
uuguucaaucacugagagu

SEQ ID NO: 416999 - RNA, 19 nt, Artificial Sequence
  Description of Artificial Sequence: Synthetic oligonucleotide
  Sense Strand Starting at position 1252 of SEQ ID NO: 318211
ggacaaagcuggcuaaaca

SEQ ID NO: 417000 - RNA, 19 nt, Artificial Sequence
  Description of Artificial Sequence: Synthetic oligonucleotide
  Antisense Strand to SEQ ID NO: 416999
uguuuagccagcuuugucc

SEQ ID NO: 417001 - RNA, 19 nt, Artificial Sequence
  Description of Artificial Sequence: Synthetic oligonucleotide
  Sense Strand Starting at position 1252 of SEQ ID NO: 318275
uggugaaucguugacucag

SEQ ID NO: 417002 - RNA, 19 nt, Artificial Sequence
  Description of Artificial Sequence: Synthetic oligonucleotide
  Antisense Strand to SEQ ID NO: 417001
cugagucaacgauucacca

SEQ ID NO: 417003 - RNA, 19 nt, Artificial Sequence
  Description of Artificial Sequence: Synthetic oligonucleotide
  Sense Strand Starting at position 1252 of SEQ ID NO: 318322
gauucucuggucuaagcuu

SEQ ID NO: 417004 - RNA, 19 nt, Artificial Sequence
  Description of Artificial Sequence: Synthetic oligonucleotide
  Antisense Strand to SEQ ID NO: 417003
aagcuuagaccagagaauc

SEQ ID NO: 417005 - RNA, 19 nt, Artificial Sequence
  Description of Artificial Sequence: Synthetic oligonucleotide
  Sense Strand Starting at position 1252 of SEQ ID NO: 318355
uuuaaaguauguuccauag

SEQ ID NO: 417006 - RNA, 19 nt, Artificial Sequence
  Description of Artificial Sequence: Synthetic oligonucleotide
  Antisense Strand to SEQ ID NO: 417005
cuauggaacauacuuuaaa

SEQ ID NO: 417007 - RNA, 19 nt, Artificial Sequence
  Description of Artificial Sequence: Synthetic oligonucleotide
  Sense Strand Starting at position 1252 of SEQ ID NO: 318370
auagaacacucggccuuua

SEQ ID NO: 417008 - RNA, 19 nt, Artificial Sequence
  Description of Artificial Sequence: Synthetic oligonucleotide
  Antisense Strand to SEQ ID NO: 417007
uaaaggccgaguguucuau

SEQ ID NO: 417009 - RNA, 19 nt, Artificial Sequence
  Description of Artificial Sequence: Synthetic oligonucleotide
  Sense Strand Starting at position 1252 of SEQ ID NO: 318375
acacucggccuuuaagaaa

SEQ ID NO: 417010 - RNA, 19 nt, Artificial Sequence
  Description of Artificial Sequence: Synthetic oligonucleotide
  Antisense Strand to SEQ ID NO: 417009
uuucuuaaaggccgagugu

SEQ ID NO: 417011 - RNA, 19 nt, Artificial Sequence
  Description of Artificial Sequence: Synthetic oligonucleotide
  Sense Strand Starting at position 1252 of SEQ ID NO: 318457
uccguagaugcauauuaaa

SEQ ID NO: 417012 - RNA, 19 nt, Artificial Sequence
  Description of Artificial Sequence: Synthetic oligonucleotide
  Antisense Strand to SEQ ID NO: 417011
uuuaauaugcaucuacgga

SEQ ID NO: 417013 - RNA, 19 nt, Artificial Sequence
  Description of Artificial Sequence: Synthetic oligonucleotide
  Sense Strand Starting at position 1252 of SEQ ID NO: 318755
ggaagauucgggcaccuga

SEQ ID NO: 417014 - RNA, 19 nt, Artificial Sequence
  Description of Artificial Sequence: Synthetic oligonucleotide
  Antisense Strand to SEQ ID NO: 417013
ucaggugcccgaaucuucc

SEQ ID NO: 417015 - RNA, 19 nt, Artificial Sequence
  Description of Artificial Sequence: Synthetic oligonucleotide
  Sense Strand Starting at position 1252 of SEQ ID NO: 318769
ccugauaaaucaguuugag

SEQ ID NO: 417016 - RNA, 19 nt, Artificial Sequence
  Description of Artificial Sequence: Synthetic oligonucleotide
  Antisense Strand to SEQ ID NO: 417015
cucaaacugauuuaucagg

SEQ ID NO: 417017 - RNA, 19 nt, Artificial Sequence
  Description of Artificial Sequence: Synthetic oligonucleotide
  Sense Strand Starting at position 1252 of SEQ ID NO: 318799
uaguuauggccuugaggag

SEQ ID NO: 417018 - RNA, 19 nt, Artificial Sequence
  Description of Artificial Sequence: Synthetic oligonucleotide
  Antisense Strand to SEQ ID NO: 417017
cuccucaaggccauaacua

SEQ ID NO: 417019 - RNA, 19 nt, Artificial Sequence
  Description of Artificial Sequence: Synthetic oligonucleotide
  Sense Strand Starting at position 1252 of SEQ ID NO: 318800
aguuauggccuugaggagu

SEQ ID NO: 417020 - RNA, 19 nt, Artificial Sequence
  Description of Artificial Sequence: Synthetic oligonucleotide
  Antisense Strand to SEQ ID NO: 417019
acuccucaaggccauaacu

SEQ ID NO: 417021 - RNA, 19 nt, Artificial Sequence
  Description of Artificial Sequence: Synthetic oligonucleotide
  Sense Strand Starting at position 1252 of SEQ ID NO: 318821
agcuuugguccugaaagag

SEQ ID NO: 417022 - RNA, 19 nt, Artificial Sequence
  Description of Artificial Sequence: Synthetic oligonucleotide
  Antisense Strand to SEQ ID NO: 417021
cucuuucaggaccaaagcu

SEQ ID NO: 417023 - RNA, 19 nt, Artificial Sequence
  Description of Artificial Sequence: Synthetic oligonucleotide
  Sense Strand Starting at position 1252 of SEQ ID NO: 318940
cgagcuuacagaggacauu

SEQ ID NO: 417024 - RNA, 19 nt, Artificial Sequence
  Description of Artificial Sequence: Synthetic oligonucleotide
  Antisense Strand to SEQ ID NO: 417023
aauguccucuguaagcucg

SEQ ID NO: 417025 - RNA, 19 nt, Artificial Sequence
  Description of Artificial Sequence: Synthetic oligonucleotide
  Sense Strand Starting at position 1252 of SEQ ID NO: 318970
ggguuucaggacuggaaau

SEQ ID NO: 417026 - RNA, 19 nt, Artificial Sequence
  Description of Artificial Sequence: Synthetic oligonucleotide
  Antisense Strand to SEQ ID NO: 417025
auuuccaguccugaaaccc

SEQ ID NO: 417027 - RNA, 19 nt, Artificial Sequence
  Description of Artificial Sequence: Synthetic oligonucleotide
  Sense Strand Starting at position 1252 of SEQ ID NO: 319107
aauuauuauuggcugugaa

SEQ ID NO: 417028 - RNA, 19 nt, Artificial Sequence
  Description of Artificial Sequence: Synthetic oligonucleotide
  Antisense Strand to SEQ ID NO: 417027
uucacagccaauaauaauu

SEQ ID NO: 417029 - RNA, 19 nt, Artificial Sequence
  Description of Artificial Sequence: Synthetic oligonucleotide
  Sense Strand Starting at position 1252 of SEQ ID NO: 319188
ucagaaguaucucucagag

SEQ ID NO: 417030 - RNA, 19 nt, Artificial Sequence
  Description of Artificial Sequence: Synthetic oligonucleotide
  Antisense Strand to SEQ ID NO: 417029
cucugagagauacuucuga

SEQ ID NO: 417031 - RNA, 19 nt, Artificial Sequence
  Description of Artificial Sequence: Synthetic oligonucleotide
  Sense Strand Starting at position 1253 of SEQ ID NO: 317259
cagggcugccucugagaca

SEQ ID NO: 417032 - RNA, 19 nt, Artificial Sequence
  Description of Artificial Sequence: Synthetic oligonucleotide
  Antisense Strand to SEQ ID NO: 417031
ugucucagaggcagcccug

SEQ ID NO: 417033 - RNA, 19 nt, Artificial Sequence
  Description of Artificial Sequence: Synthetic oligonucleotide
  Sense Strand Starting at position 1253 of SEQ ID NO: 317260
agggcugccucugagacaa

SEQ ID NO: 417034 - RNA, 19 nt, Artificial Sequence
  Description of Artificial Sequence: Synthetic oligonucleotide
  Antisense Strand to SEQ ID NO: 417033
uugucucagaggcagcccu

SEQ ID NO: 417035 - RNA, 19 nt, Artificial Sequence
  Description of Artificial Sequence: Synthetic oligonucleotide
  Sense Strand Starting at position 1253 of SEQ ID NO: 317498
aucccaauaugcuuggaga

SEQ ID NO: 417036 - RNA, 19 nt, Artificial Sequence
  Description of Artificial Sequence: Synthetic oligonucleotide
  Antisense Strand to SEQ ID NO: 417035
ucuccaagcauauugggau

SEQ ID NO: 417037 - RNA, 19 nt, Artificial Sequence
  Description of Artificial Sequence: Synthetic oligonucleotide
  Sense Strand Starting at position 1253 of SEQ ID NO: 317499
ucccaauaugcuuggagaa

SEQ ID NO: 417038 - RNA, 19 nt, Artificial Sequence
  Description of Artificial Sequence: Synthetic oligonucleotide
  Antisense Strand to SEQ ID NO: 417037
uucuccaagcauauuggga

SEQ ID NO: 417039 - RNA, 19 nt, Artificial Sequence
  Description of Artificial Sequence: Synthetic oligonucleotide
  Sense Strand Starting at position 1253 of SEQ ID NO: 317500
cccaauaugcuuggagaag

SEQ ID NO: 417040 - RNA, 19 nt, Artificial Sequence
  Description of Artificial Sequence: Synthetic oligonucleotide
  Antisense Strand to SEQ ID NO: 417039
cuucuccaagcauauuggg

SEQ ID NO: 417041 - RNA, 19 nt, Artificial Sequence
  Description of Artificial Sequence: Synthetic oligonucleotide
  Sense Strand Starting at position 1253 of SEQ ID NO: 317501
ccaauaugcuuggagaaga

SEQ ID NO: 417042 - RNA, 19 nt, Artificial Sequence
  Description of Artificial Sequence: Synthetic oligonucleotide
  Antisense Strand to SEQ ID NO: 417041
ucuucuccaagcauauugg

SEQ ID NO: 417043 - RNA, 19 nt, Artificial Sequence
  Description of Artificial Sequence: Synthetic oligonucleotide
  Sense Strand Starting at position 1253 of SEQ ID NO: 318193
gguuccauccugggcagaa

SEQ ID NO: 417044 - RNA, 19 nt, Artificial Sequence
  Description of Artificial Sequence: Synthetic oligonucleotide
  Antisense Strand to SEQ ID NO: 417043
uucugcccaggauggaacc

SEQ ID NO: 417045 - RNA, 19 nt, Artificial Sequence
  Description of Artificial Sequence: Synthetic oligonucleotide
  Sense Strand Starting at position 1253 of SEQ ID NO: 318268
gcaacuguuugucugcaca

SEQ ID NO: 417046 - RNA, 19 nt, Artificial Sequence
  Description of Artificial Sequence: Synthetic oligonucleotide
  Antisense Strand to SEQ ID NO: 417045
ugugcagacaaacaguugc

SEQ ID NO: 417047 - RNA, 19 nt, Artificial Sequence
  Description of Artificial Sequence: Synthetic oligonucleotide
  Sense Strand Starting at position 1253 of SEQ ID NO: 318271
acuguuugucugcacaaau

SEQ ID NO: 417048 - RNA, 19 nt, Artificial Sequence
  Description of Artificial Sequence: Synthetic oligonucleotide
  Antisense Strand to SEQ ID NO: 417047
auuugugcagacaaacagu

SEQ ID NO: 417049 - RNA, 19 nt, Artificial Sequence
  Description of Artificial Sequence: Synthetic oligonucleotide
  Sense Strand Starting at position 1253 of SEQ ID NO: 318340
acucaugugucaccagcaa

SEQ ID NO: 417050 - RNA, 19 nt, Artificial Sequence
  Description of Artificial Sequence: Synthetic oligonucleotide
  Antisense Strand to SEQ ID NO: 417049
uugcuggugacacaugagu

SEQ ID NO: 417051 - RNA, 19 nt, Artificial Sequence
  Description of Artificial Sequence: Synthetic oligonucleotide
  Sense Strand Starting at position 1253 of SEQ ID NO: 318431
ugccaaguccugucugcau

SEQ ID NO: 417052 - RNA, 19 nt, Artificial Sequence
  Description of Artificial Sequence: Synthetic oligonucleotide
  Antisense Strand to SEQ ID NO: 417051
augcagacaggacuuggca

SEQ ID NO: 417053 - RNA, 19 nt, Artificial Sequence
  Description of Artificial Sequence: Synthetic oligonucleotide
  Sense Strand Starting at position 1253 of SEQ ID NO: 318480
gaguuuaccucuuuaguug

SEQ ID NO: 417054 - RNA, 19 nt, Artificial Sequence
  Description of Artificial Sequence: Synthetic oligonucleotide
  Antisense Strand to SEQ ID NO: 417053
caacuaaagagguaaacuc

SEQ ID NO: 417055 - RNA, 19 nt, Artificial Sequence
  Description of Artificial Sequence: Synthetic oligonucleotide
  Sense Strand Starting at position 1253 of SEQ ID NO: 318488
cucuuuaguugcuuuauca

SEQ ID NO: 417056 - RNA, 19 nt, Artificial Sequence
  Description of Artificial Sequence: Synthetic oligonucleotide
  Antisense Strand to SEQ ID NO: 417055
ugauaaagcaacuaaagag

SEQ ID NO: 417057 - RNA, 19 nt, Artificial Sequence
  Description of Artificial Sequence: Synthetic oligonucleotide
  Sense Strand Starting at position 1253 of SEQ ID NO: 318524
gaauuaaagcuccguuucu

SEQ ID NO: 417058 - RNA, 19 nt, Artificial Sequence
  Description of Artificial Sequence: Synthetic oligonucleotide
  Antisense Strand to SEQ ID NO: 417057
agaaacggagcuuuaauuc

SEQ ID NO: 417059 - RNA, 19 nt, Artificial Sequence
  Description of Artificial Sequence: Synthetic oligonucleotide
  Sense Strand Starting at position 1253 of SEQ ID NO: 318536
cguuucuccucagcggaaa

SEQ ID NO: 417060 - RNA, 19 nt, Artificial Sequence
  Description of Artificial Sequence: Synthetic oligonucleotide
  Antisense Strand to SEQ ID NO: 417059
uuuccgcugaggagaaacg

SEQ ID NO: 417061 - RNA, 19 nt, Artificial Sequence
  Description of Artificial Sequence: Synthetic oligonucleotide
  Sense Strand Starting at position 1253 of SEQ ID NO: 318556
aaaggagauucuguugguu

SEQ ID NO: 417062 - RNA, 19 nt, Artificial Sequence
  Description of Artificial Sequence: Synthetic oligonucleotide
  Antisense Strand to SEQ ID NO: 417061
aaccaacagaaucuccuuu

SEQ ID NO: 417063 - RNA, 19 nt, Artificial Sequence
  Description of Artificial Sequence: Synthetic oligonucleotide
  Sense Strand Starting at position 1253 of SEQ ID NO: 318558
aggagauucuguugguucu

SEQ ID NO: 417064 - RNA, 19 nt, Artificial Sequence
  Description of Artificial Sequence: Synthetic oligonucleotide
  Antisense Strand to SEQ ID NO: 417063
agaaccaacagaaucuccu

SEQ ID NO: 417065 - RNA, 19 nt, Artificial Sequence
  Description of Artificial Sequence: Synthetic oligonucleotide
  Sense Strand Starting at position 1253 of SEQ ID NO: 318559
ggagauucuguugguucuu

SEQ ID NO: 417066 - RNA, 19 nt, Artificial Sequence
  Description of Artificial Sequence: Synthetic oligonucleotide
  Antisense Strand to SEQ ID NO: 417065
aagaaccaacagaaucucc

SEQ ID NO: 417067 - RNA, 19 nt, Artificial Sequence
  Description of Artificial Sequence: Synthetic oligonucleotide
  Sense Strand Starting at position 1253 of SEQ ID NO: 318560
gagauucuguugguucuua

SEQ ID NO: 417068 - RNA, 19 nt, Artificial Sequence
  Description of Artificial Sequence: Synthetic oligonucleotide
  Antisense Strand to SEQ ID NO: 417067
uaagaaccaacagaaucuc

SEQ ID NO: 417069 - RNA, 19 nt, Artificial Sequence
  Description of Artificial Sequence: Synthetic oligonucleotide
  Sense Strand Starting at position 1253 of SEQ ID NO: 318564
uucuguugguucuuaggau

SEQ ID NO: 417070 - RNA, 19 nt, Artificial Sequence
  Description of Artificial Sequence: Synthetic oligonucleotide
  Antisense Strand to SEQ ID NO: 417069
auccuaagaaccaacagaa

SEQ ID NO: 417071 - RNA, 19 nt, Artificial Sequence
  Description of Artificial Sequence: Synthetic oligonucleotide
  Sense Strand Starting at position 1253 of SEQ ID NO: 318744
gggugcccuuucucauaaa

SEQ ID NO: 417072 - RNA, 19 nt, Artificial Sequence
  Description of Artificial Sequence: Synthetic oligonucleotide
  Antisense Strand to SEQ ID NO: 417071
uuuaugagaaagggcaccc

SEQ ID NO: 417073 - RNA, 19 nt, Artificial Sequence
  Description of Artificial Sequence: Synthetic oligonucleotide
  Sense Strand Starting at position 1253 of SEQ ID NO: 318747
ugcccuuucucauaaagag

SEQ ID NO: 417074 - RNA, 19 nt, Artificial Sequence
  Description of Artificial Sequence: Synthetic oligonucleotide
  Antisense Strand to SEQ ID NO: 417073
cucuuuaugagaaagggca

SEQ ID NO: 417075 - RNA, 19 nt, Artificial Sequence
  Description of Artificial Sequence: Synthetic oligonucleotide
  Sense Strand Starting at position 1253 of SEQ ID NO: 318867
ugcuuuaccugagugggaa

SEQ ID NO: 417076 - RNA, 19 nt, Artificial Sequence
  Description of Artificial Sequence: Synthetic oligonucleotide
  Antisense Strand to SEQ ID NO: 417075
uucccacucagguaaagca

SEQ ID NO: 417077 - RNA, 19 nt, Artificial Sequence
  Description of Artificial Sequence: Synthetic oligonucleotide
  Sense Strand Starting at position 1253 of SEQ ID NO: 319099
uugagcaagucaguaugaa

SEQ ID NO: 417078 - RNA, 19 nt, Artificial Sequence
  Description of Artificial Sequence: Synthetic oligonucleotide
  Antisense Strand to SEQ ID NO: 417077
uucauacugacuugcucaa

SEQ ID NO: 417079 - RNA, 19 nt, Artificial Sequence
  Description of Artificial Sequence: Synthetic oligonucleotide
  Sense Strand Starting at position 1253 of SEQ ID NO: 319100
ugagcaagucaguaugaac

SEQ ID NO: 417080 - RNA, 19 nt, Artificial Sequence
  Description of Artificial Sequence: Synthetic oligonucleotide
  Antisense Strand to SEQ ID NO: 417079
guucauacugacuugcuca

SEQ ID NO: 417081 - RNA, 19 nt, Artificial Sequence
  Description of Artificial Sequence: Synthetic oligonucleotide
  Sense Strand Starting at position 1253 of SEQ ID NO: 319108
ucaguaugaacaggugagu

SEQ ID NO: 417082 - RNA, 19 nt, Artificial Sequence
  Description of Artificial Sequence: Synthetic oligonucleotide
  Antisense Strand to SEQ ID NO: 417081
acucaccuguucauacuga

SEQ ID NO: 417083 - RNA, 19 nt, Artificial Sequence
  Description of Artificial Sequence: Synthetic oligonucleotide
  Sense Strand Starting at position 1253 of SEQ ID NO: 319205
gggcacuuccacugcaaga

SEQ ID NO: 417084 - RNA, 19 nt, Artificial Sequence
  Description of Artificial Sequence: Synthetic oligonucleotide
  Antisense Strand to SEQ ID NO: 417083
ucuugcaguggaagugccc

SEQ ID NO: 417085 - RNA, 19 nt, Artificial Sequence
  Description of Artificial Sequence: Synthetic oligonucleotide
  Sense Strand Starting at position 1253 of SEQ ID NO: 319207
gcacuuccacugcaagacu

SEQ ID NO: 417086 - RNA, 19 nt, Artificial Sequence
  Description of Artificial Sequence: Synthetic oligonucleotide
  Antisense Strand to SEQ ID NO: 417085
agucuugcaguggaagugc

SEQ ID NO: 417087 - RNA, 19 nt, Artificial Sequence
  Description of Artificial Sequence: Synthetic oligonucleotide
  Sense Strand Starting at position 1254 of SEQ ID NO: 315246
aagaucaaacagugugaua

SEQ ID NO: 417088 - RNA, 19 nt, Artificial Sequence
  Description of Artificial Sequence: Synthetic oligonucleotide
  Antisense Strand to SEQ ID NO: 417087
uaucacacuguuugaucuu

SEQ ID NO: 417089 - RNA, 19 nt, Artificial Sequence
  Description of Artificial Sequence: Synthetic oligonucleotide
  Sense Strand Starting at position 1254 of SEQ ID NO: 315259
gugauaagguguuugaagu

SEQ ID NO: 417090 - RNA, 19 nt, Artificial Sequence
  Description of Artificial Sequence: Synthetic oligonucleotide
  Antisense Strand to SEQ ID NO: 417089
acuucaaacaccuuaucac

SEQ ID NO: 417091 - RNA, 19 nt, Artificial Sequence
  Description of Artificial Sequence: Synthetic oligonucleotide
  Sense Strand Starting at position 1254 of SEQ ID NO: 315260
ugauaagguguuugaagug

SEQ ID NO: 417092 - RNA, 19 nt, Artificial Sequence
  Description of Artificial Sequence: Synthetic oligonucleotide
  Antisense Strand to SEQ ID NO: 417091
cacuucaaacaccuuauca

SEQ ID NO: 417093 - RNA, 19 nt, Artificial Sequence
  Description of Artificial Sequence: Synthetic oligonucleotide
  Sense Strand Starting at position 1254 of SEQ ID NO: 315284
aauagugucuggcacagaa

SEQ ID NO: 417094 - RNA, 19 nt, Artificial Sequence
  Description of Artificial Sequence: Synthetic oligonucleotide
  Antisense Strand to SEQ ID NO: 417093
uucugugccagacacuauu

SEQ ID NO: 417095 - RNA, 19 nt, Artificial Sequence
  Description of Artificial Sequence: Synthetic oligonucleotide
  Sense Strand Starting at position 1254 of SEQ ID NO: 315303
gugccuagacaguaguaau

SEQ ID NO: 417096 - RNA, 19 nt, Artificial Sequence
  Description of Artificial Sequence: Synthetic oligonucleotide
  Antisense Strand to SEQ ID NO: 417095
auuacuacugucuaggcac

SEQ ID NO: 417097 - RNA, 19 nt, Artificial Sequence
  Description of Artificial Sequence: Synthetic oligonucleotide
  Sense Strand Starting at position 1254 of SEQ ID NO: 315379
gggccugcucucugugaaa

SEQ ID NO: 417098 - RNA, 19 nt, Artificial Sequence
  Description of Artificial Sequence: Synthetic oligonucleotide
  Antisense Strand to SEQ ID NO: 417097
uuucacagagagcaggccc

SEQ ID NO: 417099 - RNA, 19 nt, Artificial Sequence
  Description of Artificial Sequence: Synthetic oligonucleotide
  Sense Strand Starting at position 1254 of SEQ ID NO: 315381
gccugcucucugugaaaua

SEQ ID NO: 417100 - RNA, 19 nt, Artificial Sequence
  Description of Artificial Sequence: Synthetic oligonucleotide
  Antisense Strand to SEQ ID NO: 417099
uauuucacagagagcaggc

SEQ ID NO: 417101 - RNA, 19 nt, Artificial Sequence
  Description of Artificial Sequence: Synthetic oligonucleotide
  Sense Strand Starting at position 1254 of SEQ ID NO: 315382
ccugcucucugugaaauau

SEQ ID NO: 417102 - RNA, 19 nt, Artificial Sequence
  Description of Artificial Sequence: Synthetic oligonucleotide
  Antisense Strand to SEQ ID NO: 417101
auauuucacagagagcagg

SEQ ID NO: 417103 - RNA, 19 nt, Artificial Sequence
  Description of Artificial Sequence: Synthetic oligonucleotide
  Sense Strand Starting at position 1254 of SEQ ID NO: 315391
ugugaaauauucccagcau

SEQ ID NO: 417104 - RNA, 19 nt, Artificial Sequence
  Description of Artificial Sequence: Synthetic oligonucleotide
  Antisense Strand to SEQ ID NO: 417103
augcugggaauauuucaca

SEQ ID NO: 417105 - RNA, 19 nt, Artificial Sequence
  Description of Artificial Sequence: Synthetic oligonucleotide
  Sense Strand Starting at position 1254 of SEQ ID NO: 315392
gugaaauauucccagcauu

SEQ ID NO: 417106 - RNA, 19 nt, Artificial Sequence
  Description of Artificial Sequence: Synthetic oligonucleotide
  Antisense Strand to SEQ ID NO: 417105
aaugcugggaauauuucac

SEQ ID NO: 417107 - RNA, 19 nt, Artificial Sequence
  Description of Artificial Sequence: Synthetic oligonucleotide
  Sense Strand Starting at position 1254 of SEQ ID NO: 316050
cccaguucugcuugcgcaa

SEQ ID NO: 417108 - RNA, 19 nt, Artificial Sequence
  Description of Artificial Sequence: Synthetic oligonucleotide
  Antisense Strand to SEQ ID NO: 417107
uugcgcaagcagaacuggg

SEQ ID NO: 417109 - RNA, 19 nt, Artificial Sequence
  Description of Artificial Sequence: Synthetic oligonucleotide
  Sense Strand Starting at position 1254 of SEQ ID NO: 316163
gagugcaaccauugagauu

SEQ ID NO: 417110 - RNA, 19 nt, Artificial Sequence
  Description of Artificial Sequence: Synthetic oligonucleotide
  Antisense Strand to SEQ ID NO: 417109
aaucucaaugguugcacuc

SEQ ID NO: 417111 - RNA, 19 nt, Artificial Sequence
  Description of Artificial Sequence: Synthetic oligonucleotide
  Sense Strand Starting at position 1254 of SEQ ID NO: 316294
acgcgaagaucccauuucu

SEQ ID NO: 417112 - RNA, 19 nt, Artificial Sequence
  Description of Artificial Sequence: Synthetic oligonucleotide
  Antisense Strand to SEQ ID NO: 417111
agaaaugggaucuucgcgu

SEQ ID NO: 417113 - RNA, 19 nt, Artificial Sequence
  Description of Artificial Sequence: Synthetic oligonucleotide
  Sense Strand Starting at position 1254 of SEQ ID NO: 316349
uugcaaagcuaagauucua

SEQ ID NO: 417114 - RNA, 19 nt, Artificial Sequence
  Description of Artificial Sequence: Synthetic oligonucleotide
  Antisense Strand to SEQ ID NO: 417113
uagaaucuuagcuuugcaa

SEQ ID NO: 417115 - RNA, 19 nt, Artificial Sequence
  Description of Artificial Sequence: Synthetic oligonucleotide
  Sense Strand Starting at position 1254 of SEQ ID NO: 316387
augacuaagccaggaaucu

SEQ ID NO: 417116 - RNA, 19 nt, Artificial Sequence
  Description of Artificial Sequence: Synthetic oligonucleotide
  Antisense Strand to SEQ ID NO: 417115
agauuccuggcuuagucau

SEQ ID NO: 417117 - RNA, 19 nt, Artificial Sequence
  Description of Artificial Sequence: Synthetic oligonucleotide
  Sense Strand Starting at position 1254 of SEQ ID NO: 316445
uauuucuagcguugagauu

SEQ ID NO: 417118 - RNA, 19 nt, Artificial Sequence
  Description of Artificial Sequence: Synthetic oligonucleotide
  Antisense Strand to SEQ ID NO: 417117
aaucucaacgcuagaaaua

SEQ ID NO: 417119 - RNA, 19 nt, Artificial Sequence
  Description of Artificial Sequence: Synthetic oligonucleotide
  Sense Strand Starting at position 1254 of SEQ ID NO: 316451
uagcguugagauugggauu

SEQ ID NO: 417120 - RNA, 19 nt, Artificial Sequence
  Description of Artificial Sequence: Synthetic oligonucleotide
  Antisense Strand to SEQ ID NO: 417119
aaucccaaucucaacgcua

SEQ ID NO: 417121 - RNA, 19 nt, Artificial Sequence
  Description of Artificial Sequence: Synthetic oligonucleotide
  Sense Strand Starting at position 1254 of SEQ ID NO: 316454
cguugagauugggauucga

SEQ ID NO: 417122 - RNA, 19 nt, Artificial Sequence
  Description of Artificial Sequence: Synthetic oligonucleotide
  Antisense Strand to SEQ ID NO: 417121
ucgaaucccaaucucaacg

SEQ ID NO: 417123 - RNA, 19 nt, Artificial Sequence
  Description of Artificial Sequence: Synthetic oligonucleotide
  Sense Strand Starting at position 1254 of SEQ ID NO: 317611
ugugucauuccuggcuagu

SEQ ID NO: 417124 - RNA, 19 nt, Artificial Sequence
  Description of Artificial Sequence: Synthetic oligonucleotide
  Antisense Strand to SEQ ID NO: 417123
acuagccaggaaugacaca

SEQ ID NO: 417125 - RNA, 19 nt, Artificial Sequence
  Description of Artificial Sequence: Synthetic oligonucleotide
  Sense Strand Starting at position 1254 of SEQ ID NO: 317744
gauugacuuccacaguguu

SEQ ID NO: 417126 - RNA, 19 nt, Artificial Sequence
  Description of Artificial Sequence: Synthetic oligonucleotide
  Antisense Strand to SEQ ID NO: 417125
aacacuguggaagucaauc

SEQ ID NO: 417127 - RNA, 19 nt, Artificial Sequence
  Description of Artificial Sequence: Synthetic oligonucleotide
  Sense Strand Starting at position 1254 of SEQ ID NO: 317987
acaggaaucuauuggaguu

SEQ ID NO: 417128 - RNA, 19 nt, Artificial Sequence
  Description of Artificial Sequence: Synthetic oligonucleotide
  Antisense Strand to SEQ ID NO: 417127
aacuccaauagauuccugu

SEQ ID NO: 417129 - RNA, 19 nt, Artificial Sequence
  Description of Artificial Sequence: Synthetic oligonucleotide
  Sense Strand Starting at position 1254 of SEQ ID NO: 318077
ccgagucaguucccaaagu

SEQ ID NO: 417130 - RNA, 19 nt, Artificial Sequence
  Description of Artificial Sequence: Synthetic oligonucleotide
  Antisense Strand to SEQ ID NO: 417129
acuuugggaacugacucgg

SEQ ID NO: 417131 - RNA, 19 nt, Artificial Sequence
  Description of Artificial Sequence: Synthetic oligonucleotide
  Sense Strand Starting at position 1254 of SEQ ID NO: 318201
gcaaucugaccucacugua

SEQ ID NO: 417132 - RNA, 19 nt, Artificial Sequence
  Description of Artificial Sequence: Synthetic oligonucleotide
  Antisense Strand to SEQ ID NO: 417131
uacagugaggucagauugc

SEQ ID NO: 417133 - RNA, 19 nt, Artificial Sequence
  Description of Artificial Sequence: Synthetic oligonucleotide
  Sense Strand Starting at position 1254 of SEQ ID NO: 318332
gauggagucuucuuaugcu

SEQ ID NO: 417134 - RNA, 19 nt, Artificial Sequence
  Description of Artificial Sequence: Synthetic oligonucleotide
  Antisense Strand to SEQ ID NO: 417133
agcauaagaagacuccauc

SEQ ID NO: 417135 - RNA, 19 nt, Artificial Sequence
  Description of Artificial Sequence: Synthetic oligonucleotide
  Sense Strand Starting at position 1254 of SEQ ID NO: 318477
gugucagacuccuugguag

SEQ ID NO: 417136 - RNA, 19 nt, Artificial Sequence
  Description of Artificial Sequence: Synthetic oligonucleotide
  Antisense Strand to SEQ ID NO: 417135
cuaccaaggagucugacac

SEQ ID NO: 417137 - RNA, 19 nt, Artificial Sequence
  Description of Artificial Sequence: Synthetic oligonucleotide
  Sense Strand Starting at position 1254 of SEQ ID NO: 318479
gucagacuccuugguaggu

SEQ ID NO: 417138 - RNA, 19 nt, Artificial Sequence
  Description of Artificial Sequence: Synthetic oligonucleotide
  Antisense Strand to SEQ ID NO: 417137
accuaccaaggagucugac

SEQ ID NO: 417139 - RNA, 19 nt, Artificial Sequence
  Description of Artificial Sequence: Synthetic oligonucleotide
  Sense Strand Starting at position 1254 of SEQ ID NO: 318670
acacaaugacgaggguaua

SEQ ID NO: 417140 - RNA, 19 nt, Artificial Sequence
  Description of Artificial Sequence: Synthetic oligonucleotide
  Antisense Strand to SEQ ID NO: 417139
uauacccucgucauugugu

SEQ ID NO: 417141 - RNA, 19 nt, Artificial Sequence
  Description of Artificial Sequence: Synthetic oligonucleotide
  Sense Strand Starting at position 1254 of SEQ ID NO: 318671
cacaaugacgaggguauaa

SEQ ID NO: 417142 - RNA, 19 nt, Artificial Sequence
  Description of Artificial Sequence: Synthetic oligonucleotide
  Antisense Strand to SEQ ID NO: 417141
uuauacccucgucauugug

SEQ ID NO: 417143 - RNA, 19 nt, Artificial Sequence
  Description of Artificial Sequence: Synthetic oligonucleotide
  Sense Strand Starting at position 1254 of SEQ ID NO: 318683
gguauaaauugauccaauc

SEQ ID NO: 417144 - RNA, 19 nt, Artificial Sequence
  Description of Artificial Sequence: Synthetic oligonucleotide
  Antisense Strand to SEQ ID NO: 417143
gauuggaucaauuuauacc

SEQ ID NO: 417145 - RNA, 19 nt, Artificial Sequence
  Description of Artificial Sequence: Synthetic oligonucleotide
  Sense Strand Starting at position 1254 of SEQ ID NO: 318731
auauguaccuuccaugaga

SEQ ID NO: 417146 - RNA, 19 nt, Artificial Sequence
  Description of Artificial Sequence: Synthetic oligonucleotide
  Antisense Strand to SEQ ID NO: 417145
ucucauggaagguacauau

SEQ ID NO: 417147 - RNA, 19 nt, Artificial Sequence
  Description of Artificial Sequence: Synthetic oligonucleotide
  Sense Strand Starting at position 1254 of SEQ ID NO: 318733
auguaccuuccaugagaca

SEQ ID NO: 417148 - RNA, 19 nt, Artificial Sequence
  Description of Artificial Sequence: Synthetic oligonucleotide
  Antisense Strand to SEQ ID NO: 417147
ugucucauggaagguacau

SEQ ID NO: 417149 - RNA, 19 nt, Artificial Sequence
  Description of Artificial Sequence: Synthetic oligonucleotide
  Sense Strand Starting at position 1254 of SEQ ID NO: 318790
cuauauacaugagaaugua

SEQ ID NO: 417150 - RNA, 19 nt, Artificial Sequence
  Description of Artificial Sequence: Synthetic oligonucleotide
  Antisense Strand to SEQ ID NO: 417149
uacauucucauguauauag

SEQ ID NO: 417151 - RNA, 19 nt, Artificial Sequence
  Description of Artificial Sequence: Synthetic oligonucleotide
  Sense Strand Starting at position 1254 of SEQ ID NO: 318826
ugcagcaugguuuauacaa

SEQ ID NO: 417152 - RNA, 19 nt, Artificial Sequence
  Description of Artificial Sequence: Synthetic oligonucleotide
  Antisense Strand to SEQ ID NO: 417151
uuguauaaaccaugcugca

SEQ ID NO: 417153 - RNA, 19 nt, Artificial Sequence
  Description of Artificial Sequence: Synthetic oligonucleotide
  Sense Strand Starting at position 1254 of SEQ ID NO: 318963
augcacucauguggaauaa

SEQ ID NO: 417154 - RNA, 19 nt, Artificial Sequence
  Description of Artificial Sequence: Synthetic oligonucleotide
  Antisense Strand to SEQ ID NO: 417153
uuauuccacaugagugcau

SEQ ID NO: 417155 - RNA, 19 nt, Artificial Sequence
  Description of Artificial Sequence: Synthetic oligonucleotide
  Sense Strand Starting at position 1254 of SEQ ID NO: 318994
agaguagagaacuaugugu

SEQ ID NO: 417156 - RNA, 19 nt, Artificial Sequence
  Description of Artificial Sequence: Synthetic oligonucleotide
  Antisense Strand to SEQ ID NO: 417155
acacauaguucucuacucu

SEQ ID NO: 417157 - RNA, 19 nt, Artificial Sequence
  Description of Artificial Sequence: Synthetic oligonucleotide
  Sense Strand Starting at position 1254 of SEQ ID NO: 318996
aguagagaacuauguguau

SEQ ID NO: 417158 - RNA, 19 nt, Artificial Sequence
  Description of Artificial Sequence: Synthetic oligonucleotide
  Antisense Strand to SEQ ID NO: 417157
auacacauaguucucuacu

SEQ ID NO: 417159 - RNA, 19 nt, Artificial Sequence
  Description of Artificial Sequence: Synthetic oligonucleotide
  Sense Strand Starting at position 1254 of SEQ ID NO: 318999
agagaacuauguguauaug

SEQ ID NO: 417160 - RNA, 19 nt, Artificial Sequence
  Description of Artificial Sequence: Synthetic oligonucleotide
  Antisense Strand to SEQ ID NO: 417159
cauauacacauaguucucu

SEQ ID NO: 417161 - RNA, 19 nt, Artificial Sequence
  Description of Artificial Sequence: Synthetic oligonucleotide
  Sense Strand Starting at position 1254 of SEQ ID NO: 319013
auaugaugcugccauuugu

SEQ ID NO: 417162 - RNA, 19 nt, Artificial Sequence
  Description of Artificial Sequence: Synthetic oligonucleotide
  Antisense Strand to SEQ ID NO: 417161
acaaauggcagcaucauau

SEQ ID NO: 417163 - RNA, 19 nt, Artificial Sequence
  Description of Artificial Sequence: Synthetic oligonucleotide
  Sense Strand Starting at position 1254 of SEQ ID NO: 319029
uguggagugugaggaagau

SEQ ID NO: 417164 - RNA, 19 nt, Artificial Sequence
  Description of Artificial Sequence: Synthetic oligonucleotide
  Antisense Strand to SEQ ID NO: 417163
aucuuccucacacuccaca

SEQ ID NO: 417165 - RNA, 19 nt, Artificial Sequence
  Description of Artificial Sequence: Synthetic oligonucleotide
  Sense Strand Starting at position 1254 of SEQ ID NO: 319082
uuuguuauuguuuggagau

SEQ ID NO: 417166 - RNA, 19 nt, Artificial Sequence
  Description of Artificial Sequence: Synthetic oligonucleotide
  Antisense Strand to SEQ ID NO: 417165
aucuccaaacaauaacaaa

SEQ ID NO: 417167 - RNA, 19 nt, Artificial Sequence
  Description of Artificial Sequence: Synthetic oligonucleotide
  Sense Strand Starting at position 1255 of SEQ ID NO: 315273
ggccauucugcacauuaga

SEQ ID NO: 417168 - RNA, 19 nt, Artificial Sequence
  Description of Artificial Sequence: Synthetic oligonucleotide
  Antisense Strand to SEQ ID NO: 417167
ucuaaugugcagaauggcc

SEQ ID NO: 417169 - RNA, 19 nt, Artificial Sequence
  Description of Artificial Sequence: Synthetic oligonucleotide
  Sense Strand Starting at position 1255 of SEQ ID NO: 315314
gguugauucuaauuaauuc

SEQ ID NO: 417170 - RNA, 19 nt, Artificial Sequence
  Description of Artificial Sequence: Synthetic oligonucleotide
  Antisense Strand to SEQ ID NO: 417169
gaauuaauuagaaucaacc

SEQ ID NO: 417171 - RNA, 19 nt, Artificial Sequence
  Description of Artificial Sequence: Synthetic oligonucleotide
  Sense Strand Starting at position 1255 of SEQ ID NO: 315593
cuagacuugcaucgagaau

SEQ ID NO: 417172 - RNA, 19 nt, Artificial Sequence
  Description of Artificial Sequence: Synthetic oligonucleotide
  Antisense Strand to SEQ ID NO: 417171
auucucgaugcaagucuag

SEQ ID NO: 417173 - RNA, 19 nt, Artificial Sequence
  Description of Artificial Sequence: Synthetic oligonucleotide
  Sense Strand Starting at position 1255 of SEQ ID NO: 315602
caucgagaaucccuggauu

SEQ ID NO: 417174 - RNA, 19 nt, Artificial Sequence
  Description of Artificial Sequence: Synthetic oligonucleotide
  Antisense Strand to SEQ ID NO: 417173
aauccagggauucucgaug

SEQ ID NO: 417175 - RNA, 19 nt, Artificial Sequence
  Description of Artificial Sequence: Synthetic oligonucleotide
  Sense Strand Starting at position 1255 of SEQ ID NO: 315689
guuuaauugcaagauggau

SEQ ID NO: 417176 - RNA, 19 nt, Artificial Sequence
  Description of Artificial Sequence: Synthetic oligonucleotide
  Antisense Strand to SEQ ID NO: 417175
auccaucuugcaauuaaac

SEQ ID NO: 417177 - RNA, 19 nt, Artificial Sequence
  Description of Artificial Sequence: Synthetic oligonucleotide
  Sense Strand Starting at position 1255 of SEQ ID NO: 315941
ggguuagcacuccaaauga

SEQ ID NO: 417178 - RNA, 19 nt, Artificial Sequence
  Description of Artificial Sequence: Synthetic oligonucleotide
  Antisense Strand to SEQ ID NO: 417177
ucauuuggagugcuaaccc

SEQ ID NO: 417179 - RNA, 19 nt, Artificial Sequence
  Description of Artificial Sequence: Synthetic oligonucleotide
  Sense Strand Starting at position 1255 of SEQ ID NO: 315964
uugagacccuaaguacuau

SEQ ID NO: 417180 - RNA, 19 nt, Artificial Sequence
  Description of Artificial Sequence: Synthetic oligonucleotide
  Antisense Strand to SEQ ID NO: 417179
auaguacuuagggucucaa

SEQ ID NO: 417181 - RNA, 19 nt, Artificial Sequence
  Description of Artificial Sequence: Synthetic oligonucleotide
  Sense Strand Starting at position 1255 of SEQ ID NO: 316006
guaguaggaguucauggau

SEQ ID NO: 417182 - RNA, 19 nt, Artificial Sequence
  Description of Artificial Sequence: Synthetic oligonucleotide
  Antisense Strand to SEQ ID NO: 417181
auccaugaacuccuacuac

SEQ ID NO: 417183 - RNA, 19 nt, Artificial Sequence
  Description of Artificial Sequence: Synthetic oligonucleotide
  Sense Strand Starting at position 1255 of SEQ ID NO: 316009
guaggaguucauggaugua

SEQ ID NO: 417184 - RNA, 19 nt, Artificial Sequence
  Description of Artificial Sequence: Synthetic oligonucleotide
  Antisense Strand to SEQ ID NO: 417183
uacauccaugaacuccuac

SEQ ID NO: 417185 - RNA, 19 nt, Artificial Sequence
  Description of Artificial Sequence: Synthetic oligonucleotide
  Sense Strand Starting at position 1255 of SEQ ID NO: 316321
ggaucaguuuccucaugga

SEQ ID NO: 417186 - RNA, 19 nt, Artificial Sequence
  Description of Artificial Sequence: Synthetic oligonucleotide
  Antisense Strand to SEQ ID NO: 417185
uccaugaggaaacugaucc

SEQ ID NO: 417187 - RNA, 19 nt, Artificial Sequence
  Description of Artificial Sequence: Synthetic oligonucleotide
  Sense Strand Starting at position 1255 of SEQ ID NO: 316455
agaagagugaagugcucau

SEQ ID NO: 417188 - RNA, 19 nt, Artificial Sequence
  Description of Artificial Sequence: Synthetic oligonucleotide
  Antisense Strand to SEQ ID NO: 417187
augagcacuucacucuucu

SEQ ID NO: 417189 - RNA, 19 nt, Artificial Sequence
  Description of Artificial Sequence: Synthetic oligonucleotide
  Sense Strand Starting at position 1255 of SEQ ID NO: 316481
guuaauggcgcuuagauuu

SEQ ID NO: 417190 - RNA, 19 nt, Artificial Sequence
  Description of Artificial Sequence: Synthetic oligonucleotide
  Antisense Strand to SEQ ID NO: 417189
aaaucuaagcgccauuaac

SEQ ID NO: 417191 - RNA, 19 nt, Artificial Sequence
  Description of Artificial Sequence: Synthetic oligonucleotide
  Sense Strand Starting at position 1255 of SEQ ID NO: 316503
gcucauggucuacauacau

SEQ ID NO: 417192 - RNA, 19 nt, Artificial Sequence
  Description of Artificial Sequence: Synthetic oligonucleotide
  Antisense Strand to SEQ ID NO: 417191
auguauguagaccaugagc

SEQ ID NO: 417193 - RNA, 19 nt, Artificial Sequence
  Description of Artificial Sequence: Synthetic oligonucleotide
  Sense Strand Starting at position 1255 of SEQ ID NO: 316523
gugaccauuuaggauacaa

SEQ ID NO: 417194 - RNA, 19 nt, Artificial Sequence
  Description of Artificial Sequence: Synthetic oligonucleotide
  Antisense Strand to SEQ ID NO: 417193
uuguauccuaaauggucac

SEQ ID NO: 417195 - RNA, 19 nt, Artificial Sequence
  Description of Artificial Sequence: Synthetic oligonucleotide
  Sense Strand Starting at position 1255 of SEQ ID NO: 316682
gcacuuacgagguauggau

SEQ ID NO: 417196 - RNA, 19 nt, Artificial Sequence
  Description of Artificial Sequence: Synthetic oligonucleotide
  Antisense Strand to SEQ ID NO: 417195
auccauaccucguaagugc

SEQ ID NO: 417197 - RNA, 19 nt, Artificial Sequence
  Description of Artificial Sequence: Synthetic oligonucleotide
  Sense Strand Starting at position 1255 of SEQ ID NO: 317224
cauauaucagucugagggu

SEQ ID NO: 417198 - RNA, 19 nt, Artificial Sequence
  Description of Artificial Sequence: Synthetic oligonucleotide
  Antisense Strand to SEQ ID NO: 417197
acccucagacugauauaug

SEQ ID NO: 417199 - RNA, 19 nt, Artificial Sequence
  Description of Artificial Sequence: Synthetic oligonucleotide
  Sense Strand Starting at position 1255 of SEQ ID NO: 317233
gucugaggguauuugcuua

SEQ ID NO: 417200 - RNA, 19 nt, Artificial Sequence
  Description of Artificial Sequence: Synthetic oligonucleotide
  Antisense Strand to SEQ ID NO: 417199
uaagcaaauacccucagac

SEQ ID NO: 417201 - RNA, 19 nt, Artificial Sequence
  Description of Artificial Sequence: Synthetic oligonucleotide
  Sense Strand Starting at position 1255 of SEQ ID NO: 317237
gaggguauuugcuuauguc

SEQ ID NO: 417202 - RNA, 19 nt, Artificial Sequence
  Description of Artificial Sequence: Synthetic oligonucleotide
  Antisense Strand to SEQ ID NO: 417201
gacauaagcaaauacccuc

SEQ ID NO: 417203 - RNA, 19 nt, Artificial Sequence
  Description of Artificial Sequence: Synthetic oligonucleotide
  Sense Strand Starting at position 1255 of SEQ ID NO: 317241
guauuugcuuaugucacaa

SEQ ID NO: 417204 - RNA, 19 nt, Artificial Sequence
  Description of Artificial Sequence: Synthetic oligonucleotide
  Antisense Strand to SEQ ID NO: 417203
uugugacauaagcaaauac

SEQ ID NO: 417205 - RNA, 19 nt, Artificial Sequence
  Description of Artificial Sequence: Synthetic oligonucleotide
  Sense Strand Starting at position 1255 of SEQ ID NO: 317271
cuaccaugcuagguagaua

SEQ ID NO: 417206 - RNA, 19 nt, Artificial Sequence
  Description of Artificial Sequence: Synthetic oligonucleotide
  Antisense Strand to SEQ ID NO: 417205
uaucuaccuagcaugguag

SEQ ID NO: 417207 - RNA, 19 nt, Artificial Sequence
  Description of Artificial Sequence: Synthetic oligonucleotide
  Sense Strand Starting at position 1255 of SEQ ID NO: 317377
augagcauccuggaaguuu

SEQ ID NO: 417208 - RNA, 19 nt, Artificial Sequence
  Description of Artificial Sequence: Synthetic oligonucleotide
  Antisense Strand to SEQ ID NO: 417207
aaacuuccaggaugcucau

SEQ ID NO: 417209 - RNA, 19 nt, Artificial Sequence
  Description of Artificial Sequence: Synthetic oligonucleotide
  Sense Strand Starting at position 1255 of SEQ ID NO: 317396
aguugucauuugucaccuu

SEQ ID NO: 417210 - RNA, 19 nt, Artificial Sequence
  Description of Artificial Sequence: Synthetic oligonucleotide
  Antisense Strand to SEQ ID NO: 417209
aaggugacaaaugacaacu

SEQ ID NO: 417211 - RNA, 19 nt, Artificial Sequence
  Description of Artificial Sequence: Synthetic oligonucleotide
  Sense Strand Starting at position 1255 of SEQ ID NO: 317454
uuugguguucugccugcaa

SEQ ID NO: 417212 - RNA, 19 nt, Artificial Sequence
  Description of Artificial Sequence: Synthetic oligonucleotide
  Antisense Strand to SEQ ID NO: 417211
uugcaggcagaacaccaaa

SEQ ID NO: 417213 - RNA, 19 nt, Artificial Sequence
  Description of Artificial Sequence: Synthetic oligonucleotide
  Sense Strand Starting at position 1255 of SEQ ID NO: 317495
uaugucuucguagacugaa

SEQ ID NO: 417214 - RNA, 19 nt, Artificial Sequence
  Description of Artificial Sequence: Synthetic oligonucleotide
  Antisense Strand to SEQ ID NO: 417213
uucagucuacgaagacaua

SEQ ID NO: 417215 - RNA, 19 nt, Artificial Sequence
  Description of Artificial Sequence: Synthetic oligonucleotide
  Sense Strand Starting at position 1255 of SEQ ID NO: 317507
gacugaaaggcuuggguau

SEQ ID NO: 417216 - RNA, 19 nt, Artificial Sequence
  Description of Artificial Sequence: Synthetic oligonucleotide
  Antisense Strand to SEQ ID NO: 417215
auacccaagccuuucaguc

SEQ ID NO: 417217 - RNA, 19 nt, Artificial Sequence
  Description of Artificial Sequence: Synthetic oligonucleotide
  Sense Strand Starting at position 1255 of SEQ ID NO: 317513
aaggcuuggguaugguuaa

SEQ ID NO: 417218 - RNA, 19 nt, Artificial Sequence
  Description of Artificial Sequence: Synthetic oligonucleotide
  Antisense Strand to SEQ ID NO: 417217
uuaaccauacccaagccuu

SEQ ID NO: 417219 - RNA, 19 nt, Artificial Sequence
  Description of Artificial Sequence: Synthetic oligonucleotide
  Sense Strand Starting at position 1255 of SEQ ID NO: 317520
ggguaugguuaauuagaaa

SEQ ID NO: 417220 - RNA, 19 nt, Artificial Sequence
  Description of Artificial Sequence: Synthetic oligonucleotide
  Antisense Strand to SEQ ID NO: 417219
uuucuaauuaaccauaccc

SEQ ID NO: 417221 - RNA, 19 nt, Artificial Sequence
  Description of Artificial Sequence: Synthetic oligonucleotide
  Sense Strand Starting at position 1255 of SEQ ID NO: 317558
ccacauguuagaggaauug

SEQ ID NO: 417222 - RNA, 19 nt, Artificial Sequence
  Description of Artificial Sequence: Synthetic oligonucleotide
  Antisense Strand to SEQ ID NO: 417221
caauuccucuaacaugugg

SEQ ID NO: 417223 - RNA, 19 nt, Artificial Sequence
  Description of Artificial Sequence: Synthetic oligonucleotide
  Sense Strand Starting at position 1255 of SEQ ID NO: 317727
ugcauagucgcugcucauu

SEQ ID NO: 417224 - RNA, 19 nt, Artificial Sequence
  Description of Artificial Sequence: Synthetic oligonucleotide
  Antisense Strand to SEQ ID NO: 417223
aaugagcagcgacuaugca

SEQ ID NO: 417225 - RNA, 19 nt, Artificial Sequence
  Description of Artificial Sequence: Synthetic oligonucleotide
  Sense Strand Starting at position 1255 of SEQ ID NO: 317901
cuaguauaugcucaguauu

SEQ ID NO: 417226 - RNA, 19 nt, Artificial Sequence
  Description of Artificial Sequence: Synthetic oligonucleotide
  Antisense Strand to SEQ ID NO: 417225
aauacugagcauauacuag

SEQ ID NO: 417227 - RNA, 19 nt, Artificial Sequence
  Description of Artificial Sequence: Synthetic oligonucleotide
  Sense Strand Starting at position 1255 of SEQ ID NO: 317909
ugcucaguauuccuagaaa

SEQ ID NO: 417228 - RNA, 19 nt, Artificial Sequence
  Description of Artificial Sequence: Synthetic oligonucleotide
  Antisense Strand to SEQ ID NO: 417227
uuucuaggaauacugagca

SEQ ID NO: 417229 - RNA, 19 nt, Artificial Sequence
  Description of Artificial Sequence: Synthetic oligonucleotide
  Sense Strand Starting at position 1255 of SEQ ID NO: 318004
auggucauaguacauuaua

SEQ ID NO: 417230 - RNA, 19 nt, Artificial Sequence
  Description of Artificial Sequence: Synthetic oligonucleotide
  Antisense Strand to SEQ ID NO: 417229
uauaauguacuaugaccau

SEQ ID NO: 417231 - RNA, 19 nt, Artificial Sequence
  Description of Artificial Sequence: Synthetic oligonucleotide
  Sense Strand Starting at position 1255 of SEQ ID NO: 318007
gucauaguacauuauagua

SEQ ID NO: 417232 - RNA, 19 nt, Artificial Sequence
  Description of Artificial Sequence: Synthetic oligonucleotide
  Antisense Strand to SEQ ID NO: 417231
uacuauaauguacuaugac

SEQ ID NO: 417233 - RNA, 19 nt, Artificial Sequence
  Description of Artificial Sequence: Synthetic oligonucleotide
  Sense Strand Starting at position 1255 of SEQ ID NO: 318057
agaagugagagcugaguuu

SEQ ID NO: 417234 - RNA, 19 nt, Artificial Sequence
  Description of Artificial Sequence: Synthetic oligonucleotide
  Antisense Strand to SEQ ID NO: 417233
aaacucagcucucacuucu

SEQ ID NO: 417235 - RNA, 19 nt, Artificial Sequence
  Description of Artificial Sequence: Synthetic oligonucleotide
  Sense Strand Starting at position 1255 of SEQ ID NO: 318069
ugaguuuagcugcaggaau

SEQ ID NO: 417236 - RNA, 19 nt, Artificial Sequence
  Description of Artificial Sequence: Synthetic oligonucleotide
  Antisense Strand to SEQ ID NO: 417235
auuccugcagcuaaacuca

SEQ ID NO: 417237 - RNA, 19 nt, Artificial Sequence
  Description of Artificial Sequence: Synthetic oligonucleotide
  Sense Strand Starting at position 1255 of SEQ ID NO: 318212
ggguauguccuuuaucuuu

SEQ ID NO: 417238 - RNA, 19 nt, Artificial Sequence
  Description of Artificial Sequence: Synthetic oligonucleotide
  Antisense Strand to SEQ ID NO: 417237
aaagauaaaggacauaccc

SEQ ID NO: 417239 - RNA, 19 nt, Artificial Sequence
  Description of Artificial Sequence: Synthetic oligonucleotide
  Sense Strand Starting at position 1255 of SEQ ID NO: 318890
gugagcauuuguguauaca

SEQ ID NO: 417240 - RNA, 19 nt, Artificial Sequence
  Description of Artificial Sequence: Synthetic oligonucleotide
  Antisense Strand to SEQ ID NO: 417239
uguauacacaaaugcucac

SEQ ID NO: 417241 - RNA, 19 nt, Artificial Sequence
  Description of Artificial Sequence: Synthetic oligonucleotide
  Sense Strand Starting at position 1255 of SEQ ID NO: 318931
guagaaauauguuuccagu

SEQ ID NO: 417242 - RNA, 19 nt, Artificial Sequence
  Description of Artificial Sequence: Synthetic oligonucleotide
  Antisense Strand to SEQ ID NO: 417241
acuggaaacauauuucuac

SEQ ID NO: 417243 - RNA, 19 nt, Artificial Sequence
  Description of Artificial Sequence: Synthetic oligonucleotide
  Sense Strand Starting at position 1255 of SEQ ID NO: 318933
agaaauauguuuccaguuc

SEQ ID NO: 417244 - RNA, 19 nt, Artificial Sequence
  Description of Artificial Sequence: Synthetic oligonucleotide
  Antisense Strand to SEQ ID NO: 417243
gaacuggaaacauauuucu

SEQ ID NO: 417245 - RNA, 19 nt, Artificial Sequence
  Description of Artificial Sequence: Synthetic oligonucleotide
  Sense Strand Starting at position 1255 of SEQ ID NO: 318963
uuccuaggugugggaucau

SEQ ID NO: 417246 - RNA, 19 nt, Artificial Sequence
  Description of Artificial Sequence: Synthetic oligonucleotide
  Antisense Strand to SEQ ID NO: 417245
augaucccacaccuaggaa

SEQ ID NO: 417247 - RNA, 19 nt, Artificial Sequence
  Description of Artificial Sequence: Synthetic oligonucleotide
  Sense Strand Starting at position 1256 of SEQ ID NO: 315332
aacauuaucgcagaaaguc

SEQ ID NO: 417248 - RNA, 19 nt, Artificial Sequence
  Description of Artificial Sequence: Synthetic oligonucleotide
  Antisense Strand to SEQ ID NO: 417247
gacuuucugcgauaauguu

SEQ ID NO: 417249 - RNA, 19 nt, Artificial Sequence
  Description of Artificial Sequence: Synthetic oligonucleotide
  Sense Strand Starting at position 1256 of SEQ ID NO: 315439
auccuauggucagcugauu

SEQ ID NO: 417250 - RNA, 19 nt, Artificial Sequence
  Description of Artificial Sequence: Synthetic oligonucleotide
  Antisense Strand to SEQ ID NO: 417249
aaucagcugaccauaggau

SEQ ID NO: 417251 - RNA, 19 nt, Artificial Sequence
  Description of Artificial Sequence: Synthetic oligonucleotide
  Sense Strand Starting at position 1256 of SEQ ID NO: 315466
cuuuguccaucuguacuau

SEQ ID NO: 417252 - RNA, 19 nt, Artificial Sequence
  Description of Artificial Sequence: Synthetic oligonucleotide
  Antisense Strand to SEQ ID NO: 417251
auaguacagauggacaaag

SEQ ID NO: 417253 - RNA, 19 nt, Artificial Sequence
  Description of Artificial Sequence: Synthetic oligonucleotide
  Sense Strand Starting at position 1256 of SEQ ID NO: 315467
uuuguccaucuguacuauu

SEQ ID NO: 417254 - RNA, 19 nt, Artificial Sequence
  Description of Artificial Sequence: Synthetic oligonucleotide
  Antisense Strand to SEQ ID NO: 417253
aauaguacagauggacaaa

SEQ ID NO: 417255 - RNA, 19 nt, Artificial Sequence
  Description of Artificial Sequence: Synthetic oligonucleotide
  Sense Strand Starting at position 1256 of SEQ ID NO: 315640
uauaucuggugggaaauau

SEQ ID NO: 417256 - RNA, 19 nt, Artificial Sequence
  Description of Artificial Sequence: Synthetic oligonucleotide
  Antisense Strand to SEQ ID NO: 417255
auauuucccaccagauaua

SEQ ID NO: 417257 - RNA, 19 nt, Artificial Sequence
  Description of Artificial Sequence: Synthetic oligonucleotide
  Sense Strand Starting at position 1256 of SEQ ID NO: 315659
ucaucaacguguuuaguga

SEQ ID NO: 417258 - RNA, 19 nt, Artificial Sequence
  Description of Artificial Sequence: Synthetic oligonucleotide
  Antisense Strand to SEQ ID NO: 417257
ucacuaaacacguugauga

SEQ ID NO: 417259 - RNA, 19 nt, Artificial Sequence
  Description of Artificial Sequence: Synthetic oligonucleotide
  Sense Strand Starting at position 1256 of SEQ ID NO: 315660
caucaacguguuuagugaa

SEQ ID NO: 417260 - RNA, 19 nt, Artificial Sequence
  Description of Artificial Sequence: Synthetic oligonucleotide
  Antisense Strand to SEQ ID NO: 417259
uucacuaaacacguugaug

SEQ ID NO: 417261 - RNA, 19 nt, Artificial Sequence
  Description of Artificial Sequence: Synthetic oligonucleotide
  Sense Strand Starting at position 1256 of SEQ ID NO: 315673
agugaaaggcaaugucaaa

SEQ ID NO: 417262 - RNA, 19 nt, Artificial Sequence
  Description of Artificial Sequence: Synthetic oligonucleotide
  Antisense Strand to SEQ ID NO: 417261
uuugacauugccuuucacu

SEQ ID NO: 417263 - RNA, 19 nt, Artificial Sequence
  Description of Artificial Sequence: Synthetic oligonucleotide
  Sense Strand Starting at position 1256 of SEQ ID NO: 315785
guauccagguaacuuaauu

SEQ ID NO: 417264 - RNA, 19 nt, Artificial Sequence
  Description of Artificial Sequence: Synthetic oligonucleotide
  Antisense Strand to SEQ ID NO: 417263
aauuaaguuaccuggauac

SEQ ID NO: 417265 - RNA, 19 nt, Artificial Sequence
  Description of Artificial Sequence: Synthetic oligonucleotide
  Sense Strand Starting at position 1256 of SEQ ID NO: 315812
uguguaguucugcagaucu

SEQ ID NO: 417266 - RNA, 19 nt, Artificial Sequence
  Description of Artificial Sequence: Synthetic oligonucleotide
  Antisense Strand to SEQ ID NO: 417265
agaucugcagaacuacaca

SEQ ID NO: 417267 - RNA, 19 nt, Artificial Sequence
  Description of Artificial Sequence: Synthetic oligonucleotide
  Sense Strand Starting at position 1256 of SEQ ID NO: 315819
uucugcagaucuguaugua

SEQ ID NO: 417268 - RNA, 19 nt, Artificial Sequence
  Description of Artificial Sequence: Synthetic oligonucleotide
  Antisense Strand to SEQ ID NO: 417267
uacauacagaucugcagaa

SEQ ID NO: 417269 - RNA, 19 nt, Artificial Sequence
  Description of Artificial Sequence: Synthetic oligonucleotide
  Sense Strand Starting at position 1256 of SEQ ID NO: 315820
ucugcagaucuguauguau

SEQ ID NO: 417270 - RNA, 19 nt, Artificial Sequence
  Description of Artificial Sequence: Synthetic oligonucleotide
  Antisense Strand to SEQ ID NO: 417269
auacauacagaucugcaga

SEQ ID NO: 417271 - RNA, 19 nt, Artificial Sequence
  Description of Artificial Sequence: Synthetic oligonucleotide
  Sense Strand Starting at position 1256 of SEQ ID NO: 315822
ugcagaucuguauguauaa

SEQ ID NO: 417272 - RNA, 19 nt, Artificial Sequence
  Description of Artificial Sequence: Synthetic oligonucleotide
  Antisense Strand to SEQ ID NO: 417271
uuauacauacagaucugca

SEQ ID NO: 417273 - RNA, 19 nt, Artificial Sequence
  Description of Artificial Sequence: Synthetic oligonucleotide
  Sense Strand Starting at position 1256 of SEQ ID NO: 315823
gcagaucuguauguauaaa

SEQ ID NO: 417274 - RNA, 19 nt, Artificial Sequence
  Description of Artificial Sequence: Synthetic oligonucleotide
  Antisense Strand to SEQ ID NO: 417273
uuuauacauacagaucugc

SEQ ID NO: 417275 - RNA, 19 nt, Artificial Sequence
  Description of Artificial Sequence: Synthetic oligonucleotide
  Sense Strand Starting at position 1256 of SEQ ID NO: 315867
auguacacauucuuguaaa

SEQ ID NO: 417276 - RNA, 19 nt, Artificial Sequence
  Description of Artificial Sequence: Synthetic oligonucleotide
  Antisense Strand to SEQ ID NO: 417275
uuuacaagaauguguacau

SEQ ID NO: 417277 - RNA, 19 nt, Artificial Sequence
  Description of Artificial Sequence: Synthetic oligonucleotide
  Sense Strand Starting at position 1256 of SEQ ID NO: 315887
uuucuagaaggauguacaa

SEQ ID NO: 417278 - RNA, 19 nt, Artificial Sequence
  Description of Artificial Sequence: Synthetic oligonucleotide
  Antisense Strand to SEQ ID NO: 417277
uuguacauccuucuagaaa

SEQ ID NO: 417279 - RNA, 19 nt, Artificial Sequence
  Description of Artificial Sequence: Synthetic oligonucleotide
  Sense Strand Starting at position 1256 of SEQ ID NO: 315907
agaguuaagugacuacuuu

SEQ ID NO: 417280 - RNA, 19 nt, Artificial Sequence
  Description of Artificial Sequence: Synthetic oligonucleotide
  Antisense Strand to SEQ ID NO: 417279
aaaguagucacuuaacucu

SEQ ID NO: 417281 - RNA, 19 nt, Artificial Sequence
  Description of Artificial Sequence: Synthetic oligonucleotide
  Sense Strand Starting at position 1256 of SEQ ID NO: 316354
uaucgcuuguuccuugaaa

SEQ ID NO: 417282 - RNA, 19 nt, Artificial Sequence
  Description of Artificial Sequence: Synthetic oligonucleotide
  Antisense Strand to SEQ ID NO: 417281
uuucaaggaacaagcgaua

SEQ ID NO: 417283 - RNA, 19 nt, Artificial Sequence
  Description of Artificial Sequence: Synthetic oligonucleotide
  Sense Strand Starting at position 1256 of SEQ ID NO: 316432
uuaugagcucucgacaaua

SEQ ID NO: 417284 - RNA, 19 nt, Artificial Sequence
  Description of Artificial Sequence: Synthetic oligonucleotide
  Antisense Strand to SEQ ID NO: 417283
uauugucgagagcucauaa

SEQ ID NO: 417285 - RNA, 19 nt, Artificial Sequence
  Description of Artificial Sequence: Synthetic oligonucleotide
  Sense Strand Starting at position 1256 of SEQ ID NO: 316434
augagcucucgacaauauu

SEQ ID NO: 417286 - RNA, 19 nt, Artificial Sequence
  Description of Artificial Sequence: Synthetic oligonucleotide
  Antisense Strand to SEQ ID NO: 417285
aauauugucgagagcucau

SEQ ID NO: 417287 - RNA, 19 nt, Artificial Sequence
  Description of Artificial Sequence: Synthetic oligonucleotide
  Sense Strand Starting at position 1256 of SEQ ID NO: 316572
uuuaguauaguuugcucau

SEQ ID NO: 417288 - RNA, 19 nt, Artificial Sequence
  Description of Artificial Sequence: Synthetic oligonucleotide
  Antisense Strand to SEQ ID NO: 417287
augagcaaacuauacuaaa

SEQ ID NO: 417289 - RNA, 19 nt, Artificial Sequence
  Description of Artificial Sequence: Synthetic oligonucleotide
  Sense Strand Starting at position 1256 of SEQ ID NO: 316625
gggucaguauuaccaaaua

SEQ ID NO: 417290 - RNA, 19 nt, Artificial Sequence
  Description of Artificial Sequence: Synthetic oligonucleotide
  Antisense Strand to SEQ ID NO: 417289
uauuugguaauacugaccc

SEQ ID NO: 417291 - RNA, 19 nt, Artificial Sequence
  Description of Artificial Sequence: Synthetic oligonucleotide
  Sense Strand Starting at position 1256 of SEQ ID NO: 317092
ccguaaagguccuuagacu

SEQ ID NO: 417292 - RNA, 19 nt, Artificial Sequence
  Description of Artificial Sequence: Synthetic oligonucleotide
  Antisense Strand to SEQ ID NO: 417291
agucuaaggaccuuuacgg

SEQ ID NO: 417293 - RNA, 19 nt, Artificial Sequence
  Description of Artificial Sequence: Synthetic oligonucleotide
  Sense Strand Starting at position 1256 of SEQ ID NO: 317093
cguaaagguccuuagacuc

SEQ ID NO: 417294 - RNA, 19 nt, Artificial Sequence
  Description of Artificial Sequence: Synthetic oligonucleotide
  Antisense Strand to SEQ ID NO: 417293
gagucuaaggaccuuuacg

SEQ ID NO: 417295 - RNA, 19 nt, Artificial Sequence
  Description of Artificial Sequence: Synthetic oligonucleotide
  Sense Strand Starting at position 1256 of SEQ ID NO: 317275
gcagucugcaggcaacauu

SEQ ID NO: 417296 - RNA, 19 nt, Artificial Sequence
  Description of Artificial Sequence: Synthetic oligonucleotide
  Antisense Strand to SEQ ID NO: 417295
aauguugccugcagacugc

SEQ ID NO: 417297 - RNA, 19 nt, Artificial Sequence
  Description of Artificial Sequence: Synthetic oligonucleotide
  Sense Strand Starting at position 1256 of SEQ ID NO: 317598
acggcuucugaggaauuau

SEQ ID NO: 417298 - RNA, 19 nt, Artificial Sequence
  Description of Artificial Sequence: Synthetic oligonucleotide
  Antisense Strand to SEQ ID NO: 417297
auaauuccucagaagccgu

SEQ ID NO: 417299 - RNA, 19 nt, Artificial Sequence
  Description of Artificial Sequence: Synthetic oligonucleotide
  Sense Strand Starting at position 1256 of SEQ ID NO: 317703
ccgggaagucgccacacau

SEQ ID NO: 417300 - RNA, 19 nt, Artificial Sequence
  Description of Artificial Sequence: Synthetic oligonucleotide
  Antisense Strand to SEQ ID NO: 417299
auguguggcgacuucccgg

SEQ ID NO: 417301 - RNA, 19 nt, Artificial Sequence
  Description of Artificial Sequence: Synthetic oligonucleotide
  Sense Strand Starting at position 1256 of SEQ ID NO: 317969
agagaugagggcuguccaa

SEQ ID NO: 417302 - RNA, 19 nt, Artificial Sequence
  Description of Artificial Sequence: Synthetic oligonucleotide
  Antisense Strand to SEQ ID NO: 417301
uuggacagcccucaucucu

SEQ ID NO: 417303 - RNA, 19 nt, Artificial Sequence
  Description of Artificial Sequence: Synthetic oligonucleotide
  Sense Strand Starting at position 1256 of SEQ ID NO: 318176
aguuuauuccagcguaagg

SEQ ID NO: 417304 - RNA, 19 nt, Artificial Sequence
  Description of Artificial Sequence: Synthetic oligonucleotide
  Antisense Strand to SEQ ID NO: 417303
ccuuacgcuggaauaaacu

SEQ ID NO: 417305 - RNA, 19 nt, Artificial Sequence
  Description of Artificial Sequence: Synthetic oligonucleotide
  Sense Strand Starting at position 1256 of SEQ ID NO: 318332
acagcuauuugguagguua

SEQ ID NO: 417306 - RNA, 19 nt, Artificial Sequence
  Description of Artificial Sequence: Synthetic oligonucleotide
  Antisense Strand to SEQ ID NO: 417305
uaaccuaccaaauagcugu

SEQ ID NO: 417307 - RNA, 19 nt, Artificial Sequence
  Description of Artificial Sequence: Synthetic oligonucleotide
  Sense Strand Starting at position 1256 of SEQ ID NO: 318346
gguuacagauuacuacauu

SEQ ID NO: 417308 - RNA, 19 nt, Artificial Sequence
  Description of Artificial Sequence: Synthetic oligonucleotide
  Antisense Strand to SEQ ID NO: 417307
aauguaguaaucuguaacc

SEQ ID NO: 417309 - RNA, 19 nt, Artificial Sequence
  Description of Artificial Sequence: Synthetic oligonucleotide
  Sense Strand Starting at position 1256 of SEQ ID NO: 318430
augguuugguccuccuauu

SEQ ID NO: 417310 - RNA, 19 nt, Artificial Sequence
  Description of Artificial Sequence: Synthetic oligonucleotide
  Antisense Strand to SEQ ID NO: 417309
aauaggaggaccaaaccau

SEQ ID NO: 417311 - RNA, 19 nt, Artificial Sequence
  Description of Artificial Sequence: Synthetic oligonucleotide
  Sense Strand Starting at position 1256 of SEQ ID NO: 318520
cucccaaggcucggaauaa

SEQ ID NO: 417312 - RNA, 19 nt, Artificial Sequence
  Description of Artificial Sequence: Synthetic oligonucleotide
  Antisense Strand to SEQ ID NO: 417311
uuauuccgagccuugggag

SEQ ID NO: 417313 - RNA, 19 nt, Artificial Sequence
  Description of Artificial Sequence: Synthetic oligonucleotide
  Sense Strand Starting at position 1256 of SEQ ID NO: 318524
caaggcucggaauaaaguu

SEQ ID NO: 417314 - RNA, 19 nt, Artificial Sequence
  Description of Artificial Sequence: Synthetic oligonucleotide
  Antisense Strand to SEQ ID NO: 417313
aacuuuauuccgagccuug

SEQ ID NO: 417315 - RNA, 19 nt, Artificial Sequence
  Description of Artificial Sequence: Synthetic oligonucleotide
  Sense Strand Starting at position 1256 of SEQ ID NO: 318596
guuuacuaaugugcuaaau

SEQ ID NO: 417316 - RNA, 19 nt, Artificial Sequence
  Description of Artificial Sequence: Synthetic oligonucleotide
  Antisense Strand to SEQ ID NO: 417315
auuuagcacauuaguaaac

SEQ ID NO: 417317 - RNA, 19 nt, Artificial Sequence
  Description of Artificial Sequence: Synthetic oligonucleotide
  Sense Strand Starting at position 1256 of SEQ ID NO: 318897
agcuaugagcucuauauac

SEQ ID NO: 417318 - RNA, 19 nt, Artificial Sequence
  Description of Artificial Sequence: Synthetic oligonucleotide
  Antisense Strand to SEQ ID NO: 417317
guauauagagcucauagcu

SEQ ID NO: 417319 - RNA, 19 nt, Artificial Sequence
  Description of Artificial Sequence: Synthetic oligonucleotide
  Sense Strand Starting at position 1256 of SEQ ID NO: 318899
cuaugagcucuauauacug

SEQ ID NO: 417320 - RNA, 19 nt, Artificial Sequence
  Description of Artificial Sequence: Synthetic oligonucleotide
  Antisense Strand to SEQ ID NO: 417319
caguauauagagcucauag

SEQ ID NO: 417321 - RNA, 19 nt, Artificial Sequence
  Description of Artificial Sequence: Synthetic oligonucleotide
  Sense Strand Starting at position 1256 of SEQ ID NO: 319054
uugcuuaugaagugugaau

SEQ ID NO: 417322 - RNA, 19 nt, Artificial Sequence
  Description of Artificial Sequence: Synthetic oligonucleotide
  Antisense Strand to SEQ ID NO: 417321
auucacacuucauaagcaa

SEQ ID NO: 417323 - RNA, 19 nt, Artificial Sequence
  Description of Artificial Sequence: Synthetic oligonucleotide
  Sense Strand Starting at position 1256 of SEQ ID NO: 319056
gcuuaugaagugugaauug

SEQ ID NO: 417324 - RNA, 19 nt, Artificial Sequence
  Description of Artificial Sequence: Synthetic oligonucleotide
  Antisense Strand to SEQ ID NO: 417323
caauucacacuucauaagc

SEQ ID NO: 417325 - RNA, 19 nt, Artificial Sequence
  Description of Artificial Sequence: Synthetic oligonucleotide
  Sense Strand Starting at position 1256 of SEQ ID NO: 319061
ugaagugugaauuguagug

SEQ ID NO: 417326 - RNA, 19 nt, Artificial Sequence
  Description of Artificial Sequence: Synthetic oligonucleotide
  Antisense Strand to SEQ ID NO: 417325
cacuacaauucacacuuca

SEQ ID NO: 417327 - RNA, 19 nt, Artificial Sequence
  Description of Artificial Sequence: Synthetic oligonucleotide
  Sense Strand Starting at position 1257 of SEQ ID NO: 315246
agacgacacucgcauaaua

SEQ ID NO: 417328 - RNA, 19 nt, Artificial Sequence
  Description of Artificial Sequence: Synthetic oligonucleotide
  Antisense Strand to SEQ ID NO: 417327
uauuaugcgagugucgucu

SEQ ID NO: 417329 - RNA, 19 nt, Artificial Sequence
  Description of Artificial Sequence: Synthetic oligonucleotide
  Sense Strand Starting at position 1257 of SEQ ID NO: 315303
agcaaauguuuacucgaca

SEQ ID NO: 417330 - RNA, 19 nt, Artificial Sequence
  Description of Artificial Sequence: Synthetic oligonucleotide
  Antisense Strand to SEQ ID NO: 417329
ugucgaguaaacauuugcu

SEQ ID NO: 417331 - RNA, 19 nt, Artificial Sequence
  Description of Artificial Sequence: Synthetic oligonucleotide
  Sense Strand Starting at position 1257 of SEQ ID NO: 315304
gcaaauguuuacucgacag

SEQ ID NO: 417332 - RNA, 19 nt, Artificial Sequence
  Description of Artificial Sequence: Synthetic oligonucleotide
  Antisense Strand to SEQ ID NO: 417331
cugucgaguaaacauuugc

SEQ ID NO: 417333 - RNA, 19 nt, Artificial Sequence
  Description of Artificial Sequence: Synthetic oligonucleotide
  Sense Strand Starting at position 1257 of SEQ ID NO: 315341
gcccgaggguugcaaugua

SEQ ID NO: 417334 - RNA, 19 nt, Artificial Sequence
  Description of Artificial Sequence: Synthetic oligonucleotide
  Antisense Strand to SEQ ID NO: 417333
uacauugcaacccucgggc

SEQ ID NO: 417335 - RNA, 19 nt, Artificial Sequence
  Description of Artificial Sequence: Synthetic oligonucleotide
  Sense Strand Starting at position 1257 of SEQ ID NO: 315349
guugcaauguagcccuaaa

SEQ ID NO: 417336 - RNA, 19 nt, Artificial Sequence
  Description of Artificial Sequence: Synthetic oligonucleotide
  Antisense Strand to SEQ ID NO: 417335
uuuagggcuacauugcaac

SEQ ID NO: 417337 - RNA, 19 nt, Artificial Sequence
  Description of Artificial Sequence: Synthetic oligonucleotide
  Sense Strand Starting at position 1257 of SEQ ID NO: 315535
gguaacgucgucccuuuau

SEQ ID NO: 417338 - RNA, 19 nt, Artificial Sequence
  Description of Artificial Sequence: Synthetic oligonucleotide
  Antisense Strand to SEQ ID NO: 417337
auaaagggacgacguuacc

SEQ ID NO: 417339 - RNA, 19 nt, Artificial Sequence
  Description of Artificial Sequence: Synthetic oligonucleotide
  Sense Strand Starting at position 1257 of SEQ ID NO: 315686
gcccuuggcccucaaagau

SEQ ID NO: 417340 - RNA, 19 nt, Artificial Sequence
  Description of Artificial Sequence: Synthetic oligonucleotide
  Antisense Strand to SEQ ID NO: 417339
aucuuugagggccaagggc

SEQ ID NO: 417341 - RNA, 19 nt, Artificial Sequence
  Description of Artificial Sequence: Synthetic oligonucleotide
  Sense Strand Starting at position 1257 of SEQ ID NO: 315885
ggcaacaaucuaugaguuu

SEQ ID NO: 417342 - RNA, 19 nt, Artificial Sequence
  Description of Artificial Sequence: Synthetic oligonucleotide
  Antisense Strand to SEQ ID NO: 417341
aaacucauagauuguugcc

SEQ ID NO: 417343 - RNA, 19 nt, Artificial Sequence
  Description of Artificial Sequence: Synthetic oligonucleotide
  Sense Strand Starting at position 1257 of SEQ ID NO: 316028
cgccuaacucaagacgauu

SEQ ID NO: 417344 - RNA, 19 nt, Artificial Sequence
  Description of Artificial Sequence: Synthetic oligonucleotide
  Antisense Strand to SEQ ID NO: 417343
aaucgucuugaguuaggcg

SEQ ID NO: 417345 - RNA, 19 nt, Artificial Sequence
  Description of Artificial Sequence: Synthetic oligonucleotide
  Sense Strand Starting at position 1257 of SEQ ID NO: 316145
ccacauacuucccagguca

SEQ ID NO: 417346 - RNA, 19 nt, Artificial Sequence
  Description of Artificial Sequence: Synthetic oligonucleotide
  Antisense Strand to SEQ ID NO: 417345
ugaccugggaaguaugugg

SEQ ID NO: 417347 - RNA, 19 nt, Artificial Sequence
  Description of Artificial Sequence: Synthetic oligonucleotide
  Sense Strand Starting at position 1257 of SEQ ID NO: 316279
gcaguuauccgauggacac

SEQ ID NO: 417348 - RNA, 19 nt, Artificial Sequence
  Description of Artificial Sequence: Synthetic oligonucleotide
  Antisense Strand to SEQ ID NO: 417347
guguccaucggauaacugc

SEQ ID NO: 417349 - RNA, 19 nt, Artificial Sequence
  Description of Artificial Sequence: Synthetic oligonucleotide
  Sense Strand Starting at position 1257 of SEQ ID NO: 316280
caguuauccgauggacaca

SEQ ID NO: 417350 - RNA, 19 nt, Artificial Sequence
  Description of Artificial Sequence: Synthetic oligonucleotide
  Antisense Strand to SEQ ID NO: 417349
uguguccaucggauaacug

SEQ ID NO: 417351 - RNA, 19 nt, Artificial Sequence
  Description of Artificial Sequence: Synthetic oligonucleotide
  Sense Strand Starting at position 1257 of SEQ ID NO: 317281
aucgauuaggccugcaauc

SEQ ID NO: 417352 - RNA, 19 nt, Artificial Sequence
  Description of Artificial Sequence: Synthetic oligonucleotide
  Antisense Strand to SEQ ID NO: 417351
gauugcaggccuaaucgau

SEQ ID NO: 417353 - RNA, 19 nt, Artificial Sequence
  Description of Artificial Sequence: Synthetic oligonucleotide
  Sense Strand Starting at position 1257 of SEQ ID NO: 317368
cgacacugcaggcauuaaa

SEQ ID NO: 417354 - RNA, 19 nt, Artificial Sequence
  Description of Artificial Sequence: Synthetic oligonucleotide
  Antisense Strand to SEQ ID NO: 417353
uuuaaugccugcagugucg

SEQ ID NO: 417355 - RNA, 19 nt, Artificial Sequence
  Description of Artificial Sequence: Synthetic oligonucleotide
  Sense Strand Starting at position 1257 of SEQ ID NO: 317404
gacacagauuccuccggau

SEQ ID NO: 417356 - RNA, 19 nt, Artificial Sequence
  Description of Artificial Sequence: Synthetic oligonucleotide
  Antisense Strand to SEQ ID NO: 417355
auccggaggaaucuguguc

SEQ ID NO: 417357 - RNA, 19 nt, Artificial Sequence
  Description of Artificial Sequence: Synthetic oligonucleotide
  Sense Strand Starting at position 1257 of SEQ ID NO: 317407
acagauuccuccggauaac

SEQ ID NO: 417358 - RNA, 19 nt, Artificial Sequence
  Description of Artificial Sequence: Synthetic oligonucleotide
  Antisense Strand to SEQ ID NO: 417357
guuauccggaggaaucugu

SEQ ID NO: 417359 - RNA, 19 nt, Artificial Sequence
  Description of Artificial Sequence: Synthetic oligonucleotide
  Sense Strand Starting at position 1257 of SEQ ID NO: 317525
ugaggcuucccuucgcgau

SEQ ID NO: 417360 - RNA, 19 nt, Artificial Sequence
  Description of Artificial Sequence: Synthetic oligonucleotide
  Antisense Strand to SEQ ID NO: 417359
aucgcgaagggaagccuca

SEQ ID NO: 417361 - RNA, 19 nt, Artificial Sequence
  Description of Artificial Sequence: Synthetic oligonucleotide
  Sense Strand Starting at position 1257 of SEQ ID NO: 317526
gaggcuucccuucgcgaua

SEQ ID NO: 417362 - RNA, 19 nt, Artificial Sequence
  Description of Artificial Sequence: Synthetic oligonucleotide
  Antisense Strand to SEQ ID NO: 417361
uaucgcgaagggaagccuc

SEQ ID NO: 417363 - RNA, 19 nt, Artificial Sequence
  Description of Artificial Sequence: Synthetic oligonucleotide
  Sense Strand Starting at position 1257 of SEQ ID NO: 317564
aggagaguucgcugugcag

SEQ ID NO: 417364 - RNA, 19 nt, Artificial Sequence
  Description of Artificial Sequence: Synthetic oligonucleotide
  Antisense Strand to SEQ ID NO: 417363
cugcacagcgaacucuccu

SEQ ID NO: 417365 - RNA, 19 nt, Artificial Sequence
  Description of Artificial Sequence: Synthetic oligonucleotide
  Sense Strand Starting at position 1257 of SEQ ID NO: 317565
ggagaguucgcugugcagu

SEQ ID NO: 417366 - RNA, 19 nt, Artificial Sequence
  Description of Artificial Sequence: Synthetic oligonucleotide
  Antisense Strand to SEQ ID NO: 417365
acugcacagcgaacucucc

SEQ ID NO: 417367 - RNA, 19 nt, Artificial Sequence
  Description of Artificial Sequence: Synthetic oligonucleotide
  Sense Strand Starting at position 1257 of SEQ ID NO: 317566
gagaguucgcugugcaguc

SEQ ID NO: 417368 - RNA, 19 nt, Artificial Sequence
  Description of Artificial Sequence: Synthetic oligonucleotide
  Antisense Strand to SEQ ID NO: 417367
gacugcacagcgaacucuc

SEQ ID NO: 417369 - RNA, 19 nt, Artificial Sequence
  Description of Artificial Sequence: Synthetic oligonucleotide
  Sense Strand Starting at position 1257 of SEQ ID NO: 317602
agaauuugguuccacgagu

SEQ ID NO: 417370 - RNA, 19 nt, Artificial Sequence
  Description of Artificial Sequence: Synthetic oligonucleotide
  Antisense Strand to SEQ ID NO: 417369
acucguggaaccaaauucu

SEQ ID NO: 417371 - RNA, 19 nt, Artificial Sequence
  Description of Artificial Sequence: Synthetic oligonucleotide
  Sense Strand Starting at position 1257 of SEQ ID NO: 317645
acggauuuagucuguucuu

SEQ ID NO: 417372 - RNA, 19 nt, Artificial Sequence
  Description of Artificial Sequence: Synthetic oligonucleotide
  Antisense Strand to SEQ ID NO: 417371
aagaacagacuaaauccgu

SEQ ID NO: 417373 - RNA, 19 nt, Artificial Sequence
  Description of Artificial Sequence: Synthetic oligonucleotide
  Sense Strand Starting at position 1257 of SEQ ID NO: 318109
gcaggaagauauuagaugu

SEQ ID NO: 417374 - RNA, 19 nt, Artificial Sequence
  Description of Artificial Sequence: Synthetic oligonucleotide
  Antisense Strand to SEQ ID NO: 417373
acaucuaauaucuuccugc

SEQ ID NO: 417375 - RNA, 19 nt, Artificial Sequence
  Description of Artificial Sequence: Synthetic oligonucleotide
  Sense Strand Starting at position 1257 of SEQ ID NO: 318211
ucugaaaccuuggcagaga

SEQ ID NO: 417376 - RNA, 19 nt, Artificial Sequence
  Description of Artificial Sequence: Synthetic oligonucleotide
  Antisense Strand to SEQ ID NO: 417375
ucucugccaagguuucaga

SEQ ID NO: 417377 - RNA, 19 nt, Artificial Sequence
  Description of Artificial Sequence: Synthetic oligonucleotide
  Sense Strand Starting at position 1257 of SEQ ID NO: 318212
cugaaaccuuggcagagaa

SEQ ID NO: 417378 - RNA, 19 nt, Artificial Sequence
  Description of Artificial Sequence: Synthetic oligonucleotide
  Antisense Strand to SEQ ID NO: 417377
uucucugccaagguuucag

SEQ ID NO: 417379 - RNA, 19 nt, Artificial Sequence
  Description of Artificial Sequence: Synthetic oligonucleotide
  Sense Strand Starting at position 1257 of SEQ ID NO: 318404
cgcgucaucuucuuucuga

SEQ ID NO: 417380 - RNA, 19 nt, Artificial Sequence
  Description of Artificial Sequence: Synthetic oligonucleotide
  Antisense Strand to SEQ ID NO: 417379
ucagaaagaagaugacgcg

SEQ ID NO: 417381 - RNA, 19 nt, Artificial Sequence
  Description of Artificial Sequence: Synthetic oligonucleotide
  Sense Strand Starting at position 1257 of SEQ ID NO: 318405
gcgucaucuucuuucugaa

SEQ ID NO: 417382 - RNA, 19 nt, Artificial Sequence
  Description of Artificial Sequence: Synthetic oligonucleotide
  Antisense Strand to SEQ ID NO: 417381
uucagaaagaagaugacgc

SEQ ID NO: 417383 - RNA, 19 nt, Artificial Sequence
  Description of Artificial Sequence: Synthetic oligonucleotide
  Sense Strand Starting at position 1257 of SEQ ID NO: 318407
gucaucuucuuucugaaag

SEQ ID NO: 417384 - RNA, 19 nt, Artificial Sequence
  Description of Artificial Sequence: Synthetic oligonucleotide
  Antisense Strand to SEQ ID NO: 417383
cuuucagaaagaagaugac

SEQ ID NO: 417385 - RNA, 19 nt, Artificial Sequence
  Description of Artificial Sequence: Synthetic oligonucleotide
  Sense Strand Starting at position 1257 of SEQ ID NO: 318408
ucaucuucuuucugaaagg

SEQ ID NO: 417386 - RNA, 19 nt, Artificial Sequence
  Description of Artificial Sequence: Synthetic oligonucleotide
  Antisense Strand to SEQ ID NO: 417385
ccuuucagaaagaagauga

SEQ ID NO: 417387 - RNA, 19 nt, Artificial Sequence
  Description of Artificial Sequence: Synthetic oligonucleotide
  Sense Strand Starting at position 1257 of SEQ ID NO: 318613
gccgguuauugggacugau

SEQ ID NO: 417388 - RNA, 19 nt, Artificial Sequence
  Description of Artificial Sequence: Synthetic oligonucleotide
  Antisense Strand to SEQ ID NO: 417387
aucagucccaauaaccggc

SEQ ID NO: 417389 - RNA, 19 nt, Artificial Sequence
  Description of Artificial Sequence: Synthetic oligonucleotide
  Sense Strand Starting at position 1257 of SEQ ID NO: 318617
guuauugggacugaucgga

SEQ ID NO: 417390 - RNA, 19 nt, Artificial Sequence
  Description of Artificial Sequence: Synthetic oligonucleotide
  Antisense Strand to SEQ ID NO: 417389
uccgaucagucccaauaac

SEQ ID NO: 417391 - RNA, 19 nt, Artificial Sequence
  Description of Artificial Sequence: Synthetic oligonucleotide
  Sense Strand Starting at position 1257 of SEQ ID NO: 318858
uuugaaaccuucugagcga

SEQ ID NO: 417392 - RNA, 19 nt, Artificial Sequence
  Description of Artificial Sequence: Synthetic oligonucleotide
  Antisense Strand to SEQ ID NO: 417391
ucgcucagaagguuucaaa

SEQ ID NO: 417393 - RNA, 19 nt, Artificial Sequence
  Description of Artificial Sequence: Synthetic oligonucleotide
  Sense Strand Starting at position 1257 of SEQ ID NO: 318883
gagaacgacucuuccguuu

SEQ ID NO: 417394 - RNA, 19 nt, Artificial Sequence
  Description of Artificial Sequence: Synthetic oligonucleotide
  Antisense Strand to SEQ ID NO: 417393
aaacggaagagucguucuc

SEQ ID NO: 417395 - RNA, 19 nt, Artificial Sequence
  Description of Artificial Sequence: Synthetic oligonucleotide
  Sense Strand Starting at position 1257 of SEQ ID NO: 318885
gaacgacucuuccguuuau

SEQ ID NO: 417396 - RNA, 19 nt, Artificial Sequence
  Description of Artificial Sequence: Synthetic oligonucleotide
  Antisense Strand to SEQ ID NO: 417395
auaaacggaagagucguuc

SEQ ID NO: 417397 - RNA, 19 nt, Artificial Sequence
  Description of Artificial Sequence: Synthetic oligonucleotide
  Sense Strand Starting at position 1257 of SEQ ID NO: 318886
aacgacucuuccguuuauu

SEQ ID NO: 417398 - RNA, 19 nt, Artificial Sequence
  Description of Artificial Sequence: Synthetic oligonucleotide
  Antisense Strand to SEQ ID NO: 417397
aauaaacggaagagucguu

SEQ ID NO: 417399 - RNA, 19 nt, Artificial Sequence
  Description of Artificial Sequence: Synthetic oligonucleotide
  Sense Strand Starting at position 1257 of SEQ ID NO: 318929
uucugaaucccuggcucaa

SEQ ID NO: 417400 - RNA, 19 nt, Artificial Sequence
  Description of Artificial Sequence: Synthetic oligonucleotide
  Antisense Strand to SEQ ID NO: 417399
uugagccagggauucagaa

SEQ ID NO: 417401 - RNA, 19 nt, Artificial Sequence
  Description of Artificial Sequence: Synthetic oligonucleotide
  Sense Strand Starting at position 1257 of SEQ ID NO: 318940
uggcucaaccgagacauau

SEQ ID NO: 417402 - RNA, 19 nt, Artificial Sequence
  Description of Artificial Sequence: Synthetic oligonucleotide
  Antisense Strand to SEQ ID NO: 417401
auaugucucgguugagcca

SEQ ID NO: 417403 - RNA, 19 nt, Artificial Sequence
  Description of Artificial Sequence: Synthetic oligonucleotide
  Sense Strand Starting at position 1257 of SEQ ID NO: 319091
ucugaauucugaucggcag

SEQ ID NO: 417404 - RNA, 19 nt, Artificial Sequence
  Description of Artificial Sequence: Synthetic oligonucleotide
  Antisense Strand to SEQ ID NO: 417403
cugccgaucagaauucaga

SEQ ID NO: 417405 - RNA, 19 nt, Artificial Sequence
  Description of Artificial Sequence: Synthetic oligonucleotide
  Sense Strand Starting at position 1257 of SEQ ID NO: 319092
cugaauucugaucggcaga

SEQ ID NO: 417406 - RNA, 19 nt, Artificial Sequence
  Description of Artificial Sequence: Synthetic oligonucleotide
  Antisense Strand to SEQ ID NO: 417405
ucugccgaucagaauucag

SEQ ID NO: 417407 - RNA, 19 nt, Artificial Sequence
  Description of Artificial Sequence: Synthetic oligonucleotide
  Sense Strand Starting at position 1258 of SEQ ID NO: 315279
ccuggauguccaugagaua

SEQ ID NO: 417408 - RNA, 19 nt, Artificial Sequence
  Description of Artificial Sequence: Synthetic oligonucleotide
  Antisense Strand to SEQ ID NO: 417407
uaucucauggacauccagg

SEQ ID NO: 417409 - RNA, 19 nt, Artificial Sequence
  Description of Artificial Sequence: Synthetic oligonucleotide
  Sense Strand Starting at position 1258 of SEQ ID NO: 315324
ugucucaaauuugaaggaa

SEQ ID NO: 417410 - RNA, 19 nt, Artificial Sequence
  Description of Artificial Sequence: Synthetic oligonucleotide
  Antisense Strand to SEQ ID NO: 417409
uuccuucaaauuugagaca

SEQ ID NO: 417411 - RNA, 19 nt, Artificial Sequence
  Description of Artificial Sequence: Synthetic oligonucleotide
  Sense Strand Starting at position 1258 of SEQ ID NO: 315486
ucccuuaaagguggaugua

SEQ ID NO: 417412 - RNA, 19 nt, Artificial Sequence
  Description of Artificial Sequence: Synthetic oligonucleotide
  Antisense Strand to SEQ ID NO: 417411
uacauccaccuuuaaggga

SEQ ID NO: 417413 - RNA, 19 nt, Artificial Sequence
  Description of Artificial Sequence: Synthetic oligonucleotide
  Sense Strand Starting at position 1258 of SEQ ID NO: 315499
gauguaacuccgcauucua

SEQ ID NO: 417414 - RNA, 19 nt, Artificial Sequence
  Description of Artificial Sequence: Synthetic oligonucleotide
  Antisense Strand to SEQ ID NO: 417413
uagaaugcggaguuacauc

SEQ ID NO: 417415 - RNA, 19 nt, Artificial Sequence
  Description of Artificial Sequence: Synthetic oligonucleotide
  Sense Strand Starting at position 1258 of SEQ ID NO: 315845
agaagaaucgcuugaauaa

SEQ ID NO: 417416 - RNA, 19 nt, Artificial Sequence
  Description of Artificial Sequence: Synthetic oligonucleotide
  Antisense Strand to SEQ ID NO: 417415
uuauucaagcgauucuucu

SEQ ID NO: 417417 - RNA, 19 nt, Artificial Sequence
  Description of Artificial Sequence: Synthetic oligonucleotide
  Sense Strand Starting at position 1258 of SEQ ID NO: 316046
auugcuauccauugguauu

SEQ ID NO: 417418 - RNA, 19 nt, Artificial Sequence
  Description of Artificial Sequence: Synthetic oligonucleotide
  Antisense Strand to SEQ ID NO: 417417
aauaccaauggauagcaau

SEQ ID NO: 417419 - RNA, 19 nt, Artificial Sequence
  Description of Artificial Sequence: Synthetic oligonucleotide
  Sense Strand Starting at position 1258 of SEQ ID NO: 316057
uugguauuguucccaacau

SEQ ID NO: 417420 - RNA, 19 nt, Artificial Sequence
  Description of Artificial Sequence: Synthetic oligonucleotide
  Antisense Strand to SEQ ID NO: 417419
auguugggaacaauaccaa

SEQ ID NO: 417421 - RNA, 19 nt, Artificial Sequence
  Description of Artificial Sequence: Synthetic oligonucleotide
  Sense Strand Starting at position 1258 of SEQ ID NO: 316262
ggacaaggacuuugucuau

SEQ ID NO: 417422 - RNA, 19 nt, Artificial Sequence
  Description of Artificial Sequence: Synthetic oligonucleotide
  Antisense Strand to SEQ ID NO: 417421
auagacaaaguccuugucc

SEQ ID NO: 417423 - RNA, 19 nt, Artificial Sequence
  Description of Artificial Sequence: Synthetic oligonucleotide
  Sense Strand Starting at position 1258 of SEQ ID NO: 316268
ggacuuugucuauaauguu

SEQ ID NO: 417424 - RNA, 19 nt, Artificial Sequence
  Description of Artificial Sequence: Synthetic oligonucleotide
  Antisense Strand to SEQ ID NO: 417423
aacauuauagacaaagucc

SEQ ID NO: 417425 - RNA, 19 nt, Artificial Sequence
  Description of Artificial Sequence: Synthetic oligonucleotide
  Sense Strand Starting at position 1258 of SEQ ID NO: 316293
gaauccaaugcuugacagu

SEQ ID NO: 417426 - RNA, 19 nt, Artificial Sequence
  Description of Artificial Sequence: Synthetic oligonucleotide
  Antisense Strand to SEQ ID NO: 417425
acugucaagcauuggauuc

SEQ ID NO: 417427 - RNA, 19 nt, Artificial Sequence
  Description of Artificial Sequence: Synthetic oligonucleotide
  Sense Strand Starting at position 1258 of SEQ ID NO: 316697
ggcucagccucccuuuaaa

SEQ ID NO: 417428 - RNA, 19 nt, Artificial Sequence
  Description of Artificial Sequence: Synthetic oligonucleotide
  Antisense Strand to SEQ ID NO: 417427
uuuaaagggaggcugagcc

SEQ ID NO: 417429 - RNA, 19 nt, Artificial Sequence
  Description of Artificial Sequence: Synthetic oligonucleotide
  Sense Strand Starting at position 1258 of SEQ ID NO: 317052
agaagaaacucgcuuacca

SEQ ID NO: 417430 - RNA, 19 nt, Artificial Sequence
  Description of Artificial Sequence: Synthetic oligonucleotide
  Antisense Strand to SEQ ID NO: 417429
ugguaagcgaguuucuucu

SEQ ID NO: 417431 - RNA, 19 nt, Artificial Sequence
  Description of Artificial Sequence: Synthetic oligonucleotide
  Sense Strand Starting at position 1258 of SEQ ID NO: 317332
gcaacuggguacucgaaga

SEQ ID NO: 417432 - RNA, 19 nt, Artificial Sequence
  Description of Artificial Sequence: Synthetic oligonucleotide
  Antisense Strand to SEQ ID NO: 417431
ucuucgaguacccaguugc

SEQ ID NO: 417433 - RNA, 19 nt, Artificial Sequence
  Description of Artificial Sequence: Synthetic oligonucleotide
  Sense Strand Starting at position 1258 of SEQ ID NO: 317437
guuggcuuacgccuguuau

SEQ ID NO: 417434 - RNA, 19 nt, Artificial Sequence
  Description of Artificial Sequence: Synthetic oligonucleotide
  Antisense Strand to SEQ ID NO: 417433
auaacaggcguaagccaac

SEQ ID NO: 417435 - RNA, 19 nt, Artificial Sequence
  Description of Artificial Sequence: Synthetic oligonucleotide
  Sense Strand Starting at position 1258 of SEQ ID NO: 317768
cuguuugggcccuguauuu

SEQ ID NO: 417436 - RNA, 19 nt, Artificial Sequence
  Description of Artificial Sequence: Synthetic oligonucleotide
  Antisense Strand to SEQ ID NO: 417435
aaauacagggcccaaacag

SEQ ID NO: 417437 - RNA, 19 nt, Artificial Sequence
  Description of Artificial Sequence: Synthetic oligonucleotide
  Sense Strand Starting at position 1258 of SEQ ID NO: 317787
auaaacauuugcugacaga

SEQ ID NO: 417438 - RNA, 19 nt, Artificial Sequence
  Description of Artificial Sequence: Synthetic oligonucleotide
  Antisense Strand to SEQ ID NO: 417437
ucugucagcaaauguuuau

SEQ ID NO: 417439 - RNA, 19 nt, Artificial Sequence
  Description of Artificial Sequence: Synthetic oligonucleotide
  Sense Strand Starting at position 1258 of SEQ ID NO: 317790
aacauuugcugacagagua

SEQ ID NO: 417440 - RNA, 19 nt, Artificial Sequence
  Description of Artificial Sequence: Synthetic oligonucleotide
  Antisense Strand to SEQ ID NO: 417439
uacucugucagcaaauguu

SEQ ID NO: 417441 - RNA, 19 nt, Artificial Sequence
  Description of Artificial Sequence: Synthetic oligonucleotide
  Sense Strand Starting at position 1258 of SEQ ID NO: 317920
cuaugcuuggaacgugaua

SEQ ID NO: 417442 - RNA, 19 nt, Artificial Sequence
  Description of Artificial Sequence: Synthetic oligonucleotide
  Antisense Strand to SEQ ID NO: 417441
uaucacguuccaagcauag

SEQ ID NO: 417443 - RNA, 19 nt, Artificial Sequence
  Description of Artificial Sequence: Synthetic oligonucleotide
  Sense Strand Starting at position 1258 of SEQ ID NO: 317922
augcuuggaacgugauaag

SEQ ID NO: 417444 - RNA, 19 nt, Artificial Sequence
  Description of Artificial Sequence: Synthetic oligonucleotide
  Antisense Strand to SEQ ID NO: 417443
cuuaucacguuccaagcau

SEQ ID NO: 417445 - RNA, 19 nt, Artificial Sequence
  Description of Artificial Sequence: Synthetic oligonucleotide
  Sense Strand Starting at position 1258 of SEQ ID NO: 317964
cuagcucauuuggaaaguu

SEQ ID NO: 417446 - RNA, 19 nt, Artificial Sequence
  Description of Artificial Sequence: Synthetic oligonucleotide
  Antisense Strand to SEQ ID NO: 417445
aacuuuccaaaugagcuag

SEQ ID NO: 417447 - RNA, 19 nt, Artificial Sequence
  Description of Artificial Sequence: Synthetic oligonucleotide
  Sense Strand Starting at position 1258 of SEQ ID NO: 318140
agacacuuguacucuaaug

SEQ ID NO: 417448 - RNA, 19 nt, Artificial Sequence
  Description of Artificial Sequence: Synthetic oligonucleotide
  Antisense Strand to SEQ ID NO: 417447
cauuagaguacaagugucu

SEQ ID NO: 417449 - RNA, 19 nt, Artificial Sequence
  Description of Artificial Sequence: Synthetic oligonucleotide
  Sense Strand Starting at position 1258 of SEQ ID NO: 318310
auaaacuuuggaggcauua

SEQ ID NO: 417450 - RNA, 19 nt, Artificial Sequence
  Description of Artificial Sequence: Synthetic oligonucleotide
  Antisense Strand to SEQ ID NO: 417449
uaaugccuccaaaguuuau

SEQ ID NO: 417451 - RNA, 19 nt, Artificial Sequence
  Description of Artificial Sequence: Synthetic oligonucleotide
  Sense Strand Starting at position 1258 of SEQ ID NO: 318322
ggcauuauacacugagaua

SEQ ID NO: 417452 - RNA, 19 nt, Artificial Sequence
  Description of Artificial Sequence: Synthetic oligonucleotide
  Antisense Strand to SEQ ID NO: 417451
uaucucaguguauaaugcc

SEQ ID NO: 417453 - RNA, 19 nt, Artificial Sequence
  Description of Artificial Sequence: Synthetic oligonucleotide
  Sense Strand Starting at position 1258 of SEQ ID NO: 318363
auuguauaaguccaccuau

SEQ ID NO: 417454 - RNA, 19 nt, Artificial Sequence
  Description of Artificial Sequence: Synthetic oligonucleotide
  Antisense Strand to SEQ ID NO: 417453
auagguggacuuauacaau

SEQ ID NO: 417455 - RNA, 19 nt, Artificial Sequence
  Description of Artificial Sequence: Synthetic oligonucleotide
  Sense Strand Starting at position 1258 of SEQ ID NO: 318461
ggcaguuacuguuuaauag

SEQ ID NO: 417456 - RNA, 19 nt, Artificial Sequence
  Description of Artificial Sequence: Synthetic oligonucleotide
  Antisense Strand to SEQ ID NO: 417455
cuauuaaacaguaacugcc

SEQ ID NO: 417457 - RNA, 19 nt, Artificial Sequence
  Description of Artificial Sequence: Synthetic oligonucleotide
  Sense Strand Starting at position 1258 of SEQ ID NO: 318468
acuguuuaauagguaugaa

SEQ ID NO: 417458 - RNA, 19 nt, Artificial Sequence
  Description of Artificial Sequence: Synthetic oligonucleotide
  Antisense Strand to SEQ ID NO: 417457
uucauaccuauuaaacagu

SEQ ID NO: 417459 - RNA, 19 nt, Artificial Sequence
  Description of Artificial Sequence: Synthetic oligonucleotide
  Sense Strand Starting at position 1258 of SEQ ID NO: 318536
guuguacaagaacgugaau

SEQ ID NO: 417460 - RNA, 19 nt, Artificial Sequence
  Description of Artificial Sequence: Synthetic oligonucleotide
  Antisense Strand to SEQ ID NO: 417459
auucacguucuuguacaac

SEQ ID NO: 417461 - RNA, 19 nt, Artificial Sequence
  Description of Artificial Sequence: Synthetic oligonucleotide
  Sense Strand Starting at position 1258 of SEQ ID NO: 318538
uguacaagaacgugaaugu

SEQ ID NO: 417462 - RNA, 19 nt, Artificial Sequence
  Description of Artificial Sequence: Synthetic oligonucleotide
  Antisense Strand to SEQ ID NO: 417461
acauucacguucuuguaca

SEQ ID NO: 417463 - RNA, 19 nt, Artificial Sequence
  Description of Artificial Sequence: Synthetic oligonucleotide
  Sense Strand Starting at position 1258 of SEQ ID NO: 318539
guacaagaacgugaaugua

SEQ ID NO: 417464 - RNA, 19 nt, Artificial Sequence
  Description of Artificial Sequence: Synthetic oligonucleotide
  Antisense Strand to SEQ ID NO: 417463
uacauucacguucuuguac

SEQ ID NO: 417465 - RNA, 19 nt, Artificial Sequence
  Description of Artificial Sequence: Synthetic oligonucleotide
  Sense Strand Starting at position 1258 of SEQ ID NO: 318682
ugucuaagagacugauuac

SEQ ID NO: 417466 - RNA, 19 nt, Artificial Sequence
  Description of Artificial Sequence: Synthetic oligonucleotide
  Antisense Strand to SEQ ID NO: 417465
guaaucagucucuuagaca

SEQ ID NO: 417467 - RNA, 19 nt, Artificial Sequence
  Description of Artificial Sequence: Synthetic oligonucleotide
  Sense Strand Starting at position 1258 of SEQ ID NO: 318776
auaaauaucgucuaguagu

SEQ ID NO: 417468 - RNA, 19 nt, Artificial Sequence
  Description of Artificial Sequence: Synthetic oligonucleotide
  Antisense Strand to SEQ ID NO: 417467
acuacuagacgauauuuau

SEQ ID NO: 417469 - RNA, 19 nt, Artificial Sequence
  Description of Artificial Sequence: Synthetic oligonucleotide
  Sense Strand Starting at position 1258 of SEQ ID NO: 318782
aucgucuaguaguuauaac

SEQ ID NO: 417470 - RNA, 19 nt, Artificial Sequence
  Description of Artificial Sequence: Synthetic oligonucleotide
  Antisense Strand to SEQ ID NO: 417469
guuauaacuacuagacgau

SEQ ID NO: 417471 - RNA, 19 nt, Artificial Sequence
  Description of Artificial Sequence: Synthetic oligonucleotide
  Sense Strand Starting at position 1258 of SEQ ID NO: 318783
ucgucuaguaguuauaaca

SEQ ID NO: 417472 - RNA, 19 nt, Artificial Sequence
  Description of Artificial Sequence: Synthetic oligonucleotide
  Antisense Strand to SEQ ID NO: 417471
uguuauaacuacuagacga

SEQ ID NO: 417473 - RNA, 19 nt, Artificial Sequence
  Description of Artificial Sequence: Synthetic oligonucleotide
  Sense Strand Starting at position 1258 of SEQ ID NO: 318829
uguuccuguucuuuaaaga

SEQ ID NO: 417474 - RNA, 19 nt, Artificial Sequence
  Description of Artificial Sequence: Synthetic oligonucleotide
  Antisense Strand to SEQ ID NO: 417473
ucuuuaaagaacaggaaca

SEQ ID NO: 417475 - RNA, 19 nt, Artificial Sequence
  Description of Artificial Sequence: Synthetic oligonucleotide
  Sense Strand Starting at position 1258 of SEQ ID NO: 318830
guuccuguucuuuaaagag

SEQ ID NO: 417476 - RNA, 19 nt, Artificial Sequence
  Description of Artificial Sequence: Synthetic oligonucleotide
  Antisense Strand to SEQ ID NO: 417475
cucuuuaaagaacaggaac

SEQ ID NO: 417477 - RNA, 19 nt, Artificial Sequence
  Description of Artificial Sequence: Synthetic oligonucleotide
  Sense Strand Starting at position 1258 of SEQ ID NO: 318894
auaugaucuuugucaagua

SEQ ID NO: 417478 - RNA, 19 nt, Artificial Sequence
  Description of Artificial Sequence: Synthetic oligonucleotide
  Antisense Strand to SEQ ID NO: 417477
uacuugacaaagaucauau

SEQ ID NO: 417479 - RNA, 19 nt, Artificial Sequence
  Description of Artificial Sequence: Synthetic oligonucleotide
  Sense Strand Starting at position 1258 of SEQ ID NO: 318927
cuguuaaguuuacuaagau

SEQ ID NO: 417480 - RNA, 19 nt, Artificial Sequence
  Description of Artificial Sequence: Synthetic oligonucleotide
  Antisense Strand to SEQ ID NO: 417479
aucuuaguaaacuuaacag

SEQ ID NO: 417481 - RNA, 19 nt, Artificial Sequence
  Description of Artificial Sequence: Synthetic oligonucleotide
  Sense Strand Starting at position 1258 of SEQ ID NO: 318964
uuggaaguguuucuauaaa

SEQ ID NO: 417482 - RNA, 19 nt, Artificial Sequence
  Description of Artificial Sequence: Synthetic oligonucleotide
  Antisense Strand to SEQ ID NO: 417481
uuuauagaaacacuuccaa

SEQ ID NO: 417483 - RNA, 19 nt, Artificial Sequence
  Description of Artificial Sequence: Synthetic oligonucleotide
  Sense Strand Starting at position 1258 of SEQ ID NO: 319003
ucaauaugucugggaucug

SEQ ID NO: 417484 - RNA, 19 nt, Artificial Sequence
  Description of Artificial Sequence: Synthetic oligonucleotide
  Antisense Strand to SEQ ID NO: 417483
cagaucccagacauauuga

SEQ ID NO: 417485 - RNA, 19 nt, Artificial Sequence
  Description of Artificial Sequence: Synthetic oligonucleotide
  Sense Strand Starting at position 1258 of SEQ ID NO: 319008
augucugggaucugaccua

SEQ ID NO: 417486 - RNA, 19 nt, Artificial Sequence
  Description of Artificial Sequence: Synthetic oligonucleotide
  Antisense Strand to SEQ ID NO: 417485
uaggucagaucccagacau

SEQ ID NO: 417487 - RNA, 19 nt, Artificial Sequence
  Description of Artificial Sequence: Synthetic oligonucleotide
  Sense Strand Starting at position 1259 of SEQ ID NO: 315283
ggauuacgacuaggucuau

SEQ ID NO: 417488 - RNA, 19 nt, Artificial Sequence
  Description of Artificial Sequence: Synthetic oligonucleotide
  Antisense Strand to SEQ ID NO: 417487
auagaccuagucguaaucc

SEQ ID NO: 417489 - RNA, 19 nt, Artificial Sequence
  Description of Artificial Sequence: Synthetic oligonucleotide
  Sense Strand Starting at position 1259 of SEQ ID NO: 315287
uacgacuaggucuauguau

SEQ ID NO: 417490 - RNA, 19 nt, Artificial Sequence
  Description of Artificial Sequence: Synthetic oligonucleotide
  Antisense Strand to SEQ ID NO: 417489
auacauagaccuagucgua

SEQ ID NO: 417491 - RNA, 19 nt, Artificial Sequence
  Description of Artificial Sequence: Synthetic oligonucleotide
  Sense Strand Starting at position 1259 of SEQ ID NO: 315298
cuauguaucuaccugguuu

SEQ ID NO: 417492 - RNA, 19 nt, Artificial Sequence
  Description of Artificial Sequence: Synthetic oligonucleotide
  Antisense Strand to SEQ ID NO: 417491
aaaccagguagauacauag

SEQ ID NO: 417493 - RNA, 19 nt, Artificial Sequence
  Description of Artificial Sequence: Synthetic oligonucleotide
  Sense Strand Starting at position 1259 of SEQ ID NO: 315386
cugacugacugguugaguu

SEQ ID NO: 417494 - RNA, 19 nt, Artificial Sequence
  Description of Artificial Sequence: Synthetic oligonucleotide
  Antisense Strand to SEQ ID NO: 417493
aacucaaccagucagucag

SEQ ID NO: 417495 - RNA, 19 nt, Artificial Sequence
  Description of Artificial Sequence: Synthetic oligonucleotide
  Sense Strand Starting at position 1259 of SEQ ID NO: 315390
cugacugguugaguuacau

SEQ ID NO: 417496 - RNA, 19 nt, Artificial Sequence
  Description of Artificial Sequence: Synthetic oligonucleotide
  Antisense Strand to SEQ ID NO: 417495
auguaacucaaccagucag

SEQ ID NO: 417497 - RNA, 19 nt, Artificial Sequence
  Description of Artificial Sequence: Synthetic oligonucleotide
  Sense Strand Starting at position 1259 of SEQ ID NO: 315706
uuuauacuucuggguagag

SEQ ID NO: 417498 - RNA, 19 nt, Artificial Sequence
  Description of Artificial Sequence: Synthetic oligonucleotide
  Antisense Strand to SEQ ID NO: 417497
cucuacccagaaguauaaa

SEQ ID NO: 417499 - RNA, 19 nt, Artificial Sequence
  Description of Artificial Sequence: Synthetic oligonucleotide
  Sense Strand Starting at position 1259 of SEQ ID NO: 315707
uuauacuucuggguagaga

SEQ ID NO: 417500 - RNA, 19 nt, Artificial Sequence
  Description of Artificial Sequence: Synthetic oligonucleotide
  Antisense Strand to SEQ ID NO: 417499
ucucuacccagaaguauaa

SEQ ID NO: 417501 - RNA, 19 nt, Artificial Sequence
  Description of Artificial Sequence: Synthetic oligonucleotide
  Sense Strand Starting at position 1259 of SEQ ID NO: 316058
ucagaucuuauggguaaga

SEQ ID NO: 417502 - RNA, 19 nt, Artificial Sequence
  Description of Artificial Sequence: Synthetic oligonucleotide
  Antisense Strand to SEQ ID NO: 417501
ucuuacccauaagaucuga

SEQ ID NO: 417503 - RNA, 19 nt, Artificial Sequence
  Description of Artificial Sequence: Synthetic oligonucleotide
  Sense Strand Starting at position 1259 of SEQ ID NO: 316071
guaagaaguuaaucacuug

SEQ ID NO: 417504 - RNA, 19 nt, Artificial Sequence
  Description of Artificial Sequence: Synthetic oligonucleotide
  Antisense Strand to SEQ ID NO: 417503
caagugauuaacuucuuac

SEQ ID NO: 417505 - RNA, 19 nt, Artificial Sequence
  Description of Artificial Sequence: Synthetic oligonucleotide
  Sense Strand Starting at position 1259 of SEQ ID NO: 316074
agaaguuaaucacuuguau

SEQ ID NO: 417506 - RNA, 19 nt, Artificial Sequence
  Description of Artificial Sequence: Synthetic oligonucleotide
  Antisense Strand to SEQ ID NO: 417505
auacaagugauuaacuucu

SEQ ID NO: 417507 - RNA, 19 nt, Artificial Sequence
  Description of Artificial Sequence: Synthetic oligonucleotide
  Sense Strand Starting at position 1259 of SEQ ID NO: 316083
ucacuuguaucuuuagauc

SEQ ID NO: 417508 - RNA, 19 nt, Artificial Sequence
  Description of Artificial Sequence: Synthetic oligonucleotide
  Antisense Strand to SEQ ID NO: 417507
gaucuaaagauacaaguga

SEQ ID NO: 417509 - RNA, 19 nt, Artificial Sequence
  Description of Artificial Sequence: Synthetic oligonucleotide
  Sense Strand Starting at position 1259 of SEQ ID NO: 316089
guaucuuuagaucaaugca

SEQ ID NO: 417510 - RNA, 19 nt, Artificial Sequence
  Description of Artificial Sequence: Synthetic oligonucleotide
  Antisense Strand to SEQ ID NO: 417509
ugcauugaucuaaagauac

SEQ ID NO: 417511 - RNA, 19 nt, Artificial Sequence
  Description of Artificial Sequence: Synthetic oligonucleotide
  Sense Strand Starting at position 1259 of SEQ ID NO: 316148
cuggaaagcucuguaauuc

SEQ ID NO: 417512 - RNA, 19 nt, Artificial Sequence
  Description of Artificial Sequence: Synthetic oligonucleotide
  Antisense Strand to SEQ ID NO: 417511
gaauuacagagcuuuccag

SEQ ID NO: 417513 - RNA, 19 nt, Artificial Sequence
  Description of Artificial Sequence: Synthetic oligonucleotide
  Sense Strand Starting at position 1259 of SEQ ID NO: 316149
uggaaagcucuguaauucu

SEQ ID NO: 417514 - RNA, 19 nt, Artificial Sequence
  Description of Artificial Sequence: Synthetic oligonucleotide
  Antisense Strand to SEQ ID NO: 417513
agaauuacagagcuuucca

SEQ ID NO: 417515 - RNA, 19 nt, Artificial Sequence
  Description of Artificial Sequence: Synthetic oligonucleotide
  Sense Strand Starting at position 1259 of SEQ ID NO: 316167
ugagucggucugggauauu

SEQ ID NO: 417516 - RNA, 19 nt, Artificial Sequence
  Description of Artificial Sequence: Synthetic oligonucleotide
  Antisense Strand to SEQ ID NO: 417515
aauaucccagaccgacuca

SEQ ID NO: 417517 - RNA, 19 nt, Artificial Sequence
  Description of Artificial Sequence: Synthetic oligonucleotide
  Sense Strand Starting at position 1259 of SEQ ID NO: 316254
auuauugggcagcgagaau

SEQ ID NO: 417518 - RNA, 19 nt, Artificial Sequence
  Description of Artificial Sequence: Synthetic oligonucleotide
  Antisense Strand to SEQ ID NO: 417517
auucucgcugcccaauaau

SEQ ID NO: 417519 - RNA, 19 nt, Artificial Sequence
  Description of Artificial Sequence: Synthetic oligonucleotide
  Sense Strand Starting at position 1259 of SEQ ID NO: 316308
ggagcauuaccacgacacu

SEQ ID NO: 417520 - RNA, 19 nt, Artificial Sequence
  Description of Artificial Sequence: Synthetic oligonucleotide
  Antisense Strand to SEQ ID NO: 417519
agugucgugguaaugcucc

SEQ ID NO: 417521 - RNA, 19 nt, Artificial Sequence
  Description of Artificial Sequence: Synthetic oligonucleotide
  Sense Strand Starting at position 1259 of SEQ ID NO: 316369
ggcuucaggcaguaugaga

SEQ ID NO: 417522 - RNA, 19 nt, Artificial Sequence
  Description of Artificial Sequence: Synthetic oligonucleotide
  Antisense Strand to SEQ ID NO: 417521
ucucauacugccugaagcc

SEQ ID NO: 417523 - RNA, 19 nt, Artificial Sequence
  Description of Artificial Sequence: Synthetic oligonucleotide
  Sense Strand Starting at position 1259 of SEQ ID NO: 316402
uagaaacucuaaccgaguu

SEQ ID NO: 417524 - RNA, 19 nt, Artificial Sequence
  Description of Artificial Sequence: Synthetic oligonucleotide
  Antisense Strand to SEQ ID NO: 417523
aacucgguuagaguuucua

SEQ ID NO: 417525 - RNA, 19 nt, Artificial Sequence
  Description of Artificial Sequence: Synthetic oligonucleotide
  Sense Strand Starting at position 1259 of SEQ ID NO: 316471
ccaccugcacucgaggauu

SEQ ID NO: 417526 - RNA, 19 nt, Artificial Sequence
  Description of Artificial Sequence: Synthetic oligonucleotide
  Antisense Strand to SEQ ID NO: 417525
aauccucgagugcaggugg

SEQ ID NO: 417527 - RNA, 19 nt, Artificial Sequence
  Description of Artificial Sequence: Synthetic oligonucleotide
  Sense Strand Starting at position 1259 of SEQ ID NO: 316505
gcuccuagacauuguauuu

SEQ ID NO: 417528 - RNA, 19 nt, Artificial Sequence
  Description of Artificial Sequence: Synthetic oligonucleotide
  Antisense Strand to SEQ ID NO: 417527
aaauacaaugucuaggagc

SEQ ID NO: 417529 - RNA, 19 nt, Artificial Sequence
  Description of Artificial Sequence: Synthetic oligonucleotide
  Sense Strand Starting at position 1259 of SEQ ID NO: 316804
uccgccucgacuuaggaaa

SEQ ID NO: 417530 - RNA, 19 nt, Artificial Sequence
  Description of Artificial Sequence: Synthetic oligonucleotide
  Antisense Strand to SEQ ID NO: 417529
uuuccuaagucgaggcgga

SEQ ID NO: 417531 - RNA, 19 nt, Artificial Sequence
  Description of Artificial Sequence: Synthetic oligonucleotide
  Sense Strand Starting at position 1259 of SEQ ID NO: 317423
gcgcggguucguuuaauua

SEQ ID NO: 417532 - RNA, 19 nt, Artificial Sequence
  Description of Artificial Sequence: Synthetic oligonucleotide
  Antisense Strand to SEQ ID NO: 417531
uaauuaaacgaacccgcgc

SEQ ID NO: 417533 - RNA, 19 nt, Artificial Sequence
  Description of Artificial Sequence: Synthetic oligonucleotide
  Sense Strand Starting at position 1259 of SEQ ID NO: 317579
ggacggacuguucgguaaa

SEQ ID NO: 417534 - RNA, 19 nt, Artificial Sequence
  Description of Artificial Sequence: Synthetic oligonucleotide
  Antisense Strand to SEQ ID NO: 417533
uuuaccgaacaguccgucc

SEQ ID NO: 417535 - RNA, 19 nt, Artificial Sequence
  Description of Artificial Sequence: Synthetic oligonucleotide
  Sense Strand Starting at position 1259 of SEQ ID NO: 317581
acggacuguucgguaaaug

SEQ ID NO: 417536 - RNA, 19 nt, Artificial Sequence
  Description of Artificial Sequence: Synthetic oligonucleotide
  Antisense Strand to SEQ ID NO: 417535
cauuuaccgaacaguccgu

SEQ ID NO: 417537 - RNA, 19 nt, Artificial Sequence
  Description of Artificial Sequence: Synthetic oligonucleotide
  Sense Strand Starting at position 1259 of SEQ ID NO: 317643
uaggguuaaguccacaguu

SEQ ID NO: 417538 - RNA, 19 nt, Artificial Sequence
  Description of Artificial Sequence: Synthetic oligonucleotide
  Antisense Strand to SEQ ID NO: 417537
aacuguggacuuaacccua

SEQ ID NO: 417539 - RNA, 19 nt, Artificial Sequence
  Description of Artificial Sequence: Synthetic oligonucleotide
  Sense Strand Starting at position 1259 of SEQ ID NO: 317645
ggguuaaguccacaguuga

SEQ ID NO: 417540 - RNA, 19 nt, Artificial Sequence
  Description of Artificial Sequence: Synthetic oligonucleotide
  Antisense Strand to SEQ ID NO: 417539
ucaacuguggacuuaaccc

SEQ ID NO: 417541 - RNA, 19 nt, Artificial Sequence
  Description of Artificial Sequence: Synthetic oligonucleotide
  Sense Strand Starting at position 1259 of SEQ ID NO: 317666
gagucacgcgcauucgaaa

SEQ ID NO: 417542 - RNA, 19 nt, Artificial Sequence
  Description of Artificial Sequence: Synthetic oligonucleotide
  Antisense Strand to SEQ ID NO: 417541
uuucgaaugcgcgugacuc

SEQ ID NO: 417543 - RNA, 19 nt, Artificial Sequence
  Description of Artificial Sequence: Synthetic oligonucleotide
  Sense Strand Starting at position 1259 of SEQ ID NO: 317667
agucacgcgcauucgaaau

SEQ ID NO: 417544 - RNA, 19 nt, Artificial Sequence
  Description of Artificial Sequence: Synthetic oligonucleotide
  Antisense Strand to SEQ ID NO: 417543
auuucgaaugcgcgugacu

SEQ ID NO: 417545 - RNA, 19 nt, Artificial Sequence
  Description of Artificial Sequence: Synthetic oligonucleotide
  Sense Strand Starting at position 1259 of SEQ ID NO: 317704
ugaacuuacugggcauauu

SEQ ID NO: 417546 - RNA, 19 nt, Artificial Sequence
  Description of Artificial Sequence: Synthetic oligonucleotide
  Antisense Strand to SEQ ID NO: 417545
aauaugcccaguaaguuca

SEQ ID NO: 417547 - RNA, 19 nt, Artificial Sequence
  Description of Artificial Sequence: Synthetic oligonucleotide
  Sense Strand Starting at position 1259 of SEQ ID NO: 317776
ccaucuguaacguggagaa

SEQ ID NO: 417548 - RNA, 19 nt, Artificial Sequence
  Description of Artificial Sequence: Synthetic oligonucleotide
  Antisense Strand to SEQ ID NO: 417547
uucuccacguuacagaugg

SEQ ID NO: 417549 - RNA, 19 nt, Artificial Sequence
  Description of Artificial Sequence: Synthetic oligonucleotide
  Sense Strand Starting at position 1259 of SEQ ID NO: 317778
aucuguaacguggagaacu

SEQ ID NO: 417550 - RNA, 19 nt, Artificial Sequence
  Description of Artificial Sequence: Synthetic oligonucleotide
  Antisense Strand to SEQ ID NO: 417549
aguucuccacguuacagau

SEQ ID NO: 417551 - RNA, 19 nt, Artificial Sequence
  Description of Artificial Sequence: Synthetic oligonucleotide
  Sense Strand Starting at position 1259 of SEQ ID NO: 317780
cuguaacguggagaacuua

SEQ ID NO: 417552 - RNA, 19 nt, Artificial Sequence
  Description of Artificial Sequence: Synthetic oligonucleotide
  Antisense Strand to SEQ ID NO: 417551
uaaguucuccacguuacag

SEQ ID NO: 417553 - RNA, 19 nt, Artificial Sequence
  Description of Artificial Sequence: Synthetic oligonucleotide
  Sense Strand Starting at position 1259 of SEQ ID NO: 317816
uaauucuuucuagagcgga

SEQ ID NO: 417554 - RNA, 19 nt, Artificial Sequence
  Description of Artificial Sequence: Synthetic oligonucleotide
  Antisense Strand to SEQ ID NO: 417553
uccgcucuagaaagaauua

SEQ ID NO: 417555 - RNA, 19 nt, Artificial Sequence
  Description of Artificial Sequence: Synthetic oligonucleotide
  Sense Strand Starting at position 1259 of SEQ ID NO: 317871
gccguugagcccuuaaagu

SEQ ID NO: 417556 - RNA, 19 nt, Artificial Sequence
  Description of Artificial Sequence: Synthetic oligonucleotide
  Antisense Strand to SEQ ID NO: 417555
acuuuaagggcucaacggc

SEQ ID NO: 417557 - RNA, 19 nt, Artificial Sequence
  Description of Artificial Sequence: Synthetic oligonucleotide
  Sense Strand Starting at position 1259 of SEQ ID NO: 318371
aaaguaagaugugcaauua

SEQ ID NO: 417558 - RNA, 19 nt, Artificial Sequence
  Description of Artificial Sequence: Synthetic oligonucleotide
  Antisense Strand to SEQ ID NO: 417557
uaauugcacaucuuacuuu

SEQ ID NO: 417559 - RNA, 19 nt, Artificial Sequence
  Description of Artificial Sequence: Synthetic oligonucleotide
  Sense Strand Starting at position 1259 of SEQ ID NO: 318460
gaggcacagcauugauauc

SEQ ID NO: 417560 - RNA, 19 nt, Artificial Sequence
  Description of Artificial Sequence: Synthetic oligonucleotide
  Antisense Strand to SEQ ID NO: 417559
gauaucaaugcugugccuc

SEQ ID NO: 417561 - RNA, 19 nt, Artificial Sequence
  Description of Artificial Sequence: Synthetic oligonucleotide
  Sense Strand Starting at position 1259 of SEQ ID NO: 318543
ucaggcuugucugcuauuu

SEQ ID NO: 417562 - RNA, 19 nt, Artificial Sequence
  Description of Artificial Sequence: Synthetic oligonucleotide
  Antisense Strand to SEQ ID NO: 417561
aaauagcagacaagccuga

SEQ ID NO: 417563 - RNA, 19 nt, Artificial Sequence
  Description of Artificial Sequence: Synthetic oligonucleotide
  Sense Strand Starting at position 1259 of SEQ ID NO: 318862
auacacauucuguaguaca

SEQ ID NO: 417564 - RNA, 19 nt, Artificial Sequence
  Description of Artificial Sequence: Synthetic oligonucleotide
  Antisense Strand to SEQ ID NO: 417563
uguacuacagaauguguau

SEQ ID NO: 417565 - RNA, 19 nt, Artificial Sequence
  Description of Artificial Sequence: Synthetic oligonucleotide
  Sense Strand Starting at position 1259 of SEQ ID NO: 318937
ugcuauaucgcuucuuugu

SEQ ID NO: 417566 - RNA, 19 nt, Artificial Sequence
  Description of Artificial Sequence: Synthetic oligonucleotide
  Antisense Strand to SEQ ID NO: 417565
acaaagaagcgauauagca

SEQ ID NO: 417567 - RNA, 19 nt, Artificial Sequence
  Description of Artificial Sequence: Synthetic oligonucleotide
  Sense Strand Starting at position 1260 of SEQ ID NO: 315297
uuguuugagauaugucaug

SEQ ID NO: 417568 - RNA, 19 nt, Artificial Sequence
  Description of Artificial Sequence: Synthetic oligonucleotide
  Antisense Strand to SEQ ID NO: 417567
caugacauaucucaaacaa

SEQ ID NO: 417569 - RNA, 19 nt, Artificial Sequence
  Description of Artificial Sequence: Synthetic oligonucleotide
  Sense Strand Starting at position 1260 of SEQ ID NO: 315449
ugcacagugagcuggaaua

SEQ ID NO: 417570 - RNA, 19 nt, Artificial Sequence
  Description of Artificial Sequence: Synthetic oligonucleotide
  Antisense Strand to SEQ ID NO: 417569
uauuccagcucacugugca

SEQ ID NO: 417571 - RNA, 19 nt, Artificial Sequence
  Description of Artificial Sequence: Synthetic oligonucleotide
  Sense Strand Starting at position 1260 of SEQ ID NO: 315641
cucaaagacugcucaaagu

SEQ ID NO: 417572 - RNA, 19 nt, Artificial Sequence
  Description of Artificial Sequence: Synthetic oligonucleotide
  Antisense Strand to SEQ ID NO: 417571
acuuugagcagucuuugag

SEQ ID NO: 417573 - RNA, 19 nt, Artificial Sequence
  Description of Artificial Sequence: Synthetic oligonucleotide
  Sense Strand Starting at position 1260 of SEQ ID NO: 315757
auagguggacuuuguuuau

SEQ ID NO: 417574 - RNA, 19 nt, Artificial Sequence
  Description of Artificial Sequence: Synthetic oligonucleotide
  Antisense Strand to SEQ ID NO: 417573
auaaacaaaguccaccuau

SEQ ID NO: 417575 - RNA, 19 nt, Artificial Sequence
  Description of Artificial Sequence: Synthetic oligonucleotide
  Sense Strand Starting at position 1260 of SEQ ID NO: 315760
gguggacuuuguuuauaug

SEQ ID NO: 417576 - RNA, 19 nt, Artificial Sequence
  Description of Artificial Sequence: Synthetic oligonucleotide
  Antisense Strand to SEQ ID NO: 417575
cauauaaacaaaguccacc

SEQ ID NO: 417577 - RNA, 19 nt, Artificial Sequence
  Description of Artificial Sequence: Synthetic oligonucleotide
  Sense Strand Starting at position 1260 of SEQ ID NO: 315761
guggacuuuguuuauaugu

SEQ ID NO: 417578 - RNA, 19 nt, Artificial Sequence
  Description of Artificial Sequence: Synthetic oligonucleotide
  Antisense Strand to SEQ ID NO: 417577
acauauaaacaaaguccac

SEQ ID NO: 417579 - RNA, 19 nt, Artificial Sequence
  Description of Artificial Sequence: Synthetic oligonucleotide
  Sense Strand Starting at position 1260 of SEQ ID NO: 315838
uaggaaggcugucauuuau

SEQ ID NO: 417580 - RNA, 19 nt, Artificial Sequence
  Description of Artificial Sequence: Synthetic oligonucleotide
  Antisense Strand to SEQ ID NO: 417579
auaaaugacagccuuccua

SEQ ID NO: 417581 - RNA, 19 nt, Artificial Sequence
  Description of Artificial Sequence: Synthetic oligonucleotide
  Sense Strand Starting at position 1260 of SEQ ID NO: 315935
ggguuuguuccagaaguuu

SEQ ID NO: 417582 - RNA, 19 nt, Artificial Sequence
  Description of Artificial Sequence: Synthetic oligonucleotide
  Antisense Strand to SEQ ID NO: 417581
aaacuucuggaacaaaccc

SEQ ID NO: 417583 - RNA, 19 nt, Artificial Sequence
  Description of Artificial Sequence: Synthetic oligonucleotide
  Sense Strand Starting at position 1260 of SEQ ID NO: 315979
aguguacagccauauaaau

SEQ ID NO: 417584 - RNA, 19 nt, Artificial Sequence
  Description of Artificial Sequence: Synthetic oligonucleotide
  Antisense Strand to SEQ ID NO: 417583
auuuauauggcuguacacu

SEQ ID NO: 417585 - RNA, 19 nt, Artificial Sequence
  Description of Artificial Sequence: Synthetic oligonucleotide
  Sense Strand Starting at position 1260 of SEQ ID NO: 316017
aguguuuccauguaggaaa

SEQ ID NO: 417586 - RNA, 19 nt, Artificial Sequence
  Description of Artificial Sequence: Synthetic oligonucleotide
  Antisense Strand to SEQ ID NO: 417585
uuuccuacauggaaacacu

SEQ ID NO: 417587 - RNA, 19 nt, Artificial Sequence
  Description of Artificial Sequence: Synthetic oligonucleotide
  Sense Strand Starting at position 1260 of SEQ ID NO: 316041
gcagucuuagggcaaucaa

SEQ ID NO: 417588 - RNA, 19 nt, Artificial Sequence
  Description of Artificial Sequence: Synthetic oligonucleotide
  Antisense Strand to SEQ ID NO: 417587
uugauugcccuaagacugc

SEQ ID NO: 417589 - RNA, 19 nt, Artificial Sequence
  Description of Artificial Sequence: Synthetic oligonucleotide
  Sense Strand Starting at position 1260 of SEQ ID NO: 316093
aaggaugauugcgugacau

SEQ ID NO: 417590 - RNA, 19 nt, Artificial Sequence
  Description of Artificial Sequence: Synthetic oligonucleotide
  Antisense Strand to SEQ ID NO: 417589
augucacgcaaucauccuu

SEQ ID NO: 417591 - RNA, 19 nt, Artificial Sequence
  Description of Artificial Sequence: Synthetic oligonucleotide
  Sense Strand Starting at position 1260 of SEQ ID NO: 316105
gugacauggccuuaauaug

SEQ ID NO: 417592 - RNA, 19 nt, Artificial Sequence
  Description of Artificial Sequence: Synthetic oligonucleotide
  Antisense Strand to SEQ ID NO: 417591
cauauuaaggccaugucac

SEQ ID NO: 417593 - RNA, 19 nt, Artificial Sequence
  Description of Artificial Sequence: Synthetic oligonucleotide
  Sense Strand Starting at position 1260 of SEQ ID NO: 316113
gccuuaauauggccauaaa

SEQ ID NO: 417594 - RNA, 19 nt, Artificial Sequence
  Description of Artificial Sequence: Synthetic oligonucleotide
  Antisense Strand to SEQ ID NO: 417593
uuuauggccauauuaaggc

SEQ ID NO: 417595 - RNA, 19 nt, Artificial Sequence
  Description of Artificial Sequence: Synthetic oligonucleotide
  Sense Strand Starting at position 1260 of SEQ ID NO: 316157
aggauaacgcgcuaaauau

SEQ ID NO: 417596 - RNA, 19 nt, Artificial Sequence
  Description of Artificial Sequence: Synthetic oligonucleotide
  Antisense Strand to SEQ ID NO: 417595
auauuuagcgcguuauccu

SEQ ID NO: 417597 - RNA, 19 nt, Artificial Sequence
  Description of Artificial Sequence: Synthetic oligonucleotide
  Sense Strand Starting at position 1260 of SEQ ID NO: 316299
cguaaauccagagaaaguu

SEQ ID NO: 417598 - RNA, 19 nt, Artificial Sequence
  Description of Artificial Sequence: Synthetic oligonucleotide
  Antisense Strand to SEQ ID NO: 417597
aacuuucucuggauuuacg

SEQ ID NO: 417599 - RNA, 19 nt, Artificial Sequence
  Description of Artificial Sequence: Synthetic oligonucleotide
  Sense Strand Starting at position 1260 of SEQ ID NO: 316372
cuaggauauuccguuauua

SEQ ID NO: 417600 - RNA, 19 nt, Artificial Sequence
  Description of Artificial Sequence: Synthetic oligonucleotide
  Antisense Strand to SEQ ID NO: 417599
uaauaacggaauauccuag

SEQ ID NO: 417601 - RNA, 19 nt, Artificial Sequence
  Description of Artificial Sequence: Synthetic oligonucleotide
  Sense Strand Starting at position 1260 of SEQ ID NO: 316374
aggauauuccguuauuaau

SEQ ID NO: 417602 - RNA, 19 nt, Artificial Sequence
  Description of Artificial Sequence: Synthetic oligonucleotide
  Antisense Strand to SEQ ID NO: 417601
auuaauaacggaauauccu

SEQ ID NO: 417603 - RNA, 19 nt, Artificial Sequence
  Description of Artificial Sequence: Synthetic oligonucleotide
  Sense Strand Starting at position 1260 of SEQ ID NO: 317481
ggacgagagaucuguggga

SEQ ID NO: 417604 - RNA, 19 nt, Artificial Sequence
  Description of Artificial Sequence: Synthetic oligonucleotide
  Antisense Strand to SEQ ID NO: 417603
ucccacagaucucucgucc

SEQ ID NO: 417605 - RNA, 19 nt, Artificial Sequence
  Description of Artificial Sequence: Synthetic oligonucleotide
  Sense Strand Starting at position 1260 of SEQ ID NO: 317483
acgagagaucugugggaga

SEQ ID NO: 417606 - RNA, 19 nt, Artificial Sequence
  Description of Artificial Sequence: Synthetic oligonucleotide
  Antisense Strand to SEQ ID NO: 417605
ucucccacagaucucucgu

SEQ ID NO: 417607 - RNA, 19 nt, Artificial Sequence
  Description of Artificial Sequence: Synthetic oligonucleotide
  Sense Strand Starting at position 1260 of SEQ ID NO: 317778
ugaggaagacuucgcucaa

SEQ ID NO: 417608 - RNA, 19 nt, Artificial Sequence
  Description of Artificial Sequence: Synthetic oligonucleotide
  Antisense Strand to SEQ ID NO: 417607
uugagcgaagucuuccuca

SEQ ID NO: 417609 - RNA, 19 nt, Artificial Sequence
  Description of Artificial Sequence: Synthetic oligonucleotide
  Sense Strand Starting at position 1260 of SEQ ID NO: 317779
gaggaagacuucgcucaau

SEQ ID NO: 417610 - RNA, 19 nt, Artificial Sequence
  Description of Artificial Sequence: Synthetic oligonucleotide
  Antisense Strand to SEQ ID NO: 417609
auugagcgaagucuuccuc

SEQ ID NO: 417611 - RNA, 19 nt, Artificial Sequence
  Description of Artificial Sequence: Synthetic oligonucleotide
  Sense Strand Starting at position 1260 of SEQ ID NO: 317782
gaagacuucgcucaaucgu

SEQ ID NO: 417612 - RNA, 19 nt, Artificial Sequence
  Description of Artificial Sequence: Synthetic oligonucleotide
  Antisense Strand to SEQ ID NO: 417611
acgauugagcgaagucuuc

SEQ ID NO: 417613 - RNA, 19 nt, Artificial Sequence
  Description of Artificial Sequence: Synthetic oligonucleotide
  Sense Strand Starting at position 1260 of SEQ ID NO: 317815
aggguacugguuuaaggua

SEQ ID NO: 417614 - RNA, 19 nt, Artificial Sequence
  Description of Artificial Sequence: Synthetic oligonucleotide
  Antisense Strand to SEQ ID NO: 417613
uaccuuaaaccaguacccu

SEQ ID NO: 417615 - RNA, 19 nt, Artificial Sequence
  Description of Artificial Sequence: Synthetic oligonucleotide
  Sense Strand Starting at position 1260 of SEQ ID NO: 317823
gguuuaagguaauuaagca

SEQ ID NO: 417616 - RNA, 19 nt, Artificial Sequence
  Description of Artificial Sequence: Synthetic oligonucleotide
  Antisense Strand to SEQ ID NO: 417615
ugcuuaauuaccuuaaacc

SEQ ID NO: 417617 - RNA, 19 nt, Artificial Sequence
  Description of Artificial Sequence: Synthetic oligonucleotide
  Sense Strand Starting at position 1260 of SEQ ID NO: 317844
uauggagcaguauguuaau

SEQ ID NO: 417618 - RNA, 19 nt, Artificial Sequence
  Description of Artificial Sequence: Synthetic oligonucleotide
  Antisense Strand to SEQ ID NO: 417617
auuaacauacugcuccaua

SEQ ID NO: 417619 - RNA, 19 nt, Artificial Sequence
  Description of Artificial Sequence: Synthetic oligonucleotide
  Sense Strand Starting at position 1260 of SEQ ID NO: 317858
uuaauugagucucugacga

SEQ ID NO: 417620 - RNA, 19 nt, Artificial Sequence
  Description of Artificial Sequence: Synthetic oligonucleotide
  Antisense Strand to SEQ ID NO: 417619
ucgucagagacucaauuaa

SEQ ID NO: 417621 - RNA, 19 nt, Artificial Sequence
  Description of Artificial Sequence: Synthetic oligonucleotide
  Sense Strand Starting at position 1260 of SEQ ID NO: 317863
ugagucucugacgacuuaa

SEQ ID NO: 417622 - RNA, 19 nt, Artificial Sequence
  Description of Artificial Sequence: Synthetic oligonucleotide
  Antisense Strand to SEQ ID NO: 417621
uuaagucgucagagacuca

SEQ ID NO: 417623 - RNA, 19 nt, Artificial Sequence
  Description of Artificial Sequence: Synthetic oligonucleotide
  Sense Strand Starting at position 1260 of SEQ ID NO: 317874
cgacuuaauguuuagucga

SEQ ID NO: 417624 - RNA, 19 nt, Artificial Sequence
  Description of Artificial Sequence: Synthetic oligonucleotide
  Antisense Strand to SEQ ID NO: 417623
ucgacuaaacauuaagucg

SEQ ID NO: 417625 - RNA, 19 nt, Artificial Sequence
  Description of Artificial Sequence: Synthetic oligonucleotide
  Sense Strand Starting at position 1260 of SEQ ID NO: 317876
acuuaauguuuagucgaaa

SEQ ID NO: 417626 - RNA, 19 nt, Artificial Sequence
  Description of Artificial Sequence: Synthetic oligonucleotide
  Antisense Strand to SEQ ID NO: 417625
uuucgacuaaacauuaagu

SEQ ID NO: 417627 - RNA, 19 nt, Artificial Sequence
  Description of Artificial Sequence: Synthetic oligonucleotide
  Sense Strand Starting at position 1260 of SEQ ID NO: 317877
cuuaauguuuagucgaaau

SEQ ID NO: 417628 - RNA, 19 nt, Artificial Sequence
  Description of Artificial Sequence: Synthetic oligonucleotide
  Antisense Strand to SEQ ID NO: 417627
auuucgacuaaacauuaag

SEQ ID NO: 417629 - RNA, 19 nt, Artificial Sequence
  Description of Artificial Sequence: Synthetic oligonucleotide
  Sense Strand Starting at position 1260 of SEQ ID NO: 317888
gucgaaauccuuuguggaa

SEQ ID NO: 417630 - RNA, 19 nt, Artificial Sequence
  Description of Artificial Sequence: Synthetic oligonucleotide
  Antisense Strand to SEQ ID NO: 417629
uuccacaaaggauuucgac

SEQ ID NO: 417631 - RNA, 19 nt, Artificial Sequence
  Description of Artificial Sequence: Synthetic oligonucleotide
  Sense Strand Starting at position 1260 of SEQ ID NO: 317889
ucgaaauccuuuguggaau

SEQ ID NO: 417632 - RNA, 19 nt, Artificial Sequence
  Description of Artificial Sequence: Synthetic oligonucleotide
  Antisense Strand to SEQ ID NO: 417631
auuccacaaaggauuucga

SEQ ID NO: 417633 - RNA, 19 nt, Artificial Sequence
  Description of Artificial Sequence: Synthetic oligonucleotide
  Sense Strand Starting at position 1260 of SEQ ID NO: 317900
uguggaauuguccagcuau

SEQ ID NO: 417634 - RNA, 19 nt, Artificial Sequence
  Description of Artificial Sequence: Synthetic oligonucleotide
  Antisense Strand to SEQ ID NO: 417633
auagcuggacaauuccaca

SEQ ID NO: 417635 - RNA, 19 nt, Artificial Sequence
  Description of Artificial Sequence: Synthetic oligonucleotide
  Sense Strand Starting at position 1260 of SEQ ID NO: 317931
ugcacuaugcuuuaaagca

SEQ ID NO: 417636 - RNA, 19 nt, Artificial Sequence
  Description of Artificial Sequence: Synthetic oligonucleotide
  Antisense Strand to SEQ ID NO: 417635
ugcuuuaaagcauagugca

SEQ ID NO: 417637 - RNA, 19 nt, Artificial Sequence
  Description of Artificial Sequence: Synthetic oligonucleotide
  Sense Strand Starting at position 1260 of SEQ ID NO: 318086
ccauauuauuuccauaggu

SEQ ID NO: 417638 - RNA, 19 nt, Artificial Sequence
  Description of Artificial Sequence: Synthetic oligonucleotide
  Antisense Strand to SEQ ID NO: 417637
accuauggaaauaauaugg

SEQ ID NO: 417639 - RNA, 19 nt, Artificial Sequence
  Description of Artificial Sequence: Synthetic oligonucleotide
  Sense Strand Starting at position 1260 of SEQ ID NO: 318175
cccaucaucgagcaguaua

SEQ ID NO: 417640 - RNA, 19 nt, Artificial Sequence
  Description of Artificial Sequence: Synthetic oligonucleotide
  Antisense Strand to SEQ ID NO: 417639
uauacugcucgaugauggg

SEQ ID NO: 417641 - RNA, 19 nt, Artificial Sequence
  Description of Artificial Sequence: Synthetic oligonucleotide
  Sense Strand Starting at position 1260 of SEQ ID NO: 318742
accaguaauguagaagugu

SEQ ID NO: 417642 - RNA, 19 nt, Artificial Sequence
  Description of Artificial Sequence: Synthetic oligonucleotide
  Antisense Strand to SEQ ID NO: 417641
acacuucuacauuacuggu

SEQ ID NO: 417643 - RNA, 19 nt, Artificial Sequence
  Description of Artificial Sequence: Synthetic oligonucleotide
  Sense Strand Starting at position 1260 of SEQ ID NO: 318864
cuuggaauucccugaucau

SEQ ID NO: 417644 - RNA, 19 nt, Artificial Sequence
  Description of Artificial Sequence: Synthetic oligonucleotide
  Antisense Strand to SEQ ID NO: 417643
augaucagggaauuccaag

SEQ ID NO: 417645 - RNA, 19 nt, Artificial Sequence
  Description of Artificial Sequence: Synthetic oligonucleotide
  Sense Strand Starting at position 1260 of SEQ ID NO: 318867
ggaauucccugaucauuag

SEQ ID NO: 417646 - RNA, 19 nt, Artificial Sequence
  Description of Artificial Sequence: Synthetic oligonucleotide
  Antisense Strand to SEQ ID NO: 417645
cuaaugaucagggaauucc

SEQ ID NO: 417647 - RNA, 19 nt, Artificial Sequence
  Description of Artificial Sequence: Synthetic oligonucleotide
  Sense Strand Starting at position 1261 of SEQ ID NO: 317435
gucggagaugccuaauuca

SEQ ID NO: 417648 - RNA, 19 nt, Artificial Sequence
  Description of Artificial Sequence: Synthetic oligonucleotide
  Antisense Strand to SEQ ID NO: 417647
ugaauuaggcaucuccgac

SEQ ID NO: 417649 - RNA, 19 nt, Artificial Sequence
  Description of Artificial Sequence: Synthetic oligonucleotide
  Sense Strand Starting at position 1261 of SEQ ID NO: 318098
gggagcgguuucuuuauuu

SEQ ID NO: 417650 - RNA, 19 nt, Artificial Sequence
  Description of Artificial Sequence: Synthetic oligonucleotide
  Antisense Strand to SEQ ID NO: 417649
aaauaaagaaaccgcuccc

SEQ ID NO: 417651 - RNA, 19 nt, Artificial Sequence
  Description of Artificial Sequence: Synthetic oligonucleotide
  Sense Strand Starting at position 1261 of SEQ ID NO: 318142
guuguagguucuuuaagca

SEQ ID NO: 417652 - RNA, 19 nt, Artificial Sequence
  Description of Artificial Sequence: Synthetic oligonucleotide
  Antisense Strand to SEQ ID NO: 417651
ugcuuaaagaaccuacaac

SEQ ID NO: 417653 - RNA, 19 nt, Artificial Sequence
  Description of Artificial Sequence: Synthetic oligonucleotide
  Sense Strand Starting at position 1261 of SEQ ID NO: 318154
uuaagcauugacgagcuaa

SEQ ID NO: 417654 - RNA, 19 nt, Artificial Sequence
  Description of Artificial Sequence: Synthetic oligonucleotide
  Antisense Strand to SEQ ID NO: 417653
uuagcucgucaaugcuuaa

SEQ ID NO: 417655 - RNA, 19 nt, Artificial Sequence
  Description of Artificial Sequence: Synthetic oligonucleotide
  Sense Strand Starting at position 1261 of SEQ ID NO: 318198
ggaagcuuacaauggaacu

SEQ ID NO: 417656 - RNA, 19 nt, Artificial Sequence
  Description of Artificial Sequence: Synthetic oligonucleotide
  Antisense Strand to SEQ ID NO: 417655
aguuccauuguaagcuucc

SEQ ID NO: 417657 - RNA, 19 nt, Artificial Sequence
  Description of Artificial Sequence: Synthetic oligonucleotide
  Sense Strand Starting at position 1261 of SEQ ID NO: 318210
uggaacuaaucagauguuu

SEQ ID NO: 417658 - RNA, 19 nt, Artificial Sequence
  Description of Artificial Sequence: Synthetic oligonucleotide
  Antisense Strand to SEQ ID NO: 417657
aaacaucugauuaguucca

SEQ ID NO: 417659 - RNA, 19 nt, Artificial Sequence
  Description of Artificial Sequence: Synthetic oligonucleotide
  Sense Strand Starting at position 1261 of SEQ ID NO: 318235
cgguuuguuccgagacagu

SEQ ID NO: 417660 - RNA, 19 nt, Artificial Sequence
  Description of Artificial Sequence: Synthetic oligonucleotide
  Antisense Strand to SEQ ID NO: 417659
acugucucggaacaaaccg

SEQ ID NO: 417661 - RNA, 19 nt, Artificial Sequence
  Description of Artificial Sequence: Synthetic oligonucleotide
  Sense Strand Starting at position 1261 of SEQ ID NO: 318252
guggaagacuggaggucau

SEQ ID NO: 417662 - RNA, 19 nt, Artificial Sequence
  Description of Artificial Sequence: Synthetic oligonucleotide
  Antisense Strand to SEQ ID NO: 417661
augaccuccagucuuccac

SEQ ID NO: 417663 - RNA, 19 nt, Artificial Sequence
  Description of Artificial Sequence: Synthetic oligonucleotide
  Sense Strand Starting at position 1261 of SEQ ID NO: 318267
ucaugugcuugugucuaau

SEQ ID NO: 417664 - RNA, 19 nt, Artificial Sequence
  Description of Artificial Sequence: Synthetic oligonucleotide
  Antisense Strand to SEQ ID NO: 417663
auuagacacaagcacauga

SEQ ID NO: 417665 - RNA, 19 nt, Artificial Sequence
  Description of Artificial Sequence: Synthetic oligonucleotide
  Sense Strand Starting at position 1261 of SEQ ID NO: 318269
augugcuugugucuaaugu

SEQ ID NO: 417666 - RNA, 19 nt, Artificial Sequence
  Description of Artificial Sequence: Synthetic oligonucleotide
  Antisense Strand to SEQ ID NO: 417665
acauuagacacaagcacau

SEQ ID NO: 417667 - RNA, 19 nt, Artificial Sequence
  Description of Artificial Sequence: Synthetic oligonucleotide
  Sense Strand Starting at position 1261 of SEQ ID NO: 318270
ugugcuugugucuaauguu

SEQ ID NO: 417668 - RNA, 19 nt, Artificial Sequence
  Description of Artificial Sequence: Synthetic oligonucleotide
  Antisense Strand to SEQ ID NO: 417667
aacauuagacacaagcaca

SEQ ID NO: 417669 - RNA, 19 nt, Artificial Sequence
  Description of Artificial Sequence: Synthetic oligonucleotide
  Sense Strand Starting at position 1261 of SEQ ID NO: 318276
ugugucuaauguuuagcaa

SEQ ID NO: 417670 - RNA, 19 nt, Artificial Sequence
  Description of Artificial Sequence: Synthetic oligonucleotide
  Antisense Strand to SEQ ID NO: 417669
uugcuaaacauuagacaca

SEQ ID NO: 417671 - RNA, 19 nt, Artificial Sequence
  Description of Artificial Sequence: Synthetic oligonucleotide
  Sense Strand Starting at position 1261 of SEQ ID NO: 318277
gugucuaauguuuagcaaa

SEQ ID NO: 417672 - RNA, 19 nt, Artificial Sequence
  Description of Artificial Sequence: Synthetic oligonucleotide
  Antisense Strand to SEQ ID NO: 417671
uuugcuaaacauuagacac

SEQ ID NO: 417673 - RNA, 19 nt, Artificial Sequence
  Description of Artificial Sequence: Synthetic oligonucleotide
  Sense Strand Starting at position 1261 of SEQ ID NO: 318399
auaaauguugaccauugua

SEQ ID NO: 417674 - RNA, 19 nt, Artificial Sequence
  Description of Artificial Sequence: Synthetic oligonucleotide
  Antisense Strand to SEQ ID NO: 417673
uacaauggucaacauuuau

SEQ ID NO: 417675 - RNA, 19 nt, Artificial Sequence
  Description of Artificial Sequence: Synthetic oligonucleotide
  Sense Strand Starting at position 1261 of SEQ ID NO: 318412
auuguagucagaggaguaa

SEQ ID NO: 417676 - RNA, 19 nt, Artificial Sequence
  Description of Artificial Sequence: Synthetic oligonucleotide
  Antisense Strand to SEQ ID NO: 417675
uuacuccucugacuacaau

SEQ ID NO: 417677 - RNA, 19 nt, Artificial Sequence
  Description of Artificial Sequence: Synthetic oligonucleotide
  Sense Strand Starting at position 1261 of SEQ ID NO: 318469
aagccagauugagucagaa

SEQ ID NO: 417678 - RNA, 19 nt, Artificial Sequence
  Description of Artificial Sequence: Synthetic oligonucleotide
  Antisense Strand to SEQ ID NO: 417677
uucugacucaaucuggcuu

SEQ ID NO: 417679 - RNA, 19 nt, Artificial Sequence
  Description of Artificial Sequence: Synthetic oligonucleotide
  Sense Strand Starting at position 1261 of SEQ ID NO: 318572
gcuuaaggguuaccaacau

SEQ ID NO: 417680 - RNA, 19 nt, Artificial Sequence
  Description of Artificial Sequence: Synthetic oligonucleotide
  Antisense Strand to SEQ ID NO: 417679
auguugguaacccuuaagc

SEQ ID NO: 417681 - RNA, 19 nt, Artificial Sequence
  Description of Artificial Sequence: Synthetic oligonucleotide
  Sense Strand Starting at position 1261 of SEQ ID NO: 318602
uccugaauuugcugugauu

SEQ ID NO: 417682 - RNA, 19 nt, Artificial Sequence
  Description of Artificial Sequence: Synthetic oligonucleotide
  Antisense Strand to SEQ ID NO: 417681
aaucacagcaaauucagga

SEQ ID NO: 417683 - RNA, 19 nt, Artificial Sequence
  Description of Artificial Sequence: Synthetic oligonucleotide
  Sense Strand Starting at position 1261 of SEQ ID NO: 318605
ugaauuugcugugauucca

SEQ ID NO: 417684 - RNA, 19 nt, Artificial Sequence
  Description of Artificial Sequence: Synthetic oligonucleotide
  Antisense Strand to SEQ ID NO: 417683
uggaaucacagcaaauuca

SEQ ID NO: 417685 - RNA, 19 nt, Artificial Sequence
  Description of Artificial Sequence: Synthetic oligonucleotide
  Sense Strand Starting at position 1261 of SEQ ID NO: 318651
uuacuuucggcacgaaauc

SEQ ID NO: 417686 - RNA, 19 nt, Artificial Sequence
  Description of Artificial Sequence: Synthetic oligonucleotide
  Antisense Strand to SEQ ID NO: 417685
gauuucgugccgaaaguaa

SEQ ID NO: 417687 - RNA, 19 nt, Artificial Sequence
  Description of Artificial Sequence: Synthetic oligonucleotide
  Sense Strand Starting at position 1261 of SEQ ID NO: 318652
uacuuucggcacgaaauca

SEQ ID NO: 417688 - RNA, 19 nt, Artificial Sequence
  Description of Artificial Sequence: Synthetic oligonucleotide
  Antisense Strand to SEQ ID NO: 417687
ugauuucgugccgaaagua

SEQ ID NO: 417689 - RNA, 19 nt, Artificial Sequence
  Description of Artificial Sequence: Synthetic oligonucleotide
  Sense Strand Starting at position 1261 of SEQ ID NO: 318677
gggcuuuauaaauguagaa

SEQ ID NO: 417690 - RNA, 19 nt, Artificial Sequence
  Description of Artificial Sequence: Synthetic oligonucleotide
  Antisense Strand to SEQ ID NO: 417689
uucuacauuuauaaagccc

SEQ ID NO: 417691 - RNA, 19 nt, Artificial Sequence
  Description of Artificial Sequence: Synthetic oligonucleotide
  Sense Strand Starting at position 1261 of SEQ ID NO: 318689
uguagaaccuacugcauua

SEQ ID NO: 417692 - RNA, 19 nt, Artificial Sequence
  Description of Artificial Sequence: Synthetic oligonucleotide
  Antisense Strand to SEQ ID NO: 417691
uaaugcaguagguucuaca

SEQ ID NO: 417693 - RNA, 19 nt, Artificial Sequence
  Description of Artificial Sequence: Synthetic oligonucleotide
  Sense Strand Starting at position 1261 of SEQ ID NO: 318741
guagcagccagcguauuau

SEQ ID NO: 417694 - RNA, 19 nt, Artificial Sequence
  Description of Artificial Sequence: Synthetic oligonucleotide
  Antisense Strand to SEQ ID NO: 417693
auaauacgcuggcugcuac

SEQ ID NO: 417695 - RNA, 19 nt, Artificial Sequence
  Description of Artificial Sequence: Synthetic oligonucleotide
  Sense Strand Starting at position 1261 of SEQ ID NO: 318766
uggauugggccaugaacaa

SEQ ID NO: 417696 - RNA, 19 nt, Artificial Sequence
  Description of Artificial Sequence: Synthetic oligonucleotide
  Antisense Strand to SEQ ID NO: 417695
uuguucauggcccaaucca

SEQ ID NO: 417697 - RNA, 19 nt, Artificial Sequence
  Description of Artificial Sequence: Synthetic oligonucleotide
  Sense Strand Starting at position 1261 of SEQ ID NO: 318783
aaccguaacgagugauaaa

SEQ ID NO: 417698 - RNA, 19 nt, Artificial Sequence
  Description of Artificial Sequence: Synthetic oligonucleotide
  Antisense Strand to SEQ ID NO: 417697
uuuaucacucguuacgguu

SEQ ID NO: 417699 - RNA, 19 nt, Artificial Sequence
  Description of Artificial Sequence: Synthetic oligonucleotide
  Sense Strand Starting at position 1261 of SEQ ID NO: 318784
accguaacgagugauaaag

SEQ ID NO: 417700 - RNA, 19 nt, Artificial Sequence
  Description of Artificial Sequence: Synthetic oligonucleotide
  Antisense Strand to SEQ ID NO: 417699
cuuuaucacucguuacggu

SEQ ID NO: 417701 - RNA, 19 nt, Artificial Sequence
  Description of Artificial Sequence: Synthetic oligonucleotide
  Sense Strand Starting at position 1261 of SEQ ID NO: 318869
uaguuaguuccuggccaaa

SEQ ID NO: 417702 - RNA, 19 nt, Artificial Sequence
  Description of Artificial Sequence: Synthetic oligonucleotide
  Antisense Strand to SEQ ID NO: 417701
uuuggccaggaacuaacua

SEQ ID NO: 417703 - RNA, 19 nt, Artificial Sequence
  Description of Artificial Sequence: Synthetic oligonucleotide
  Sense Strand Starting at position 1261 of SEQ ID NO: 318871
guuaguuccuggccaaaga

SEQ ID NO: 417704 - RNA, 19 nt, Artificial Sequence
  Description of Artificial Sequence: Synthetic oligonucleotide
  Antisense Strand to SEQ ID NO: 417703
ucuuuggccaggaacuaac

SEQ ID NO: 417705 - RNA, 19 nt, Artificial Sequence
  Description of Artificial Sequence: Synthetic oligonucleotide
  Sense Strand Starting at position 1261 of SEQ ID NO: 318872
uuaguuccuggccaaagaa

SEQ ID NO: 417706 - RNA, 19 nt, Artificial Sequence
  Description of Artificial Sequence: Synthetic oligonucleotide
  Antisense Strand to SEQ ID NO: 417705
uucuuuggccaggaacuaa

SEQ ID NO: 417707 - RNA, 19 nt, Artificial Sequence
  Description of Artificial Sequence: Synthetic oligonucleotide
  Sense Strand Starting at position 1261 of SEQ ID NO: 318940
cuuaaacuuuggcaugcua

SEQ ID NO: 417708 - RNA, 19 nt, Artificial Sequence
  Description of Artificial Sequence: Synthetic oligonucleotide
  Antisense Strand to SEQ ID NO: 417707
uagcaugccaaaguuuaag

SEQ ID NO: 417709 - RNA, 19 nt, Artificial Sequence
  Description of Artificial Sequence: Synthetic oligonucleotide
  Sense Strand Starting at position 1261 of SEQ ID NO: 319021
gcagucgucauuuagguaa

SEQ ID NO: 417710 - RNA, 19 nt, Artificial Sequence
  Description of Artificial Sequence: Synthetic oligonucleotide
  Antisense Strand to SEQ ID NO: 417709
uuaccuaaaugacgacugc

SEQ ID NO: 417711 - RNA, 19 nt, Artificial Sequence
  Description of Artificial Sequence: Synthetic oligonucleotide
  Sense Strand Starting at position 1261 of SEQ ID NO: 319049
cuuaauggaaaucgugauu

SEQ ID NO: 417712 - RNA, 19 nt, Artificial Sequence
  Description of Artificial Sequence: Synthetic oligonucleotide
  Antisense Strand to SEQ ID NO: 417711
aaucacgauuuccauuaag

SEQ ID NO: 417713 - RNA, 19 nt, Artificial Sequence
  Description of Artificial Sequence: Synthetic oligonucleotide
  Sense Strand Starting at position 1261 of SEQ ID NO: 319111
aucaguaaaucguugaacu

SEQ ID NO: 417714 - RNA, 19 nt, Artificial Sequence
  Description of Artificial Sequence: Synthetic oligonucleotide
  Antisense Strand to SEQ ID NO: 417713
aguucaacgauuuacugau

SEQ ID NO: 417715 - RNA, 19 nt, Artificial Sequence
  Description of Artificial Sequence: Synthetic oligonucleotide
  Sense Strand Starting at position 1261 of SEQ ID NO: 319112
ucaguaaaucguugaacuc

SEQ ID NO: 417716 - RNA, 19 nt, Artificial Sequence
  Description of Artificial Sequence: Synthetic oligonucleotide
  Antisense Strand to SEQ ID NO: 417715
gaguucaacgauuuacuga

SEQ ID NO: 417717 - RNA, 19 nt, Artificial Sequence
  Description of Artificial Sequence: Synthetic oligonucleotide
  Sense Strand Starting at position 1261 of SEQ ID NO: 319129
ucgguucucuaaucuuuga

SEQ ID NO: 417718 - RNA, 19 nt, Artificial Sequence
  Description of Artificial Sequence: Synthetic oligonucleotide
  Antisense Strand to SEQ ID NO: 417717
ucaaagauuagagaaccga

SEQ ID NO: 417719 - RNA, 19 nt, Artificial Sequence
  Description of Artificial Sequence: Synthetic oligonucleotide
  Sense Strand Starting at position 1261 of SEQ ID NO: 319132
guucucuaaucuuugaaga

SEQ ID NO: 417720 - RNA, 19 nt, Artificial Sequence
  Description of Artificial Sequence: Synthetic oligonucleotide
  Antisense Strand to SEQ ID NO: 417719
ucuucaaagauuagagaac

SEQ ID NO: 417721 - RNA, 19 nt, Artificial Sequence
  Description of Artificial Sequence: Synthetic oligonucleotide
  Sense Strand Starting at position 1261 of SEQ ID NO: 319208
uuaggucuuuaguuguaau

SEQ ID NO: 417722 - RNA, 19 nt, Artificial Sequence
  Description of Artificial Sequence: Synthetic oligonucleotide
  Antisense Strand to SEQ ID NO: 417721
auuacaacuaaagaccuaa

SEQ ID NO: 417723 - RNA, 19 nt, Artificial Sequence
  Description of Artificial Sequence: Synthetic oligonucleotide
  Sense Strand Starting at position 1261 of SEQ ID NO: 319211
ggucuuuaguuguaauuua

SEQ ID NO: 417724 - RNA, 19 nt, Artificial Sequence
  Description of Artificial Sequence: Synthetic oligonucleotide
  Antisense Strand to SEQ ID NO: 417723
uaaauuacaacuaaagacc

SEQ ID NO: 417725 - RNA, 19 nt, Artificial Sequence
  Description of Artificial Sequence: Synthetic oligonucleotide
  Sense Strand Starting at position 1261 of SEQ ID NO: 319218
aguuguaauuuauagagcu

SEQ ID NO: 417726 - RNA, 19 nt, Artificial Sequence
  Description of Artificial Sequence: Synthetic oligonucleotide
  Antisense Strand to SEQ ID NO: 417725
agcucuauaaauuacaacu

SEQ ID NO: 417727 - RNA, 19 nt, Artificial Sequence
  Description of Artificial Sequence: Synthetic oligonucleotide
  Sense Strand Starting at position 1262 of SEQ ID NO: 315354
aucagaugaucucuaguuu

SEQ ID NO: 417728 - RNA, 19 nt, Artificial Sequence
  Description of Artificial Sequence: Synthetic oligonucleotide
  Antisense Strand to SEQ ID NO: 417727
aaacuagagaucaucugau

SEQ ID NO: 417729 - RNA, 19 nt, Artificial Sequence
  Description of Artificial Sequence: Synthetic oligonucleotide
  Sense Strand Starting at position 1262 of SEQ ID NO: 315355
ucagaugaucucuaguuuc

SEQ ID NO: 417730 - RNA, 19 nt, Artificial Sequence
  Description of Artificial Sequence: Synthetic oligonucleotide
  Antisense Strand to SEQ ID NO: 417729
gaaacuagagaucaucuga

SEQ ID NO: 417731 - RNA, 19 nt, Artificial Sequence
  Description of Artificial Sequence: Synthetic oligonucleotide
  Sense Strand Starting at position 1262 of SEQ ID NO: 315442
ccauaucugcaauggauau

SEQ ID NO: 417732 - RNA, 19 nt, Artificial Sequence
  Description of Artificial Sequence: Synthetic oligonucleotide
  Antisense Strand to SEQ ID NO: 417731
auauccauugcagauaugg

SEQ ID NO: 417733 - RNA, 19 nt, Artificial Sequence
  Description of Artificial Sequence: Synthetic oligonucleotide
  Sense Strand Starting at position 1262 of SEQ ID NO: 315461
ucaagaagguucuuuagug

SEQ ID NO: 417734 - RNA, 19 nt, Artificial Sequence
  Description of Artificial Sequence: Synthetic oligonucleotide
  Antisense Strand to SEQ ID NO: 417733
cacuaaagaaccuucuuga

SEQ ID NO: 417735 - RNA, 19 nt, Artificial Sequence
  Description of Artificial Sequence: Synthetic oligonucleotide
  Sense Strand Starting at position 1262 of SEQ ID NO: 315462
caagaagguucuuuagugu

SEQ ID NO: 417736 - RNA, 19 nt, Artificial Sequence
  Description of Artificial Sequence: Synthetic oligonucleotide
  Antisense Strand to SEQ ID NO: 417735
acacuaaagaaccuucuug

SEQ ID NO: 417737 - RNA, 19 nt, Artificial Sequence
  Description of Artificial Sequence: Synthetic oligonucleotide
  Sense Strand Starting at position 1262 of SEQ ID NO: 315503
agaggugggaugugaguaa

SEQ ID NO: 417738 - RNA, 19 nt, Artificial Sequence
  Description of Artificial Sequence: Synthetic oligonucleotide
  Antisense Strand to SEQ ID NO: 417737
uuacucacaucccaccucu

SEQ ID NO: 417739 - RNA, 19 nt, Artificial Sequence
  Description of Artificial Sequence: Synthetic oligonucleotide
  Sense Strand Starting at position 1262 of SEQ ID NO: 315533
gaaacugucauagguaggu

SEQ ID NO: 417740 - RNA, 19 nt, Artificial Sequence
  Description of Artificial Sequence: Synthetic oligonucleotide
  Antisense Strand to SEQ ID NO: 417739
accuaccuaugacaguuuc

SEQ ID NO: 417741 - RNA, 19 nt, Artificial Sequence
  Description of Artificial Sequence: Synthetic oligonucleotide
  Sense Strand Starting at position 1262 of SEQ ID NO: 315583
ugcacauguggguacuaua

SEQ ID NO: 417742 - RNA, 19 nt, Artificial Sequence
  Description of Artificial Sequence: Synthetic oligonucleotide
  Antisense Strand to SEQ ID NO: 417741
uauaguacccacaugugca

SEQ ID NO: 417743 - RNA, 19 nt, Artificial Sequence
  Description of Artificial Sequence: Synthetic oligonucleotide
  Sense Strand Starting at position 1262 of SEQ ID NO: 315824
ugaugcaacauugguugaa

SEQ ID NO: 417744 - RNA, 19 nt, Artificial Sequence
  Description of Artificial Sequence: Synthetic oligonucleotide
  Antisense Strand to SEQ ID NO: 417743
uucaaccaauguugcauca

SEQ ID NO: 417745 - RNA, 19 nt, Artificial Sequence
  Description of Artificial Sequence: Synthetic oligonucleotide
  Sense Strand Starting at position 1262 of SEQ ID NO: 315825
gaugcaacauugguugaau

SEQ ID NO: 417746 - RNA, 19 nt, Artificial Sequence
  Description of Artificial Sequence: Synthetic oligonucleotide
  Antisense Strand to SEQ ID NO: 417745
auucaaccaauguugcauc

SEQ ID NO: 417747 - RNA, 19 nt, Artificial Sequence
  Description of Artificial Sequence: Synthetic oligonucleotide
  Sense Strand Starting at position 1262 of SEQ ID NO: 315828
gcaacauugguugaaucca

SEQ ID NO: 417748 - RNA, 19 nt, Artificial Sequence
  Description of Artificial Sequence: Synthetic oligonucleotide
  Antisense Strand to SEQ ID NO: 417747
uggauucaaccaauguugc

SEQ ID NO: 417749 - RNA, 19 nt, Artificial Sequence
  Description of Artificial Sequence: Synthetic oligonucleotide
  Sense Strand Starting at position 1262 of SEQ ID NO: 315857
accugauagcgagagcuga

SEQ ID NO: 417750 - RNA, 19 nt, Artificial Sequence
  Description of Artificial Sequence: Synthetic oligonucleotide
  Antisense Strand to SEQ ID NO: 417749
ucagcucucgcuaucaggu

SEQ ID NO: 417751 - RNA, 19 nt, Artificial Sequence
  Description of Artificial Sequence: Synthetic oligonucleotide
  Sense Strand Starting at position 1262 of SEQ ID NO: 315951
gucaguugucaagagguuu

SEQ ID NO: 417752 - RNA, 19 nt, Artificial Sequence
  Description of Artificial Sequence: Synthetic oligonucleotide
  Antisense Strand to SEQ ID NO: 417751
aaaccucuugacaacugac

SEQ ID NO: 417753 - RNA, 19 nt, Artificial Sequence
  Description of Artificial Sequence: Synthetic oligonucleotide
  Sense Strand Starting at position 1262 of SEQ ID NO: 315962
agagguuugggaugcaaag

SEQ ID NO: 417754 - RNA, 19 nt, Artificial Sequence
  Description of Artificial Sequence: Synthetic oligonucleotide
  Antisense Strand to SEQ ID NO: 417753
cuuugcaucccaaaccucu

SEQ ID NO: 417755 - RNA, 19 nt, Artificial Sequence
  Description of Artificial Sequence: Synthetic oligonucleotide
  Sense Strand Starting at position 1262 of SEQ ID NO: 315974
ugcaaagguugguuuggaa

SEQ ID NO: 417756 - RNA, 19 nt, Artificial Sequence
  Description of Artificial Sequence: Synthetic oligonucleotide
  Antisense Strand to SEQ ID NO: 417755
uuccaaaccaaccuuugca

SEQ ID NO: 417757 - RNA, 19 nt, Artificial Sequence
  Description of Artificial Sequence: Synthetic oligonucleotide
  Sense Strand Starting at position 1262 of SEQ ID NO: 316004
gcagguuauuuagaaugau

SEQ ID NO: 417758 - RNA, 19 nt, Artificial Sequence
  Description of Artificial Sequence: Synthetic oligonucleotide
  Antisense Strand to SEQ ID NO: 417757
aucauucuaaauaaccugc

SEQ ID NO: 417759 - RNA, 19 nt, Artificial Sequence
  Description of Artificial Sequence: Synthetic oligonucleotide
  Sense Strand Starting at position 1262 of SEQ ID NO: 316426
cucuuaggugaugguaaau

SEQ ID NO: 417760 - RNA, 19 nt, Artificial Sequence
  Description of Artificial Sequence: Synthetic oligonucleotide
  Antisense Strand to SEQ ID NO: 417759
auuuaccaucaccuaagag

SEQ ID NO: 417761 - RNA, 19 nt, Artificial Sequence
  Description of Artificial Sequence: Synthetic oligonucleotide
  Sense Strand Starting at position 1262 of SEQ ID NO: 316432
ggugaugguaaaugucuau

SEQ ID NO: 417762 - RNA, 19 nt, Artificial Sequence
  Description of Artificial Sequence: Synthetic oligonucleotide
  Antisense Strand to SEQ ID NO: 417761
auagacauuuaccaucacc

SEQ ID NO: 417763 - RNA, 19 nt, Artificial Sequence
  Description of Artificial Sequence: Synthetic oligonucleotide
  Sense Strand Starting at position 1262 of SEQ ID NO: 316435
gaugguaaaugucuauuag

SEQ ID NO: 417764 - RNA, 19 nt, Artificial Sequence
  Description of Artificial Sequence: Synthetic oligonucleotide
  Antisense Strand to SEQ ID NO: 417763
cuaauagacauuuaccauc

SEQ ID NO: 417765 - RNA, 19 nt, Artificial Sequence
  Description of Artificial Sequence: Synthetic oligonucleotide
  Sense Strand Starting at position 1262 of SEQ ID NO: 316671
accugagaauaagccauau

SEQ ID NO: 417766 - RNA, 19 nt, Artificial Sequence
  Description of Artificial Sequence: Synthetic oligonucleotide
  Antisense Strand to SEQ ID NO: 417765
auauggcuuauucucaggu

SEQ ID NO: 417767 - RNA, 19 nt, Artificial Sequence
  Description of Artificial Sequence: Synthetic oligonucleotide
  Sense Strand Starting at position 1262 of SEQ ID NO: 316696
augaccagccuuugaaagu

SEQ ID NO: 417768 - RNA, 19 nt, Artificial Sequence
  Description of Artificial Sequence: Synthetic oligonucleotide
  Antisense Strand to SEQ ID NO: 417767
acuuucaaaggcuggucau

SEQ ID NO: 417769 - RNA, 19 nt, Artificial Sequence
  Description of Artificial Sequence: Synthetic oligonucleotide
  Sense Strand Starting at position 1262 of SEQ ID NO: 317579
cgguggaugggauguuuga

SEQ ID NO: 417770 - RNA, 19 nt, Artificial Sequence
  Description of Artificial Sequence: Synthetic oligonucleotide
  Antisense Strand to SEQ ID NO: 417769
ucaaacaucccauccaccg

SEQ ID NO: 417771 - RNA, 19 nt, Artificial Sequence
  Description of Artificial Sequence: Synthetic oligonucleotide
  Sense Strand Starting at position 1262 of SEQ ID NO: 317616
auuaaauggcccugaggaa

SEQ ID NO: 417772 - RNA, 19 nt, Artificial Sequence
  Description of Artificial Sequence: Synthetic oligonucleotide
  Antisense Strand to SEQ ID NO: 417771
uuccucagggccauuuaau

SEQ ID NO: 417773 - RNA, 19 nt, Artificial Sequence
  Description of Artificial Sequence: Synthetic oligonucleotide
  Sense Strand Starting at position 1262 of SEQ ID NO: 317769
ugugcaguuaagggacaau

SEQ ID NO: 417774 - RNA, 19 nt, Artificial Sequence
  Description of Artificial Sequence: Synthetic oligonucleotide
  Antisense Strand to SEQ ID NO: 417773
auugucccuuaacugcaca

SEQ ID NO: 417775 - RNA, 19 nt, Artificial Sequence
  Description of Artificial Sequence: Synthetic oligonucleotide
  Sense Strand Starting at position 1262 of SEQ ID NO: 317862
cuuucugagcuugaguuua

SEQ ID NO: 417776 - RNA, 19 nt, Artificial Sequence
  Description of Artificial Sequence: Synthetic oligonucleotide
  Antisense Strand to SEQ ID NO: 417775
uaaacucaagcucagaaag

SEQ ID NO: 417777 - RNA, 19 nt, Artificial Sequence
  Description of Artificial Sequence: Synthetic oligonucleotide
  Sense Strand Starting at position 1262 of SEQ ID NO: 317867
ugagcuugaguuuacugaa

SEQ ID NO: 417778 - RNA, 19 nt, Artificial Sequence
  Description of Artificial Sequence: Synthetic oligonucleotide
  Antisense Strand to SEQ ID NO: 417777
uucaguaaacucaagcuca

SEQ ID NO: 417779 - RNA, 19 nt, Artificial Sequence
  Description of Artificial Sequence: Synthetic oligonucleotide
  Sense Strand Starting at position 1262 of SEQ ID NO: 317927
ugcaauaggaaguguaagu

SEQ ID NO: 417780 - RNA, 19 nt, Artificial Sequence
  Description of Artificial Sequence: Synthetic oligonucleotide
  Antisense Strand to SEQ ID NO: 417779
acuuacacuuccuauugca

SEQ ID NO: 417781 - RNA, 19 nt, Artificial Sequence
  Description of Artificial Sequence: Synthetic oligonucleotide
  Sense Strand Starting at position 1262 of SEQ ID NO: 318100
gcuagaugugaugauggau

SEQ ID NO: 417782 - RNA, 19 nt, Artificial Sequence
  Description of Artificial Sequence: Synthetic oligonucleotide
  Antisense Strand to SEQ ID NO: 417781
auccaucaucacaucuagc

SEQ ID NO: 417783 - RNA, 19 nt, Artificial Sequence
  Description of Artificial Sequence: Synthetic oligonucleotide
  Sense Strand Starting at position 1262 of SEQ ID NO: 318103
agaugugaugauggauguu

SEQ ID NO: 417784 - RNA, 19 nt, Artificial Sequence
  Description of Artificial Sequence: Synthetic oligonucleotide
  Antisense Strand to SEQ ID NO: 417783
aacauccaucaucacaucu

SEQ ID NO: 417785 - RNA, 19 nt, Artificial Sequence
  Description of Artificial Sequence: Synthetic oligonucleotide
  Sense Strand Starting at position 1262 of SEQ ID NO: 318106
ugugaugauggauguugaa

SEQ ID NO: 417786 - RNA, 19 nt, Artificial Sequence
  Description of Artificial Sequence: Synthetic oligonucleotide
  Antisense Strand to SEQ ID NO: 417785
uucaacauccaucaucaca

SEQ ID NO: 417787 - RNA, 19 nt, Artificial Sequence
  Description of Artificial Sequence: Synthetic oligonucleotide
  Sense Strand Starting at position 1262 of SEQ ID NO: 318244
ucaccucuuccaggagacu

SEQ ID NO: 417788 - RNA, 19 nt, Artificial Sequence
  Description of Artificial Sequence: Synthetic oligonucleotide
  Antisense Strand to SEQ ID NO: 417787
agucuccuggaagagguga

SEQ ID NO: 417789 - RNA, 19 nt, Artificial Sequence
  Description of Artificial Sequence: Synthetic oligonucleotide
  Sense Strand Starting at position 1262 of SEQ ID NO: 318253
ccaggagacuucuugccuu

SEQ ID NO: 417790 - RNA, 19 nt, Artificial Sequence
  Description of Artificial Sequence: Synthetic oligonucleotide
  Antisense Strand to SEQ ID NO: 417789
aaggcaagaagucuccugg

SEQ ID NO: 417791 - RNA, 19 nt, Artificial Sequence
  Description of Artificial Sequence: Synthetic oligonucleotide
  Sense Strand Starting at position 1262 of SEQ ID NO: 318323
gcauguguugucccuguuu

SEQ ID NO: 417792 - RNA, 19 nt, Artificial Sequence
  Description of Artificial Sequence: Synthetic oligonucleotide
  Antisense Strand to SEQ ID NO: 417791
aaacagggacaacacaugc

SEQ ID NO: 417793 - RNA, 19 nt, Artificial Sequence
  Description of Artificial Sequence: Synthetic oligonucleotide
  Sense Strand Starting at position 1262 of SEQ ID NO: 318783
aucaaagagcuuuguggua

SEQ ID NO: 417794 - RNA, 19 nt, Artificial Sequence
  Description of Artificial Sequence: Synthetic oligonucleotide
  Antisense Strand to SEQ ID NO: 417793
uaccacaaagcucuuugau

SEQ ID NO: 417795 - RNA, 19 nt, Artificial Sequence
  Description of Artificial Sequence: Synthetic oligonucleotide
  Sense Strand Starting at position 1262 of SEQ ID NO: 318832
gcaagagucacaggauaug

SEQ ID NO: 417796 - RNA, 19 nt, Artificial Sequence
  Description of Artificial Sequence: Synthetic oligonucleotide
  Antisense Strand to SEQ ID NO: 417795
cauauccugugacucuugc

SEQ ID NO: 417797 - RNA, 19 nt, Artificial Sequence
  Description of Artificial Sequence: Synthetic oligonucleotide
  Sense Strand Starting at position 1262 of SEQ ID NO: 318937
uuuagaauuagagggcuuu

SEQ ID NO: 417798 - RNA, 19 nt, Artificial Sequence
  Description of Artificial Sequence: Synthetic oligonucleotide
  Antisense Strand to SEQ ID NO: 417797
aaagcccucuaauucuaaa

SEQ ID NO: 417799 - RNA, 19 nt, Artificial Sequence
  Description of Artificial Sequence: Synthetic oligonucleotide
  Sense Strand Starting at position 1262 of SEQ ID NO: 318938
uuagaauuagagggcuuua

SEQ ID NO: 417800 - RNA, 19 nt, Artificial Sequence
  Description of Artificial Sequence: Synthetic oligonucleotide
  Antisense Strand to SEQ ID NO: 417799
uaaagcccucuaauucuaa

SEQ ID NO: 417801 - RNA, 19 nt, Artificial Sequence
  Description of Artificial Sequence: Synthetic oligonucleotide
  Sense Strand Starting at position 1262 of SEQ ID NO: 319028
cacugugaguugucagaga

SEQ ID NO: 417802 - RNA, 19 nt, Artificial Sequence
  Description of Artificial Sequence: Synthetic oligonucleotide
  Antisense Strand to SEQ ID NO: 417801
ucucugacaacucacagug

SEQ ID NO: 417803 - RNA, 19 nt, Artificial Sequence
  Description of Artificial Sequence: Synthetic oligonucleotide
  Sense Strand Starting at position 1262 of SEQ ID NO: 319035
aguugucagagauaaccga

SEQ ID NO: 417804 - RNA, 19 nt, Artificial Sequence
  Description of Artificial Sequence: Synthetic oligonucleotide
  Antisense Strand to SEQ ID NO: 417803
ucgguuaucucugacaacu

SEQ ID NO: 417805 - RNA, 19 nt, Artificial Sequence
  Description of Artificial Sequence: Synthetic oligonucleotide
  Sense Strand Starting at position 1262 of SEQ ID NO: 319079
agagccaggucucuuaaau

SEQ ID NO: 417806 - RNA, 19 nt, Artificial Sequence
  Description of Artificial Sequence: Synthetic oligonucleotide
  Antisense Strand to SEQ ID NO: 417805
auuuaagagaccuggcucu

SEQ ID NO: 417807 - RNA, 19 nt, Artificial Sequence
  Description of Artificial Sequence: Synthetic oligonucleotide
  Sense Strand Starting at position 1263 of SEQ ID NO: 315275
aucagaugaucucuaguuu

SEQ ID NO: 417808 - RNA, 19 nt, Artificial Sequence
  Description of Artificial Sequence: Synthetic oligonucleotide
  Antisense Strand to SEQ ID NO: 417807
aaacuagagaucaucugau

SEQ ID NO: 417809 - RNA, 19 nt, Artificial Sequence
  Description of Artificial Sequence: Synthetic oligonucleotide
  Sense Strand Starting at position 1263 of SEQ ID NO: 315276
ucagaugaucucuaguuuc

SEQ ID NO: 417810 - RNA, 19 nt, Artificial Sequence
  Description of Artificial Sequence: Synthetic oligonucleotide
  Antisense Strand to SEQ ID NO: 417809
gaaacuagagaucaucuga

SEQ ID NO: 417811 - RNA, 19 nt, Artificial Sequence
  Description of Artificial Sequence: Synthetic oligonucleotide
  Sense Strand Starting at position 1263 of SEQ ID NO: 315363
ccauaucugcaauggauau

SEQ ID NO: 417812 - RNA, 19 nt, Artificial Sequence
  Description of Artificial Sequence: Synthetic oligonucleotide
  Antisense Strand to SEQ ID NO: 417811
auauccauugcagauaugg

SEQ ID NO: 417813 - RNA, 19 nt, Artificial Sequence
  Description of Artificial Sequence: Synthetic oligonucleotide
  Sense Strand Starting at position 1263 of SEQ ID NO: 315382
ucaagaagguucuuuagug

SEQ ID NO: 417814 - RNA, 19 nt, Artificial Sequence
  Description of Artificial Sequence: Synthetic oligonucleotide
  Antisense Strand to SEQ ID NO: 417813
cacuaaagaaccuucuuga

SEQ ID NO: 417815 - RNA, 19 nt, Artificial Sequence
  Description of Artificial Sequence: Synthetic oligonucleotide
  Sense Strand Starting at position 1263 of SEQ ID NO: 315383
caagaagguucuuuagugu

SEQ ID NO: 417816 - RNA, 19 nt, Artificial Sequence
  Description of Artificial Sequence: Synthetic oligonucleotide
  Antisense Strand to SEQ ID NO: 417815
acacuaaagaaccuucuug

SEQ ID NO: 417817 - RNA, 19 nt, Artificial Sequence
  Description of Artificial Sequence: Synthetic oligonucleotide
  Sense Strand Starting at position 1263 of SEQ ID NO: 315424
agaggugggaugugaguaa

SEQ ID NO: 417818 - RNA, 19 nt, Artificial Sequence
  Description of Artificial Sequence: Synthetic oligonucleotide
  Antisense Strand to SEQ ID NO: 417817
uuacucacaucccaccucu

SEQ ID NO: 417819 - RNA, 19 nt, Artificial Sequence
  Description of Artificial Sequence: Synthetic oligonucleotide
  Sense Strand Starting at position 1263 of SEQ ID NO: 315454
gaaacugucauagguaggu

SEQ ID NO: 417820 - RNA, 19 nt, Artificial Sequence
  Description of Artificial Sequence: Synthetic oligonucleotide
  Antisense Strand to SEQ ID NO: 417819
accuaccuaugacaguuuc

SEQ ID NO: 417821 - RNA, 19 nt, Artificial Sequence
  Description of Artificial Sequence: Synthetic oligonucleotide
  Sense Strand Starting at position 1263 of SEQ ID NO: 315504
ugcacauguggguacuaua

SEQ ID NO: 417822 - RNA, 19 nt, Artificial Sequence
  Description of Artificial Sequence: Synthetic oligonucleotide
  Antisense Strand to SEQ ID NO: 417821
uauaguacccacaugugca

SEQ ID NO: 417823 - RNA, 19 nt, Artificial Sequence
  Description of Artificial Sequence: Synthetic oligonucleotide
  Sense Strand Starting at position 1263 of SEQ ID NO: 315745
ugaugcaacauugguugaa

SEQ ID NO: 417824 - RNA, 19 nt, Artificial Sequence
  Description of Artificial Sequence: Synthetic oligonucleotide
  Antisense Strand to SEQ ID NO: 417823
uucaaccaauguugcauca

SEQ ID NO: 417825 - RNA, 19 nt, Artificial Sequence
  Description of Artificial Sequence: Synthetic oligonucleotide
  Sense Strand Starting at position 1263 of SEQ ID NO: 315746
gaugcaacauugguugaau

SEQ ID NO: 417826 - RNA, 19 nt, Artificial Sequence
  Description of Artificial Sequence: Synthetic oligonucleotide
  Antisense Strand to SEQ ID NO: 417825
auucaaccaauguugcauc

SEQ ID NO: 417827 - RNA, 19 nt, Artificial Sequence
  Description of Artificial Sequence: Synthetic oligonucleotide
  Sense Strand Starting at position 1263 of SEQ ID NO: 315749
gcaacauugguugaaucca

SEQ ID NO: 417828 - RNA, 19 nt, Artificial Sequence
  Description of Artificial Sequence: Synthetic oligonucleotide
  Antisense Strand to SEQ ID NO: 417827
uggauucaaccaauguugc

SEQ ID NO: 417829 - RNA, 19 nt, Artificial Sequence
  Description of Artificial Sequence: Synthetic oligonucleotide
  Sense Strand Starting at position 1263 of SEQ ID NO: 315778
accugauagcgagagcuga

SEQ ID NO: 417830 - RNA, 19 nt, Artificial Sequence
  Description of Artificial Sequence: Synthetic oligonucleotide
  Antisense Strand to SEQ ID NO: 417829
ucagcucucgcuaucaggu

SEQ ID NO: 417831 - RNA, 19 nt, Artificial Sequence
  Description of Artificial Sequence: Synthetic oligonucleotide
  Sense Strand Starting at position 1263 of SEQ ID NO: 315872
gucaguugucaagagguuu

SEQ ID NO: 417832 - RNA, 19 nt, Artificial Sequence
  Description of Artificial Sequence: Synthetic oligonucleotide
  Antisense Strand to SEQ ID NO: 417831
aaaccucuugacaacugac

SEQ ID NO: 417833 - RNA, 19 nt, Artificial Sequence
  Description of Artificial Sequence: Synthetic oligonucleotide
  Sense Strand Starting at position 1263 of SEQ ID NO: 315883
agagguuugggaugcaaag

SEQ ID NO: 417834 - RNA, 19 nt, Artificial Sequence
  Description of Artificial Sequence: Synthetic oligonucleotide
  Antisense Strand to SEQ ID NO: 417833
cuuugcaucccaaaccucu

SEQ ID NO: 417835 - RNA, 19 nt, Artificial Sequence
  Description of Artificial Sequence: Synthetic oligonucleotide
  Sense Strand Starting at position 1263 of SEQ ID NO: 315895
ugcaaagguugguuuggaa

SEQ ID NO: 417836 - RNA, 19 nt, Artificial Sequence
  Description of Artificial Sequence: Synthetic oligonucleotide
  Antisense Strand to SEQ ID NO: 417835
uuccaaaccaaccuuugca

SEQ ID NO: 417837 - RNA, 19 nt, Artificial Sequence
  Description of Artificial Sequence: Synthetic oligonucleotide
  Sense Strand Starting at position 1263 of SEQ ID NO: 315925
gcagguuauuuagaaugau

SEQ ID NO: 417838 - RNA, 19 nt, Artificial Sequence
  Description of Artificial Sequence: Synthetic oligonucleotide
  Antisense Strand to SEQ ID NO: 417837
aucauucuaaauaaccugc

SEQ ID NO: 417839 - RNA, 19 nt, Artificial Sequence
  Description of Artificial Sequence: Synthetic oligonucleotide
  Sense Strand Starting at position 1263 of SEQ ID NO: 316347
cucuuaggugaugguaaau

SEQ ID NO: 417840 - RNA, 19 nt, Artificial Sequence
  Description of Artificial Sequence: Synthetic oligonucleotide
  Antisense Strand to SEQ ID NO: 417839
auuuaccaucaccuaagag

SEQ ID NO: 417841 - RNA, 19 nt, Artificial Sequence
  Description of Artificial Sequence: Synthetic oligonucleotide
  Sense Strand Starting at position 1263 of SEQ ID NO: 316353
ggugaugguaaaugucuau

SEQ ID NO: 417842 - RNA, 19 nt, Artificial Sequence
  Description of Artificial Sequence: Synthetic oligonucleotide
  Antisense Strand to SEQ ID NO: 417841
auagacauuuaccaucacc

SEQ ID NO: 417843 - RNA, 19 nt, Artificial Sequence
  Description of Artificial Sequence: Synthetic oligonucleotide
  Sense Strand Starting at position 1263 of SEQ ID NO: 316356
gaugguaaaugucuauuag

SEQ ID NO: 417844 - RNA, 19 nt, Artificial Sequence
  Description of Artificial Sequence: Synthetic oligonucleotide
  Antisense Strand to SEQ ID NO: 417843
cuaauagacauuuaccauc

SEQ ID NO: 417845 - RNA, 19 nt, Artificial Sequence
  Description of Artificial Sequence: Synthetic oligonucleotide
  Sense Strand Starting at position 1263 of SEQ ID NO: 316592
accugagaauaagccauau

SEQ ID NO: 417846 - RNA, 19 nt, Artificial Sequence
  Description of Artificial Sequence: Synthetic oligonucleotide
  Antisense Strand to SEQ ID NO: 417845
auauggcuuauucucaggu

SEQ ID NO: 417847 - RNA, 19 nt, Artificial Sequence
  Description of Artificial Sequence: Synthetic oligonucleotide
  Sense Strand Starting at position 1263 of SEQ ID NO: 316617
augaccagccuuugaaagu

SEQ ID NO: 417848 - RNA, 19 nt, Artificial Sequence
  Description of Artificial Sequence: Synthetic oligonucleotide
  Antisense Strand to SEQ ID NO: 417847
acuuucaaaggcuggucau

SEQ ID NO: 417849 - RNA, 19 nt, Artificial Sequence
  Description of Artificial Sequence: Synthetic oligonucleotide
  Sense Strand Starting at position 1263 of SEQ ID NO: 317500
cgguggaugggauguuuga

SEQ ID NO: 417850 - RNA, 19 nt, Artificial Sequence
  Description of Artificial Sequence: Synthetic oligonucleotide
  Antisense Strand to SEQ ID NO: 417849
ucaaacaucccauccaccg

SEQ ID NO: 417851 - RNA, 19 nt, Artificial Sequence
  Description of Artificial Sequence: Synthetic oligonucleotide
  Sense Strand Starting at position 1263 of SEQ ID NO: 317537
auuaaauggcccugaggaa

SEQ ID NO: 417852 - RNA, 19 nt, Artificial Sequence
  Description of Artificial Sequence: Synthetic oligonucleotide
  Antisense Strand to SEQ ID NO: 417851
uuccucagggccauuuaau

SEQ ID NO: 417853 - RNA, 19 nt, Artificial Sequence
  Description of Artificial Sequence: Synthetic oligonucleotide
  Sense Strand Starting at position 1263 of SEQ ID NO: 317690
ugugcaguuaagggacaau

SEQ ID NO: 417854 - RNA, 19 nt, Artificial Sequence
  Description of Artificial Sequence: Synthetic oligonucleotide
  Antisense Strand to SEQ ID NO: 417853
auugucccuuaacugcaca

SEQ ID NO: 417855 - RNA, 19 nt, Artificial Sequence
  Description of Artificial Sequence: Synthetic oligonucleotide
  Sense Strand Starting at position 1263 of SEQ ID NO: 317783
cuuucugagcuugaguuua

SEQ ID NO: 417856 - RNA, 19 nt, Artificial Sequence
  Description of Artificial Sequence: Synthetic oligonucleotide
  Antisense Strand to SEQ ID NO: 417855
uaaacucaagcucagaaag

SEQ ID NO: 417857 - RNA, 19 nt, Artificial Sequence
  Description of Artificial Sequence: Synthetic oligonucleotide
  Sense Strand Starting at position 1263 of SEQ ID NO: 317788
ugagcuugaguuuacugaa

SEQ ID NO: 417858 - RNA, 19 nt, Artificial Sequence
  Description of Artificial Sequence: Synthetic oligonucleotide
  Antisense Strand to SEQ ID NO: 417857
uucaguaaacucaagcuca

SEQ ID NO: 417859 - RNA, 19 nt, Artificial Sequence
  Description of Artificial Sequence: Synthetic oligonucleotide
  Sense Strand Starting at position 1263 of SEQ ID NO: 317848
ugcaauaggaaguguaagu

SEQ ID NO: 417860 - RNA, 19 nt, Artificial Sequence
  Description of Artificial Sequence: Synthetic oligonucleotide
  Antisense Strand to SEQ ID NO: 417859
acuuacacuuccuauugca

SEQ ID NO: 417861 - RNA, 19 nt, Artificial Sequence
  Description of Artificial Sequence: Synthetic oligonucleotide
  Sense Strand Starting at position 1263 of SEQ ID NO: 318021
gcuagaugugaugauggau

SEQ ID NO: 417862 - RNA, 19 nt, Artificial Sequence
  Description of Artificial Sequence: Synthetic oligonucleotide
  Antisense Strand to SEQ ID NO: 417861
auccaucaucacaucuagc

SEQ ID NO: 417863 - RNA, 19 nt, Artificial Sequence
  Description of Artificial Sequence: Synthetic oligonucleotide
  Sense Strand Starting at position 1263 of SEQ ID NO: 318024
agaugugaugauggauguu

SEQ ID NO: 417864 - RNA, 19 nt, Artificial Sequence
  Description of Artificial Sequence: Synthetic oligonucleotide
  Antisense Strand to SEQ ID NO: 417863
aacauccaucaucacaucu

SEQ ID NO: 417865 - RNA, 19 nt, Artificial Sequence
  Description of Artificial Sequence: Synthetic oligonucleotide
  Sense Strand Starting at position 1263 of SEQ ID NO: 318027
ugugaugauggauguugaa

SEQ ID NO: 417866 - RNA, 19 nt, Artificial Sequence
  Description of Artificial Sequence: Synthetic oligonucleotide
  Antisense Strand to SEQ ID NO: 417865
uucaacauccaucaucaca

SEQ ID NO: 417867 - RNA, 19 nt, Artificial Sequence
  Description of Artificial Sequence: Synthetic oligonucleotide
  Sense Strand Starting at position 1263 of SEQ ID NO: 318165
ucaccucuuccaggagacu

SEQ ID NO: 417868 - RNA, 19 nt, Artificial Sequence
  Description of Artificial Sequence: Synthetic oligonucleotide
  Antisense Strand to SEQ ID NO: 417867
agucuccuggaagagguga

SEQ ID NO: 417869 - RNA, 19 nt, Artificial Sequence
  Description of Artificial Sequence: Synthetic oligonucleotide
  Sense Strand Starting at position 1263 of SEQ ID NO: 318174
ccaggagacuucuugccuu

SEQ ID NO: 417870 - RNA, 19 nt, Artificial Sequence
  Description of Artificial Sequence: Synthetic oligonucleotide
  Antisense Strand to SEQ ID NO: 417869
aaggcaagaagucuccugg

SEQ ID NO: 417871 - RNA, 19 nt, Artificial Sequence
  Description of Artificial Sequence: Synthetic oligonucleotide
  Sense Strand Starting at position 1263 of SEQ ID NO: 318244
gcauguguugucccuguuu

SEQ ID NO: 417872 - RNA, 19 nt, Artificial Sequence
  Description of Artificial Sequence: Synthetic oligonucleotide
  Antisense Strand to SEQ ID NO: 417871
aaacagggacaacacaugc

SEQ ID NO: 417873 - RNA, 19 nt, Artificial Sequence
  Description of Artificial Sequence: Synthetic oligonucleotide
  Sense Strand Starting at position 1263 of SEQ ID NO: 318704
aucaaagagcuuuguggua

SEQ ID NO: 417874 - RNA, 19 nt, Artificial Sequence
  Description of Artificial Sequence: Synthetic oligonucleotide
  Antisense Strand to SEQ ID NO: 417873
uaccacaaagcucuuugau

SEQ ID NO: 417875 - RNA, 19 nt, Artificial Sequence
  Description of Artificial Sequence: Synthetic oligonucleotide
  Sense Strand Starting at position 1263 of SEQ ID NO: 318753
gcaagagucacaggauaug

SEQ ID NO: 417876 - RNA, 19 nt, Artificial Sequence
  Description of Artificial Sequence: Synthetic oligonucleotide
  Antisense Strand to SEQ ID NO: 417875
cauauccugugacucuugc

SEQ ID NO: 417877 - RNA, 19 nt, Artificial Sequence
  Description of Artificial Sequence: Synthetic oligonucleotide
  Sense Strand Starting at position 1263 of SEQ ID NO: 318858
uuuagaauuagagggcuuu

SEQ ID NO: 417878 - RNA, 19 nt, Artificial Sequence
  Description of Artificial Sequence: Synthetic oligonucleotide
  Antisense Strand to SEQ ID NO: 417877
aaagcccucuaauucuaaa

SEQ ID NO: 417879 - RNA, 19 nt, Artificial Sequence
  Description of Artificial Sequence: Synthetic oligonucleotide
  Sense Strand Starting at position 1263 of SEQ ID NO: 318859
uuagaauuagagggcuuua

SEQ ID NO: 417880 - RNA, 19 nt, Artificial Sequence
  Description of Artificial Sequence: Synthetic oligonucleotide
  Antisense Strand to SEQ ID NO: 417879
uaaagcccucuaauucuaa

SEQ ID NO: 417881 - RNA, 19 nt, Artificial Sequence
  Description of Artificial Sequence: Synthetic oligonucleotide
  Sense Strand Starting at position 1263 of SEQ ID NO: 318949
cacugugaguugucagaga

SEQ ID NO: 417882 - RNA, 19 nt, Artificial Sequence
  Description of Artificial Sequence: Synthetic oligonucleotide
  Antisense Strand to SEQ ID NO: 417881
ucucugacaacucacagug

SEQ ID NO: 417883 - RNA, 19 nt, Artificial Sequence
  Description of Artificial Sequence: Synthetic oligonucleotide
  Sense Strand Starting at position 1263 of SEQ ID NO: 318956
aguugucagagauaaccga

SEQ ID NO: 417884 - RNA, 19 nt, Artificial Sequence
  Description of Artificial Sequence: Synthetic oligonucleotide
  Antisense Strand to SEQ ID NO: 417883
ucgguuaucucugacaacu

SEQ ID NO: 417885 - RNA, 19 nt, Artificial Sequence
  Description of Artificial Sequence: Synthetic oligonucleotide
  Sense Strand Starting at position 1263 of SEQ ID NO: 319000
agagccaggucucuuaaau

SEQ ID NO: 417886 - RNA, 19 nt, Artificial Sequence
  Description of Artificial Sequence: Synthetic oligonucleotide
  Antisense Strand to SEQ ID NO: 417885
auuuaagagaccuggcucu

SEQ ID NO: 417887 - RNA, 19 nt, Artificial Sequence
  Description of Artificial Sequence: Synthetic oligonucleotide
  Sense Strand Starting at position 1264 of SEQ ID NO: 315280
aaaguaauuuccgugucca

SEQ ID NO: 417888 - RNA, 19 nt, Artificial Sequence
  Description of Artificial Sequence: Synthetic oligonucleotide
  Antisense Strand to SEQ ID NO: 417887
uggacacggaaauuacuuu

SEQ ID NO: 417889 - RNA, 19 nt, Artificial Sequence
  Description of Artificial Sequence: Synthetic oligonucleotide
  Sense Strand Starting at position 1264 of SEQ ID NO: 315281
aaguaauuuccguguccaa

SEQ ID NO: 417890 - RNA, 19 nt, Artificial Sequence
  Description of Artificial Sequence: Synthetic oligonucleotide
  Antisense Strand to SEQ ID NO: 417889
uuggacacggaaauuacuu

SEQ ID NO: 417891 - RNA, 19 nt, Artificial Sequence
  Description of Artificial Sequence: Synthetic oligonucleotide
  Sense Strand Starting at position 1264 of SEQ ID NO: 315370
accaaauaugauggcuuau

SEQ ID NO: 417892 - RNA, 19 nt, Artificial Sequence
  Description of Artificial Sequence: Synthetic oligonucleotide
  Antisense Strand to SEQ ID NO: 417891
auaagccaucauauuuggu

SEQ ID NO: 417893 - RNA, 19 nt, Artificial Sequence
  Description of Artificial Sequence: Synthetic oligonucleotide
  Sense Strand Starting at position 1264 of SEQ ID NO: 315382
ggcuuaugacaguauacaa

SEQ ID NO: 417894 - RNA, 19 nt, Artificial Sequence
  Description of Artificial Sequence: Synthetic oligonucleotide
  Antisense Strand to SEQ ID NO: 417893
uuguauacugucauaagcc

SEQ ID NO: 417895 - RNA, 19 nt, Artificial Sequence
  Description of Artificial Sequence: Synthetic oligonucleotide
  Sense Strand Starting at position 1264 of SEQ ID NO: 315525
uuuaucugccuggauagau

SEQ ID NO: 417896 - RNA, 19 nt, Artificial Sequence
  Description of Artificial Sequence: Synthetic oligonucleotide
  Antisense Strand to SEQ ID NO: 417895
aucuauccaggcagauaaa

SEQ ID NO: 417897 - RNA, 19 nt, Artificial Sequence
  Description of Artificial Sequence: Synthetic oligonucleotide
  Sense Strand Starting at position 1264 of SEQ ID NO: 315565
cgugacacauuaguuuaaa

SEQ ID NO: 417898 - RNA, 19 nt, Artificial Sequence
  Description of Artificial Sequence: Synthetic oligonucleotide
  Antisense Strand to SEQ ID NO: 417897
uuuaaacuaaugugucacg

SEQ ID NO: 417899 - RNA, 19 nt, Artificial Sequence
  Description of Artificial Sequence: Synthetic oligonucleotide
  Sense Strand Starting at position 1264 of SEQ ID NO: 315566
gugacacauuaguuuaaau

SEQ ID NO: 417900 - RNA, 19 nt, Artificial Sequence
  Description of Artificial Sequence: Synthetic oligonucleotide
  Antisense Strand to SEQ ID NO: 417899
auuuaaacuaaugugucac

SEQ ID NO: 417901 - RNA, 19 nt, Artificial Sequence
  Description of Artificial Sequence: Synthetic oligonucleotide
  Sense Strand Starting at position 1264 of SEQ ID NO: 315593
auccaucuugggcaaagua

SEQ ID NO: 417902 - RNA, 19 nt, Artificial Sequence
  Description of Artificial Sequence: Synthetic oligonucleotide
  Antisense Strand to SEQ ID NO: 417901
uacuuugcccaagauggau

SEQ ID NO: 417903 - RNA, 19 nt, Artificial Sequence
  Description of Artificial Sequence: Synthetic oligonucleotide
  Sense Strand Starting at position 1264 of SEQ ID NO: 315601
ugggcaaaguaucuuaaua

SEQ ID NO: 417904 - RNA, 19 nt, Artificial Sequence
  Description of Artificial Sequence: Synthetic oligonucleotide
  Antisense Strand to SEQ ID NO: 417903
uauuaagauacuuugccca

SEQ ID NO: 417905 - RNA, 19 nt, Artificial Sequence
  Description of Artificial Sequence: Synthetic oligonucleotide
  Sense Strand Starting at position 1264 of SEQ ID NO: 315782
acugauaccucuuugagca

SEQ ID NO: 417906 - RNA, 19 nt, Artificial Sequence
  Description of Artificial Sequence: Synthetic oligonucleotide
  Antisense Strand to SEQ ID NO: 417905
ugcucaaagagguaucagu

SEQ ID NO: 417907 - RNA, 19 nt, Artificial Sequence
  Description of Artificial Sequence: Synthetic oligonucleotide
  Sense Strand Starting at position 1264 of SEQ ID NO: 315945
gcagguauacuugagcaca

SEQ ID NO: 417908 - RNA, 19 nt, Artificial Sequence
  Description of Artificial Sequence: Synthetic oligonucleotide
  Antisense Strand to SEQ ID NO: 417907
ugugcucaaguauaccugc

SEQ ID NO: 417909 - RNA, 19 nt, Artificial Sequence
  Description of Artificial Sequence: Synthetic oligonucleotide
  Sense Strand Starting at position 1264 of SEQ ID NO: 315948
gguauacuugagcacaacu

SEQ ID NO: 417910 - RNA, 19 nt, Artificial Sequence
  Description of Artificial Sequence: Synthetic oligonucleotide
  Antisense Strand to SEQ ID NO: 417909
aguugugcucaaguauacc

SEQ ID NO: 417911 - RNA, 19 nt, Artificial Sequence
  Description of Artificial Sequence: Synthetic oligonucleotide
  Sense Strand Starting at position 1264 of SEQ ID NO: 317331
aaggauugggcucagcauu

SEQ ID NO: 417912 - RNA, 19 nt, Artificial Sequence
  Description of Artificial Sequence: Synthetic oligonucleotide
  Antisense Strand to SEQ ID NO: 417911
aaugcugagcccaauccuu

SEQ ID NO: 417913 - RNA, 19 nt, Artificial Sequence
  Description of Artificial Sequence: Synthetic oligonucleotide
  Sense Strand Starting at position 1264 of SEQ ID NO: 317374
cuuccaggaagugauguau

SEQ ID NO: 417914 - RNA, 19 nt, Artificial Sequence
  Description of Artificial Sequence: Synthetic oligonucleotide
  Antisense Strand to SEQ ID NO: 417913
auacaucacuuccuggaag

SEQ ID NO: 417915 - RNA, 19 nt, Artificial Sequence
  Description of Artificial Sequence: Synthetic oligonucleotide
  Sense Strand Starting at position 1264 of SEQ ID NO: 317378
caggaagugauguauguga

SEQ ID NO: 417916 - RNA, 19 nt, Artificial Sequence
  Description of Artificial Sequence: Synthetic oligonucleotide
  Antisense Strand to SEQ ID NO: 417915
ucacauacaucacuuccug

SEQ ID NO: 417917 - RNA, 19 nt, Artificial Sequence
  Description of Artificial Sequence: Synthetic oligonucleotide
  Sense Strand Starting at position 1264 of SEQ ID NO: 317380
ggaagugauguaugugaga

SEQ ID NO: 417918 - RNA, 19 nt, Artificial Sequence
  Description of Artificial Sequence: Synthetic oligonucleotide
  Antisense Strand to SEQ ID NO: 417917
ucucacauacaucacuucc

SEQ ID NO: 417919 - RNA, 19 nt, Artificial Sequence
  Description of Artificial Sequence: Synthetic oligonucleotide
  Sense Strand Starting at position 1264 of SEQ ID NO: 317382
aagugauguaugugagaag

SEQ ID NO: 417920 - RNA, 19 nt, Artificial Sequence
  Description of Artificial Sequence: Synthetic oligonucleotide
  Antisense Strand to SEQ ID NO: 417919
cuucucacauacaucacuu

SEQ ID NO: 417921 - RNA, 19 nt, Artificial Sequence
  Description of Artificial Sequence: Synthetic oligonucleotide
  Sense Strand Starting at position 1264 of SEQ ID NO: 317414
guguacgugggaucguuau

SEQ ID NO: 417922 - RNA, 19 nt, Artificial Sequence
  Description of Artificial Sequence: Synthetic oligonucleotide
  Antisense Strand to SEQ ID NO: 417921
auaacgaucccacguacac

SEQ ID NO: 417923 - RNA, 19 nt, Artificial Sequence
  Description of Artificial Sequence: Synthetic oligonucleotide
  Sense Strand Starting at position 1264 of SEQ ID NO: 317450
agcuguaaccuaggguaaa

SEQ ID NO: 417924 - RNA, 19 nt, Artificial Sequence
  Description of Artificial Sequence: Synthetic oligonucleotide
  Antisense Strand to SEQ ID NO: 417923
uuuacccuagguuacagcu

SEQ ID NO: 417925 - RNA, 19 nt, Artificial Sequence
  Description of Artificial Sequence: Synthetic oligonucleotide
  Sense Strand Starting at position 1264 of SEQ ID NO: 317520
guaagaacccuauacgagu

SEQ ID NO: 417926 - RNA, 19 nt, Artificial Sequence
  Description of Artificial Sequence: Synthetic oligonucleotide
  Antisense Strand to SEQ ID NO: 417925
acucguauaggguucuuac

SEQ ID NO: 417927 - RNA, 19 nt, Artificial Sequence
  Description of Artificial Sequence: Synthetic oligonucleotide
  Sense Strand Starting at position 1264 of SEQ ID NO: 317742
ccaggauggcuuuaauguc

SEQ ID NO: 417928 - RNA, 19 nt, Artificial Sequence
  Description of Artificial Sequence: Synthetic oligonucleotide
  Antisense Strand to SEQ ID NO: 417927
gacauuaaagccauccugg

SEQ ID NO: 417929 - RNA, 19 nt, Artificial Sequence
  Description of Artificial Sequence: Synthetic oligonucleotide
  Sense Strand Starting at position 1264 of SEQ ID NO: 317854
gucugugggacuuacugua

SEQ ID NO: 417930 - RNA, 19 nt, Artificial Sequence
  Description of Artificial Sequence: Synthetic oligonucleotide
  Antisense Strand to SEQ ID NO: 417929
uacaguaagucccacagac

SEQ ID NO: 417931 - RNA, 19 nt, Artificial Sequence
  Description of Artificial Sequence: Synthetic oligonucleotide
  Sense Strand Starting at position 1264 of SEQ ID NO: 317962
cuuacuuacugacuugaga

SEQ ID NO: 417932 - RNA, 19 nt, Artificial Sequence
  Description of Artificial Sequence: Synthetic oligonucleotide
  Antisense Strand to SEQ ID NO: 417931
ucucaagucaguaaguaag

SEQ ID NO: 417933 - RNA, 19 nt, Artificial Sequence
  Description of Artificial Sequence: Synthetic oligonucleotide
  Sense Strand Starting at position 1264 of SEQ ID NO: 318074
cuaguaagaggcuagaguu

SEQ ID NO: 417934 - RNA, 19 nt, Artificial Sequence
  Description of Artificial Sequence: Synthetic oligonucleotide
  Antisense Strand to SEQ ID NO: 417933
aacucuagccucuuacuag

SEQ ID NO: 417935 - RNA, 19 nt, Artificial Sequence
  Description of Artificial Sequence: Synthetic oligonucleotide
  Sense Strand Starting at position 1264 of SEQ ID NO: 318132
aguugcuggauugaguauu

SEQ ID NO: 417936 - RNA, 19 nt, Artificial Sequence
  Description of Artificial Sequence: Synthetic oligonucleotide
  Antisense Strand to SEQ ID NO: 417935
aauacucaauccagcaacu

SEQ ID NO: 417937 - RNA, 19 nt, Artificial Sequence
  Description of Artificial Sequence: Synthetic oligonucleotide
  Sense Strand Starting at position 1264 of SEQ ID NO: 318152
uaucauauggaaggucuaa

SEQ ID NO: 417938 - RNA, 19 nt, Artificial Sequence
  Description of Artificial Sequence: Synthetic oligonucleotide
  Antisense Strand to SEQ ID NO: 417937
uuagaccuuccauaugaua

SEQ ID NO: 417939 - RNA, 19 nt, Artificial Sequence
  Description of Artificial Sequence: Synthetic oligonucleotide
  Sense Strand Starting at position 1264 of SEQ ID NO: 318254
ucaguauaguccucuugaa

SEQ ID NO: 417940 - RNA, 19 nt, Artificial Sequence
  Description of Artificial Sequence: Synthetic oligonucleotide
  Antisense Strand to SEQ ID NO: 417939
uucaagaggacuauacuga

SEQ ID NO: 417941 - RNA, 19 nt, Artificial Sequence
  Description of Artificial Sequence: Synthetic oligonucleotide
  Sense Strand Starting at position 1264 of SEQ ID NO: 318274
agaaauaaacggugacagu

SEQ ID NO: 417942 - RNA, 19 nt, Artificial Sequence
  Description of Artificial Sequence: Synthetic oligonucleotide
  Antisense Strand to SEQ ID NO: 417941
acugucaccguuuauuucu

SEQ ID NO: 417943 - RNA, 19 nt, Artificial Sequence
  Description of Artificial Sequence: Synthetic oligonucleotide
  Sense Strand Starting at position 1264 of SEQ ID NO: 318309
caccaugugucuuugagga

SEQ ID NO: 417944 - RNA, 19 nt, Artificial Sequence
  Description of Artificial Sequence: Synthetic oligonucleotide
  Antisense Strand to SEQ ID NO: 417943
uccucaaagacacauggug

SEQ ID NO: 417945 - RNA, 19 nt, Artificial Sequence
  Description of Artificial Sequence: Synthetic oligonucleotide
  Sense Strand Starting at position 1264 of SEQ ID NO: 318314
ugugucuuugaggaaauca

SEQ ID NO: 417946 - RNA, 19 nt, Artificial Sequence
  Description of Artificial Sequence: Synthetic oligonucleotide
  Antisense Strand to SEQ ID NO: 417945
ugauuuccucaaagacaca

SEQ ID NO: 417947 - RNA, 19 nt, Artificial Sequence
  Description of Artificial Sequence: Synthetic oligonucleotide
  Sense Strand Starting at position 1264 of SEQ ID NO: 318428
agguaaacaguuugagacu

SEQ ID NO: 417948 - RNA, 19 nt, Artificial Sequence
  Description of Artificial Sequence: Synthetic oligonucleotide
  Antisense Strand to SEQ ID NO: 417947
agucucaaacuguuuaccu

SEQ ID NO: 417949 - RNA, 19 nt, Artificial Sequence
  Description of Artificial Sequence: Synthetic oligonucleotide
  Sense Strand Starting at position 1264 of SEQ ID NO: 318831
gguacagacugacuuguuu

SEQ ID NO: 417950 - RNA, 19 nt, Artificial Sequence
  Description of Artificial Sequence: Synthetic oligonucleotide
  Antisense Strand to SEQ ID NO: 417949
aaacaagucagucuguacc

SEQ ID NO: 417951 - RNA, 19 nt, Artificial Sequence
  Description of Artificial Sequence: Synthetic oligonucleotide
  Sense Strand Starting at position 1264 of SEQ ID NO: 318859
acucuagagaaugguuguu

SEQ ID NO: 417952 - RNA, 19 nt, Artificial Sequence
  Description of Artificial Sequence: Synthetic oligonucleotide
  Antisense Strand to SEQ ID NO: 417951
aacaaccauucucuagagu

SEQ ID NO: 417953 - RNA, 19 nt, Artificial Sequence
  Description of Artificial Sequence: Synthetic oligonucleotide
  Sense Strand Starting at position 1264 of SEQ ID NO: 318955
uuguguuagagucaaucug

SEQ ID NO: 417954 - RNA, 19 nt, Artificial Sequence
  Description of Artificial Sequence: Synthetic oligonucleotide
  Antisense Strand to SEQ ID NO: 417953
cagauugacucuaacacaa

SEQ ID NO: 417955 - RNA, 19 nt, Artificial Sequence
  Description of Artificial Sequence: Synthetic oligonucleotide
  Sense Strand Starting at position 1264 of SEQ ID NO: 318962
agagucaaucugugaucaa

SEQ ID NO: 417956 - RNA, 19 nt, Artificial Sequence
  Description of Artificial Sequence: Synthetic oligonucleotide
  Antisense Strand to SEQ ID NO: 417955
uugaucacagauugacucu

SEQ ID NO: 417957 - RNA, 19 nt, Artificial Sequence
  Description of Artificial Sequence: Synthetic oligonucleotide
  Sense Strand Starting at position 1264 of SEQ ID NO: 318965
gucaaucugugaucaagga

SEQ ID NO: 417958 - RNA, 19 nt, Artificial Sequence
  Description of Artificial Sequence: Synthetic oligonucleotide
  Antisense Strand to SEQ ID NO: 417957
uccuugaucacagauugac

SEQ ID NO: 417959 - RNA, 19 nt, Artificial Sequence
  Description of Artificial Sequence: Synthetic oligonucleotide
  Sense Strand Starting at position 1264 of SEQ ID NO: 319002
cuaagaaaccggugucuga

SEQ ID NO: 417960 - RNA, 19 nt, Artificial Sequence
  Description of Artificial Sequence: Synthetic oligonucleotide
  Antisense Strand to SEQ ID NO: 417959
ucagacaccgguuucuuag

SEQ ID NO: 417961 - RNA, 19 nt, Artificial Sequence
  Description of Artificial Sequence: Synthetic oligonucleotide
  Sense Strand Starting at position 1264 of SEQ ID NO: 319103
augggaucugucuauacuu

SEQ ID NO: 417962 - RNA, 19 nt, Artificial Sequence
  Description of Artificial Sequence: Synthetic oligonucleotide
  Antisense Strand to SEQ ID NO: 417961
aaguauagacagaucccau

SEQ ID NO: 417963 - RNA, 19 nt, Artificial Sequence
  Description of Artificial Sequence: Synthetic oligonucleotide
  Sense Strand Starting at position 1264 of SEQ ID NO: 319105
gggaucugucuauacuucu

SEQ ID NO: 417964 - RNA, 19 nt, Artificial Sequence
  Description of Artificial Sequence: Synthetic oligonucleotide
  Antisense Strand to SEQ ID NO: 417963
agaaguauagacagauccc

SEQ ID NO: 417965 - RNA, 19 nt, Artificial Sequence
  Description of Artificial Sequence: Synthetic oligonucleotide
  Sense Strand Starting at position 1264 of SEQ ID NO: 319175
ugaaauggccgugaacaua

SEQ ID NO: 417966 - RNA, 19 nt, Artificial Sequence
  Description of Artificial Sequence: Synthetic oligonucleotide
  Antisense Strand to SEQ ID NO: 417965
uauguucacggccauuuca

SEQ ID NO: 417967 - RNA, 19 nt, Artificial Sequence
  Description of Artificial Sequence: Synthetic oligonucleotide
  Sense Strand Starting at position 1265 of SEQ ID NO: 315390
gcuuccaggccuggaauua

SEQ ID NO: 417968 - RNA, 19 nt, Artificial Sequence
  Description of Artificial Sequence: Synthetic oligonucleotide
  Antisense Strand to SEQ ID NO: 417967
uaauuccaggccuggaagc

SEQ ID NO: 417969 - RNA, 19 nt, Artificial Sequence
  Description of Artificial Sequence: Synthetic oligonucleotide
  Sense Strand Starting at position 1265 of SEQ ID NO: 315535
uguggauucccgugggaau

SEQ ID NO: 417970 - RNA, 19 nt, Artificial Sequence
  Description of Artificial Sequence: Synthetic oligonucleotide
  Antisense Strand to SEQ ID NO: 417969
auucccacgggaauccaca

SEQ ID NO: 417971 - RNA, 19 nt, Artificial Sequence
  Description of Artificial Sequence: Synthetic oligonucleotide
  Sense Strand Starting at position 1265 of SEQ ID NO: 315536
guggauucccgugggaauc

SEQ ID NO: 417972 - RNA, 19 nt, Artificial Sequence
  Description of Artificial Sequence: Synthetic oligonucleotide
  Antisense Strand to SEQ ID NO: 417971
gauucccacgggaauccac

SEQ ID NO: 417973 - RNA, 19 nt, Artificial Sequence
  Description of Artificial Sequence: Synthetic oligonucleotide
  Sense Strand Starting at position 1265 of SEQ ID NO: 315676
uccuuaccuucuuugagga

SEQ ID NO: 417974 - RNA, 19 nt, Artificial Sequence
  Description of Artificial Sequence: Synthetic oligonucleotide
  Antisense Strand to SEQ ID NO: 417973
uccucaaagaagguaagga

SEQ ID NO: 417975 - RNA, 19 nt, Artificial Sequence
  Description of Artificial Sequence: Synthetic oligonucleotide
  Sense Strand Starting at position 1265 of SEQ ID NO: 315862
uguucugucccagauggga

SEQ ID NO: 417976 - RNA, 19 nt, Artificial Sequence
  Description of Artificial Sequence: Synthetic oligonucleotide
  Antisense Strand to SEQ ID NO: 417975
ucccaucugggacagaaca

SEQ ID NO: 417977 - RNA, 19 nt, Artificial Sequence
  Description of Artificial Sequence: Synthetic oligonucleotide
  Sense Strand Starting at position 1265 of SEQ ID NO: 316010
agaguuuggagguguuugu

SEQ ID NO: 417978 - RNA, 19 nt, Artificial Sequence
  Description of Artificial Sequence: Synthetic oligonucleotide
  Antisense Strand to SEQ ID NO: 417977
acaaacaccuccaaacucu

SEQ ID NO: 417979 - RNA, 19 nt, Artificial Sequence
  Description of Artificial Sequence: Synthetic oligonucleotide
  Sense Strand Starting at position 1265 of SEQ ID NO: 316141
uacgaauuguaguuacaag

SEQ ID NO: 417980 - RNA, 19 nt, Artificial Sequence
  Description of Artificial Sequence: Synthetic oligonucleotide
  Antisense Strand to SEQ ID NO: 417979
cuuguaacuacaauucgua

SEQ ID NO: 417981 - RNA, 19 nt, Artificial Sequence
  Description of Artificial Sequence: Synthetic oligonucleotide
  Sense Strand Starting at position 1265 of SEQ ID NO: 316142
acgaauuguaguuacaagu

SEQ ID NO: 417982 - RNA, 19 nt, Artificial Sequence
  Description of Artificial Sequence: Synthetic oligonucleotide
  Antisense Strand to SEQ ID NO: 417981
acuuguaacuacaauucgu

SEQ ID NO: 417983 - RNA, 19 nt, Artificial Sequence
  Description of Artificial Sequence: Synthetic oligonucleotide
  Sense Strand Starting at position 1265 of SEQ ID NO: 316222
gaagcuuaagcccauggaa

SEQ ID NO: 417984 - RNA, 19 nt, Artificial Sequence
  Description of Artificial Sequence: Synthetic oligonucleotide
  Antisense Strand to SEQ ID NO: 417983
uuccaugggcuuaagcuuc

SEQ ID NO: 417985 - RNA, 19 nt, Artificial Sequence
  Description of Artificial Sequence: Synthetic oligonucleotide
  Sense Strand Starting at position 1265 of SEQ ID NO: 316225
gcuuaagcccauggaaacu

SEQ ID NO: 417986 - RNA, 19 nt, Artificial Sequence
  Description of Artificial Sequence: Synthetic oligonucleotide
  Antisense Strand to SEQ ID NO: 417985
aguuuccaugggcuuaagc

SEQ ID NO: 417987 - RNA, 19 nt, Artificial Sequence
  Description of Artificial Sequence: Synthetic oligonucleotide
  Sense Strand Starting at position 1265 of SEQ ID NO: 316324
gugguuggacuguaaacau

SEQ ID NO: 417988 - RNA, 19 nt, Artificial Sequence
  Description of Artificial Sequence: Synthetic oligonucleotide
  Antisense Strand to SEQ ID NO: 417987
auguuuacaguccaaccac

SEQ ID NO: 417989 - RNA, 19 nt, Artificial Sequence
  Description of Artificial Sequence: Synthetic oligonucleotide
  Sense Strand Starting at position 1265 of SEQ ID NO: 316580
cugguucugggcuagaaga

SEQ ID NO: 417990 - RNA, 19 nt, Artificial Sequence
  Description of Artificial Sequence: Synthetic oligonucleotide
  Antisense Strand to SEQ ID NO: 417989
ucuucuagcccagaaccag

SEQ ID NO: 417991 - RNA, 19 nt, Artificial Sequence
  Description of Artificial Sequence: Synthetic oligonucleotide
  Sense Strand Starting at position 1265 of SEQ ID NO: 316582
gguucugggcuagaagaua

SEQ ID NO: 417992 - RNA, 19 nt, Artificial Sequence
  Description of Artificial Sequence: Synthetic oligonucleotide
  Antisense Strand to SEQ ID NO: 417991
uaucuucuagcccagaacc

SEQ ID NO: 417993 - RNA, 19 nt, Artificial Sequence
  Description of Artificial Sequence: Synthetic oligonucleotide
  Sense Strand Starting at position 1265 of SEQ ID NO: 316638
uggcauuucuuguagacag

SEQ ID NO: 417994 - RNA, 19 nt, Artificial Sequence
  Description of Artificial Sequence: Synthetic oligonucleotide
  Antisense Strand to SEQ ID NO: 417993
cugucuacaagaaaugcca

SEQ ID NO: 417995 - RNA, 19 nt, Artificial Sequence
  Description of Artificial Sequence: Synthetic oligonucleotide
  Sense Strand Starting at position 1265 of SEQ ID NO: 316679
agagguaugaguuaaggcu

SEQ ID NO: 417996 - RNA, 19 nt, Artificial Sequence
  Description of Artificial Sequence: Synthetic oligonucleotide
  Antisense Strand to SEQ ID NO: 417995
agccuuaacucauaccucu

SEQ ID NO: 417997 - RNA, 19 nt, Artificial Sequence
  Description of Artificial Sequence: Synthetic oligonucleotide
  Sense Strand Starting at position 1265 of SEQ ID NO: 316687
gaguuaaggcuaggagauu

SEQ ID NO: 417998 - RNA, 19 nt, Artificial Sequence
  Description of Artificial Sequence: Synthetic oligonucleotide
  Antisense Strand to SEQ ID NO: 417997
aaucuccuagccuuaacuc

SEQ ID NO: 417999 - RNA, 19 nt, Artificial Sequence
  Description of Artificial Sequence: Synthetic oligonucleotide
  Sense Strand Starting at position 1265 of SEQ ID NO: 316688
aguuaaggcuaggagauua

SEQ ID NO: 418000 - RNA, 19 nt, Artificial Sequence
  Description of Artificial Sequence: Synthetic oligonucleotide
  Antisense Strand to SEQ ID NO: 417999
uaaucuccuagccuuaacu

SEQ ID NO: 418001 - RNA, 19 nt, Artificial Sequence
  Description of Artificial Sequence: Synthetic oligonucleotide
  Sense Strand Starting at position 1265 of SEQ ID NO: 316780
aagggauaaugauagugau

SEQ ID NO: 418002 - RNA, 19 nt, Artificial Sequence
  Description of Artificial Sequence: Synthetic oligonucleotide
  Antisense Strand to SEQ ID NO: 418001
aucacuaucauuaucccuu

SEQ ID NO: 418003 - RNA, 19 nt, Artificial Sequence
  Description of Artificial Sequence: Synthetic oligonucleotide
  Sense Strand Starting at position 1265 of SEQ ID NO: 316911
gcaggaccgccugauauaa

SEQ ID NO: 418004 - RNA, 19 nt, Artificial Sequence
  Description of Artificial Sequence: Synthetic oligonucleotide
  Antisense Strand to SEQ ID NO: 418003
uuauaucaggcgguccugc

SEQ ID NO: 418005 - RNA, 19 nt, Artificial Sequence
  Description of Artificial Sequence: Synthetic oligonucleotide
  Sense Strand Starting at position 1265 of SEQ ID NO: 316919
gccugauauaacugaggac

SEQ ID NO: 418006 - RNA, 19 nt, Artificial Sequence
  Description of Artificial Sequence: Synthetic oligonucleotide
  Antisense Strand to SEQ ID NO: 418005
guccucaguuauaucaggc

SEQ ID NO: 418007 - RNA, 19 nt, Artificial Sequence
  Description of Artificial Sequence: Synthetic oligonucleotide
  Sense Strand Starting at position 1265 of SEQ ID NO: 317522
cgaguguuuccgccugggu

SEQ ID NO: 418008 - RNA, 19 nt, Artificial Sequence
  Description of Artificial Sequence: Synthetic oligonucleotide
  Antisense Strand to SEQ ID NO: 418007
acccaggcggaaacacucg

SEQ ID NO: 418009 - RNA, 19 nt, Artificial Sequence
  Description of Artificial Sequence: Synthetic oligonucleotide
  Sense Strand Starting at position 1265 of SEQ ID NO: 317704
gcuccucccgggugaagaa

SEQ ID NO: 418010 - RNA, 19 nt, Artificial Sequence
  Description of Artificial Sequence: Synthetic oligonucleotide
  Antisense Strand to SEQ ID NO: 418009
uucuucacccgggaggagc

SEQ ID NO: 418011 - RNA, 19 nt, Artificial Sequence
  Description of Artificial Sequence: Synthetic oligonucleotide
  Sense Strand Starting at position 1265 of SEQ ID NO: 317979
gggagagugcugcagaauc

SEQ ID NO: 418012 - RNA, 19 nt, Artificial Sequence
  Description of Artificial Sequence: Synthetic oligonucleotide
  Antisense Strand to SEQ ID NO: 418011
gauucugcagcacucuccc

SEQ ID NO: 418013 - RNA, 19 nt, Artificial Sequence
  Description of Artificial Sequence: Synthetic oligonucleotide
  Sense Strand Starting at position 1265 of SEQ ID NO: 317987
gcugcagaauccucgagga

SEQ ID NO: 418014 - RNA, 19 nt, Artificial Sequence
  Description of Artificial Sequence: Synthetic oligonucleotide
  Antisense Strand to SEQ ID NO: 418013
uccucgaggauucugcagc

SEQ ID NO: 418015 - RNA, 19 nt, Artificial Sequence
  Description of Artificial Sequence: Synthetic oligonucleotide
  Sense Strand Starting at position 1265 of SEQ ID NO: 318151
ggagauuugugccugcggu

SEQ ID NO: 418016 - RNA, 19 nt, Artificial Sequence
  Description of Artificial Sequence: Synthetic oligonucleotide
  Antisense Strand to SEQ ID NO: 418015
accgcaggcacaaaucucc

SEQ ID NO: 418017 - RNA, 19 nt, Artificial Sequence
  Description of Artificial Sequence: Synthetic oligonucleotide
  Sense Strand Starting at position 1265 of SEQ ID NO: 318178
ggcuauaauguaggugaga

SEQ ID NO: 418018 - RNA, 19 nt, Artificial Sequence
  Description of Artificial Sequence: Synthetic oligonucleotide
  Antisense Strand to SEQ ID NO: 418017
ucucaccuacauuauagcc

SEQ ID NO: 418019 - RNA, 19 nt, Artificial Sequence
  Description of Artificial Sequence: Synthetic oligonucleotide
  Sense Strand Starting at position 1265 of SEQ ID NO: 318179
gcuauaauguaggugagag

SEQ ID NO: 418020 - RNA, 19 nt, Artificial Sequence
  Description of Artificial Sequence: Synthetic oligonucleotide
  Antisense Strand to SEQ ID NO: 418019
cucucaccuacauuauagc

SEQ ID NO: 418021 - RNA, 19 nt, Artificial Sequence
  Description of Artificial Sequence: Synthetic oligonucleotide
  Sense Strand Starting at position 1265 of SEQ ID NO: 318274
gcuggaugcagagaugagu

SEQ ID NO: 418022 - RNA, 19 nt, Artificial Sequence
  Description of Artificial Sequence: Synthetic oligonucleotide
  Antisense Strand to SEQ ID NO: 418021
acucaucucugcauccagc

SEQ ID NO: 418023 - RNA, 19 nt, Artificial Sequence
  Description of Artificial Sequence: Synthetic oligonucleotide
  Sense Strand Starting at position 1265 of SEQ ID NO: 318492
ccaggagcgucuuccaaca

SEQ ID NO: 418024 - RNA, 19 nt, Artificial Sequence
  Description of Artificial Sequence: Synthetic oligonucleotide
  Antisense Strand to SEQ ID NO: 418023
uguuggaagacgcuccugg

SEQ ID NO: 418025 - RNA, 19 nt, Artificial Sequence
  Description of Artificial Sequence: Synthetic oligonucleotide
  Sense Strand Starting at position 1265 of SEQ ID NO: 318503
uuccaacagguuugauuaa

SEQ ID NO: 418026 - RNA, 19 nt, Artificial Sequence
  Description of Artificial Sequence: Synthetic oligonucleotide
  Antisense Strand to SEQ ID NO: 418025
uuaaucaaaccuguuggaa

SEQ ID NO: 418027 - RNA, 19 nt, Artificial Sequence
  Description of Artificial Sequence: Synthetic oligonucleotide
  Sense Strand Starting at position 1265 of SEQ ID NO: 318504
uccaacagguuugauuaaa

SEQ ID NO: 418028 - RNA, 19 nt, Artificial Sequence
  Description of Artificial Sequence: Synthetic oligonucleotide
  Antisense Strand to SEQ ID NO: 418027
uuuaaucaaaccuguugga

SEQ ID NO: 418029 - RNA, 19 nt, Artificial Sequence
  Description of Artificial Sequence: Synthetic oligonucleotide
  Sense Strand Starting at position 1265 of SEQ ID NO: 318630
gggaucagagguugucagu

SEQ ID NO: 418030 - RNA, 19 nt, Artificial Sequence
  Description of Artificial Sequence: Synthetic oligonucleotide
  Antisense Strand to SEQ ID NO: 418029
acugacaaccucugauccc

SEQ ID NO: 418031 - RNA, 19 nt, Artificial Sequence
  Description of Artificial Sequence: Synthetic oligonucleotide
  Sense Strand Starting at position 1265 of SEQ ID NO: 318789
auacaugguaggugguaau

SEQ ID NO: 418032 - RNA, 19 nt, Artificial Sequence
  Description of Artificial Sequence: Synthetic oligonucleotide
  Antisense Strand to SEQ ID NO: 418031
auuaccaccuaccauguau

SEQ ID NO: 418033 - RNA, 19 nt, Artificial Sequence
  Description of Artificial Sequence: Synthetic oligonucleotide
  Sense Strand Starting at position 1265 of SEQ ID NO: 318802
gguaauuaccagugauaaa

SEQ ID NO: 418034 - RNA, 19 nt, Artificial Sequence
  Description of Artificial Sequence: Synthetic oligonucleotide
  Antisense Strand to SEQ ID NO: 418033
uuuaucacugguaauuacc

SEQ ID NO: 418035 - RNA, 19 nt, Artificial Sequence
  Description of Artificial Sequence: Synthetic oligonucleotide
  Sense Strand Starting at position 1265 of SEQ ID NO: 318867
uugauagaguggucaggaa

SEQ ID NO: 418036 - RNA, 19 nt, Artificial Sequence
  Description of Artificial Sequence: Synthetic oligonucleotide
  Antisense Strand to SEQ ID NO: 418035
uuccugaccacucuaucaa

SEQ ID NO: 418037 - RNA, 19 nt, Artificial Sequence
  Description of Artificial Sequence: Synthetic oligonucleotide
  Sense Strand Starting at position 1265 of SEQ ID NO: 318907
ucgaacagaugcuucugaa

SEQ ID NO: 418038 - RNA, 19 nt, Artificial Sequence
  Description of Artificial Sequence: Synthetic oligonucleotide
  Antisense Strand to SEQ ID NO: 418037
uucagaagcaucuguucga

SEQ ID NO: 418039 - RNA, 19 nt, Artificial Sequence
  Description of Artificial Sequence: Synthetic oligonucleotide
  Sense Strand Starting at position 1265 of SEQ ID NO: 318911
acagaugcuucugaaggaa

SEQ ID NO: 418040 - RNA, 19 nt, Artificial Sequence
  Description of Artificial Sequence: Synthetic oligonucleotide
  Antisense Strand to SEQ ID NO: 418039
uuccuucagaagcaucugu

SEQ ID NO: 418041 - RNA, 19 nt, Artificial Sequence
  Description of Artificial Sequence: Synthetic oligonucleotide
  Sense Strand Starting at position 1265 of SEQ ID NO: 318914
gaugcuucugaaggaagua

SEQ ID NO: 418042 - RNA, 19 nt, Artificial Sequence
  Description of Artificial Sequence: Synthetic oligonucleotide
  Antisense Strand to SEQ ID NO: 418041
uacuuccuucagaagcauc

SEQ ID NO: 418043 - RNA, 19 nt, Artificial Sequence
  Description of Artificial Sequence: Synthetic oligonucleotide
  Sense Strand Starting at position 1265 of SEQ ID NO: 319016
gugcuuguguguuugagga

SEQ ID NO: 418044 - RNA, 19 nt, Artificial Sequence
  Description of Artificial Sequence: Synthetic oligonucleotide
  Antisense Strand to SEQ ID NO: 418043
uccucaaacacacaagcac

SEQ ID NO: 418045 - RNA, 19 nt, Artificial Sequence
  Description of Artificial Sequence: Synthetic oligonucleotide
  Sense Strand Starting at position 1265 of SEQ ID NO: 319112
gccuguuguccugaagauu

SEQ ID NO: 418046 - RNA, 19 nt, Artificial Sequence
  Description of Artificial Sequence: Synthetic oligonucleotide
  Antisense Strand to SEQ ID NO: 418045
aaucuucaggacaacaggc

SEQ ID NO: 418047 - RNA, 19 nt, Artificial Sequence
  Description of Artificial Sequence: Synthetic oligonucleotide
  Sense Strand Starting at position 1266 of SEQ ID NO: 315642
auaguuugccuaggagaga

SEQ ID NO: 418048 - RNA, 19 nt, Artificial Sequence
  Description of Artificial Sequence: Synthetic oligonucleotide
  Antisense Strand to SEQ ID NO: 418047
ucucuccuaggcaaacuau

SEQ ID NO: 418049 - RNA, 19 nt, Artificial Sequence
  Description of Artificial Sequence: Synthetic oligonucleotide
  Sense Strand Starting at position 1266 of SEQ ID NO: 315706
aggugcuagaguugagaau

SEQ ID NO: 418050 - RNA, 19 nt, Artificial Sequence
  Description of Artificial Sequence: Synthetic oligonucleotide
  Antisense Strand to SEQ ID NO: 418049
auucucaacucuagcaccu

SEQ ID NO: 418051 - RNA, 19 nt, Artificial Sequence
  Description of Artificial Sequence: Synthetic oligonucleotide
  Sense Strand Starting at position 1266 of SEQ ID NO: 315761
uggaauuagaccugugggu

SEQ ID NO: 418052 - RNA, 19 nt, Artificial Sequence
  Description of Artificial Sequence: Synthetic oligonucleotide
  Antisense Strand to SEQ ID NO: 418051
acccacaggucuaauucca

SEQ ID NO: 418053 - RNA, 19 nt, Artificial Sequence
  Description of Artificial Sequence: Synthetic oligonucleotide
  Sense Strand Starting at position 1266 of SEQ ID NO: 315763
gaauuagaccuguggguga

SEQ ID NO: 418054 - RNA, 19 nt, Artificial Sequence
  Description of Artificial Sequence: Synthetic oligonucleotide
  Antisense Strand to SEQ ID NO: 418053
ucacccacaggucuaauuc

SEQ ID NO: 418055 - RNA, 19 nt, Artificial Sequence
  Description of Artificial Sequence: Synthetic oligonucleotide
  Sense Strand Starting at position 1266 of SEQ ID NO: 315767
uagaccugugggugaagaa

SEQ ID NO: 418056 - RNA, 19 nt, Artificial Sequence
  Description of Artificial Sequence: Synthetic oligonucleotide
  Antisense Strand to SEQ ID NO: 418055
uucuucacccacaggucua

SEQ ID NO: 418057 - RNA, 19 nt, Artificial Sequence
  Description of Artificial Sequence: Synthetic oligonucleotide
  Sense Strand Starting at position 1266 of SEQ ID NO: 315806
gcgugaggaacugagagau

SEQ ID NO: 418058 - RNA, 19 nt, Artificial Sequence
  Description of Artificial Sequence: Synthetic oligonucleotide
  Antisense Strand to SEQ ID NO: 418057
aucucucaguuccucacgc

SEQ ID NO: 418059 - RNA, 19 nt, Artificial Sequence
  Description of Artificial Sequence: Synthetic oligonucleotide
  Sense Strand Starting at position 1266 of SEQ ID NO: 315853
cagguuugggcaggaagau

SEQ ID NO: 418060 - RNA, 19 nt, Artificial Sequence
  Description of Artificial Sequence: Synthetic oligonucleotide
  Antisense Strand to SEQ ID NO: 418059
aucuuccugcccaaaccug

SEQ ID NO: 418061 - RNA, 19 nt, Artificial Sequence
  Description of Artificial Sequence: Synthetic oligonucleotide
  Sense Strand Starting at position 1266 of SEQ ID NO: 315870
aucaaagucugguuuggga

SEQ ID NO: 418062 - RNA, 19 nt, Artificial Sequence
  Description of Artificial Sequence: Synthetic oligonucleotide
  Antisense Strand to SEQ ID NO: 418061
ucccaaaccagacuuugau

SEQ ID NO: 418063 - RNA, 19 nt, Artificial Sequence
  Description of Artificial Sequence: Synthetic oligonucleotide
  Sense Strand Starting at position 1266 of SEQ ID NO: 315872
caaagucugguuugggaca

SEQ ID NO: 418064 - RNA, 19 nt, Artificial Sequence
  Description of Artificial Sequence: Synthetic oligonucleotide
  Antisense Strand to SEQ ID NO: 418063
ugucccaaaccagacuuug

SEQ ID NO: 418065 - RNA, 19 nt, Artificial Sequence
  Description of Artificial Sequence: Synthetic oligonucleotide
  Sense Strand Starting at position 1266 of SEQ ID NO: 315938
gggcuagaucuacgggaug

SEQ ID NO: 418066 - RNA, 19 nt, Artificial Sequence
  Description of Artificial Sequence: Synthetic oligonucleotide
  Antisense Strand to SEQ ID NO: 418065
caucccguagaucuagccc

SEQ ID NO: 418067 - RNA, 19 nt, Artificial Sequence
  Description of Artificial Sequence: Synthetic oligonucleotide
  Sense Strand Starting at position 1266 of SEQ ID NO: 315940
gcuagaucuacgggaugug

SEQ ID NO: 418068 - RNA, 19 nt, Artificial Sequence
  Description of Artificial Sequence: Synthetic oligonucleotide
  Antisense Strand to SEQ ID NO: 418067
cacaucccguagaucuagc

SEQ ID NO: 418069 - RNA, 19 nt, Artificial Sequence
  Description of Artificial Sequence: Synthetic oligonucleotide
  Sense Strand Starting at position 1266 of SEQ ID NO: 316064
gccacuaauggcugaggaa

SEQ ID NO: 418070 - RNA, 19 nt, Artificial Sequence
  Description of Artificial Sequence: Synthetic oligonucleotide
  Antisense Strand to SEQ ID NO: 418069
uuccucagccauuaguggc

SEQ ID NO: 418071 - RNA, 19 nt, Artificial Sequence
  Description of Artificial Sequence: Synthetic oligonucleotide
  Sense Strand Starting at position 1266 of SEQ ID NO: 316255
caggcaccuugauuagagu

SEQ ID NO: 418072 - RNA, 19 nt, Artificial Sequence
  Description of Artificial Sequence: Synthetic oligonucleotide
  Antisense Strand to SEQ ID NO: 418071
acucuaaucaaggugccug

SEQ ID NO: 418073 - RNA, 19 nt, Artificial Sequence
  Description of Artificial Sequence: Synthetic oligonucleotide
  Sense Strand Starting at position 1266 of SEQ ID NO: 316261
ccuugauuagagugggaca

SEQ ID NO: 418074 - RNA, 19 nt, Artificial Sequence
  Description of Artificial Sequence: Synthetic oligonucleotide
  Antisense Strand to SEQ ID NO: 418073
ugucccacucuaaucaagg

SEQ ID NO: 418075 - RNA, 19 nt, Artificial Sequence
  Description of Artificial Sequence: Synthetic oligonucleotide
  Sense Strand Starting at position 1266 of SEQ ID NO: 316262
cuugauuagagugggacau

SEQ ID NO: 418076 - RNA, 19 nt, Artificial Sequence
  Description of Artificial Sequence: Synthetic oligonucleotide
  Antisense Strand to SEQ ID NO: 418075
augucccacucuaaucaag

SEQ ID NO: 418077 - RNA, 19 nt, Artificial Sequence
  Description of Artificial Sequence: Synthetic oligonucleotide
  Sense Strand Starting at position 1266 of SEQ ID NO: 316352
ggguguggugguugaggau

SEQ ID NO: 418078 - RNA, 19 nt, Artificial Sequence
  Description of Artificial Sequence: Synthetic oligonucleotide
  Antisense Strand to SEQ ID NO: 418077
auccucaaccaccacaccc

SEQ ID NO: 418079 - RNA, 19 nt, Artificial Sequence
  Description of Artificial Sequence: Synthetic oligonucleotide
  Sense Strand Starting at position 1266 of SEQ ID NO: 316353
gguguggugguugaggauu

SEQ ID NO: 418080 - RNA, 19 nt, Artificial Sequence
  Description of Artificial Sequence: Synthetic oligonucleotide
  Antisense Strand to SEQ ID NO: 418079
aauccucaaccaccacacc

SEQ ID NO: 418081 - RNA, 19 nt, Artificial Sequence
  Description of Artificial Sequence: Synthetic oligonucleotide
  Sense Strand Starting at position 1266 of SEQ ID NO: 317490
uaguguugcgguuccuuau

SEQ ID NO: 418082 - RNA, 19 nt, Artificial Sequence
  Description of Artificial Sequence: Synthetic oligonucleotide
  Antisense Strand to SEQ ID NO: 418081
auaaggaaccgcaacacua

SEQ ID NO: 418083 - RNA, 19 nt, Artificial Sequence
  Description of Artificial Sequence: Synthetic oligonucleotide
  Sense Strand Starting at position 1266 of SEQ ID NO: 317530
ggcccuaggguuugaguga

SEQ ID NO: 418084 - RNA, 19 nt, Artificial Sequence
  Description of Artificial Sequence: Synthetic oligonucleotide
  Antisense Strand to SEQ ID NO: 418083
ucacucaaacccuagggcc

SEQ ID NO: 418085 - RNA, 19 nt, Artificial Sequence
  Description of Artificial Sequence: Synthetic oligonucleotide
  Sense Strand Starting at position 1266 of SEQ ID NO: 317535
uaggguuugagugauucca

SEQ ID NO: 418086 - RNA, 19 nt, Artificial Sequence
  Description of Artificial Sequence: Synthetic oligonucleotide
  Antisense Strand to SEQ ID NO: 418085
uggaaucacucaaacccua

SEQ ID NO: 418087 - RNA, 19 nt, Artificial Sequence
  Description of Artificial Sequence: Synthetic oligonucleotide
  Sense Strand Starting at position 1266 of SEQ ID NO: 317537
ggguuugagugauuccaca

SEQ ID NO: 418088 - RNA, 19 nt, Artificial Sequence
  Description of Artificial Sequence: Synthetic oligonucleotide
  Antisense Strand to SEQ ID NO: 418087
uguggaaucacucaaaccc

SEQ ID NO: 418089 - RNA, 19 nt, Artificial Sequence
  Description of Artificial Sequence: Synthetic oligonucleotide
  Sense Strand Starting at position 1266 of SEQ ID NO: 317553
acaguauuuauaggcgcua

SEQ ID NO: 418090 - RNA, 19 nt, Artificial Sequence
  Description of Artificial Sequence: Synthetic oligonucleotide
  Antisense Strand to SEQ ID NO: 418089
uagcgccuauaaauacugu

SEQ ID NO: 418091 - RNA, 19 nt, Artificial Sequence
  Description of Artificial Sequence: Synthetic oligonucleotide
  Sense Strand Starting at position 1266 of SEQ ID NO: 317554
caguauuuauaggcgcuaa

SEQ ID NO: 418092 - RNA, 19 nt, Artificial Sequence
  Description of Artificial Sequence: Synthetic oligonucleotide
  Antisense Strand to SEQ ID NO: 418091
uuagcgccuauaaauacug

SEQ ID NO: 418093 - RNA, 19 nt, Artificial Sequence
  Description of Artificial Sequence: Synthetic oligonucleotide
  Sense Strand Starting at position 1266 of SEQ ID NO: 317587
ccucauggagcuuacuaaa

SEQ ID NO: 418094 - RNA, 19 nt, Artificial Sequence
  Description of Artificial Sequence: Synthetic oligonucleotide
  Antisense Strand to SEQ ID NO: 418093
uuuaguaagcuccaugagg

SEQ ID NO: 418095 - RNA, 19 nt, Artificial Sequence
  Description of Artificial Sequence: Synthetic oligonucleotide
  Sense Strand Starting at position 1266 of SEQ ID NO: 317725
gcgcauuuaagcugaaggu

SEQ ID NO: 418096 - RNA, 19 nt, Artificial Sequence
  Description of Artificial Sequence: Synthetic oligonucleotide
  Antisense Strand to SEQ ID NO: 418095
accuucagcuuaaaugcgc

SEQ ID NO: 418097 - RNA, 19 nt, Artificial Sequence
  Description of Artificial Sequence: Synthetic oligonucleotide
  Sense Strand Starting at position 1266 of SEQ ID NO: 317731
uuaagcugaagguguaaau

SEQ ID NO: 418098 - RNA, 19 nt, Artificial Sequence
  Description of Artificial Sequence: Synthetic oligonucleotide
  Antisense Strand to SEQ ID NO: 418097
auuuacaccuucagcuuaa

SEQ ID NO: 418099 - RNA, 19 nt, Artificial Sequence
  Description of Artificial Sequence: Synthetic oligonucleotide
  Sense Strand Starting at position 1266 of SEQ ID NO: 317834
agaaccucugugcgaacua

SEQ ID NO: 418100 - RNA, 19 nt, Artificial Sequence
  Description of Artificial Sequence: Synthetic oligonucleotide
  Antisense Strand to SEQ ID NO: 418099
uaguucgcacagagguucu

SEQ ID NO: 418101 - RNA, 19 nt, Artificial Sequence
  Description of Artificial Sequence: Synthetic oligonucleotide
  Sense Strand Starting at position 1266 of SEQ ID NO: 317922
ggguaagguccuuagcgag

SEQ ID NO: 418102 - RNA, 19 nt, Artificial Sequence
  Description of Artificial Sequence: Synthetic oligonucleotide
  Antisense Strand to SEQ ID NO: 418101
cucgcuaaggaccuuaccc

SEQ ID NO: 418103 - RNA, 19 nt, Artificial Sequence
  Description of Artificial Sequence: Synthetic oligonucleotide
  Sense Strand Starting at position 1266 of SEQ ID NO: 318013
uugagucaacugcgaaaga

SEQ ID NO: 418104 - RNA, 19 nt, Artificial Sequence
  Description of Artificial Sequence: Synthetic oligonucleotide
  Antisense Strand to SEQ ID NO: 418103
ucuuucgcaguugacucaa

SEQ ID NO: 418105 - RNA, 19 nt, Artificial Sequence
  Description of Artificial Sequence: Synthetic oligonucleotide
  Sense Strand Starting at position 1266 of SEQ ID NO: 318022
cugcgaaagaaauguaaua

SEQ ID NO: 418106 - RNA, 19 nt, Artificial Sequence
  Description of Artificial Sequence: Synthetic oligonucleotide
  Antisense Strand to SEQ ID NO: 418105
uauuacauuucuuucgcag

SEQ ID NO: 418107 - RNA, 19 nt, Artificial Sequence
  Description of Artificial Sequence: Synthetic oligonucleotide
  Sense Strand Starting at position 1266 of SEQ ID NO: 318024
gcgaaagaaauguaauagu

SEQ ID NO: 418108 - RNA, 19 nt, Artificial Sequence
  Description of Artificial Sequence: Synthetic oligonucleotide
  Antisense Strand to SEQ ID NO: 418107
acuauuacauuucuuucgc

SEQ ID NO: 418109 - RNA, 19 nt, Artificial Sequence
  Description of Artificial Sequence: Synthetic oligonucleotide
  Sense Strand Starting at position 1266 of SEQ ID NO: 318067
aggcuaagacuguaagcaa

SEQ ID NO: 418110 - RNA, 19 nt, Artificial Sequence
  Description of Artificial Sequence: Synthetic oligonucleotide
  Antisense Strand to SEQ ID NO: 418109
uugcuuacagucuuagccu

SEQ ID NO: 418111 - RNA, 19 nt, Artificial Sequence
  Description of Artificial Sequence: Synthetic oligonucleotide
  Sense Strand Starting at position 1266 of SEQ ID NO: 318349
uugucagucacuggguaga

SEQ ID NO: 418112 - RNA, 19 nt, Artificial Sequence
  Description of Artificial Sequence: Synthetic oligonucleotide
  Antisense Strand to SEQ ID NO: 418111
ucuacccagugacugacaa

SEQ ID NO: 418113 - RNA, 19 nt, Artificial Sequence
  Description of Artificial Sequence: Synthetic oligonucleotide
  Sense Strand Starting at position 1266 of SEQ ID NO: 318370
ugcucuuaagagugaaggu

SEQ ID NO: 418114 - RNA, 19 nt, Artificial Sequence
  Description of Artificial Sequence: Synthetic oligonucleotide
  Antisense Strand to SEQ ID NO: 418113
accuucacucuuaagagca

SEQ ID NO: 418115 - RNA, 19 nt, Artificial Sequence
  Description of Artificial Sequence: Synthetic oligonucleotide
  Sense Strand Starting at position 1266 of SEQ ID NO: 318470
aaaggugauuuagggaauu

SEQ ID NO: 418116 - RNA, 19 nt, Artificial Sequence
  Description of Artificial Sequence: Synthetic oligonucleotide
  Antisense Strand to SEQ ID NO: 418115
aauucccuaaaucaccuuu

SEQ ID NO: 418117 - RNA, 19 nt, Artificial Sequence
  Description of Artificial Sequence: Synthetic oligonucleotide
  Sense Strand Starting at position 1266 of SEQ ID NO: 318502
agagauacaugacaaauga

SEQ ID NO: 418118 - RNA, 19 nt, Artificial Sequence
  Description of Artificial Sequence: Synthetic oligonucleotide
  Antisense Strand to SEQ ID NO: 418117
ucauuugucauguaucucu

SEQ ID NO: 418119 - RNA, 19 nt, Artificial Sequence
  Description of Artificial Sequence: Synthetic oligonucleotide
  Sense Strand Starting at position 1266 of SEQ ID NO: 318558
gaggguuguugagugacca

SEQ ID NO: 418120 - RNA, 19 nt, Artificial Sequence
  Description of Artificial Sequence: Synthetic oligonucleotide
  Antisense Strand to SEQ ID NO: 418119
uggucacucaacaacccuc

SEQ ID NO: 418121 - RNA, 19 nt, Artificial Sequence
  Description of Artificial Sequence: Synthetic oligonucleotide
  Sense Strand Starting at position 1266 of SEQ ID NO: 318586
uccuauuagucacccaguu

SEQ ID NO: 418122 - RNA, 19 nt, Artificial Sequence
  Description of Artificial Sequence: Synthetic oligonucleotide
  Antisense Strand to SEQ ID NO: 418121
aacugggugacuaauagga

SEQ ID NO: 418123 - RNA, 19 nt, Artificial Sequence
  Description of Artificial Sequence: Synthetic oligonucleotide
  Sense Strand Starting at position 1266 of SEQ ID NO: 318695
guaggucacagagguaaug

SEQ ID NO: 418124 - RNA, 19 nt, Artificial Sequence
  Description of Artificial Sequence: Synthetic oligonucleotide
  Antisense Strand to SEQ ID NO: 418123
cauuaccucugugaccuac

SEQ ID NO: 418125 - RNA, 19 nt, Artificial Sequence
  Description of Artificial Sequence: Synthetic oligonucleotide
  Sense Strand Starting at position 1266 of SEQ ID NO: 319108
uuugaaagcucagcucaaa

SEQ ID NO: 418126 - RNA, 19 nt, Artificial Sequence
  Description of Artificial Sequence: Synthetic oligonucleotide
  Antisense Strand to SEQ ID NO: 418125
uuugagcugagcuuucaaa

SEQ ID NO: 418127 - RNA, 19 nt, Artificial Sequence
  Description of Artificial Sequence: Synthetic oligonucleotide
  Sense Strand Starting at position 1267 of SEQ ID NO: 315239
cuuccuuguuccucccaga

SEQ ID NO: 418128 - RNA, 19 nt, Artificial Sequence
  Description of Artificial Sequence: Synthetic oligonucleotide
  Antisense Strand to SEQ ID NO: 418127
ucugggaggaacaaggaag

SEQ ID NO: 418129 - RNA, 19 nt, Artificial Sequence
  Description of Artificial Sequence: Synthetic oligonucleotide
  Sense Strand Starting at position 1267 of SEQ ID NO: 315358
ggaaucagauucuuaugca

SEQ ID NO: 418130 - RNA, 19 nt, Artificial Sequence
  Description of Artificial Sequence: Synthetic oligonucleotide
  Antisense Strand to SEQ ID NO: 418129
ugcauaagaaucugauucc

SEQ ID NO: 418131 - RNA, 19 nt, Artificial Sequence
  Description of Artificial Sequence: Synthetic oligonucleotide
  Sense Strand Starting at position 1267 of SEQ ID NO: 315402
cccguucuuggugacgauu

SEQ ID NO: 418132 - RNA, 19 nt, Artificial Sequence
  Description of Artificial Sequence: Synthetic oligonucleotide
  Antisense Strand to SEQ ID NO: 418131
aaucgucaccaagaacggg

SEQ ID NO: 418133 - RNA, 19 nt, Artificial Sequence
  Description of Artificial Sequence: Synthetic oligonucleotide
  Sense Strand Starting at position 1267 of SEQ ID NO: 315413
ugacgauugucuccucaua

SEQ ID NO: 418134 - RNA, 19 nt, Artificial Sequence
  Description of Artificial Sequence: Synthetic oligonucleotide
  Antisense Strand to SEQ ID NO: 418133
uaugaggagacaaucguca

SEQ ID NO: 418135 - RNA, 19 nt, Artificial Sequence
  Description of Artificial Sequence: Synthetic oligonucleotide
  Sense Strand Starting at position 1267 of SEQ ID NO: 315415
acgauugucuccucauaga

SEQ ID NO: 418136 - RNA, 19 nt, Artificial Sequence
  Description of Artificial Sequence: Synthetic oligonucleotide
  Antisense Strand to SEQ ID NO: 418135
ucuaugaggagacaaucgu

SEQ ID NO: 418137 - RNA, 19 nt, Artificial Sequence
  Description of Artificial Sequence: Synthetic oligonucleotide
  Sense Strand Starting at position 1267 of SEQ ID NO: 315590
gauaauaugccuggagaau

SEQ ID NO: 418138 - RNA, 19 nt, Artificial Sequence
  Description of Artificial Sequence: Synthetic oligonucleotide
  Antisense Strand to SEQ ID NO: 418137
auucuccaggcauauuauc

SEQ ID NO: 418139 - RNA, 19 nt, Artificial Sequence
  Description of Artificial Sequence: Synthetic oligonucleotide
  Sense Strand Starting at position 1267 of SEQ ID NO: 316190
agugucaaagacugaaaua

SEQ ID NO: 418140 - RNA, 19 nt, Artificial Sequence
  Description of Artificial Sequence: Synthetic oligonucleotide
  Antisense Strand to SEQ ID NO: 418139
uauuucagucuuugacacu

SEQ ID NO: 418141 - RNA, 19 nt, Artificial Sequence
  Description of Artificial Sequence: Synthetic oligonucleotide
  Sense Strand Starting at position 1267 of SEQ ID NO: 316435
gcgcucuggaucuggagaa

SEQ ID NO: 418142 - RNA, 19 nt, Artificial Sequence
  Description of Artificial Sequence: Synthetic oligonucleotide
  Antisense Strand to SEQ ID NO: 418141
uucuccagauccagagcgc

SEQ ID NO: 418143 - RNA, 19 nt, Artificial Sequence
  Description of Artificial Sequence: Synthetic oligonucleotide
  Sense Strand Starting at position 1267 of SEQ ID NO: 316566
agccuaaacagaggguuau

SEQ ID NO: 418144 - RNA, 19 nt, Artificial Sequence
  Description of Artificial Sequence: Synthetic oligonucleotide
  Antisense Strand to SEQ ID NO: 418143
auaacccucuguuuaggcu

SEQ ID NO: 418145 - RNA, 19 nt, Artificial Sequence
  Description of Artificial Sequence: Synthetic oligonucleotide
  Sense Strand Starting at position 1267 of SEQ ID NO: 316567
gccuaaacagaggguuauu

SEQ ID NO: 418146 - RNA, 19 nt, Artificial Sequence
  Description of Artificial Sequence: Synthetic oligonucleotide
  Antisense Strand to SEQ ID NO: 418145
aauaacccucuguuuaggc

SEQ ID NO: 418147 - RNA, 19 nt, Artificial Sequence
  Description of Artificial Sequence: Synthetic oligonucleotide
  Sense Strand Starting at position 1267 of SEQ ID NO: 316666
agaucuuauggaggucuua

SEQ ID NO: 418148 - RNA, 19 nt, Artificial Sequence
  Description of Artificial Sequence: Synthetic oligonucleotide
  Antisense Strand to SEQ ID NO: 418147
uaagaccuccauaagaucu

SEQ ID NO: 418149 - RNA, 19 nt, Artificial Sequence
  Description of Artificial Sequence: Synthetic oligonucleotide
  Sense Strand Starting at position 1267 of SEQ ID NO: 316698
uuagcuuuaccgugcggaa

SEQ ID NO: 418150 - RNA, 19 nt, Artificial Sequence
  Description of Artificial Sequence: Synthetic oligonucleotide
  Antisense Strand to SEQ ID NO: 418149
uuccgcacgguaaagcuaa

SEQ ID NO: 418151 - RNA, 19 nt, Artificial Sequence
  Description of Artificial Sequence: Synthetic oligonucleotide
  Sense Strand Starting at position 1267 of SEQ ID NO: 317327
ccagcaugcguugcgagau

SEQ ID NO: 418152 - RNA, 19 nt, Artificial Sequence
  Description of Artificial Sequence: Synthetic oligonucleotide
  Antisense Strand to SEQ ID NO: 418151
aucucgcaacgcaugcugg

SEQ ID NO: 418153 - RNA, 19 nt, Artificial Sequence
  Description of Artificial Sequence: Synthetic oligonucleotide
  Sense Strand Starting at position 1267 of SEQ ID NO: 317396
gaaagugguggccgugagu

SEQ ID NO: 418154 - RNA, 19 nt, Artificial Sequence
  Description of Artificial Sequence: Synthetic oligonucleotide
  Antisense Strand to SEQ ID NO: 418153
acucacggccaccacuuuc

SEQ ID NO: 418155 - RNA, 19 nt, Artificial Sequence
  Description of Artificial Sequence: Synthetic oligonucleotide
  Sense Strand Starting at position 1267 of SEQ ID NO: 317409
gugaguccucccggucuuu

SEQ ID NO: 418156 - RNA, 19 nt, Artificial Sequence
  Description of Artificial Sequence: Synthetic oligonucleotide
  Antisense Strand to SEQ ID NO: 418155
aaagaccgggaggacucac

SEQ ID NO: 418157 - RNA, 19 nt, Artificial Sequence
  Description of Artificial Sequence: Synthetic oligonucleotide
  Sense Strand Starting at position 1267 of SEQ ID NO: 317577
gcgauugccacgcuuaugu

SEQ ID NO: 418158 - RNA, 19 nt, Artificial Sequence
  Description of Artificial Sequence: Synthetic oligonucleotide
  Antisense Strand to SEQ ID NO: 418157
acauaagcguggcaaucgc

SEQ ID NO: 418159 - RNA, 19 nt, Artificial Sequence
  Description of Artificial Sequence: Synthetic oligonucleotide
  Sense Strand Starting at position 1267 of SEQ ID NO: 317692
cagaguccaugcuuaauga

SEQ ID NO: 418160 - RNA, 19 nt, Artificial Sequence
  Description of Artificial Sequence: Synthetic oligonucleotide
  Antisense Strand to SEQ ID NO: 418159
ucauuaagcauggacucug

SEQ ID NO: 418161 - RNA, 19 nt, Artificial Sequence
  Description of Artificial Sequence: Synthetic oligonucleotide
  Sense Strand Starting at position 1267 of SEQ ID NO: 317693
agaguccaugcuuaaugaa

SEQ ID NO: 418162 - RNA, 19 nt, Artificial Sequence
  Description of Artificial Sequence: Synthetic oligonucleotide
  Antisense Strand to SEQ ID NO: 418161
uucauuaagcauggacucu

SEQ ID NO: 418163 - RNA, 19 nt, Artificial Sequence
  Description of Artificial Sequence: Synthetic oligonucleotide
  Sense Strand Starting at position 1267 of SEQ ID NO: 317727
cagcuauacccucgguauc

SEQ ID NO: 418164 - RNA, 19 nt, Artificial Sequence
  Description of Artificial Sequence: Synthetic oligonucleotide
  Antisense Strand to SEQ ID NO: 418163
gauaccgaggguauagcug

SEQ ID NO: 418165 - RNA, 19 nt, Artificial Sequence
  Description of Artificial Sequence: Synthetic oligonucleotide
  Sense Strand Starting at position 1267 of SEQ ID NO: 317728
agcuauacccucgguauca

SEQ ID NO: 418166 - RNA, 19 nt, Artificial Sequence
  Description of Artificial Sequence: Synthetic oligonucleotide
  Antisense Strand to SEQ ID NO: 418165
ugauaccgaggguauagcu

SEQ ID NO: 418167 - RNA, 19 nt, Artificial Sequence
  Description of Artificial Sequence: Synthetic oligonucleotide
  Sense Strand Starting at position 1267 of SEQ ID NO: 317774
cucuguauuuggugaagga

SEQ ID NO: 418168 - RNA, 19 nt, Artificial Sequence
  Description of Artificial Sequence: Synthetic oligonucleotide
  Antisense Strand to SEQ ID NO: 418167
uccuucaccaaauacagag

SEQ ID NO: 418169 - RNA, 19 nt, Artificial Sequence
  Description of Artificial Sequence: Synthetic oligonucleotide
  Sense Strand Starting at position 1267 of SEQ ID NO: 317783
uggugaaggaguuaugcca

SEQ ID NO: 418170 - RNA, 19 nt, Artificial Sequence
  Description of Artificial Sequence: Synthetic oligonucleotide
  Antisense Strand to SEQ ID NO: 418169
uggcauaacuccuucacca

SEQ ID NO: 418171 - RNA, 19 nt, Artificial Sequence
  Description of Artificial Sequence: Synthetic oligonucleotide
  Sense Strand Starting at position 1267 of SEQ ID NO: 317790
ggaguuaugccacaccuuc

SEQ ID NO: 418172 - RNA, 19 nt, Artificial Sequence
  Description of Artificial Sequence: Synthetic oligonucleotide
  Antisense Strand to SEQ ID NO: 418171
gaagguguggcauaacucc

SEQ ID NO: 418173 - RNA, 19 nt, Artificial Sequence
  Description of Artificial Sequence: Synthetic oligonucleotide
  Sense Strand Starting at position 1267 of SEQ ID NO: 317827
guguguugaagggaugguu

SEQ ID NO: 418174 - RNA, 19 nt, Artificial Sequence
  Description of Artificial Sequence: Synthetic oligonucleotide
  Antisense Strand to SEQ ID NO: 418173
aaccaucccuucaacacac

SEQ ID NO: 418175 - RNA, 19 nt, Artificial Sequence
  Description of Artificial Sequence: Synthetic oligonucleotide
  Sense Strand Starting at position 1267 of SEQ ID NO: 317877
acucuugucgcccaggaua

SEQ ID NO: 418176 - RNA, 19 nt, Artificial Sequence
  Description of Artificial Sequence: Synthetic oligonucleotide
  Antisense Strand to SEQ ID NO: 418175
uauccugggcgacaagagu

SEQ ID NO: 418177 - RNA, 19 nt, Artificial Sequence
  Description of Artificial Sequence: Synthetic oligonucleotide
  Sense Strand Starting at position 1267 of SEQ ID NO: 317879
ucuugucgcccaggauaau

SEQ ID NO: 418178 - RNA, 19 nt, Artificial Sequence
  Description of Artificial Sequence: Synthetic oligonucleotide
  Antisense Strand to SEQ ID NO: 418177
auuauccugggcgacaaga

SEQ ID NO: 418179 - RNA, 19 nt, Artificial Sequence
  Description of Artificial Sequence: Synthetic oligonucleotide
  Sense Strand Starting at position 1267 of SEQ ID NO: 318167
ggagucuugcucuaucgga

SEQ ID NO: 418180 - RNA, 19 nt, Artificial Sequence
  Description of Artificial Sequence: Synthetic oligonucleotide
  Antisense Strand to SEQ ID NO: 418179
uccgauagagcaagacucc

SEQ ID NO: 418181 - RNA, 19 nt, Artificial Sequence
  Description of Artificial Sequence: Synthetic oligonucleotide
  Sense Strand Starting at position 1267 of SEQ ID NO: 318497
ggagcugagugaugaccaa

SEQ ID NO: 418182 - RNA, 19 nt, Artificial Sequence
  Description of Artificial Sequence: Synthetic oligonucleotide
  Antisense Strand to SEQ ID NO: 418181
uuggucaucacucagcucc

SEQ ID NO: 418183 - RNA, 19 nt, Artificial Sequence
  Description of Artificial Sequence: Synthetic oligonucleotide
  Sense Strand Starting at position 1267 of SEQ ID NO: 318512
ccaaguauguaugcauacu

SEQ ID NO: 418184 - RNA, 19 nt, Artificial Sequence
  Description of Artificial Sequence: Synthetic oligonucleotide
  Antisense Strand to SEQ ID NO: 418183
aguaugcauacauacuugg

SEQ ID NO: 418185 - RNA, 19 nt, Artificial Sequence
  Description of Artificial Sequence: Synthetic oligonucleotide
  Sense Strand Starting at position 1267 of SEQ ID NO: 318622
ugcagcucugcgccuauaa

SEQ ID NO: 418186 - RNA, 19 nt, Artificial Sequence
  Description of Artificial Sequence: Synthetic oligonucleotide
  Antisense Strand to SEQ ID NO: 418185
uuauaggcgcagagcugca

SEQ ID NO: 418187 - RNA, 19 nt, Artificial Sequence
  Description of Artificial Sequence: Synthetic oligonucleotide
  Sense Strand Starting at position 1267 of SEQ ID NO: 318623
gcagcucugcgccuauaau

SEQ ID NO: 418188 - RNA, 19 nt, Artificial Sequence
  Description of Artificial Sequence: Synthetic oligonucleotide
  Antisense Strand to SEQ ID NO: 418187
auuauaggcgcagagcugc

SEQ ID NO: 418189 - RNA, 19 nt, Artificial Sequence
  Description of Artificial Sequence: Synthetic oligonucleotide
  Sense Strand Starting at position 1267 of SEQ ID NO: 318730
agagacucaugucucuaca

SEQ ID NO: 418190 - RNA, 19 nt, Artificial Sequence
  Description of Artificial Sequence: Synthetic oligonucleotide
  Antisense Strand to SEQ ID NO: 418189
uguagagacaugagucucu

SEQ ID NO: 418191 - RNA, 19 nt, Artificial Sequence
  Description of Artificial Sequence: Synthetic oligonucleotide
  Sense Strand Starting at position 1267 of SEQ ID NO: 318779
gcaggaggaucuugaaauc

SEQ ID NO: 418192 - RNA, 19 nt, Artificial Sequence
  Description of Artificial Sequence: Synthetic oligonucleotide
  Antisense Strand to SEQ ID NO: 418191
gauuucaagauccuccugc

SEQ ID NO: 418193 - RNA, 19 nt, Artificial Sequence
  Description of Artificial Sequence: Synthetic oligonucleotide
  Sense Strand Starting at position 1267 of SEQ ID NO: 318932
gagagacccuggcuuugau

SEQ ID NO: 418194 - RNA, 19 nt, Artificial Sequence
  Description of Artificial Sequence: Synthetic oligonucleotide
  Antisense Strand to SEQ ID NO: 418193
aucaaagccagggucucuc

SEQ ID NO: 418195 - RNA, 19 nt, Artificial Sequence
  Description of Artificial Sequence: Synthetic oligonucleotide
  Sense Strand Starting at position 1267 of SEQ ID NO: 318939
ccuggcuuugauuagcaaa

SEQ ID NO: 418196 - RNA, 19 nt, Artificial Sequence
  Description of Artificial Sequence: Synthetic oligonucleotide
  Antisense Strand to SEQ ID NO: 418195
uuugcuaaucaaagccagg

SEQ ID NO: 418197 - RNA, 19 nt, Artificial Sequence
  Description of Artificial Sequence: Synthetic oligonucleotide
  Sense Strand Starting at position 1267 of SEQ ID NO: 318941
uggcuuugauuagcaaaua

SEQ ID NO: 418198 - RNA, 19 nt, Artificial Sequence
  Description of Artificial Sequence: Synthetic oligonucleotide
  Antisense Strand to SEQ ID NO: 418197
uauuugcuaaucaaagcca

SEQ ID NO: 418199 - RNA, 19 nt, Artificial Sequence
  Description of Artificial Sequence: Synthetic oligonucleotide
  Sense Strand Starting at position 1267 of SEQ ID NO: 318942
ggcuuugauuagcaaauaa

SEQ ID NO: 418200 - RNA, 19 nt, Artificial Sequence
  Description of Artificial Sequence: Synthetic oligonucleotide
  Antisense Strand to SEQ ID NO: 418199
uuauuugcuaaucaaagcc

SEQ ID NO: 418201 - RNA, 19 nt, Artificial Sequence
  Description of Artificial Sequence: Synthetic oligonucleotide
  Sense Strand Starting at position 1267 of SEQ ID NO: 319007
gggacauccuccucauaug

SEQ ID NO: 418202 - RNA, 19 nt, Artificial Sequence
  Description of Artificial Sequence: Synthetic oligonucleotide
  Antisense Strand to SEQ ID NO: 418201
cauaugaggaggauguccc

SEQ ID NO: 418203 - RNA, 19 nt, Artificial Sequence
  Description of Artificial Sequence: Synthetic oligonucleotide
  Sense Strand Starting at position 1267 of SEQ ID NO: 319083
aggaguuggcacuguagag

SEQ ID NO: 418204 - RNA, 19 nt, Artificial Sequence
  Description of Artificial Sequence: Synthetic oligonucleotide
  Antisense Strand to SEQ ID NO: 418203
cucuacagugccaacuccu

SEQ ID NO: 418205 - RNA, 19 nt, Artificial Sequence
  Description of Artificial Sequence: Synthetic oligonucleotide
  Sense Strand Starting at position 1267 of SEQ ID NO: 319129
gccuuauucugagcaccca

SEQ ID NO: 418206 - RNA, 19 nt, Artificial Sequence
  Description of Artificial Sequence: Synthetic oligonucleotide
  Antisense Strand to SEQ ID NO: 418205
ugggugcucagaauaaggc

SEQ ID NO: 418207 - RNA, 19 nt, Artificial Sequence
  Description of Artificial Sequence: Synthetic oligonucleotide
  Sense Strand Starting at position 1268 of SEQ ID NO: 315387
ucaagugagccucacauua

SEQ ID NO: 418208 - RNA, 19 nt, Artificial Sequence
  Description of Artificial Sequence: Synthetic oligonucleotide
  Antisense Strand to SEQ ID NO: 418207
uaaugugaggcucacuuga

SEQ ID NO: 418209 - RNA, 19 nt, Artificial Sequence
  Description of Artificial Sequence: Synthetic oligonucleotide
  Sense Strand Starting at position 1268 of SEQ ID NO: 315592
ccugucucacuaugggaaa

SEQ ID NO: 418210 - RNA, 19 nt, Artificial Sequence
  Description of Artificial Sequence: Synthetic oligonucleotide
  Antisense Strand to SEQ ID NO: 418209
uuucccauagugagacagg

SEQ ID NO: 418211 - RNA, 19 nt, Artificial Sequence
  Description of Artificial Sequence: Synthetic oligonucleotide
  Sense Strand Starting at position 1268 of SEQ ID NO: 315646
ggcuaacuuccugggaucu

SEQ ID NO: 418212 - RNA, 19 nt, Artificial Sequence
  Description of Artificial Sequence: Synthetic oligonucleotide
  Antisense Strand to SEQ ID NO: 418211
agaucccaggaaguuagcc

SEQ ID NO: 418213 - RNA, 19 nt, Artificial Sequence
  Description of Artificial Sequence: Synthetic oligonucleotide
  Sense Strand Starting at position 1268 of SEQ ID NO: 316159
gagggugugaugcgggaau

SEQ ID NO: 418214 - RNA, 19 nt, Artificial Sequence
  Description of Artificial Sequence: Synthetic oligonucleotide
  Antisense Strand to SEQ ID NO: 418213
auucccgcaucacacccuc

SEQ ID NO: 418215 - RNA, 19 nt, Artificial Sequence
  Description of Artificial Sequence: Synthetic oligonucleotide
  Sense Strand Starting at position 1268 of SEQ ID NO: 316462
agggccuucuccuaacaca

SEQ ID NO: 418216 - RNA, 19 nt, Artificial Sequence
  Description of Artificial Sequence: Synthetic oligonucleotide
  Antisense Strand to SEQ ID NO: 418215
uguguuaggagaaggcccu

SEQ ID NO: 418217 - RNA, 19 nt, Artificial Sequence
  Description of Artificial Sequence: Synthetic oligonucleotide
  Sense Strand Starting at position 1268 of SEQ ID NO: 316500
gucagacacaugcgguaua

SEQ ID NO: 418218 - RNA, 19 nt, Artificial Sequence
  Description of Artificial Sequence: Synthetic oligonucleotide
  Antisense Strand to SEQ ID NO: 418217
uauaccgcaugugucugac

SEQ ID NO: 418219 - RNA, 19 nt, Artificial Sequence
  Description of Artificial Sequence: Synthetic oligonucleotide
  Sense Strand Starting at position 1268 of SEQ ID NO: 316514
guauaugcauccuuggcaa

SEQ ID NO: 418220 - RNA, 19 nt, Artificial Sequence
  Description of Artificial Sequence: Synthetic oligonucleotide
  Antisense Strand to SEQ ID NO: 418219
uugccaaggaugcauauac

SEQ ID NO: 418221 - RNA, 19 nt, Artificial Sequence
  Description of Artificial Sequence: Synthetic oligonucleotide
  Sense Strand Starting at position 1268 of SEQ ID NO: 316600
augaaacacugaugucuaa

SEQ ID NO: 418222 - RNA, 19 nt, Artificial Sequence
  Description of Artificial Sequence: Synthetic oligonucleotide
  Antisense Strand to SEQ ID NO: 418221
uuagacaucaguguuucau

SEQ ID NO: 418223 - RNA, 19 nt, Artificial Sequence
  Description of Artificial Sequence: Synthetic oligonucleotide
  Sense Strand Starting at position 1268 of SEQ ID NO: 316846
ccaguuguguacguacaca

SEQ ID NO: 418224 - RNA, 19 nt, Artificial Sequence
  Description of Artificial Sequence: Synthetic oligonucleotide
  Antisense Strand to SEQ ID NO: 418223
uguguacguacacaacugg

SEQ ID NO: 418225 - RNA, 19 nt, Artificial Sequence
  Description of Artificial Sequence: Synthetic oligonucleotide
  Sense Strand Starting at position 1268 of SEQ ID NO: 317313
gggugggucuaaggaugau

SEQ ID NO: 418226 - RNA, 19 nt, Artificial Sequence
  Description of Artificial Sequence: Synthetic oligonucleotide
  Antisense Strand to SEQ ID NO: 418225
aucauccuuagacccaccc

SEQ ID NO: 418227 - RNA, 19 nt, Artificial Sequence
  Description of Artificial Sequence: Synthetic oligonucleotide
  Sense Strand Starting at position 1268 of SEQ ID NO: 317316
ugggucuaaggaugaugau

SEQ ID NO: 418228 - RNA, 19 nt, Artificial Sequence
  Description of Artificial Sequence: Synthetic oligonucleotide
  Antisense Strand to SEQ ID NO: 418227
aucaucauccuuagaccca

SEQ ID NO: 418229 - RNA, 19 nt, Artificial Sequence
  Description of Artificial Sequence: Synthetic oligonucleotide
  Sense Strand Starting at position 1268 of SEQ ID NO: 317319
gucuaaggaugaugauuga

SEQ ID NO: 418230 - RNA, 19 nt, Artificial Sequence
  Description of Artificial Sequence: Synthetic oligonucleotide
  Antisense Strand to SEQ ID NO: 418229
ucaaucaucauccuuagac

SEQ ID NO: 418231 - RNA, 19 nt, Artificial Sequence
  Description of Artificial Sequence: Synthetic oligonucleotide
  Sense Strand Starting at position 1268 of SEQ ID NO: 317500
ccaggugggucuccgaaua

SEQ ID NO: 418232 - RNA, 19 nt, Artificial Sequence
  Description of Artificial Sequence: Synthetic oligonucleotide
  Antisense Strand to SEQ ID NO: 418231
uauucggagacccaccugg

SEQ ID NO: 418233 - RNA, 19 nt, Artificial Sequence
  Description of Artificial Sequence: Synthetic oligonucleotide
  Sense Strand Starting at position 1268 of SEQ ID NO: 317505
ugggucuccgaauaggagu

SEQ ID NO: 418234 - RNA, 19 nt, Artificial Sequence
  Description of Artificial Sequence: Synthetic oligonucleotide
  Antisense Strand to SEQ ID NO: 418233
acuccuauucggagaccca

SEQ ID NO: 418235 - RNA, 19 nt, Artificial Sequence
  Description of Artificial Sequence: Synthetic oligonucleotide
  Sense Strand Starting at position 1268 of SEQ ID NO: 318102
gcgugagccacuuacuagu

SEQ ID NO: 418236 - RNA, 19 nt, Artificial Sequence
  Description of Artificial Sequence: Synthetic oligonucleotide
  Antisense Strand to SEQ ID NO: 418235
acuaguaaguggcucacgc

SEQ ID NO: 418237 - RNA, 19 nt, Artificial Sequence
  Description of Artificial Sequence: Synthetic oligonucleotide
  Sense Strand Starting at position 1268 of SEQ ID NO: 318200
aggaacuucccauguccua

SEQ ID NO: 418238 - RNA, 19 nt, Artificial Sequence
  Description of Artificial Sequence: Synthetic oligonucleotide
  Antisense Strand to SEQ ID NO: 418237
uaggacaugggaaguuccu

SEQ ID NO: 418239 - RNA, 19 nt, Artificial Sequence
  Description of Artificial Sequence: Synthetic oligonucleotide
  Sense Strand Starting at position 1268 of SEQ ID NO: 318219
augaccuucugugucuaua

SEQ ID NO: 418240 - RNA, 19 nt, Artificial Sequence
  Description of Artificial Sequence: Synthetic oligonucleotide
  Antisense Strand to SEQ ID NO: 418239
uauagacacagaaggucau

SEQ ID NO: 418241 - RNA, 19 nt, Artificial Sequence
  Description of Artificial Sequence: Synthetic oligonucleotide
  Sense Strand Starting at position 1268 of SEQ ID NO: 318316
ugugaugagucagggauga

SEQ ID NO: 418242 - RNA, 19 nt, Artificial Sequence
  Description of Artificial Sequence: Synthetic oligonucleotide
  Antisense Strand to SEQ ID NO: 418241
ucaucccugacucaucaca

SEQ ID NO: 418243 - RNA, 19 nt, Artificial Sequence
  Description of Artificial Sequence: Synthetic oligonucleotide
  Sense Strand Starting at position 1268 of SEQ ID NO: 318359
cagcuuguccagggacuuu

SEQ ID NO: 418244 - RNA, 19 nt, Artificial Sequence
  Description of Artificial Sequence: Synthetic oligonucleotide
  Antisense Strand to SEQ ID NO: 418243
aaagucccuggacaagcug

SEQ ID NO: 418245 - RNA, 19 nt, Artificial Sequence
  Description of Artificial Sequence: Synthetic oligonucleotide
  Sense Strand Starting at position 1268 of SEQ ID NO: 318370
gggacuuuggcugggaaga

SEQ ID NO: 418246 - RNA, 19 nt, Artificial Sequence
  Description of Artificial Sequence: Synthetic oligonucleotide
  Antisense Strand to SEQ ID NO: 418245
ucuucccagccaaaguccc

SEQ ID NO: 418247 - RNA, 19 nt, Artificial Sequence
  Description of Artificial Sequence: Synthetic oligonucleotide
  Sense Strand Starting at position 1268 of SEQ ID NO: 318371
ggacuuuggcugggaagau

SEQ ID NO: 418248 - RNA, 19 nt, Artificial Sequence
  Description of Artificial Sequence: Synthetic oligonucleotide
  Antisense Strand to SEQ ID NO: 418247
aucuucccagccaaagucc

SEQ ID NO: 418249 - RNA, 19 nt, Artificial Sequence
  Description of Artificial Sequence: Synthetic oligonucleotide
  Sense Strand Starting at position 1268 of SEQ ID NO: 318372
gacuuuggcugggaagauu

SEQ ID NO: 418250 - RNA, 19 nt, Artificial Sequence
  Description of Artificial Sequence: Synthetic oligonucleotide
  Antisense Strand to SEQ ID NO: 418249
aaucuucccagccaaaguc

SEQ ID NO: 418251 - RNA, 19 nt, Artificial Sequence
  Description of Artificial Sequence: Synthetic oligonucleotide
  Sense Strand Starting at position 1268 of SEQ ID NO: 318419
guugcugagagaugugaug

SEQ ID NO: 418252 - RNA, 19 nt, Artificial Sequence
  Description of Artificial Sequence: Synthetic oligonucleotide
  Antisense Strand to SEQ ID NO: 418251
caucacaucucucagcaac

SEQ ID NO: 418253 - RNA, 19 nt, Artificial Sequence
  Description of Artificial Sequence: Synthetic oligonucleotide
  Sense Strand Starting at position 1268 of SEQ ID NO: 318421
ugcugagagaugugaugau

SEQ ID NO: 418254 - RNA, 19 nt, Artificial Sequence
  Description of Artificial Sequence: Synthetic oligonucleotide
  Antisense Strand to SEQ ID NO: 418253
aucaucacaucucucagca

SEQ ID NO: 418255 - RNA, 19 nt, Artificial Sequence
  Description of Artificial Sequence: Synthetic oligonucleotide
  Sense Strand Starting at position 1268 of SEQ ID NO: 318436
ugaugaaauguguggccua

SEQ ID NO: 418256 - RNA, 19 nt, Artificial Sequence
  Description of Artificial Sequence: Synthetic oligonucleotide
  Antisense Strand to SEQ ID NO: 418255
uaggccacacauuucauca

SEQ ID NO: 418257 - RNA, 19 nt, Artificial Sequence
  Description of Artificial Sequence: Synthetic oligonucleotide
  Sense Strand Starting at position 1268 of SEQ ID NO: 318623
gaagacugggccuauguca

SEQ ID NO: 418258 - RNA, 19 nt, Artificial Sequence
  Description of Artificial Sequence: Synthetic oligonucleotide
  Antisense Strand to SEQ ID NO: 418257
ugacauaggcccagucuuc

SEQ ID NO: 418259 - RNA, 19 nt, Artificial Sequence
  Description of Artificial Sequence: Synthetic oligonucleotide
  Sense Strand Starting at position 1268 of SEQ ID NO: 318630
gggccuaugucaucugcua

SEQ ID NO: 418260 - RNA, 19 nt, Artificial Sequence
  Description of Artificial Sequence: Synthetic oligonucleotide
  Antisense Strand to SEQ ID NO: 418259
uagcagaugacauaggccc

SEQ ID NO: 418261 - RNA, 19 nt, Artificial Sequence
  Description of Artificial Sequence: Synthetic oligonucleotide
  Sense Strand Starting at position 1268 of SEQ ID NO: 318703
gcuugccuucuagaacagu

SEQ ID NO: 418262 - RNA, 19 nt, Artificial Sequence
  Description of Artificial Sequence: Synthetic oligonucleotide
  Antisense Strand to SEQ ID NO: 418261
acuguucuagaaggcaagc

SEQ ID NO: 418263 - RNA, 19 nt, Artificial Sequence
  Description of Artificial Sequence: Synthetic oligonucleotide
  Sense Strand Starting at position 1268 of SEQ ID NO: 318779
agagcuacuuguuacauca

SEQ ID NO: 418264 - RNA, 19 nt, Artificial Sequence
  Description of Artificial Sequence: Synthetic oligonucleotide
  Antisense Strand to SEQ ID NO: 418263
ugauguaacaaguagcucu

SEQ ID NO: 418265 - RNA, 19 nt, Artificial Sequence
  Description of Artificial Sequence: Synthetic oligonucleotide
  Sense Strand Starting at position 1268 of SEQ ID NO: 318786
cuuguuacaucagcucaga

SEQ ID NO: 418266 - RNA, 19 nt, Artificial Sequence
  Description of Artificial Sequence: Synthetic oligonucleotide
  Antisense Strand to SEQ ID NO: 418265
ucugagcugauguaacaag

SEQ ID NO: 418267 - RNA, 19 nt, Artificial Sequence
  Description of Artificial Sequence: Synthetic oligonucleotide
  Sense Strand Starting at position 1268 of SEQ ID NO: 318789
guuacaucagcucagacua

SEQ ID NO: 418268 - RNA, 19 nt, Artificial Sequence
  Description of Artificial Sequence: Synthetic oligonucleotide
  Antisense Strand to SEQ ID NO: 418267
uagucugagcugauguaac

SEQ ID NO: 418269 - RNA, 19 nt, Artificial Sequence
  Description of Artificial Sequence: Synthetic oligonucleotide
  Sense Strand Starting at position 1268 of SEQ ID NO: 318821
ggagcaucuggugauucca

SEQ ID NO: 418270 - RNA, 19 nt, Artificial Sequence
  Description of Artificial Sequence: Synthetic oligonucleotide
  Antisense Strand to SEQ ID NO: 418269
uggaaucaccagaugcucc

SEQ ID NO: 418271 - RNA, 19 nt, Artificial Sequence
  Description of Artificial Sequence: Synthetic oligonucleotide
  Sense Strand Starting at position 1268 of SEQ ID NO: 318854
acuugaccuccuggaaaug

SEQ ID NO: 418272 - RNA, 19 nt, Artificial Sequence
  Description of Artificial Sequence: Synthetic oligonucleotide
  Antisense Strand to SEQ ID NO: 418271
cauuuccaggaggucaagu

SEQ ID NO: 418273 - RNA, 19 nt, Artificial Sequence
  Description of Artificial Sequence: Synthetic oligonucleotide
  Sense Strand Starting at position 1268 of SEQ ID NO: 318934
gaugaacugugacaaagua

SEQ ID NO: 418274 - RNA, 19 nt, Artificial Sequence
  Description of Artificial Sequence: Synthetic oligonucleotide
  Antisense Strand to SEQ ID NO: 418273
uacuuugucacaguucauc

SEQ ID NO: 418275 - RNA, 19 nt, Artificial Sequence
  Description of Artificial Sequence: Synthetic oligonucleotide
  Sense Strand Starting at position 1268 of SEQ ID NO: 319016
uggcacaaaucuuuacgua

SEQ ID NO: 418276 - RNA, 19 nt, Artificial Sequence
  Description of Artificial Sequence: Synthetic oligonucleotide
  Antisense Strand to SEQ ID NO: 418275
uacguaaagauuugugcca

SEQ ID NO: 418277 - RNA, 19 nt, Artificial Sequence
  Description of Artificial Sequence: Synthetic oligonucleotide
  Sense Strand Starting at position 1268 of SEQ ID NO: 319017
ggcacaaaucuuuacguau

SEQ ID NO: 418278 - RNA, 19 nt, Artificial Sequence
  Description of Artificial Sequence: Synthetic oligonucleotide
  Antisense Strand to SEQ ID NO: 418277
auacguaaagauuugugcc

SEQ ID NO: 418279 - RNA, 19 nt, Artificial Sequence
  Description of Artificial Sequence: Synthetic oligonucleotide
  Sense Strand Starting at position 1268 of SEQ ID NO: 319028
uuacguauuuguuuaucgu

SEQ ID NO: 418280 - RNA, 19 nt, Artificial Sequence
  Description of Artificial Sequence: Synthetic oligonucleotide
  Antisense Strand to SEQ ID NO: 418279
acgauaaacaaauacguaa

SEQ ID NO: 418281 - RNA, 19 nt, Artificial Sequence
  Description of Artificial Sequence: Synthetic oligonucleotide
  Sense Strand Starting at position 1268 of SEQ ID NO: 319031
cguauuuguuuaucgucuu

SEQ ID NO: 418282 - RNA, 19 nt, Artificial Sequence
  Description of Artificial Sequence: Synthetic oligonucleotide
  Antisense Strand to SEQ ID NO: 418281
aagacgauaaacaaauacg

SEQ ID NO: 418283 - RNA, 19 nt, Artificial Sequence
  Description of Artificial Sequence: Synthetic oligonucleotide
  Sense Strand Starting at position 1268 of SEQ ID NO: 319067
gguguuugcccuugcugua

SEQ ID NO: 418284 - RNA, 19 nt, Artificial Sequence
  Description of Artificial Sequence: Synthetic oligonucleotide
  Antisense Strand to SEQ ID NO: 418283
uacagcaagggcaaacacc

SEQ ID NO: 418285 - RNA, 19 nt, Artificial Sequence
  Description of Artificial Sequence: Synthetic oligonucleotide
  Sense Strand Starting at position 1268 of SEQ ID NO: 319068
guguuugcccuugcuguau

SEQ ID NO: 418286 - RNA, 19 nt, Artificial Sequence
  Description of Artificial Sequence: Synthetic oligonucleotide
  Antisense Strand to SEQ ID NO: 418285
auacagcaagggcaaacac

SEQ ID NO: 418287 - RNA, 19 nt, Artificial Sequence
  Description of Artificial Sequence: Synthetic oligonucleotide
  Sense Strand Starting at position 1269 of SEQ ID NO: 315323
ucgauuagccuacaauaaa

SEQ ID NO: 418288 - RNA, 19 nt, Artificial Sequence
  Description of Artificial Sequence: Synthetic oligonucleotide
  Antisense Strand to SEQ ID NO: 418287
uuuauuguaggcuaaucga

SEQ ID NO: 418289 - RNA, 19 nt, Artificial Sequence
  Description of Artificial Sequence: Synthetic oligonucleotide
  Sense Strand Starting at position 1269 of SEQ ID NO: 315369
uaagguugguuuccaagaa

SEQ ID NO: 418290 - RNA, 19 nt, Artificial Sequence
  Description of Artificial Sequence: Synthetic oligonucleotide
  Antisense Strand to SEQ ID NO: 418289
uucuuggaaaccaaccuua

SEQ ID NO: 418291 - RNA, 19 nt, Artificial Sequence
  Description of Artificial Sequence: Synthetic oligonucleotide
  Sense Strand Starting at position 1269 of SEQ ID NO: 315373
guugguuuccaagaaccua

SEQ ID NO: 418292 - RNA, 19 nt, Artificial Sequence
  Description of Artificial Sequence: Synthetic oligonucleotide
  Antisense Strand to SEQ ID NO: 418291
uagguucuuggaaaccaac

SEQ ID NO: 418293 - RNA, 19 nt, Artificial Sequence
  Description of Artificial Sequence: Synthetic oligonucleotide
  Sense Strand Starting at position 1269 of SEQ ID NO: 315663
aacuguuagcaaggaugua

SEQ ID NO: 418294 - RNA, 19 nt, Artificial Sequence
  Description of Artificial Sequence: Synthetic oligonucleotide
  Antisense Strand to SEQ ID NO: 418293
uacauccuugcuaacaguu

SEQ ID NO: 418295 - RNA, 19 nt, Artificial Sequence
  Description of Artificial Sequence: Synthetic oligonucleotide
  Sense Strand Starting at position 1269 of SEQ ID NO: 315721
ugguaucacuacuuggaaa

SEQ ID NO: 418296 - RNA, 19 nt, Artificial Sequence
  Description of Artificial Sequence: Synthetic oligonucleotide
  Antisense Strand to SEQ ID NO: 418295
uuuccaaguagugauacca

SEQ ID NO: 418297 - RNA, 19 nt, Artificial Sequence
  Description of Artificial Sequence: Synthetic oligonucleotide
  Sense Strand Starting at position 1269 of SEQ ID NO: 315723
guaucacuacuuggaaacu

SEQ ID NO: 418298 - RNA, 19 nt, Artificial Sequence
  Description of Artificial Sequence: Synthetic oligonucleotide
  Antisense Strand to SEQ ID NO: 418297
aguuuccaaguagugauac

SEQ ID NO: 418299 - RNA, 19 nt, Artificial Sequence
  Description of Artificial Sequence: Synthetic oligonucleotide
  Sense Strand Starting at position 1269 of SEQ ID NO: 315756
cuugcuaagguagaaauca

SEQ ID NO: 418300 - RNA, 19 nt, Artificial Sequence
  Description of Artificial Sequence: Synthetic oligonucleotide
  Antisense Strand to SEQ ID NO: 418299
ugauuucuaccuuagcaag

SEQ ID NO: 418301 - RNA, 19 nt, Artificial Sequence
  Description of Artificial Sequence: Synthetic oligonucleotide
  Sense Strand Starting at position 1269 of SEQ ID NO: 315846
gggaguuacgugcaagaau

SEQ ID NO: 418302 - RNA, 19 nt, Artificial Sequence
  Description of Artificial Sequence: Synthetic oligonucleotide
  Antisense Strand to SEQ ID NO: 418301
auucuugcacguaacuccc

SEQ ID NO: 418303 - RNA, 19 nt, Artificial Sequence
  Description of Artificial Sequence: Synthetic oligonucleotide
  Sense Strand Starting at position 1269 of SEQ ID NO: 315849
aguuacgugcaagaauaaa

SEQ ID NO: 418304 - RNA, 19 nt, Artificial Sequence
  Description of Artificial Sequence: Synthetic oligonucleotide
  Antisense Strand to SEQ ID NO: 418303
uuuauucuugcacguaacu

SEQ ID NO: 418305 - RNA, 19 nt, Artificial Sequence
  Description of Artificial Sequence: Synthetic oligonucleotide
  Sense Strand Starting at position 1269 of SEQ ID NO: 315917
gauaaacuccgguacgauu

SEQ ID NO: 418306 - RNA, 19 nt, Artificial Sequence
  Description of Artificial Sequence: Synthetic oligonucleotide
  Antisense Strand to SEQ ID NO: 418305
aaucguaccggaguuuauc

SEQ ID NO: 418307 - RNA, 19 nt, Artificial Sequence
  Description of Artificial Sequence: Synthetic oligonucleotide
  Sense Strand Starting at position 1269 of SEQ ID NO: 315942
agggaauagucagcaacga

SEQ ID NO: 418308 - RNA, 19 nt, Artificial Sequence
  Description of Artificial Sequence: Synthetic oligonucleotide
  Antisense Strand to SEQ ID NO: 418307
ucguugcugacuauucccu

SEQ ID NO: 418309 - RNA, 19 nt, Artificial Sequence
  Description of Artificial Sequence: Synthetic oligonucleotide
  Sense Strand Starting at position 1269 of SEQ ID NO: 315992
augcaugaaucucugaaac

SEQ ID NO: 418310 - RNA, 19 nt, Artificial Sequence
  Description of Artificial Sequence: Synthetic oligonucleotide
  Antisense Strand to SEQ ID NO: 418309
guuucagagauucaugcau

SEQ ID NO: 418311 - RNA, 19 nt, Artificial Sequence
  Description of Artificial Sequence: Synthetic oligonucleotide
  Sense Strand Starting at position 1269 of SEQ ID NO: 316033
gcagaagaauaccuaugua

SEQ ID NO: 418312 - RNA, 19 nt, Artificial Sequence
  Description of Artificial Sequence: Synthetic oligonucleotide
  Antisense Strand to SEQ ID NO: 418311
uacauagguauucuucugc

SEQ ID NO: 418313 - RNA, 19 nt, Artificial Sequence
  Description of Artificial Sequence: Synthetic oligonucleotide
  Sense Strand Starting at position 1269 of SEQ ID NO: 316036
gaagaauaccuauguaugu

SEQ ID NO: 418314 - RNA, 19 nt, Artificial Sequence
  Description of Artificial Sequence: Synthetic oligonucleotide
  Antisense Strand to SEQ ID NO: 418313
acauacauagguauucuuc

SEQ ID NO: 418315 - RNA, 19 nt, Artificial Sequence
  Description of Artificial Sequence: Synthetic oligonucleotide
  Sense Strand Starting at position 1269 of SEQ ID NO: 316056
ugguucuauuuauaucaag

SEQ ID NO: 418316 - RNA, 19 nt, Artificial Sequence
  Description of Artificial Sequence: Synthetic oligonucleotide
  Antisense Strand to SEQ ID NO: 418315
cuugauauaaauagaacca

SEQ ID NO: 418317 - RNA, 19 nt, Artificial Sequence
  Description of Artificial Sequence: Synthetic oligonucleotide
  Sense Strand Starting at position 1269 of SEQ ID NO: 316163
agugguuaacccugaggga

SEQ ID NO: 418318 - RNA, 19 nt, Artificial Sequence
  Description of Artificial Sequence: Synthetic oligonucleotide
  Antisense Strand to SEQ ID NO: 418317
ucccucaggguuaaccacu

SEQ ID NO: 418319 - RNA, 19 nt, Artificial Sequence
  Description of Artificial Sequence: Synthetic oligonucleotide
  Sense Strand Starting at position 1269 of SEQ ID NO: 316404
auuccuaaacguugaaagu

SEQ ID NO: 418320 - RNA, 19 nt, Artificial Sequence
  Description of Artificial Sequence: Synthetic oligonucleotide
  Antisense Strand to SEQ ID NO: 418319
acuuucaacguuuaggaau

SEQ ID NO: 418321 - RNA, 19 nt, Artificial Sequence
  Description of Artificial Sequence: Synthetic oligonucleotide
  Sense Strand Starting at position 1269 of SEQ ID NO: 316414
guugaaagucuguaccuua

SEQ ID NO: 418322 - RNA, 19 nt, Artificial Sequence
  Description of Artificial Sequence: Synthetic oligonucleotide
  Antisense Strand to SEQ ID NO: 418321
uaagguacagacuuucaac

SEQ ID NO: 418323 - RNA, 19 nt, Artificial Sequence
  Description of Artificial Sequence: Synthetic oligonucleotide
  Sense Strand Starting at position 1269 of SEQ ID NO: 316425
guaccuuacacguagguua

SEQ ID NO: 418324 - RNA, 19 nt, Artificial Sequence
  Description of Artificial Sequence: Synthetic oligonucleotide
  Antisense Strand to SEQ ID NO: 418323
uaaccuacguguaagguac

SEQ ID NO: 418325 - RNA, 19 nt, Artificial Sequence
  Description of Artificial Sequence: Synthetic oligonucleotide
  Sense Strand Starting at position 1269 of SEQ ID NO: 316456
ucguuucuaagugaaguau

SEQ ID NO: 418326 - RNA, 19 nt, Artificial Sequence
  Description of Artificial Sequence: Synthetic oligonucleotide
  Antisense Strand to SEQ ID NO: 418325
auacuucacuuagaaacga

SEQ ID NO: 418327 - RNA, 19 nt, Artificial Sequence
  Description of Artificial Sequence: Synthetic oligonucleotide
  Sense Strand Starting at position 1269 of SEQ ID NO: 316465
agugaaguauucuuaaaca

SEQ ID NO: 418328 - RNA, 19 nt, Artificial Sequence
  Description of Artificial Sequence: Synthetic oligonucleotide
  Antisense Strand to SEQ ID NO: 418327
uguuuaagaauacuucacu

SEQ ID NO: 418329 - RNA, 19 nt, Artificial Sequence
  Description of Artificial Sequence: Synthetic oligonucleotide
  Sense Strand Starting at position 1269 of SEQ ID NO: 316503
gaaauaaugccggauuccu

SEQ ID NO: 418330 - RNA, 19 nt, Artificial Sequence
  Description of Artificial Sequence: Synthetic oligonucleotide
  Antisense Strand to SEQ ID NO: 418329
aggaauccggcauuauuuc

SEQ ID NO: 418331 - RNA, 19 nt, Artificial Sequence
  Description of Artificial Sequence: Synthetic oligonucleotide
  Sense Strand Starting at position 1269 of SEQ ID NO: 316548
gugcaugaagcugaaauua

SEQ ID NO: 418332 - RNA, 19 nt, Artificial Sequence
  Description of Artificial Sequence: Synthetic oligonucleotide
  Antisense Strand to SEQ ID NO: 418331
uaauuucagcuucaugcac

SEQ ID NO: 418333 - RNA, 19 nt, Artificial Sequence
  Description of Artificial Sequence: Synthetic oligonucleotide
  Sense Strand Starting at position 1269 of SEQ ID NO: 316558
cugaaauuaccucagucgu

SEQ ID NO: 418334 - RNA, 19 nt, Artificial Sequence
  Description of Artificial Sequence: Synthetic oligonucleotide
  Antisense Strand to SEQ ID NO: 418333
acgacugagguaauuucag

SEQ ID NO: 418335 - RNA, 19 nt, Artificial Sequence
  Description of Artificial Sequence: Synthetic oligonucleotide
  Sense Strand Starting at position 1269 of SEQ ID NO: 316851
gcgccuacccgaguacuau

SEQ ID NO: 418336 - RNA, 19 nt, Artificial Sequence
  Description of Artificial Sequence: Synthetic oligonucleotide
  Antisense Strand to SEQ ID NO: 418335
auaguacucggguaggcgc

SEQ ID NO: 418337 - RNA, 19 nt, Artificial Sequence
  Description of Artificial Sequence: Synthetic oligonucleotide
  Sense Strand Starting at position 1269 of SEQ ID NO: 317400
uggcgauggcgcucugaga

SEQ ID NO: 418338 - RNA, 19 nt, Artificial Sequence
  Description of Artificial Sequence: Synthetic oligonucleotide
  Antisense Strand to SEQ ID NO: 418337
ucucagagcgccaucgcca

SEQ ID NO: 418339 - RNA, 19 nt, Artificial Sequence
  Description of Artificial Sequence: Synthetic oligonucleotide
  Sense Strand Starting at position 1269 of SEQ ID NO: 317401
ggcgauggcgcucugagau

SEQ ID NO: 418340 - RNA, 19 nt, Artificial Sequence
  Description of Artificial Sequence: Synthetic oligonucleotide
  Antisense Strand to SEQ ID NO: 418339
aucucagagcgccaucgcc

SEQ ID NO: 418341 - RNA, 19 nt, Artificial Sequence
  Description of Artificial Sequence: Synthetic oligonucleotide
  Sense Strand Starting at position 1269 of SEQ ID NO: 317569
uugcguuugcuauugcaau

SEQ ID NO: 418342 - RNA, 19 nt, Artificial Sequence
  Description of Artificial Sequence: Synthetic oligonucleotide
  Antisense Strand to SEQ ID NO: 418341
auugcaauagcaaacgcaa

SEQ ID NO: 418343 - RNA, 19 nt, Artificial Sequence
  Description of Artificial Sequence: Synthetic oligonucleotide
  Sense Strand Starting at position 1269 of SEQ ID NO: 317593
uuuaaugaguuuccuaggu

SEQ ID NO: 418344 - RNA, 19 nt, Artificial Sequence
  Description of Artificial Sequence: Synthetic oligonucleotide
  Antisense Strand to SEQ ID NO: 418343
accuaggaaacucauuaaa

SEQ ID NO: 418345 - RNA, 19 nt, Artificial Sequence
  Description of Artificial Sequence: Synthetic oligonucleotide
  Sense Strand Starting at position 1269 of SEQ ID NO: 317668
cucugaaaccgcgagaaga

SEQ ID NO: 418346 - RNA, 19 nt, Artificial Sequence
  Description of Artificial Sequence: Synthetic oligonucleotide
  Antisense Strand to SEQ ID NO: 418345
ucuucucgcgguuucagag

SEQ ID NO: 418347 - RNA, 19 nt, Artificial Sequence
  Description of Artificial Sequence: Synthetic oligonucleotide
  Sense Strand Starting at position 1269 of SEQ ID NO: 317684
agaggaauccucuguccau

SEQ ID NO: 418348 - RNA, 19 nt, Artificial Sequence
  Description of Artificial Sequence: Synthetic oligonucleotide
  Antisense Strand to SEQ ID NO: 418347
auggacagaggauuccucu

SEQ ID NO: 418349 - RNA, 19 nt, Artificial Sequence
  Description of Artificial Sequence: Synthetic oligonucleotide
  Sense Strand Starting at position 1269 of SEQ ID NO: 317685
gaggaauccucuguccauu

SEQ ID NO: 418350 - RNA, 19 nt, Artificial Sequence
  Description of Artificial Sequence: Synthetic oligonucleotide
  Antisense Strand to SEQ ID NO: 418349
aauggacagaggauuccuc

SEQ ID NO: 418351 - RNA, 19 nt, Artificial Sequence
  Description of Artificial Sequence: Synthetic oligonucleotide
  Sense Strand Starting at position 1269 of SEQ ID NO: 317696
uguccauuucgguggauga

SEQ ID NO: 418352 - RNA, 19 nt, Artificial Sequence
  Description of Artificial Sequence: Synthetic oligonucleotide
  Antisense Strand to SEQ ID NO: 418351
ucauccaccgaaauggaca

SEQ ID NO: 418353 - RNA, 19 nt, Artificial Sequence
  Description of Artificial Sequence: Synthetic oligonucleotide
  Sense Strand Starting at position 1269 of SEQ ID NO: 317937
ggaguuuccuucuucucaa

SEQ ID NO: 418354 - RNA, 19 nt, Artificial Sequence
  Description of Artificial Sequence: Synthetic oligonucleotide
  Antisense Strand to SEQ ID NO: 418353
uugagaagaaggaaacucc

SEQ ID NO: 418355 - RNA, 19 nt, Artificial Sequence
  Description of Artificial Sequence: Synthetic oligonucleotide
  Sense Strand Starting at position 1269 of SEQ ID NO: 318298
ugagacuaaucuguggaca

SEQ ID NO: 418356 - RNA, 19 nt, Artificial Sequence
  Description of Artificial Sequence: Synthetic oligonucleotide
  Antisense Strand to SEQ ID NO: 418355
uguccacagauuagucuca

SEQ ID NO: 418357 - RNA, 19 nt, Artificial Sequence
  Description of Artificial Sequence: Synthetic oligonucleotide
  Sense Strand Starting at position 1269 of SEQ ID NO: 318299
gagacuaaucuguggacau

SEQ ID NO: 418358 - RNA, 19 nt, Artificial Sequence
  Description of Artificial Sequence: Synthetic oligonucleotide
  Antisense Strand to SEQ ID NO: 418357
auguccacagauuagucuc

SEQ ID NO: 418359 - RNA, 19 nt, Artificial Sequence
  Description of Artificial Sequence: Synthetic oligonucleotide
  Sense Strand Starting at position 1269 of SEQ ID NO: 318516
auugaugggucauugacau

SEQ ID NO: 418360 - RNA, 19 nt, Artificial Sequence
  Description of Artificial Sequence: Synthetic oligonucleotide
  Antisense Strand to SEQ ID NO: 418359
augucaaugacccaucaau

SEQ ID NO: 418361 - RNA, 19 nt, Artificial Sequence
  Description of Artificial Sequence: Synthetic oligonucleotide
  Sense Strand Starting at position 1269 of SEQ ID NO: 318553
agacauugauggguccagu

SEQ ID NO: 418362 - RNA, 19 nt, Artificial Sequence
  Description of Artificial Sequence: Synthetic oligonucleotide
  Antisense Strand to SEQ ID NO: 418361
acuggacccaucaaugucu

SEQ ID NO: 418363 - RNA, 19 nt, Artificial Sequence
  Description of Artificial Sequence: Synthetic oligonucleotide
  Sense Strand Starting at position 1269 of SEQ ID NO: 318773
uaaugagcacgcugcauuu

SEQ ID NO: 418364 - RNA, 19 nt, Artificial Sequence
  Description of Artificial Sequence: Synthetic oligonucleotide
  Antisense Strand to SEQ ID NO: 418363
aaaugcagcgugcucauua

SEQ ID NO: 418365 - RNA, 19 nt, Artificial Sequence
  Description of Artificial Sequence: Synthetic oligonucleotide
  Sense Strand Starting at position 1269 of SEQ ID NO: 318784
cugcauuugucaucuccua

SEQ ID NO: 418366 - RNA, 19 nt, Artificial Sequence
  Description of Artificial Sequence: Synthetic oligonucleotide
  Antisense Strand to SEQ ID NO: 418365
uaggagaugacaaaugcag

SEQ ID NO: 418367 - RNA, 19 nt, Artificial Sequence
  Description of Artificial Sequence: Synthetic oligonucleotide
  Sense Strand Starting at position 1270 of SEQ ID NO: 315286
cuguuucugccacauggau

SEQ ID NO: 418368 - RNA, 19 nt, Artificial Sequence
  Description of Artificial Sequence: Synthetic oligonucleotide
  Antisense Strand to SEQ ID NO: 418367
auccauguggcagaaacag

SEQ ID NO: 418369 - RNA, 19 nt, Artificial Sequence
  Description of Artificial Sequence: Synthetic oligonucleotide
  Sense Strand Starting at position 1270 of SEQ ID NO: 315563
gcuaguguggcucaugaga

SEQ ID NO: 418370 - RNA, 19 nt, Artificial Sequence
  Description of Artificial Sequence: Synthetic oligonucleotide
  Antisense Strand to SEQ ID NO: 418369
ucucaugagccacacuagc

SEQ ID NO: 418371 - RNA, 19 nt, Artificial Sequence
  Description of Artificial Sequence: Synthetic oligonucleotide
  Sense Strand Starting at position 1270 of SEQ ID NO: 315612
uacuguguggcauacucaa

SEQ ID NO: 418372 - RNA, 19 nt, Artificial Sequence
  Description of Artificial Sequence: Synthetic oligonucleotide
  Antisense Strand to SEQ ID NO: 418371
uugaguaugccacacagua

SEQ ID NO: 418373 - RNA, 19 nt, Artificial Sequence
  Description of Artificial Sequence: Synthetic oligonucleotide
  Sense Strand Starting at position 1270 of SEQ ID NO: 315683
cucugaaaugcugacaugu

SEQ ID NO: 418374 - RNA, 19 nt, Artificial Sequence
  Description of Artificial Sequence: Synthetic oligonucleotide
  Antisense Strand to SEQ ID NO: 418373
acaugucagcauuucagag

SEQ ID NO: 418375 - RNA, 19 nt, Artificial Sequence
  Description of Artificial Sequence: Synthetic oligonucleotide
  Sense Strand Starting at position 1270 of SEQ ID NO: 315761
cauuaaacagacugugaug

SEQ ID NO: 418376 - RNA, 19 nt, Artificial Sequence
  Description of Artificial Sequence: Synthetic oligonucleotide
  Antisense Strand to SEQ ID NO: 418375
caucacagucuguuuaaug

SEQ ID NO: 418377 - RNA, 19 nt, Artificial Sequence
  Description of Artificial Sequence: Synthetic oligonucleotide
  Sense Strand Starting at position 1270 of SEQ ID NO: 315903
uugcucagucucgagauau

SEQ ID NO: 418378 - RNA, 19 nt, Artificial Sequence
  Description of Artificial Sequence: Synthetic oligonucleotide
  Antisense Strand to SEQ ID NO: 418377
auaucucgagacugagcaa

SEQ ID NO: 418379 - RNA, 19 nt, Artificial Sequence
  Description of Artificial Sequence: Synthetic oligonucleotide
  Sense Strand Starting at position 1270 of SEQ ID NO: 315971
gagggugaagcaugaguca

SEQ ID NO: 418380 - RNA, 19 nt, Artificial Sequence
  Description of Artificial Sequence: Synthetic oligonucleotide
  Antisense Strand to SEQ ID NO: 418379
ugacucaugcuucacccuc

SEQ ID NO: 418381 - RNA, 19 nt, Artificial Sequence
  Description of Artificial Sequence: Synthetic oligonucleotide
  Sense Strand Starting at position 1270 of SEQ ID NO: 316002
uagguuaaaugugccucaa

SEQ ID NO: 418382 - RNA, 19 nt, Artificial Sequence
  Description of Artificial Sequence: Synthetic oligonucleotide
  Antisense Strand to SEQ ID NO: 418381
uugaggcacauuuaaccua

SEQ ID NO: 418383 - RNA, 19 nt, Artificial Sequence
  Description of Artificial Sequence: Synthetic oligonucleotide
  Sense Strand Starting at position 1270 of SEQ ID NO: 316347
aagcuaaggcgucaaggaa

SEQ ID NO: 418384 - RNA, 19 nt, Artificial Sequence
  Description of Artificial Sequence: Synthetic oligonucleotide
  Antisense Strand to SEQ ID NO: 418383
uuccuugacgccuuagcuu

SEQ ID NO: 418385 - RNA, 19 nt, Artificial Sequence
  Description of Artificial Sequence: Synthetic oligonucleotide
  Sense Strand Starting at position 1270 of SEQ ID NO: 316521
ccgagagcauucuuaucuu

SEQ ID NO: 418386 - RNA, 19 nt, Artificial Sequence
  Description of Artificial Sequence: Synthetic oligonucleotide
  Antisense Strand to SEQ ID NO: 418385
aagauaagaaugcucucgg

SEQ ID NO: 418387 - RNA, 19 nt, Artificial Sequence
  Description of Artificial Sequence: Synthetic oligonucleotide
  Sense Strand Starting at position 1270 of SEQ ID NO: 316527
gcauucuuaucuuugagag

SEQ ID NO: 418388 - RNA, 19 nt, Artificial Sequence
  Description of Artificial Sequence: Synthetic oligonucleotide
  Antisense Strand to SEQ ID NO: 418387
cucucaaagauaagaaugc

SEQ ID NO: 418389 - RNA, 19 nt, Artificial Sequence
  Description of Artificial Sequence: Synthetic oligonucleotide
  Sense Strand Starting at position 1270 of SEQ ID NO: 316603
cugagugaugucuaguccu

SEQ ID NO: 418390 - RNA, 19 nt, Artificial Sequence
  Description of Artificial Sequence: Synthetic oligonucleotide
  Antisense Strand to SEQ ID NO: 418389
aggacuagacaucacucag

SEQ ID NO: 418391 - RNA, 19 nt, Artificial Sequence
  Description of Artificial Sequence: Synthetic oligonucleotide
  Sense Strand Starting at position 1270 of SEQ ID NO: 316606
agugaugucuaguccugac

SEQ ID NO: 418392 - RNA, 19 nt, Artificial Sequence
  Description of Artificial Sequence: Synthetic oligonucleotide
  Antisense Strand to SEQ ID NO: 418391
gucaggacuagacaucacu

SEQ ID NO: 418393 - RNA, 19 nt, Artificial Sequence
  Description of Artificial Sequence: Synthetic oligonucleotide
  Sense Strand Starting at position 1270 of SEQ ID NO: 316610
augucuaguccugacgacu

SEQ ID NO: 418394 - RNA, 19 nt, Artificial Sequence
  Description of Artificial Sequence: Synthetic oligonucleotide
  Antisense Strand to SEQ ID NO: 418393
agucgucaggacuagacau

SEQ ID NO: 418395 - RNA, 19 nt, Artificial Sequence
  Description of Artificial Sequence: Synthetic oligonucleotide
  Sense Strand Starting at position 1270 of SEQ ID NO: 316618
uccugacgacuuugugauu

SEQ ID NO: 418396 - RNA, 19 nt, Artificial Sequence
  Description of Artificial Sequence: Synthetic oligonucleotide
  Antisense Strand to SEQ ID NO: 418395
aaucacaaagucgucagga

SEQ ID NO: 418397 - RNA, 19 nt, Artificial Sequence
  Description of Artificial Sequence: Synthetic oligonucleotide
  Sense Strand Starting at position 1270 of SEQ ID NO: 317105
ucugacaagugcuuuauaa

SEQ ID NO: 418398 - RNA, 19 nt, Artificial Sequence
  Description of Artificial Sequence: Synthetic oligonucleotide
  Antisense Strand to SEQ ID NO: 418397
uuauaaagcacuugucaga

SEQ ID NO: 418399 - RNA, 19 nt, Artificial Sequence
  Description of Artificial Sequence: Synthetic oligonucleotide
  Sense Strand Starting at position 1270 of SEQ ID NO: 317107
ugacaagugcuuuauaaua

SEQ ID NO: 418400 - RNA, 19 nt, Artificial Sequence
  Description of Artificial Sequence: Synthetic oligonucleotide
  Antisense Strand to SEQ ID NO: 418399
uauuauaaagcacuuguca

SEQ ID NO: 418401 - RNA, 19 nt, Artificial Sequence
  Description of Artificial Sequence: Synthetic oligonucleotide
  Sense Strand Starting at position 1270 of SEQ ID NO: 317193
ggugaauuccaaugguguc

SEQ ID NO: 418402 - RNA, 19 nt, Artificial Sequence
  Description of Artificial Sequence: Synthetic oligonucleotide
  Antisense Strand to SEQ ID NO: 418401
gacaccauuggaauucacc

SEQ ID NO: 418403 - RNA, 19 nt, Artificial Sequence
  Description of Artificial Sequence: Synthetic oligonucleotide
  Sense Strand Starting at position 1270 of SEQ ID NO: 317194
gugaauuccaaugguguca

SEQ ID NO: 418404 - RNA, 19 nt, Artificial Sequence
  Description of Artificial Sequence: Synthetic oligonucleotide
  Antisense Strand to SEQ ID NO: 418403
ugacaccauuggaauucac

SEQ ID NO: 418405 - RNA, 19 nt, Artificial Sequence
  Description of Artificial Sequence: Synthetic oligonucleotide
  Sense Strand Starting at position 1270 of SEQ ID NO: 317250
cugcaaauccuuggguaac

SEQ ID NO: 418406 - RNA, 19 nt, Artificial Sequence
  Description of Artificial Sequence: Synthetic oligonucleotide
  Antisense Strand to SEQ ID NO: 418405
guuacccaaggauuugcag

SEQ ID NO: 418407 - RNA, 19 nt, Artificial Sequence
  Description of Artificial Sequence: Synthetic oligonucleotide
  Sense Strand Starting at position 1270 of SEQ ID NO: 317347
guagguuaauggucugaau

SEQ ID NO: 418408 - RNA, 19 nt, Artificial Sequence
  Description of Artificial Sequence: Synthetic oligonucleotide
  Antisense Strand to SEQ ID NO: 418407
auucagaccauuaaccuac

SEQ ID NO: 418409 - RNA, 19 nt, Artificial Sequence
  Description of Artificial Sequence: Synthetic oligonucleotide
  Sense Strand Starting at position 1270 of SEQ ID NO: 317349
agguuaauggucugaauau

SEQ ID NO: 418410 - RNA, 19 nt, Artificial Sequence
  Description of Artificial Sequence: Synthetic oligonucleotide
  Antisense Strand to SEQ ID NO: 418409
auauucagaccauuaaccu

SEQ ID NO: 418411 - RNA, 19 nt, Artificial Sequence
  Description of Artificial Sequence: Synthetic oligonucleotide
  Sense Strand Starting at position 1270 of SEQ ID NO: 317445
agagaacauuaccaugaaa

SEQ ID NO: 418412 - RNA, 19 nt, Artificial Sequence
  Description of Artificial Sequence: Synthetic oligonucleotide
  Antisense Strand to SEQ ID NO: 418411
uuucaugguaauguucucu

SEQ ID NO: 418413 - RNA, 19 nt, Artificial Sequence
  Description of Artificial Sequence: Synthetic oligonucleotide
  Sense Strand Starting at position 1270 of SEQ ID NO: 317472
cuguaagaaucuguuaaau

SEQ ID NO: 418414 - RNA, 19 nt, Artificial Sequence
  Description of Artificial Sequence: Synthetic oligonucleotide
  Antisense Strand to SEQ ID NO: 418413
auuuaacagauucuuacag

SEQ ID NO: 418415 - RNA, 19 nt, Artificial Sequence
  Description of Artificial Sequence: Synthetic oligonucleotide
  Sense Strand Starting at position 1270 of SEQ ID NO: 317481
ucuguuaaaugagccagua

SEQ ID NO: 418416 - RNA, 19 nt, Artificial Sequence
  Description of Artificial Sequence: Synthetic oligonucleotide
  Antisense Strand to SEQ ID NO: 418415
uacuggcucauuuaacaga

SEQ ID NO: 418417 - RNA, 19 nt, Artificial Sequence
  Description of Artificial Sequence: Synthetic oligonucleotide
  Sense Strand Starting at position 1270 of SEQ ID NO: 317511
agaguuaauuugcacucaa

SEQ ID NO: 418418 - RNA, 19 nt, Artificial Sequence
  Description of Artificial Sequence: Synthetic oligonucleotide
  Antisense Strand to SEQ ID NO: 418417
uugagugcaaauuaacucu

SEQ ID NO: 418419 - RNA, 19 nt, Artificial Sequence
  Description of Artificial Sequence: Synthetic oligonucleotide
  Sense Strand Starting at position 1270 of SEQ ID NO: 317588
uuuccaaauuaugcugaga

SEQ ID NO: 418420 - RNA, 19 nt, Artificial Sequence
  Description of Artificial Sequence: Synthetic oligonucleotide
  Antisense Strand to SEQ ID NO: 418419
ucucagcauaauuuggaaa

SEQ ID NO: 418421 - RNA, 19 nt, Artificial Sequence
  Description of Artificial Sequence: Synthetic oligonucleotide
  Sense Strand Starting at position 1270 of SEQ ID NO: 317601
cugagacaaugcucaacaa

SEQ ID NO: 418422 - RNA, 19 nt, Artificial Sequence
  Description of Artificial Sequence: Synthetic oligonucleotide
  Antisense Strand to SEQ ID NO: 418421
uuguugagcauugucucag

SEQ ID NO: 418423 - RNA, 19 nt, Artificial Sequence
  Description of Artificial Sequence: Synthetic oligonucleotide
  Sense Strand Starting at position 1270 of SEQ ID NO: 317775
ggcugugugcugagaggua

SEQ ID NO: 418424 - RNA, 19 nt, Artificial Sequence
  Description of Artificial Sequence: Synthetic oligonucleotide
  Antisense Strand to SEQ ID NO: 418423
uaccucucagcacacagcc

SEQ ID NO: 418425 - RNA, 19 nt, Artificial Sequence
  Description of Artificial Sequence: Synthetic oligonucleotide
  Sense Strand Starting at position 1270 of SEQ ID NO: 317832
gcaagaugugcagucguuu

SEQ ID NO: 418426 - RNA, 19 nt, Artificial Sequence
  Description of Artificial Sequence: Synthetic oligonucleotide
  Antisense Strand to SEQ ID NO: 418425
aaacgacugcacaucuugc

SEQ ID NO: 418427 - RNA, 19 nt, Artificial Sequence
  Description of Artificial Sequence: Synthetic oligonucleotide
  Sense Strand Starting at position 1270 of SEQ ID NO: 317874
gcuguccauuugucaaugu

SEQ ID NO: 418428 - RNA, 19 nt, Artificial Sequence
  Description of Artificial Sequence: Synthetic oligonucleotide
  Antisense Strand to SEQ ID NO: 418427
acauugacaaauggacagc

SEQ ID NO: 418429 - RNA, 19 nt, Artificial Sequence
  Description of Artificial Sequence: Synthetic oligonucleotide
  Sense Strand Starting at position 1270 of SEQ ID NO: 318104
gggacuucagagugaguuc

SEQ ID NO: 418430 - RNA, 19 nt, Artificial Sequence
  Description of Artificial Sequence: Synthetic oligonucleotide
  Antisense Strand to SEQ ID NO: 418429
gaacucacucugaaguccc

SEQ ID NO: 418431 - RNA, 19 nt, Artificial Sequence
  Description of Artificial Sequence: Synthetic oligonucleotide
  Sense Strand Starting at position 1270 of SEQ ID NO: 318210
ugaggaaagucucauuuac

SEQ ID NO: 418432 - RNA, 19 nt, Artificial Sequence
  Description of Artificial Sequence: Synthetic oligonucleotide
  Antisense Strand to SEQ ID NO: 418431
guaaaugagacuuuccuca

SEQ ID NO: 418433 - RNA, 19 nt, Artificial Sequence
  Description of Artificial Sequence: Synthetic oligonucleotide
  Sense Strand Starting at position 1270 of SEQ ID NO: 318240
uagagcuggagucaaguau

SEQ ID NO: 418434 - RNA, 19 nt, Artificial Sequence
  Description of Artificial Sequence: Synthetic oligonucleotide
  Antisense Strand to SEQ ID NO: 418433
auacuugacuccagcucua

SEQ ID NO: 418435 - RNA, 19 nt, Artificial Sequence
  Description of Artificial Sequence: Synthetic oligonucleotide
  Sense Strand Starting at position 1270 of SEQ ID NO: 318279
gguucugcucaagaaauag

SEQ ID NO: 418436 - RNA, 19 nt, Artificial Sequence
  Description of Artificial Sequence: Synthetic oligonucleotide
  Antisense Strand to SEQ ID NO: 418435
cuauuucuugagcagaacc

SEQ ID NO: 418437 - RNA, 19 nt, Artificial Sequence
  Description of Artificial Sequence: Synthetic oligonucleotide
  Sense Strand Starting at position 1270 of SEQ ID NO: 318626
agauaacucugucccaaag

SEQ ID NO: 418438 - RNA, 19 nt, Artificial Sequence
  Description of Artificial Sequence: Synthetic oligonucleotide
  Antisense Strand to SEQ ID NO: 418437
cuuugggacagaguuaucu

SEQ ID NO: 418439 - RNA, 19 nt, Artificial Sequence
  Description of Artificial Sequence: Synthetic oligonucleotide
  Sense Strand Starting at position 1270 of SEQ ID NO: 318785
gcccuagagcucuggauga

SEQ ID NO: 418440 - RNA, 19 nt, Artificial Sequence
  Description of Artificial Sequence: Synthetic oligonucleotide
  Antisense Strand to SEQ ID NO: 418439
ucauccagagcucuagggc

SEQ ID NO: 418441 - RNA, 19 nt, Artificial Sequence
  Description of Artificial Sequence: Synthetic oligonucleotide
  Sense Strand Starting at position 1270 of SEQ ID NO: 318787
ccuagagcucuggaugacu

SEQ ID NO: 418442 - RNA, 19 nt, Artificial Sequence
  Description of Artificial Sequence: Synthetic oligonucleotide
  Antisense Strand to SEQ ID NO: 418441
agucauccagagcucuagg

SEQ ID NO: 418443 - RNA, 19 nt, Artificial Sequence
  Description of Artificial Sequence: Synthetic oligonucleotide
  Sense Strand Starting at position 1270 of SEQ ID NO: 319196
ggaauuagcucaguaaguc

SEQ ID NO: 418444 - RNA, 19 nt, Artificial Sequence
  Description of Artificial Sequence: Synthetic oligonucleotide
  Antisense Strand to SEQ ID NO: 418443
gacuuacugagcuaauucc

SEQ ID NO: 418445 - RNA, 19 nt, Artificial Sequence
  Description of Artificial Sequence: Synthetic oligonucleotide
  Sense Strand Starting at position 1270 of SEQ ID NO: 319197
gaauuagcucaguaaguca

SEQ ID NO: 418446 - RNA, 19 nt, Artificial Sequence
  Description of Artificial Sequence: Synthetic oligonucleotide
  Antisense Strand to SEQ ID NO: 418445
ugacuuacugagcuaauuc

SEQ ID NO: 418447 - RNA, 19 nt, Artificial Sequence
  Description of Artificial Sequence: Synthetic oligonucleotide
  Sense Strand Starting at position 1271 of SEQ ID NO: 315336
ggcuccagaguuuaagcaa

SEQ ID NO: 418448 - RNA, 19 nt, Artificial Sequence
  Description of Artificial Sequence: Synthetic oligonucleotide
  Antisense Strand to SEQ ID NO: 418447
uugcuuaaacucuggagcc

SEQ ID NO: 418449 - RNA, 19 nt, Artificial Sequence
  Description of Artificial Sequence: Synthetic oligonucleotide
  Sense Strand Starting at position 1271 of SEQ ID NO: 315452
gccuccaaauuaguuaaga

SEQ ID NO: 418450 - RNA, 19 nt, Artificial Sequence
  Description of Artificial Sequence: Synthetic oligonucleotide
  Antisense Strand to SEQ ID NO: 418449
ucuuaacuaauuuggaggc

SEQ ID NO: 418451 - RNA, 19 nt, Artificial Sequence
  Description of Artificial Sequence: Synthetic oligonucleotide
  Sense Strand Starting at position 1271 of SEQ ID NO: 315795
aggagucuguugagaagag

SEQ ID NO: 418452 - RNA, 19 nt, Artificial Sequence
  Description of Artificial Sequence: Synthetic oligonucleotide
  Antisense Strand to SEQ ID NO: 418451
cucuucucaacagacuccu

SEQ ID NO: 418453 - RNA, 19 nt, Artificial Sequence
  Description of Artificial Sequence: Synthetic oligonucleotide
  Sense Strand Starting at position 1271 of SEQ ID NO: 315915
ucaccaaaguuucuaugua

SEQ ID NO: 418454 - RNA, 19 nt, Artificial Sequence
  Description of Artificial Sequence: Synthetic oligonucleotide
  Antisense Strand to SEQ ID NO: 418453
uacauagaaacuuugguga

SEQ ID NO: 418455 - RNA, 19 nt, Artificial Sequence
  Description of Artificial Sequence: Synthetic oligonucleotide
  Sense Strand Starting at position 1271 of SEQ ID NO: 315944
gucuguuaagaccauuacu

SEQ ID NO: 418456 - RNA, 19 nt, Artificial Sequence
  Description of Artificial Sequence: Synthetic oligonucleotide
  Antisense Strand to SEQ ID NO: 418455
aguaauggucuuaacagac

SEQ ID NO: 418457 - RNA, 19 nt, Artificial Sequence
  Description of Artificial Sequence: Synthetic oligonucleotide
  Sense Strand Starting at position 1271 of SEQ ID NO: 316004
ggcauaaacagucggauua

SEQ ID NO: 418458 - RNA, 19 nt, Artificial Sequence
  Description of Artificial Sequence: Synthetic oligonucleotide
  Antisense Strand to SEQ ID NO: 418457
uaauccgacuguuuaugcc

SEQ ID NO: 418459 - RNA, 19 nt, Artificial Sequence
  Description of Artificial Sequence: Synthetic oligonucleotide
  Sense Strand Starting at position 1271 of SEQ ID NO: 316042
gaguuaugauguuucucag

SEQ ID NO: 418460 - RNA, 19 nt, Artificial Sequence
  Description of Artificial Sequence: Synthetic oligonucleotide
  Antisense Strand to SEQ ID NO: 418459
cugagaaacaucauaacuc

SEQ ID NO: 418461 - RNA, 19 nt, Artificial Sequence
  Description of Artificial Sequence: Synthetic oligonucleotide
  Sense Strand Starting at position 1271 of SEQ ID NO: 316045
uuaugauguuucucagaac

SEQ ID NO: 418462 - RNA, 19 nt, Artificial Sequence
  Description of Artificial Sequence: Synthetic oligonucleotide
  Antisense Strand to SEQ ID NO: 418461
guucugagaaacaucauaa

SEQ ID NO: 418463 - RNA, 19 nt, Artificial Sequence
  Description of Artificial Sequence: Synthetic oligonucleotide
  Sense Strand Starting at position 1271 of SEQ ID NO: 316355
caggguucccuguaaacac

SEQ ID NO: 418464 - RNA, 19 nt, Artificial Sequence
  Description of Artificial Sequence: Synthetic oligonucleotide
  Antisense Strand to SEQ ID NO: 418463
guguuuacagggaacccug

SEQ ID NO: 418465 - RNA, 19 nt, Artificial Sequence
  Description of Artificial Sequence: Synthetic oligonucleotide
  Sense Strand Starting at position 1271 of SEQ ID NO: 316509
acguguagacuguacauua

SEQ ID NO: 418466 - RNA, 19 nt, Artificial Sequence
  Description of Artificial Sequence: Synthetic oligonucleotide
  Antisense Strand to SEQ ID NO: 418465
uaauguacagucuacacgu

SEQ ID NO: 418467 - RNA, 19 nt, Artificial Sequence
  Description of Artificial Sequence: Synthetic oligonucleotide
  Sense Strand Starting at position 1271 of SEQ ID NO: 317081
gucagaaauuaccuuugaa

SEQ ID NO: 418468 - RNA, 19 nt, Artificial Sequence
  Description of Artificial Sequence: Synthetic oligonucleotide
  Antisense Strand to SEQ ID NO: 418467
uucaaagguaauuucugac

SEQ ID NO: 418469 - RNA, 19 nt, Artificial Sequence
  Description of Artificial Sequence: Synthetic oligonucleotide
  Sense Strand Starting at position 1271 of SEQ ID NO: 317356
cgcguuauuggguccggga

SEQ ID NO: 418470 - RNA, 19 nt, Artificial Sequence
  Description of Artificial Sequence: Synthetic oligonucleotide
  Antisense Strand to SEQ ID NO: 418469
ucccggacccaauaacgcg

SEQ ID NO: 418471 - RNA, 19 nt, Artificial Sequence
  Description of Artificial Sequence: Synthetic oligonucleotide
  Sense Strand Starting at position 1271 of SEQ ID NO: 317419
acgccaacccuugauagau

SEQ ID NO: 418472 - RNA, 19 nt, Artificial Sequence
  Description of Artificial Sequence: Synthetic oligonucleotide
  Antisense Strand to SEQ ID NO: 418471
aucuaucaaggguuggcgu

SEQ ID NO: 418473 - RNA, 19 nt, Artificial Sequence
  Description of Artificial Sequence: Synthetic oligonucleotide
  Sense Strand Starting at position 1271 of SEQ ID NO: 317427
ccuugauagaugcgaacca

SEQ ID NO: 418474 - RNA, 19 nt, Artificial Sequence
  Description of Artificial Sequence: Synthetic oligonucleotide
  Antisense Strand to SEQ ID NO: 418473
ugguucgcaucuaucaagg

SEQ ID NO: 418475 - RNA, 19 nt, Artificial Sequence
  Description of Artificial Sequence: Synthetic oligonucleotide
  Sense Strand Starting at position 1271 of SEQ ID NO: 317436
augcgaaccagucguauuu

SEQ ID NO: 418476 - RNA, 19 nt, Artificial Sequence
  Description of Artificial Sequence: Synthetic oligonucleotide
  Antisense Strand to SEQ ID NO: 418475
aaauacgacugguucgcau

SEQ ID NO: 418477 - RNA, 19 nt, Artificial Sequence
  Description of Artificial Sequence: Synthetic oligonucleotide
  Sense Strand Starting at position 1271 of SEQ ID NO: 317447
ucguauuuccuuuguggga

SEQ ID NO: 418478 - RNA, 19 nt, Artificial Sequence
  Description of Artificial Sequence: Synthetic oligonucleotide
  Antisense Strand to SEQ ID NO: 418477
ucccacaaaggaaauacga

SEQ ID NO: 418479 - RNA, 19 nt, Artificial Sequence
  Description of Artificial Sequence: Synthetic oligonucleotide
  Sense Strand Starting at position 1271 of SEQ ID NO: 317448
cguauuuccuuugugggaa

SEQ ID NO: 418480 - RNA, 19 nt, Artificial Sequence
  Description of Artificial Sequence: Synthetic oligonucleotide
  Antisense Strand to SEQ ID NO: 418479
uucccacaaaggaaauacg

SEQ ID NO: 418481 - RNA, 19 nt, Artificial Sequence
  Description of Artificial Sequence: Synthetic oligonucleotide
  Sense Strand Starting at position 1271 of SEQ ID NO: 317634
ucaucuuaagauggugaau

SEQ ID NO: 418482 - RNA, 19 nt, Artificial Sequence
  Description of Artificial Sequence: Synthetic oligonucleotide
  Antisense Strand to SEQ ID NO: 418481
auucaccaucuuaagauga

SEQ ID NO: 418483 - RNA, 19 nt, Artificial Sequence
  Description of Artificial Sequence: Synthetic oligonucleotide
  Sense Strand Starting at position 1271 of SEQ ID NO: 317637
ucuuaagauggugaauguu

SEQ ID NO: 418484 - RNA, 19 nt, Artificial Sequence
  Description of Artificial Sequence: Synthetic oligonucleotide
  Antisense Strand to SEQ ID NO: 418483
aacauucaccaucuuaaga

SEQ ID NO: 418485 - RNA, 19 nt, Artificial Sequence
  Description of Artificial Sequence: Synthetic oligonucleotide
  Sense Strand Starting at position 1271 of SEQ ID NO: 317780
aucguaaauacagauggua

SEQ ID NO: 418486 - RNA, 19 nt, Artificial Sequence
  Description of Artificial Sequence: Synthetic oligonucleotide
  Antisense Strand to SEQ ID NO: 418485
uaccaucuguauuuacgau

SEQ ID NO: 418487 - RNA, 19 nt, Artificial Sequence
  Description of Artificial Sequence: Synthetic oligonucleotide
  Sense Strand Starting at position 1271 of SEQ ID NO: 317782
cguaaauacagaugguauu

SEQ ID NO: 418488 - RNA, 19 nt, Artificial Sequence
  Description of Artificial Sequence: Synthetic oligonucleotide
  Antisense Strand to SEQ ID NO: 418487
aauaccaucuguauuuacg

SEQ ID NO: 418489 - RNA, 19 nt, Artificial Sequence
  Description of Artificial Sequence: Synthetic oligonucleotide
  Sense Strand Starting at position 1271 of SEQ ID NO: 318188
gugcuuaggaguuagaauu

SEQ ID NO: 418490 - RNA, 19 nt, Artificial Sequence
  Description of Artificial Sequence: Synthetic oligonucleotide
  Antisense Strand to SEQ ID NO: 418489
aauucuaacuccuaagcac

SEQ ID NO: 418491 - RNA, 19 nt, Artificial Sequence
  Description of Artificial Sequence: Synthetic oligonucleotide
  Sense Strand Starting at position 1271 of SEQ ID NO: 318199
uuagaauucuguucucaga

SEQ ID NO: 418492 - RNA, 19 nt, Artificial Sequence
  Description of Artificial Sequence: Synthetic oligonucleotide
  Antisense Strand to SEQ ID NO: 418491
ucugagaacagaauucuaa

SEQ ID NO: 418493 - RNA, 19 nt, Artificial Sequence
  Description of Artificial Sequence: Synthetic oligonucleotide
  Sense Strand Starting at position 1271 of SEQ ID NO: 318201
agaauucuguucucagaau

SEQ ID NO: 418494 - RNA, 19 nt, Artificial Sequence
  Description of Artificial Sequence: Synthetic oligonucleotide
  Antisense Strand to SEQ ID NO: 418493
auucugagaacagaauucu

SEQ ID NO: 418495 - RNA, 19 nt, Artificial Sequence
  Description of Artificial Sequence: Synthetic oligonucleotide
  Sense Strand Starting at position 1271 of SEQ ID NO: 318207
cuguucucagaaugaagau

SEQ ID NO: 418496 - RNA, 19 nt, Artificial Sequence
  Description of Artificial Sequence: Synthetic oligonucleotide
  Antisense Strand to SEQ ID NO: 418495
aucuucauucugagaacag

SEQ ID NO: 418497 - RNA, 19 nt, Artificial Sequence
  Description of Artificial Sequence: Synthetic oligonucleotide
  Sense Strand Starting at position 1271 of SEQ ID NO: 318216
gaaugaagaucggccuuua

SEQ ID NO: 418498 - RNA, 19 nt, Artificial Sequence
  Description of Artificial Sequence: Synthetic oligonucleotide
  Antisense Strand to SEQ ID NO: 418497
uaaaggccgaucuucauuc

SEQ ID NO: 418499 - RNA, 19 nt, Artificial Sequence
  Description of Artificial Sequence: Synthetic oligonucleotide
  Sense Strand Starting at position 1271 of SEQ ID NO: 318227
ggccuuuaacaagguugaa

SEQ ID NO: 418500 - RNA, 19 nt, Artificial Sequence
  Description of Artificial Sequence: Synthetic oligonucleotide
  Antisense Strand to SEQ ID NO: 418499
uucaaccuuguuaaaggcc

SEQ ID NO: 418501 - RNA, 19 nt, Artificial Sequence
  Description of Artificial Sequence: Synthetic oligonucleotide
  Sense Strand Starting at position 1271 of SEQ ID NO: 318230
cuuuaacaagguugaaaug

SEQ ID NO: 418502 - RNA, 19 nt, Artificial Sequence
  Description of Artificial Sequence: Synthetic oligonucleotide
  Antisense Strand to SEQ ID NO: 418501
cauuucaaccuuguuaaag

SEQ ID NO: 418503 - RNA, 19 nt, Artificial Sequence
  Description of Artificial Sequence: Synthetic oligonucleotide
  Sense Strand Starting at position 1271 of SEQ ID NO: 318265
aaaguauugcucugaggac

SEQ ID NO: 418504 - RNA, 19 nt, Artificial Sequence
  Description of Artificial Sequence: Synthetic oligonucleotide
  Antisense Strand to SEQ ID NO: 418503
guccucagagcaauacuuu

SEQ ID NO: 418505 - RNA, 19 nt, Artificial Sequence
  Description of Artificial Sequence: Synthetic oligonucleotide
  Sense Strand Starting at position 1271 of SEQ ID NO: 318465
gcaaacugacacuaugcau

SEQ ID NO: 418506 - RNA, 19 nt, Artificial Sequence
  Description of Artificial Sequence: Synthetic oligonucleotide
  Antisense Strand to SEQ ID NO: 418505
augcauagugucaguuugc

SEQ ID NO: 418507 - RNA, 19 nt, Artificial Sequence
  Description of Artificial Sequence: Synthetic oligonucleotide
  Sense Strand Starting at position 1271 of SEQ ID NO: 318616
uugaaccagcucugaagaa

SEQ ID NO: 418508 - RNA, 19 nt, Artificial Sequence
  Description of Artificial Sequence: Synthetic oligonucleotide
  Antisense Strand to SEQ ID NO: 418507
uucuucagagcugguucaa

SEQ ID NO: 418509 - RNA, 19 nt, Artificial Sequence
  Description of Artificial Sequence: Synthetic oligonucleotide
  Sense Strand Starting at position 1271 of SEQ ID NO: 318701
gcuggcucucaagaaagau

SEQ ID NO: 418510 - RNA, 19 nt, Artificial Sequence
  Description of Artificial Sequence: Synthetic oligonucleotide
  Antisense Strand to SEQ ID NO: 418509
aucuuucuugagagccagc

SEQ ID NO: 418511 - RNA, 19 nt, Artificial Sequence
  Description of Artificial Sequence: Synthetic oligonucleotide
  Sense Strand Starting at position 1271 of SEQ ID NO: 318828
ugacaagugcuacacauga

SEQ ID NO: 418512 - RNA, 19 nt, Artificial Sequence
  Description of Artificial Sequence: Synthetic oligonucleotide
  Antisense Strand to SEQ ID NO: 418511
ucauguguagcacuuguca

SEQ ID NO: 418513 - RNA, 19 nt, Artificial Sequence
  Description of Artificial Sequence: Synthetic oligonucleotide
  Sense Strand Starting at position 1271 of SEQ ID NO: 318833
agugcuacacaugaaauua

SEQ ID NO: 418514 - RNA, 19 nt, Artificial Sequence
  Description of Artificial Sequence: Synthetic oligonucleotide
  Antisense Strand to SEQ ID NO: 418513
uaauuucauguguagcacu

SEQ ID NO: 418515 - RNA, 19 nt, Artificial Sequence
  Description of Artificial Sequence: Synthetic oligonucleotide
  Sense Strand Starting at position 1271 of SEQ ID NO: 318969
ccaauucuacucuggguga

SEQ ID NO: 418516 - RNA, 19 nt, Artificial Sequence
  Description of Artificial Sequence: Synthetic oligonucleotide
  Antisense Strand to SEQ ID NO: 418515
ucacccagaguagaauugg

SEQ ID NO: 418517 - RNA, 19 nt, Artificial Sequence
  Description of Artificial Sequence: Synthetic oligonucleotide
  Sense Strand Starting at position 1271 of SEQ ID NO: 318971
aauucuacucugggugaag

SEQ ID NO: 418518 - RNA, 19 nt, Artificial Sequence
  Description of Artificial Sequence: Synthetic oligonucleotide
  Antisense Strand to SEQ ID NO: 418517
cuucacccagaguagaauu

SEQ ID NO: 418519 - RNA, 19 nt, Artificial Sequence
  Description of Artificial Sequence: Synthetic oligonucleotide
  Sense Strand Starting at position 1271 of SEQ ID NO: 318972
auucuacucugggugaaga

SEQ ID NO: 418520 - RNA, 19 nt, Artificial Sequence
  Description of Artificial Sequence: Synthetic oligonucleotide
  Antisense Strand to SEQ ID NO: 418519
ucuucacccagaguagaau

SEQ ID NO: 418521 - RNA, 19 nt, Artificial Sequence
  Description of Artificial Sequence: Synthetic oligonucleotide
  Sense Strand Starting at position 1271 of SEQ ID NO: 319052
uucuguuuccaaggaaccu

SEQ ID NO: 418522 - RNA, 19 nt, Artificial Sequence
  Description of Artificial Sequence: Synthetic oligonucleotide
  Antisense Strand to SEQ ID NO: 418521
agguuccuuggaaacagaa

SEQ ID NO: 418523 - RNA, 19 nt, Artificial Sequence
  Description of Artificial Sequence: Synthetic oligonucleotide
  Sense Strand Starting at position 1271 of SEQ ID NO: 319082
cuuugaagagcucagcaca

SEQ ID NO: 418524 - RNA, 19 nt, Artificial Sequence
  Description of Artificial Sequence: Synthetic oligonucleotide
  Antisense Strand to SEQ ID NO: 418523
ugugcugagcucuucaaag

SEQ ID NO: 418525 - RNA, 19 nt, Artificial Sequence
  Description of Artificial Sequence: Synthetic oligonucleotide
  Sense Strand Starting at position 1271 of SEQ ID NO: 319085
ugaagagcucagcacacua

SEQ ID NO: 418526 - RNA, 19 nt, Artificial Sequence
  Description of Artificial Sequence: Synthetic oligonucleotide
  Antisense Strand to SEQ ID NO: 418525
uagugugcugagcucuuca

SEQ ID NO: 418527 - RNA, 19 nt, Artificial Sequence
  Description of Artificial Sequence: Synthetic oligonucleotide
  Sense Strand Starting at position 1272 of SEQ ID NO: 315256
uuuccaaagguguaaucua

SEQ ID NO: 418528 - RNA, 19 nt, Artificial Sequence
  Description of Artificial Sequence: Synthetic oligonucleotide
  Antisense Strand to SEQ ID NO: 418527
uagauuacaccuuuggaaa

SEQ ID NO: 418529 - RNA, 19 nt, Artificial Sequence
  Description of Artificial Sequence: Synthetic oligonucleotide
  Sense Strand Starting at position 1272 of SEQ ID NO: 315709
uuacaauuacgccacagau

SEQ ID NO: 418530 - RNA, 19 nt, Artificial Sequence
  Description of Artificial Sequence: Synthetic oligonucleotide
  Antisense Strand to SEQ ID NO: 418529
aucuguggcguaauuguaa

SEQ ID NO: 418531 - RNA, 19 nt, Artificial Sequence
  Description of Artificial Sequence: Synthetic oligonucleotide
  Sense Strand Starting at position 1272 of SEQ ID NO: 315863
aguuucuaccgucaaauau

SEQ ID NO: 418532 - RNA, 19 nt, Artificial Sequence
  Description of Artificial Sequence: Synthetic oligonucleotide
  Antisense Strand to SEQ ID NO: 418531
auauuugacgguagaaacu

SEQ ID NO: 418533 - RNA, 19 nt, Artificial Sequence
  Description of Artificial Sequence: Synthetic oligonucleotide
  Sense Strand Starting at position 1272 of SEQ ID NO: 315915
agaaguauugccuagcaau

SEQ ID NO: 418534 - RNA, 19 nt, Artificial Sequence
  Description of Artificial Sequence: Synthetic oligonucleotide
  Antisense Strand to SEQ ID NO: 418533
auugcuaggcaauacuucu

SEQ ID NO: 418535 - RNA, 19 nt, Artificial Sequence
  Description of Artificial Sequence: Synthetic oligonucleotide
  Sense Strand Starting at position 1272 of SEQ ID NO: 315995
uugagcagauuacuuaaua

SEQ ID NO: 418536 - RNA, 19 nt, Artificial Sequence
  Description of Artificial Sequence: Synthetic oligonucleotide
  Antisense Strand to SEQ ID NO: 418535
uauuaaguaaucugcucaa

SEQ ID NO: 418537 - RNA, 19 nt, Artificial Sequence
  Description of Artificial Sequence: Synthetic oligonucleotide
  Sense Strand Starting at position 1272 of SEQ ID NO: 315996
ugagcagauuacuuaauag

SEQ ID NO: 418538 - RNA, 19 nt, Artificial Sequence
  Description of Artificial Sequence: Synthetic oligonucleotide
  Antisense Strand to SEQ ID NO: 418537
cuauuaaguaaucugcuca

SEQ ID NO: 418539 - RNA, 19 nt, Artificial Sequence
  Description of Artificial Sequence: Synthetic oligonucleotide
  Sense Strand Starting at position 1272 of SEQ ID NO: 316080
acagaagacucaguacagu

SEQ ID NO: 418540 - RNA, 19 nt, Artificial Sequence
  Description of Artificial Sequence: Synthetic oligonucleotide
  Antisense Strand to SEQ ID NO: 418539
acuguacugagucuucugu

SEQ ID NO: 418541 - RNA, 19 nt, Artificial Sequence
  Description of Artificial Sequence: Synthetic oligonucleotide
  Sense Strand Starting at position 1272 of SEQ ID NO: 316103
gggauaugguaagcaaugu

SEQ ID NO: 418542 - RNA, 19 nt, Artificial Sequence
  Description of Artificial Sequence: Synthetic oligonucleotide
  Antisense Strand to SEQ ID NO: 418541
acauugcuuaccauauccc

SEQ ID NO: 418543 - RNA, 19 nt, Artificial Sequence
  Description of Artificial Sequence: Synthetic oligonucleotide
  Sense Strand Starting at position 1272 of SEQ ID NO: 316104
ggauaugguaagcaauguu

SEQ ID NO: 418544 - RNA, 19 nt, Artificial Sequence
  Description of Artificial Sequence: Synthetic oligonucleotide
  Antisense Strand to SEQ ID NO: 418543
aacauugcuuaccauaucc

SEQ ID NO: 418545 - RNA, 19 nt, Artificial Sequence
  Description of Artificial Sequence: Synthetic oligonucleotide
  Sense Strand Starting at position 1272 of SEQ ID NO: 316175
ugaaauuaaguuugucauc

SEQ ID NO: 418546 - RNA, 19 nt, Artificial Sequence
  Description of Artificial Sequence: Synthetic oligonucleotide
  Antisense Strand to SEQ ID NO: 418545
gaugacaaacuuaauuuca

SEQ ID NO: 418547 - RNA, 19 nt, Artificial Sequence
  Description of Artificial Sequence: Synthetic oligonucleotide
  Sense Strand Starting at position 1272 of SEQ ID NO: 316255
ugggaaucggcacggaaau

SEQ ID NO: 418548 - RNA, 19 nt, Artificial Sequence
  Description of Artificial Sequence: Synthetic oligonucleotide
  Antisense Strand to SEQ ID NO: 418547
auuuccgugccgauuccca

SEQ ID NO: 418549 - RNA, 19 nt, Artificial Sequence
  Description of Artificial Sequence: Synthetic oligonucleotide
  Sense Strand Starting at position 1272 of SEQ ID NO: 316256
gggaaucggcacggaaauu

SEQ ID NO: 418550 - RNA, 19 nt, Artificial Sequence
  Description of Artificial Sequence: Synthetic oligonucleotide
  Antisense Strand to SEQ ID NO: 418549
aauuuccgugccgauuccc

SEQ ID NO: 418551 - RNA, 19 nt, Artificial Sequence
  Description of Artificial Sequence: Synthetic oligonucleotide
  Sense Strand Starting at position 1272 of SEQ ID NO: 316379
cugucucaccagcauagaa

SEQ ID NO: 418552 - RNA, 19 nt, Artificial Sequence
  Description of Artificial Sequence: Synthetic oligonucleotide
  Antisense Strand to SEQ ID NO: 418551
uucuaugcuggugagacag

SEQ ID NO: 418553 - RNA, 19 nt, Artificial Sequence
  Description of Artificial Sequence: Synthetic oligonucleotide
  Sense Strand Starting at position 1272 of SEQ ID NO: 316381
gucucaccagcauagaauu

SEQ ID NO: 418554 - RNA, 19 nt, Artificial Sequence
  Description of Artificial Sequence: Synthetic oligonucleotide
  Antisense Strand to SEQ ID NO: 418553
aauucuaugcuggugagac

SEQ ID NO: 418555 - RNA, 19 nt, Artificial Sequence
  Description of Artificial Sequence: Synthetic oligonucleotide
  Sense Strand Starting at position 1272 of SEQ ID NO: 316412
agaaauaggguguguagua

SEQ ID NO: 418556 - RNA, 19 nt, Artificial Sequence
  Description of Artificial Sequence: Synthetic oligonucleotide
  Antisense Strand to SEQ ID NO: 418555
uacuacacacccuauuucu

SEQ ID NO: 418557 - RNA, 19 nt, Artificial Sequence
  Description of Artificial Sequence: Synthetic oligonucleotide
  Sense Strand Starting at position 1272 of SEQ ID NO: 316413
gaaauaggguguguaguaa

SEQ ID NO: 418558 - RNA, 19 nt, Artificial Sequence
  Description of Artificial Sequence: Synthetic oligonucleotide
  Antisense Strand to SEQ ID NO: 418557
uuacuacacacccuauuuc

SEQ ID NO: 418559 - RNA, 19 nt, Artificial Sequence
  Description of Artificial Sequence: Synthetic oligonucleotide
  Sense Strand Starting at position 1272 of SEQ ID NO: 316435
ggauaaauaggcuguuuga

SEQ ID NO: 418560 - RNA, 19 nt, Artificial Sequence
  Description of Artificial Sequence: Synthetic oligonucleotide
  Antisense Strand to SEQ ID NO: 418559
ucaaacagccuauuuaucc

SEQ ID NO: 418561 - RNA, 19 nt, Artificial Sequence
  Description of Artificial Sequence: Synthetic oligonucleotide
  Sense Strand Starting at position 1272 of SEQ ID NO: 316518
aguacaauaccugacaugu

SEQ ID NO: 418562 - RNA, 19 nt, Artificial Sequence
  Description of Artificial Sequence: Synthetic oligonucleotide
  Antisense Strand to SEQ ID NO: 418561
acaugucagguauuguacu

SEQ ID NO: 418563 - RNA, 19 nt, Artificial Sequence
  Description of Artificial Sequence: Synthetic oligonucleotide
  Sense Strand Starting at position 1272 of SEQ ID NO: 316526
accugacauguagaguuau

SEQ ID NO: 418564 - RNA, 19 nt, Artificial Sequence
  Description of Artificial Sequence: Synthetic oligonucleotide
  Antisense Strand to SEQ ID NO: 418563
auaacucuacaugucaggu

SEQ ID NO: 418565 - RNA, 19 nt, Artificial Sequence
  Description of Artificial Sequence: Synthetic oligonucleotide
  Sense Strand Starting at position 1272 of SEQ ID NO: 316620
guguguuuaagguagauug

SEQ ID NO: 418566 - RNA, 19 nt, Artificial Sequence
  Description of Artificial Sequence: Synthetic oligonucleotide
  Antisense Strand to SEQ ID NO: 418565
caaucuaccuuaaacacac

SEQ ID NO: 418567 - RNA, 19 nt, Artificial Sequence
  Description of Artificial Sequence: Synthetic oligonucleotide
  Sense Strand Starting at position 1272 of SEQ ID NO: 317417
gcuuaauuaggugaaucuu

SEQ ID NO: 418568 - RNA, 19 nt, Artificial Sequence
  Description of Artificial Sequence: Synthetic oligonucleotide
  Antisense Strand to SEQ ID NO: 418567
aagauucaccuaauuaagc

SEQ ID NO: 418569 - RNA, 19 nt, Artificial Sequence
  Description of Artificial Sequence: Synthetic oligonucleotide
  Sense Strand Starting at position 1272 of SEQ ID NO: 317432
ucuuauaccgugcauaaug

SEQ ID NO: 418570 - RNA, 19 nt, Artificial Sequence
  Description of Artificial Sequence: Synthetic oligonucleotide
  Antisense Strand to SEQ ID NO: 418569
cauuaugcacgguauaaga

SEQ ID NO: 418571 - RNA, 19 nt, Artificial Sequence
  Description of Artificial Sequence: Synthetic oligonucleotide
  Sense Strand Starting at position 1272 of SEQ ID NO: 317480
acauuaugcguuuacacaa

SEQ ID NO: 418572 - RNA, 19 nt, Artificial Sequence
  Description of Artificial Sequence: Synthetic oligonucleotide
  Antisense Strand to SEQ ID NO: 418571
uuguguaaacgcauaaugu

SEQ ID NO: 418573 - RNA, 19 nt, Artificial Sequence
  Description of Artificial Sequence: Synthetic oligonucleotide
  Sense Strand Starting at position 1272 of SEQ ID NO: 317752
augucacauucuguuagau

SEQ ID NO: 418574 - RNA, 19 nt, Artificial Sequence
  Description of Artificial Sequence: Synthetic oligonucleotide
  Antisense Strand to SEQ ID NO: 418573
aucuaacagaaugugacau

SEQ ID NO: 418575 - RNA, 19 nt, Artificial Sequence
  Description of Artificial Sequence: Synthetic oligonucleotide
  Sense Strand Starting at position 1272 of SEQ ID NO: 317764
guuagauaaguucagcgga

SEQ ID NO: 418576 - RNA, 19 nt, Artificial Sequence
  Description of Artificial Sequence: Synthetic oligonucleotide
  Antisense Strand to SEQ ID NO: 418575
uccgcugaacuuaucuaac

SEQ ID NO: 418577 - RNA, 19 nt, Artificial Sequence
  Description of Artificial Sequence: Synthetic oligonucleotide
  Sense Strand Starting at position 1272 of SEQ ID NO: 318105
ucaguugugagcuacgaaa

SEQ ID NO: 418578 - RNA, 19 nt, Artificial Sequence
  Description of Artificial Sequence: Synthetic oligonucleotide
  Antisense Strand to SEQ ID NO: 418577
uuucguagcucacaacuga

SEQ ID NO: 418579 - RNA, 19 nt, Artificial Sequence
  Description of Artificial Sequence: Synthetic oligonucleotide
  Sense Strand Starting at position 1272 of SEQ ID NO: 318233
ucaacaucacuugggaagu

SEQ ID NO: 418580 - RNA, 19 nt, Artificial Sequence
  Description of Artificial Sequence: Synthetic oligonucleotide
  Antisense Strand to SEQ ID NO: 418579
acuucccaagugauguuga

SEQ ID NO: 418581 - RNA, 19 nt, Artificial Sequence
  Description of Artificial Sequence: Synthetic oligonucleotide
  Sense Strand Starting at position 1272 of SEQ ID NO: 318346
gugauucuccacugguaaa

SEQ ID NO: 418582 - RNA, 19 nt, Artificial Sequence
  Description of Artificial Sequence: Synthetic oligonucleotide
  Antisense Strand to SEQ ID NO: 418581
uuuaccaguggagaaucac

SEQ ID NO: 418583 - RNA, 19 nt, Artificial Sequence
  Description of Artificial Sequence: Synthetic oligonucleotide
  Sense Strand Starting at position 1272 of SEQ ID NO: 318397
ccugauggguacucaguaa

SEQ ID NO: 418584 - RNA, 19 nt, Artificial Sequence
  Description of Artificial Sequence: Synthetic oligonucleotide
  Antisense Strand to SEQ ID NO: 418583
uuacugaguacccaucagg

SEQ ID NO: 418585 - RNA, 19 nt, Artificial Sequence
  Description of Artificial Sequence: Synthetic oligonucleotide
  Sense Strand Starting at position 1272 of SEQ ID NO: 318401
auggguacucaguaaaugu

SEQ ID NO: 418586 - RNA, 19 nt, Artificial Sequence
  Description of Artificial Sequence: Synthetic oligonucleotide
  Antisense Strand to SEQ ID NO: 418585
acauuuacugaguacccau

SEQ ID NO: 418587 - RNA, 19 nt, Artificial Sequence
  Description of Artificial Sequence: Synthetic oligonucleotide
  Sense Strand Starting at position 1272 of SEQ ID NO: 318425
cuguuacuacacugugaua

SEQ ID NO: 418588 - RNA, 19 nt, Artificial Sequence
  Description of Artificial Sequence: Synthetic oligonucleotide
  Antisense Strand to SEQ ID NO: 418587
uaucacaguguaguaacag

SEQ ID NO: 418589 - RNA, 19 nt, Artificial Sequence
  Description of Artificial Sequence: Synthetic oligonucleotide
  Sense Strand Starting at position 1272 of SEQ ID NO: 318427
guuacuacacugugauauu

SEQ ID NO: 418590 - RNA, 19 nt, Artificial Sequence
  Description of Artificial Sequence: Synthetic oligonucleotide
  Antisense Strand to SEQ ID NO: 418589
aauaucacaguguaguaac

SEQ ID NO: 418591 - RNA, 19 nt, Artificial Sequence
  Description of Artificial Sequence: Synthetic oligonucleotide
  Sense Strand Starting at position 1272 of SEQ ID NO: 318480
aaggaaagcuuguccuuua

SEQ ID NO: 418592 - RNA, 19 nt, Artificial Sequence
  Description of Artificial Sequence: Synthetic oligonucleotide
  Antisense Strand to SEQ ID NO: 418591
uaaaggacaagcuuuccuu

SEQ ID NO: 418593 - RNA, 19 nt, Artificial Sequence
  Description of Artificial Sequence: Synthetic oligonucleotide
  Sense Strand Starting at position 1272 of SEQ ID NO: 318481
aggaaagcuuguccuuuau

SEQ ID NO: 418594 - RNA, 19 nt, Artificial Sequence
  Description of Artificial Sequence: Synthetic oligonucleotide
  Antisense Strand to SEQ ID NO: 418593
auaaaggacaagcuuuccu

SEQ ID NO: 418595 - RNA, 19 nt, Artificial Sequence
  Description of Artificial Sequence: Synthetic oligonucleotide
  Sense Strand Starting at position 1272 of SEQ ID NO: 318743
cuggauacccuuugauuag

SEQ ID NO: 418596 - RNA, 19 nt, Artificial Sequence
  Description of Artificial Sequence: Synthetic oligonucleotide
  Antisense Strand to SEQ ID NO: 418595
cuaaucaaaggguauccag

SEQ ID NO: 418597 - RNA, 19 nt, Artificial Sequence
  Description of Artificial Sequence: Synthetic oligonucleotide
  Sense Strand Starting at position 1272 of SEQ ID NO: 318877
acagcuagccgaugaagaa

SEQ ID NO: 418598 - RNA, 19 nt, Artificial Sequence
  Description of Artificial Sequence: Synthetic oligonucleotide
  Antisense Strand to SEQ ID NO: 418597
uucuucaucggcuagcugu

SEQ ID NO: 418599 - RNA, 19 nt, Artificial Sequence
  Description of Artificial Sequence: Synthetic oligonucleotide
  Sense Strand Starting at position 1272 of SEQ ID NO: 318887
gaugaagaagucugcaaag

SEQ ID NO: 418600 - RNA, 19 nt, Artificial Sequence
  Description of Artificial Sequence: Synthetic oligonucleotide
  Antisense Strand to SEQ ID NO: 418599
cuuugcagacuucuucauc

SEQ ID NO: 418601 - RNA, 19 nt, Artificial Sequence
  Description of Artificial Sequence: Synthetic oligonucleotide
  Sense Strand Starting at position 1272 of SEQ ID NO: 318889
ugaagaagucugcaaaggu

SEQ ID NO: 418602 - RNA, 19 nt, Artificial Sequence
  Description of Artificial Sequence: Synthetic oligonucleotide
  Antisense Strand to SEQ ID NO: 418601
accuuugcagacuucuuca

SEQ ID NO: 418603 - RNA, 19 nt, Artificial Sequence
  Description of Artificial Sequence: Synthetic oligonucleotide
  Sense Strand Starting at position 1272 of SEQ ID NO: 318991
acuggcuuagauugauuga

SEQ ID NO: 418604 - RNA, 19 nt, Artificial Sequence
  Description of Artificial Sequence: Synthetic oligonucleotide
  Antisense Strand to SEQ ID NO: 418603
ucaaucaaucuaagccagu

SEQ ID NO: 418605 - RNA, 19 nt, Artificial Sequence
  Description of Artificial Sequence: Synthetic oligonucleotide
  Sense Strand Starting at position 1272 of SEQ ID NO: 319029
ugcccuugccaggaaugaa

SEQ ID NO: 418606 - RNA, 19 nt, Artificial Sequence
  Description of Artificial Sequence: Synthetic oligonucleotide
  Antisense Strand to SEQ ID NO: 418605
uucauuccuggcaagggca

SEQ ID NO: 418607 - RNA, 19 nt, Artificial Sequence
  Description of Artificial Sequence: Synthetic oligonucleotide
  Sense Strand Starting at position 1273 of SEQ ID NO: 315277
uccauauaucagugaacag

SEQ ID NO: 418608 - RNA, 19 nt, Artificial Sequence
  Description of Artificial Sequence: Synthetic oligonucleotide
  Antisense Strand to SEQ ID NO: 418607
cuguucacugauauaugga

SEQ ID NO: 418609 - RNA, 19 nt, Artificial Sequence
  Description of Artificial Sequence: Synthetic oligonucleotide
  Sense Strand Starting at position 1273 of SEQ ID NO: 315291
aacagcuuuggguaucaaa

SEQ ID NO: 418610 - RNA, 19 nt, Artificial Sequence
  Description of Artificial Sequence: Synthetic oligonucleotide
  Antisense Strand to SEQ ID NO: 418609
uuugauacccaaagcuguu

SEQ ID NO: 418611 - RNA, 19 nt, Artificial Sequence
  Description of Artificial Sequence: Synthetic oligonucleotide
  Sense Strand Starting at position 1273 of SEQ ID NO: 315339
aagucaauggugcaaauca

SEQ ID NO: 418612 - RNA, 19 nt, Artificial Sequence
  Description of Artificial Sequence: Synthetic oligonucleotide
  Antisense Strand to SEQ ID NO: 418611
ugauuugcaccauugacuu

SEQ ID NO: 418613 - RNA, 19 nt, Artificial Sequence
  Description of Artificial Sequence: Synthetic oligonucleotide
  Sense Strand Starting at position 1273 of SEQ ID NO: 315408
uuacaaugucaagggauca

SEQ ID NO: 418614 - RNA, 19 nt, Artificial Sequence
  Description of Artificial Sequence: Synthetic oligonucleotide
  Antisense Strand to SEQ ID NO: 418613
ugaucccuugacauuguaa

SEQ ID NO: 418615 - RNA, 19 nt, Artificial Sequence
  Description of Artificial Sequence: Synthetic oligonucleotide
  Sense Strand Starting at position 1273 of SEQ ID NO: 315547
gucaaauaguuuccacuua

SEQ ID NO: 418616 - RNA, 19 nt, Artificial Sequence
  Description of Artificial Sequence: Synthetic oligonucleotide
  Antisense Strand to SEQ ID NO: 418615
uaaguggaaacuauuugac

SEQ ID NO: 418617 - RNA, 19 nt, Artificial Sequence
  Description of Artificial Sequence: Synthetic oligonucleotide
  Sense Strand Starting at position 1273 of SEQ ID NO: 315555
guuuccacuuauucugauu

SEQ ID NO: 418618 - RNA, 19 nt, Artificial Sequence
  Description of Artificial Sequence: Synthetic oligonucleotide
  Antisense Strand to SEQ ID NO: 418617
aaucagaauaaguggaaac

SEQ ID NO: 418619 - RNA, 19 nt, Artificial Sequence
  Description of Artificial Sequence: Synthetic oligonucleotide
  Sense Strand Starting at position 1273 of SEQ ID NO: 315567
ucugauuagagaugucagu

SEQ ID NO: 418620 - RNA, 19 nt, Artificial Sequence
  Description of Artificial Sequence: Synthetic oligonucleotide
  Antisense Strand to SEQ ID NO: 418619
acugacaucucuaaucaga

SEQ ID NO: 418621 - RNA, 19 nt, Artificial Sequence
  Description of Artificial Sequence: Synthetic oligonucleotide
  Sense Strand Starting at position 1273 of SEQ ID NO: 315721
uguuaugcucuuuaaagga

SEQ ID NO: 418622 - RNA, 19 nt, Artificial Sequence
  Description of Artificial Sequence: Synthetic oligonucleotide
  Antisense Strand to SEQ ID NO: 418621
uccuuuaaagagcauaaca

SEQ ID NO: 418623 - RNA, 19 nt, Artificial Sequence
  Description of Artificial Sequence: Synthetic oligonucleotide
  Sense Strand Starting at position 1273 of SEQ ID NO: 316214
ggcaguuacgaagagagua

SEQ ID NO: 418624 - RNA, 19 nt, Artificial Sequence
  Description of Artificial Sequence: Synthetic oligonucleotide
  Antisense Strand to SEQ ID NO: 418623
uacucucuucguaacugcc

SEQ ID NO: 418625 - RNA, 19 nt, Artificial Sequence
  Description of Artificial Sequence: Synthetic oligonucleotide
  Sense Strand Starting at position 1273 of SEQ ID NO: 316222
cgaagagaguaguuagauu

SEQ ID NO: 418626 - RNA, 19 nt, Artificial Sequence
  Description of Artificial Sequence: Synthetic oligonucleotide
  Antisense Strand to SEQ ID NO: 418625
aaucuaacuacucucuucg

SEQ ID NO: 418627 - RNA, 19 nt, Artificial Sequence
  Description of Artificial Sequence: Synthetic oligonucleotide
  Sense Strand Starting at position 1273 of SEQ ID NO: 316293
auuccaucugcugaauuga

SEQ ID NO: 418628 - RNA, 19 nt, Artificial Sequence
  Description of Artificial Sequence: Synthetic oligonucleotide
  Antisense Strand to SEQ ID NO: 418627
ucaauucagcagauggaau

SEQ ID NO: 418629 - RNA, 19 nt, Artificial Sequence
  Description of Artificial Sequence: Synthetic oligonucleotide
  Sense Strand Starting at position 1273 of SEQ ID NO: 316308
uugauaagcuuuguuagga

SEQ ID NO: 418630 - RNA, 19 nt, Artificial Sequence
  Description of Artificial Sequence: Synthetic oligonucleotide
  Antisense Strand to SEQ ID NO: 418629
uccuaacaaagcuuaucaa

SEQ ID NO: 418631 - RNA, 19 nt, Artificial Sequence
  Description of Artificial Sequence: Synthetic oligonucleotide
  Sense Strand Starting at position 1273 of SEQ ID NO: 316309
ugauaagcuuuguuaggaa

SEQ ID NO: 418632 - RNA, 19 nt, Artificial Sequence
  Description of Artificial Sequence: Synthetic oligonucleotide
  Antisense Strand to SEQ ID NO: 418631
uuccuaacaaagcuuauca

SEQ ID NO: 418633 - RNA, 19 nt, Artificial Sequence
  Description of Artificial Sequence: Synthetic oligonucleotide
  Sense Strand Starting at position 1273 of SEQ ID NO: 316353
cuugguaaugucgaauggu

SEQ ID NO: 418634 - RNA, 19 nt, Artificial Sequence
  Description of Artificial Sequence: Synthetic oligonucleotide
  Antisense Strand to SEQ ID NO: 418633
accauucgacauuaccaag

SEQ ID NO: 418635 - RNA, 19 nt, Artificial Sequence
  Description of Artificial Sequence: Synthetic oligonucleotide
  Sense Strand Starting at position 1273 of SEQ ID NO: 316359
aaugucgaaugguuugaga

SEQ ID NO: 418636 - RNA, 19 nt, Artificial Sequence
  Description of Artificial Sequence: Synthetic oligonucleotide
  Antisense Strand to SEQ ID NO: 418635
ucucaaaccauucgacauu

SEQ ID NO: 418637 - RNA, 19 nt, Artificial Sequence
  Description of Artificial Sequence: Synthetic oligonucleotide
  Sense Strand Starting at position 1273 of SEQ ID NO: 316361
ugucgaaugguuugagaug

SEQ ID NO: 418638 - RNA, 19 nt, Artificial Sequence
  Description of Artificial Sequence: Synthetic oligonucleotide
  Antisense Strand to SEQ ID NO: 418637
caucucaaaccauucgaca

SEQ ID NO: 418639 - RNA, 19 nt, Artificial Sequence
  Description of Artificial Sequence: Synthetic oligonucleotide
  Sense Strand Starting at position 1273 of SEQ ID NO: 316491
gguuuaauauuugaucuca

SEQ ID NO: 418640 - RNA, 19 nt, Artificial Sequence
  Description of Artificial Sequence: Synthetic oligonucleotide
  Antisense Strand to SEQ ID NO: 418639
ugagaucaaauauuaaacc

SEQ ID NO: 418641 - RNA, 19 nt, Artificial Sequence
  Description of Artificial Sequence: Synthetic oligonucleotide
  Sense Strand Starting at position 1273 of SEQ ID NO: 316624
ggcugacucacuggagguu

SEQ ID NO: 418642 - RNA, 19 nt, Artificial Sequence
  Description of Artificial Sequence: Synthetic oligonucleotide
  Antisense Strand to SEQ ID NO: 418641
aaccuccagugagucagcc

SEQ ID NO: 418643 - RNA, 19 nt, Artificial Sequence
  Description of Artificial Sequence: Synthetic oligonucleotide
  Sense Strand Starting at position 1273 of SEQ ID NO: 316660
auaucuuccgaucaguacu

SEQ ID NO: 418644 - RNA, 19 nt, Artificial Sequence
  Description of Artificial Sequence: Synthetic oligonucleotide
  Antisense Strand to SEQ ID NO: 418643
aguacugaucggaagauau

SEQ ID NO: 418645 - RNA, 19 nt, Artificial Sequence
  Description of Artificial Sequence: Synthetic oligonucleotide
  Sense Strand Starting at position 1273 of SEQ ID NO: 316662
aucuuccgaucaguacuaa

SEQ ID NO: 418646 - RNA, 19 nt, Artificial Sequence
  Description of Artificial Sequence: Synthetic oligonucleotide
  Antisense Strand to SEQ ID NO: 418645
uuaguacugaucggaagau

SEQ ID NO: 418647 - RNA, 19 nt, Artificial Sequence
  Description of Artificial Sequence: Synthetic oligonucleotide
  Sense Strand Starting at position 1273 of SEQ ID NO: 316825
gcagguuaccuguagggau

SEQ ID NO: 418648 - RNA, 19 nt, Artificial Sequence
  Description of Artificial Sequence: Synthetic oligonucleotide
  Antisense Strand to SEQ ID NO: 418647
aucccuacagguaaccugc

SEQ ID NO: 418649 - RNA, 19 nt, Artificial Sequence
  Description of Artificial Sequence: Synthetic oligonucleotide
  Sense Strand Starting at position 1273 of SEQ ID NO: 317295
gugauaaguguccagggca

SEQ ID NO: 418650 - RNA, 19 nt, Artificial Sequence
  Description of Artificial Sequence: Synthetic oligonucleotide
  Antisense Strand to SEQ ID NO: 418649
ugcccuggacacuuaucac

SEQ ID NO: 418651 - RNA, 19 nt, Artificial Sequence
  Description of Artificial Sequence: Synthetic oligonucleotide
  Sense Strand Starting at position 1273 of SEQ ID NO: 317321
agcgauguugccuugcuaa

SEQ ID NO: 418652 - RNA, 19 nt, Artificial Sequence
  Description of Artificial Sequence: Synthetic oligonucleotide
  Antisense Strand to SEQ ID NO: 418651
uuagcaaggcaacaucgcu

SEQ ID NO: 418653 - RNA, 19 nt, Artificial Sequence
  Description of Artificial Sequence: Synthetic oligonucleotide
  Sense Strand Starting at position 1273 of SEQ ID NO: 317333
uugcuaaccggguaucuaa

SEQ ID NO: 418654 - RNA, 19 nt, Artificial Sequence
  Description of Artificial Sequence: Synthetic oligonucleotide
  Antisense Strand to SEQ ID NO: 418653
uuagauacccgguuagcaa

SEQ ID NO: 418655 - RNA, 19 nt, Artificial Sequence
  Description of Artificial Sequence: Synthetic oligonucleotide
  Sense Strand Starting at position 1273 of SEQ ID NO: 317533
ugacgcugacuggagaauu

SEQ ID NO: 418656 - RNA, 19 nt, Artificial Sequence
  Description of Artificial Sequence: Synthetic oligonucleotide
  Antisense Strand to SEQ ID NO: 418655
aauucuccagucagcguca

SEQ ID NO: 418657 - RNA, 19 nt, Artificial Sequence
  Description of Artificial Sequence: Synthetic oligonucleotide
  Sense Strand Starting at position 1273 of SEQ ID NO: 317580
ggcacuugacuagagcuaa

SEQ ID NO: 418658 - RNA, 19 nt, Artificial Sequence
  Description of Artificial Sequence: Synthetic oligonucleotide
  Antisense Strand to SEQ ID NO: 418657
uuagcucuagucaagugcc

SEQ ID NO: 418659 - RNA, 19 nt, Artificial Sequence
  Description of Artificial Sequence: Synthetic oligonucleotide
  Sense Strand Starting at position 1273 of SEQ ID NO: 317804
guccgauuuggccgaagug

SEQ ID NO: 418660 - RNA, 19 nt, Artificial Sequence
  Description of Artificial Sequence: Synthetic oligonucleotide
  Antisense Strand to SEQ ID NO: 418659
cacuucggccaaaucggac

SEQ ID NO: 418661 - RNA, 19 nt, Artificial Sequence
  Description of Artificial Sequence: Synthetic oligonucleotide
  Sense Strand Starting at position 1273 of SEQ ID NO: 318212
ggcaauuaaggcuacaaau

SEQ ID NO: 418662 - RNA, 19 nt, Artificial Sequence
  Description of Artificial Sequence: Synthetic oligonucleotide
  Antisense Strand to SEQ ID NO: 418661
auuuguagccuuaauugcc

SEQ ID NO: 418663 - RNA, 19 nt, Artificial Sequence
  Description of Artificial Sequence: Synthetic oligonucleotide
  Sense Strand Starting at position 1273 of SEQ ID NO: 318235
agaaauagaugccuucuuu

SEQ ID NO: 418664 - RNA, 19 nt, Artificial Sequence
  Description of Artificial Sequence: Synthetic oligonucleotide
  Antisense Strand to SEQ ID NO: 418663
aaagaaggcaucuauuucu

SEQ ID NO: 418665 - RNA, 19 nt, Artificial Sequence
  Description of Artificial Sequence: Synthetic oligonucleotide
  Sense Strand Starting at position 1273 of SEQ ID NO: 318256
ugauacagccauuagaucu

SEQ ID NO: 418666 - RNA, 19 nt, Artificial Sequence
  Description of Artificial Sequence: Synthetic oligonucleotide
  Antisense Strand to SEQ ID NO: 418665
agaucuaauggcuguauca

SEQ ID NO: 418667 - RNA, 19 nt, Artificial Sequence
  Description of Artificial Sequence: Synthetic oligonucleotide
  Sense Strand Starting at position 1273 of SEQ ID NO: 318310
ccguauuccgggaggcuga

SEQ ID NO: 418668 - RNA, 19 nt, Artificial Sequence
  Description of Artificial Sequence: Synthetic oligonucleotide
  Antisense Strand to SEQ ID NO: 418667
ucagccucccggaauacgg

SEQ ID NO: 418669 - RNA, 19 nt, Artificial Sequence
  Description of Artificial Sequence: Synthetic oligonucleotide
  Sense Strand Starting at position 1273 of SEQ ID NO: 318317
ccgggaggcugaguuaaug

SEQ ID NO: 418670 - RNA, 19 nt, Artificial Sequence
  Description of Artificial Sequence: Synthetic oligonucleotide
  Antisense Strand to SEQ ID NO: 418669
cauuaacucagccucccgg

SEQ ID NO: 418671 - RNA, 19 nt, Artificial Sequence
  Description of Artificial Sequence: Synthetic oligonucleotide
  Sense Strand Starting at position 1273 of SEQ ID NO: 318423
agguaauggaacugaguga

SEQ ID NO: 418672 - RNA, 19 nt, Artificial Sequence
  Description of Artificial Sequence: Synthetic oligonucleotide
  Antisense Strand to SEQ ID NO: 418671
ucacucaguuccauuaccu

SEQ ID NO: 418673 - RNA, 19 nt, Artificial Sequence
  Description of Artificial Sequence: Synthetic oligonucleotide
  Sense Strand Starting at position 1273 of SEQ ID NO: 318639
agaacuaguuuccuaaguu

SEQ ID NO: 418674 - RNA, 19 nt, Artificial Sequence
  Description of Artificial Sequence: Synthetic oligonucleotide
  Antisense Strand to SEQ ID NO: 418673
aacuuaggaaacuaguucu

SEQ ID NO: 418675 - RNA, 19 nt, Artificial Sequence
  Description of Artificial Sequence: Synthetic oligonucleotide
  Sense Strand Starting at position 1273 of SEQ ID NO: 318698
accguaauauaggugaaag

SEQ ID NO: 418676 - RNA, 19 nt, Artificial Sequence
  Description of Artificial Sequence: Synthetic oligonucleotide
  Antisense Strand to SEQ ID NO: 418675
cuuucaccuauauuacggu

SEQ ID NO: 418677 - RNA, 19 nt, Artificial Sequence
  Description of Artificial Sequence: Synthetic oligonucleotide
  Sense Strand Starting at position 1273 of SEQ ID NO: 318699
ccguaauauaggugaaagg

SEQ ID NO: 418678 - RNA, 19 nt, Artificial Sequence
  Description of Artificial Sequence: Synthetic oligonucleotide
  Antisense Strand to SEQ ID NO: 418677
ccuuucaccuauauuacgg

SEQ ID NO: 418679 - RNA, 19 nt, Artificial Sequence
  Description of Artificial Sequence: Synthetic oligonucleotide
  Sense Strand Starting at position 1273 of SEQ ID NO: 318738
uagugugcuagugguauuu

SEQ ID NO: 418680 - RNA, 19 nt, Artificial Sequence
  Description of Artificial Sequence: Synthetic oligonucleotide
  Antisense Strand to SEQ ID NO: 418679
aaauaccacuagcacacua

SEQ ID NO: 418681 - RNA, 19 nt, Artificial Sequence
  Description of Artificial Sequence: Synthetic oligonucleotide
  Sense Strand Starting at position 1273 of SEQ ID NO: 318926
gcuagaagccuuguguugu

SEQ ID NO: 418682 - RNA, 19 nt, Artificial Sequence
  Description of Artificial Sequence: Synthetic oligonucleotide
  Antisense Strand to SEQ ID NO: 418681
acaacacaaggcuucuagc

SEQ ID NO: 418683 - RNA, 19 nt, Artificial Sequence
  Description of Artificial Sequence: Synthetic oligonucleotide
  Sense Strand Starting at position 1273 of SEQ ID NO: 319066
guaggaguguugaagaggu

SEQ ID NO: 418684 - RNA, 19 nt, Artificial Sequence
  Description of Artificial Sequence: Synthetic oligonucleotide
  Antisense Strand to SEQ ID NO: 418683
accucuucaacacuccuac

SEQ ID NO: 418685 - RNA, 19 nt, Artificial Sequence
  Description of Artificial Sequence: Synthetic oligonucleotide
  Sense Strand Starting at position 1273 of SEQ ID NO: 319192
agaaauguuguauaagcuu

SEQ ID NO: 418686 - RNA, 19 nt, Artificial Sequence
  Description of Artificial Sequence: Synthetic oligonucleotide
  Antisense Strand to SEQ ID NO: 418685
aagcuuauacaacauuucu

SEQ ID NO: 418687 - RNA, 19 nt, Artificial Sequence
  Description of Artificial Sequence: Synthetic oligonucleotide
  Sense Strand Starting at position 1274 of SEQ ID NO: 315462
ggaugaauaaauugcagua

SEQ ID NO: 418688 - RNA, 19 nt, Artificial Sequence
  Description of Artificial Sequence: Synthetic oligonucleotide
  Antisense Strand to SEQ ID NO: 418687
uacugcaauuuauucaucc

SEQ ID NO: 418689 - RNA, 19 nt, Artificial Sequence
  Description of Artificial Sequence: Synthetic oligonucleotide
  Sense Strand Starting at position 1274 of SEQ ID NO: 315896
uguaucaaccacugaggau

SEQ ID NO: 418690 - RNA, 19 nt, Artificial Sequence
  Description of Artificial Sequence: Synthetic oligonucleotide
  Antisense Strand to SEQ ID NO: 418689
auccucagugguugauaca

SEQ ID NO: 418691 - RNA, 19 nt, Artificial Sequence
  Description of Artificial Sequence: Synthetic oligonucleotide
  Sense Strand Starting at position 1274 of SEQ ID NO: 315978
gcuucugaacuuuacaaug

SEQ ID NO: 418692 - RNA, 19 nt, Artificial Sequence
  Description of Artificial Sequence: Synthetic oligonucleotide
  Antisense Strand to SEQ ID NO: 418691
cauuguaaaguucagaagc

SEQ ID NO: 418693 - RNA, 19 nt, Artificial Sequence
  Description of Artificial Sequence: Synthetic oligonucleotide
  Sense Strand Starting at position 1274 of SEQ ID NO: 315998
agaaguugauauguaacau

SEQ ID NO: 418694 - RNA, 19 nt, Artificial Sequence
  Description of Artificial Sequence: Synthetic oligonucleotide
  Antisense Strand to SEQ ID NO: 418693
auguuacauaucaacuucu

SEQ ID NO: 418695 - RNA, 19 nt, Artificial Sequence
  Description of Artificial Sequence: Synthetic oligonucleotide
  Sense Strand Starting at position 1274 of SEQ ID NO: 316464
gggagauaucaguggcaua

SEQ ID NO: 418696 - RNA, 19 nt, Artificial Sequence
  Description of Artificial Sequence: Synthetic oligonucleotide
  Antisense Strand to SEQ ID NO: 418695
uaugccacugauaucuccc

SEQ ID NO: 418697 - RNA, 19 nt, Artificial Sequence
  Description of Artificial Sequence: Synthetic oligonucleotide
  Sense Strand Starting at position 1274 of SEQ ID NO: 316465
ggagauaucaguggcauag

SEQ ID NO: 418698 - RNA, 19 nt, Artificial Sequence
  Description of Artificial Sequence: Synthetic oligonucleotide
  Antisense Strand to SEQ ID NO: 418697
cuaugccacugauaucucc

SEQ ID NO: 418699 - RNA, 19 nt, Artificial Sequence
  Description of Artificial Sequence: Synthetic oligonucleotide
  Sense Strand Starting at position 1274 of SEQ ID NO: 316492
gggaguguagaauggguaa

SEQ ID NO: 418700 - RNA, 19 nt, Artificial Sequence
  Description of Artificial Sequence: Synthetic oligonucleotide
  Antisense Strand to SEQ ID NO: 418699
uuacccauucuacacuccc

SEQ ID NO: 418701 - RNA, 19 nt, Artificial Sequence
  Description of Artificial Sequence: Synthetic oligonucleotide
  Sense Strand Starting at position 1274 of SEQ ID NO: 316494
gaguguagaauggguaaga

SEQ ID NO: 418702 - RNA, 19 nt, Artificial Sequence
  Description of Artificial Sequence: Synthetic oligonucleotide
  Antisense Strand to SEQ ID NO: 418701
ucuuacccauucuacacuc

SEQ ID NO: 418703 - RNA, 19 nt, Artificial Sequence
  Description of Artificial Sequence: Synthetic oligonucleotide
  Sense Strand Starting at position 1274 of SEQ ID NO: 316495
aguguagaauggguaagaa

SEQ ID NO: 418704 - RNA, 19 nt, Artificial Sequence
  Description of Artificial Sequence: Synthetic oligonucleotide
  Antisense Strand to SEQ ID NO: 418703
uucuuacccauucuacacu

SEQ ID NO: 418705 - RNA, 19 nt, Artificial Sequence
  Description of Artificial Sequence: Synthetic oligonucleotide
  Sense Strand Starting at position 1274 of SEQ ID NO: 316507
guaagaaguggucauagug

SEQ ID NO: 418706 - RNA, 19 nt, Artificial Sequence
  Description of Artificial Sequence: Synthetic oligonucleotide
  Antisense Strand to SEQ ID NO: 418705
cacuaugaccacuucuuac

SEQ ID NO: 418707 - RNA, 19 nt, Artificial Sequence
  Description of Artificial Sequence: Synthetic oligonucleotide
  Sense Strand Starting at position 1274 of SEQ ID NO: 316838
ccaauuaaaugcuuaggaa

SEQ ID NO: 418708 - RNA, 19 nt, Artificial Sequence
  Description of Artificial Sequence: Synthetic oligonucleotide
  Antisense Strand to SEQ ID NO: 418707
uuccuaagcauuuaauugg

SEQ ID NO: 418709 - RNA, 19 nt, Artificial Sequence
  Description of Artificial Sequence: Synthetic oligonucleotide
  Sense Strand Starting at position 1274 of SEQ ID NO: 317263
cugaguggucagugauuuc

SEQ ID NO: 418710 - RNA, 19 nt, Artificial Sequence
  Description of Artificial Sequence: Synthetic oligonucleotide
  Antisense Strand to SEQ ID NO: 418709
gaaaucacugaccacucag

SEQ ID NO: 418711 - RNA, 19 nt, Artificial Sequence
  Description of Artificial Sequence: Synthetic oligonucleotide
  Sense Strand Starting at position 1274 of SEQ ID NO: 317320
ugagacauuuaugaucaua

SEQ ID NO: 418712 - RNA, 19 nt, Artificial Sequence
  Description of Artificial Sequence: Synthetic oligonucleotide
  Antisense Strand to SEQ ID NO: 418711
uaugaucauaaaugucuca

SEQ ID NO: 418713 - RNA, 19 nt, Artificial Sequence
  Description of Artificial Sequence: Synthetic oligonucleotide
  Sense Strand Starting at position 1274 of SEQ ID NO: 317488
aggguuuacuaacugauua

SEQ ID NO: 418714 - RNA, 19 nt, Artificial Sequence
  Description of Artificial Sequence: Synthetic oligonucleotide
  Antisense Strand to SEQ ID NO: 418713
uaaucaguuaguaaacccu

SEQ ID NO: 418715 - RNA, 19 nt, Artificial Sequence
  Description of Artificial Sequence: Synthetic oligonucleotide
  Sense Strand Starting at position 1274 of SEQ ID NO: 317502
gauuaaaugugggcuagga

SEQ ID NO: 418716 - RNA, 19 nt, Artificial Sequence
  Description of Artificial Sequence: Synthetic oligonucleotide
  Antisense Strand to SEQ ID NO: 418715
uccuagcccacauuuaauc

SEQ ID NO: 418717 - RNA, 19 nt, Artificial Sequence
  Description of Artificial Sequence: Synthetic oligonucleotide
  Sense Strand Starting at position 1274 of SEQ ID NO: 317542
ucauuucugccuugguaac

SEQ ID NO: 418718 - RNA, 19 nt, Artificial Sequence
  Description of Artificial Sequence: Synthetic oligonucleotide
  Antisense Strand to SEQ ID NO: 418717
guuaccaaggcagaaauga

SEQ ID NO: 418719 - RNA, 19 nt, Artificial Sequence
  Description of Artificial Sequence: Synthetic oligonucleotide
  Sense Strand Starting at position 1274 of SEQ ID NO: 317565
agaauaggguuauugugaa

SEQ ID NO: 418720 - RNA, 19 nt, Artificial Sequence
  Description of Artificial Sequence: Synthetic oligonucleotide
  Antisense Strand to SEQ ID NO: 418719
uucacaauaacccuauucu

SEQ ID NO: 418721 - RNA, 19 nt, Artificial Sequence
  Description of Artificial Sequence: Synthetic oligonucleotide
  Sense Strand Starting at position 1274 of SEQ ID NO: 317573
guuauugugaacugaaaug

SEQ ID NO: 418722 - RNA, 19 nt, Artificial Sequence
  Description of Artificial Sequence: Synthetic oligonucleotide
  Antisense Strand to SEQ ID NO: 418721
cauuucaguucacaauaac

SEQ ID NO: 418723 - RNA, 19 nt, Artificial Sequence
  Description of Artificial Sequence: Synthetic oligonucleotide
  Sense Strand Starting at position 1274 of SEQ ID NO: 317582
aacugaaauguaggugacu

SEQ ID NO: 418724 - RNA, 19 nt, Artificial Sequence
  Description of Artificial Sequence: Synthetic oligonucleotide
  Antisense Strand to SEQ ID NO: 418723
agucaccuacauuucaguu

SEQ ID NO: 418725 - RNA, 19 nt, Artificial Sequence
  Description of Artificial Sequence: Synthetic oligonucleotide
  Sense Strand Starting at position 1274 of SEQ ID NO: 317583
acugaaauguaggugacua

SEQ ID NO: 418726 - RNA, 19 nt, Artificial Sequence
  Description of Artificial Sequence: Synthetic oligonucleotide
  Antisense Strand to SEQ ID NO: 418725
uagucaccuacauuucagu

SEQ ID NO: 418727 - RNA, 19 nt, Artificial Sequence
  Description of Artificial Sequence: Synthetic oligonucleotide
  Sense Strand Starting at position 1274 of SEQ ID NO: 317587
aaauguaggugacuauaga

SEQ ID NO: 418728 - RNA, 19 nt, Artificial Sequence
  Description of Artificial Sequence: Synthetic oligonucleotide
  Antisense Strand to SEQ ID NO: 418727
ucuauagucaccuacauuu

SEQ ID NO: 418729 - RNA, 19 nt, Artificial Sequence
  Description of Artificial Sequence: Synthetic oligonucleotide
  Sense Strand Starting at position 1274 of SEQ ID NO: 317996
cuugauugaaauggguuua

SEQ ID NO: 418730 - RNA, 19 nt, Artificial Sequence
  Description of Artificial Sequence: Synthetic oligonucleotide
  Antisense Strand to SEQ ID NO: 418729
uaaacccauuucaaucaag

SEQ ID NO: 418731 - RNA, 19 nt, Artificial Sequence
  Description of Artificial Sequence: Synthetic oligonucleotide
  Sense Strand Starting at position 1274 of SEQ ID NO: 317997
uugauugaaauggguuuaa

SEQ ID NO: 418732 - RNA, 19 nt, Artificial Sequence
  Description of Artificial Sequence: Synthetic oligonucleotide
  Antisense Strand to SEQ ID NO: 418731
uuaaacccauuucaaucaa

SEQ ID NO: 418733 - RNA, 19 nt, Artificial Sequence
  Description of Artificial Sequence: Synthetic oligonucleotide
  Sense Strand Starting at position 1274 of SEQ ID NO: 318139
ugcugaugacaguaaucua

SEQ ID NO: 418734 - RNA, 19 nt, Artificial Sequence
  Description of Artificial Sequence: Synthetic oligonucleotide
  Antisense Strand to SEQ ID NO: 418733
uagauuacugucaucagca

SEQ ID NO: 418735 - RNA, 19 nt, Artificial Sequence
  Description of Artificial Sequence: Synthetic oligonucleotide
  Sense Strand Starting at position 1274 of SEQ ID NO: 318286
gacagaauauauguguaca

SEQ ID NO: 418736 - RNA, 19 nt, Artificial Sequence
  Description of Artificial Sequence: Synthetic oligonucleotide
  Antisense Strand to SEQ ID NO: 418735
uguacacauauauucuguc

SEQ ID NO: 418737 - RNA, 19 nt, Artificial Sequence
  Description of Artificial Sequence: Synthetic oligonucleotide
  Sense Strand Starting at position 1274 of SEQ ID NO: 318288
cagaauauauguguacaga

SEQ ID NO: 418738 - RNA, 19 nt, Artificial Sequence
  Description of Artificial Sequence: Synthetic oligonucleotide
  Antisense Strand to SEQ ID NO: 418737
ucuguacacauauauucug

SEQ ID NO: 418739 - RNA, 19 nt, Artificial Sequence
  Description of Artificial Sequence: Synthetic oligonucleotide
  Sense Strand Starting at position 1274 of SEQ ID NO: 318296
auguguacagauuauugua

SEQ ID NO: 418740 - RNA, 19 nt, Artificial Sequence
  Description of Artificial Sequence: Synthetic oligonucleotide
  Antisense Strand to SEQ ID NO: 418739
uacaauaaucuguacacau

SEQ ID NO: 418741 - RNA, 19 nt, Artificial Sequence
  Description of Artificial Sequence: Synthetic oligonucleotide
  Sense Strand Starting at position 1274 of SEQ ID NO: 318364
ccuauuugcucguugaaau

SEQ ID NO: 418742 - RNA, 19 nt, Artificial Sequence
  Description of Artificial Sequence: Synthetic oligonucleotide
  Antisense Strand to SEQ ID NO: 418741
auuucaacgagcaaauagg

SEQ ID NO: 418743 - RNA, 19 nt, Artificial Sequence
  Description of Artificial Sequence: Synthetic oligonucleotide
  Sense Strand Starting at position 1274 of SEQ ID NO: 318365
cuauuugcucguugaaaua

SEQ ID NO: 418744 - RNA, 19 nt, Artificial Sequence
  Description of Artificial Sequence: Synthetic oligonucleotide
  Antisense Strand to SEQ ID NO: 418743
uauuucaacgagcaaauag

SEQ ID NO: 418745 - RNA, 19 nt, Artificial Sequence
  Description of Artificial Sequence: Synthetic oligonucleotide
  Sense Strand Starting at position 1274 of SEQ ID NO: 318392
gguaauuaauuagcugaga

SEQ ID NO: 418746 - RNA, 19 nt, Artificial Sequence
  Description of Artificial Sequence: Synthetic oligonucleotide
  Antisense Strand to SEQ ID NO: 418745
ucucagcuaauuaauuacc

SEQ ID NO: 418747 - RNA, 19 nt, Artificial Sequence
  Description of Artificial Sequence: Synthetic oligonucleotide
  Sense Strand Starting at position 1274 of SEQ ID NO: 318393
guaauuaauuagcugagaa

SEQ ID NO: 418748 - RNA, 19 nt, Artificial Sequence
  Description of Artificial Sequence: Synthetic oligonucleotide
  Antisense Strand to SEQ ID NO: 418747
uucucagcuaauuaauuac

SEQ ID NO: 418749 - RNA, 19 nt, Artificial Sequence
  Description of Artificial Sequence: Synthetic oligonucleotide
  Sense Strand Starting at position 1274 of SEQ ID NO: 318418
uggagaagaaaguguuuga

SEQ ID NO: 418750 - RNA, 19 nt, Artificial Sequence
  Description of Artificial Sequence: Synthetic oligonucleotide
  Antisense Strand to SEQ ID NO: 418749
ucaaacacuuucuucucca

SEQ ID NO: 418751 - RNA, 19 nt, Artificial Sequence
  Description of Artificial Sequence: Synthetic oligonucleotide
  Sense Strand Starting at position 1274 of SEQ ID NO: 318421
agaagaaaguguuugaggu

SEQ ID NO: 418752 - RNA, 19 nt, Artificial Sequence
  Description of Artificial Sequence: Synthetic oligonucleotide
  Antisense Strand to SEQ ID NO: 418751
accucaaacacuuucuucu

SEQ ID NO: 418753 - RNA, 19 nt, Artificial Sequence
  Description of Artificial Sequence: Synthetic oligonucleotide
  Sense Strand Starting at position 1274 of SEQ ID NO: 318499
gaaauaugauugccagaug

SEQ ID NO: 418754 - RNA, 19 nt, Artificial Sequence
  Description of Artificial Sequence: Synthetic oligonucleotide
  Antisense Strand to SEQ ID NO: 418753
caucuggcaaucauauuuc

SEQ ID NO: 418755 - RNA, 19 nt, Artificial Sequence
  Description of Artificial Sequence: Synthetic oligonucleotide
  Sense Strand Starting at position 1274 of SEQ ID NO: 318895
aagggacuuugucuuagau

SEQ ID NO: 418756 - RNA, 19 nt, Artificial Sequence
  Description of Artificial Sequence: Synthetic oligonucleotide
  Antisense Strand to SEQ ID NO: 418755
aucuaagacaaagucccuu

SEQ ID NO: 418757 - RNA, 19 nt, Artificial Sequence
  Description of Artificial Sequence: Synthetic oligonucleotide
  Sense Strand Starting at position 1274 of SEQ ID NO: 319021
augaucuguuuauugggaa

SEQ ID NO: 418758 - RNA, 19 nt, Artificial Sequence
  Description of Artificial Sequence: Synthetic oligonucleotide
  Antisense Strand to SEQ ID NO: 418757
uucccaauaaacagaucau

SEQ ID NO: 418759 - RNA, 19 nt, Artificial Sequence
  Description of Artificial Sequence: Synthetic oligonucleotide
  Sense Strand Starting at position 1274 of SEQ ID NO: 319125
uuaacauggaugggaguuu

SEQ ID NO: 418760 - RNA, 19 nt, Artificial Sequence
  Description of Artificial Sequence: Synthetic oligonucleotide
  Antisense Strand to SEQ ID NO: 418759
aaacucccauccauguuaa

SEQ ID NO: 418761 - RNA, 19 nt, Artificial Sequence
  Description of Artificial Sequence: Synthetic oligonucleotide
  Sense Strand Starting at position 1274 of SEQ ID NO: 319175
gcaagugaaguauacugaa

SEQ ID NO: 418762 - RNA, 19 nt, Artificial Sequence
  Description of Artificial Sequence: Synthetic oligonucleotide
  Antisense Strand to SEQ ID NO: 418761
uucaguauacuucacuugc

SEQ ID NO: 418763 - RNA, 19 nt, Artificial Sequence
  Description of Artificial Sequence: Synthetic oligonucleotide
  Sense Strand Starting at position 1274 of SEQ ID NO: 319202
caagguagugguuauauga

SEQ ID NO: 418764 - RNA, 19 nt, Artificial Sequence
  Description of Artificial Sequence: Synthetic oligonucleotide
  Antisense Strand to SEQ ID NO: 418763
ucauauaaccacuaccuug

SEQ ID NO: 418765 - RNA, 19 nt, Artificial Sequence
  Description of Artificial Sequence: Synthetic oligonucleotide
  Sense Strand Starting at position 1274 of SEQ ID NO: 319209
gugguuauaugauuugcua

SEQ ID NO: 418766 - RNA, 19 nt, Artificial Sequence
  Description of Artificial Sequence: Synthetic oligonucleotide
  Antisense Strand to SEQ ID NO: 418765
uagcaaaucauauaaccac

SEQ ID NO: 418767 - RNA, 19 nt, Artificial Sequence
  Description of Artificial Sequence: Synthetic oligonucleotide
  Sense Strand Starting at position 1275 of SEQ ID NO: 315314
gggucuaguccagaaugcu

SEQ ID NO: 418768 - RNA, 19 nt, Artificial Sequence
  Description of Artificial Sequence: Synthetic oligonucleotide
  Antisense Strand to SEQ ID NO: 418767
agcauucuggacuagaccc

SEQ ID NO: 418769 - RNA, 19 nt, Artificial Sequence
  Description of Artificial Sequence: Synthetic oligonucleotide
  Sense Strand Starting at position 1275 of SEQ ID NO: 315442
gagagaaaguuguuguguc

SEQ ID NO: 418770 - RNA, 19 nt, Artificial Sequence
  Description of Artificial Sequence: Synthetic oligonucleotide
  Antisense Strand to SEQ ID NO: 418769
gacacaacaacuuucucuc

SEQ ID NO: 418771 - RNA, 19 nt, Artificial Sequence
  Description of Artificial Sequence: Synthetic oligonucleotide
  Sense Strand Starting at position 1275 of SEQ ID NO: 315495
ccagucuagucaguaauga

SEQ ID NO: 418772 - RNA, 19 nt, Artificial Sequence
  Description of Artificial Sequence: Synthetic oligonucleotide
  Antisense Strand to SEQ ID NO: 418771
ucauuacugacuagacugg

SEQ ID NO: 418773 - RNA, 19 nt, Artificial Sequence
  Description of Artificial Sequence: Synthetic oligonucleotide
  Sense Strand Starting at position 1275 of SEQ ID NO: 315496
cagucuagucaguaaugau

SEQ ID NO: 418774 - RNA, 19 nt, Artificial Sequence
  Description of Artificial Sequence: Synthetic oligonucleotide
  Antisense Strand to SEQ ID NO: 418773
aucauuacugacuagacug

SEQ ID NO: 418775 - RNA, 19 nt, Artificial Sequence
  Description of Artificial Sequence: Synthetic oligonucleotide
  Sense Strand Starting at position 1275 of SEQ ID NO: 315506
aguaaugauccuugagccu

SEQ ID NO: 418776 - RNA, 19 nt, Artificial Sequence
  Description of Artificial Sequence: Synthetic oligonucleotide
  Antisense Strand to SEQ ID NO: 418775
aggcucaaggaucauuacu

SEQ ID NO: 418777 - RNA, 19 nt, Artificial Sequence
  Description of Artificial Sequence: Synthetic oligonucleotide
  Sense Strand Starting at position 1275 of SEQ ID NO: 315513
auccuugagccugaguagu

SEQ ID NO: 418778 - RNA, 19 nt, Artificial Sequence
  Description of Artificial Sequence: Synthetic oligonucleotide
  Antisense Strand to SEQ ID NO: 418777
acuacucaggcucaaggau

SEQ ID NO: 418779 - RNA, 19 nt, Artificial Sequence
  Description of Artificial Sequence: Synthetic oligonucleotide
  Sense Strand Starting at position 1275 of SEQ ID NO: 315665
uuggaaugggauuggcuua

SEQ ID NO: 418780 - RNA, 19 nt, Artificial Sequence
  Description of Artificial Sequence: Synthetic oligonucleotide
  Antisense Strand to SEQ ID NO: 418779
uaagccaaucccauuccaa

SEQ ID NO: 418781 - RNA, 19 nt, Artificial Sequence
  Description of Artificial Sequence: Synthetic oligonucleotide
  Sense Strand Starting at position 1275 of SEQ ID NO: 315712
agucguugagcucaaccau

SEQ ID NO: 418782 - RNA, 19 nt, Artificial Sequence
  Description of Artificial Sequence: Synthetic oligonucleotide
  Antisense Strand to SEQ ID NO: 418781
augguugagcucaacgacu

SEQ ID NO: 418783 - RNA, 19 nt, Artificial Sequence
  Description of Artificial Sequence: Synthetic oligonucleotide
  Sense Strand Starting at position 1275 of SEQ ID NO: 315734
cucaauucccgagaaaguc

SEQ ID NO: 418784 - RNA, 19 nt, Artificial Sequence
  Description of Artificial Sequence: Synthetic oligonucleotide
  Antisense Strand to SEQ ID NO: 418783
gacuuucucgggaauugag

SEQ ID NO: 418785 - RNA, 19 nt, Artificial Sequence
  Description of Artificial Sequence: Synthetic oligonucleotide
  Sense Strand Starting at position 1275 of SEQ ID NO: 315743
cgagaaagucaccaagucu

SEQ ID NO: 418786 - RNA, 19 nt, Artificial Sequence
  Description of Artificial Sequence: Synthetic oligonucleotide
  Antisense Strand to SEQ ID NO: 418785
agacuuggugacuuucucg

SEQ ID NO: 418787 - RNA, 19 nt, Artificial Sequence
  Description of Artificial Sequence: Synthetic oligonucleotide
  Sense Strand Starting at position 1275 of SEQ ID NO: 315754
ccaagucuccaucacggaa

SEQ ID NO: 418788 - RNA, 19 nt, Artificial Sequence
  Description of Artificial Sequence: Synthetic oligonucleotide
  Antisense Strand to SEQ ID NO: 418787
uuccgugauggagacuugg

SEQ ID NO: 418789 - RNA, 19 nt, Artificial Sequence
  Description of Artificial Sequence: Synthetic oligonucleotide
  Sense Strand Starting at position 1275 of SEQ ID NO: 315790
cuuuccucagagugagaau

SEQ ID NO: 418790 - RNA, 19 nt, Artificial Sequence
  Description of Artificial Sequence: Synthetic oligonucleotide
  Antisense Strand to SEQ ID NO: 418789
auucucacucugaggaaag

SEQ ID NO: 418791 - RNA, 19 nt, Artificial Sequence
  Description of Artificial Sequence: Synthetic oligonucleotide
  Sense Strand Starting at position 1275 of SEQ ID NO: 315898
ggugaaugccuacagcuca

SEQ ID NO: 418792 - RNA, 19 nt, Artificial Sequence
  Description of Artificial Sequence: Synthetic oligonucleotide
  Antisense Strand to SEQ ID NO: 418791
ugagcuguaggcauucacc

SEQ ID NO: 418793 - RNA, 19 nt, Artificial Sequence
  Description of Artificial Sequence: Synthetic oligonucleotide
  Sense Strand Starting at position 1275 of SEQ ID NO: 316005
agaacaacugccugagaug

SEQ ID NO: 418794 - RNA, 19 nt, Artificial Sequence
  Description of Artificial Sequence: Synthetic oligonucleotide
  Antisense Strand to SEQ ID NO: 418793
caucucaggcaguuguucu

SEQ ID NO: 418795 - RNA, 19 nt, Artificial Sequence
  Description of Artificial Sequence: Synthetic oligonucleotide
  Sense Strand Starting at position 1275 of SEQ ID NO: 316045
uggcuuacagauuguacuu

SEQ ID NO: 418796 - RNA, 19 nt, Artificial Sequence
  Description of Artificial Sequence: Synthetic oligonucleotide
  Antisense Strand to SEQ ID NO: 418795
aaguacaaucuguaagcca

SEQ ID NO: 418797 - RNA, 19 nt, Artificial Sequence
  Description of Artificial Sequence: Synthetic oligonucleotide
  Sense Strand Starting at position 1275 of SEQ ID NO: 316050
uacagauuguacuuaagga

SEQ ID NO: 418798 - RNA, 19 nt, Artificial Sequence
  Description of Artificial Sequence: Synthetic oligonucleotide
  Antisense Strand to SEQ ID NO: 418797
uccuuaaguacaaucugua

SEQ ID NO: 418799 - RNA, 19 nt, Artificial Sequence
  Description of Artificial Sequence: Synthetic oligonucleotide
  Sense Strand Starting at position 1275 of SEQ ID NO: 316134
acuagaauuugagaggguu

SEQ ID NO: 418800 - RNA, 19 nt, Artificial Sequence
  Description of Artificial Sequence: Synthetic oligonucleotide
  Antisense Strand to SEQ ID NO: 418799
aacccucucaaauucuagu

SEQ ID NO: 418801 - RNA, 19 nt, Artificial Sequence
  Description of Artificial Sequence: Synthetic oligonucleotide
  Sense Strand Starting at position 1275 of SEQ ID NO: 316537
acagcagguccucagugau

SEQ ID NO: 418802 - RNA, 19 nt, Artificial Sequence
  Description of Artificial Sequence: Synthetic oligonucleotide
  Antisense Strand to SEQ ID NO: 418801
aucacugaggaccugcugu

SEQ ID NO: 418803 - RNA, 19 nt, Artificial Sequence
  Description of Artificial Sequence: Synthetic oligonucleotide
  Sense Strand Starting at position 1275 of SEQ ID NO: 316642
ccugcucugagaggagaaa

SEQ ID NO: 418804 - RNA, 19 nt, Artificial Sequence
  Description of Artificial Sequence: Synthetic oligonucleotide
  Antisense Strand to SEQ ID NO: 418803
uuucuccucucagagcagg

SEQ ID NO: 418805 - RNA, 19 nt, Artificial Sequence
  Description of Artificial Sequence: Synthetic oligonucleotide
  Sense Strand Starting at position 1275 of SEQ ID NO: 316952
guuguagaucaaggucuga

SEQ ID NO: 418806 - RNA, 19 nt, Artificial Sequence
  Description of Artificial Sequence: Synthetic oligonucleotide
  Antisense Strand to SEQ ID NO: 418805
ucagaccuugaucuacaac

SEQ ID NO: 418807 - RNA, 19 nt, Artificial Sequence
  Description of Artificial Sequence: Synthetic oligonucleotide
  Sense Strand Starting at position 1275 of SEQ ID NO: 317003
ccucacagcugucuugaau

SEQ ID NO: 418808 - RNA, 19 nt, Artificial Sequence
  Description of Artificial Sequence: Synthetic oligonucleotide
  Antisense Strand to SEQ ID NO: 418807
auucaagacagcugugagg

SEQ ID NO: 418809 - RNA, 19 nt, Artificial Sequence
  Description of Artificial Sequence: Synthetic oligonucleotide
  Sense Strand Starting at position 1275 of SEQ ID NO: 317103
gagauagggucuuugugua

SEQ ID NO: 418810 - RNA, 19 nt, Artificial Sequence
  Description of Artificial Sequence: Synthetic oligonucleotide
  Antisense Strand to SEQ ID NO: 418809
uacacaaagacccuaucuc

SEQ ID NO: 418811 - RNA, 19 nt, Artificial Sequence
  Description of Artificial Sequence: Synthetic oligonucleotide
  Sense Strand Starting at position 1275 of SEQ ID NO: 317208
acagcucucuuccuggaga

SEQ ID NO: 418812 - RNA, 19 nt, Artificial Sequence
  Description of Artificial Sequence: Synthetic oligonucleotide
  Antisense Strand to SEQ ID NO: 418811
ucuccaggaagagagcugu

SEQ ID NO: 418813 - RNA, 19 nt, Artificial Sequence
  Description of Artificial Sequence: Synthetic oligonucleotide
  Sense Strand Starting at position 1275 of SEQ ID NO: 317210
agcucucuuccuggagaaa

SEQ ID NO: 418814 - RNA, 19 nt, Artificial Sequence
  Description of Artificial Sequence: Synthetic oligonucleotide
  Antisense Strand to SEQ ID NO: 418813
uuucuccaggaagagagcu

SEQ ID NO: 418815 - RNA, 19 nt, Artificial Sequence
  Description of Artificial Sequence: Synthetic oligonucleotide
  Sense Strand Starting at position 1275 of SEQ ID NO: 317321
ggaugaguuccaggacucu

SEQ ID NO: 418816 - RNA, 19 nt, Artificial Sequence
  Description of Artificial Sequence: Synthetic oligonucleotide
  Antisense Strand to SEQ ID NO: 418815
agaguccuggaacucaucc

SEQ ID NO: 418817 - RNA, 19 nt, Artificial Sequence
  Description of Artificial Sequence: Synthetic oligonucleotide
  Sense Strand Starting at position 1275 of SEQ ID NO: 317345
ggugaucagucucugagug

SEQ ID NO: 418818 - RNA, 19 nt, Artificial Sequence
  Description of Artificial Sequence: Synthetic oligonucleotide
  Antisense Strand to SEQ ID NO: 418817
cacucagagacugaucacc

SEQ ID NO: 418819 - RNA, 19 nt, Artificial Sequence
  Description of Artificial Sequence: Synthetic oligonucleotide
  Sense Strand Starting at position 1275 of SEQ ID NO: 317350
ucagucucugagugucaga

SEQ ID NO: 418820 - RNA, 19 nt, Artificial Sequence
  Description of Artificial Sequence: Synthetic oligonucleotide
  Antisense Strand to SEQ ID NO: 418819
ucugacacucagagacuga

SEQ ID NO: 418821 - RNA, 19 nt, Artificial Sequence
  Description of Artificial Sequence: Synthetic oligonucleotide
  Sense Strand Starting at position 1275 of SEQ ID NO: 317521
gggccaguucucugggaga

SEQ ID NO: 418822 - RNA, 19 nt, Artificial Sequence
  Description of Artificial Sequence: Synthetic oligonucleotide
  Antisense Strand to SEQ ID NO: 418821
ucucccagagaacuggccc

SEQ ID NO: 418823 - RNA, 19 nt, Artificial Sequence
  Description of Artificial Sequence: Synthetic oligonucleotide
  Sense Strand Starting at position 1275 of SEQ ID NO: 317523
gccaguucucugggagaug

SEQ ID NO: 418824 - RNA, 19 nt, Artificial Sequence
  Description of Artificial Sequence: Synthetic oligonucleotide
  Antisense Strand to SEQ ID NO: 418823
caucucccagagaacuggc

SEQ ID NO: 418825 - RNA, 19 nt, Artificial Sequence
  Description of Artificial Sequence: Synthetic oligonucleotide
  Sense Strand Starting at position 1275 of SEQ ID NO: 317542
gaccacuguuugucacgaa

SEQ ID NO: 418826 - RNA, 19 nt, Artificial Sequence
  Description of Artificial Sequence: Synthetic oligonucleotide
  Antisense Strand to SEQ ID NO: 418825
uucgugacaaacagugguc

SEQ ID NO: 418827 - RNA, 19 nt, Artificial Sequence
  Description of Artificial Sequence: Synthetic oligonucleotide
  Sense Strand Starting at position 1275 of SEQ ID NO: 317546
acuguuugucacgaaacua

SEQ ID NO: 418828 - RNA, 19 nt, Artificial Sequence
  Description of Artificial Sequence: Synthetic oligonucleotide
  Antisense Strand to SEQ ID NO: 418827
uaguuucgugacaaacagu

SEQ ID NO: 418829 - RNA, 19 nt, Artificial Sequence
  Description of Artificial Sequence: Synthetic oligonucleotide
  Sense Strand Starting at position 1275 of SEQ ID NO: 317931
ggugcaugccuacauguaa

SEQ ID NO: 418830 - RNA, 19 nt, Artificial Sequence
  Description of Artificial Sequence: Synthetic oligonucleotide
  Antisense Strand to SEQ ID NO: 418829
uuacauguaggcaugcacc

SEQ ID NO: 418831 - RNA, 19 nt, Artificial Sequence
  Description of Artificial Sequence: Synthetic oligonucleotide
  Sense Strand Starting at position 1275 of SEQ ID NO: 318104
gugaccucuuaugucuauu

SEQ ID NO: 418832 - RNA, 19 nt, Artificial Sequence
  Description of Artificial Sequence: Synthetic oligonucleotide
  Antisense Strand to SEQ ID NO: 418831
aauagacauaagaggucac

SEQ ID NO: 418833 - RNA, 19 nt, Artificial Sequence
  Description of Artificial Sequence: Synthetic oligonucleotide
  Sense Strand Starting at position 1275 of SEQ ID NO: 318153
uagaguuuauagccuguau

SEQ ID NO: 418834 - RNA, 19 nt, Artificial Sequence
  Description of Artificial Sequence: Synthetic oligonucleotide
  Antisense Strand to SEQ ID NO: 418833
auacaggcuauaaacucua

SEQ ID NO: 418835 - RNA, 19 nt, Artificial Sequence
  Description of Artificial Sequence: Synthetic oligonucleotide
  Sense Strand Starting at position 1275 of SEQ ID NO: 318155
gaguuuauagccuguauca

SEQ ID NO: 418836 - RNA, 19 nt, Artificial Sequence
  Description of Artificial Sequence: Synthetic oligonucleotide
  Antisense Strand to SEQ ID NO: 418835
ugauacaggcuauaaacuc

SEQ ID NO: 418837 - RNA, 19 nt, Artificial Sequence
  Description of Artificial Sequence: Synthetic oligonucleotide
  Sense Strand Starting at position 1275 of SEQ ID NO: 318157
guuuauagccuguaucaau

SEQ ID NO: 418838 - RNA, 19 nt, Artificial Sequence
  Description of Artificial Sequence: Synthetic oligonucleotide
  Antisense Strand to SEQ ID NO: 418837
auugauacaggcuauaaac

SEQ ID NO: 418839 - RNA, 19 nt, Artificial Sequence
  Description of Artificial Sequence: Synthetic oligonucleotide
  Sense Strand Starting at position 1275 of SEQ ID NO: 318260
cuggguuauuucuaacuuu

SEQ ID NO: 418840 - RNA, 19 nt, Artificial Sequence
  Description of Artificial Sequence: Synthetic oligonucleotide
  Antisense Strand to SEQ ID NO: 418839
aaaguuagaaauaacccag

SEQ ID NO: 418841 - RNA, 19 nt, Artificial Sequence
  Description of Artificial Sequence: Synthetic oligonucleotide
  Sense Strand Starting at position 1275 of SEQ ID NO: 318573
gugucuugggcucaagcaa

SEQ ID NO: 418842 - RNA, 19 nt, Artificial Sequence
  Description of Artificial Sequence: Synthetic oligonucleotide
  Antisense Strand to SEQ ID NO: 418841
uugcuugagcccaagacac

SEQ ID NO: 418843 - RNA, 19 nt, Artificial Sequence
  Description of Artificial Sequence: Synthetic oligonucleotide
  Sense Strand Starting at position 1275 of SEQ ID NO: 318981
cucgaaucucuggacucaa

SEQ ID NO: 418844 - RNA, 19 nt, Artificial Sequence
  Description of Artificial Sequence: Synthetic oligonucleotide
  Antisense Strand to SEQ ID NO: 418843
uugaguccagagauucgag

SEQ ID NO: 418845 - RNA, 19 nt, Artificial Sequence
  Description of Artificial Sequence: Synthetic oligonucleotide
  Sense Strand Starting at position 1275 of SEQ ID NO: 319060
ggcuuuggcuaauuuccua

SEQ ID NO: 418846 - RNA, 19 nt, Artificial Sequence
  Description of Artificial Sequence: Synthetic oligonucleotide
  Antisense Strand to SEQ ID NO: 418845
uaggaaauuagccaaagcc

SEQ ID NO: 418847 - RNA, 19 nt, Artificial Sequence
  Description of Artificial Sequence: Synthetic oligonucleotide
  Sense Strand Starting at position 1276 of SEQ ID NO: 315253
uuguguauagccgcugaau

SEQ ID NO: 418848 - RNA, 19 nt, Artificial Sequence
  Description of Artificial Sequence: Synthetic oligonucleotide
  Antisense Strand to SEQ ID NO: 418847
auucagcggcuauacacaa

SEQ ID NO: 418849 - RNA, 19 nt, Artificial Sequence
  Description of Artificial Sequence: Synthetic oligonucleotide
  Sense Strand Starting at position 1276 of SEQ ID NO: 315266
cugaauacuuugucaguaa

SEQ ID NO: 418850 - RNA, 19 nt, Artificial Sequence
  Description of Artificial Sequence: Synthetic oligonucleotide
  Antisense Strand to SEQ ID NO: 418849
uuacugacaaaguauucag

SEQ ID NO: 418851 - RNA, 19 nt, Artificial Sequence
  Description of Artificial Sequence: Synthetic oligonucleotide
  Sense Strand Starting at position 1276 of SEQ ID NO: 315270
auacuuugucaguaacuuc

SEQ ID NO: 418852 - RNA, 19 nt, Artificial Sequence
  Description of Artificial Sequence: Synthetic oligonucleotide
  Antisense Strand to SEQ ID NO: 418851
gaaguuacugacaaaguau

SEQ ID NO: 418853 - RNA, 19 nt, Artificial Sequence
  Description of Artificial Sequence: Synthetic oligonucleotide
  Sense Strand Starting at position 1276 of SEQ ID NO: 315347
ucuugagaacuagguuaaa

SEQ ID NO: 418854 - RNA, 19 nt, Artificial Sequence
  Description of Artificial Sequence: Synthetic oligonucleotide
  Antisense Strand to SEQ ID NO: 418853
uuuaaccuaguucucaaga

SEQ ID NO: 418855 - RNA, 19 nt, Artificial Sequence
  Description of Artificial Sequence: Synthetic oligonucleotide
  Sense Strand Starting at position 1276 of SEQ ID NO: 315468
cuaguaaagucaucaaguc

SEQ ID NO: 418856 - RNA, 19 nt, Artificial Sequence
  Description of Artificial Sequence: Synthetic oligonucleotide
  Antisense Strand to SEQ ID NO: 418855
gacuugaugacuuuacuag

SEQ ID NO: 418857 - RNA, 19 nt, Artificial Sequence
  Description of Artificial Sequence: Synthetic oligonucleotide
  Sense Strand Starting at position 1276 of SEQ ID NO: 315592
auguauacagucugaauaa

SEQ ID NO: 418858 - RNA, 19 nt, Artificial Sequence
  Description of Artificial Sequence: Synthetic oligonucleotide
  Antisense Strand to SEQ ID NO: 418857
uuauucagacuguauacau

SEQ ID NO: 418859 - RNA, 19 nt, Artificial Sequence
  Description of Artificial Sequence: Synthetic oligonucleotide
  Sense Strand Starting at position 1276 of SEQ ID NO: 315675
gccagaaauuguuuccuga

SEQ ID NO: 418860 - RNA, 19 nt, Artificial Sequence
  Description of Artificial Sequence: Synthetic oligonucleotide
  Antisense Strand to SEQ ID NO: 418859
ucaggaaacaauuucuggc

SEQ ID NO: 418861 - RNA, 19 nt, Artificial Sequence
  Description of Artificial Sequence: Synthetic oligonucleotide
  Sense Strand Starting at position 1276 of SEQ ID NO: 315678
agaaauuguuuccugaauu

SEQ ID NO: 418862 - RNA, 19 nt, Artificial Sequence
  Description of Artificial Sequence: Synthetic oligonucleotide
  Antisense Strand to SEQ ID NO: 418861
aauucaggaaacaauuucu

SEQ ID NO: 418863 - RNA, 19 nt, Artificial Sequence
  Description of Artificial Sequence: Synthetic oligonucleotide
  Sense Strand Starting at position 1276 of SEQ ID NO: 315721
aucuauaugcuauggagua

SEQ ID NO: 418864 - RNA, 19 nt, Artificial Sequence
  Description of Artificial Sequence: Synthetic oligonucleotide
  Antisense Strand to SEQ ID NO: 418863
uacuccauagcauauagau

SEQ ID NO: 418865 - RNA, 19 nt, Artificial Sequence
  Description of Artificial Sequence: Synthetic oligonucleotide
  Sense Strand Starting at position 1276 of SEQ ID NO: 315726
uaugcuauggaguaaguuu

SEQ ID NO: 418866 - RNA, 19 nt, Artificial Sequence
  Description of Artificial Sequence: Synthetic oligonucleotide
  Antisense Strand to SEQ ID NO: 418865
aaacuuacuccauagcaua

SEQ ID NO: 418867 - RNA, 19 nt, Artificial Sequence
  Description of Artificial Sequence: Synthetic oligonucleotide
  Sense Strand Starting at position 1276 of SEQ ID NO: 315750
uccaguguuuaacucuaau

SEQ ID NO: 418868 - RNA, 19 nt, Artificial Sequence
  Description of Artificial Sequence: Synthetic oligonucleotide
  Antisense Strand to SEQ ID NO: 418867
auuagaguuaaacacugga

SEQ ID NO: 418869 - RNA, 19 nt, Artificial Sequence
  Description of Artificial Sequence: Synthetic oligonucleotide
  Sense Strand Starting at position 1276 of SEQ ID NO: 315753
aguguuuaacucuaauguu

SEQ ID NO: 418870 - RNA, 19 nt, Artificial Sequence
  Description of Artificial Sequence: Synthetic oligonucleotide
  Antisense Strand to SEQ ID NO: 418869
aacauuagaguuaaacacu

SEQ ID NO: 418871 - RNA, 19 nt, Artificial Sequence
  Description of Artificial Sequence: Synthetic oligonucleotide
  Sense Strand Starting at position 1276 of SEQ ID NO: 315769
guucucuuagcuuagcaga

SEQ ID NO: 418872 - RNA, 19 nt, Artificial Sequence
  Description of Artificial Sequence: Synthetic oligonucleotide
  Antisense Strand to SEQ ID NO: 418871
ucugcuaagcuaagagaac

SEQ ID NO: 418873 - RNA, 19 nt, Artificial Sequence
  Description of Artificial Sequence: Synthetic oligonucleotide
  Sense Strand Starting at position 1276 of SEQ ID NO: 315771
ucucuuagcuuagcagaga

SEQ ID NO: 418874 - RNA, 19 nt, Artificial Sequence
  Description of Artificial Sequence: Synthetic oligonucleotide
  Antisense Strand to SEQ ID NO: 418873
ucucugcuaagcuaagaga

SEQ ID NO: 418875 - RNA, 19 nt, Artificial Sequence
  Description of Artificial Sequence: Synthetic oligonucleotide
  Sense Strand Starting at position 1276 of SEQ ID NO: 315779
cuuagcagagauugaauaa

SEQ ID NO: 418876 - RNA, 19 nt, Artificial Sequence
  Description of Artificial Sequence: Synthetic oligonucleotide
  Antisense Strand to SEQ ID NO: 418875
uuauucaaucucugcuaag

SEQ ID NO: 418877 - RNA, 19 nt, Artificial Sequence
  Description of Artificial Sequence: Synthetic oligonucleotide
  Sense Strand Starting at position 1276 of SEQ ID NO: 315786
gagauugaauaagagauua

SEQ ID NO: 418878 - RNA, 19 nt, Artificial Sequence
  Description of Artificial Sequence: Synthetic oligonucleotide
  Antisense Strand to SEQ ID NO: 418877
uaaucucuuauucaaucuc

SEQ ID NO: 418879 - RNA, 19 nt, Artificial Sequence
  Description of Artificial Sequence: Synthetic oligonucleotide
  Sense Strand Starting at position 1276 of SEQ ID NO: 315991
uugucagaggcucaucaaa

SEQ ID NO: 418880 - RNA, 19 nt, Artificial Sequence
  Description of Artificial Sequence: Synthetic oligonucleotide
  Antisense Strand to SEQ ID NO: 418879
uuugaugagccucugacaa

SEQ ID NO: 418881 - RNA, 19 nt, Artificial Sequence
  Description of Artificial Sequence: Synthetic oligonucleotide
  Sense Strand Starting at position 1276 of SEQ ID NO: 316048
auguuagugccauaacaag

SEQ ID NO: 418882 - RNA, 19 nt, Artificial Sequence
  Description of Artificial Sequence: Synthetic oligonucleotide
  Antisense Strand to SEQ ID NO: 418881
cuuguuauggcacuaacau

SEQ ID NO: 418883 - RNA, 19 nt, Artificial Sequence
  Description of Artificial Sequence: Synthetic oligonucleotide
  Sense Strand Starting at position 1276 of SEQ ID NO: 316116
agacaaagguuagaagaau

SEQ ID NO: 418884 - RNA, 19 nt, Artificial Sequence
  Description of Artificial Sequence: Synthetic oligonucleotide
  Antisense Strand to SEQ ID NO: 418883
auucuucuaaccuuugucu

SEQ ID NO: 418885 - RNA, 19 nt, Artificial Sequence
  Description of Artificial Sequence: Synthetic oligonucleotide
  Sense Strand Starting at position 1276 of SEQ ID NO: 316321
cuggauucuacugggcaaa

SEQ ID NO: 418886 - RNA, 19 nt, Artificial Sequence
  Description of Artificial Sequence: Synthetic oligonucleotide
  Antisense Strand to SEQ ID NO: 418885
uuugcccaguagaauccag

SEQ ID NO: 418887 - RNA, 19 nt, Artificial Sequence
  Description of Artificial Sequence: Synthetic oligonucleotide
  Sense Strand Starting at position 1276 of SEQ ID NO: 316323
ggauucuacugggcaaaga

SEQ ID NO: 418888 - RNA, 19 nt, Artificial Sequence
  Description of Artificial Sequence: Synthetic oligonucleotide
  Antisense Strand to SEQ ID NO: 418887
ucuuugcccaguagaaucc

SEQ ID NO: 418889 - RNA, 19 nt, Artificial Sequence
  Description of Artificial Sequence: Synthetic oligonucleotide
  Sense Strand Starting at position 1276 of SEQ ID NO: 316423
uguucucaucugcaaaguu

SEQ ID NO: 418890 - RNA, 19 nt, Artificial Sequence
  Description of Artificial Sequence: Synthetic oligonucleotide
  Antisense Strand to SEQ ID NO: 418889
aacuuugcagaugagaaca

SEQ ID NO: 418891 - RNA, 19 nt, Artificial Sequence
  Description of Artificial Sequence: Synthetic oligonucleotide
  Sense Strand Starting at position 1276 of SEQ ID NO: 317361
aggcacuuagagcaucaau

SEQ ID NO: 418892 - RNA, 19 nt, Artificial Sequence
  Description of Artificial Sequence: Synthetic oligonucleotide
  Antisense Strand to SEQ ID NO: 418891
auugaugcucuaagugccu

SEQ ID NO: 418893 - RNA, 19 nt, Artificial Sequence
  Description of Artificial Sequence: Synthetic oligonucleotide
  Sense Strand Starting at position 1276 of SEQ ID NO: 317503
gaggcagcacuguaguuaa

SEQ ID NO: 418894 - RNA, 19 nt, Artificial Sequence
  Description of Artificial Sequence: Synthetic oligonucleotide
  Antisense Strand to SEQ ID NO: 418893
uuaacuacagugcugccuc

SEQ ID NO: 418895 - RNA, 19 nt, Artificial Sequence
  Description of Artificial Sequence: Synthetic oligonucleotide
  Sense Strand Starting at position 1276 of SEQ ID NO: 317604
acggacgagcuauauguaa

SEQ ID NO: 418896 - RNA, 19 nt, Artificial Sequence
  Description of Artificial Sequence: Synthetic oligonucleotide
  Antisense Strand to SEQ ID NO: 418895
uuacauauagcucguccgu

SEQ ID NO: 418897 - RNA, 19 nt, Artificial Sequence
  Description of Artificial Sequence: Synthetic oligonucleotide
  Sense Strand Starting at position 1276 of SEQ ID NO: 317606
ggacgagcuauauguaaug

SEQ ID NO: 418898 - RNA, 19 nt, Artificial Sequence
  Description of Artificial Sequence: Synthetic oligonucleotide
  Antisense Strand to SEQ ID NO: 418897
cauuacauauagcucgucc

SEQ ID NO: 418899 - RNA, 19 nt, Artificial Sequence
  Description of Artificial Sequence: Synthetic oligonucleotide
  Sense Strand Starting at position 1276 of SEQ ID NO: 317746
acguauuuguguccugcua

SEQ ID NO: 418900 - RNA, 19 nt, Artificial Sequence
  Description of Artificial Sequence: Synthetic oligonucleotide
  Antisense Strand to SEQ ID NO: 418899
uagcaggacacaaauacgu

SEQ ID NO: 418901 - RNA, 19 nt, Artificial Sequence
  Description of Artificial Sequence: Synthetic oligonucleotide
  Sense Strand Starting at position 1276 of SEQ ID NO: 317811
cgcuguuugacucaugacu

SEQ ID NO: 418902 - RNA, 19 nt, Artificial Sequence
  Description of Artificial Sequence: Synthetic oligonucleotide
  Antisense Strand to SEQ ID NO: 418901
agucaugagucaaacagcg

SEQ ID NO: 418903 - RNA, 19 nt, Artificial Sequence
  Description of Artificial Sequence: Synthetic oligonucleotide
  Sense Strand Starting at position 1276 of SEQ ID NO: 317817
uugacucaugacuguacau

SEQ ID NO: 418904 - RNA, 19 nt, Artificial Sequence
  Description of Artificial Sequence: Synthetic oligonucleotide
  Antisense Strand to SEQ ID NO: 418903
auguacagucaugagucaa

SEQ ID NO: 418905 - RNA, 19 nt, Artificial Sequence
  Description of Artificial Sequence: Synthetic oligonucleotide
  Sense Strand Starting at position 1276 of SEQ ID NO: 317856
uugguuuccugauucuuua

SEQ ID NO: 418906 - RNA, 19 nt, Artificial Sequence
  Description of Artificial Sequence: Synthetic oligonucleotide
  Antisense Strand to SEQ ID NO: 418905
uaaagaaucaggaaaccaa

SEQ ID NO: 418907 - RNA, 19 nt, Artificial Sequence
  Description of Artificial Sequence: Synthetic oligonucleotide
  Sense Strand Starting at position 1276 of SEQ ID NO: 318017
aaagguaguuguuucuuua

SEQ ID NO: 418908 - RNA, 19 nt, Artificial Sequence
  Description of Artificial Sequence: Synthetic oligonucleotide
  Antisense Strand to SEQ ID NO: 418907
uaaagaaacaacuaccuuu

SEQ ID NO: 418909 - RNA, 19 nt, Artificial Sequence
  Description of Artificial Sequence: Synthetic oligonucleotide
  Sense Strand Starting at position 1276 of SEQ ID NO: 318146
uccagagagucauucuugu

SEQ ID NO: 418910 - RNA, 19 nt, Artificial Sequence
  Description of Artificial Sequence: Synthetic oligonucleotide
  Antisense Strand to SEQ ID NO: 418909
acaagaaugacucucugga

SEQ ID NO: 418911 - RNA, 19 nt, Artificial Sequence
  Description of Artificial Sequence: Synthetic oligonucleotide
  Sense Strand Starting at position 1276 of SEQ ID NO: 318268
acuccuacuccuggugaau

SEQ ID NO: 418912 - RNA, 19 nt, Artificial Sequence
  Description of Artificial Sequence: Synthetic oligonucleotide
  Antisense Strand to SEQ ID NO: 418911
auucaccaggaguaggagu

SEQ ID NO: 418913 - RNA, 19 nt, Artificial Sequence
  Description of Artificial Sequence: Synthetic oligonucleotide
  Sense Strand Starting at position 1276 of SEQ ID NO: 318438
uuaggucugcuuuaacacu

SEQ ID NO: 418914 - RNA, 19 nt, Artificial Sequence
  Description of Artificial Sequence: Synthetic oligonucleotide
  Antisense Strand to SEQ ID NO: 418913
aguguuaaagcagaccuaa

SEQ ID NO: 418915 - RNA, 19 nt, Artificial Sequence
  Description of Artificial Sequence: Synthetic oligonucleotide
  Sense Strand Starting at position 1276 of SEQ ID NO: 318634
aacaaaguaugucuaguga

SEQ ID NO: 418916 - RNA, 19 nt, Artificial Sequence
  Description of Artificial Sequence: Synthetic oligonucleotide
  Antisense Strand to SEQ ID NO: 418915
ucacuagacauacuuuguu

SEQ ID NO: 418917 - RNA, 19 nt, Artificial Sequence
  Description of Artificial Sequence: Synthetic oligonucleotide
  Sense Strand Starting at position 1276 of SEQ ID NO: 318704
auuugauaccugugucuuu

SEQ ID NO: 418918 - RNA, 19 nt, Artificial Sequence
  Description of Artificial Sequence: Synthetic oligonucleotide
  Antisense Strand to SEQ ID NO: 418917
aaagacacagguaucaaau

SEQ ID NO: 418919 - RNA, 19 nt, Artificial Sequence
  Description of Artificial Sequence: Synthetic oligonucleotide
  Sense Strand Starting at position 1276 of SEQ ID NO: 318737
ucauguacaccagggauau

SEQ ID NO: 418920 - RNA, 19 nt, Artificial Sequence
  Description of Artificial Sequence: Synthetic oligonucleotide
  Antisense Strand to SEQ ID NO: 418919
auaucccugguguacauga

SEQ ID NO: 418921 - RNA, 19 nt, Artificial Sequence
  Description of Artificial Sequence: Synthetic oligonucleotide
  Sense Strand Starting at position 1276 of SEQ ID NO: 318928
agggcuaaucagugagggu

SEQ ID NO: 418922 - RNA, 19 nt, Artificial Sequence
  Description of Artificial Sequence: Synthetic oligonucleotide
  Antisense Strand to SEQ ID NO: 418921
acccucacugauuagcccu

SEQ ID NO: 418923 - RNA, 19 nt, Artificial Sequence
  Description of Artificial Sequence: Synthetic oligonucleotide
  Sense Strand Starting at position 1276 of SEQ ID NO: 319158
gcucacuacucaguggaga

SEQ ID NO: 418924 - RNA, 19 nt, Artificial Sequence
  Description of Artificial Sequence: Synthetic oligonucleotide
  Antisense Strand to SEQ ID NO: 418923
ucuccacugaguagugagc

SEQ ID NO: 418925 - RNA, 19 nt, Artificial Sequence
  Description of Artificial Sequence: Synthetic oligonucleotide
  Sense Strand Starting at position 1276 of SEQ ID NO: 319160
ucacuacucaguggagaga

SEQ ID NO: 418926 - RNA, 19 nt, Artificial Sequence
  Description of Artificial Sequence: Synthetic oligonucleotide
  Antisense Strand to SEQ ID NO: 418925
ucucuccacugaguaguga

SEQ ID NO: 418927 - RNA, 19 nt, Artificial Sequence
  Description of Artificial Sequence: Synthetic oligonucleotide
  Sense Strand Starting at position 1277 of SEQ ID NO: 315236
guuucuuauuccuuaugca

SEQ ID NO: 418928 - RNA, 19 nt, Artificial Sequence
  Description of Artificial Sequence: Synthetic oligonucleotide
  Antisense Strand to SEQ ID NO: 418927
ugcauaaggaauaagaaac

SEQ ID NO: 418929 - RNA, 19 nt, Artificial Sequence
  Description of Artificial Sequence: Synthetic oligonucleotide
  Sense Strand Starting at position 1277 of SEQ ID NO: 315248
uuaugcaauuugugaagaa

SEQ ID NO: 418930 - RNA, 19 nt, Artificial Sequence
  Description of Artificial Sequence: Synthetic oligonucleotide
  Antisense Strand to SEQ ID NO: 418929
uucuucacaaauugcauaa

SEQ ID NO: 418931 - RNA, 19 nt, Artificial Sequence
  Description of Artificial Sequence: Synthetic oligonucleotide
  Sense Strand Starting at position 1277 of SEQ ID NO: 315342
guucucugggcugguauua

SEQ ID NO: 418932 - RNA, 19 nt, Artificial Sequence
  Description of Artificial Sequence: Synthetic oligonucleotide
  Antisense Strand to SEQ ID NO: 418931
uaauaccagcccagagaac

SEQ ID NO: 418933 - RNA, 19 nt, Artificial Sequence
  Description of Artificial Sequence: Synthetic oligonucleotide
  Sense Strand Starting at position 1277 of SEQ ID NO: 315405
aaccauuaguaggacaaga

SEQ ID NO: 418934 - RNA, 19 nt, Artificial Sequence
  Description of Artificial Sequence: Synthetic oligonucleotide
  Antisense Strand to SEQ ID NO: 418933
ucuuguccuacuaaugguu

SEQ ID NO: 418935 - RNA, 19 nt, Artificial Sequence
  Description of Artificial Sequence: Synthetic oligonucleotide
  Sense Strand Starting at position 1277 of SEQ ID NO: 315462
cgaggaaucuuacaaacuu

SEQ ID NO: 418936 - RNA, 19 nt, Artificial Sequence
  Description of Artificial Sequence: Synthetic oligonucleotide
  Antisense Strand to SEQ ID NO: 418935
aaguuuguaagauuccucg

SEQ ID NO: 418937 - RNA, 19 nt, Artificial Sequence
  Description of Artificial Sequence: Synthetic oligonucleotide
  Sense Strand Starting at position 1277 of SEQ ID NO: 315512
gcugcaugugagcaaugau

SEQ ID NO: 418938 - RNA, 19 nt, Artificial Sequence
  Description of Artificial Sequence: Synthetic oligonucleotide
  Antisense Strand to SEQ ID NO: 418937
aucauugcucacaugcagc

SEQ ID NO: 418939 - RNA, 19 nt, Artificial Sequence
  Description of Artificial Sequence: Synthetic oligonucleotide
  Sense Strand Starting at position 1277 of SEQ ID NO: 315604
aaccaugaggagcguuuaa

SEQ ID NO: 418940 - RNA, 19 nt, Artificial Sequence
  Description of Artificial Sequence: Synthetic oligonucleotide
  Antisense Strand to SEQ ID NO: 418939
uuaaacgcuccucaugguu

SEQ ID NO: 418941 - RNA, 19 nt, Artificial Sequence
  Description of Artificial Sequence: Synthetic oligonucleotide
  Sense Strand Starting at position 1277 of SEQ ID NO: 315616
cguuuaagcuauccucauu

SEQ ID NO: 418942 - RNA, 19 nt, Artificial Sequence
  Description of Artificial Sequence: Synthetic oligonucleotide
  Antisense Strand to SEQ ID NO: 418941
aaugaggauagcuuaaacg

SEQ ID NO: 418943 - RNA, 19 nt, Artificial Sequence
  Description of Artificial Sequence: Synthetic oligonucleotide
  Sense Strand Starting at position 1277 of SEQ ID NO: 315621
aagcuauccucauugggag

SEQ ID NO: 418944 - RNA, 19 nt, Artificial Sequence
  Description of Artificial Sequence: Synthetic oligonucleotide
  Antisense Strand to SEQ ID NO: 418943
cucccaaugaggauagcuu

SEQ ID NO: 418945 - RNA, 19 nt, Artificial Sequence
  Description of Artificial Sequence: Synthetic oligonucleotide
  Sense Strand Starting at position 1277 of SEQ ID NO: 315929
ccaugcagccaguguaaau

SEQ ID NO: 418946 - RNA, 19 nt, Artificial Sequence
  Description of Artificial Sequence: Synthetic oligonucleotide
  Antisense Strand to SEQ ID NO: 418945
auuuacacuggcugcaugg

SEQ ID NO: 418947 - RNA, 19 nt, Artificial Sequence
  Description of Artificial Sequence: Synthetic oligonucleotide
  Sense Strand Starting at position 1277 of SEQ ID NO: 317407
gggcgaggguugugaauuu

SEQ ID NO: 418948 - RNA, 19 nt, Artificial Sequence
  Description of Artificial Sequence: Synthetic oligonucleotide
  Antisense Strand to SEQ ID NO: 418947
aaauucacaacccucgccc

SEQ ID NO: 418949 - RNA, 19 nt, Artificial Sequence
  Description of Artificial Sequence: Synthetic oligonucleotide
  Sense Strand Starting at position 1277 of SEQ ID NO: 317426
ucucuuaagugguuuggga

SEQ ID NO: 418950 - RNA, 19 nt, Artificial Sequence
  Description of Artificial Sequence: Synthetic oligonucleotide
  Antisense Strand to SEQ ID NO: 418949
ucccaaaccacuuaagaga

SEQ ID NO: 418951 - RNA, 19 nt, Artificial Sequence
  Description of Artificial Sequence: Synthetic oligonucleotide
  Sense Strand Starting at position 1277 of SEQ ID NO: 317428
ucuuaagugguuugggaac

SEQ ID NO: 418952 - RNA, 19 nt, Artificial Sequence
  Description of Artificial Sequence: Synthetic oligonucleotide
  Antisense Strand to SEQ ID NO: 418951
guucccaaaccacuuaaga

SEQ ID NO: 418953 - RNA, 19 nt, Artificial Sequence
  Description of Artificial Sequence: Synthetic oligonucleotide
  Sense Strand Starting at position 1277 of SEQ ID NO: 317447
cuggauucugggcgggaga

SEQ ID NO: 418954 - RNA, 19 nt, Artificial Sequence
  Description of Artificial Sequence: Synthetic oligonucleotide
  Antisense Strand to SEQ ID NO: 418953
ucucccgcccagaauccag

SEQ ID NO: 418955 - RNA, 19 nt, Artificial Sequence
  Description of Artificial Sequence: Synthetic oligonucleotide
  Sense Strand Starting at position 1277 of SEQ ID NO: 317492
cugggagugauuggaacua

SEQ ID NO: 418956 - RNA, 19 nt, Artificial Sequence
  Description of Artificial Sequence: Synthetic oligonucleotide
  Antisense Strand to SEQ ID NO: 418955
uaguuccaaucacucccag

SEQ ID NO: 418957 - RNA, 19 nt, Artificial Sequence
  Description of Artificial Sequence: Synthetic oligonucleotide
  Sense Strand Starting at position 1277 of SEQ ID NO: 317530
gagagaaaguucuuuccaa

SEQ ID NO: 418958 - RNA, 19 nt, Artificial Sequence
  Description of Artificial Sequence: Synthetic oligonucleotide
  Antisense Strand to SEQ ID NO: 418957
uuggaaagaacuuucucuc

SEQ ID NO: 418959 - RNA, 19 nt, Artificial Sequence
  Description of Artificial Sequence: Synthetic oligonucleotide
  Sense Strand Starting at position 1277 of SEQ ID NO: 317531
agagaaaguucuuuccaau

SEQ ID NO: 418960 - RNA, 19 nt, Artificial Sequence
  Description of Artificial Sequence: Synthetic oligonucleotide
  Antisense Strand to SEQ ID NO: 418959
auuggaaagaacuuucucu

SEQ ID NO: 418961 - RNA, 19 nt, Artificial Sequence
  Description of Artificial Sequence: Synthetic oligonucleotide
  Sense Strand Starting at position 1277 of SEQ ID NO: 317534
gaaaguucuuuccaaugag

SEQ ID NO: 418962 - RNA, 19 nt, Artificial Sequence
  Description of Artificial Sequence: Synthetic oligonucleotide
  Antisense Strand to SEQ ID NO: 418961
cucauuggaaagaacuuuc

SEQ ID NO: 418963 - RNA, 19 nt, Artificial Sequence
  Description of Artificial Sequence: Synthetic oligonucleotide
  Sense Strand Starting at position 1277 of SEQ ID NO: 317759
uagguaugccugugagaaa

SEQ ID NO: 418964 - RNA, 19 nt, Artificial Sequence
  Description of Artificial Sequence: Synthetic oligonucleotide
  Antisense Strand to SEQ ID NO: 418963
uuucucacaggcauaccua

SEQ ID NO: 418965 - RNA, 19 nt, Artificial Sequence
  Description of Artificial Sequence: Synthetic oligonucleotide
  Sense Strand Starting at position 1277 of SEQ ID NO: 317878
uuauaagagugauacaaag

SEQ ID NO: 418966 - RNA, 19 nt, Artificial Sequence
  Description of Artificial Sequence: Synthetic oligonucleotide
  Antisense Strand to SEQ ID NO: 418965
cuuuguaucacucuuauaa

SEQ ID NO: 418967 - RNA, 19 nt, Artificial Sequence
  Description of Artificial Sequence: Synthetic oligonucleotide
  Sense Strand Starting at position 1277 of SEQ ID NO: 317921
guguaacgggcuugcgaau

SEQ ID NO: 418968 - RNA, 19 nt, Artificial Sequence
  Description of Artificial Sequence: Synthetic oligonucleotide
  Antisense Strand to SEQ ID NO: 418967
auucgcaagcccguuacac

SEQ ID NO: 418969 - RNA, 19 nt, Artificial Sequence
  Description of Artificial Sequence: Synthetic oligonucleotide
  Sense Strand Starting at position 1277 of SEQ ID NO: 317927
cgggcuugcgaaugugaga

SEQ ID NO: 418970 - RNA, 19 nt, Artificial Sequence
  Description of Artificial Sequence: Synthetic oligonucleotide
  Antisense Strand to SEQ ID NO: 418969
ucucacauucgcaagcccg

SEQ ID NO: 418971 - RNA, 19 nt, Artificial Sequence
  Description of Artificial Sequence: Synthetic oligonucleotide
  Sense Strand Starting at position 1277 of SEQ ID NO: 317934
gcgaaugugagacaucacu

SEQ ID NO: 418972 - RNA, 19 nt, Artificial Sequence
  Description of Artificial Sequence: Synthetic oligonucleotide
  Antisense Strand to SEQ ID NO: 418971
agugaugucucacauucgc

SEQ ID NO: 418973 - RNA, 19 nt, Artificial Sequence
  Description of Artificial Sequence: Synthetic oligonucleotide
  Sense Strand Starting at position 1277 of SEQ ID NO: 317943
agacaucacugggaauaag

SEQ ID NO: 418974 - RNA, 19 nt, Artificial Sequence
  Description of Artificial Sequence: Synthetic oligonucleotide
  Antisense Strand to SEQ ID NO: 418973
cuuauucccagugaugucu

SEQ ID NO: 418975 - RNA, 19 nt, Artificial Sequence
  Description of Artificial Sequence: Synthetic oligonucleotide
  Sense Strand Starting at position 1277 of SEQ ID NO: 318077
ucgcuaaauugaccaaauu

SEQ ID NO: 418976 - RNA, 19 nt, Artificial Sequence
  Description of Artificial Sequence: Synthetic oligonucleotide
  Antisense Strand to SEQ ID NO: 418975
aauuuggucaauuuagcga

SEQ ID NO: 418977 - RNA, 19 nt, Artificial Sequence
  Description of Artificial Sequence: Synthetic oligonucleotide
  Sense Strand Starting at position 1277 of SEQ ID NO: 318078
cgcuaaauugaccaaauua

SEQ ID NO: 418978 - RNA, 19 nt, Artificial Sequence
  Description of Artificial Sequence: Synthetic oligonucleotide
  Antisense Strand to SEQ ID NO: 418977
uaauuuggucaauuuagcg

SEQ ID NO: 418979 - RNA, 19 nt, Artificial Sequence
  Description of Artificial Sequence: Synthetic oligonucleotide
  Sense Strand Starting at position 1277 of SEQ ID NO: 318163
uugaaaugaucagcaauuc

SEQ ID NO: 418980 - RNA, 19 nt, Artificial Sequence
  Description of Artificial Sequence: Synthetic oligonucleotide
  Antisense Strand to SEQ ID NO: 418979
gaauugcugaucauuucaa

SEQ ID NO: 418981 - RNA, 19 nt, Artificial Sequence
  Description of Artificial Sequence: Synthetic oligonucleotide
  Sense Strand Starting at position 1277 of SEQ ID NO: 318287
uaaagagaugugugccauu

SEQ ID NO: 418982 - RNA, 19 nt, Artificial Sequence
  Description of Artificial Sequence: Synthetic oligonucleotide
  Antisense Strand to SEQ ID NO: 418981
aauggcacacaucucuuua

SEQ ID NO: 418983 - RNA, 19 nt, Artificial Sequence
  Description of Artificial Sequence: Synthetic oligonucleotide
  Sense Strand Starting at position 1277 of SEQ ID NO: 318332
ggucuuguacauuaaggag

SEQ ID NO: 418984 - RNA, 19 nt, Artificial Sequence
  Description of Artificial Sequence: Synthetic oligonucleotide
  Antisense Strand to SEQ ID NO: 418983
cuccuuaauguacaagacc

SEQ ID NO: 418985 - RNA, 19 nt, Artificial Sequence
  Description of Artificial Sequence: Synthetic oligonucleotide
  Sense Strand Starting at position 1277 of SEQ ID NO: 318354
gccucagauuuccauaggu

SEQ ID NO: 418986 - RNA, 19 nt, Artificial Sequence
  Description of Artificial Sequence: Synthetic oligonucleotide
  Antisense Strand to SEQ ID NO: 418985
accuauggaaaucugaggc

SEQ ID NO: 418987 - RNA, 19 nt, Artificial Sequence
  Description of Artificial Sequence: Synthetic oligonucleotide
  Sense Strand Starting at position 1277 of SEQ ID NO: 318557
aaaguaauugugcaugcuu

SEQ ID NO: 418988 - RNA, 19 nt, Artificial Sequence
  Description of Artificial Sequence: Synthetic oligonucleotide
  Antisense Strand to SEQ ID NO: 418987
aagcaugcacaauuacuuu

SEQ ID NO: 418989 - RNA, 19 nt, Artificial Sequence
  Description of Artificial Sequence: Synthetic oligonucleotide
  Sense Strand Starting at position 1277 of SEQ ID NO: 318560
guaauugugcaugcuucuu

SEQ ID NO: 418990 - RNA, 19 nt, Artificial Sequence
  Description of Artificial Sequence: Synthetic oligonucleotide
  Antisense Strand to SEQ ID NO: 418989
aagaagcaugcacaauuac

SEQ ID NO: 418991 - RNA, 19 nt, Artificial Sequence
  Description of Artificial Sequence: Synthetic oligonucleotide
  Sense Strand Starting at position 1277 of SEQ ID NO: 318601
uguaucuaccaggaguugu

SEQ ID NO: 418992 - RNA, 19 nt, Artificial Sequence
  Description of Artificial Sequence: Synthetic oligonucleotide
  Antisense Strand to SEQ ID NO: 418991
acaacuccugguagauaca

SEQ ID NO: 418993 - RNA, 19 nt, Artificial Sequence
  Description of Artificial Sequence: Synthetic oligonucleotide
  Sense Strand Starting at position 1277 of SEQ ID NO: 318770
ggaguccugguagaguaua

SEQ ID NO: 418994 - RNA, 19 nt, Artificial Sequence
  Description of Artificial Sequence: Synthetic oligonucleotide
  Antisense Strand to SEQ ID NO: 418993
uauacucuaccaggacucc

SEQ ID NO: 418995 - RNA, 19 nt, Artificial Sequence
  Description of Artificial Sequence: Synthetic oligonucleotide
  Sense Strand Starting at position 1277 of SEQ ID NO: 318795
ugaugacauucuuugcuau

SEQ ID NO: 418996 - RNA, 19 nt, Artificial Sequence
  Description of Artificial Sequence: Synthetic oligonucleotide
  Antisense Strand to SEQ ID NO: 418995
auagcaaagaaugucauca

SEQ ID NO: 418997 - RNA, 19 nt, Artificial Sequence
  Description of Artificial Sequence: Synthetic oligonucleotide
  Sense Strand Starting at position 1277 of SEQ ID NO: 318909
gaaauaaacucaggaugag

SEQ ID NO: 418998 - RNA, 19 nt, Artificial Sequence
  Description of Artificial Sequence: Synthetic oligonucleotide
  Antisense Strand to SEQ ID NO: 418997
cucauccugaguuuauuuc

SEQ ID NO: 418999 - RNA, 19 nt, Artificial Sequence
  Description of Artificial Sequence: Synthetic oligonucleotide
  Sense Strand Starting at position 1277 of SEQ ID NO: 318979
uuggauuucugauacuuaa

SEQ ID NO: 419000 - RNA, 19 nt, Artificial Sequence
  Description of Artificial Sequence: Synthetic oligonucleotide
  Antisense Strand to SEQ ID NO: 418999
uuaaguaucagaaauccaa

SEQ ID NO: 419001 - RNA, 19 nt, Artificial Sequence
  Description of Artificial Sequence: Synthetic oligonucleotide
  Sense Strand Starting at position 1277 of SEQ ID NO: 319127
ucuuuaauauugguuugca

SEQ ID NO: 419002 - RNA, 19 nt, Artificial Sequence
  Description of Artificial Sequence: Synthetic oligonucleotide
  Antisense Strand to SEQ ID NO: 419001
ugcaaaccaauauuaaaga

SEQ ID NO: 419003 - RNA, 19 nt, Artificial Sequence
  Description of Artificial Sequence: Synthetic oligonucleotide
  Sense Strand Starting at position 1277 of SEQ ID NO: 319128
cuuuaauauugguuugcau

SEQ ID NO: 419004 - RNA, 19 nt, Artificial Sequence
  Description of Artificial Sequence: Synthetic oligonucleotide
  Antisense Strand to SEQ ID NO: 419003
augcaaaccaauauuaaag

SEQ ID NO: 419005 - RNA, 19 nt, Artificial Sequence
  Description of Artificial Sequence: Synthetic oligonucleotide
  Sense Strand Starting at position 1277 of SEQ ID NO: 319201
uguuguguuacugaugcuu

SEQ ID NO: 419006 - RNA, 19 nt, Artificial Sequence
  Description of Artificial Sequence: Synthetic oligonucleotide
  Antisense Strand to SEQ ID NO: 419005
aagcaucaguaacacaaca

SEQ ID NO: 419007 - RNA, 19 nt, Artificial Sequence
  Description of Artificial Sequence: Synthetic oligonucleotide
  Sense Strand Starting at position 1278 of SEQ ID NO: 315240
acuuaaaucccaggguuau

SEQ ID NO: 419008 - RNA, 19 nt, Artificial Sequence
  Description of Artificial Sequence: Synthetic oligonucleotide
  Antisense Strand to SEQ ID NO: 419007
auaacccugggauuuaagu

SEQ ID NO: 419009 - RNA, 19 nt, Artificial Sequence
  Description of Artificial Sequence: Synthetic oligonucleotide
  Sense Strand Starting at position 1278 of SEQ ID NO: 315241
cuuaaaucccaggguuaua

SEQ ID NO: 419010 - RNA, 19 nt, Artificial Sequence
  Description of Artificial Sequence: Synthetic oligonucleotide
  Antisense Strand to SEQ ID NO: 419009
uauaacccugggauuuaag

SEQ ID NO: 419011 - RNA, 19 nt, Artificial Sequence
  Description of Artificial Sequence: Synthetic oligonucleotide
  Sense Strand Starting at position 1278 of SEQ ID NO: 315246
aucccaggguuauaaacaa

SEQ ID NO: 419012 - RNA, 19 nt, Artificial Sequence
  Description of Artificial Sequence: Synthetic oligonucleotide
  Antisense Strand to SEQ ID NO: 419011
uuguuuauaacccugggau

SEQ ID NO: 419013 - RNA, 19 nt, Artificial Sequence
  Description of Artificial Sequence: Synthetic oligonucleotide
  Sense Strand Starting at position 1278 of SEQ ID NO: 315302
agagauaaauacgcuuacu

SEQ ID NO: 419014 - RNA, 19 nt, Artificial Sequence
  Description of Artificial Sequence: Synthetic oligonucleotide
  Antisense Strand to SEQ ID NO: 419013
aguaagcguauuuaucucu

SEQ ID NO: 419015 - RNA, 19 nt, Artificial Sequence
  Description of Artificial Sequence: Synthetic oligonucleotide
  Sense Strand Starting at position 1278 of SEQ ID NO: 315439
cuauguacccuauguugua

SEQ ID NO: 419016 - RNA, 19 nt, Artificial Sequence
  Description of Artificial Sequence: Synthetic oligonucleotide
  Antisense Strand to SEQ ID NO: 419015
uacaacauaggguacauag

SEQ ID NO: 419017 - RNA, 19 nt, Artificial Sequence
  Description of Artificial Sequence: Synthetic oligonucleotide
  Sense Strand Starting at position 1278 of SEQ ID NO: 315466
ccuggaaauuagcaacaua

SEQ ID NO: 419018 - RNA, 19 nt, Artificial Sequence
  Description of Artificial Sequence: Synthetic oligonucleotide
  Antisense Strand to SEQ ID NO: 419017
uauguugcuaauuuccagg

SEQ ID NO: 419019 - RNA, 19 nt, Artificial Sequence
  Description of Artificial Sequence: Synthetic oligonucleotide
  Sense Strand Starting at position 1278 of SEQ ID NO: 315515
augaaaugauuuggcuuga

SEQ ID NO: 419020 - RNA, 19 nt, Artificial Sequence
  Description of Artificial Sequence: Synthetic oligonucleotide
  Antisense Strand to SEQ ID NO: 419019
ucaagccaaaucauuucau

SEQ ID NO: 419021 - RNA, 19 nt, Artificial Sequence
  Description of Artificial Sequence: Synthetic oligonucleotide
  Sense Strand Starting at position 1278 of SEQ ID NO: 315590
ccagguaagccuuauaaca

SEQ ID NO: 419022 - RNA, 19 nt, Artificial Sequence
  Description of Artificial Sequence: Synthetic oligonucleotide
  Antisense Strand to SEQ ID NO: 419021
uguuauaaggcuuaccugg

SEQ ID NO: 419023 - RNA, 19 nt, Artificial Sequence
  Description of Artificial Sequence: Synthetic oligonucleotide
  Sense Strand Starting at position 1278 of SEQ ID NO: 315661
caggaaagcguuuaauucu

SEQ ID NO: 419024 - RNA, 19 nt, Artificial Sequence
  Description of Artificial Sequence: Synthetic oligonucleotide
  Antisense Strand to SEQ ID NO: 419023
agaauuaaacgcuuuccug

SEQ ID NO: 419025 - RNA, 19 nt, Artificial Sequence
  Description of Artificial Sequence: Synthetic oligonucleotide
  Sense Strand Starting at position 1278 of SEQ ID NO: 315695
cugucuuccuacucauguu

SEQ ID NO: 419026 - RNA, 19 nt, Artificial Sequence
  Description of Artificial Sequence: Synthetic oligonucleotide
  Antisense Strand to SEQ ID NO: 419025
aacaugaguaggaagacag

SEQ ID NO: 419027 - RNA, 19 nt, Artificial Sequence
  Description of Artificial Sequence: Synthetic oligonucleotide
  Sense Strand Starting at position 1278 of SEQ ID NO: 315935
uccaaauugccguaguaaa

SEQ ID NO: 419028 - RNA, 19 nt, Artificial Sequence
  Description of Artificial Sequence: Synthetic oligonucleotide
  Antisense Strand to SEQ ID NO: 419027
uuuacuacggcaauuugga

SEQ ID NO: 419029 - RNA, 19 nt, Artificial Sequence
  Description of Artificial Sequence: Synthetic oligonucleotide
  Sense Strand Starting at position 1278 of SEQ ID NO: 316055
ccuuuagaaccgcgagaua

SEQ ID NO: 419030 - RNA, 19 nt, Artificial Sequence
  Description of Artificial Sequence: Synthetic oligonucleotide
  Antisense Strand to SEQ ID NO: 419029
uaucucgcgguucuaaagg

SEQ ID NO: 419031 - RNA, 19 nt, Artificial Sequence
  Description of Artificial Sequence: Synthetic oligonucleotide
  Sense Strand Starting at position 1278 of SEQ ID NO: 316058
uuagaaccgcgagauacuu

SEQ ID NO: 419032 - RNA, 19 nt, Artificial Sequence
  Description of Artificial Sequence: Synthetic oligonucleotide
  Antisense Strand to SEQ ID NO: 419031
aaguaucucgcgguucuaa

SEQ ID NO: 419033 - RNA, 19 nt, Artificial Sequence
  Description of Artificial Sequence: Synthetic oligonucleotide
  Sense Strand Starting at position 1278 of SEQ ID NO: 316078
gaggguaaacccuagcacu

SEQ ID NO: 419034 - RNA, 19 nt, Artificial Sequence
  Description of Artificial Sequence: Synthetic oligonucleotide
  Antisense Strand to SEQ ID NO: 419033
agugcuaggguuuacccuc

SEQ ID NO: 419035 - RNA, 19 nt, Artificial Sequence
  Description of Artificial Sequence: Synthetic oligonucleotide
  Sense Strand Starting at position 1278 of SEQ ID NO: 316202
acaggaugaugucuuucua

SEQ ID NO: 419036 - RNA, 19 nt, Artificial Sequence
  Description of Artificial Sequence: Synthetic oligonucleotide
  Antisense Strand to SEQ ID NO: 419035
uagaaagacaucauccugu

SEQ ID NO: 419037 - RNA, 19 nt, Artificial Sequence
  Description of Artificial Sequence: Synthetic oligonucleotide
  Sense Strand Starting at position 1278 of SEQ ID NO: 316206
gaugaugucuuucuaaagc

SEQ ID NO: 419038 - RNA, 19 nt, Artificial Sequence
  Description of Artificial Sequence: Synthetic oligonucleotide
  Antisense Strand to SEQ ID NO: 419037
gcuuuagaaagacaucauc

SEQ ID NO: 419039 - RNA, 19 nt, Artificial Sequence
  Description of Artificial Sequence: Synthetic oligonucleotide
  Sense Strand Starting at position 1278 of SEQ ID NO: 316244
gaagauggauuggacauuu

SEQ ID NO: 419040 - RNA, 19 nt, Artificial Sequence
  Description of Artificial Sequence: Synthetic oligonucleotide
  Antisense Strand to SEQ ID NO: 419039
aaauguccaauccaucuuc

SEQ ID NO: 419041 - RNA, 19 nt, Artificial Sequence
  Description of Artificial Sequence: Synthetic oligonucleotide
  Sense Strand Starting at position 1278 of SEQ ID NO: 316638
ugcagcaauuaugcaauua

SEQ ID NO: 419042 - RNA, 19 nt, Artificial Sequence
  Description of Artificial Sequence: Synthetic oligonucleotide
  Antisense Strand to SEQ ID NO: 419041
uaauugcauaauugcugca

SEQ ID NO: 419043 - RNA, 19 nt, Artificial Sequence
  Description of Artificial Sequence: Synthetic oligonucleotide
  Sense Strand Starting at position 1278 of SEQ ID NO: 316682
ggcacuuuccaccgugaca

SEQ ID NO: 419044 - RNA, 19 nt, Artificial Sequence
  Description of Artificial Sequence: Synthetic oligonucleotide
  Antisense Strand to SEQ ID NO: 419043
ugucacgguggaaagugcc

SEQ ID NO: 419045 - RNA, 19 nt, Artificial Sequence
  Description of Artificial Sequence: Synthetic oligonucleotide
  Sense Strand Starting at position 1278 of SEQ ID NO: 316693
ccgugacauuuauccugua

SEQ ID NO: 419046 - RNA, 19 nt, Artificial Sequence
  Description of Artificial Sequence: Synthetic oligonucleotide
  Antisense Strand to SEQ ID NO: 419045
uacaggauaaaugucacgg

SEQ ID NO: 419047 - RNA, 19 nt, Artificial Sequence
  Description of Artificial Sequence: Synthetic oligonucleotide
  Sense Strand Starting at position 1278 of SEQ ID NO: 317350
cccugaguccuggaaagug

SEQ ID NO: 419048 - RNA, 19 nt, Artificial Sequence
  Description of Artificial Sequence: Synthetic oligonucleotide
  Antisense Strand to SEQ ID NO: 419047
cacuuuccaggacucaggg

SEQ ID NO: 419049 - RNA, 19 nt, Artificial Sequence
  Description of Artificial Sequence: Synthetic oligonucleotide
  Sense Strand Starting at position 1278 of SEQ ID NO: 317994
cacguuggccuggaaacuu

SEQ ID NO: 419050 - RNA, 19 nt, Artificial Sequence
  Description of Artificial Sequence: Synthetic oligonucleotide
  Antisense Strand to SEQ ID NO: 419049
aaguuuccaggccaacgug

SEQ ID NO: 419051 - RNA, 19 nt, Artificial Sequence
  Description of Artificial Sequence: Synthetic oligonucleotide
  Sense Strand Starting at position 1278 of SEQ ID NO: 318470
acugcuuaauugcugaaau

SEQ ID NO: 419052 - RNA, 19 nt, Artificial Sequence
  Description of Artificial Sequence: Synthetic oligonucleotide
  Antisense Strand to SEQ ID NO: 419051
auuucagcaauuaagcagu

SEQ ID NO: 419053 - RNA, 19 nt, Artificial Sequence
  Description of Artificial Sequence: Synthetic oligonucleotide
  Sense Strand Starting at position 1278 of SEQ ID NO: 318482
cugaaauuaugguugcuac

SEQ ID NO: 419054 - RNA, 19 nt, Artificial Sequence
  Description of Artificial Sequence: Synthetic oligonucleotide
  Antisense Strand to SEQ ID NO: 419053
guagcaaccauaauuucag

SEQ ID NO: 419055 - RNA, 19 nt, Artificial Sequence
  Description of Artificial Sequence: Synthetic oligonucleotide
  Sense Strand Starting at position 1278 of SEQ ID NO: 318483
ugaaauuaugguugcuaca

SEQ ID NO: 419056 - RNA, 19 nt, Artificial Sequence
  Description of Artificial Sequence: Synthetic oligonucleotide
  Antisense Strand to SEQ ID NO: 419055
uguagcaaccauaauuuca

SEQ ID NO: 419057 - RNA, 19 nt, Artificial Sequence
  Description of Artificial Sequence: Synthetic oligonucleotide
  Sense Strand Starting at position 1278 of SEQ ID NO: 318485
aaauuaugguugcuacagu

SEQ ID NO: 419058 - RNA, 19 nt, Artificial Sequence
  Description of Artificial Sequence: Synthetic oligonucleotide
  Antisense Strand to SEQ ID NO: 419057
acuguagcaaccauaauuu

SEQ ID NO: 419059 - RNA, 19 nt, Artificial Sequence
  Description of Artificial Sequence: Synthetic oligonucleotide
  Sense Strand Starting at position 1278 of SEQ ID NO: 318623
gugguagauauaugacauu

SEQ ID NO: 419060 - RNA, 19 nt, Artificial Sequence
  Description of Artificial Sequence: Synthetic oligonucleotide
  Antisense Strand to SEQ ID NO: 419059
aaugucauauaucuaccac

SEQ ID NO: 419061 - RNA, 19 nt, Artificial Sequence
  Description of Artificial Sequence: Synthetic oligonucleotide
  Sense Strand Starting at position 1278 of SEQ ID NO: 318626
guagauauaugacauugaa

SEQ ID NO: 419062 - RNA, 19 nt, Artificial Sequence
  Description of Artificial Sequence: Synthetic oligonucleotide
  Antisense Strand to SEQ ID NO: 419061
uucaaugucauauaucuac

SEQ ID NO: 419063 - RNA, 19 nt, Artificial Sequence
  Description of Artificial Sequence: Synthetic oligonucleotide
  Sense Strand Starting at position 1278 of SEQ ID NO: 318669
agaacuucccuaugucuga

SEQ ID NO: 419064 - RNA, 19 nt, Artificial Sequence
  Description of Artificial Sequence: Synthetic oligonucleotide
  Antisense Strand to SEQ ID NO: 419063
ucagacauagggaaguucu

SEQ ID NO: 419065 - RNA, 19 nt, Artificial Sequence
  Description of Artificial Sequence: Synthetic oligonucleotide
  Sense Strand Starting at position 1278 of SEQ ID NO: 318684
cugaaccuucucuguugua

SEQ ID NO: 419066 - RNA, 19 nt, Artificial Sequence
  Description of Artificial Sequence: Synthetic oligonucleotide
  Antisense Strand to SEQ ID NO: 419065
uacaacagagaagguucag

SEQ ID NO: 419067 - RNA, 19 nt, Artificial Sequence
  Description of Artificial Sequence: Synthetic oligonucleotide
  Sense Strand Starting at position 1278 of SEQ ID NO: 318709
gcaucacauucgucagcaa

SEQ ID NO: 419068 - RNA, 19 nt, Artificial Sequence
  Description of Artificial Sequence: Synthetic oligonucleotide
  Antisense Strand to SEQ ID NO: 419067
uugcugacgaaugugaugc

SEQ ID NO: 419069 - RNA, 19 nt, Artificial Sequence
  Description of Artificial Sequence: Synthetic oligonucleotide
  Sense Strand Starting at position 1278 of SEQ ID NO: 318712
ucacauucgucagcaaauu

SEQ ID NO: 419070 - RNA, 19 nt, Artificial Sequence
  Description of Artificial Sequence: Synthetic oligonucleotide
  Antisense Strand to SEQ ID NO: 419069
aauuugcugacgaauguga

SEQ ID NO: 419071 - RNA, 19 nt, Artificial Sequence
  Description of Artificial Sequence: Synthetic oligonucleotide
  Sense Strand Starting at position 1278 of SEQ ID NO: 318795
ugcuaauguccuggucuaa

SEQ ID NO: 419072 - RNA, 19 nt, Artificial Sequence
  Description of Artificial Sequence: Synthetic oligonucleotide
  Antisense Strand to SEQ ID NO: 419071
uuagaccaggacauuagca

SEQ ID NO: 419073 - RNA, 19 nt, Artificial Sequence
  Description of Artificial Sequence: Synthetic oligonucleotide
  Sense Strand Starting at position 1278 of SEQ ID NO: 318920
auuagauuaugucucucuu

SEQ ID NO: 419074 - RNA, 19 nt, Artificial Sequence
  Description of Artificial Sequence: Synthetic oligonucleotide
  Antisense Strand to SEQ ID NO: 419073
aagagagacauaaucuaau

SEQ ID NO: 419075 - RNA, 19 nt, Artificial Sequence
  Description of Artificial Sequence: Synthetic oligonucleotide
  Sense Strand Starting at position 1278 of SEQ ID NO: 318955
guggcuucccaucauagag

SEQ ID NO: 419076 - RNA, 19 nt, Artificial Sequence
  Description of Artificial Sequence: Synthetic oligonucleotide
  Antisense Strand to SEQ ID NO: 419075
cucuaugaugggaagccac

SEQ ID NO: 419077 - RNA, 19 nt, Artificial Sequence
  Description of Artificial Sequence: Synthetic oligonucleotide
  Sense Strand Starting at position 1278 of SEQ ID NO: 318996
ggauacauggccugcauga

SEQ ID NO: 419078 - RNA, 19 nt, Artificial Sequence
  Description of Artificial Sequence: Synthetic oligonucleotide
  Antisense Strand to SEQ ID NO: 419077
ucaugcaggccauguaucc

SEQ ID NO: 419079 - RNA, 19 nt, Artificial Sequence
  Description of Artificial Sequence: Synthetic oligonucleotide
  Sense Strand Starting at position 1278 of SEQ ID NO: 319009
gcaugaugugcccaccauu

SEQ ID NO: 419080 - RNA, 19 nt, Artificial Sequence
  Description of Artificial Sequence: Synthetic oligonucleotide
  Antisense Strand to SEQ ID NO: 419079
aauggugggcacaucaugc

SEQ ID NO: 419081 - RNA, 19 nt, Artificial Sequence
  Description of Artificial Sequence: Synthetic oligonucleotide
  Sense Strand Starting at position 1278 of SEQ ID NO: 319046
gaccucaagcuguacgauu

SEQ ID NO: 419082 - RNA, 19 nt, Artificial Sequence
  Description of Artificial Sequence: Synthetic oligonucleotide
  Antisense Strand to SEQ ID NO: 419081
aaucguacagcuugagguc

SEQ ID NO: 419083 - RNA, 19 nt, Artificial Sequence
  Description of Artificial Sequence: Synthetic oligonucleotide
  Sense Strand Starting at position 1278 of SEQ ID NO: 319133
ccucaagaccuguguacuu

SEQ ID NO: 419084 - RNA, 19 nt, Artificial Sequence
  Description of Artificial Sequence: Synthetic oligonucleotide
  Antisense Strand to SEQ ID NO: 419083
aaguacacaggucuugagg

SEQ ID NO: 419085 - RNA, 19 nt, Artificial Sequence
  Description of Artificial Sequence: Synthetic oligonucleotide
  Sense Strand Starting at position 1278 of SEQ ID NO: 319138
agaccuguguacuuacuau

SEQ ID NO: 419086 - RNA, 19 nt, Artificial Sequence
  Description of Artificial Sequence: Synthetic oligonucleotide
  Antisense Strand to SEQ ID NO: 419085
auaguaaguacacaggucu

SEQ ID NO: 419087 - RNA, 19 nt, Artificial Sequence
  Description of Artificial Sequence: Synthetic oligonucleotide
  Sense Strand Starting at position 1279 of SEQ ID NO: 315391
aucuacaggccuuaaguua

SEQ ID NO: 419088 - RNA, 19 nt, Artificial Sequence
  Description of Artificial Sequence: Synthetic oligonucleotide
  Antisense Strand to SEQ ID NO: 419087
uaacuuaaggccuguagau

SEQ ID NO: 419089 - RNA, 19 nt, Artificial Sequence
  Description of Artificial Sequence: Synthetic oligonucleotide
  Sense Strand Starting at position 1279 of SEQ ID NO: 315489
gguuuaauaugccuuccac

SEQ ID NO: 419090 - RNA, 19 nt, Artificial Sequence
  Description of Artificial Sequence: Synthetic oligonucleotide
  Antisense Strand to SEQ ID NO: 419089
guggaaggcauauuaaacc

SEQ ID NO: 419091 - RNA, 19 nt, Artificial Sequence
  Description of Artificial Sequence: Synthetic oligonucleotide
  Sense Strand Starting at position 1279 of SEQ ID NO: 315546
cugagaguucuuuauggcu

SEQ ID NO: 419092 - RNA, 19 nt, Artificial Sequence
  Description of Artificial Sequence: Synthetic oligonucleotide
  Antisense Strand to SEQ ID NO: 419091
agccauaaagaacucucag

SEQ ID NO: 419093 - RNA, 19 nt, Artificial Sequence
  Description of Artificial Sequence: Synthetic oligonucleotide
  Sense Strand Starting at position 1279 of SEQ ID NO: 315551
aguucuuuauggcucagaa

SEQ ID NO: 419094 - RNA, 19 nt, Artificial Sequence
  Description of Artificial Sequence: Synthetic oligonucleotide
  Antisense Strand to SEQ ID NO: 419093
uucugagccauaaagaacu

SEQ ID NO: 419095 - RNA, 19 nt, Artificial Sequence
  Description of Artificial Sequence: Synthetic oligonucleotide
  Sense Strand Starting at position 1279 of SEQ ID NO: 315553
uucuuuauggcucagaauu

SEQ ID NO: 419096 - RNA, 19 nt, Artificial Sequence
  Description of Artificial Sequence: Synthetic oligonucleotide
  Antisense Strand to SEQ ID NO: 419095
aauucugagccauaaagaa

SEQ ID NO: 419097 - RNA, 19 nt, Artificial Sequence
  Description of Artificial Sequence: Synthetic oligonucleotide
  Sense Strand Starting at position 1279 of SEQ ID NO: 315555
cuuuauggcucagaauuuc

SEQ ID NO: 419098 - RNA, 19 nt, Artificial Sequence
  Description of Artificial Sequence: Synthetic oligonucleotide
  Antisense Strand to SEQ ID NO: 419097
gaaauucugagccauaaag

SEQ ID NO: 419099 - RNA, 19 nt, Artificial Sequence
  Description of Artificial Sequence: Synthetic oligonucleotide
  Sense Strand Starting at position 1279 of SEQ ID NO: 315658
gcugcaguaagauguauga

SEQ ID NO: 419100 - RNA, 19 nt, Artificial Sequence
  Description of Artificial Sequence: Synthetic oligonucleotide
  Antisense Strand to SEQ ID NO: 419099
ucauacaucuuacugcagc

SEQ ID NO: 419101 - RNA, 19 nt, Artificial Sequence
  Description of Artificial Sequence: Synthetic oligonucleotide
  Sense Strand Starting at position 1279 of SEQ ID NO: 315785
agacuuuauuagucaaguc

SEQ ID NO: 419102 - RNA, 19 nt, Artificial Sequence
  Description of Artificial Sequence: Synthetic oligonucleotide
  Antisense Strand to SEQ ID NO: 419101
gacuugacuaauaaagucu

SEQ ID NO: 419103 - RNA, 19 nt, Artificial Sequence
  Description of Artificial Sequence: Synthetic oligonucleotide
  Sense Strand Starting at position 1279 of SEQ ID NO: 315797
ucaagucaacgcuauggua

SEQ ID NO: 419104 - RNA, 19 nt, Artificial Sequence
  Description of Artificial Sequence: Synthetic oligonucleotide
  Antisense Strand to SEQ ID NO: 419103
uaccauagcguugacuuga

SEQ ID NO: 419105 - RNA, 19 nt, Artificial Sequence
  Description of Artificial Sequence: Synthetic oligonucleotide
  Sense Strand Starting at position 1279 of SEQ ID NO: 315799
aagucaacgcuaugguaaa

SEQ ID NO: 419106 - RNA, 19 nt, Artificial Sequence
  Description of Artificial Sequence: Synthetic oligonucleotide
  Antisense Strand to SEQ ID NO: 419105
uuuaccauagcguugacuu

SEQ ID NO: 419107 - RNA, 19 nt, Artificial Sequence
  Description of Artificial Sequence: Synthetic oligonucleotide
  Sense Strand Starting at position 1279 of SEQ ID NO: 315977
gugcaaucacugcaucuua

SEQ ID NO: 419108 - RNA, 19 nt, Artificial Sequence
  Description of Artificial Sequence: Synthetic oligonucleotide
  Antisense Strand to SEQ ID NO: 419107
uaagaugcagugauugcac

SEQ ID NO: 419109 - RNA, 19 nt, Artificial Sequence
  Description of Artificial Sequence: Synthetic oligonucleotide
  Sense Strand Starting at position 1279 of SEQ ID NO: 316017
cugagaggguagucuccaa

SEQ ID NO: 419110 - RNA, 19 nt, Artificial Sequence
  Description of Artificial Sequence: Synthetic oligonucleotide
  Antisense Strand to SEQ ID NO: 419109
uuggagacuacccucucag

SEQ ID NO: 419111 - RNA, 19 nt, Artificial Sequence
  Description of Artificial Sequence: Synthetic oligonucleotide
  Sense Strand Starting at position 1279 of SEQ ID NO: 316207
guauucucccaauauaagu

SEQ ID NO: 419112 - RNA, 19 nt, Artificial Sequence
  Description of Artificial Sequence: Synthetic oligonucleotide
  Antisense Strand to SEQ ID NO: 419111
acuuauauugggagaauac

SEQ ID NO: 419113 - RNA, 19 nt, Artificial Sequence
  Description of Artificial Sequence: Synthetic oligonucleotide
  Sense Strand Starting at position 1279 of SEQ ID NO: 317494
ucuagcgagcgagaugauu

SEQ ID NO: 419114 - RNA, 19 nt, Artificial Sequence
  Description of Artificial Sequence: Synthetic oligonucleotide
  Antisense Strand to SEQ ID NO: 419113
aaucaucucgcucgcuaga

SEQ ID NO: 419115 - RNA, 19 nt, Artificial Sequence
  Description of Artificial Sequence: Synthetic oligonucleotide
  Sense Strand Starting at position 1279 of SEQ ID NO: 317685
cgccacuuccggaggugau

SEQ ID NO: 419116 - RNA, 19 nt, Artificial Sequence
  Description of Artificial Sequence: Synthetic oligonucleotide
  Antisense Strand to SEQ ID NO: 419115
aucaccuccggaaguggcg

SEQ ID NO: 419117 - RNA, 19 nt, Artificial Sequence
  Description of Artificial Sequence: Synthetic oligonucleotide
  Sense Strand Starting at position 1279 of SEQ ID NO: 317686
gccacuuccggaggugauu

SEQ ID NO: 419118 - RNA, 19 nt, Artificial Sequence
  Description of Artificial Sequence: Synthetic oligonucleotide
  Antisense Strand to SEQ ID NO: 419117
aaucaccuccggaaguggc

SEQ ID NO: 419119 - RNA, 19 nt, Artificial Sequence
  Description of Artificial Sequence: Synthetic oligonucleotide
  Sense Strand Starting at position 1279 of SEQ ID NO: 317812
ccuugauuggcgugagaau

SEQ ID NO: 419120 - RNA, 19 nt, Artificial Sequence
  Description of Artificial Sequence: Synthetic oligonucleotide
  Antisense Strand to SEQ ID NO: 419119
auucucacgccaaucaagg

SEQ ID NO: 419121 - RNA, 19 nt, Artificial Sequence
  Description of Artificial Sequence: Synthetic oligonucleotide
  Sense Strand Starting at position 1279 of SEQ ID NO: 317813
cuugauuggcgugagaaua

SEQ ID NO: 419122 - RNA, 19 nt, Artificial Sequence
  Description of Artificial Sequence: Synthetic oligonucleotide
  Antisense Strand to SEQ ID NO: 419121
uauucucacgccaaucaag

SEQ ID NO: 419123 - RNA, 19 nt, Artificial Sequence
  Description of Artificial Sequence: Synthetic oligonucleotide
  Sense Strand Starting at position 1279 of SEQ ID NO: 317881
guugcauugccgagagcag

SEQ ID NO: 419124 - RNA, 19 nt, Artificial Sequence
  Description of Artificial Sequence: Synthetic oligonucleotide
  Antisense Strand to SEQ ID NO: 419123
cugcucucggcaaugcaac

SEQ ID NO: 419125 - RNA, 19 nt, Artificial Sequence
  Description of Artificial Sequence: Synthetic oligonucleotide
  Sense Strand Starting at position 1279 of SEQ ID NO: 317900
cuuggcuauccugaguuga

SEQ ID NO: 419126 - RNA, 19 nt, Artificial Sequence
  Description of Artificial Sequence: Synthetic oligonucleotide
  Antisense Strand to SEQ ID NO: 419125
ucaacucaggauagccaag

SEQ ID NO: 419127 - RNA, 19 nt, Artificial Sequence
  Description of Artificial Sequence: Synthetic oligonucleotide
  Sense Strand Starting at position 1279 of SEQ ID NO: 317902
uggcuauccugaguugaac

SEQ ID NO: 419128 - RNA, 19 nt, Artificial Sequence
  Description of Artificial Sequence: Synthetic oligonucleotide
  Antisense Strand to SEQ ID NO: 419127
guucaacucaggauagcca

SEQ ID NO: 419129 - RNA, 19 nt, Artificial Sequence
  Description of Artificial Sequence: Synthetic oligonucleotide
  Sense Strand Starting at position 1279 of SEQ ID NO: 318131
cagugugcggaucagaguu

SEQ ID NO: 419130 - RNA, 19 nt, Artificial Sequence
  Description of Artificial Sequence: Synthetic oligonucleotide
  Antisense Strand to SEQ ID NO: 419129
aacucugauccgcacacug

SEQ ID NO: 419131 - RNA, 19 nt, Artificial Sequence
  Description of Artificial Sequence: Synthetic oligonucleotide
  Sense Strand Starting at position 1279 of SEQ ID NO: 318139
ggaucagaguuccuuagga

SEQ ID NO: 419132 - RNA, 19 nt, Artificial Sequence
  Description of Artificial Sequence: Synthetic oligonucleotide
  Antisense Strand to SEQ ID NO: 419131
uccuaaggaacucugaucc

SEQ ID NO: 419133 - RNA, 19 nt, Artificial Sequence
  Description of Artificial Sequence: Synthetic oligonucleotide
  Sense Strand Starting at position 1279 of SEQ ID NO: 318179
gcggaauccuugcugaaga

SEQ ID NO: 419134 - RNA, 19 nt, Artificial Sequence
  Description of Artificial Sequence: Synthetic oligonucleotide
  Antisense Strand to SEQ ID NO: 419133
ucuucagcaaggauuccgc

SEQ ID NO: 419135 - RNA, 19 nt, Artificial Sequence
  Description of Artificial Sequence: Synthetic oligonucleotide
  Sense Strand Starting at position 1279 of SEQ ID NO: 318228
cgaacuuacugccuaagaa

SEQ ID NO: 419136 - RNA, 19 nt, Artificial Sequence
  Description of Artificial Sequence: Synthetic oligonucleotide
  Antisense Strand to SEQ ID NO: 419135
uucuuaggcaguaaguucg

SEQ ID NO: 419137 - RNA, 19 nt, Artificial Sequence
  Description of Artificial Sequence: Synthetic oligonucleotide
  Sense Strand Starting at position 1279 of SEQ ID NO: 318356
gucucaacgccugugugau

SEQ ID NO: 419138 - RNA, 19 nt, Artificial Sequence
  Description of Artificial Sequence: Synthetic oligonucleotide
  Antisense Strand to SEQ ID NO: 419137
aucacacaggcguugagac

SEQ ID NO: 419139 - RNA, 19 nt, Artificial Sequence
  Description of Artificial Sequence: Synthetic oligonucleotide
  Sense Strand Starting at position 1279 of SEQ ID NO: 318362
acgccugugugauuuagau

SEQ ID NO: 419140 - RNA, 19 nt, Artificial Sequence
  Description of Artificial Sequence: Synthetic oligonucleotide
  Antisense Strand to SEQ ID NO: 419139
aucuaaaucacacaggcgu

SEQ ID NO: 419141 - RNA, 19 nt, Artificial Sequence
  Description of Artificial Sequence: Synthetic oligonucleotide
  Sense Strand Starting at position 1279 of SEQ ID NO: 318366
cugugugauuuagauacua

SEQ ID NO: 419142 - RNA, 19 nt, Artificial Sequence
  Description of Artificial Sequence: Synthetic oligonucleotide
  Antisense Strand to SEQ ID NO: 419141
uaguaucuaaaucacacag

SEQ ID NO: 419143 - RNA, 19 nt, Artificial Sequence
  Description of Artificial Sequence: Synthetic oligonucleotide
  Sense Strand Starting at position 1279 of SEQ ID NO: 318431
cgggugaauuaguugaggu

SEQ ID NO: 419144 - RNA, 19 nt, Artificial Sequence
  Description of Artificial Sequence: Synthetic oligonucleotide
  Antisense Strand to SEQ ID NO: 419143
accucaacuaauucacccg

SEQ ID NO: 419145 - RNA, 19 nt, Artificial Sequence
  Description of Artificial Sequence: Synthetic oligonucleotide
  Sense Strand Starting at position 1279 of SEQ ID NO: 318432
gggugaauuaguugagguc

SEQ ID NO: 419146 - RNA, 19 nt, Artificial Sequence
  Description of Artificial Sequence: Synthetic oligonucleotide
  Antisense Strand to SEQ ID NO: 419145
gaccucaacuaauucaccc

SEQ ID NO: 419147 - RNA, 19 nt, Artificial Sequence
  Description of Artificial Sequence: Synthetic oligonucleotide
  Sense Strand Starting at position 1279 of SEQ ID NO: 318433
ggugaauuaguugagguca

SEQ ID NO: 419148 - RNA, 19 nt, Artificial Sequence
  Description of Artificial Sequence: Synthetic oligonucleotide
  Antisense Strand to SEQ ID NO: 419147
ugaccucaacuaauucacc

SEQ ID NO: 419149 - RNA, 19 nt, Artificial Sequence
  Description of Artificial Sequence: Synthetic oligonucleotide
  Sense Strand Starting at position 1279 of SEQ ID NO: 318569
aggcuugaacccgggagaa

SEQ ID NO: 419150 - RNA, 19 nt, Artificial Sequence
  Description of Artificial Sequence: Synthetic oligonucleotide
  Antisense Strand to SEQ ID NO: 419149
uucucccggguucaagccu

SEQ ID NO: 419151 - RNA, 19 nt, Artificial Sequence
  Description of Artificial Sequence: Synthetic oligonucleotide
  Sense Strand Starting at position 1279 of SEQ ID NO: 318889
agggaaacauuggucucau

SEQ ID NO: 419152 - RNA, 19 nt, Artificial Sequence
  Description of Artificial Sequence: Synthetic oligonucleotide
  Antisense Strand to SEQ ID NO: 419151
augagaccaauguuucccu

SEQ ID NO: 419153 - RNA, 19 nt, Artificial Sequence
  Description of Artificial Sequence: Synthetic oligonucleotide
  Sense Strand Starting at position 1279 of SEQ ID NO: 318890
gggaaacauuggucucauu

SEQ ID NO: 419154 - RNA, 19 nt, Artificial Sequence
  Description of Artificial Sequence: Synthetic oligonucleotide
  Antisense Strand to SEQ ID NO: 419153
aaugagaccaauguuuccc

SEQ ID NO: 419155 - RNA, 19 nt, Artificial Sequence
  Description of Artificial Sequence: Synthetic oligonucleotide
  Sense Strand Starting at position 1279 of SEQ ID NO: 318986
uacuauuaguuguuggaaa

SEQ ID NO: 419156 - RNA, 19 nt, Artificial Sequence
  Description of Artificial Sequence: Synthetic oligonucleotide
  Antisense Strand to SEQ ID NO: 419155
uuuccaacaacuaauagua

SEQ ID NO: 419157 - RNA, 19 nt, Artificial Sequence
  Description of Artificial Sequence: Synthetic oligonucleotide
  Sense Strand Starting at position 1279 of SEQ ID NO: 319026
ggaagauaauucucugguu

SEQ ID NO: 419158 - RNA, 19 nt, Artificial Sequence
  Description of Artificial Sequence: Synthetic oligonucleotide
  Antisense Strand to SEQ ID NO: 419157
aaccagagaauuaucuucc

SEQ ID NO: 419159 - RNA, 19 nt, Artificial Sequence
  Description of Artificial Sequence: Synthetic oligonucleotide
  Sense Strand Starting at position 1279 of SEQ ID NO: 319027
gaagauaauucucugguuu

SEQ ID NO: 419160 - RNA, 19 nt, Artificial Sequence
  Description of Artificial Sequence: Synthetic oligonucleotide
  Antisense Strand to SEQ ID NO: 419159
aaaccagagaauuaucuuc

SEQ ID NO: 419161 - RNA, 19 nt, Artificial Sequence
  Description of Artificial Sequence: Synthetic oligonucleotide
  Sense Strand Starting at position 1279 of SEQ ID NO: 319089
caggcugugcccuaaggaa

SEQ ID NO: 419162 - RNA, 19 nt, Artificial Sequence
  Description of Artificial Sequence: Synthetic oligonucleotide
  Antisense Strand to SEQ ID NO: 419161
uuccuuagggcacagccug

SEQ ID NO: 419163 - RNA, 19 nt, Artificial Sequence
  Description of Artificial Sequence: Synthetic oligonucleotide
  Sense Strand Starting at position 1279 of SEQ ID NO: 319150
gugucucaggccuaugauc

SEQ ID NO: 419164 - RNA, 19 nt, Artificial Sequence
  Description of Artificial Sequence: Synthetic oligonucleotide
  Antisense Strand to SEQ ID NO: 419163
gaucauaggccugagacac

SEQ ID NO: 419165 - RNA, 19 nt, Artificial Sequence
  Description of Artificial Sequence: Synthetic oligonucleotide
  Sense Strand Starting at position 1279 of SEQ ID NO: 319189
gacuuaaagcuugggagga

SEQ ID NO: 419166 - RNA, 19 nt, Artificial Sequence
  Description of Artificial Sequence: Synthetic oligonucleotide
  Antisense Strand to SEQ ID NO: 419165
uccucccaagcuuuaaguc

SEQ ID NO: 419167 - RNA, 19 nt, Artificial Sequence
  Description of Artificial Sequence: Synthetic oligonucleotide
  Sense Strand Starting at position 1280 of SEQ ID NO: 315364
aucuacaggccuuaaguua

SEQ ID NO: 419168 - RNA, 19 nt, Artificial Sequence
  Description of Artificial Sequence: Synthetic oligonucleotide
  Antisense Strand to SEQ ID NO: 419167
uaacuuaaggccuguagau

SEQ ID NO: 419169 - RNA, 19 nt, Artificial Sequence
  Description of Artificial Sequence: Synthetic oligonucleotide
  Sense Strand Starting at position 1280 of SEQ ID NO: 315462
gguuuaauaugccuuccac

SEQ ID NO: 419170 - RNA, 19 nt, Artificial Sequence
  Description of Artificial Sequence: Synthetic oligonucleotide
  Antisense Strand to SEQ ID NO: 419169
guggaaggcauauuaaacc

SEQ ID NO: 419171 - RNA, 19 nt, Artificial Sequence
  Description of Artificial Sequence: Synthetic oligonucleotide
  Sense Strand Starting at position 1280 of SEQ ID NO: 315519
cugagaguucuuuauggcu

SEQ ID NO: 419172 - RNA, 19 nt, Artificial Sequence
  Description of Artificial Sequence: Synthetic oligonucleotide
  Antisense Strand to SEQ ID NO: 419171
agccauaaagaacucucag

SEQ ID NO: 419173 - RNA, 19 nt, Artificial Sequence
  Description of Artificial Sequence: Synthetic oligonucleotide
  Sense Strand Starting at position 1280 of SEQ ID NO: 315524
aguucuuuauggcucagaa

SEQ ID NO: 419174 - RNA, 19 nt, Artificial Sequence
  Description of Artificial Sequence: Synthetic oligonucleotide
  Antisense Strand to SEQ ID NO: 419173
uucugagccauaaagaacu

SEQ ID NO: 419175 - RNA, 19 nt, Artificial Sequence
  Description of Artificial Sequence: Synthetic oligonucleotide
  Sense Strand Starting at position 1280 of SEQ ID NO: 315526
uucuuuauggcucagaauu

SEQ ID NO: 419176 - RNA, 19 nt, Artificial Sequence
  Description of Artificial Sequence: Synthetic oligonucleotide
  Antisense Strand to SEQ ID NO: 419175
aauucugagccauaaagaa

SEQ ID NO: 419177 - RNA, 19 nt, Artificial Sequence
  Description of Artificial Sequence: Synthetic oligonucleotide
  Sense Strand Starting at position 1280 of SEQ ID NO: 315528
cuuuauggcucagaauuuc

SEQ ID NO: 419178 - RNA, 19 nt, Artificial Sequence
  Description of Artificial Sequence: Synthetic oligonucleotide
  Antisense Strand to SEQ ID NO: 419177
gaaauucugagccauaaag

SEQ ID NO: 419179 - RNA, 19 nt, Artificial Sequence
  Description of Artificial Sequence: Synthetic oligonucleotide
  Sense Strand Starting at position 1280 of SEQ ID NO: 315631
gcugcaguaagauguauga

SEQ ID NO: 419180 - RNA, 19 nt, Artificial Sequence
  Description of Artificial Sequence: Synthetic oligonucleotide
  Antisense Strand to SEQ ID NO: 419179
ucauacaucuuacugcagc

SEQ ID NO: 419181 - RNA, 19 nt, Artificial Sequence
  Description of Artificial Sequence: Synthetic oligonucleotide
  Sense Strand Starting at position 1280 of SEQ ID NO: 315758
agacuuuauuagucaaguc

SEQ ID NO: 419182 - RNA, 19 nt, Artificial Sequence
  Description of Artificial Sequence: Synthetic oligonucleotide
  Antisense Strand to SEQ ID NO: 419181
gacuugacuaauaaagucu

SEQ ID NO: 419183 - RNA, 19 nt, Artificial Sequence
  Description of Artificial Sequence: Synthetic oligonucleotide
  Sense Strand Starting at position 1280 of SEQ ID NO: 315770
ucaagucaacgcuauggua

SEQ ID NO: 419184 - RNA, 19 nt, Artificial Sequence
  Description of Artificial Sequence: Synthetic oligonucleotide
  Antisense Strand to SEQ ID NO: 419183
uaccauagcguugacuuga

SEQ ID NO: 419185 - RNA, 19 nt, Artificial Sequence
  Description of Artificial Sequence: Synthetic oligonucleotide
  Sense Strand Starting at position 1280 of SEQ ID NO: 315772
aagucaacgcuaugguaaa

SEQ ID NO: 419186 - RNA, 19 nt, Artificial Sequence
  Description of Artificial Sequence: Synthetic oligonucleotide
  Antisense Strand to SEQ ID NO: 419185
uuuaccauagcguugacuu

SEQ ID NO: 419187 - RNA, 19 nt, Artificial Sequence
  Description of Artificial Sequence: Synthetic oligonucleotide
  Sense Strand Starting at position 1280 of SEQ ID NO: 315950
gugcaaucacugcaucuua

SEQ ID NO: 419188 - RNA, 19 nt, Artificial Sequence
  Description of Artificial Sequence: Synthetic oligonucleotide
  Antisense Strand to SEQ ID NO: 419187
uaagaugcagugauugcac

SEQ ID NO: 419189 - RNA, 19 nt, Artificial Sequence
  Description of Artificial Sequence: Synthetic oligonucleotide
  Sense Strand Starting at position 1280 of SEQ ID NO: 315990
cugagaggguagucuccaa

SEQ ID NO: 419190 - RNA, 19 nt, Artificial Sequence
  Description of Artificial Sequence: Synthetic oligonucleotide
  Antisense Strand to SEQ ID NO: 419189
uuggagacuacccucucag

SEQ ID NO: 419191 - RNA, 19 nt, Artificial Sequence
  Description of Artificial Sequence: Synthetic oligonucleotide
  Sense Strand Starting at position 1280 of SEQ ID NO: 316180
guauucucccaauauaagu

SEQ ID NO: 419192 - RNA, 19 nt, Artificial Sequence
  Description of Artificial Sequence: Synthetic oligonucleotide
  Antisense Strand to SEQ ID NO: 419191
acuuauauugggagaauac

SEQ ID NO: 419193 - RNA, 19 nt, Artificial Sequence
  Description of Artificial Sequence: Synthetic oligonucleotide
  Sense Strand Starting at position 1280 of SEQ ID NO: 317467
ucuagcgagcgagaugauu

SEQ ID NO: 419194 - RNA, 19 nt, Artificial Sequence
  Description of Artificial Sequence: Synthetic oligonucleotide
  Antisense Strand to SEQ ID NO: 419193
aaucaucucgcucgcuaga

SEQ ID NO: 419195 - RNA, 19 nt, Artificial Sequence
  Description of Artificial Sequence: Synthetic oligonucleotide
  Sense Strand Starting at position 1280 of SEQ ID NO: 317658
cgccacuuccggaggugau

SEQ ID NO: 419196 - RNA, 19 nt, Artificial Sequence
  Description of Artificial Sequence: Synthetic oligonucleotide
  Antisense Strand to SEQ ID NO: 419195
aucaccuccggaaguggcg

SEQ ID NO: 419197 - RNA, 19 nt, Artificial Sequence
  Description of Artificial Sequence: Synthetic oligonucleotide
  Sense Strand Starting at position 1280 of SEQ ID NO: 317659
gccacuuccggaggugauu

SEQ ID NO: 419198 - RNA, 19 nt, Artificial Sequence
  Description of Artificial Sequence: Synthetic oligonucleotide
  Antisense Strand to SEQ ID NO: 419197
aaucaccuccggaaguggc

SEQ ID NO: 419199 - RNA, 19 nt, Artificial Sequence
  Description of Artificial Sequence: Synthetic oligonucleotide
  Sense Strand Starting at position 1280 of SEQ ID NO: 317785
ccuugauuggcgugagaau

SEQ ID NO: 419200 - RNA, 19 nt, Artificial Sequence
  Description of Artificial Sequence: Synthetic oligonucleotide
  Antisense Strand to SEQ ID NO: 419199
auucucacgccaaucaagg

SEQ ID NO: 419201 - RNA, 19 nt, Artificial Sequence
  Description of Artificial Sequence: Synthetic oligonucleotide
  Sense Strand Starting at position 1280 of SEQ ID NO: 317786
cuugauuggcgugagaaua

SEQ ID NO: 419202 - RNA, 19 nt, Artificial Sequence
  Description of Artificial Sequence: Synthetic oligonucleotide
  Antisense Strand to SEQ ID NO: 419201
uauucucacgccaaucaag

SEQ ID NO: 419203 - RNA, 19 nt, Artificial Sequence
  Description of Artificial Sequence: Synthetic oligonucleotide
  Sense Strand Starting at position 1280 of SEQ ID NO: 317854
guugcauugccgagagcag

SEQ ID NO: 419204 - RNA, 19 nt, Artificial Sequence
  Description of Artificial Sequence: Synthetic oligonucleotide
  Antisense Strand to SEQ ID NO: 419203
cugcucucggcaaugcaac

SEQ ID NO: 419205 - RNA, 19 nt, Artificial Sequence
  Description of Artificial Sequence: Synthetic oligonucleotide
  Sense Strand Starting at position 1280 of SEQ ID NO: 317873
cuuggcuauccugaguuga

SEQ ID NO: 419206 - RNA, 19 nt, Artificial Sequence
  Description of Artificial Sequence: Synthetic oligonucleotide
  Antisense Strand to SEQ ID NO: 419205
ucaacucaggauagccaag

SEQ ID NO: 419207 - RNA, 19 nt, Artificial Sequence
  Description of Artificial Sequence: Synthetic oligonucleotide
  Sense Strand Starting at position 1280 of SEQ ID NO: 317875
uggcuauccugaguugaac

SEQ ID NO: 419208 - RNA, 19 nt, Artificial Sequence
  Description of Artificial Sequence: Synthetic oligonucleotide
  Antisense Strand to SEQ ID NO: 419207
guucaacucaggauagcca

SEQ ID NO: 419209 - RNA, 19 nt, Artificial Sequence
  Description of Artificial Sequence: Synthetic oligonucleotide
  Sense Strand Starting at position 1280 of SEQ ID NO: 318104
cagugugcggaucagaguu

SEQ ID NO: 419210 - RNA, 19 nt, Artificial Sequence
  Description of Artificial Sequence: Synthetic oligonucleotide
  Antisense Strand to SEQ ID NO: 419209
aacucugauccgcacacug

SEQ ID NO: 419211 - RNA, 19 nt, Artificial Sequence
  Description of Artificial Sequence: Synthetic oligonucleotide
  Sense Strand Starting at position 1280 of SEQ ID NO: 318112
ggaucagaguuccuuagga

SEQ ID NO: 419212 - RNA, 19 nt, Artificial Sequence
  Description of Artificial Sequence: Synthetic oligonucleotide
  Antisense Strand to SEQ ID NO: 419211
uccuaaggaacucugaucc

SEQ ID NO: 419213 - RNA, 19 nt, Artificial Sequence
  Description of Artificial Sequence: Synthetic oligonucleotide
  Sense Strand Starting at position 1280 of SEQ ID NO: 318152
gcggaauccuugcugaaga

SEQ ID NO: 419214 - RNA, 19 nt, Artificial Sequence
  Description of Artificial Sequence: Synthetic oligonucleotide
  Antisense Strand to SEQ ID NO: 419213
ucuucagcaaggauuccgc

SEQ ID NO: 419215 - RNA, 19 nt, Artificial Sequence
  Description of Artificial Sequence: Synthetic oligonucleotide
  Sense Strand Starting at position 1280 of SEQ ID NO: 318201
cgaacuuacugccuaagaa

SEQ ID NO: 419216 - RNA, 19 nt, Artificial Sequence
  Description of Artificial Sequence: Synthetic oligonucleotide
  Antisense Strand to SEQ ID NO: 419215
uucuuaggcaguaaguucg

SEQ ID NO: 419217 - RNA, 19 nt, Artificial Sequence
  Description of Artificial Sequence: Synthetic oligonucleotide
  Sense Strand Starting at position 1280 of SEQ ID NO: 318329
gucucaacgccugugugau

SEQ ID NO: 419218 - RNA, 19 nt, Artificial Sequence
  Description of Artificial Sequence: Synthetic oligonucleotide
  Antisense Strand to SEQ ID NO: 419217
aucacacaggcguugagac

SEQ ID NO: 419219 - RNA, 19 nt, Artificial Sequence
  Description of Artificial Sequence: Synthetic oligonucleotide
  Sense Strand Starting at position 1280 of SEQ ID NO: 318335
acgccugugugauuuagau

SEQ ID NO: 419220 - RNA, 19 nt, Artificial Sequence
  Description of Artificial Sequence: Synthetic oligonucleotide
  Antisense Strand to SEQ ID NO: 419219
aucuaaaucacacaggcgu

SEQ ID NO: 419221 - RNA, 19 nt, Artificial Sequence
  Description of Artificial Sequence: Synthetic oligonucleotide
  Sense Strand Starting at position 1280 of SEQ ID NO: 318339
cugugugauuuagauacua

SEQ ID NO: 419222 - RNA, 19 nt, Artificial Sequence
  Description of Artificial Sequence: Synthetic oligonucleotide
  Antisense Strand to SEQ ID NO: 419221
uaguaucuaaaucacacag

SEQ ID NO: 419223 - RNA, 19 nt, Artificial Sequence
  Description of Artificial Sequence: Synthetic oligonucleotide
  Sense Strand Starting at position 1280 of SEQ ID NO: 318404
cgggugaauuaguugaggu

SEQ ID NO: 419224 - RNA, 19 nt, Artificial Sequence
  Description of Artificial Sequence: Synthetic oligonucleotide
  Antisense Strand to SEQ ID NO: 419223
accucaacuaauucacccg

SEQ ID NO: 419225 - RNA, 19 nt, Artificial Sequence
  Description of Artificial Sequence: Synthetic oligonucleotide
  Sense Strand Starting at position 1280 of SEQ ID NO: 318405
gggugaauuaguugagguc

SEQ ID NO: 419226 - RNA, 19 nt, Artificial Sequence
  Description of Artificial Sequence: Synthetic oligonucleotide
  Antisense Strand to SEQ ID NO: 419225
gaccucaacuaauucaccc

SEQ ID NO: 419227 - RNA, 19 nt, Artificial Sequence
  Description of Artificial Sequence: Synthetic oligonucleotide
  Sense Strand Starting at position 1280 of SEQ ID NO: 318406
ggugaauuaguugagguca

SEQ ID NO: 419228 - RNA, 19 nt, Artificial Sequence
  Description of Artificial Sequence: Synthetic oligonucleotide
  Antisense Strand to SEQ ID NO: 419227
ugaccucaacuaauucacc

SEQ ID NO: 419229 - RNA, 19 nt, Artificial Sequence
  Description of Artificial Sequence: Synthetic oligonucleotide
  Sense Strand Starting at position 1280 of SEQ ID NO: 318542
aggcuugaacccgggagaa

SEQ ID NO: 419230 - RNA, 19 nt, Artificial Sequence
  Description of Artificial Sequence: Synthetic oligonucleotide
  Antisense Strand to SEQ ID NO: 419229
uucucccggguucaagccu

SEQ ID NO: 419231 - RNA, 19 nt, Artificial Sequence
  Description of Artificial Sequence: Synthetic oligonucleotide
  Sense Strand Starting at position 1280 of SEQ ID NO: 318862
agggaaacauuggucucau

SEQ ID NO: 419232 - RNA, 19 nt, Artificial Sequence
  Description of Artificial Sequence: Synthetic oligonucleotide
  Antisense Strand to SEQ ID NO: 419231
augagaccaauguuucccu

SEQ ID NO: 419233 - RNA, 19 nt, Artificial Sequence
  Description of Artificial Sequence: Synthetic oligonucleotide
  Sense Strand Starting at position 1280 of SEQ ID NO: 318863
gggaaacauuggucucauu

SEQ ID NO: 419234 - RNA, 19 nt, Artificial Sequence
  Description of Artificial Sequence: Synthetic oligonucleotide
  Antisense Strand to SEQ ID NO: 419233
aaugagaccaauguuuccc

SEQ ID NO: 419235 - RNA, 19 nt, Artificial Sequence
  Description of Artificial Sequence: Synthetic oligonucleotide
  Sense Strand Starting at position 1280 of SEQ ID NO: 318959
uacuauuaguuguuggaaa

SEQ ID NO: 419236 - RNA, 19 nt, Artificial Sequence
  Description of Artificial Sequence: Synthetic oligonucleotide
  Antisense Strand to SEQ ID NO: 419235
uuuccaacaacuaauagua

SEQ ID NO: 419237 - RNA, 19 nt, Artificial Sequence
  Description of Artificial Sequence: Synthetic oligonucleotide
  Sense Strand Starting at position 1280 of SEQ ID NO: 318999
ggaagauaauucucugguu

SEQ ID NO: 419238 - RNA, 19 nt, Artificial Sequence
  Description of Artificial Sequence: Synthetic oligonucleotide
  Antisense Strand to SEQ ID NO: 419237
aaccagagaauuaucuucc

SEQ ID NO: 419239 - RNA, 19 nt, Artificial Sequence
  Description of Artificial Sequence: Synthetic oligonucleotide
  Sense Strand Starting at position 1280 of SEQ ID NO: 319000
gaagauaauucucugguuu

SEQ ID NO: 419240 - RNA, 19 nt, Artificial Sequence
  Description of Artificial Sequence: Synthetic oligonucleotide
  Antisense Strand to SEQ ID NO: 419239
aaaccagagaauuaucuuc

SEQ ID NO: 419241 - RNA, 19 nt, Artificial Sequence
  Description of Artificial Sequence: Synthetic oligonucleotide
  Sense Strand Starting at position 1280 of SEQ ID NO: 319062
caggcugugcccuaaggaa

SEQ ID NO: 419242 - RNA, 19 nt, Artificial Sequence
  Description of Artificial Sequence: Synthetic oligonucleotide
  Antisense Strand to SEQ ID NO: 419241
uuccuuagggcacagccug

SEQ ID NO: 419243 - RNA, 19 nt, Artificial Sequence
  Description of Artificial Sequence: Synthetic oligonucleotide
  Sense Strand Starting at position 1280 of SEQ ID NO: 319123
gugucucaggccuaugauc

SEQ ID NO: 419244 - RNA, 19 nt, Artificial Sequence
  Description of Artificial Sequence: Synthetic oligonucleotide
  Antisense Strand to SEQ ID NO: 419243
gaucauaggccugagacac

SEQ ID NO: 419245 - RNA, 19 nt, Artificial Sequence
  Description of Artificial Sequence: Synthetic oligonucleotide
  Sense Strand Starting at position 1280 of SEQ ID NO: 319162
gacuuaaagcuugggagga

SEQ ID NO: 419246 - RNA, 19 nt, Artificial Sequence
  Description of Artificial Sequence: Synthetic oligonucleotide
  Antisense Strand to SEQ ID NO: 419245
uccucccaagcuuuaaguc

SEQ ID NO: 419247 - RNA, 19 nt, Artificial Sequence
  Description of Artificial Sequence: Synthetic oligonucleotide
  Sense Strand Starting at position 1281 of SEQ ID NO: 315771
gcuagauaacaaugcguca

SEQ ID NO: 419248 - RNA, 19 nt, Artificial Sequence
  Description of Artificial Sequence: Synthetic oligonucleotide
  Antisense Strand to SEQ ID NO: 419247
ugacgcauuguuaucuagc

SEQ ID NO: 419249 - RNA, 19 nt, Artificial Sequence
  Description of Artificial Sequence: Synthetic oligonucleotide
  Sense Strand Starting at position 1281 of SEQ ID NO: 315774
agauaacaaugcgucaaau

SEQ ID NO: 419250 - RNA, 19 nt, Artificial Sequence
  Description of Artificial Sequence: Synthetic oligonucleotide
  Antisense Strand to SEQ ID NO: 419249
auuugacgcauuguuaucu

SEQ ID NO: 419251 - RNA, 19 nt, Artificial Sequence
  Description of Artificial Sequence: Synthetic oligonucleotide
  Sense Strand Starting at position 1281 of SEQ ID NO: 315776
auaacaaugcgucaaauau

SEQ ID NO: 419252 - RNA, 19 nt, Artificial Sequence
  Description of Artificial Sequence: Synthetic oligonucleotide
  Antisense Strand to SEQ ID NO: 419251
auauuugacgcauuguuau

SEQ ID NO: 419253 - RNA, 19 nt, Artificial Sequence
  Description of Artificial Sequence: Synthetic oligonucleotide
  Sense Strand Starting at position 1281 of SEQ ID NO: 315794
ucucguuaucauugcaaag

SEQ ID NO: 419254 - RNA, 19 nt, Artificial Sequence
  Description of Artificial Sequence: Synthetic oligonucleotide
  Antisense Strand to SEQ ID NO: 419253
cuuugcaaugauaacgaga

SEQ ID NO: 419255 - RNA, 19 nt, Artificial Sequence
  Description of Artificial Sequence: Synthetic oligonucleotide
  Sense Strand Starting at position 1281 of SEQ ID NO: 315852
guauacaaccuguaguagu

SEQ ID NO: 419256 - RNA, 19 nt, Artificial Sequence
  Description of Artificial Sequence: Synthetic oligonucleotide
  Antisense Strand to SEQ ID NO: 419255
acuacuacagguuguauac

SEQ ID NO: 419257 - RNA, 19 nt, Artificial Sequence
  Description of Artificial Sequence: Synthetic oligonucleotide
  Sense Strand Starting at position 1281 of SEQ ID NO: 315896
ccagauauugcacguuaaa

SEQ ID NO: 419258 - RNA, 19 nt, Artificial Sequence
  Description of Artificial Sequence: Synthetic oligonucleotide
  Antisense Strand to SEQ ID NO: 419257
uuuaacgugcaauaucugg

SEQ ID NO: 419259 - RNA, 19 nt, Artificial Sequence
  Description of Artificial Sequence: Synthetic oligonucleotide
  Sense Strand Starting at position 1281 of SEQ ID NO: 315899
gauauugcacguuaaacuc

SEQ ID NO: 419260 - RNA, 19 nt, Artificial Sequence
  Description of Artificial Sequence: Synthetic oligonucleotide
  Antisense Strand to SEQ ID NO: 419259
gaguuuaacgugcaauauc

SEQ ID NO: 419261 - RNA, 19 nt, Artificial Sequence
  Description of Artificial Sequence: Synthetic oligonucleotide
  Sense Strand Starting at position 1281 of SEQ ID NO: 315908
cguuaaacucuaggaacau

SEQ ID NO: 419262 - RNA, 19 nt, Artificial Sequence
  Description of Artificial Sequence: Synthetic oligonucleotide
  Antisense Strand to SEQ ID NO: 419261
auguuccuagaguuuaacg

SEQ ID NO: 419263 - RNA, 19 nt, Artificial Sequence
  Description of Artificial Sequence: Synthetic oligonucleotide
  Sense Strand Starting at position 1281 of SEQ ID NO: 315909
guuaaacucuaggaacauu

SEQ ID NO: 419264 - RNA, 19 nt, Artificial Sequence
  Description of Artificial Sequence: Synthetic oligonucleotide
  Antisense Strand to SEQ ID NO: 419263
aauguuccuagaguuuaac

SEQ ID NO: 419265 - RNA, 19 nt, Artificial Sequence
  Description of Artificial Sequence: Synthetic oligonucleotide
  Sense Strand Starting at position 1281 of SEQ ID NO: 315932
guggaaacauucuccgcau

SEQ ID NO: 419266 - RNA, 19 nt, Artificial Sequence
  Description of Artificial Sequence: Synthetic oligonucleotide
  Antisense Strand to SEQ ID NO: 419265
augcggagaauguuuccac

SEQ ID NO: 419267 - RNA, 19 nt, Artificial Sequence
  Description of Artificial Sequence: Synthetic oligonucleotide
  Sense Strand Starting at position 1281 of SEQ ID NO: 315934
ggaaacauucuccgcaucu

SEQ ID NO: 419268 - RNA, 19 nt, Artificial Sequence
  Description of Artificial Sequence: Synthetic oligonucleotide
  Antisense Strand to SEQ ID NO: 419267
agaugcggagaauguuucc

SEQ ID NO: 419269 - RNA, 19 nt, Artificial Sequence
  Description of Artificial Sequence: Synthetic oligonucleotide
  Sense Strand Starting at position 1281 of SEQ ID NO: 315951
cuaacaaauuacgagauaa

SEQ ID NO: 419270 - RNA, 19 nt, Artificial Sequence
  Description of Artificial Sequence: Synthetic oligonucleotide
  Antisense Strand to SEQ ID NO: 419269
uuaucucguaauuuguuag

SEQ ID NO: 419271 - RNA, 19 nt, Artificial Sequence
  Description of Artificial Sequence: Synthetic oligonucleotide
  Sense Strand Starting at position 1281 of SEQ ID NO: 315969
aaguauagauccguugaga

SEQ ID NO: 419272 - RNA, 19 nt, Artificial Sequence
  Description of Artificial Sequence: Synthetic oligonucleotide
  Antisense Strand to SEQ ID NO: 419271
ucucaacggaucuauacuu

SEQ ID NO: 419273 - RNA, 19 nt, Artificial Sequence
  Description of Artificial Sequence: Synthetic oligonucleotide
  Sense Strand Starting at position 1281 of SEQ ID NO: 316048
ggcacauuggaguacucuu

SEQ ID NO: 419274 - RNA, 19 nt, Artificial Sequence
  Description of Artificial Sequence: Synthetic oligonucleotide
  Antisense Strand to SEQ ID NO: 419273
aagaguacuccaaugugcc

SEQ ID NO: 419275 - RNA, 19 nt, Artificial Sequence
  Description of Artificial Sequence: Synthetic oligonucleotide
  Sense Strand Starting at position 1281 of SEQ ID NO: 316056
ggaguacucuucucucaaa

SEQ ID NO: 419276 - RNA, 19 nt, Artificial Sequence
  Description of Artificial Sequence: Synthetic oligonucleotide
  Antisense Strand to SEQ ID NO: 419275
uuugagagaagaguacucc

SEQ ID NO: 419277 - RNA, 19 nt, Artificial Sequence
  Description of Artificial Sequence: Synthetic oligonucleotide
  Sense Strand Starting at position 1281 of SEQ ID NO: 316354
cgucuccgucuuuaugauu

SEQ ID NO: 419278 - RNA, 19 nt, Artificial Sequence
  Description of Artificial Sequence: Synthetic oligonucleotide
  Antisense Strand to SEQ ID NO: 419277
aaucauaaagacggagacg

SEQ ID NO: 419279 - RNA, 19 nt, Artificial Sequence
  Description of Artificial Sequence: Synthetic oligonucleotide
  Sense Strand Starting at position 1281 of SEQ ID NO: 317068
ccgguaaccgcgucucuua

SEQ ID NO: 419280 - RNA, 19 nt, Artificial Sequence
  Description of Artificial Sequence: Synthetic oligonucleotide
  Antisense Strand to SEQ ID NO: 419279
uaagagacgcgguuaccgg

SEQ ID NO: 419281 - RNA, 19 nt, Artificial Sequence
  Description of Artificial Sequence: Synthetic oligonucleotide
  Sense Strand Starting at position 1281 of SEQ ID NO: 317079
gucucuuaccgguaauggu

SEQ ID NO: 419282 - RNA, 19 nt, Artificial Sequence
  Description of Artificial Sequence: Synthetic oligonucleotide
  Antisense Strand to SEQ ID NO: 419281
accauuaccgguaagagac

SEQ ID NO: 419283 - RNA, 19 nt, Artificial Sequence
  Description of Artificial Sequence: Synthetic oligonucleotide
  Sense Strand Starting at position 1281 of SEQ ID NO: 317424
cgcggugucgauuccuaga

SEQ ID NO: 419284 - RNA, 19 nt, Artificial Sequence
  Description of Artificial Sequence: Synthetic oligonucleotide
  Antisense Strand to SEQ ID NO: 419283
ucuaggaaucgacaccgcg

SEQ ID NO: 419285 - RNA, 19 nt, Artificial Sequence
  Description of Artificial Sequence: Synthetic oligonucleotide
  Sense Strand Starting at position 1281 of SEQ ID NO: 317426
cggugucgauuccuagauu

SEQ ID NO: 419286 - RNA, 19 nt, Artificial Sequence
  Description of Artificial Sequence: Synthetic oligonucleotide
  Antisense Strand to SEQ ID NO: 419285
aaucuaggaaucgacaccg

SEQ ID NO: 419287 - RNA, 19 nt, Artificial Sequence
  Description of Artificial Sequence: Synthetic oligonucleotide
  Sense Strand Starting at position 1281 of SEQ ID NO: 317456
uucggucucggcagauagu

SEQ ID NO: 419288 - RNA, 19 nt, Artificial Sequence
  Description of Artificial Sequence: Synthetic oligonucleotide
  Antisense Strand to SEQ ID NO: 419287
acuaucugccgagaccgaa

SEQ ID NO: 419289 - RNA, 19 nt, Artificial Sequence
  Description of Artificial Sequence: Synthetic oligonucleotide
  Sense Strand Starting at position 1281 of SEQ ID NO: 317457
ucggucucggcagauaguu

SEQ ID NO: 419290 - RNA, 19 nt, Artificial Sequence
  Description of Artificial Sequence: Synthetic oligonucleotide
  Antisense Strand to SEQ ID NO: 419289
aacuaucugccgagaccga

SEQ ID NO: 419291 - RNA, 19 nt, Artificial Sequence
  Description of Artificial Sequence: Synthetic oligonucleotide
  Sense Strand Starting at position 1281 of SEQ ID NO: 317467
cagauaguucuucgcauuu

SEQ ID NO: 419292 - RNA, 19 nt, Artificial Sequence
  Description of Artificial Sequence: Synthetic oligonucleotide
  Antisense Strand to SEQ ID NO: 419291
aaaugcgaagaacuaucug

SEQ ID NO: 419293 - RNA, 19 nt, Artificial Sequence
  Description of Artificial Sequence: Synthetic oligonucleotide
  Sense Strand Starting at position 1281 of SEQ ID NO: 317664
aaccgauugcgacgaguga

SEQ ID NO: 419294 - RNA, 19 nt, Artificial Sequence
  Description of Artificial Sequence: Synthetic oligonucleotide
  Antisense Strand to SEQ ID NO: 419293
ucacucgucgcaaucgguu

SEQ ID NO: 419295 - RNA, 19 nt, Artificial Sequence
  Description of Artificial Sequence: Synthetic oligonucleotide
  Sense Strand Starting at position 1281 of SEQ ID NO: 317665
accgauugcgacgagugaa

SEQ ID NO: 419296 - RNA, 19 nt, Artificial Sequence
  Description of Artificial Sequence: Synthetic oligonucleotide
  Antisense Strand to SEQ ID NO: 419295
uucacucgucgcaaucggu

SEQ ID NO: 419297 - RNA, 19 nt, Artificial Sequence
  Description of Artificial Sequence: Synthetic oligonucleotide
  Sense Strand Starting at position 1281 of SEQ ID NO: 317668
gauugcgacgagugaaaua

SEQ ID NO: 419298 - RNA, 19 nt, Artificial Sequence
  Description of Artificial Sequence: Synthetic oligonucleotide
  Antisense Strand to SEQ ID NO: 419297
uauuucacucgucgcaauc

SEQ ID NO: 419299 - RNA, 19 nt, Artificial Sequence
  Description of Artificial Sequence: Synthetic oligonucleotide
  Sense Strand Starting at position 1281 of SEQ ID NO: 317822
agaggcgucauuuguauaa

SEQ ID NO: 419300 - RNA, 19 nt, Artificial Sequence
  Description of Artificial Sequence: Synthetic oligonucleotide
  Antisense Strand to SEQ ID NO: 419299
uuauacaaaugacgccucu

SEQ ID NO: 419301 - RNA, 19 nt, Artificial Sequence
  Description of Artificial Sequence: Synthetic oligonucleotide
  Sense Strand Starting at position 1281 of SEQ ID NO: 317850
cuguauaugcaguagagga

SEQ ID NO: 419302 - RNA, 19 nt, Artificial Sequence
  Description of Artificial Sequence: Synthetic oligonucleotide
  Antisense Strand to SEQ ID NO: 419301
uccucuacugcauauacag

SEQ ID NO: 419303 - RNA, 19 nt, Artificial Sequence
  Description of Artificial Sequence: Synthetic oligonucleotide
  Sense Strand Starting at position 1281 of SEQ ID NO: 317963
cggaccuuacuucgaguuu

SEQ ID NO: 419304 - RNA, 19 nt, Artificial Sequence
  Description of Artificial Sequence: Synthetic oligonucleotide
  Antisense Strand to SEQ ID NO: 419303
aaacucgaaguaagguccg

SEQ ID NO: 419305 - RNA, 19 nt, Artificial Sequence
  Description of Artificial Sequence: Synthetic oligonucleotide
  Sense Strand Starting at position 1281 of SEQ ID NO: 317974
ucgaguuucuuauuuaucu

SEQ ID NO: 419306 - RNA, 19 nt, Artificial Sequence
  Description of Artificial Sequence: Synthetic oligonucleotide
  Antisense Strand to SEQ ID NO: 419305
agauaaauaagaaacucga

SEQ ID NO: 419307 - RNA, 19 nt, Artificial Sequence
  Description of Artificial Sequence: Synthetic oligonucleotide
  Sense Strand Starting at position 1281 of SEQ ID NO: 317975
cgaguuucuuauuuaucuu

SEQ ID NO: 419308 - RNA, 19 nt, Artificial Sequence
  Description of Artificial Sequence: Synthetic oligonucleotide
  Antisense Strand to SEQ ID NO: 419307
aagauaaauaagaaacucg

SEQ ID NO: 419309 - RNA, 19 nt, Artificial Sequence
  Description of Artificial Sequence: Synthetic oligonucleotide
  Sense Strand Starting at position 1281 of SEQ ID NO: 318070
gggagaaucgcuugaggca

SEQ ID NO: 419310 - RNA, 19 nt, Artificial Sequence
  Description of Artificial Sequence: Synthetic oligonucleotide
  Antisense Strand to SEQ ID NO: 419309
ugccucaagcgauucuccc

SEQ ID NO: 419311 - RNA, 19 nt, Artificial Sequence
  Description of Artificial Sequence: Synthetic oligonucleotide
  Sense Strand Starting at position 1281 of SEQ ID NO: 318107
ugggaaauauaucaagaau

SEQ ID NO: 419312 - RNA, 19 nt, Artificial Sequence
  Description of Artificial Sequence: Synthetic oligonucleotide
  Antisense Strand to SEQ ID NO: 419311
auucuugauauauuuccca

SEQ ID NO: 419313 - RNA, 19 nt, Artificial Sequence
  Description of Artificial Sequence: Synthetic oligonucleotide
  Sense Strand Starting at position 1281 of SEQ ID NO: 318151
aagauauucguguguuccu

SEQ ID NO: 419314 - RNA, 19 nt, Artificial Sequence
  Description of Artificial Sequence: Synthetic oligonucleotide
  Antisense Strand to SEQ ID NO: 419313
aggaacacacgaauaucuu

SEQ ID NO: 419315 - RNA, 19 nt, Artificial Sequence
  Description of Artificial Sequence: Synthetic oligonucleotide
  Sense Strand Starting at position 1281 of SEQ ID NO: 318158
ucguguguuccuugaauaa

SEQ ID NO: 419316 - RNA, 19 nt, Artificial Sequence
  Description of Artificial Sequence: Synthetic oligonucleotide
  Antisense Strand to SEQ ID NO: 419315
uuauucaaggaacacacga

SEQ ID NO: 419317 - RNA, 19 nt, Artificial Sequence
  Description of Artificial Sequence: Synthetic oligonucleotide
  Sense Strand Starting at position 1281 of SEQ ID NO: 318260
gauuccaagugauuccguu

SEQ ID NO: 419318 - RNA, 19 nt, Artificial Sequence
  Description of Artificial Sequence: Synthetic oligonucleotide
  Antisense Strand to SEQ ID NO: 419317
aacggaaucacuuggaauc

SEQ ID NO: 419319 - RNA, 19 nt, Artificial Sequence
  Description of Artificial Sequence: Synthetic oligonucleotide
  Sense Strand Starting at position 1281 of SEQ ID NO: 318354
ggaugagcugucugaagaa

SEQ ID NO: 419320 - RNA, 19 nt, Artificial Sequence
  Description of Artificial Sequence: Synthetic oligonucleotide
  Antisense Strand to SEQ ID NO: 419319
uucuucagacagcucaucc

SEQ ID NO: 419321 - RNA, 19 nt, Artificial Sequence
  Description of Artificial Sequence: Synthetic oligonucleotide
  Sense Strand Starting at position 1281 of SEQ ID NO: 318372
auugacacauccuaagagu

SEQ ID NO: 419322 - RNA, 19 nt, Artificial Sequence
  Description of Artificial Sequence: Synthetic oligonucleotide
  Antisense Strand to SEQ ID NO: 419321
acucuuaggaugugucaau

SEQ ID NO: 419323 - RNA, 19 nt, Artificial Sequence
  Description of Artificial Sequence: Synthetic oligonucleotide
  Sense Strand Starting at position 1281 of SEQ ID NO: 318508
gcaaucucaguuuacugaa

SEQ ID NO: 419324 - RNA, 19 nt, Artificial Sequence
  Description of Artificial Sequence: Synthetic oligonucleotide
  Antisense Strand to SEQ ID NO: 419323
uucaguaaacugagauugc

SEQ ID NO: 419325 - RNA, 19 nt, Artificial Sequence
  Description of Artificial Sequence: Synthetic oligonucleotide
  Sense Strand Starting at position 1281 of SEQ ID NO: 319148
agggaucagucauaaauuu

SEQ ID NO: 419326 - RNA, 19 nt, Artificial Sequence
  Description of Artificial Sequence: Synthetic oligonucleotide
  Antisense Strand to SEQ ID NO: 419325
aaauuuaugacugaucccu

SEQ ID NO: 419327 - RNA, 19 nt, Artificial Sequence
  Description of Artificial Sequence: Synthetic oligonucleotide
  Sense Strand Starting at position 1282 of SEQ ID NO: 315240
accuccaugucugcuauau

SEQ ID NO: 419328 - RNA, 19 nt, Artificial Sequence
  Description of Artificial Sequence: Synthetic oligonucleotide
  Antisense Strand to SEQ ID NO: 419327
auauagcagacauggaggu

SEQ ID NO: 419329 - RNA, 19 nt, Artificial Sequence
  Description of Artificial Sequence: Synthetic oligonucleotide
  Sense Strand Starting at position 1282 of SEQ ID NO: 315244
ccaugucugcuauauacac

SEQ ID NO: 419330 - RNA, 19 nt, Artificial Sequence
  Description of Artificial Sequence: Synthetic oligonucleotide
  Antisense Strand to SEQ ID NO: 419329
guguauauagcagacaugg

SEQ ID NO: 419331 - RNA, 19 nt, Artificial Sequence
  Description of Artificial Sequence: Synthetic oligonucleotide
  Sense Strand Starting at position 1282 of SEQ ID NO: 315283
ugucgcuuugcuuuacaga

SEQ ID NO: 419332 - RNA, 19 nt, Artificial Sequence
  Description of Artificial Sequence: Synthetic oligonucleotide
  Antisense Strand to SEQ ID NO: 419331
ucuguaaagcaaagcgaca

SEQ ID NO: 419333 - RNA, 19 nt, Artificial Sequence
  Description of Artificial Sequence: Synthetic oligonucleotide
  Sense Strand Starting at position 1282 of SEQ ID NO: 315284
gucgcuuugcuuuacagau

SEQ ID NO: 419334 - RNA, 19 nt, Artificial Sequence
  Description of Artificial Sequence: Synthetic oligonucleotide
  Antisense Strand to SEQ ID NO: 419333
aucuguaaagcaaagcgac

SEQ ID NO: 419335 - RNA, 19 nt, Artificial Sequence
  Description of Artificial Sequence: Synthetic oligonucleotide
  Sense Strand Starting at position 1282 of SEQ ID NO: 315354
cgugaagugggacagaguu

SEQ ID NO: 419336 - RNA, 19 nt, Artificial Sequence
  Description of Artificial Sequence: Synthetic oligonucleotide
  Antisense Strand to SEQ ID NO: 419335
aacucugucccacuucacg

SEQ ID NO: 419337 - RNA, 19 nt, Artificial Sequence
  Description of Artificial Sequence: Synthetic oligonucleotide
  Sense Strand Starting at position 1282 of SEQ ID NO: 315592
cgcacauaugcgcccauaa

SEQ ID NO: 419338 - RNA, 19 nt, Artificial Sequence
  Description of Artificial Sequence: Synthetic oligonucleotide
  Antisense Strand to SEQ ID NO: 419337
uuaugggcgcauaugugcg

SEQ ID NO: 419339 - RNA, 19 nt, Artificial Sequence
  Description of Artificial Sequence: Synthetic oligonucleotide
  Sense Strand Starting at position 1282 of SEQ ID NO: 315646
gggccuuugugccuggaga

SEQ ID NO: 419340 - RNA, 19 nt, Artificial Sequence
  Description of Artificial Sequence: Synthetic oligonucleotide
  Antisense Strand to SEQ ID NO: 419339
ucuccaggcacaaaggccc

SEQ ID NO: 419341 - RNA, 19 nt, Artificial Sequence
  Description of Artificial Sequence: Synthetic oligonucleotide
  Sense Strand Starting at position 1282 of SEQ ID NO: 315648
gccuuugugccuggagaca

SEQ ID NO: 419342 - RNA, 19 nt, Artificial Sequence
  Description of Artificial Sequence: Synthetic oligonucleotide
  Antisense Strand to SEQ ID NO: 419341
ugucuccaggcacaaaggc

SEQ ID NO: 419343 - RNA, 19 nt, Artificial Sequence
  Description of Artificial Sequence: Synthetic oligonucleotide
  Sense Strand Starting at position 1282 of SEQ ID NO: 315738
cagcauuucucuguguggu

SEQ ID NO: 419344 - RNA, 19 nt, Artificial Sequence
  Description of Artificial Sequence: Synthetic oligonucleotide
  Antisense Strand to SEQ ID NO: 419343
accacacagagaaaugcug

SEQ ID NO: 419345 - RNA, 19 nt, Artificial Sequence
  Description of Artificial Sequence: Synthetic oligonucleotide
  Sense Strand Starting at position 1282 of SEQ ID NO: 315756
uggccuaugggaugacaga

SEQ ID NO: 419346 - RNA, 19 nt, Artificial Sequence
  Description of Artificial Sequence: Synthetic oligonucleotide
  Antisense Strand to SEQ ID NO: 419345
ucugucaucccauaggcca

SEQ ID NO: 419347 - RNA, 19 nt, Artificial Sequence
  Description of Artificial Sequence: Synthetic oligonucleotide
  Sense Strand Starting at position 1282 of SEQ ID NO: 315806
aguguugagcucucguguu

SEQ ID NO: 419348 - RNA, 19 nt, Artificial Sequence
  Description of Artificial Sequence: Synthetic oligonucleotide
  Antisense Strand to SEQ ID NO: 419347
aacacgagagcucaacacu

SEQ ID NO: 419349 - RNA, 19 nt, Artificial Sequence
  Description of Artificial Sequence: Synthetic oligonucleotide
  Sense Strand Starting at position 1282 of SEQ ID NO: 315808
uguugagcucucguguuga

SEQ ID NO: 419350 - RNA, 19 nt, Artificial Sequence
  Description of Artificial Sequence: Synthetic oligonucleotide
  Antisense Strand to SEQ ID NO: 419349
ucaacacgagagcucaaca

SEQ ID NO: 419351 - RNA, 19 nt, Artificial Sequence
  Description of Artificial Sequence: Synthetic oligonucleotide
  Sense Strand Starting at position 1282 of SEQ ID NO: 315865
guguccagguguucuguga

SEQ ID NO: 419352 - RNA, 19 nt, Artificial Sequence
  Description of Artificial Sequence: Synthetic oligonucleotide
  Antisense Strand to SEQ ID NO: 419351
ucacagaacaccuggacac

SEQ ID NO: 419353 - RNA, 19 nt, Artificial Sequence
  Description of Artificial Sequence: Synthetic oligonucleotide
  Sense Strand Starting at position 1282 of SEQ ID NO: 315869
ccagguguucugugacuau

SEQ ID NO: 419354 - RNA, 19 nt, Artificial Sequence
  Description of Artificial Sequence: Synthetic oligonucleotide
  Antisense Strand to SEQ ID NO: 419353
auagucacagaacaccugg

SEQ ID NO: 419355 - RNA, 19 nt, Artificial Sequence
  Description of Artificial Sequence: Synthetic oligonucleotide
  Sense Strand Starting at position 1282 of SEQ ID NO: 315942
ccaagcuguccggacauau

SEQ ID NO: 419356 - RNA, 19 nt, Artificial Sequence
  Description of Artificial Sequence: Synthetic oligonucleotide
  Antisense Strand to SEQ ID NO: 419355
auauguccggacagcuugg

SEQ ID NO: 419357 - RNA, 19 nt, Artificial Sequence
  Description of Artificial Sequence: Synthetic oligonucleotide
  Sense Strand Starting at position 1282 of SEQ ID NO: 315946
gcuguccggacauauauua

SEQ ID NO: 419358 - RNA, 19 nt, Artificial Sequence
  Description of Artificial Sequence: Synthetic oligonucleotide
  Antisense Strand to SEQ ID NO: 419357
uaauauauguccggacagc

SEQ ID NO: 419359 - RNA, 19 nt, Artificial Sequence
  Description of Artificial Sequence: Synthetic oligonucleotide
  Sense Strand Starting at position 1282 of SEQ ID NO: 316000
guggcagugacccaacuua

SEQ ID NO: 419360 - RNA, 19 nt, Artificial Sequence
  Description of Artificial Sequence: Synthetic oligonucleotide
  Antisense Strand to SEQ ID NO: 419359
uaaguugggucacugccac

SEQ ID NO: 419361 - RNA, 19 nt, Artificial Sequence
  Description of Artificial Sequence: Synthetic oligonucleotide
  Sense Strand Starting at position 1282 of SEQ ID NO: 316065
ggcacucagaucugauaug

SEQ ID NO: 419362 - RNA, 19 nt, Artificial Sequence
  Description of Artificial Sequence: Synthetic oligonucleotide
  Antisense Strand to SEQ ID NO: 419361
cauaucagaucugagugcc

SEQ ID NO: 419363 - RNA, 19 nt, Artificial Sequence
  Description of Artificial Sequence: Synthetic oligonucleotide
  Sense Strand Starting at position 1282 of SEQ ID NO: 316066
gcacucagaucugauauga

SEQ ID NO: 419364 - RNA, 19 nt, Artificial Sequence
  Description of Artificial Sequence: Synthetic oligonucleotide
  Antisense Strand to SEQ ID NO: 419363
ucauaucagaucugagugc

SEQ ID NO: 419365 - RNA, 19 nt, Artificial Sequence
  Description of Artificial Sequence: Synthetic oligonucleotide
  Sense Strand Starting at position 1282 of SEQ ID NO: 316330
ccaguaagaucugcaagag

SEQ ID NO: 419366 - RNA, 19 nt, Artificial Sequence
  Description of Artificial Sequence: Synthetic oligonucleotide
  Antisense Strand to SEQ ID NO: 419365
cucuugcagaucuuacugg

SEQ ID NO: 419367 - RNA, 19 nt, Artificial Sequence
  Description of Artificial Sequence: Synthetic oligonucleotide
  Sense Strand Starting at position 1282 of SEQ ID NO: 316988
ggcgguucucagcaggaga

SEQ ID NO: 419368 - RNA, 19 nt, Artificial Sequence
  Description of Artificial Sequence: Synthetic oligonucleotide
  Antisense Strand to SEQ ID NO: 419367
ucuccugcugagaaccgcc

SEQ ID NO: 419369 - RNA, 19 nt, Artificial Sequence
  Description of Artificial Sequence: Synthetic oligonucleotide
  Sense Strand Starting at position 1282 of SEQ ID NO: 317011
gcagcugauccaggaaaca

SEQ ID NO: 419370 - RNA, 19 nt, Artificial Sequence
  Description of Artificial Sequence: Synthetic oligonucleotide
  Antisense Strand to SEQ ID NO: 419369
uguuuccuggaucagcugc

SEQ ID NO: 419371 - RNA, 19 nt, Artificial Sequence
  Description of Artificial Sequence: Synthetic oligonucleotide
  Sense Strand Starting at position 1282 of SEQ ID NO: 317307
gguacaugcuuccuggcau

SEQ ID NO: 419372 - RNA, 19 nt, Artificial Sequence
  Description of Artificial Sequence: Synthetic oligonucleotide
  Antisense Strand to SEQ ID NO: 419371
augccaggaagcauguacc

SEQ ID NO: 419373 - RNA, 19 nt, Artificial Sequence
  Description of Artificial Sequence: Synthetic oligonucleotide
  Sense Strand Starting at position 1282 of SEQ ID NO: 317456
uguacccaugcagaauaau

SEQ ID NO: 419374 - RNA, 19 nt, Artificial Sequence
  Description of Artificial Sequence: Synthetic oligonucleotide
  Antisense Strand to SEQ ID NO: 419373
auuauucugcauggguaca

SEQ ID NO: 419375 - RNA, 19 nt, Artificial Sequence
  Description of Artificial Sequence: Synthetic oligonucleotide
  Sense Strand Starting at position 1282 of SEQ ID NO: 317657
cacagugagucaucugcca

SEQ ID NO: 419376 - RNA, 19 nt, Artificial Sequence
  Description of Artificial Sequence: Synthetic oligonucleotide
  Antisense Strand to SEQ ID NO: 419375
uggcagaugacucacugug

SEQ ID NO: 419377 - RNA, 19 nt, Artificial Sequence
  Description of Artificial Sequence: Synthetic oligonucleotide
  Sense Strand Starting at position 1282 of SEQ ID NO: 317845
ugcugaaucucagcucauu

SEQ ID NO: 419378 - RNA, 19 nt, Artificial Sequence
  Description of Artificial Sequence: Synthetic oligonucleotide
  Antisense Strand to SEQ ID NO: 419377
aaugagcugagauucagca

SEQ ID NO: 419379 - RNA, 19 nt, Artificial Sequence
  Description of Artificial Sequence: Synthetic oligonucleotide
  Sense Strand Starting at position 1282 of SEQ ID NO: 317857
gcucauuaucugggccuca

SEQ ID NO: 419380 - RNA, 19 nt, Artificial Sequence
  Description of Artificial Sequence: Synthetic oligonucleotide
  Antisense Strand to SEQ ID NO: 419379
ugaggcccagauaaugagc

SEQ ID NO: 419381 - RNA, 19 nt, Artificial Sequence
  Description of Artificial Sequence: Synthetic oligonucleotide
  Sense Strand Starting at position 1282 of SEQ ID NO: 317870
gccucaguccugggcagua

SEQ ID NO: 419382 - RNA, 19 nt, Artificial Sequence
  Description of Artificial Sequence: Synthetic oligonucleotide
  Antisense Strand to SEQ ID NO: 419381
uacugcccaggacugaggc

SEQ ID NO: 419383 - RNA, 19 nt, Artificial Sequence
  Description of Artificial Sequence: Synthetic oligonucleotide
  Sense Strand Starting at position 1282 of SEQ ID NO: 318016
guccauacuuaggucuuua

SEQ ID NO: 419384 - RNA, 19 nt, Artificial Sequence
  Description of Artificial Sequence: Synthetic oligonucleotide
  Antisense Strand to SEQ ID NO: 419383
uaaagaccuaaguauggac

SEQ ID NO: 419385 - RNA, 19 nt, Artificial Sequence
  Description of Artificial Sequence: Synthetic oligonucleotide
  Sense Strand Starting at position 1282 of SEQ ID NO: 318020
auacuuaggucuuuaaagg

SEQ ID NO: 419386 - RNA, 19 nt, Artificial Sequence
  Description of Artificial Sequence: Synthetic oligonucleotide
  Antisense Strand to SEQ ID NO: 419385
ccuuuaaagaccuaaguau

SEQ ID NO: 419387 - RNA, 19 nt, Artificial Sequence
  Description of Artificial Sequence: Synthetic oligonucleotide
  Sense Strand Starting at position 1282 of SEQ ID NO: 318578
ucacuaucccaaggagcuu

SEQ ID NO: 419388 - RNA, 19 nt, Artificial Sequence
  Description of Artificial Sequence: Synthetic oligonucleotide
  Antisense Strand to SEQ ID NO: 419387
aagcuccuugggauaguga

SEQ ID NO: 419389 - RNA, 19 nt, Artificial Sequence
  Description of Artificial Sequence: Synthetic oligonucleotide
  Sense Strand Starting at position 1282 of SEQ ID NO: 318604
cugguacuccuccacagaa

SEQ ID NO: 419390 - RNA, 19 nt, Artificial Sequence
  Description of Artificial Sequence: Synthetic oligonucleotide
  Antisense Strand to SEQ ID NO: 419389
uucuguggaggaguaccag

SEQ ID NO: 419391 - RNA, 19 nt, Artificial Sequence
  Description of Artificial Sequence: Synthetic oligonucleotide
  Sense Strand Starting at position 1282 of SEQ ID NO: 318616
cacagaauacucggaguau

SEQ ID NO: 419392 - RNA, 19 nt, Artificial Sequence
  Description of Artificial Sequence: Synthetic oligonucleotide
  Antisense Strand to SEQ ID NO: 419391
auacuccgaguauucugug

SEQ ID NO: 419393 - RNA, 19 nt, Artificial Sequence
  Description of Artificial Sequence: Synthetic oligonucleotide
  Sense Strand Starting at position 1282 of SEQ ID NO: 318877
cuuccuccucugcaugaga

SEQ ID NO: 419394 - RNA, 19 nt, Artificial Sequence
  Description of Artificial Sequence: Synthetic oligonucleotide
  Antisense Strand to SEQ ID NO: 419393
ucucaugcagaggaggaag

SEQ ID NO: 419395 - RNA, 19 nt, Artificial Sequence
  Description of Artificial Sequence: Synthetic oligonucleotide
  Sense Strand Starting at position 1282 of SEQ ID NO: 318879
uccuccucugcaugagaga

SEQ ID NO: 419396 - RNA, 19 nt, Artificial Sequence
  Description of Artificial Sequence: Synthetic oligonucleotide
  Antisense Strand to SEQ ID NO: 419395
ucucucaugcagaggagga

SEQ ID NO: 419397 - RNA, 19 nt, Artificial Sequence
  Description of Artificial Sequence: Synthetic oligonucleotide
  Sense Strand Starting at position 1282 of SEQ ID NO: 318934
cagugucugcagcauaacu

SEQ ID NO: 419398 - RNA, 19 nt, Artificial Sequence
  Description of Artificial Sequence: Synthetic oligonucleotide
  Antisense Strand to SEQ ID NO: 419397
aguuaugcugcagacacug

SEQ ID NO: 419399 - RNA, 19 nt, Artificial Sequence
  Description of Artificial Sequence: Synthetic oligonucleotide
  Sense Strand Starting at position 1282 of SEQ ID NO: 319072
aagaaaguucugggaguag

SEQ ID NO: 419400 - RNA, 19 nt, Artificial Sequence
  Description of Artificial Sequence: Synthetic oligonucleotide
  Antisense Strand to SEQ ID NO: 419399
cuacucccagaacuuucuu

SEQ ID NO: 419401 - RNA, 19 nt, Artificial Sequence
  Description of Artificial Sequence: Synthetic oligonucleotide
  Sense Strand Starting at position 1282 of SEQ ID NO: 319095
cuacucacgugauccagau

SEQ ID NO: 419402 - RNA, 19 nt, Artificial Sequence
  Description of Artificial Sequence: Synthetic oligonucleotide
  Antisense Strand to SEQ ID NO: 419401
aucuggaucacgugaguag

SEQ ID NO: 419403 - RNA, 19 nt, Artificial Sequence
  Description of Artificial Sequence: Synthetic oligonucleotide
  Sense Strand Starting at position 1282 of SEQ ID NO: 319099
ucacgugauccagaugcga

SEQ ID NO: 419404 - RNA, 19 nt, Artificial Sequence
  Description of Artificial Sequence: Synthetic oligonucleotide
  Antisense Strand to SEQ ID NO: 419403
ucgcaucuggaucacguga

SEQ ID NO: 419405 - RNA, 19 nt, Artificial Sequence
  Description of Artificial Sequence: Synthetic oligonucleotide
  Sense Strand Starting at position 1282 of SEQ ID NO: 319101
acgugauccagaugcgaug

SEQ ID NO: 419406 - RNA, 19 nt, Artificial Sequence
  Description of Artificial Sequence: Synthetic oligonucleotide
  Antisense Strand to SEQ ID NO: 419405
caucgcaucuggaucacgu

SEQ ID NO: 419407 - RNA, 19 nt, Artificial Sequence
  Description of Artificial Sequence: Synthetic oligonucleotide
  Sense Strand Starting at position 1283 of SEQ ID NO: 315334
aguuauaaaucugcuuaga

SEQ ID NO: 419408 - RNA, 19 nt, Artificial Sequence
  Description of Artificial Sequence: Synthetic oligonucleotide
  Antisense Strand to SEQ ID NO: 419407
ucuaagcagauuuauaacu

SEQ ID NO: 419409 - RNA, 19 nt, Artificial Sequence
  Description of Artificial Sequence: Synthetic oligonucleotide
  Sense Strand Starting at position 1283 of SEQ ID NO: 315349
uagauagggugguuuguua

SEQ ID NO: 419410 - RNA, 19 nt, Artificial Sequence
  Description of Artificial Sequence: Synthetic oligonucleotide
  Antisense Strand to SEQ ID NO: 419409
uaacaaaccacccuaucua

SEQ ID NO: 419411 - RNA, 19 nt, Artificial Sequence
  Description of Artificial Sequence: Synthetic oligonucleotide
  Sense Strand Starting at position 1283 of SEQ ID NO: 315761
guugaaauuccaugacuuu

SEQ ID NO: 419412 - RNA, 19 nt, Artificial Sequence
  Description of Artificial Sequence: Synthetic oligonucleotide
  Antisense Strand to SEQ ID NO: 419411
aaagucauggaauuucaac

SEQ ID NO: 419413 - RNA, 19 nt, Artificial Sequence
  Description of Artificial Sequence: Synthetic oligonucleotide
  Sense Strand Starting at position 1283 of SEQ ID NO: 315778
uuaagauucuuugacucag

SEQ ID NO: 419414 - RNA, 19 nt, Artificial Sequence
  Description of Artificial Sequence: Synthetic oligonucleotide
  Antisense Strand to SEQ ID NO: 419413
cugagucaaagaaucuuaa

SEQ ID NO: 419415 - RNA, 19 nt, Artificial Sequence
  Description of Artificial Sequence: Synthetic oligonucleotide
  Sense Strand Starting at position 1283 of SEQ ID NO: 315989
cugugagccugucucaauc

SEQ ID NO: 419416 - RNA, 19 nt, Artificial Sequence
  Description of Artificial Sequence: Synthetic oligonucleotide
  Antisense Strand to SEQ ID NO: 419415
gauugagacaggcucacag

SEQ ID NO: 419417 - RNA, 19 nt, Artificial Sequence
  Description of Artificial Sequence: Synthetic oligonucleotide
  Sense Strand Starting at position 1283 of SEQ ID NO: 316044
ugacuuucguagucaucac

SEQ ID NO: 419418 - RNA, 19 nt, Artificial Sequence
  Description of Artificial Sequence: Synthetic oligonucleotide
  Antisense Strand to SEQ ID NO: 419417
gugaugacuacgaaaguca

SEQ ID NO: 419419 - RNA, 19 nt, Artificial Sequence
  Description of Artificial Sequence: Synthetic oligonucleotide
  Sense Strand Starting at position 1283 of SEQ ID NO: 316055
gucaucacuuccuuagguu

SEQ ID NO: 419420 - RNA, 19 nt, Artificial Sequence
  Description of Artificial Sequence: Synthetic oligonucleotide
  Antisense Strand to SEQ ID NO: 419419
aaccuaaggaagugaugac

SEQ ID NO: 419421 - RNA, 19 nt, Artificial Sequence
  Description of Artificial Sequence: Synthetic oligonucleotide
  Sense Strand Starting at position 1283 of SEQ ID NO: 316056
ucaucacuuccuuagguuu

SEQ ID NO: 419422 - RNA, 19 nt, Artificial Sequence
  Description of Artificial Sequence: Synthetic oligonucleotide
  Antisense Strand to SEQ ID NO: 419421
aaaccuaaggaagugauga

SEQ ID NO: 419423 - RNA, 19 nt, Artificial Sequence
  Description of Artificial Sequence: Synthetic oligonucleotide
  Sense Strand Starting at position 1283 of SEQ ID NO: 316094
gagugugcuuucccagaaa

SEQ ID NO: 419424 - RNA, 19 nt, Artificial Sequence
  Description of Artificial Sequence: Synthetic oligonucleotide
  Antisense Strand to SEQ ID NO: 419423
uuucugggaaagcacacuc

SEQ ID NO: 419425 - RNA, 19 nt, Artificial Sequence
  Description of Artificial Sequence: Synthetic oligonucleotide
  Sense Strand Starting at position 1283 of SEQ ID NO: 316097
ugugcuuucccagaaacca

SEQ ID NO: 419426 - RNA, 19 nt, Artificial Sequence
  Description of Artificial Sequence: Synthetic oligonucleotide
  Antisense Strand to SEQ ID NO: 419425
ugguuucugggaaagcaca

SEQ ID NO: 419427 - RNA, 19 nt, Artificial Sequence
  Description of Artificial Sequence: Synthetic oligonucleotide
  Sense Strand Starting at position 1283 of SEQ ID NO: 316112
accacaguuuagucucuua

SEQ ID NO: 419428 - RNA, 19 nt, Artificial Sequence
  Description of Artificial Sequence: Synthetic oligonucleotide
  Antisense Strand to SEQ ID NO: 419427
uaagagacuaaacuguggu

SEQ ID NO: 419429 - RNA, 19 nt, Artificial Sequence
  Description of Artificial Sequence: Synthetic oligonucleotide
  Sense Strand Starting at position 1283 of SEQ ID NO: 316347
gagcaucaccugggacuua

SEQ ID NO: 419430 - RNA, 19 nt, Artificial Sequence
  Description of Artificial Sequence: Synthetic oligonucleotide
  Antisense Strand to SEQ ID NO: 419429
uaagucccaggugaugcuc

SEQ ID NO: 419431 - RNA, 19 nt, Artificial Sequence
  Description of Artificial Sequence: Synthetic oligonucleotide
  Sense Strand Starting at position 1283 of SEQ ID NO: 316431
cuggccuucuguguuacua

SEQ ID NO: 419432 - RNA, 19 nt, Artificial Sequence
  Description of Artificial Sequence: Synthetic oligonucleotide
  Antisense Strand to SEQ ID NO: 419431
uaguaacacagaaggccag

SEQ ID NO: 419433 - RNA, 19 nt, Artificial Sequence
  Description of Artificial Sequence: Synthetic oligonucleotide
  Sense Strand Starting at position 1283 of SEQ ID NO: 316776
agagauggcguccauaaag

SEQ ID NO: 419434 - RNA, 19 nt, Artificial Sequence
  Description of Artificial Sequence: Synthetic oligonucleotide
  Antisense Strand to SEQ ID NO: 419433
cuuuauggacgccaucucu

SEQ ID NO: 419435 - RNA, 19 nt, Artificial Sequence
  Description of Artificial Sequence: Synthetic oligonucleotide
  Sense Strand Starting at position 1283 of SEQ ID NO: 316874
uuaacuaacgcccggauaa

SEQ ID NO: 419436 - RNA, 19 nt, Artificial Sequence
  Description of Artificial Sequence: Synthetic oligonucleotide
  Antisense Strand to SEQ ID NO: 419435
uuauccgggcguuaguuaa

SEQ ID NO: 419437 - RNA, 19 nt, Artificial Sequence
  Description of Artificial Sequence: Synthetic oligonucleotide
  Sense Strand Starting at position 1283 of SEQ ID NO: 316875
uaacuaacgcccggauaaa

SEQ ID NO: 419438 - RNA, 19 nt, Artificial Sequence
  Description of Artificial Sequence: Synthetic oligonucleotide
  Antisense Strand to SEQ ID NO: 419437
uuuauccgggcguuaguua

SEQ ID NO: 419439 - RNA, 19 nt, Artificial Sequence
  Description of Artificial Sequence: Synthetic oligonucleotide
  Sense Strand Starting at position 1283 of SEQ ID NO: 317082
ccugguagcuaagucaaga

SEQ ID NO: 419440 - RNA, 19 nt, Artificial Sequence
  Description of Artificial Sequence: Synthetic oligonucleotide
  Antisense Strand to SEQ ID NO: 419439
ucuugacuuagcuaccagg

SEQ ID NO: 419441 - RNA, 19 nt, Artificial Sequence
  Description of Artificial Sequence: Synthetic oligonucleotide
  Sense Strand Starting at position 1283 of SEQ ID NO: 317255
cagguuuggauucguccau

SEQ ID NO: 419442 - RNA, 19 nt, Artificial Sequence
  Description of Artificial Sequence: Synthetic oligonucleotide
  Antisense Strand to SEQ ID NO: 419441
auggacgaauccaaaccug

SEQ ID NO: 419443 - RNA, 19 nt, Artificial Sequence
  Description of Artificial Sequence: Synthetic oligonucleotide
  Sense Strand Starting at position 1283 of SEQ ID NO: 317256
agguuuggauucguccaua

SEQ ID NO: 419444 - RNA, 19 nt, Artificial Sequence
  Description of Artificial Sequence: Synthetic oligonucleotide
  Antisense Strand to SEQ ID NO: 419443
uauggacgaauccaaaccu

SEQ ID NO: 419445 - RNA, 19 nt, Artificial Sequence
  Description of Artificial Sequence: Synthetic oligonucleotide
  Sense Strand Starting at position 1283 of SEQ ID NO: 317261
uggauucguccauacgguu

SEQ ID NO: 419446 - RNA, 19 nt, Artificial Sequence
  Description of Artificial Sequence: Synthetic oligonucleotide
  Antisense Strand to SEQ ID NO: 419445
aaccguauggacgaaucca

SEQ ID NO: 419447 - RNA, 19 nt, Artificial Sequence
  Description of Artificial Sequence: Synthetic oligonucleotide
  Sense Strand Starting at position 1283 of SEQ ID NO: 317447
gcgggaagugcuggaguaa

SEQ ID NO: 419448 - RNA, 19 nt, Artificial Sequence
  Description of Artificial Sequence: Synthetic oligonucleotide
  Antisense Strand to SEQ ID NO: 419447
uuacuccagcacuucccgc

SEQ ID NO: 419449 - RNA, 19 nt, Artificial Sequence
  Description of Artificial Sequence: Synthetic oligonucleotide
  Sense Strand Starting at position 1283 of SEQ ID NO: 317458
uggaguaacagucauagug

SEQ ID NO: 419450 - RNA, 19 nt, Artificial Sequence
  Description of Artificial Sequence: Synthetic oligonucleotide
  Antisense Strand to SEQ ID NO: 419449
cacuaugacuguuacucca

SEQ ID NO: 419451 - RNA, 19 nt, Artificial Sequence
  Description of Artificial Sequence: Synthetic oligonucleotide
  Sense Strand Starting at position 1283 of SEQ ID NO: 317554
aagcgcugauugguuaaga

SEQ ID NO: 419452 - RNA, 19 nt, Artificial Sequence
  Description of Artificial Sequence: Synthetic oligonucleotide
  Antisense Strand to SEQ ID NO: 419451
ucuuaaccaaucagcgcuu

SEQ ID NO: 419453 - RNA, 19 nt, Artificial Sequence
  Description of Artificial Sequence: Synthetic oligonucleotide
  Sense Strand Starting at position 1283 of SEQ ID NO: 317567
uuaagagucucaguuccua

SEQ ID NO: 419454 - RNA, 19 nt, Artificial Sequence
  Description of Artificial Sequence: Synthetic oligonucleotide
  Antisense Strand to SEQ ID NO: 419453
uaggaacugagacucuuaa

SEQ ID NO: 419455 - RNA, 19 nt, Artificial Sequence
  Description of Artificial Sequence: Synthetic oligonucleotide
  Sense Strand Starting at position 1283 of SEQ ID NO: 317762
gguggcauagucuggauaa

SEQ ID NO: 419456 - RNA, 19 nt, Artificial Sequence
  Description of Artificial Sequence: Synthetic oligonucleotide
  Antisense Strand to SEQ ID NO: 419455
uuauccagacuaugccacc

SEQ ID NO: 419457 - RNA, 19 nt, Artificial Sequence
  Description of Artificial Sequence: Synthetic oligonucleotide
  Sense Strand Starting at position 1283 of SEQ ID NO: 317826
aagagaaggcugugaauua

SEQ ID NO: 419458 - RNA, 19 nt, Artificial Sequence
  Description of Artificial Sequence: Synthetic oligonucleotide
  Antisense Strand to SEQ ID NO: 419457
uaauucacagccuucucuu

SEQ ID NO: 419459 - RNA, 19 nt, Artificial Sequence
  Description of Artificial Sequence: Synthetic oligonucleotide
  Sense Strand Starting at position 1283 of SEQ ID NO: 317873
augagacacucugaucuca

SEQ ID NO: 419460 - RNA, 19 nt, Artificial Sequence
  Description of Artificial Sequence: Synthetic oligonucleotide
  Antisense Strand to SEQ ID NO: 419459
ugagaucagagugucucau

SEQ ID NO: 419461 - RNA, 19 nt, Artificial Sequence
  Description of Artificial Sequence: Synthetic oligonucleotide
  Sense Strand Starting at position 1283 of SEQ ID NO: 317886
aucucaaguugauugugua

SEQ ID NO: 419462 - RNA, 19 nt, Artificial Sequence
  Description of Artificial Sequence: Synthetic oligonucleotide
  Antisense Strand to SEQ ID NO: 419461
uacacaaucaacuugagau

SEQ ID NO: 419463 - RNA, 19 nt, Artificial Sequence
  Description of Artificial Sequence: Synthetic oligonucleotide
  Sense Strand Starting at position 1283 of SEQ ID NO: 317887
ucucaaguugauuguguaa

SEQ ID NO: 419464 - RNA, 19 nt, Artificial Sequence
  Description of Artificial Sequence: Synthetic oligonucleotide
  Antisense Strand to SEQ ID NO: 419463
uuacacaaucaacuugaga

SEQ ID NO: 419465 - RNA, 19 nt, Artificial Sequence
  Description of Artificial Sequence: Synthetic oligonucleotide
  Sense Strand Starting at position 1283 of SEQ ID NO: 317890
caaguugauuguguaaacu

SEQ ID NO: 419466 - RNA, 19 nt, Artificial Sequence
  Description of Artificial Sequence: Synthetic oligonucleotide
  Antisense Strand to SEQ ID NO: 419465
aguuuacacaaucaacuug

SEQ ID NO: 419467 - RNA, 19 nt, Artificial Sequence
  Description of Artificial Sequence: Synthetic oligonucleotide
  Sense Strand Starting at position 1283 of SEQ ID NO: 318039
cccuccucccguuggaaua

SEQ ID NO: 419468 - RNA, 19 nt, Artificial Sequence
  Description of Artificial Sequence: Synthetic oligonucleotide
  Antisense Strand to SEQ ID NO: 419467
uauuccaacgggaggaggg

SEQ ID NO: 419469 - RNA, 19 nt, Artificial Sequence
  Description of Artificial Sequence: Synthetic oligonucleotide
  Sense Strand Starting at position 1283 of SEQ ID NO: 318072
cagcguuaacauuaaacag

SEQ ID NO: 419470 - RNA, 19 nt, Artificial Sequence
  Description of Artificial Sequence: Synthetic oligonucleotide
  Antisense Strand to SEQ ID NO: 419469
cuguuuaauguuaacgcug

SEQ ID NO: 419471 - RNA, 19 nt, Artificial Sequence
  Description of Artificial Sequence: Synthetic oligonucleotide
  Sense Strand Starting at position 1283 of SEQ ID NO: 318578
uugaaauggccuugcagag

SEQ ID NO: 419472 - RNA, 19 nt, Artificial Sequence
  Description of Artificial Sequence: Synthetic oligonucleotide
  Antisense Strand to SEQ ID NO: 419471
cucugcaaggccauuucaa

SEQ ID NO: 419473 - RNA, 19 nt, Artificial Sequence
  Description of Artificial Sequence: Synthetic oligonucleotide
  Sense Strand Starting at position 1283 of SEQ ID NO: 318825
ggcuccaggucuuuauaua

SEQ ID NO: 419474 - RNA, 19 nt, Artificial Sequence
  Description of Artificial Sequence: Synthetic oligonucleotide
  Antisense Strand to SEQ ID NO: 419473
uauauaaagaccuggagcc

SEQ ID NO: 419475 - RNA, 19 nt, Artificial Sequence
  Description of Artificial Sequence: Synthetic oligonucleotide
  Sense Strand Starting at position 1283 of SEQ ID NO: 318826
gcuccaggucuuuauauaa

SEQ ID NO: 419476 - RNA, 19 nt, Artificial Sequence
  Description of Artificial Sequence: Synthetic oligonucleotide
  Antisense Strand to SEQ ID NO: 419475
uuauauaaagaccuggagc

SEQ ID NO: 419477 - RNA, 19 nt, Artificial Sequence
  Description of Artificial Sequence: Synthetic oligonucleotide
  Sense Strand Starting at position 1283 of SEQ ID NO: 318861
uugccaauuguaggguaua

SEQ ID NO: 419478 - RNA, 19 nt, Artificial Sequence
  Description of Artificial Sequence: Synthetic oligonucleotide
  Antisense Strand to SEQ ID NO: 419477
uauacccuacaauuggcaa

SEQ ID NO: 419479 - RNA, 19 nt, Artificial Sequence
  Description of Artificial Sequence: Synthetic oligonucleotide
  Sense Strand Starting at position 1283 of SEQ ID NO: 318958
auauuccacuuguuaugua

SEQ ID NO: 419480 - RNA, 19 nt, Artificial Sequence
  Description of Artificial Sequence: Synthetic oligonucleotide
  Antisense Strand to SEQ ID NO: 419479
uacauaacaaguggaauau

SEQ ID NO: 419481 - RNA, 19 nt, Artificial Sequence
  Description of Artificial Sequence: Synthetic oligonucleotide
  Sense Strand Starting at position 1283 of SEQ ID NO: 318972
auguaacccguuuauguaa

SEQ ID NO: 419482 - RNA, 19 nt, Artificial Sequence
  Description of Artificial Sequence: Synthetic oligonucleotide
  Antisense Strand to SEQ ID NO: 419481
uuacauaaacggguuacau

SEQ ID NO: 419483 - RNA, 19 nt, Artificial Sequence
  Description of Artificial Sequence: Synthetic oligonucleotide
  Sense Strand Starting at position 1283 of SEQ ID NO: 319059
gucugaguucagcacgaca

SEQ ID NO: 419484 - RNA, 19 nt, Artificial Sequence
  Description of Artificial Sequence: Synthetic oligonucleotide
  Antisense Strand to SEQ ID NO: 419483
ugucgugcugaacucagac

SEQ ID NO: 419485 - RNA, 19 nt, Artificial Sequence
  Description of Artificial Sequence: Synthetic oligonucleotide
  Sense Strand Starting at position 1283 of SEQ ID NO: 319090
ugcacuggugcccagagua

SEQ ID NO: 419486 - RNA, 19 nt, Artificial Sequence
  Description of Artificial Sequence: Synthetic oligonucleotide
  Antisense Strand to SEQ ID NO: 419485
uacucugggcaccagugca

SEQ ID NO: 419487 - RNA, 19 nt, Artificial Sequence
  Description of Artificial Sequence: Synthetic oligonucleotide
  Sense Strand Starting at position 1284 of SEQ ID NO: 315386
aguaguugcccugacuaua

SEQ ID NO: 419488 - RNA, 19 nt, Artificial Sequence
  Description of Artificial Sequence: Synthetic oligonucleotide
  Antisense Strand to SEQ ID NO: 419487
uauagucagggcaacuacu

SEQ ID NO: 419489 - RNA, 19 nt, Artificial Sequence
  Description of Artificial Sequence: Synthetic oligonucleotide
  Sense Strand Starting at position 1284 of SEQ ID NO: 315398
gacuauaggcuucgauuac

SEQ ID NO: 419490 - RNA, 19 nt, Artificial Sequence
  Description of Artificial Sequence: Synthetic oligonucleotide
  Antisense Strand to SEQ ID NO: 419489
guaaucgaagccuauaguc

SEQ ID NO: 419491 - RNA, 19 nt, Artificial Sequence
  Description of Artificial Sequence: Synthetic oligonucleotide
  Sense Strand Starting at position 1284 of SEQ ID NO: 315402
auaggcuucgauuacagua

SEQ ID NO: 419492 - RNA, 19 nt, Artificial Sequence
  Description of Artificial Sequence: Synthetic oligonucleotide
  Antisense Strand to SEQ ID NO: 419491
uacuguaaucgaagccuau

SEQ ID NO: 419493 - RNA, 19 nt, Artificial Sequence
  Description of Artificial Sequence: Synthetic oligonucleotide
  Sense Strand Starting at position 1284 of SEQ ID NO: 315407
cuucgauuacaguaguuac

SEQ ID NO: 419494 - RNA, 19 nt, Artificial Sequence
  Description of Artificial Sequence: Synthetic oligonucleotide
  Antisense Strand to SEQ ID NO: 419493
guaacuacuguaaucgaag

SEQ ID NO: 419495 - RNA, 19 nt, Artificial Sequence
  Description of Artificial Sequence: Synthetic oligonucleotide
  Sense Strand Starting at position 1284 of SEQ ID NO: 315410
cgauuacaguaguuacaag

SEQ ID NO: 419496 - RNA, 19 nt, Artificial Sequence
  Description of Artificial Sequence: Synthetic oligonucleotide
  Antisense Strand to SEQ ID NO: 419495
cuuguaacuacuguaaucg

SEQ ID NO: 419497 - RNA, 19 nt, Artificial Sequence
  Description of Artificial Sequence: Synthetic oligonucleotide
  Sense Strand Starting at position 1284 of SEQ ID NO: 316125
acaagcgauugauuagcua

SEQ ID NO: 419498 - RNA, 19 nt, Artificial Sequence
  Description of Artificial Sequence: Synthetic oligonucleotide
  Antisense Strand to SEQ ID NO: 419497
uagcuaaucaaucgcuugu

SEQ ID NO: 419499 - RNA, 19 nt, Artificial Sequence
  Description of Artificial Sequence: Synthetic oligonucleotide
  Sense Strand Starting at position 1284 of SEQ ID NO: 316160
ucacacauuccagguacau

SEQ ID NO: 419500 - RNA, 19 nt, Artificial Sequence
  Description of Artificial Sequence: Synthetic oligonucleotide
  Antisense Strand to SEQ ID NO: 419499
auguaccuggaauguguga

SEQ ID NO: 419501 - RNA, 19 nt, Artificial Sequence
  Description of Artificial Sequence: Synthetic oligonucleotide
  Sense Strand Starting at position 1284 of SEQ ID NO: 316195
gcagcuagucagggacaaa

SEQ ID NO: 419502 - RNA, 19 nt, Artificial Sequence
  Description of Artificial Sequence: Synthetic oligonucleotide
  Antisense Strand to SEQ ID NO: 419501
uuugucccugacuagcugc

SEQ ID NO: 419503 - RNA, 19 nt, Artificial Sequence
  Description of Artificial Sequence: Synthetic oligonucleotide
  Sense Strand Starting at position 1284 of SEQ ID NO: 316247
gggaguaugguugaagucu

SEQ ID NO: 419504 - RNA, 19 nt, Artificial Sequence
  Description of Artificial Sequence: Synthetic oligonucleotide
  Antisense Strand to SEQ ID NO: 419503
agacuucaaccauacuccc

SEQ ID NO: 419505 - RNA, 19 nt, Artificial Sequence
  Description of Artificial Sequence: Synthetic oligonucleotide
  Sense Strand Starting at position 1284 of SEQ ID NO: 316300
aguucugguuguucuauuu

SEQ ID NO: 419506 - RNA, 19 nt, Artificial Sequence
  Description of Artificial Sequence: Synthetic oligonucleotide
  Antisense Strand to SEQ ID NO: 419505
aaauagaacaaccagaacu

SEQ ID NO: 419507 - RNA, 19 nt, Artificial Sequence
  Description of Artificial Sequence: Synthetic oligonucleotide
  Sense Strand Starting at position 1284 of SEQ ID NO: 316765
aagcgugugggugaaagaa

SEQ ID NO: 419508 - RNA, 19 nt, Artificial Sequence
  Description of Artificial Sequence: Synthetic oligonucleotide
  Antisense Strand to SEQ ID NO: 419507
uucuuucacccacacgcuu

SEQ ID NO: 419509 - RNA, 19 nt, Artificial Sequence
  Description of Artificial Sequence: Synthetic oligonucleotide
  Sense Strand Starting at position 1284 of SEQ ID NO: 317403
ucaugagaguuugcauaaa

SEQ ID NO: 419510 - RNA, 19 nt, Artificial Sequence
  Description of Artificial Sequence: Synthetic oligonucleotide
  Antisense Strand to SEQ ID NO: 419509
uuuaugcaaacucucauga

SEQ ID NO: 419511 - RNA, 19 nt, Artificial Sequence
  Description of Artificial Sequence: Synthetic oligonucleotide
  Sense Strand Starting at position 1284 of SEQ ID NO: 317603
caucuaguacgugacaguu

SEQ ID NO: 419512 - RNA, 19 nt, Artificial Sequence
  Description of Artificial Sequence: Synthetic oligonucleotide
  Antisense Strand to SEQ ID NO: 419511
aacugucacguacuagaug

SEQ ID NO: 419513 - RNA, 19 nt, Artificial Sequence
  Description of Artificial Sequence: Synthetic oligonucleotide
  Sense Strand Starting at position 1284 of SEQ ID NO: 317613
gugacaguuccauagcagu

SEQ ID NO: 419514 - RNA, 19 nt, Artificial Sequence
  Description of Artificial Sequence: Synthetic oligonucleotide
  Antisense Strand to SEQ ID NO: 419513
acugcuauggaacugucac

SEQ ID NO: 419515 - RNA, 19 nt, Artificial Sequence
  Description of Artificial Sequence: Synthetic oligonucleotide
  Sense Strand Starting at position 1284 of SEQ ID NO: 317627
gcaguuugcacauaggaau

SEQ ID NO: 419516 - RNA, 19 nt, Artificial Sequence
  Description of Artificial Sequence: Synthetic oligonucleotide
  Antisense Strand to SEQ ID NO: 419515
auuccuaugugcaaacugc

SEQ ID NO: 419517 - RNA, 19 nt, Artificial Sequence
  Description of Artificial Sequence: Synthetic oligonucleotide
  Sense Strand Starting at position 1284 of SEQ ID NO: 317651
gcacuuagaucauuacagu

SEQ ID NO: 419518 - RNA, 19 nt, Artificial Sequence
  Description of Artificial Sequence: Synthetic oligonucleotide
  Antisense Strand to SEQ ID NO: 419517
acuguaaugaucuaagugc

SEQ ID NO: 419519 - RNA, 19 nt, Artificial Sequence
  Description of Artificial Sequence: Synthetic oligonucleotide
  Sense Strand Starting at position 1284 of SEQ ID NO: 317693
cucugcuuccuggaggagu

SEQ ID NO: 419520 - RNA, 19 nt, Artificial Sequence
  Description of Artificial Sequence: Synthetic oligonucleotide
  Antisense Strand to SEQ ID NO: 419519
acuccuccaggaagcagag

SEQ ID NO: 419521 - RNA, 19 nt, Artificial Sequence
  Description of Artificial Sequence: Synthetic oligonucleotide
  Sense Strand Starting at position 1284 of SEQ ID NO: 317734
accucaaaugcuuagguaa

SEQ ID NO: 419522 - RNA, 19 nt, Artificial Sequence
  Description of Artificial Sequence: Synthetic oligonucleotide
  Antisense Strand to SEQ ID NO: 419521
uuaccuaagcauuugaggu

SEQ ID NO: 419523 - RNA, 19 nt, Artificial Sequence
  Description of Artificial Sequence: Synthetic oligonucleotide
  Sense Strand Starting at position 1284 of SEQ ID NO: 317745
uuagguaauagguguagaa

SEQ ID NO: 419524 - RNA, 19 nt, Artificial Sequence
  Description of Artificial Sequence: Synthetic oligonucleotide
  Antisense Strand to SEQ ID NO: 419523
uucuacaccuauuaccuaa

SEQ ID NO: 419525 - RNA, 19 nt, Artificial Sequence
  Description of Artificial Sequence: Synthetic oligonucleotide
  Sense Strand Starting at position 1284 of SEQ ID NO: 317785
agaguuagaagacgguuaa

SEQ ID NO: 419526 - RNA, 19 nt, Artificial Sequence
  Description of Artificial Sequence: Synthetic oligonucleotide
  Antisense Strand to SEQ ID NO: 419525
uuaaccgucuucuaacucu

SEQ ID NO: 419527 - RNA, 19 nt, Artificial Sequence
  Description of Artificial Sequence: Synthetic oligonucleotide
  Sense Strand Starting at position 1284 of SEQ ID NO: 317786
gaguuagaagacgguuaau

SEQ ID NO: 419528 - RNA, 19 nt, Artificial Sequence
  Description of Artificial Sequence: Synthetic oligonucleotide
  Antisense Strand to SEQ ID NO: 419527
auuaaccgucuucuaacuc

SEQ ID NO: 419529 - RNA, 19 nt, Artificial Sequence
  Description of Artificial Sequence: Synthetic oligonucleotide
  Sense Strand Starting at position 1284 of SEQ ID NO: 317796
acgguuaauugauugguau

SEQ ID NO: 419530 - RNA, 19 nt, Artificial Sequence
  Description of Artificial Sequence: Synthetic oligonucleotide
  Antisense Strand to SEQ ID NO: 419529
auaccaaucaauuaaccgu

SEQ ID NO: 419531 - RNA, 19 nt, Artificial Sequence
  Description of Artificial Sequence: Synthetic oligonucleotide
  Sense Strand Starting at position 1284 of SEQ ID NO: 317798
gguuaauugauugguauca

SEQ ID NO: 419532 - RNA, 19 nt, Artificial Sequence
  Description of Artificial Sequence: Synthetic oligonucleotide
  Antisense Strand to SEQ ID NO: 419531
ugauaccaaucaauuaacc

SEQ ID NO: 419533 - RNA, 19 nt, Artificial Sequence
  Description of Artificial Sequence: Synthetic oligonucleotide
  Sense Strand Starting at position 1284 of SEQ ID NO: 317811
guaucaggguuauccagga

SEQ ID NO: 419534 - RNA, 19 nt, Artificial Sequence
  Description of Artificial Sequence: Synthetic oligonucleotide
  Antisense Strand to SEQ ID NO: 419533
uccuggauaacccugauac

SEQ ID NO: 419535 - RNA, 19 nt, Artificial Sequence
  Description of Artificial Sequence: Synthetic oligonucleotide
  Sense Strand Starting at position 1284 of SEQ ID NO: 317815
caggguuauccaggaggau

SEQ ID NO: 419536 - RNA, 19 nt, Artificial Sequence
  Description of Artificial Sequence: Synthetic oligonucleotide
  Antisense Strand to SEQ ID NO: 419535
auccuccuggauaacccug

SEQ ID NO: 419537 - RNA, 19 nt, Artificial Sequence
  Description of Artificial Sequence: Synthetic oligonucleotide
  Sense Strand Starting at position 1284 of SEQ ID NO: 317931
uucuccauuguguauauaa

SEQ ID NO: 419538 - RNA, 19 nt, Artificial Sequence
  Description of Artificial Sequence: Synthetic oligonucleotide
  Antisense Strand to SEQ ID NO: 419537
uuauauacacaauggagaa

SEQ ID NO: 419539 - RNA, 19 nt, Artificial Sequence
  Description of Artificial Sequence: Synthetic oligonucleotide
  Sense Strand Starting at position 1284 of SEQ ID NO: 317958
uuuauucuagcuuaaggaa

SEQ ID NO: 419540 - RNA, 19 nt, Artificial Sequence
  Description of Artificial Sequence: Synthetic oligonucleotide
  Antisense Strand to SEQ ID NO: 419539
uuccuuaagcuagaauaaa

SEQ ID NO: 419541 - RNA, 19 nt, Artificial Sequence
  Description of Artificial Sequence: Synthetic oligonucleotide
  Sense Strand Starting at position 1284 of SEQ ID NO: 318043
gacauuauguuagugaaac

SEQ ID NO: 419542 - RNA, 19 nt, Artificial Sequence
  Description of Artificial Sequence: Synthetic oligonucleotide
  Antisense Strand to SEQ ID NO: 419541
guuucacuaacauaauguc

SEQ ID NO: 419543 - RNA, 19 nt, Artificial Sequence
  Description of Artificial Sequence: Synthetic oligonucleotide
  Sense Strand Starting at position 1284 of SEQ ID NO: 318336
uauuuaaggugaggaauau

SEQ ID NO: 419544 - RNA, 19 nt, Artificial Sequence
  Description of Artificial Sequence: Synthetic oligonucleotide
  Antisense Strand to SEQ ID NO: 419543
auauuccucaccuuaaaua

SEQ ID NO: 419545 - RNA, 19 nt, Artificial Sequence
  Description of Artificial Sequence: Synthetic oligonucleotide
  Sense Strand Starting at position 1284 of SEQ ID NO: 318345
ugaggaauauaugaauuac

SEQ ID NO: 419546 - RNA, 19 nt, Artificial Sequence
  Description of Artificial Sequence: Synthetic oligonucleotide
  Antisense Strand to SEQ ID NO: 419545
guaauucauauauuccuca

SEQ ID NO: 419547 - RNA, 19 nt, Artificial Sequence
  Description of Artificial Sequence: Synthetic oligonucleotide
  Sense Strand Starting at position 1284 of SEQ ID NO: 318355
augaauuacucugauuuga

SEQ ID NO: 419548 - RNA, 19 nt, Artificial Sequence
  Description of Artificial Sequence: Synthetic oligonucleotide
  Antisense Strand to SEQ ID NO: 419547
ucaaaucagaguaauucau

SEQ ID NO: 419549 - RNA, 19 nt, Artificial Sequence
  Description of Artificial Sequence: Synthetic oligonucleotide
  Sense Strand Starting at position 1284 of SEQ ID NO: 318379
guacauuguguguauugaa

SEQ ID NO: 419550 - RNA, 19 nt, Artificial Sequence
  Description of Artificial Sequence: Synthetic oligonucleotide
  Antisense Strand to SEQ ID NO: 419549
uucaauacacacaauguac

SEQ ID NO: 419551 - RNA, 19 nt, Artificial Sequence
  Description of Artificial Sequence: Synthetic oligonucleotide
  Sense Strand Starting at position 1284 of SEQ ID NO: 318393
uugaaauagcacuauguac

SEQ ID NO: 419552 - RNA, 19 nt, Artificial Sequence
  Description of Artificial Sequence: Synthetic oligonucleotide
  Antisense Strand to SEQ ID NO: 419551
guacauagugcuauuucaa

SEQ ID NO: 419553 - RNA, 19 nt, Artificial Sequence
  Description of Artificial Sequence: Synthetic oligonucleotide
  Sense Strand Starting at position 1284 of SEQ ID NO: 318404
cuauguacccaauaaaugu

SEQ ID NO: 419554 - RNA, 19 nt, Artificial Sequence
  Description of Artificial Sequence: Synthetic oligonucleotide
  Antisense Strand to SEQ ID NO: 419553
acauuuauuggguacauag

SEQ ID NO: 419555 - RNA, 19 nt, Artificial Sequence
  Description of Artificial Sequence: Synthetic oligonucleotide
  Sense Strand Starting at position 1284 of SEQ ID NO: 318411
cccaauaaauguguacgau

SEQ ID NO: 419556 - RNA, 19 nt, Artificial Sequence
  Description of Artificial Sequence: Synthetic oligonucleotide
  Antisense Strand to SEQ ID NO: 419555
aucguacacauuuauuggg

SEQ ID NO: 419557 - RNA, 19 nt, Artificial Sequence
  Description of Artificial Sequence: Synthetic oligonucleotide
  Sense Strand Starting at position 1284 of SEQ ID NO: 318412
ccaauaaauguguacgaua

SEQ ID NO: 419558 - RNA, 19 nt, Artificial Sequence
  Description of Artificial Sequence: Synthetic oligonucleotide
  Antisense Strand to SEQ ID NO: 419557
uaucguacacauuuauugg

SEQ ID NO: 419559 - RNA, 19 nt, Artificial Sequence
  Description of Artificial Sequence: Synthetic oligonucleotide
  Sense Strand Starting at position 1284 of SEQ ID NO: 318414
aauaaauguguacgauauc

SEQ ID NO: 419560 - RNA, 19 nt, Artificial Sequence
  Description of Artificial Sequence: Synthetic oligonucleotide
  Antisense Strand to SEQ ID NO: 419559
gauaucguacacauuuauu

SEQ ID NO: 419561 - RNA, 19 nt, Artificial Sequence
  Description of Artificial Sequence: Synthetic oligonucleotide
  Sense Strand Starting at position 1284 of SEQ ID NO: 318417
aaauguguacgauaucaug

SEQ ID NO: 419562 - RNA, 19 nt, Artificial Sequence
  Description of Artificial Sequence: Synthetic oligonucleotide
  Antisense Strand to SEQ ID NO: 419561
caugauaucguacacauuu

SEQ ID NO: 419563 - RNA, 19 nt, Artificial Sequence
  Description of Artificial Sequence: Synthetic oligonucleotide
  Sense Strand Starting at position 1284 of SEQ ID NO: 318425
acgauaucaugugucaacu

SEQ ID NO: 419564 - RNA, 19 nt, Artificial Sequence
  Description of Artificial Sequence: Synthetic oligonucleotide
  Antisense Strand to SEQ ID NO: 419563
aguugacacaugauaucgu

SEQ ID NO: 419565 - RNA, 19 nt, Artificial Sequence
  Description of Artificial Sequence: Synthetic oligonucleotide
  Sense Strand Starting at position 1284 of SEQ ID NO: 318586
ugagcuauaugagucucaa

SEQ ID NO: 419566 - RNA, 19 nt, Artificial Sequence
  Description of Artificial Sequence: Synthetic oligonucleotide
  Antisense Strand to SEQ ID NO: 419565
uugagacucauauagcuca

SEQ ID NO: 419567 - RNA, 19 nt, Artificial Sequence
  Description of Artificial Sequence: Synthetic oligonucleotide
  Sense Strand Starting at position 1285 of SEQ ID NO: 315397
gcacaaauuccagagcaua

SEQ ID NO: 419568 - RNA, 19 nt, Artificial Sequence
  Description of Artificial Sequence: Synthetic oligonucleotide
  Antisense Strand to SEQ ID NO: 419567
uaugcucuggaauuugugc

SEQ ID NO: 419569 - RNA, 19 nt, Artificial Sequence
  Description of Artificial Sequence: Synthetic oligonucleotide
  Sense Strand Starting at position 1285 of SEQ ID NO: 315433
guuuacucugguuaagauu

SEQ ID NO: 419570 - RNA, 19 nt, Artificial Sequence
  Description of Artificial Sequence: Synthetic oligonucleotide
  Antisense Strand to SEQ ID NO: 419569
aaucuuaaccagaguaaac

SEQ ID NO: 419571 - RNA, 19 nt, Artificial Sequence
  Description of Artificial Sequence: Synthetic oligonucleotide
  Sense Strand Starting at position 1285 of SEQ ID NO: 315448
gauuguaagcaggagaagu

SEQ ID NO: 419572 - RNA, 19 nt, Artificial Sequence
  Description of Artificial Sequence: Synthetic oligonucleotide
  Antisense Strand to SEQ ID NO: 419571
acuucuccugcuuacaauc

SEQ ID NO: 419573 - RNA, 19 nt, Artificial Sequence
  Description of Artificial Sequence: Synthetic oligonucleotide
  Sense Strand Starting at position 1285 of SEQ ID NO: 316337
ggcuacgaauucuuaaaug

SEQ ID NO: 419574 - RNA, 19 nt, Artificial Sequence
  Description of Artificial Sequence: Synthetic oligonucleotide
  Antisense Strand to SEQ ID NO: 419573
cauuuaagaauucguagcc

SEQ ID NO: 419575 - RNA, 19 nt, Artificial Sequence
  Description of Artificial Sequence: Synthetic oligonucleotide
  Sense Strand Starting at position 1285 of SEQ ID NO: 316373
acuaguuagaaguggaguu

SEQ ID NO: 419576 - RNA, 19 nt, Artificial Sequence
  Description of Artificial Sequence: Synthetic oligonucleotide
  Antisense Strand to SEQ ID NO: 419575
aacuccacuucuaacuagu

SEQ ID NO: 419577 - RNA, 19 nt, Artificial Sequence
  Description of Artificial Sequence: Synthetic oligonucleotide
  Sense Strand Starting at position 1285 of SEQ ID NO: 316489
cuuuauguccugcagauca

SEQ ID NO: 419578 - RNA, 19 nt, Artificial Sequence
  Description of Artificial Sequence: Synthetic oligonucleotide
  Antisense Strand to SEQ ID NO: 419577
ugaucugcaggacauaaag

SEQ ID NO: 419579 - RNA, 19 nt, Artificial Sequence
  Description of Artificial Sequence: Synthetic oligonucleotide
  Sense Strand Starting at position 1285 of SEQ ID NO: 316552
aaauaacauugcguagaua

SEQ ID NO: 419580 - RNA, 19 nt, Artificial Sequence
  Description of Artificial Sequence: Synthetic oligonucleotide
  Antisense Strand to SEQ ID NO: 419579
uaucuacgcaauguuauuu

SEQ ID NO: 419581 - RNA, 19 nt, Artificial Sequence
  Description of Artificial Sequence: Synthetic oligonucleotide
  Sense Strand Starting at position 1285 of SEQ ID NO: 316555
uaacauugcguagauaaag

SEQ ID NO: 419582 - RNA, 19 nt, Artificial Sequence
  Description of Artificial Sequence: Synthetic oligonucleotide
  Antisense Strand to SEQ ID NO: 419581
cuuuaucuacgcaauguua

SEQ ID NO: 419583 - RNA, 19 nt, Artificial Sequence
  Description of Artificial Sequence: Synthetic oligonucleotide
  Sense Strand Starting at position 1285 of SEQ ID NO: 316617
aguguuugcagagaauaac

SEQ ID NO: 419584 - RNA, 19 nt, Artificial Sequence
  Description of Artificial Sequence: Synthetic oligonucleotide
  Antisense Strand to SEQ ID NO: 419583
guuauucucugcaaacacu

SEQ ID NO: 419585 - RNA, 19 nt, Artificial Sequence
  Description of Artificial Sequence: Synthetic oligonucleotide
  Sense Strand Starting at position 1285 of SEQ ID NO: 316679
ccaaaugauuucugacaag

SEQ ID NO: 419586 - RNA, 19 nt, Artificial Sequence
  Description of Artificial Sequence: Synthetic oligonucleotide
  Antisense Strand to SEQ ID NO: 419585
cuugucagaaaucauuugg

SEQ ID NO: 419587 - RNA, 19 nt, Artificial Sequence
  Description of Artificial Sequence: Synthetic oligonucleotide
  Sense Strand Starting at position 1285 of SEQ ID NO: 316716
cucugcuagccugaacaga

SEQ ID NO: 419588 - RNA, 19 nt, Artificial Sequence
  Description of Artificial Sequence: Synthetic oligonucleotide
  Antisense Strand to SEQ ID NO: 419587
ucuguucaggcuagcagag

SEQ ID NO: 419589 - RNA, 19 nt, Artificial Sequence
  Description of Artificial Sequence: Synthetic oligonucleotide
  Sense Strand Starting at position 1285 of SEQ ID NO: 316750
acgagcuauuucguuaaac

SEQ ID NO: 419590 - RNA, 19 nt, Artificial Sequence
  Description of Artificial Sequence: Synthetic oligonucleotide
  Antisense Strand to SEQ ID NO: 419589
guuuaacgaaauagcucgu

SEQ ID NO: 419591 - RNA, 19 nt, Artificial Sequence
  Description of Artificial Sequence: Synthetic oligonucleotide
  Sense Strand Starting at position 1285 of SEQ ID NO: 316751
cgagcuauuucguuaaacu

SEQ ID NO: 419592 - RNA, 19 nt, Artificial Sequence
  Description of Artificial Sequence: Synthetic oligonucleotide
  Antisense Strand to SEQ ID NO: 419591
aguuuaacgaaauagcucg

SEQ ID NO: 419593 - RNA, 19 nt, Artificial Sequence
  Description of Artificial Sequence: Synthetic oligonucleotide
  Sense Strand Starting at position 1285 of SEQ ID NO: 316809
uacaaaggugacugucuau

SEQ ID NO: 419594 - RNA, 19 nt, Artificial Sequence
  Description of Artificial Sequence: Synthetic oligonucleotide
  Antisense Strand to SEQ ID NO: 419593
auagacagucaccuuugua

SEQ ID NO: 419595 - RNA, 19 nt, Artificial Sequence
  Description of Artificial Sequence: Synthetic oligonucleotide
  Sense Strand Starting at position 1285 of SEQ ID NO: 316818
gacugucuaugugcgauuu

SEQ ID NO: 419596 - RNA, 19 nt, Artificial Sequence
  Description of Artificial Sequence: Synthetic oligonucleotide
  Antisense Strand to SEQ ID NO: 419595
aaaucgcacauagacaguc

SEQ ID NO: 419597 - RNA, 19 nt, Artificial Sequence
  Description of Artificial Sequence: Synthetic oligonucleotide
  Sense Strand Starting at position 1285 of SEQ ID NO: 316819
acugucuaugugcgauuua

SEQ ID NO: 419598 - RNA, 19 nt, Artificial Sequence
  Description of Artificial Sequence: Synthetic oligonucleotide
  Antisense Strand to SEQ ID NO: 419597
uaaaucgcacauagacagu

SEQ ID NO: 419599 - RNA, 19 nt, Artificial Sequence
  Description of Artificial Sequence: Synthetic oligonucleotide
  Sense Strand Starting at position 1285 of SEQ ID NO: 316923
guaauaucuccagaaguuu

SEQ ID NO: 419600 - RNA, 19 nt, Artificial Sequence
  Description of Artificial Sequence: Synthetic oligonucleotide
  Antisense Strand to SEQ ID NO: 419599
aaacuucuggagauauuac

SEQ ID NO: 419601 - RNA, 19 nt, Artificial Sequence
  Description of Artificial Sequence: Synthetic oligonucleotide
  Sense Strand Starting at position 1285 of SEQ ID NO: 316953
gacuuauaucaaggguauu

SEQ ID NO: 419602 - RNA, 19 nt, Artificial Sequence
  Description of Artificial Sequence: Synthetic oligonucleotide
  Antisense Strand to SEQ ID NO: 419601
aauacccuugauauaaguc

SEQ ID NO: 419603 - RNA, 19 nt, Artificial Sequence
  Description of Artificial Sequence: Synthetic oligonucleotide
  Sense Strand Starting at position 1285 of SEQ ID NO: 317138
ccgggagauucccugcaga

SEQ ID NO: 419604 - RNA, 19 nt, Artificial Sequence
  Description of Artificial Sequence: Synthetic oligonucleotide
  Antisense Strand to SEQ ID NO: 419603
ucugcagggaaucucccgg

SEQ ID NO: 419605 - RNA, 19 nt, Artificial Sequence
  Description of Artificial Sequence: Synthetic oligonucleotide
  Sense Strand Starting at position 1285 of SEQ ID NO: 317369
gaggcugucaguugauuuc

SEQ ID NO: 419606 - RNA, 19 nt, Artificial Sequence
  Description of Artificial Sequence: Synthetic oligonucleotide
  Antisense Strand to SEQ ID NO: 419605
gaaaucaacugacagccuc

SEQ ID NO: 419607 - RNA, 19 nt, Artificial Sequence
  Description of Artificial Sequence: Synthetic oligonucleotide
  Sense Strand Starting at position 1285 of SEQ ID NO: 317382
gauuucugcugcuuuggaa

SEQ ID NO: 419608 - RNA, 19 nt, Artificial Sequence
  Description of Artificial Sequence: Synthetic oligonucleotide
  Antisense Strand to SEQ ID NO: 419607
uuccaaagcagcagaaauc

SEQ ID NO: 419609 - RNA, 19 nt, Artificial Sequence
  Description of Artificial Sequence: Synthetic oligonucleotide
  Sense Strand Starting at position 1285 of SEQ ID NO: 317671
acaguaauugcccaaguaa

SEQ ID NO: 419610 - RNA, 19 nt, Artificial Sequence
  Description of Artificial Sequence: Synthetic oligonucleotide
  Antisense Strand to SEQ ID NO: 419609
uuacuugggcaauuacugu

SEQ ID NO: 419611 - RNA, 19 nt, Artificial Sequence
  Description of Artificial Sequence: Synthetic oligonucleotide
  Sense Strand Starting at position 1285 of SEQ ID NO: 317775
ggcucaagugauuaucuga

SEQ ID NO: 419612 - RNA, 19 nt, Artificial Sequence
  Description of Artificial Sequence: Synthetic oligonucleotide
  Antisense Strand to SEQ ID NO: 419611
ucagauaaucacuugagcc

SEQ ID NO: 419613 - RNA, 19 nt, Artificial Sequence
  Description of Artificial Sequence: Synthetic oligonucleotide
  Sense Strand Starting at position 1285 of SEQ ID NO: 317778
ucaagugauuaucugaugu

SEQ ID NO: 419614 - RNA, 19 nt, Artificial Sequence
  Description of Artificial Sequence: Synthetic oligonucleotide
  Antisense Strand to SEQ ID NO: 419613
acaucagauaaucacuuga

SEQ ID NO: 419615 - RNA, 19 nt, Artificial Sequence
  Description of Artificial Sequence: Synthetic oligonucleotide
  Sense Strand Starting at position 1285 of SEQ ID NO: 317865
cccugacuucuggagccau

SEQ ID NO: 419616 - RNA, 19 nt, Artificial Sequence
  Description of Artificial Sequence: Synthetic oligonucleotide
  Antisense Strand to SEQ ID NO: 419615
auggcuccagaagucaggg

SEQ ID NO: 419617 - RNA, 19 nt, Artificial Sequence
  Description of Artificial Sequence: Synthetic oligonucleotide
  Sense Strand Starting at position 1285 of SEQ ID NO: 317957
cuuguuuaaccugaguuag

SEQ ID NO: 419618 - RNA, 19 nt, Artificial Sequence
  Description of Artificial Sequence: Synthetic oligonucleotide
  Antisense Strand to SEQ ID NO: 419617
cuaacucagguuaaacaag

SEQ ID NO: 419619 - RNA, 19 nt, Artificial Sequence
  Description of Artificial Sequence: Synthetic oligonucleotide
  Sense Strand Starting at position 1285 of SEQ ID NO: 317959
uguuuaaccugaguuagga

SEQ ID NO: 419620 - RNA, 19 nt, Artificial Sequence
  Description of Artificial Sequence: Synthetic oligonucleotide
  Antisense Strand to SEQ ID NO: 419619
uccuaacucagguuaaaca

SEQ ID NO: 419621 - RNA, 19 nt, Artificial Sequence
  Description of Artificial Sequence: Synthetic oligonucleotide
  Sense Strand Starting at position 1285 of SEQ ID NO: 317968
ugaguuaggaaucgguaac

SEQ ID NO: 419622 - RNA, 19 nt, Artificial Sequence
  Description of Artificial Sequence: Synthetic oligonucleotide
  Antisense Strand to SEQ ID NO: 419621
guuaccgauuccuaacuca

SEQ ID NO: 419623 - RNA, 19 nt, Artificial Sequence
  Description of Artificial Sequence: Synthetic oligonucleotide
  Sense Strand Starting at position 1285 of SEQ ID NO: 317969
gaguuaggaaucgguaacu

SEQ ID NO: 419624 - RNA, 19 nt, Artificial Sequence
  Description of Artificial Sequence: Synthetic oligonucleotide
  Antisense Strand to SEQ ID NO: 419623
aguuaccgauuccuaacuc

SEQ ID NO: 419625 - RNA, 19 nt, Artificial Sequence
  Description of Artificial Sequence: Synthetic oligonucleotide
  Sense Strand Starting at position 1285 of SEQ ID NO: 318019
accaauagacuugggaguu

SEQ ID NO: 419626 - RNA, 19 nt, Artificial Sequence
  Description of Artificial Sequence: Synthetic oligonucleotide
  Antisense Strand to SEQ ID NO: 419625
aacucccaagucuauuggu

SEQ ID NO: 419627 - RNA, 19 nt, Artificial Sequence
  Description of Artificial Sequence: Synthetic oligonucleotide
  Sense Strand Starting at position 1285 of SEQ ID NO: 318029
uugggaguuccucaaaggu

SEQ ID NO: 419628 - RNA, 19 nt, Artificial Sequence
  Description of Artificial Sequence: Synthetic oligonucleotide
  Antisense Strand to SEQ ID NO: 419627
accuuugaggaacucccaa

SEQ ID NO: 419629 - RNA, 19 nt, Artificial Sequence
  Description of Artificial Sequence: Synthetic oligonucleotide
  Sense Strand Starting at position 1285 of SEQ ID NO: 318038
ccucaaaggucagcaucau

SEQ ID NO: 419630 - RNA, 19 nt, Artificial Sequence
  Description of Artificial Sequence: Synthetic oligonucleotide
  Antisense Strand to SEQ ID NO: 419629
augaugcugaccuuugagg

SEQ ID NO: 419631 - RNA, 19 nt, Artificial Sequence
  Description of Artificial Sequence: Synthetic oligonucleotide
  Sense Strand Starting at position 1285 of SEQ ID NO: 318123
uagacagugcccugagauu

SEQ ID NO: 419632 - RNA, 19 nt, Artificial Sequence
  Description of Artificial Sequence: Synthetic oligonucleotide
  Antisense Strand to SEQ ID NO: 419631
aaucucagggcacugucua

SEQ ID NO: 419633 - RNA, 19 nt, Artificial Sequence
  Description of Artificial Sequence: Synthetic oligonucleotide
  Sense Strand Starting at position 1285 of SEQ ID NO: 318188
gaaguugagcugcaauaua

SEQ ID NO: 419634 - RNA, 19 nt, Artificial Sequence
  Description of Artificial Sequence: Synthetic oligonucleotide
  Antisense Strand to SEQ ID NO: 419633
uauauugcagcucaacuuc

SEQ ID NO: 419635 - RNA, 19 nt, Artificial Sequence
  Description of Artificial Sequence: Synthetic oligonucleotide
  Sense Strand Starting at position 1285 of SEQ ID NO: 318197
cugcaauauagaugggaca

SEQ ID NO: 419636 - RNA, 19 nt, Artificial Sequence
  Description of Artificial Sequence: Synthetic oligonucleotide
  Antisense Strand to SEQ ID NO: 419635
ugucccaucuauauugcag

SEQ ID NO: 419637 - RNA, 19 nt, Artificial Sequence
  Description of Artificial Sequence: Synthetic oligonucleotide
  Sense Strand Starting at position 1285 of SEQ ID NO: 318199
gcaauauagaugggacagu

SEQ ID NO: 419638 - RNA, 19 nt, Artificial Sequence
  Description of Artificial Sequence: Synthetic oligonucleotide
  Antisense Strand to SEQ ID NO: 419637
acugucccaucuauauugc

SEQ ID NO: 419639 - RNA, 19 nt, Artificial Sequence
  Description of Artificial Sequence: Synthetic oligonucleotide
  Sense Strand Starting at position 1285 of SEQ ID NO: 318306
uguggauuacccugggaag

SEQ ID NO: 419640 - RNA, 19 nt, Artificial Sequence
  Description of Artificial Sequence: Synthetic oligonucleotide
  Antisense Strand to SEQ ID NO: 419639
cuucccaggguaauccaca

SEQ ID NO: 419641 - RNA, 19 nt, Artificial Sequence
  Description of Artificial Sequence: Synthetic oligonucleotide
  Sense Strand Starting at position 1285 of SEQ ID NO: 318518
uagaauucugugcaauggu

SEQ ID NO: 419642 - RNA, 19 nt, Artificial Sequence
  Description of Artificial Sequence: Synthetic oligonucleotide
  Antisense Strand to SEQ ID NO: 419641
accauugcacagaauucua

SEQ ID NO: 419643 - RNA, 19 nt, Artificial Sequence
  Description of Artificial Sequence: Synthetic oligonucleotide
  Sense Strand Starting at position 1285 of SEQ ID NO: 318887
ggaaauauuugugauaaag

SEQ ID NO: 419644 - RNA, 19 nt, Artificial Sequence
  Description of Artificial Sequence: Synthetic oligonucleotide
  Antisense Strand to SEQ ID NO: 419643
cuuuaucacaaauauuucc

SEQ ID NO: 419645 - RNA, 19 nt, Artificial Sequence
  Description of Artificial Sequence: Synthetic oligonucleotide
  Sense Strand Starting at position 1285 of SEQ ID NO: 318962
guuccauuaccaugauuau

SEQ ID NO: 419646 - RNA, 19 nt, Artificial Sequence
  Description of Artificial Sequence: Synthetic oligonucleotide
  Antisense Strand to SEQ ID NO: 419645
auaaucaugguaauggaac

SEQ ID NO: 419647 - RNA, 19 nt, Artificial Sequence
  Description of Artificial Sequence: Synthetic oligonucleotide
  Sense Strand Starting at position 1286 of SEQ ID NO: 315259
ccuggaauuacugguguaa

SEQ ID NO: 419648 - RNA, 19 nt, Artificial Sequence
  Description of Artificial Sequence: Synthetic oligonucleotide
  Antisense Strand to SEQ ID NO: 419647
uuacaccaguaauuccagg

SEQ ID NO: 419649 - RNA, 19 nt, Artificial Sequence
  Description of Artificial Sequence: Synthetic oligonucleotide
  Sense Strand Starting at position 1286 of SEQ ID NO: 315332
uagucaaaucagggauucu

SEQ ID NO: 419650 - RNA, 19 nt, Artificial Sequence
  Description of Artificial Sequence: Synthetic oligonucleotide
  Antisense Strand to SEQ ID NO: 419649
agaaucccugauuugacua

SEQ ID NO: 419651 - RNA, 19 nt, Artificial Sequence
  Description of Artificial Sequence: Synthetic oligonucleotide
  Sense Strand Starting at position 1286 of SEQ ID NO: 315756
cucucuacaucuguaugua

SEQ ID NO: 419652 - RNA, 19 nt, Artificial Sequence
  Description of Artificial Sequence: Synthetic oligonucleotide
  Antisense Strand to SEQ ID NO: 419651
uacauacagauguagagag

SEQ ID NO: 419653 - RNA, 19 nt, Artificial Sequence
  Description of Artificial Sequence: Synthetic oligonucleotide
  Sense Strand Starting at position 1286 of SEQ ID NO: 315808
augugauauuugcuuuccu

SEQ ID NO: 419654 - RNA, 19 nt, Artificial Sequence
  Description of Artificial Sequence: Synthetic oligonucleotide
  Antisense Strand to SEQ ID NO: 419653
aggaaagcaaauaucacau

SEQ ID NO: 419655 - RNA, 19 nt, Artificial Sequence
  Description of Artificial Sequence: Synthetic oligonucleotide
  Sense Strand Starting at position 1286 of SEQ ID NO: 315827
aagagaugucaaugcauau

SEQ ID NO: 419656 - RNA, 19 nt, Artificial Sequence
  Description of Artificial Sequence: Synthetic oligonucleotide
  Antisense Strand to SEQ ID NO: 419655
auaugcauugacaucucuu

SEQ ID NO: 419657 - RNA, 19 nt, Artificial Sequence
  Description of Artificial Sequence: Synthetic oligonucleotide
  Sense Strand Starting at position 1286 of SEQ ID NO: 315920
ucuauaguauccuuugauu

SEQ ID NO: 419658 - RNA, 19 nt, Artificial Sequence
  Description of Artificial Sequence: Synthetic oligonucleotide
  Antisense Strand to SEQ ID NO: 419657
aaucaaaggauacuauaga

SEQ ID NO: 419659 - RNA, 19 nt, Artificial Sequence
  Description of Artificial Sequence: Synthetic oligonucleotide
  Sense Strand Starting at position 1286 of SEQ ID NO: 315943
uuggcaagauucuugagau

SEQ ID NO: 419660 - RNA, 19 nt, Artificial Sequence
  Description of Artificial Sequence: Synthetic oligonucleotide
  Antisense Strand to SEQ ID NO: 419659
aucucaagaaucuugccaa

SEQ ID NO: 419661 - RNA, 19 nt, Artificial Sequence
  Description of Artificial Sequence: Synthetic oligonucleotide
  Sense Strand Starting at position 1286 of SEQ ID NO: 315956
ugagauucuuucucuggca

SEQ ID NO: 419662 - RNA, 19 nt, Artificial Sequence
  Description of Artificial Sequence: Synthetic oligonucleotide
  Antisense Strand to SEQ ID NO: 419661
ugccagagaaagaaucuca

SEQ ID NO: 419663 - RNA, 19 nt, Artificial Sequence
  Description of Artificial Sequence: Synthetic oligonucleotide
  Sense Strand Starting at position 1286 of SEQ ID NO: 316111
aggacauuguuucuggaaa

SEQ ID NO: 419664 - RNA, 19 nt, Artificial Sequence
  Description of Artificial Sequence: Synthetic oligonucleotide
  Antisense Strand to SEQ ID NO: 419663
uuuccagaaacaauguccu

SEQ ID NO: 419665 - RNA, 19 nt, Artificial Sequence
  Description of Artificial Sequence: Synthetic oligonucleotide
  Sense Strand Starting at position 1286 of SEQ ID NO: 316195
auuauuucuugggaaucuu

SEQ ID NO: 419666 - RNA, 19 nt, Artificial Sequence
  Description of Artificial Sequence: Synthetic oligonucleotide
  Antisense Strand to SEQ ID NO: 419665
aagauucccaagaaauaau

SEQ ID NO: 419667 - RNA, 19 nt, Artificial Sequence
  Description of Artificial Sequence: Synthetic oligonucleotide
  Sense Strand Starting at position 1286 of SEQ ID NO: 316203
uugggaaucuucucaccua

SEQ ID NO: 419668 - RNA, 19 nt, Artificial Sequence
  Description of Artificial Sequence: Synthetic oligonucleotide
  Antisense Strand to SEQ ID NO: 419667
uaggugagaagauucccaa

SEQ ID NO: 419669 - RNA, 19 nt, Artificial Sequence
  Description of Artificial Sequence: Synthetic oligonucleotide
  Sense Strand Starting at position 1286 of SEQ ID NO: 316229
aucuaucugugacucaaga

SEQ ID NO: 419670 - RNA, 19 nt, Artificial Sequence
  Description of Artificial Sequence: Synthetic oligonucleotide
  Antisense Strand to SEQ ID NO: 419669
ucuugagucacagauagau

SEQ ID NO: 419671 - RNA, 19 nt, Artificial Sequence
  Description of Artificial Sequence: Synthetic oligonucleotide
  Sense Strand Starting at position 1286 of SEQ ID NO: 316253
ugugucaauuuagagaauu

SEQ ID NO: 419672 - RNA, 19 nt, Artificial Sequence
  Description of Artificial Sequence: Synthetic oligonucleotide
  Antisense Strand to SEQ ID NO: 419671
aauucucuaaauugacaca

SEQ ID NO: 419673 - RNA, 19 nt, Artificial Sequence
  Description of Artificial Sequence: Synthetic oligonucleotide
  Sense Strand Starting at position 1286 of SEQ ID NO: 316339
cuggucuagccuggagauu

SEQ ID NO: 419674 - RNA, 19 nt, Artificial Sequence
  Description of Artificial Sequence: Synthetic oligonucleotide
  Antisense Strand to SEQ ID NO: 419673
aaucuccaggcuagaccag

SEQ ID NO: 419675 - RNA, 19 nt, Artificial Sequence
  Description of Artificial Sequence: Synthetic oligonucleotide
  Sense Strand Starting at position 1286 of SEQ ID NO: 316340
uggucuagccuggagauua

SEQ ID NO: 419676 - RNA, 19 nt, Artificial Sequence
  Description of Artificial Sequence: Synthetic oligonucleotide
  Antisense Strand to SEQ ID NO: 419675
uaaucuccaggcuagacca

SEQ ID NO: 419677 - RNA, 19 nt, Artificial Sequence
  Description of Artificial Sequence: Synthetic oligonucleotide
  Sense Strand Starting at position 1286 of SEQ ID NO: 316354
gauuaugaccuugggcagu

SEQ ID NO: 419678 - RNA, 19 nt, Artificial Sequence
  Description of Artificial Sequence: Synthetic oligonucleotide
  Antisense Strand to SEQ ID NO: 419677
acugcccaaggucauaauc

SEQ ID NO: 419679 - RNA, 19 nt, Artificial Sequence
  Description of Artificial Sequence: Synthetic oligonucleotide
  Sense Strand Starting at position 1286 of SEQ ID NO: 316429
cgcauuauaagaggagaca

SEQ ID NO: 419680 - RNA, 19 nt, Artificial Sequence
  Description of Artificial Sequence: Synthetic oligonucleotide
  Antisense Strand to SEQ ID NO: 419679
ugucuccucuuauaaugcg

SEQ ID NO: 419681 - RNA, 19 nt, Artificial Sequence
  Description of Artificial Sequence: Synthetic oligonucleotide
  Sense Strand Starting at position 1286 of SEQ ID NO: 316504
cuacuuaacgggcauuaua

SEQ ID NO: 419682 - RNA, 19 nt, Artificial Sequence
  Description of Artificial Sequence: Synthetic oligonucleotide
  Antisense Strand to SEQ ID NO: 419681
uauaaugcccguuaaguag

SEQ ID NO: 419683 - RNA, 19 nt, Artificial Sequence
  Description of Artificial Sequence: Synthetic oligonucleotide
  Sense Strand Starting at position 1286 of SEQ ID NO: 316511
acgggcauuauaugcuaaa

SEQ ID NO: 419684 - RNA, 19 nt, Artificial Sequence
  Description of Artificial Sequence: Synthetic oligonucleotide
  Antisense Strand to SEQ ID NO: 419683
uuuagcauauaaugcccgu

SEQ ID NO: 419685 - RNA, 19 nt, Artificial Sequence
  Description of Artificial Sequence: Synthetic oligonucleotide
  Sense Strand Starting at position 1286 of SEQ ID NO: 316512
cgggcauuauaugcuaaau

SEQ ID NO: 419686 - RNA, 19 nt, Artificial Sequence
  Description of Artificial Sequence: Synthetic oligonucleotide
  Antisense Strand to SEQ ID NO: 419685
auuuagcauauaaugcccg

SEQ ID NO: 419687 - RNA, 19 nt, Artificial Sequence
  Description of Artificial Sequence: Synthetic oligonucleotide
  Sense Strand Starting at position 1286 of SEQ ID NO: 316525
cuaaauaauguuggcuuau

SEQ ID NO: 419688 - RNA, 19 nt, Artificial Sequence
  Description of Artificial Sequence: Synthetic oligonucleotide
  Antisense Strand to SEQ ID NO: 419687
auaagccaacauuauuuag

SEQ ID NO: 419689 - RNA, 19 nt, Artificial Sequence
  Description of Artificial Sequence: Synthetic oligonucleotide
  Sense Strand Starting at position 1286 of SEQ ID NO: 316527
aaauaauguuggcuuauag

SEQ ID NO: 419690 - RNA, 19 nt, Artificial Sequence
  Description of Artificial Sequence: Synthetic oligonucleotide
  Antisense Strand to SEQ ID NO: 419689
cuauaagccaacauuauuu

SEQ ID NO: 419691 - RNA, 19 nt, Artificial Sequence
  Description of Artificial Sequence: Synthetic oligonucleotide
  Sense Strand Starting at position 1286 of SEQ ID NO: 316535
uuggcuuauagugaagauu

SEQ ID NO: 419692 - RNA, 19 nt, Artificial Sequence
  Description of Artificial Sequence: Synthetic oligonucleotide
  Antisense Strand to SEQ ID NO: 419691
aaucuucacuauaagccaa

SEQ ID NO: 419693 - RNA, 19 nt, Artificial Sequence
  Description of Artificial Sequence: Synthetic oligonucleotide
  Sense Strand Starting at position 1286 of SEQ ID NO: 316544
agugaagauugucccguga

SEQ ID NO: 419694 - RNA, 19 nt, Artificial Sequence
  Description of Artificial Sequence: Synthetic oligonucleotide
  Antisense Strand to SEQ ID NO: 419693
ucacgggacaaucuucacu

SEQ ID NO: 419695 - RNA, 19 nt, Artificial Sequence
  Description of Artificial Sequence: Synthetic oligonucleotide
  Sense Strand Starting at position 1286 of SEQ ID NO: 317446
cguggaagucagagugcau

SEQ ID NO: 419696 - RNA, 19 nt, Artificial Sequence
  Description of Artificial Sequence: Synthetic oligonucleotide
  Antisense Strand to SEQ ID NO: 419695
augcacucugacuuccacg

SEQ ID NO: 419697 - RNA, 19 nt, Artificial Sequence
  Description of Artificial Sequence: Synthetic oligonucleotide
  Sense Strand Starting at position 1286 of SEQ ID NO: 317453
gucagagugcauuauguuu

SEQ ID NO: 419698 - RNA, 19 nt, Artificial Sequence
  Description of Artificial Sequence: Synthetic oligonucleotide
  Antisense Strand to SEQ ID NO: 419697
aaacauaaugcacucugac

SEQ ID NO: 419699 - RNA, 19 nt, Artificial Sequence
  Description of Artificial Sequence: Synthetic oligonucleotide
  Sense Strand Starting at position 1286 of SEQ ID NO: 317461
gcauuauguuucucaccag

SEQ ID NO: 419700 - RNA, 19 nt, Artificial Sequence
  Description of Artificial Sequence: Synthetic oligonucleotide
  Antisense Strand to SEQ ID NO: 419699
cuggugagaaacauaaugc

SEQ ID NO: 419701 - RNA, 19 nt, Artificial Sequence
  Description of Artificial Sequence: Synthetic oligonucleotide
  Sense Strand Starting at position 1286 of SEQ ID NO: 317752
cugggauuaugcccgguaa

SEQ ID NO: 419702 - RNA, 19 nt, Artificial Sequence
  Description of Artificial Sequence: Synthetic oligonucleotide
  Antisense Strand to SEQ ID NO: 419701
uuaccgggcauaaucccag

SEQ ID NO: 419703 - RNA, 19 nt, Artificial Sequence
  Description of Artificial Sequence: Synthetic oligonucleotide
  Sense Strand Starting at position 1286 of SEQ ID NO: 317987
aaagaauucuggcugggug

SEQ ID NO: 419704 - RNA, 19 nt, Artificial Sequence
  Description of Artificial Sequence: Synthetic oligonucleotide
  Antisense Strand to SEQ ID NO: 419703
cacccagccagaauucuuu

SEQ ID NO: 419705 - RNA, 19 nt, Artificial Sequence
  Description of Artificial Sequence: Synthetic oligonucleotide
  Sense Strand Starting at position 1286 of SEQ ID NO: 318446
caguguuuccgacaguuua

SEQ ID NO: 419706 - RNA, 19 nt, Artificial Sequence
  Description of Artificial Sequence: Synthetic oligonucleotide
  Antisense Strand to SEQ ID NO: 419705
uaaacugucggaaacacug

SEQ ID NO: 419707 - RNA, 19 nt, Artificial Sequence
  Description of Artificial Sequence: Synthetic oligonucleotide
  Sense Strand Starting at position 1286 of SEQ ID NO: 318482
cucuccaugugcucagaaa

SEQ ID NO: 419708 - RNA, 19 nt, Artificial Sequence
  Description of Artificial Sequence: Synthetic oligonucleotide
  Antisense Strand to SEQ ID NO: 419707
uuucugagcacauggagag

SEQ ID NO: 419709 - RNA, 19 nt, Artificial Sequence
  Description of Artificial Sequence: Synthetic oligonucleotide
  Sense Strand Starting at position 1286 of SEQ ID NO: 318504
caucaaaugugcucagaag

SEQ ID NO: 419710 - RNA, 19 nt, Artificial Sequence
  Description of Artificial Sequence: Synthetic oligonucleotide
  Antisense Strand to SEQ ID NO: 419709
cuucugagcacauuugaug

SEQ ID NO: 419711 - RNA, 19 nt, Artificial Sequence
  Description of Artificial Sequence: Synthetic oligonucleotide
  Sense Strand Starting at position 1286 of SEQ ID NO: 318505
aucaaaugugcucagaagu

SEQ ID NO: 419712 - RNA, 19 nt, Artificial Sequence
  Description of Artificial Sequence: Synthetic oligonucleotide
  Antisense Strand to SEQ ID NO: 419711
acuucugagcacauuugau

SEQ ID NO: 419713 - RNA, 19 nt, Artificial Sequence
  Description of Artificial Sequence: Synthetic oligonucleotide
  Sense Strand Starting at position 1286 of SEQ ID NO: 318522
guuacauuagagcauaaau

SEQ ID NO: 419714 - RNA, 19 nt, Artificial Sequence
  Description of Artificial Sequence: Synthetic oligonucleotide
  Antisense Strand to SEQ ID NO: 419713
auuuaugcucuaauguaac

SEQ ID NO: 419715 - RNA, 19 nt, Artificial Sequence
  Description of Artificial Sequence: Synthetic oligonucleotide
  Sense Strand Starting at position 1286 of SEQ ID NO: 318533
gcauaaaucucaucaaggu

SEQ ID NO: 419716 - RNA, 19 nt, Artificial Sequence
  Description of Artificial Sequence: Synthetic oligonucleotide
  Antisense Strand to SEQ ID NO: 419715
accuugaugagauuuaugc

SEQ ID NO: 419717 - RNA, 19 nt, Artificial Sequence
  Description of Artificial Sequence: Synthetic oligonucleotide
  Sense Strand Starting at position 1286 of SEQ ID NO: 318563
aguacaucuguuuauaggu

SEQ ID NO: 419718 - RNA, 19 nt, Artificial Sequence
  Description of Artificial Sequence: Synthetic oligonucleotide
  Antisense Strand to SEQ ID NO: 419717
accuauaaacagauguacu

SEQ ID NO: 419719 - RNA, 19 nt, Artificial Sequence
  Description of Artificial Sequence: Synthetic oligonucleotide
  Sense Strand Starting at position 1286 of SEQ ID NO: 318580
gucacagaagcauaaucau

SEQ ID NO: 419720 - RNA, 19 nt, Artificial Sequence
  Description of Artificial Sequence: Synthetic oligonucleotide
  Antisense Strand to SEQ ID NO: 419719
augauuaugcuucugugac

SEQ ID NO: 419721 - RNA, 19 nt, Artificial Sequence
  Description of Artificial Sequence: Synthetic oligonucleotide
  Sense Strand Starting at position 1286 of SEQ ID NO: 318603
ccugucagacaguaucuua

SEQ ID NO: 419722 - RNA, 19 nt, Artificial Sequence
  Description of Artificial Sequence: Synthetic oligonucleotide
  Antisense Strand to SEQ ID NO: 419721
uaagauacugucugacagg

SEQ ID NO: 419723 - RNA, 19 nt, Artificial Sequence
  Description of Artificial Sequence: Synthetic oligonucleotide
  Sense Strand Starting at position 1286 of SEQ ID NO: 318606
gucagacaguaucuuaagu

SEQ ID NO: 419724 - RNA, 19 nt, Artificial Sequence
  Description of Artificial Sequence: Synthetic oligonucleotide
  Antisense Strand to SEQ ID NO: 419723
acuuaagauacugucugac

SEQ ID NO: 419725 - RNA, 19 nt, Artificial Sequence
  Description of Artificial Sequence: Synthetic oligonucleotide
  Sense Strand Starting at position 1286 of SEQ ID NO: 318639
gggcuaggaucauugcauu

SEQ ID NO: 419726 - RNA, 19 nt, Artificial Sequence
  Description of Artificial Sequence: Synthetic oligonucleotide
  Antisense Strand to SEQ ID NO: 419725
aaugcaaugauccuagccc

SEQ ID NO: 419727 - RNA, 19 nt, Artificial Sequence
  Description of Artificial Sequence: Synthetic oligonucleotide
  Sense Strand Starting at position 1287 of SEQ ID NO: 316424
cgugucaccuacuuuauuu

SEQ ID NO: 419728 - RNA, 19 nt, Artificial Sequence
  Description of Artificial Sequence: Synthetic oligonucleotide
  Antisense Strand to SEQ ID NO: 419727
aaauaaaguaggugacacg

SEQ ID NO: 419729 - RNA, 19 nt, Artificial Sequence
  Description of Artificial Sequence: Synthetic oligonucleotide
  Sense Strand Starting at position 1287 of SEQ ID NO: 316641
ccgcacguucuccagagau

SEQ ID NO: 419730 - RNA, 19 nt, Artificial Sequence
  Description of Artificial Sequence: Synthetic oligonucleotide
  Antisense Strand to SEQ ID NO: 419729
aucucuggagaacgugcgg

SEQ ID NO: 419731 - RNA, 19 nt, Artificial Sequence
  Description of Artificial Sequence: Synthetic oligonucleotide
  Sense Strand Starting at position 1287 of SEQ ID NO: 316666
gagggacauuugcaaauga

SEQ ID NO: 419732 - RNA, 19 nt, Artificial Sequence
  Description of Artificial Sequence: Synthetic oligonucleotide
  Antisense Strand to SEQ ID NO: 419731
ucauuugcaaaugucccuc

SEQ ID NO: 419733 - RNA, 19 nt, Artificial Sequence
  Description of Artificial Sequence: Synthetic oligonucleotide
  Sense Strand Starting at position 1287 of SEQ ID NO: 316701
gugugcaaacguucugagu

SEQ ID NO: 419734 - RNA, 19 nt, Artificial Sequence
  Description of Artificial Sequence: Synthetic oligonucleotide
  Antisense Strand to SEQ ID NO: 419733
acucagaacguuugcacac

SEQ ID NO: 419735 - RNA, 19 nt, Artificial Sequence
  Description of Artificial Sequence: Synthetic oligonucleotide
  Sense Strand Starting at position 1287 of SEQ ID NO: 316831
ggguccucaucuguaaaca

SEQ ID NO: 419736 - RNA, 19 nt, Artificial Sequence
  Description of Artificial Sequence: Synthetic oligonucleotide
  Antisense Strand to SEQ ID NO: 419735
uguuuacagaugaggaccc

SEQ ID NO: 419737 - RNA, 19 nt, Artificial Sequence
  Description of Artificial Sequence: Synthetic oligonucleotide
  Sense Strand Starting at position 1287 of SEQ ID NO: 316832
gguccucaucuguaaacag

SEQ ID NO: 419738 - RNA, 19 nt, Artificial Sequence
  Description of Artificial Sequence: Synthetic oligonucleotide
  Antisense Strand to SEQ ID NO: 419737
cuguuuacagaugaggacc

SEQ ID NO: 419739 - RNA, 19 nt, Artificial Sequence
  Description of Artificial Sequence: Synthetic oligonucleotide
  Sense Strand Starting at position 1287 of SEQ ID NO: 316890
gacagaguccacugugcau

SEQ ID NO: 419740 - RNA, 19 nt, Artificial Sequence
  Description of Artificial Sequence: Synthetic oligonucleotide
  Antisense Strand to SEQ ID NO: 419739
augcacaguggacucuguc

SEQ ID NO: 419741 - RNA, 19 nt, Artificial Sequence
  Description of Artificial Sequence: Synthetic oligonucleotide
  Sense Strand Starting at position 1287 of SEQ ID NO: 317169
ggaggcuagacauguguga

SEQ ID NO: 419742 - RNA, 19 nt, Artificial Sequence
  Description of Artificial Sequence: Synthetic oligonucleotide
  Antisense Strand to SEQ ID NO: 419741
ucacacaugucuagccucc

SEQ ID NO: 419743 - RNA, 19 nt, Artificial Sequence
  Description of Artificial Sequence: Synthetic oligonucleotide
  Sense Strand Starting at position 1287 of SEQ ID NO: 317171
aggcuagacaugugugacu

SEQ ID NO: 419744 - RNA, 19 nt, Artificial Sequence
  Description of Artificial Sequence: Synthetic oligonucleotide
  Antisense Strand to SEQ ID NO: 419743
agucacacaugucuagccu

SEQ ID NO: 419745 - RNA, 19 nt, Artificial Sequence
  Description of Artificial Sequence: Synthetic oligonucleotide
  Sense Strand Starting at position 1287 of SEQ ID NO: 317173
gcuagacaugugugacuga

SEQ ID NO: 419746 - RNA, 19 nt, Artificial Sequence
  Description of Artificial Sequence: Synthetic oligonucleotide
  Antisense Strand to SEQ ID NO: 419745
ucagucacacaugucuagc

SEQ ID NO: 419747 - RNA, 19 nt, Artificial Sequence
  Description of Artificial Sequence: Synthetic oligonucleotide
  Sense Strand Starting at position 1287 of SEQ ID NO: 317176
agacaugugugacugagau

SEQ ID NO: 419748 - RNA, 19 nt, Artificial Sequence
  Description of Artificial Sequence: Synthetic oligonucleotide
  Antisense Strand to SEQ ID NO: 419747
aucucagucacacaugucu

SEQ ID NO: 419749 - RNA, 19 nt, Artificial Sequence
  Description of Artificial Sequence: Synthetic oligonucleotide
  Sense Strand Starting at position 1287 of SEQ ID NO: 317374
aggacauugcucugcggga

SEQ ID NO: 419750 - RNA, 19 nt, Artificial Sequence
  Description of Artificial Sequence: Synthetic oligonucleotide
  Antisense Strand to SEQ ID NO: 419749
ucccgcagagcaauguccu

SEQ ID NO: 419751 - RNA, 19 nt, Artificial Sequence
  Description of Artificial Sequence: Synthetic oligonucleotide
  Sense Strand Starting at position 1287 of SEQ ID NO: 317821
ggaugacccucauucccaa

SEQ ID NO: 419752 - RNA, 19 nt, Artificial Sequence
  Description of Artificial Sequence: Synthetic oligonucleotide
  Antisense Strand to SEQ ID NO: 419751
uugggaaugagggucaucc

SEQ ID NO: 419753 - RNA, 19 nt, Artificial Sequence
  Description of Artificial Sequence: Synthetic oligonucleotide
  Sense Strand Starting at position 1287 of SEQ ID NO: 317843
uguuaacaacucugccaga

SEQ ID NO: 419754 - RNA, 19 nt, Artificial Sequence
  Description of Artificial Sequence: Synthetic oligonucleotide
  Antisense Strand to SEQ ID NO: 419753
ucuggcagaguuguuaaca

SEQ ID NO: 419755 - RNA, 19 nt, Artificial Sequence
  Description of Artificial Sequence: Synthetic oligonucleotide
  Sense Strand Starting at position 1287 of SEQ ID NO: 317844
guuaacaacucugccagaa

SEQ ID NO: 419756 - RNA, 19 nt, Artificial Sequence
  Description of Artificial Sequence: Synthetic oligonucleotide
  Antisense Strand to SEQ ID NO: 419755
uucuggcagaguuguuaac

SEQ ID NO: 419757 - RNA, 19 nt, Artificial Sequence
  Description of Artificial Sequence: Synthetic oligonucleotide
  Sense Strand Starting at position 1287 of SEQ ID NO: 317848
acaacucugccagaaagca

SEQ ID NO: 419758 - RNA, 19 nt, Artificial Sequence
  Description of Artificial Sequence: Synthetic oligonucleotide
  Antisense Strand to SEQ ID NO: 419757
ugcuuucuggcagaguugu

SEQ ID NO: 419759 - RNA, 19 nt, Artificial Sequence
  Description of Artificial Sequence: Synthetic oligonucleotide
  Sense Strand Starting at position 1287 of SEQ ID NO: 317871
ucaugagcccuaugcuaug

SEQ ID NO: 419760 - RNA, 19 nt, Artificial Sequence
  Description of Artificial Sequence: Synthetic oligonucleotide
  Antisense Strand to SEQ ID NO: 419759
cauagcauagggcucauga

SEQ ID NO: 419761 - RNA, 19 nt, Artificial Sequence
  Description of Artificial Sequence: Synthetic oligonucleotide
  Sense Strand Starting at position 1287 of SEQ ID NO: 317880
cuaugcuauggauggagaa

SEQ ID NO: 419762 - RNA, 19 nt, Artificial Sequence
  Description of Artificial Sequence: Synthetic oligonucleotide
  Antisense Strand to SEQ ID NO: 419761
uucuccauccauagcauag

SEQ ID NO: 419763 - RNA, 19 nt, Artificial Sequence
  Description of Artificial Sequence: Synthetic oligonucleotide
  Sense Strand Starting at position 1287 of SEQ ID NO: 318020
ccauguccugucuacacaa

SEQ ID NO: 419764 - RNA, 19 nt, Artificial Sequence
  Description of Artificial Sequence: Synthetic oligonucleotide
  Antisense Strand to SEQ ID NO: 419763
uuguguagacaggacaugg

SEQ ID NO: 419765 - RNA, 19 nt, Artificial Sequence
  Description of Artificial Sequence: Synthetic oligonucleotide
  Sense Strand Starting at position 1287 of SEQ ID NO: 318149
gagagcauccuguggguca

SEQ ID NO: 419766 - RNA, 19 nt, Artificial Sequence
  Description of Artificial Sequence: Synthetic oligonucleotide
  Antisense Strand to SEQ ID NO: 419765
ugacccacaggaugcucuc

SEQ ID NO: 419767 - RNA, 19 nt, Artificial Sequence
  Description of Artificial Sequence: Synthetic oligonucleotide
  Sense Strand Starting at position 1287 of SEQ ID NO: 318238
ggguuacacagccagucau

SEQ ID NO: 419768 - RNA, 19 nt, Artificial Sequence
  Description of Artificial Sequence: Synthetic oligonucleotide
  Antisense Strand to SEQ ID NO: 419767
augacuggcuguguaaccc

SEQ ID NO: 419769 - RNA, 19 nt, Artificial Sequence
  Description of Artificial Sequence: Synthetic oligonucleotide
  Sense Strand Starting at position 1287 of SEQ ID NO: 318426
uccugaggcccugguagau

SEQ ID NO: 419770 - RNA, 19 nt, Artificial Sequence
  Description of Artificial Sequence: Synthetic oligonucleotide
  Antisense Strand to SEQ ID NO: 419769
aucuaccagggccucagga

SEQ ID NO: 419771 - RNA, 19 nt, Artificial Sequence
  Description of Artificial Sequence: Synthetic oligonucleotide
  Sense Strand Starting at position 1287 of SEQ ID NO: 318444
uggaaacucuaggagaauc

SEQ ID NO: 419772 - RNA, 19 nt, Artificial Sequence
  Description of Artificial Sequence: Synthetic oligonucleotide
  Antisense Strand to SEQ ID NO: 419771
gauucuccuagaguuucca

SEQ ID NO: 419773 - RNA, 19 nt, Artificial Sequence
  Description of Artificial Sequence: Synthetic oligonucleotide
  Sense Strand Starting at position 1287 of SEQ ID NO: 318469
ucuaacguuugaucuuuga

SEQ ID NO: 419774 - RNA, 19 nt, Artificial Sequence
  Description of Artificial Sequence: Synthetic oligonucleotide
  Antisense Strand to SEQ ID NO: 419773
ucaaagaucaaacguuaga

SEQ ID NO: 419775 - RNA, 19 nt, Artificial Sequence
  Description of Artificial Sequence: Synthetic oligonucleotide
  Sense Strand Starting at position 1287 of SEQ ID NO: 318473
acguuugaucuuugacccu

SEQ ID NO: 419776 - RNA, 19 nt, Artificial Sequence
  Description of Artificial Sequence: Synthetic oligonucleotide
  Antisense Strand to SEQ ID NO: 419775
agggucaaagaucaaacgu

SEQ ID NO: 419777 - RNA, 19 nt, Artificial Sequence
  Description of Artificial Sequence: Synthetic oligonucleotide
  Sense Strand Starting at position 1287 of SEQ ID NO: 318573
cuuggcagaucccugauau

SEQ ID NO: 419778 - RNA, 19 nt, Artificial Sequence
  Description of Artificial Sequence: Synthetic oligonucleotide
  Antisense Strand to SEQ ID NO: 419777
auaucagggaucugccaag

SEQ ID NO: 419779 - RNA, 19 nt, Artificial Sequence
  Description of Artificial Sequence: Synthetic oligonucleotide
  Sense Strand Starting at position 1287 of SEQ ID NO: 318574
uuggcagaucccugauauc

SEQ ID NO: 419780 - RNA, 19 nt, Artificial Sequence
  Description of Artificial Sequence: Synthetic oligonucleotide
  Antisense Strand to SEQ ID NO: 419779
gauaucagggaucugccaa

SEQ ID NO: 419781 - RNA, 19 nt, Artificial Sequence
  Description of Artificial Sequence: Synthetic oligonucleotide
  Sense Strand Starting at position 1287 of SEQ ID NO: 318616
agggaaccaaccugugauu

SEQ ID NO: 419782 - RNA, 19 nt, Artificial Sequence
  Description of Artificial Sequence: Synthetic oligonucleotide
  Antisense Strand to SEQ ID NO: 419781
aaucacagguugguucccu

SEQ ID NO: 419783 - RNA, 19 nt, Artificial Sequence
  Description of Artificial Sequence: Synthetic oligonucleotide
  Sense Strand Starting at position 1287 of SEQ ID NO: 318618
ggaaccaaccugugauuag

SEQ ID NO: 419784 - RNA, 19 nt, Artificial Sequence
  Description of Artificial Sequence: Synthetic oligonucleotide
  Antisense Strand to SEQ ID NO: 419783
cuaaucacagguugguucc

SEQ ID NO: 419785 - RNA, 19 nt, Artificial Sequence
  Description of Artificial Sequence: Synthetic oligonucleotide
  Sense Strand Starting at position 1287 of SEQ ID NO: 318690
ggcugaguugaucaccaaa

SEQ ID NO: 419786 - RNA, 19 nt, Artificial Sequence
  Description of Artificial Sequence: Synthetic oligonucleotide
  Antisense Strand to SEQ ID NO: 419785
uuuggugaucaacucagcc

SEQ ID NO: 419787 - RNA, 19 nt, Artificial Sequence
  Description of Artificial Sequence: Synthetic oligonucleotide
  Sense Strand Starting at position 1287 of SEQ ID NO: 318710
gccaaugauuuagucaguu

SEQ ID NO: 419788 - RNA, 19 nt, Artificial Sequence
  Description of Artificial Sequence: Synthetic oligonucleotide
  Antisense Strand to SEQ ID NO: 419787
aacugacuaaaucauuggc

SEQ ID NO: 419789 - RNA, 19 nt, Artificial Sequence
  Description of Artificial Sequence: Synthetic oligonucleotide
  Sense Strand Starting at position 1287 of SEQ ID NO: 318714
augauuuagucaguugugu

SEQ ID NO: 419790 - RNA, 19 nt, Artificial Sequence
  Description of Artificial Sequence: Synthetic oligonucleotide
  Antisense Strand to SEQ ID NO: 419789
acacaacugacuaaaucau

SEQ ID NO: 419791 - RNA, 19 nt, Artificial Sequence
  Description of Artificial Sequence: Synthetic oligonucleotide
  Sense Strand Starting at position 1287 of SEQ ID NO: 318716
gauuuagucaguuguguag

SEQ ID NO: 419792 - RNA, 19 nt, Artificial Sequence
  Description of Artificial Sequence: Synthetic oligonucleotide
  Antisense Strand to SEQ ID NO: 419791
cuacacaacugacuaaauc

SEQ ID NO: 419793 - RNA, 19 nt, Artificial Sequence
  Description of Artificial Sequence: Synthetic oligonucleotide
  Sense Strand Starting at position 1287 of SEQ ID NO: 318720
uagucaguuguguagguca

SEQ ID NO: 419794 - RNA, 19 nt, Artificial Sequence
  Description of Artificial Sequence: Synthetic oligonucleotide
  Antisense Strand to SEQ ID NO: 419793
ugaccuacacaacugacua

SEQ ID NO: 419795 - RNA, 19 nt, Artificial Sequence
  Description of Artificial Sequence: Synthetic oligonucleotide
  Sense Strand Starting at position 1287 of SEQ ID NO: 318725
aguuguguaggucaugaag

SEQ ID NO: 419796 - RNA, 19 nt, Artificial Sequence
  Description of Artificial Sequence: Synthetic oligonucleotide
  Antisense Strand to SEQ ID NO: 419795
cuucaugaccuacacaacu

SEQ ID NO: 419797 - RNA, 19 nt, Artificial Sequence
  Description of Artificial Sequence: Synthetic oligonucleotide
  Sense Strand Starting at position 1287 of SEQ ID NO: 318802
gcagauuccuggagagggu

SEQ ID NO: 419798 - RNA, 19 nt, Artificial Sequence
  Description of Artificial Sequence: Synthetic oligonucleotide
  Antisense Strand to SEQ ID NO: 419797
acccucuccaggaaucugc

SEQ ID NO: 419799 - RNA, 19 nt, Artificial Sequence
  Description of Artificial Sequence: Synthetic oligonucleotide
  Sense Strand Starting at position 1287 of SEQ ID NO: 318898
aucuauauucuucguaaug

SEQ ID NO: 419800 - RNA, 19 nt, Artificial Sequence
  Description of Artificial Sequence: Synthetic oligonucleotide
  Antisense Strand to SEQ ID NO: 419799
cauuacgaagaauauagau

SEQ ID NO: 419801 - RNA, 19 nt, Artificial Sequence
  Description of Artificial Sequence: Synthetic oligonucleotide
  Sense Strand Starting at position 1287 of SEQ ID NO: 318910
cguaauguccuuuauaaga

SEQ ID NO: 419802 - RNA, 19 nt, Artificial Sequence
  Description of Artificial Sequence: Synthetic oligonucleotide
  Antisense Strand to SEQ ID NO: 419801
ucuuauaaaggacauuacg

SEQ ID NO: 419803 - RNA, 19 nt, Artificial Sequence
  Description of Artificial Sequence: Synthetic oligonucleotide
  Sense Strand Starting at position 1287 of SEQ ID NO: 319006
cccaguuuauagccagacu

SEQ ID NO: 419804 - RNA, 19 nt, Artificial Sequence
  Description of Artificial Sequence: Synthetic oligonucleotide
  Antisense Strand to SEQ ID NO: 419803
agucuggcuauaaacuggg

SEQ ID NO: 419805 - RNA, 19 nt, Artificial Sequence
  Description of Artificial Sequence: Synthetic oligonucleotide
  Sense Strand Starting at position 1287 of SEQ ID NO: 319017
gccagacuguggucagaac

SEQ ID NO: 419806 - RNA, 19 nt, Artificial Sequence
  Description of Artificial Sequence: Synthetic oligonucleotide
  Antisense Strand to SEQ ID NO: 419805
guucugaccacagucuggc

SEQ ID NO: 419807 - RNA, 19 nt, Artificial Sequence
  Description of Artificial Sequence: Synthetic oligonucleotide
  Sense Strand Starting at position 1288 of SEQ ID NO: 315244
cuucuuccuggagguaaca

SEQ ID NO: 419808 - RNA, 19 nt, Artificial Sequence
  Description of Artificial Sequence: Synthetic oligonucleotide
  Antisense Strand to SEQ ID NO: 419807
uguuaccuccaggaagaag

SEQ ID NO: 419809 - RNA, 19 nt, Artificial Sequence
  Description of Artificial Sequence: Synthetic oligonucleotide
  Sense Strand Starting at position 1288 of SEQ ID NO: 315255
agguaacaaucugucaauu

SEQ ID NO: 419810 - RNA, 19 nt, Artificial Sequence
  Description of Artificial Sequence: Synthetic oligonucleotide
  Antisense Strand to SEQ ID NO: 419809
aauugacagauuguuaccu

SEQ ID NO: 419811 - RNA, 19 nt, Artificial Sequence
  Description of Artificial Sequence: Synthetic oligonucleotide
  Sense Strand Starting at position 1288 of SEQ ID NO: 315268
ucaauugcuuaaguuagga

SEQ ID NO: 419812 - RNA, 19 nt, Artificial Sequence
  Description of Artificial Sequence: Synthetic oligonucleotide
  Antisense Strand to SEQ ID NO: 419811
uccuaacuuaagcaauuga

SEQ ID NO: 419813 - RNA, 19 nt, Artificial Sequence
  Description of Artificial Sequence: Synthetic oligonucleotide
  Sense Strand Starting at position 1288 of SEQ ID NO: 315531
ggauacuaacucugauacu

SEQ ID NO: 419814 - RNA, 19 nt, Artificial Sequence
  Description of Artificial Sequence: Synthetic oligonucleotide
  Antisense Strand to SEQ ID NO: 419813
aguaucagaguuaguaucc

SEQ ID NO: 419815 - RNA, 19 nt, Artificial Sequence
  Description of Artificial Sequence: Synthetic oligonucleotide
  Sense Strand Starting at position 1288 of SEQ ID NO: 315666
guccacaugcuaugaauaa

SEQ ID NO: 419816 - RNA, 19 nt, Artificial Sequence
  Description of Artificial Sequence: Synthetic oligonucleotide
  Antisense Strand to SEQ ID NO: 419815
uuauucauagcauguggac

SEQ ID NO: 419817 - RNA, 19 nt, Artificial Sequence
  Description of Artificial Sequence: Synthetic oligonucleotide
  Sense Strand Starting at position 1288 of SEQ ID NO: 315688
acauuagaccauugcgaga

SEQ ID NO: 419818 - RNA, 19 nt, Artificial Sequence
  Description of Artificial Sequence: Synthetic oligonucleotide
  Antisense Strand to SEQ ID NO: 419817
ucucgcaauggucuaaugu

SEQ ID NO: 419819 - RNA, 19 nt, Artificial Sequence
  Description of Artificial Sequence: Synthetic oligonucleotide
  Sense Strand Starting at position 1288 of SEQ ID NO: 315735
cucccaaugcauugagauc

SEQ ID NO: 419820 - RNA, 19 nt, Artificial Sequence
  Description of Artificial Sequence: Synthetic oligonucleotide
  Antisense Strand to SEQ ID NO: 419819
gaucucaaugcauugggag

SEQ ID NO: 419821 - RNA, 19 nt, Artificial Sequence
  Description of Artificial Sequence: Synthetic oligonucleotide
  Sense Strand Starting at position 1288 of SEQ ID NO: 315756
ccgggugacauaugagauc

SEQ ID NO: 419822 - RNA, 19 nt, Artificial Sequence
  Description of Artificial Sequence: Synthetic oligonucleotide
  Antisense Strand to SEQ ID NO: 419821
gaucucauaugucacccgg

SEQ ID NO: 419823 - RNA, 19 nt, Artificial Sequence
  Description of Artificial Sequence: Synthetic oligonucleotide
  Sense Strand Starting at position 1288 of SEQ ID NO: 315771
gaucuaaaguggguggaua

SEQ ID NO: 419824 - RNA, 19 nt, Artificial Sequence
  Description of Artificial Sequence: Synthetic oligonucleotide
  Antisense Strand to SEQ ID NO: 419823
uauccacccacuuuagauc

SEQ ID NO: 419825 - RNA, 19 nt, Artificial Sequence
  Description of Artificial Sequence: Synthetic oligonucleotide
  Sense Strand Starting at position 1288 of SEQ ID NO: 315772
aucuaaaguggguggauaa

SEQ ID NO: 419826 - RNA, 19 nt, Artificial Sequence
  Description of Artificial Sequence: Synthetic oligonucleotide
  Antisense Strand to SEQ ID NO: 419825
uuauccacccacuuuagau

SEQ ID NO: 419827 - RNA, 19 nt, Artificial Sequence
  Description of Artificial Sequence: Synthetic oligonucleotide
  Sense Strand Starting at position 1288 of SEQ ID NO: 315773
ucuaaaguggguggauaaa

SEQ ID NO: 419828 - RNA, 19 nt, Artificial Sequence
  Description of Artificial Sequence: Synthetic oligonucleotide
  Antisense Strand to SEQ ID NO: 419827
uuuauccacccacuuuaga

SEQ ID NO: 419829 - RNA, 19 nt, Artificial Sequence
  Description of Artificial Sequence: Synthetic oligonucleotide
  Sense Strand Starting at position 1288 of SEQ ID NO: 315829
acagcugagucacuuugaa

SEQ ID NO: 419830 - RNA, 19 nt, Artificial Sequence
  Description of Artificial Sequence: Synthetic oligonucleotide
  Antisense Strand to SEQ ID NO: 419829
uucaaagugacucagcugu

SEQ ID NO: 419831 - RNA, 19 nt, Artificial Sequence
  Description of Artificial Sequence: Synthetic oligonucleotide
  Sense Strand Starting at position 1288 of SEQ ID NO: 315949
cggcgaucccucucagcuu

SEQ ID NO: 419832 - RNA, 19 nt, Artificial Sequence
  Description of Artificial Sequence: Synthetic oligonucleotide
  Antisense Strand to SEQ ID NO: 419831
aagcugagagggaucgccg

SEQ ID NO: 419833 - RNA, 19 nt, Artificial Sequence
  Description of Artificial Sequence: Synthetic oligonucleotide
  Sense Strand Starting at position 1288 of SEQ ID NO: 317739
gaaaucuaacgugaggcuu

SEQ ID NO: 419834 - RNA, 19 nt, Artificial Sequence
  Description of Artificial Sequence: Synthetic oligonucleotide
  Antisense Strand to SEQ ID NO: 419833
aagccucacguuagauuuc

SEQ ID NO: 419835 - RNA, 19 nt, Artificial Sequence
  Description of Artificial Sequence: Synthetic oligonucleotide
  Sense Strand Starting at position 1288 of SEQ ID NO: 317745
uaacgugaggcuuaaaucu

SEQ ID NO: 419836 - RNA, 19 nt, Artificial Sequence
  Description of Artificial Sequence: Synthetic oligonucleotide
  Antisense Strand to SEQ ID NO: 419835
agauuuaagccucacguua

SEQ ID NO: 419837 - RNA, 19 nt, Artificial Sequence
  Description of Artificial Sequence: Synthetic oligonucleotide
  Sense Strand Starting at position 1288 of SEQ ID NO: 317948
ggaagucagggauggucaa

SEQ ID NO: 419838 - RNA, 19 nt, Artificial Sequence
  Description of Artificial Sequence: Synthetic oligonucleotide
  Antisense Strand to SEQ ID NO: 419837
uugaccaucccugacuucc

SEQ ID NO: 419839 - RNA, 19 nt, Artificial Sequence
  Description of Artificial Sequence: Synthetic oligonucleotide
  Sense Strand Starting at position 1288 of SEQ ID NO: 318035
aguucucaugucgaacauu

SEQ ID NO: 419840 - RNA, 19 nt, Artificial Sequence
  Description of Artificial Sequence: Synthetic oligonucleotide
  Antisense Strand to SEQ ID NO: 419839
aauguucgacaugagaacu

SEQ ID NO: 419841 - RNA, 19 nt, Artificial Sequence
  Description of Artificial Sequence: Synthetic oligonucleotide
  Sense Strand Starting at position 1288 of SEQ ID NO: 318089
acauauuccugucuugauc

SEQ ID NO: 419842 - RNA, 19 nt, Artificial Sequence
  Description of Artificial Sequence: Synthetic oligonucleotide
  Antisense Strand to SEQ ID NO: 419841
gaucaagacaggaauaugu

SEQ ID NO: 419843 - RNA, 19 nt, Artificial Sequence
  Description of Artificial Sequence: Synthetic oligonucleotide
  Sense Strand Starting at position 1288 of SEQ ID NO: 318095
uccugucuugaucaucagu

SEQ ID NO: 419844 - RNA, 19 nt, Artificial Sequence
  Description of Artificial Sequence: Synthetic oligonucleotide
  Antisense Strand to SEQ ID NO: 419843
acugaugaucaagacagga

SEQ ID NO: 419845 - RNA, 19 nt, Artificial Sequence
  Description of Artificial Sequence: Synthetic oligonucleotide
  Sense Strand Starting at position 1288 of SEQ ID NO: 318150
gguugaucauuugcaagca

SEQ ID NO: 419846 - RNA, 19 nt, Artificial Sequence
  Description of Artificial Sequence: Synthetic oligonucleotide
  Antisense Strand to SEQ ID NO: 419845
ugcuugcaaaugaucaacc

SEQ ID NO: 419847 - RNA, 19 nt, Artificial Sequence
  Description of Artificial Sequence: Synthetic oligonucleotide
  Sense Strand Starting at position 1288 of SEQ ID NO: 318304
ugcagaaauagcgagaaau

SEQ ID NO: 419848 - RNA, 19 nt, Artificial Sequence
  Description of Artificial Sequence: Synthetic oligonucleotide
  Antisense Strand to SEQ ID NO: 419847
auuucucgcuauuucugca

SEQ ID NO: 419849 - RNA, 19 nt, Artificial Sequence
  Description of Artificial Sequence: Synthetic oligonucleotide
  Sense Strand Starting at position 1288 of SEQ ID NO: 318361
aucagauaguccuuaaguu

SEQ ID NO: 419850 - RNA, 19 nt, Artificial Sequence
  Description of Artificial Sequence: Synthetic oligonucleotide
  Antisense Strand to SEQ ID NO: 419849
aacuuaaggacuaucugau

SEQ ID NO: 419851 - RNA, 19 nt, Artificial Sequence
  Description of Artificial Sequence: Synthetic oligonucleotide
  Sense Strand Starting at position 1288 of SEQ ID NO: 318362
ucagauaguccuuaaguuc

SEQ ID NO: 419852 - RNA, 19 nt, Artificial Sequence
  Description of Artificial Sequence: Synthetic oligonucleotide
  Antisense Strand to SEQ ID NO: 419851
gaacuuaaggacuaucuga

SEQ ID NO: 419853 - RNA, 19 nt, Artificial Sequence
  Description of Artificial Sequence: Synthetic oligonucleotide
  Sense Strand Starting at position 1288 of SEQ ID NO: 318417
ccugguucuccagaccuau

SEQ ID NO: 419854 - RNA, 19 nt, Artificial Sequence
  Description of Artificial Sequence: Synthetic oligonucleotide
  Antisense Strand to SEQ ID NO: 419853
auaggucuggagaaccagg

SEQ ID NO: 419855 - RNA, 19 nt, Artificial Sequence
  Description of Artificial Sequence: Synthetic oligonucleotide
  Sense Strand Starting at position 1288 of SEQ ID NO: 318634
acguuaauggaugauguuu

SEQ ID NO: 419856 - RNA, 19 nt, Artificial Sequence
  Description of Artificial Sequence: Synthetic oligonucleotide
  Antisense Strand to SEQ ID NO: 419855
aaacaucauccauuaacgu

SEQ ID NO: 419857 - RNA, 19 nt, Artificial Sequence
  Description of Artificial Sequence: Synthetic oligonucleotide
  Sense Strand Starting at position 1288 of SEQ ID NO: 318759
aagauauauugaguuagca

SEQ ID NO: 419858 - RNA, 19 nt, Artificial Sequence
  Description of Artificial Sequence: Synthetic oligonucleotide
  Antisense Strand to SEQ ID NO: 419857
ugcuaacucaauauaucuu

SEQ ID NO: 419859 - RNA, 19 nt, Artificial Sequence
  Description of Artificial Sequence: Synthetic oligonucleotide
  Sense Strand Starting at position 1288 of SEQ ID NO: 318789
aguagacccucauuacauu

SEQ ID NO: 419860 - RNA, 19 nt, Artificial Sequence
  Description of Artificial Sequence: Synthetic oligonucleotide
  Antisense Strand to SEQ ID NO: 419859
aauguaaugagggucuacu

SEQ ID NO: 419861 - RNA, 19 nt, Artificial Sequence
  Description of Artificial Sequence: Synthetic oligonucleotide
  Sense Strand Starting at position 1288 of SEQ ID NO: 318825
cgauaaaccucuuuggaag

SEQ ID NO: 419862 - RNA, 19 nt, Artificial Sequence
  Description of Artificial Sequence: Synthetic oligonucleotide
  Antisense Strand to SEQ ID NO: 419861
cuuccaaagagguuuaucg

SEQ ID NO: 419863 - RNA, 19 nt, Artificial Sequence
  Description of Artificial Sequence: Synthetic oligonucleotide
  Sense Strand Starting at position 1288 of SEQ ID NO: 318892
ccagcauuuccuugucuag

SEQ ID NO: 419864 - RNA, 19 nt, Artificial Sequence
  Description of Artificial Sequence: Synthetic oligonucleotide
  Antisense Strand to SEQ ID NO: 419863
cuagacaaggaaaugcugg

SEQ ID NO: 419865 - RNA, 19 nt, Artificial Sequence
  Description of Artificial Sequence: Synthetic oligonucleotide
  Sense Strand Starting at position 1288 of SEQ ID NO: 318894
agcauuuccuugucuagac

SEQ ID NO: 419866 - RNA, 19 nt, Artificial Sequence
  Description of Artificial Sequence: Synthetic oligonucleotide
  Antisense Strand to SEQ ID NO: 419865
gucuagacaaggaaaugcu

SEQ ID NO: 419867 - RNA, 19 nt, Artificial Sequence
  Description of Artificial Sequence: Synthetic oligonucleotide
  Sense Strand Starting at position 1288 of SEQ ID NO: 318895
gcauuuccuugucuagaca

SEQ ID NO: 419868 - RNA, 19 nt, Artificial Sequence
  Description of Artificial Sequence: Synthetic oligonucleotide
  Antisense Strand to SEQ ID NO: 419867
ugucuagacaaggaaaugc

SEQ ID NO: 419869 - RNA, 19 nt, Artificial Sequence
  Description of Artificial Sequence: Synthetic oligonucleotide
  Sense Strand Starting at position 1288 of SEQ ID NO: 318926
auaaauuaaggcuguguaa

SEQ ID NO: 419870 - RNA, 19 nt, Artificial Sequence
  Description of Artificial Sequence: Synthetic oligonucleotide
  Antisense Strand to SEQ ID NO: 419869
uuacacagccuuaauuuau

SEQ ID NO: 419871 - RNA, 19 nt, Artificial Sequence
  Description of Artificial Sequence: Synthetic oligonucleotide
  Sense Strand Starting at position 1288 of SEQ ID NO: 318928
aaauuaaggcuguguaaag

SEQ ID NO: 419872 - RNA, 19 nt, Artificial Sequence
  Description of Artificial Sequence: Synthetic oligonucleotide
  Antisense Strand to SEQ ID NO: 419871
cuuuacacagccuuaauuu

SEQ ID NO: 419873 - RNA, 19 nt, Artificial Sequence
  Description of Artificial Sequence: Synthetic oligonucleotide
  Sense Strand Starting at position 1288 of SEQ ID NO: 318929
aauuaaggcuguguaaaga

SEQ ID NO: 419874 - RNA, 19 nt, Artificial Sequence
  Description of Artificial Sequence: Synthetic oligonucleotide
  Antisense Strand to SEQ ID NO: 419873
ucuuuacacagccuuaauu

SEQ ID NO: 419875 - RNA, 19 nt, Artificial Sequence
  Description of Artificial Sequence: Synthetic oligonucleotide
  Sense Strand Starting at position 1288 of SEQ ID NO: 318943
aaagauauuuguuagagca

SEQ ID NO: 419876 - RNA, 19 nt, Artificial Sequence
  Description of Artificial Sequence: Synthetic oligonucleotide
  Antisense Strand to SEQ ID NO: 419875
ugcucuaacaaauaucuuu

SEQ ID NO: 419877 - RNA, 19 nt, Artificial Sequence
  Description of Artificial Sequence: Synthetic oligonucleotide
  Sense Strand Starting at position 1288 of SEQ ID NO: 318960
cacuguuucgaguaacaaa

SEQ ID NO: 419878 - RNA, 19 nt, Artificial Sequence
  Description of Artificial Sequence: Synthetic oligonucleotide
  Antisense Strand to SEQ ID NO: 419877
uuuguuacucgaaacagug

SEQ ID NO: 419879 - RNA, 19 nt, Artificial Sequence
  Description of Artificial Sequence: Synthetic oligonucleotide
  Sense Strand Starting at position 1288 of SEQ ID NO: 319004
ucuguagaaagugguuaaa

SEQ ID NO: 419880 - RNA, 19 nt, Artificial Sequence
  Description of Artificial Sequence: Synthetic oligonucleotide
  Antisense Strand to SEQ ID NO: 419879
uuuaaccacuuucuacaga

SEQ ID NO: 419881 - RNA, 19 nt, Artificial Sequence
  Description of Artificial Sequence: Synthetic oligonucleotide
  Sense Strand Starting at position 1288 of SEQ ID NO: 319059
ugugcugauguggaacaau

SEQ ID NO: 419882 - RNA, 19 nt, Artificial Sequence
  Description of Artificial Sequence: Synthetic oligonucleotide
  Antisense Strand to SEQ ID NO: 419881
auuguuccacaucagcaca

SEQ ID NO: 419883 - RNA, 19 nt, Artificial Sequence
  Description of Artificial Sequence: Synthetic oligonucleotide
  Sense Strand Starting at position 1288 of SEQ ID NO: 319068
guggaacaaucuccaaauu

SEQ ID NO: 419884 - RNA, 19 nt, Artificial Sequence
  Description of Artificial Sequence: Synthetic oligonucleotide
  Antisense Strand to SEQ ID NO: 419883
aauuuggagauuguuccac

SEQ ID NO: 419885 - RNA, 19 nt, Artificial Sequence
  Description of Artificial Sequence: Synthetic oligonucleotide
  Sense Strand Starting at position 1288 of SEQ ID NO: 319152
gauaauaugcaguaggcau

SEQ ID NO: 419886 - RNA, 19 nt, Artificial Sequence
  Description of Artificial Sequence: Synthetic oligonucleotide
  Antisense Strand to SEQ ID NO: 419885
augccuacugcauauuauc

SEQ ID NO: 419887 - RNA, 19 nt, Artificial Sequence
  Description of Artificial Sequence: Synthetic oligonucleotide
  Sense Strand Starting at position 1289 of SEQ ID NO: 315289
ccacaauuacucugggaau

SEQ ID NO: 419888 - RNA, 19 nt, Artificial Sequence
  Description of Artificial Sequence: Synthetic oligonucleotide
  Antisense Strand to SEQ ID NO: 419887
auucccagaguaauugugg

SEQ ID NO: 419889 - RNA, 19 nt, Artificial Sequence
  Description of Artificial Sequence: Synthetic oligonucleotide
  Sense Strand Starting at position 1289 of SEQ ID NO: 315346
ccugguuugcucgauccuu

SEQ ID NO: 419890 - RNA, 19 nt, Artificial Sequence
  Description of Artificial Sequence: Synthetic oligonucleotide
  Antisense Strand to SEQ ID NO: 419889
aaggaucgagcaaaccagg

SEQ ID NO: 419891 - RNA, 19 nt, Artificial Sequence
  Description of Artificial Sequence: Synthetic oligonucleotide
  Sense Strand Starting at position 1289 of SEQ ID NO: 315548
uggccaaauucuccagcaa

SEQ ID NO: 419892 - RNA, 19 nt, Artificial Sequence
  Description of Artificial Sequence: Synthetic oligonucleotide
  Antisense Strand to SEQ ID NO: 419891
uugcuggagaauuuggcca

SEQ ID NO: 419893 - RNA, 19 nt, Artificial Sequence
  Description of Artificial Sequence: Synthetic oligonucleotide
  Sense Strand Starting at position 1289 of SEQ ID NO: 315549
ggccaaauucuccagcaag

SEQ ID NO: 419894 - RNA, 19 nt, Artificial Sequence
  Description of Artificial Sequence: Synthetic oligonucleotide
  Antisense Strand to SEQ ID NO: 419893
cuugcuggagaauuuggcc

SEQ ID NO: 419895 - RNA, 19 nt, Artificial Sequence
  Description of Artificial Sequence: Synthetic oligonucleotide
  Sense Strand Starting at position 1289 of SEQ ID NO: 315585
gaaagaagccagugaucac

SEQ ID NO: 419896 - RNA, 19 nt, Artificial Sequence
  Description of Artificial Sequence: Synthetic oligonucleotide
  Antisense Strand to SEQ ID NO: 419895
gugaucacuggcuucuuuc

SEQ ID NO: 419897 - RNA, 19 nt, Artificial Sequence
  Description of Artificial Sequence: Synthetic oligonucleotide
  Sense Strand Starting at position 1289 of SEQ ID NO: 315592
gccagugaucacugccaag

SEQ ID NO: 419898 - RNA, 19 nt, Artificial Sequence
  Description of Artificial Sequence: Synthetic oligonucleotide
  Antisense Strand to SEQ ID NO: 419897
cuuggcagugaucacuggc

SEQ ID NO: 419899 - RNA, 19 nt, Artificial Sequence
  Description of Artificial Sequence: Synthetic oligonucleotide
  Sense Strand Starting at position 1289 of SEQ ID NO: 315671
agagcuguaucuucucauc

SEQ ID NO: 419900 - RNA, 19 nt, Artificial Sequence
  Description of Artificial Sequence: Synthetic oligonucleotide
  Antisense Strand to SEQ ID NO: 419899
gaugagaagauacagcucu

SEQ ID NO: 419901 - RNA, 19 nt, Artificial Sequence
  Description of Artificial Sequence: Synthetic oligonucleotide
  Sense Strand Starting at position 1289 of SEQ ID NO: 315701
ccuggacacucucaggaua

SEQ ID NO: 419902 - RNA, 19 nt, Artificial Sequence
  Description of Artificial Sequence: Synthetic oligonucleotide
  Antisense Strand to SEQ ID NO: 419901
uauccugagaguguccagg

SEQ ID NO: 419903 - RNA, 19 nt, Artificial Sequence
  Description of Artificial Sequence: Synthetic oligonucleotide
  Sense Strand Starting at position 1289 of SEQ ID NO: 315703
uggacacucucaggauauu

SEQ ID NO: 419904 - RNA, 19 nt, Artificial Sequence
  Description of Artificial Sequence: Synthetic oligonucleotide
  Antisense Strand to SEQ ID NO: 419903
aauauccugagagugucca

SEQ ID NO: 419905 - RNA, 19 nt, Artificial Sequence
  Description of Artificial Sequence: Synthetic oligonucleotide
  Sense Strand Starting at position 1289 of SEQ ID NO: 315729
gguaauaaauaaugcaagu

SEQ ID NO: 419906 - RNA, 19 nt, Artificial Sequence
  Description of Artificial Sequence: Synthetic oligonucleotide
  Antisense Strand to SEQ ID NO: 419905
acuugcauuauuuauuacc

SEQ ID NO: 419907 - RNA, 19 nt, Artificial Sequence
  Description of Artificial Sequence: Synthetic oligonucleotide
  Sense Strand Starting at position 1289 of SEQ ID NO: 315762
cuggccaagccucauagau

SEQ ID NO: 419908 - RNA, 19 nt, Artificial Sequence
  Description of Artificial Sequence: Synthetic oligonucleotide
  Antisense Strand to SEQ ID NO: 419907
aucuaugaggcuuggccag

SEQ ID NO: 419909 - RNA, 19 nt, Artificial Sequence
  Description of Artificial Sequence: Synthetic oligonucleotide
  Sense Strand Starting at position 1289 of SEQ ID NO: 315764
ggccaagccucauagauac

SEQ ID NO: 419910 - RNA, 19 nt, Artificial Sequence
  Description of Artificial Sequence: Synthetic oligonucleotide
  Antisense Strand to SEQ ID NO: 419909
guaucuaugaggcuuggcc

SEQ ID NO: 419911 - RNA, 19 nt, Artificial Sequence
  Description of Artificial Sequence: Synthetic oligonucleotide
  Sense Strand Starting at position 1289 of SEQ ID NO: 315953
cuuagucaccacuggagaa

SEQ ID NO: 419912 - RNA, 19 nt, Artificial Sequence
  Description of Artificial Sequence: Synthetic oligonucleotide
  Antisense Strand to SEQ ID NO: 419911
uucuccaguggugacuaag

SEQ ID NO: 419913 - RNA, 19 nt, Artificial Sequence
  Description of Artificial Sequence: Synthetic oligonucleotide
  Sense Strand Starting at position 1289 of SEQ ID NO: 316125
gcaagaaccugcuccuaug

SEQ ID NO: 419914 - RNA, 19 nt, Artificial Sequence
  Description of Artificial Sequence: Synthetic oligonucleotide
  Antisense Strand to SEQ ID NO: 419913
cauaggagcagguucuugc

SEQ ID NO: 419915 - RNA, 19 nt, Artificial Sequence
  Description of Artificial Sequence: Synthetic oligonucleotide
  Sense Strand Starting at position 1289 of SEQ ID NO: 316221
guaucuagaugucacgcua

SEQ ID NO: 419916 - RNA, 19 nt, Artificial Sequence
  Description of Artificial Sequence: Synthetic oligonucleotide
  Antisense Strand to SEQ ID NO: 419915
uagcgugacaucuagauac

SEQ ID NO: 419917 - RNA, 19 nt, Artificial Sequence
  Description of Artificial Sequence: Synthetic oligonucleotide
  Sense Strand Starting at position 1289 of SEQ ID NO: 316280
gggcauccaguuugagacu

SEQ ID NO: 419918 - RNA, 19 nt, Artificial Sequence
  Description of Artificial Sequence: Synthetic oligonucleotide
  Antisense Strand to SEQ ID NO: 419917
agucucaaacuggaugccc

SEQ ID NO: 419919 - RNA, 19 nt, Artificial Sequence
  Description of Artificial Sequence: Synthetic oligonucleotide
  Sense Strand Starting at position 1289 of SEQ ID NO: 316286
ccaguuugagacuggaaca

SEQ ID NO: 419920 - RNA, 19 nt, Artificial Sequence
  Description of Artificial Sequence: Synthetic oligonucleotide
  Antisense Strand to SEQ ID NO: 419919
uguuccagucucaaacugg

SEQ ID NO: 419921 - RNA, 19 nt, Artificial Sequence
  Description of Artificial Sequence: Synthetic oligonucleotide
  Sense Strand Starting at position 1289 of SEQ ID NO: 316512
gacagauaaugacuagucu

SEQ ID NO: 419922 - RNA, 19 nt, Artificial Sequence
  Description of Artificial Sequence: Synthetic oligonucleotide
  Antisense Strand to SEQ ID NO: 419921
agacuagucauuaucuguc

SEQ ID NO: 419923 - RNA, 19 nt, Artificial Sequence
  Description of Artificial Sequence: Synthetic oligonucleotide
  Sense Strand Starting at position 1289 of SEQ ID NO: 316516
gauaaugacuagucugugu

SEQ ID NO: 419924 - RNA, 19 nt, Artificial Sequence
  Description of Artificial Sequence: Synthetic oligonucleotide
  Antisense Strand to SEQ ID NO: 419923
acacagacuagucauuauc

SEQ ID NO: 419925 - RNA, 19 nt, Artificial Sequence
  Description of Artificial Sequence: Synthetic oligonucleotide
  Sense Strand Starting at position 1289 of SEQ ID NO: 316604
ugggcuggaucuuuaauga

SEQ ID NO: 419926 - RNA, 19 nt, Artificial Sequence
  Description of Artificial Sequence: Synthetic oligonucleotide
  Antisense Strand to SEQ ID NO: 419925
ucauuaaagauccagccca

SEQ ID NO: 419927 - RNA, 19 nt, Artificial Sequence
  Description of Artificial Sequence: Synthetic oligonucleotide
  Sense Strand Starting at position 1289 of SEQ ID NO: 317191
uguuucgacuucuagcuaa

SEQ ID NO: 419928 - RNA, 19 nt, Artificial Sequence
  Description of Artificial Sequence: Synthetic oligonucleotide
  Antisense Strand to SEQ ID NO: 419927
uuagcuagaagucgaaaca

SEQ ID NO: 419929 - RNA, 19 nt, Artificial Sequence
  Description of Artificial Sequence: Synthetic oligonucleotide
  Sense Strand Starting at position 1289 of SEQ ID NO: 317639
ccucauaggugccuuccaa

SEQ ID NO: 419930 - RNA, 19 nt, Artificial Sequence
  Description of Artificial Sequence: Synthetic oligonucleotide
  Antisense Strand to SEQ ID NO: 419929
uuggaaggcaccuaugagg

SEQ ID NO: 419931 - RNA, 19 nt, Artificial Sequence
  Description of Artificial Sequence: Synthetic oligonucleotide
  Sense Strand Starting at position 1289 of SEQ ID NO: 317895
gauguagaggguuagguua

SEQ ID NO: 419932 - RNA, 19 nt, Artificial Sequence
  Description of Artificial Sequence: Synthetic oligonucleotide
  Antisense Strand to SEQ ID NO: 419931
uaaccuaacccucuacauc

SEQ ID NO: 419933 - RNA, 19 nt, Artificial Sequence
  Description of Artificial Sequence: Synthetic oligonucleotide
  Sense Strand Starting at position 1289 of SEQ ID NO: 318019
ccguuucuucugcuguaga

SEQ ID NO: 419934 - RNA, 19 nt, Artificial Sequence
  Description of Artificial Sequence: Synthetic oligonucleotide
  Antisense Strand to SEQ ID NO: 419933
ucuacagcagaagaaacgg

SEQ ID NO: 419935 - RNA, 19 nt, Artificial Sequence
  Description of Artificial Sequence: Synthetic oligonucleotide
  Sense Strand Starting at position 1289 of SEQ ID NO: 318165
gggugagccaaagguuaca

SEQ ID NO: 419936 - RNA, 19 nt, Artificial Sequence
  Description of Artificial Sequence: Synthetic oligonucleotide
  Antisense Strand to SEQ ID NO: 419935
uguaaccuuuggcucaccc

SEQ ID NO: 419937 - RNA, 19 nt, Artificial Sequence
  Description of Artificial Sequence: Synthetic oligonucleotide
  Sense Strand Starting at position 1289 of SEQ ID NO: 318178
guuacacagaucuacgguu

SEQ ID NO: 419938 - RNA, 19 nt, Artificial Sequence
  Description of Artificial Sequence: Synthetic oligonucleotide
  Antisense Strand to SEQ ID NO: 419937
aaccguagaucuguguaac

SEQ ID NO: 419939 - RNA, 19 nt, Artificial Sequence
  Description of Artificial Sequence: Synthetic oligonucleotide
  Sense Strand Starting at position 1289 of SEQ ID NO: 318217
acugauguccuaggaagac

SEQ ID NO: 419940 - RNA, 19 nt, Artificial Sequence
  Description of Artificial Sequence: Synthetic oligonucleotide
  Antisense Strand to SEQ ID NO: 419939
gucuuccuaggacaucagu

SEQ ID NO: 419941 - RNA, 19 nt, Artificial Sequence
  Description of Artificial Sequence: Synthetic oligonucleotide
  Sense Strand Starting at position 1289 of SEQ ID NO: 318498
acgcacaucuccuacagua

SEQ ID NO: 419942 - RNA, 19 nt, Artificial Sequence
  Description of Artificial Sequence: Synthetic oligonucleotide
  Antisense Strand to SEQ ID NO: 419941
uacuguaggagaugugcgu

SEQ ID NO: 419943 - RNA, 19 nt, Artificial Sequence
  Description of Artificial Sequence: Synthetic oligonucleotide
  Sense Strand Starting at position 1289 of SEQ ID NO: 318548
uccggacucgcucugcaau

SEQ ID NO: 419944 - RNA, 19 nt, Artificial Sequence
  Description of Artificial Sequence: Synthetic oligonucleotide
  Antisense Strand to SEQ ID NO: 419943
auugcagagcgaguccgga

SEQ ID NO: 419945 - RNA, 19 nt, Artificial Sequence
  Description of Artificial Sequence: Synthetic oligonucleotide
  Sense Strand Starting at position 1289 of SEQ ID NO: 318581
gcuggaucugcucagcuga

SEQ ID NO: 419946 - RNA, 19 nt, Artificial Sequence
  Description of Artificial Sequence: Synthetic oligonucleotide
  Antisense Strand to SEQ ID NO: 419945
ucagcugagcagauccagc

SEQ ID NO: 419947 - RNA, 19 nt, Artificial Sequence
  Description of Artificial Sequence: Synthetic oligonucleotide
  Sense Strand Starting at position 1289 of SEQ ID NO: 318681
gcaagaacuuaagaacaua

SEQ ID NO: 419948 - RNA, 19 nt, Artificial Sequence
  Description of Artificial Sequence: Synthetic oligonucleotide
  Antisense Strand to SEQ ID NO: 419947
uauguucuuaaguucuugc

SEQ ID NO: 419949 - RNA, 19 nt, Artificial Sequence
  Description of Artificial Sequence: Synthetic oligonucleotide
  Sense Strand Starting at position 1289 of SEQ ID NO: 318740
ggacucaggacauguacau

SEQ ID NO: 419950 - RNA, 19 nt, Artificial Sequence
  Description of Artificial Sequence: Synthetic oligonucleotide
  Antisense Strand to SEQ ID NO: 419949
auguacauguccugagucc

SEQ ID NO: 419951 - RNA, 19 nt, Artificial Sequence
  Description of Artificial Sequence: Synthetic oligonucleotide
  Sense Strand Starting at position 1289 of SEQ ID NO: 318857
ggcaauaacucaggagcca

SEQ ID NO: 419952 - RNA, 19 nt, Artificial Sequence
  Description of Artificial Sequence: Synthetic oligonucleotide
  Antisense Strand to SEQ ID NO: 419951
uggcuccugaguuauugcc

SEQ ID NO: 419953 - RNA, 19 nt, Artificial Sequence
  Description of Artificial Sequence: Synthetic oligonucleotide
  Sense Strand Starting at position 1289 of SEQ ID NO: 318891
acacuaauccaguguaguc

SEQ ID NO: 419954 - RNA, 19 nt, Artificial Sequence
  Description of Artificial Sequence: Synthetic oligonucleotide
  Antisense Strand to SEQ ID NO: 419953
gacuacacuggauuagugu

SEQ ID NO: 419955 - RNA, 19 nt, Artificial Sequence
  Description of Artificial Sequence: Synthetic oligonucleotide
  Sense Strand Starting at position 1289 of SEQ ID NO: 318900
caguguagucccugaggcu

SEQ ID NO: 419956 - RNA, 19 nt, Artificial Sequence
  Description of Artificial Sequence: Synthetic oligonucleotide
  Antisense Strand to SEQ ID NO: 419955
agccucagggacuacacug

SEQ ID NO: 419957 - RNA, 19 nt, Artificial Sequence
  Description of Artificial Sequence: Synthetic oligonucleotide
  Sense Strand Starting at position 1289 of SEQ ID NO: 318907
gucccugaggcucaaguau

SEQ ID NO: 419958 - RNA, 19 nt, Artificial Sequence
  Description of Artificial Sequence: Synthetic oligonucleotide
  Antisense Strand to SEQ ID NO: 419957
auacuugagccucagggac

SEQ ID NO: 419959 - RNA, 19 nt, Artificial Sequence
  Description of Artificial Sequence: Synthetic oligonucleotide
  Sense Strand Starting at position 1289 of SEQ ID NO: 319023
cuggauaaguucuugaagu

SEQ ID NO: 419960 - RNA, 19 nt, Artificial Sequence
  Description of Artificial Sequence: Synthetic oligonucleotide
  Antisense Strand to SEQ ID NO: 419959
acuucaagaacuuauccag

SEQ ID NO: 419961 - RNA, 19 nt, Artificial Sequence
  Description of Artificial Sequence: Synthetic oligonucleotide
  Sense Strand Starting at position 1289 of SEQ ID NO: 319024
uggauaaguucuugaaguu

SEQ ID NO: 419962 - RNA, 19 nt, Artificial Sequence
  Description of Artificial Sequence: Synthetic oligonucleotide
  Antisense Strand to SEQ ID NO: 419961
aacuucaagaacuuaucca

SEQ ID NO: 419963 - RNA, 19 nt, Artificial Sequence
  Description of Artificial Sequence: Synthetic oligonucleotide
  Sense Strand Starting at position 1289 of SEQ ID NO: 319025
ggauaaguucuugaaguuc

SEQ ID NO: 419964 - RNA, 19 nt, Artificial Sequence
  Description of Artificial Sequence: Synthetic oligonucleotide
  Antisense Strand to SEQ ID NO: 419963
gaacuucaagaacuuaucc

SEQ ID NO: 419965 - RNA, 19 nt, Artificial Sequence
  Description of Artificial Sequence: Synthetic oligonucleotide
  Sense Strand Starting at position 1289 of SEQ ID NO: 319215
cagugcuaggucugcugua

SEQ ID NO: 419966 - RNA, 19 nt, Artificial Sequence
  Description of Artificial Sequence: Synthetic oligonucleotide
  Antisense Strand to SEQ ID NO: 419965
uacagcagaccuagcacug

SEQ ID NO: 419967 - RNA, 19 nt, Artificial Sequence
  Description of Artificial Sequence: Synthetic oligonucleotide
  Sense Strand Starting at position 1290 of SEQ ID NO: 315318
ggcagcuucccagagguca

SEQ ID NO: 419968 - RNA, 19 nt, Artificial Sequence
  Description of Artificial Sequence: Synthetic oligonucleotide
  Antisense Strand to SEQ ID NO: 419967
ugaccucugggaagcugcc

SEQ ID NO: 419969 - RNA, 19 nt, Artificial Sequence
  Description of Artificial Sequence: Synthetic oligonucleotide
  Sense Strand Starting at position 1290 of SEQ ID NO: 315447
ucuacuucugcugaguauu

SEQ ID NO: 419970 - RNA, 19 nt, Artificial Sequence
  Description of Artificial Sequence: Synthetic oligonucleotide
  Antisense Strand to SEQ ID NO: 419969
aauacucagcagaaguaga

SEQ ID NO: 419971 - RNA, 19 nt, Artificial Sequence
  Description of Artificial Sequence: Synthetic oligonucleotide
  Sense Strand Starting at position 1290 of SEQ ID NO: 315453
ucugcugaguauucuuuau

SEQ ID NO: 419972 - RNA, 19 nt, Artificial Sequence
  Description of Artificial Sequence: Synthetic oligonucleotide
  Antisense Strand to SEQ ID NO: 419971
auaaagaauacucagcaga

SEQ ID NO: 419973 - RNA, 19 nt, Artificial Sequence
  Description of Artificial Sequence: Synthetic oligonucleotide
  Sense Strand Starting at position 1290 of SEQ ID NO: 315455
ugcugaguauucuuuauga

SEQ ID NO: 419974 - RNA, 19 nt, Artificial Sequence
  Description of Artificial Sequence: Synthetic oligonucleotide
  Antisense Strand to SEQ ID NO: 419973
ucauaaagaauacucagca

SEQ ID NO: 419975 - RNA, 19 nt, Artificial Sequence
  Description of Artificial Sequence: Synthetic oligonucleotide
  Sense Strand Starting at position 1290 of SEQ ID NO: 315457
cugaguauucuuuaugaac

SEQ ID NO: 419976 - RNA, 19 nt, Artificial Sequence
  Description of Artificial Sequence: Synthetic oligonucleotide
  Antisense Strand to SEQ ID NO: 419975
guucauaaagaauacucag

SEQ ID NO: 419977 - RNA, 19 nt, Artificial Sequence
  Description of Artificial Sequence: Synthetic oligonucleotide
  Sense Strand Starting at position 1290 of SEQ ID NO: 315563
gggcgaucaccugagaucu

SEQ ID NO: 419978 - RNA, 19 nt, Artificial Sequence
  Description of Artificial Sequence: Synthetic oligonucleotide
  Antisense Strand to SEQ ID NO: 419977
agaucucaggugaucgccc

SEQ ID NO: 419979 - RNA, 19 nt, Artificial Sequence
  Description of Artificial Sequence: Synthetic oligonucleotide
  Sense Strand Starting at position 1290 of SEQ ID NO: 315872
ugguuagcucaaggugaau

SEQ ID NO: 419980 - RNA, 19 nt, Artificial Sequence
  Description of Artificial Sequence: Synthetic oligonucleotide
  Antisense Strand to SEQ ID NO: 419979
auucaccuugagcuaacca

SEQ ID NO: 419981 - RNA, 19 nt, Artificial Sequence
  Description of Artificial Sequence: Synthetic oligonucleotide
  Sense Strand Starting at position 1290 of SEQ ID NO: 315885
gugaauacauaagcuguua

SEQ ID NO: 419982 - RNA, 19 nt, Artificial Sequence
  Description of Artificial Sequence: Synthetic oligonucleotide
  Antisense Strand to SEQ ID NO: 419981
uaacagcuuauguauucac

SEQ ID NO: 419983 - RNA, 19 nt, Artificial Sequence
  Description of Artificial Sequence: Synthetic oligonucleotide
  Sense Strand Starting at position 1290 of SEQ ID NO: 315896
agcuguuaucuguacuccu

SEQ ID NO: 419984 - RNA, 19 nt, Artificial Sequence
  Description of Artificial Sequence: Synthetic oligonucleotide
  Antisense Strand to SEQ ID NO: 419983
aggaguacagauaacagcu

SEQ ID NO: 419985 - RNA, 19 nt, Artificial Sequence
  Description of Artificial Sequence: Synthetic oligonucleotide
  Sense Strand Starting at position 1290 of SEQ ID NO: 315942
cucaauuccucggcagauc

SEQ ID NO: 419986 - RNA, 19 nt, Artificial Sequence
  Description of Artificial Sequence: Synthetic oligonucleotide
  Antisense Strand to SEQ ID NO: 419985
gaucugccgaggaauugag

SEQ ID NO: 419987 - RNA, 19 nt, Artificial Sequence
  Description of Artificial Sequence: Synthetic oligonucleotide
  Sense Strand Starting at position 1290 of SEQ ID NO: 315943
ucaauuccucggcagauca

SEQ ID NO: 419988 - RNA, 19 nt, Artificial Sequence
  Description of Artificial Sequence: Synthetic oligonucleotide
  Antisense Strand to SEQ ID NO: 419987
ugaucugccgaggaauuga

SEQ ID NO: 419989 - RNA, 19 nt, Artificial Sequence
  Description of Artificial Sequence: Synthetic oligonucleotide
  Sense Strand Starting at position 1290 of SEQ ID NO: 315953
ggcagaucaucaccacaau

SEQ ID NO: 419990 - RNA, 19 nt, Artificial Sequence
  Description of Artificial Sequence: Synthetic oligonucleotide
  Antisense Strand to SEQ ID NO: 419989
auuguggugaugaucugcc

SEQ ID NO: 419991 - RNA, 19 nt, Artificial Sequence
  Description of Artificial Sequence: Synthetic oligonucleotide
  Sense Strand Starting at position 1290 of SEQ ID NO: 316309
acaaucauacucgaugcaa

SEQ ID NO: 419992 - RNA, 19 nt, Artificial Sequence
  Description of Artificial Sequence: Synthetic oligonucleotide
  Antisense Strand to SEQ ID NO: 419991
uugcaucgaguaugauugu

SEQ ID NO: 419993 - RNA, 19 nt, Artificial Sequence
  Description of Artificial Sequence: Synthetic oligonucleotide
  Sense Strand Starting at position 1290 of SEQ ID NO: 316369
ccaggaaucucuccaguag

SEQ ID NO: 419994 - RNA, 19 nt, Artificial Sequence
  Description of Artificial Sequence: Synthetic oligonucleotide
  Antisense Strand to SEQ ID NO: 419993
cuacuggagagauuccugg

SEQ ID NO: 419995 - RNA, 19 nt, Artificial Sequence
  Description of Artificial Sequence: Synthetic oligonucleotide
  Sense Strand Starting at position 1290 of SEQ ID NO: 316370
caggaaucucuccaguagu

SEQ ID NO: 419996 - RNA, 19 nt, Artificial Sequence
  Description of Artificial Sequence: Synthetic oligonucleotide
  Antisense Strand to SEQ ID NO: 419995
acuacuggagagauuccug

SEQ ID NO: 419997 - RNA, 19 nt, Artificial Sequence
  Description of Artificial Sequence: Synthetic oligonucleotide
  Sense Strand Starting at position 1290 of SEQ ID NO: 316439
cagccugggucuucuaaau

SEQ ID NO: 419998 - RNA, 19 nt, Artificial Sequence
  Description of Artificial Sequence: Synthetic oligonucleotide
  Antisense Strand to SEQ ID NO: 419997
auuuagaagacccaggcug

SEQ ID NO: 419999 - RNA, 19 nt, Artificial Sequence
  Description of Artificial Sequence: Synthetic oligonucleotide
  Sense Strand Starting at position 1290 of SEQ ID NO: 316704
ggaauccaggucugugaca

SEQ ID NO: 420000 - RNA, 19 nt, Artificial Sequence
  Description of Artificial Sequence: Synthetic oligonucleotide
  Antisense Strand to SEQ ID NO: 419999
ugucacagaccuggauucc

SEQ ID NO: 420001 - RNA, 19 nt, Artificial Sequence
  Description of Artificial Sequence: Synthetic oligonucleotide
  Sense Strand Starting at position 1290 of SEQ ID NO: 316743
gcgaguccucaugguaaag

SEQ ID NO: 420002 - RNA, 19 nt, Artificial Sequence
  Description of Artificial Sequence: Synthetic oligonucleotide
  Antisense Strand to SEQ ID NO: 420001
cuuuaccaugaggacucgc

SEQ ID NO: 420003 - RNA, 19 nt, Artificial Sequence
  Description of Artificial Sequence: Synthetic oligonucleotide
  Sense Strand Starting at position 1290 of SEQ ID NO: 316904
uggaguuauucuccugagg

SEQ ID NO: 420004 - RNA, 19 nt, Artificial Sequence
  Description of Artificial Sequence: Synthetic oligonucleotide
  Antisense Strand to SEQ ID NO: 420003
ccucaggagaauaacucca

SEQ ID NO: 420005 - RNA, 19 nt, Artificial Sequence
  Description of Artificial Sequence: Synthetic oligonucleotide
  Sense Strand Starting at position 1290 of SEQ ID NO: 317017
ccugguucugcauagagga

SEQ ID NO: 420006 - RNA, 19 nt, Artificial Sequence
  Description of Artificial Sequence: Synthetic oligonucleotide
  Antisense Strand to SEQ ID NO: 420005
uccucuaugcagaaccagg

SEQ ID NO: 420007 - RNA, 19 nt, Artificial Sequence
  Description of Artificial Sequence: Synthetic oligonucleotide
  Sense Strand Starting at position 1290 of SEQ ID NO: 317073
gagugugguccucauuaag

SEQ ID NO: 420008 - RNA, 19 nt, Artificial Sequence
  Description of Artificial Sequence: Synthetic oligonucleotide
  Antisense Strand to SEQ ID NO: 420007
cuuaaugaggaccacacuc

SEQ ID NO: 420009 - RNA, 19 nt, Artificial Sequence
  Description of Artificial Sequence: Synthetic oligonucleotide
  Sense Strand Starting at position 1290 of SEQ ID NO: 317545
agguuaucgugguccuaaa

SEQ ID NO: 420010 - RNA, 19 nt, Artificial Sequence
  Description of Artificial Sequence: Synthetic oligonucleotide
  Antisense Strand to SEQ ID NO: 420009
uuuaggaccacgauaaccu

SEQ ID NO: 420011 - RNA, 19 nt, Artificial Sequence
  Description of Artificial Sequence: Synthetic oligonucleotide
  Sense Strand Starting at position 1290 of SEQ ID NO: 317745
gacucaaugguguguugua

SEQ ID NO: 420012 - RNA, 19 nt, Artificial Sequence
  Description of Artificial Sequence: Synthetic oligonucleotide
  Antisense Strand to SEQ ID NO: 420011
uacaacacaccauugaguc

SEQ ID NO: 420013 - RNA, 19 nt, Artificial Sequence
  Description of Artificial Sequence: Synthetic oligonucleotide
  Sense Strand Starting at position 1290 of SEQ ID NO: 317754
guguguuguagucauuaac

SEQ ID NO: 420014 - RNA, 19 nt, Artificial Sequence
  Description of Artificial Sequence: Synthetic oligonucleotide
  Antisense Strand to SEQ ID NO: 420013
guuaaugacuacaacacac

SEQ ID NO: 420015 - RNA, 19 nt, Artificial Sequence
  Description of Artificial Sequence: Synthetic oligonucleotide
  Sense Strand Starting at position 1290 of SEQ ID NO: 317757
uguuguagucauuaacagu

SEQ ID NO: 420016 - RNA, 19 nt, Artificial Sequence
  Description of Artificial Sequence: Synthetic oligonucleotide
  Antisense Strand to SEQ ID NO: 420015
acuguuaaugacuacaaca

SEQ ID NO: 420017 - RNA, 19 nt, Artificial Sequence
  Description of Artificial Sequence: Synthetic oligonucleotide
  Sense Strand Starting at position 1290 of SEQ ID NO: 317813
cgcagaauuccgucagcuc

SEQ ID NO: 420018 - RNA, 19 nt, Artificial Sequence
  Description of Artificial Sequence: Synthetic oligonucleotide
  Antisense Strand to SEQ ID NO: 420017
gagcugacggaauucugcg

SEQ ID NO: 420019 - RNA, 19 nt, Artificial Sequence
  Description of Artificial Sequence: Synthetic oligonucleotide
  Sense Strand Starting at position 1290 of SEQ ID NO: 317814
gcagaauuccgucagcucu

SEQ ID NO: 420020 - RNA, 19 nt, Artificial Sequence
  Description of Artificial Sequence: Synthetic oligonucleotide
  Antisense Strand to SEQ ID NO: 420019
agagcugacggaauucugc

SEQ ID NO: 420021 - RNA, 19 nt, Artificial Sequence
  Description of Artificial Sequence: Synthetic oligonucleotide
  Sense Strand Starting at position 1290 of SEQ ID NO: 317888
agagguacuccacauuagu

SEQ ID NO: 420022 - RNA, 19 nt, Artificial Sequence
  Description of Artificial Sequence: Synthetic oligonucleotide
  Antisense Strand to SEQ ID NO: 420021
acuaauguggaguaccucu

SEQ ID NO: 420023 - RNA, 19 nt, Artificial Sequence
  Description of Artificial Sequence: Synthetic oligonucleotide
  Sense Strand Starting at position 1290 of SEQ ID NO: 318033
ucaggcaguuggucuagau

SEQ ID NO: 420024 - RNA, 19 nt, Artificial Sequence
  Description of Artificial Sequence: Synthetic oligonucleotide
  Antisense Strand to SEQ ID NO: 420023
aucuagaccaacugccuga

SEQ ID NO: 420025 - RNA, 19 nt, Artificial Sequence
  Description of Artificial Sequence: Synthetic oligonucleotide
  Sense Strand Starting at position 1290 of SEQ ID NO: 318046
cuagaugcgucuccauaca

SEQ ID NO: 420026 - RNA, 19 nt, Artificial Sequence
  Description of Artificial Sequence: Synthetic oligonucleotide
  Antisense Strand to SEQ ID NO: 420025
uguauggagacgcaucuag

SEQ ID NO: 420027 - RNA, 19 nt, Artificial Sequence
  Description of Artificial Sequence: Synthetic oligonucleotide
  Sense Strand Starting at position 1290 of SEQ ID NO: 318075
aguccuuguccucagagaa

SEQ ID NO: 420028 - RNA, 19 nt, Artificial Sequence
  Description of Artificial Sequence: Synthetic oligonucleotide
  Antisense Strand to SEQ ID NO: 420027
uucucugaggacaaggacu

SEQ ID NO: 420029 - RNA, 19 nt, Artificial Sequence
  Description of Artificial Sequence: Synthetic oligonucleotide
  Sense Strand Starting at position 1290 of SEQ ID NO: 318105
aguuccugcccucauagaa

SEQ ID NO: 420030 - RNA, 19 nt, Artificial Sequence
  Description of Artificial Sequence: Synthetic oligonucleotide
  Antisense Strand to SEQ ID NO: 420029
uucuaugagggcaggaacu

SEQ ID NO: 420031 - RNA, 19 nt, Artificial Sequence
  Description of Artificial Sequence: Synthetic oligonucleotide
  Sense Strand Starting at position 1290 of SEQ ID NO: 318185
gccauuaaagugugugaac

SEQ ID NO: 420032 - RNA, 19 nt, Artificial Sequence
  Description of Artificial Sequence: Synthetic oligonucleotide
  Antisense Strand to SEQ ID NO: 420031
guucacacacuuuaauggc

SEQ ID NO: 420033 - RNA, 19 nt, Artificial Sequence
  Description of Artificial Sequence: Synthetic oligonucleotide
  Sense Strand Starting at position 1290 of SEQ ID NO: 318187
cauuaaagugugugaacca

SEQ ID NO: 420034 - RNA, 19 nt, Artificial Sequence
  Description of Artificial Sequence: Synthetic oligonucleotide
  Antisense Strand to SEQ ID NO: 420033
ugguucacacacuuuaaug

SEQ ID NO: 420035 - RNA, 19 nt, Artificial Sequence
  Description of Artificial Sequence: Synthetic oligonucleotide
  Sense Strand Starting at position 1290 of SEQ ID NO: 318624
uggagaccgaaaugucuua

SEQ ID NO: 420036 - RNA, 19 nt, Artificial Sequence
  Description of Artificial Sequence: Synthetic oligonucleotide
  Antisense Strand to SEQ ID NO: 420035
uaagacauuucggucucca

SEQ ID NO: 420037 - RNA, 19 nt, Artificial Sequence
  Description of Artificial Sequence: Synthetic oligonucleotide
  Sense Strand Starting at position 1290 of SEQ ID NO: 319019
ggaagccuuugacuugagu

SEQ ID NO: 420038 - RNA, 19 nt, Artificial Sequence
  Description of Artificial Sequence: Synthetic oligonucleotide
  Antisense Strand to SEQ ID NO: 420037
acucaagucaaaggcuucc

SEQ ID NO: 420039 - RNA, 19 nt, Artificial Sequence
  Description of Artificial Sequence: Synthetic oligonucleotide
  Sense Strand Starting at position 1290 of SEQ ID NO: 319025
cuuugacuugaguaacauu

SEQ ID NO: 420040 - RNA, 19 nt, Artificial Sequence
  Description of Artificial Sequence: Synthetic oligonucleotide
  Antisense Strand to SEQ ID NO: 420039
aauguuacucaagucaaag

SEQ ID NO: 420041 - RNA, 19 nt, Artificial Sequence
  Description of Artificial Sequence: Synthetic oligonucleotide
  Sense Strand Starting at position 1290 of SEQ ID NO: 319028
ugacuugaguaacauuuga

SEQ ID NO: 420042 - RNA, 19 nt, Artificial Sequence
  Description of Artificial Sequence: Synthetic oligonucleotide
  Antisense Strand to SEQ ID NO: 420041
ucaaauguuacucaaguca

SEQ ID NO: 420043 - RNA, 19 nt, Artificial Sequence
  Description of Artificial Sequence: Synthetic oligonucleotide
  Sense Strand Starting at position 1290 of SEQ ID NO: 319036
guaacauuugaguguggua

SEQ ID NO: 420044 - RNA, 19 nt, Artificial Sequence
  Description of Artificial Sequence: Synthetic oligonucleotide
  Antisense Strand to SEQ ID NO: 420043
uaccacacucaaauguuac

SEQ ID NO: 420045 - RNA, 19 nt, Artificial Sequence
  Description of Artificial Sequence: Synthetic oligonucleotide
  Sense Strand Starting at position 1290 of SEQ ID NO: 319041
auuugagugugguauugaa

SEQ ID NO: 420046 - RNA, 19 nt, Artificial Sequence
  Description of Artificial Sequence: Synthetic oligonucleotide
  Antisense Strand to SEQ ID NO: 420045
uucaauaccacacucaaau

SEQ ID NO: 420047 - RNA, 19 nt, Artificial Sequence
  Description of Artificial Sequence: Synthetic oligonucleotide
  Sense Strand Starting at position 1291 of SEQ ID NO: 315317
gagagaagcucaccucuga

SEQ ID NO: 420048 - RNA, 19 nt, Artificial Sequence
  Description of Artificial Sequence: Synthetic oligonucleotide
  Antisense Strand to SEQ ID NO: 420047
ucagaggugagcuucucuc

SEQ ID NO: 420049 - RNA, 19 nt, Artificial Sequence
  Description of Artificial Sequence: Synthetic oligonucleotide
  Sense Strand Starting at position 1291 of SEQ ID NO: 315375
uucuguugccaggagauga

SEQ ID NO: 420050 - RNA, 19 nt, Artificial Sequence
  Description of Artificial Sequence: Synthetic oligonucleotide
  Antisense Strand to SEQ ID NO: 420049
ucaucuccuggcaacagaa

SEQ ID NO: 420051 - RNA, 19 nt, Artificial Sequence
  Description of Artificial Sequence: Synthetic oligonucleotide
  Sense Strand Starting at position 1291 of SEQ ID NO: 315457
cgcuauaacagagauaagu

SEQ ID NO: 420052 - RNA, 19 nt, Artificial Sequence
  Description of Artificial Sequence: Synthetic oligonucleotide
  Antisense Strand to SEQ ID NO: 420051
acuuaucucuguuauagcg

SEQ ID NO: 420053 - RNA, 19 nt, Artificial Sequence
  Description of Artificial Sequence: Synthetic oligonucleotide
  Sense Strand Starting at position 1291 of SEQ ID NO: 315472
aagucugacgccucguuau

SEQ ID NO: 420054 - RNA, 19 nt, Artificial Sequence
  Description of Artificial Sequence: Synthetic oligonucleotide
  Antisense Strand to SEQ ID NO: 420053
auaacgaggcgucagacuu

SEQ ID NO: 420055 - RNA, 19 nt, Artificial Sequence
  Description of Artificial Sequence: Synthetic oligonucleotide
  Sense Strand Starting at position 1291 of SEQ ID NO: 315474
gucugacgccucguuauca

SEQ ID NO: 420056 - RNA, 19 nt, Artificial Sequence
  Description of Artificial Sequence: Synthetic oligonucleotide
  Antisense Strand to SEQ ID NO: 420055
ugauaacgaggcgucagac

SEQ ID NO: 420057 - RNA, 19 nt, Artificial Sequence
  Description of Artificial Sequence: Synthetic oligonucleotide
  Sense Strand Starting at position 1291 of SEQ ID NO: 315588
uccaaacuggcccagaauu

SEQ ID NO: 420058 - RNA, 19 nt, Artificial Sequence
  Description of Artificial Sequence: Synthetic oligonucleotide
  Antisense Strand to SEQ ID NO: 420057
aauucugggccaguuugga

SEQ ID NO: 420059 - RNA, 19 nt, Artificial Sequence
  Description of Artificial Sequence: Synthetic oligonucleotide
  Sense Strand Starting at position 1291 of SEQ ID NO: 315622
cauucuguacguuguauuu

SEQ ID NO: 420060 - RNA, 19 nt, Artificial Sequence
  Description of Artificial Sequence: Synthetic oligonucleotide
  Antisense Strand to SEQ ID NO: 420059
aaauacaacguacagaaug

SEQ ID NO: 420061 - RNA, 19 nt, Artificial Sequence
  Description of Artificial Sequence: Synthetic oligonucleotide
  Sense Strand Starting at position 1291 of SEQ ID NO: 316555
cgugaaaggaauugaauuc

SEQ ID NO: 420062 - RNA, 19 nt, Artificial Sequence
  Description of Artificial Sequence: Synthetic oligonucleotide
  Antisense Strand to SEQ ID NO: 420061
gaauucaauuccuuucacg

SEQ ID NO: 420063 - RNA, 19 nt, Artificial Sequence
  Description of Artificial Sequence: Synthetic oligonucleotide
  Sense Strand Starting at position 1291 of SEQ ID NO: 316692
uguucucgugcaucgcaaa

SEQ ID NO: 420064 - RNA, 19 nt, Artificial Sequence
  Description of Artificial Sequence: Synthetic oligonucleotide
  Antisense Strand to SEQ ID NO: 420063
uuugcgaugcacgagaaca

SEQ ID NO: 420065 - RNA, 19 nt, Artificial Sequence
  Description of Artificial Sequence: Synthetic oligonucleotide
  Sense Strand Starting at position 1291 of SEQ ID NO: 316733
gggugaaucugacuuacuc

SEQ ID NO: 420066 - RNA, 19 nt, Artificial Sequence
  Description of Artificial Sequence: Synthetic oligonucleotide
  Antisense Strand to SEQ ID NO: 420065
gaguaagucagauucaccc

SEQ ID NO: 420067 - RNA, 19 nt, Artificial Sequence
  Description of Artificial Sequence: Synthetic oligonucleotide
  Sense Strand Starting at position 1291 of SEQ ID NO: 317078
uaccaauguccaggaaagu

SEQ ID NO: 420068 - RNA, 19 nt, Artificial Sequence
  Description of Artificial Sequence: Synthetic oligonucleotide
  Antisense Strand to SEQ ID NO: 420067
acuuuccuggacauuggua

SEQ ID NO: 420069 - RNA, 19 nt, Artificial Sequence
  Description of Artificial Sequence: Synthetic oligonucleotide
  Sense Strand Starting at position 1291 of SEQ ID NO: 317198
ugagaucuuaggugcugga

SEQ ID NO: 420070 - RNA, 19 nt, Artificial Sequence
  Description of Artificial Sequence: Synthetic oligonucleotide
  Antisense Strand to SEQ ID NO: 420069
uccagcaccuaagaucuca

SEQ ID NO: 420071 - RNA, 19 nt, Artificial Sequence
  Description of Artificial Sequence: Synthetic oligonucleotide
  Sense Strand Starting at position 1291 of SEQ ID NO: 317217
ucgccuuaugccuugaguu

SEQ ID NO: 420072 - RNA, 19 nt, Artificial Sequence
  Description of Artificial Sequence: Synthetic oligonucleotide
  Antisense Strand to SEQ ID NO: 420071
aacucaaggcauaaggcga

SEQ ID NO: 420073 - RNA, 19 nt, Artificial Sequence
  Description of Artificial Sequence: Synthetic oligonucleotide
  Sense Strand Starting at position 1291 of SEQ ID NO: 317330
uugugaaugucauuuguau

SEQ ID NO: 420074 - RNA, 19 nt, Artificial Sequence
  Description of Artificial Sequence: Synthetic oligonucleotide
  Antisense Strand to SEQ ID NO: 420073
auacaaaugacauucacaa

SEQ ID NO: 420075 - RNA, 19 nt, Artificial Sequence
  Description of Artificial Sequence: Synthetic oligonucleotide
  Sense Strand Starting at position 1291 of SEQ ID NO: 317543
agugacuaguggucacuga

SEQ ID NO: 420076 - RNA, 19 nt, Artificial Sequence
  Description of Artificial Sequence: Synthetic oligonucleotide
  Antisense Strand to SEQ ID NO: 420075
ucagugaccacuagucacu

SEQ ID NO: 420077 - RNA, 19 nt, Artificial Sequence
  Description of Artificial Sequence: Synthetic oligonucleotide
  Sense Strand Starting at position 1291 of SEQ ID NO: 317544
gugacuaguggucacugau

SEQ ID NO: 420078 - RNA, 19 nt, Artificial Sequence
  Description of Artificial Sequence: Synthetic oligonucleotide
  Antisense Strand to SEQ ID NO: 420077
aucagugaccacuagucac

SEQ ID NO: 420079 - RNA, 19 nt, Artificial Sequence
  Description of Artificial Sequence: Synthetic oligonucleotide
  Sense Strand Starting at position 1291 of SEQ ID NO: 317596
cuuacuguuccggaagggu

SEQ ID NO: 420080 - RNA, 19 nt, Artificial Sequence
  Description of Artificial Sequence: Synthetic oligonucleotide
  Antisense Strand to SEQ ID NO: 420079
acccuuccggaacaguaag

SEQ ID NO: 420081 - RNA, 19 nt, Artificial Sequence
  Description of Artificial Sequence: Synthetic oligonucleotide
  Sense Strand Starting at position 1291 of SEQ ID NO: 317741
gaggcugagcgauaggaaa

SEQ ID NO: 420082 - RNA, 19 nt, Artificial Sequence
  Description of Artificial Sequence: Synthetic oligonucleotide
  Antisense Strand to SEQ ID NO: 420081
uuuccuaucgcucagccuc

SEQ ID NO: 420083 - RNA, 19 nt, Artificial Sequence
  Description of Artificial Sequence: Synthetic oligonucleotide
  Sense Strand Starting at position 1291 of SEQ ID NO: 317777
gagaguucuuaucuuagag

SEQ ID NO: 420084 - RNA, 19 nt, Artificial Sequence
  Description of Artificial Sequence: Synthetic oligonucleotide
  Antisense Strand to SEQ ID NO: 420083
cucuaagauaagaacucuc

SEQ ID NO: 420085 - RNA, 19 nt, Artificial Sequence
  Description of Artificial Sequence: Synthetic oligonucleotide
  Sense Strand Starting at position 1291 of SEQ ID NO: 317789
cuuagagauugucugguua

SEQ ID NO: 420086 - RNA, 19 nt, Artificial Sequence
  Description of Artificial Sequence: Synthetic oligonucleotide
  Antisense Strand to SEQ ID NO: 420085
uaaccagacaaucucuaag

SEQ ID NO: 420087 - RNA, 19 nt, Artificial Sequence
  Description of Artificial Sequence: Synthetic oligonucleotide
  Sense Strand Starting at position 1291 of SEQ ID NO: 317843
guauguguuggguuugucu

SEQ ID NO: 420088 - RNA, 19 nt, Artificial Sequence
  Description of Artificial Sequence: Synthetic oligonucleotide
  Antisense Strand to SEQ ID NO: 420087
agacaaacccaacacauac

SEQ ID NO: 420089 - RNA, 19 nt, Artificial Sequence
  Description of Artificial Sequence: Synthetic oligonucleotide
  Sense Strand Starting at position 1291 of SEQ ID NO: 317850
uuggguuugucucuagaga

SEQ ID NO: 420090 - RNA, 19 nt, Artificial Sequence
  Description of Artificial Sequence: Synthetic oligonucleotide
  Antisense Strand to SEQ ID NO: 420089
ucucuagagacaaacccaa

SEQ ID NO: 420091 - RNA, 19 nt, Artificial Sequence
  Description of Artificial Sequence: Synthetic oligonucleotide
  Sense Strand Starting at position 1291 of SEQ ID NO: 317851
uggguuugucucuagagaa

SEQ ID NO: 420092 - RNA, 19 nt, Artificial Sequence
  Description of Artificial Sequence: Synthetic oligonucleotide
  Antisense Strand to SEQ ID NO: 420091
uucucuagagacaaaccca

SEQ ID NO: 420093 - RNA, 19 nt, Artificial Sequence
  Description of Artificial Sequence: Synthetic oligonucleotide
  Sense Strand Starting at position 1291 of SEQ ID NO: 317865
gagaaagagugauccuugu

SEQ ID NO: 420094 - RNA, 19 nt, Artificial Sequence
  Description of Artificial Sequence: Synthetic oligonucleotide
  Antisense Strand to SEQ ID NO: 420093
acaaggaucacucuuucuc

SEQ ID NO: 420095 - RNA, 19 nt, Artificial Sequence
  Description of Artificial Sequence: Synthetic oligonucleotide
  Sense Strand Starting at position 1291 of SEQ ID NO: 317894
gugcauggugaguagaaug

SEQ ID NO: 420096 - RNA, 19 nt, Artificial Sequence
  Description of Artificial Sequence: Synthetic oligonucleotide
  Antisense Strand to SEQ ID NO: 420095
cauucuacucaccaugcac

SEQ ID NO: 420097 - RNA, 19 nt, Artificial Sequence
  Description of Artificial Sequence: Synthetic oligonucleotide
  Sense Strand Starting at position 1291 of SEQ ID NO: 317899
uggugaguagaaugagaau

SEQ ID NO: 420098 - RNA, 19 nt, Artificial Sequence
  Description of Artificial Sequence: Synthetic oligonucleotide
  Antisense Strand to SEQ ID NO: 420097
auucucauucuacucacca

SEQ ID NO: 420099 - RNA, 19 nt, Artificial Sequence
  Description of Artificial Sequence: Synthetic oligonucleotide
  Sense Strand Starting at position 1291 of SEQ ID NO: 318026
uuauauuacccuuaggucu

SEQ ID NO: 420100 - RNA, 19 nt, Artificial Sequence
  Description of Artificial Sequence: Synthetic oligonucleotide
  Antisense Strand to SEQ ID NO: 420099
agaccuaaggguaauauaa

SEQ ID NO: 420101 - RNA, 19 nt, Artificial Sequence
  Description of Artificial Sequence: Synthetic oligonucleotide
  Sense Strand Starting at position 1291 of SEQ ID NO: 318038
uaggucuucugauuucgua

SEQ ID NO: 420102 - RNA, 19 nt, Artificial Sequence
  Description of Artificial Sequence: Synthetic oligonucleotide
  Antisense Strand to SEQ ID NO: 420101
uacgaaaucagaagaccua

SEQ ID NO: 420103 - RNA, 19 nt, Artificial Sequence
  Description of Artificial Sequence: Synthetic oligonucleotide
  Sense Strand Starting at position 1291 of SEQ ID NO: 318053
cguaccaagacaugaauga

SEQ ID NO: 420104 - RNA, 19 nt, Artificial Sequence
  Description of Artificial Sequence: Synthetic oligonucleotide
  Antisense Strand to SEQ ID NO: 420103
ucauucaugucuugguacg

SEQ ID NO: 420105 - RNA, 19 nt, Artificial Sequence
  Description of Artificial Sequence: Synthetic oligonucleotide
  Sense Strand Starting at position 1291 of SEQ ID NO: 318222
ucugguaaauugguaagaa

SEQ ID NO: 420106 - RNA, 19 nt, Artificial Sequence
  Description of Artificial Sequence: Synthetic oligonucleotide
  Antisense Strand to SEQ ID NO: 420105
uucuuaccaauuuaccaga

SEQ ID NO: 420107 - RNA, 19 nt, Artificial Sequence
  Description of Artificial Sequence: Synthetic oligonucleotide
  Sense Strand Starting at position 1291 of SEQ ID NO: 318308
agaucacugucuuuguaaa

SEQ ID NO: 420108 - RNA, 19 nt, Artificial Sequence
  Description of Artificial Sequence: Synthetic oligonucleotide
  Antisense Strand to SEQ ID NO: 420107
uuuacaaagacagugaucu

SEQ ID NO: 420109 - RNA, 19 nt, Artificial Sequence
  Description of Artificial Sequence: Synthetic oligonucleotide
  Sense Strand Starting at position 1291 of SEQ ID NO: 318310
aucacugucuuuguaaaca

SEQ ID NO: 420110 - RNA, 19 nt, Artificial Sequence
  Description of Artificial Sequence: Synthetic oligonucleotide
  Antisense Strand to SEQ ID NO: 420109
uguuuacaaagacagugau

SEQ ID NO: 420111 - RNA, 19 nt, Artificial Sequence
  Description of Artificial Sequence: Synthetic oligonucleotide
  Sense Strand Starting at position 1291 of SEQ ID NO: 318367
uguauuauacuaggaaugu

SEQ ID NO: 420112 - RNA, 19 nt, Artificial Sequence
  Description of Artificial Sequence: Synthetic oligonucleotide
  Antisense Strand to SEQ ID NO: 420111
acauuccuaguauaauaca

SEQ ID NO: 420113 - RNA, 19 nt, Artificial Sequence
  Description of Artificial Sequence: Synthetic oligonucleotide
  Sense Strand Starting at position 1291 of SEQ ID NO: 318473
ccaguuacucccuaacagu

SEQ ID NO: 420114 - RNA, 19 nt, Artificial Sequence
  Description of Artificial Sequence: Synthetic oligonucleotide
  Antisense Strand to SEQ ID NO: 420113
acuguuagggaguaacugg

SEQ ID NO: 420115 - RNA, 19 nt, Artificial Sequence
  Description of Artificial Sequence: Synthetic oligonucleotide
  Sense Strand Starting at position 1291 of SEQ ID NO: 318544
augugcaaacauugagacu

SEQ ID NO: 420116 - RNA, 19 nt, Artificial Sequence
  Description of Artificial Sequence: Synthetic oligonucleotide
  Antisense Strand to SEQ ID NO: 420115
agucucaauguuugcacau

SEQ ID NO: 420117 - RNA, 19 nt, Artificial Sequence
  Description of Artificial Sequence: Synthetic oligonucleotide
  Sense Strand Starting at position 1291 of SEQ ID NO: 318550
aaacauugagacuguggua

SEQ ID NO: 420118 - RNA, 19 nt, Artificial Sequence
  Description of Artificial Sequence: Synthetic oligonucleotide
  Antisense Strand to SEQ ID NO: 420117
uaccacagucucaauguuu

SEQ ID NO: 420119 - RNA, 19 nt, Artificial Sequence
  Description of Artificial Sequence: Synthetic oligonucleotide
  Sense Strand Starting at position 1291 of SEQ ID NO: 318783
gagugugugcccguuucca

SEQ ID NO: 420120 - RNA, 19 nt, Artificial Sequence
  Description of Artificial Sequence: Synthetic oligonucleotide
  Antisense Strand to SEQ ID NO: 420119
uggaaacgggcacacacuc

SEQ ID NO: 420121 - RNA, 19 nt, Artificial Sequence
  Description of Artificial Sequence: Synthetic oligonucleotide
  Sense Strand Starting at position 1291 of SEQ ID NO: 318785
gugugugcccguuuccauu

SEQ ID NO: 420122 - RNA, 19 nt, Artificial Sequence
  Description of Artificial Sequence: Synthetic oligonucleotide
  Antisense Strand to SEQ ID NO: 420121
aauggaaacgggcacacac

SEQ ID NO: 420123 - RNA, 19 nt, Artificial Sequence
  Description of Artificial Sequence: Synthetic oligonucleotide
  Sense Strand Starting at position 1291 of SEQ ID NO: 318907
cuucuuuccuagguugaaa

SEQ ID NO: 420124 - RNA, 19 nt, Artificial Sequence
  Description of Artificial Sequence: Synthetic oligonucleotide
  Antisense Strand to SEQ ID NO: 420123
uuucaaccuaggaaagaag

SEQ ID NO: 420125 - RNA, 19 nt, Artificial Sequence
  Description of Artificial Sequence: Synthetic oligonucleotide
  Sense Strand Starting at position 1291 of SEQ ID NO: 319144
uuggaacaucuguauacuu

SEQ ID NO: 420126 - RNA, 19 nt, Artificial Sequence
  Description of Artificial Sequence: Synthetic oligonucleotide
  Antisense Strand to SEQ ID NO: 420125
aaguauacagauguuccaa

SEQ ID NO: 420127 - RNA, 19 nt, Artificial Sequence
  Description of Artificial Sequence: Synthetic oligonucleotide
  Sense Strand Starting at position 1292 of SEQ ID NO: 315270
gcuagaauacaauguaucu

SEQ ID NO: 420128 - RNA, 19 nt, Artificial Sequence
  Description of Artificial Sequence: Synthetic oligonucleotide
  Antisense Strand to SEQ ID NO: 420127
agauacauuguauucuagc

SEQ ID NO: 420129 - RNA, 19 nt, Artificial Sequence
  Description of Artificial Sequence: Synthetic oligonucleotide
  Sense Strand Starting at position 1292 of SEQ ID NO: 315342
gcacuccuucccguguuua

SEQ ID NO: 420130 - RNA, 19 nt, Artificial Sequence
  Description of Artificial Sequence: Synthetic oligonucleotide
  Antisense Strand to SEQ ID NO: 420129
uaaacacgggaaggagugc

SEQ ID NO: 420131 - RNA, 19 nt, Artificial Sequence
  Description of Artificial Sequence: Synthetic oligonucleotide
  Sense Strand Starting at position 1292 of SEQ ID NO: 315354
guguuuauuagugagaaag

SEQ ID NO: 420132 - RNA, 19 nt, Artificial Sequence
  Description of Artificial Sequence: Synthetic oligonucleotide
  Antisense Strand to SEQ ID NO: 420131
cuuucucacuaauaaacac

SEQ ID NO: 420133 - RNA, 19 nt, Artificial Sequence
  Description of Artificial Sequence: Synthetic oligonucleotide
  Sense Strand Starting at position 1292 of SEQ ID NO: 315448
acauuaguggcuuacucua

SEQ ID NO: 420134 - RNA, 19 nt, Artificial Sequence
  Description of Artificial Sequence: Synthetic oligonucleotide
  Antisense Strand to SEQ ID NO: 420133
uagaguaagccacuaaugu

SEQ ID NO: 420135 - RNA, 19 nt, Artificial Sequence
  Description of Artificial Sequence: Synthetic oligonucleotide
  Sense Strand Starting at position 1292 of SEQ ID NO: 315510
ggaggacuuaaucgccaca

SEQ ID NO: 420136 - RNA, 19 nt, Artificial Sequence
  Description of Artificial Sequence: Synthetic oligonucleotide
  Antisense Strand to SEQ ID NO: 420135
uguggcgauuaaguccucc

SEQ ID NO: 420137 - RNA, 19 nt, Artificial Sequence
  Description of Artificial Sequence: Synthetic oligonucleotide
  Sense Strand Starting at position 1292 of SEQ ID NO: 315512
aggacuuaaucgccacacu

SEQ ID NO: 420138 - RNA, 19 nt, Artificial Sequence
  Description of Artificial Sequence: Synthetic oligonucleotide
  Antisense Strand to SEQ ID NO: 420137
aguguggcgauuaaguccu

SEQ ID NO: 420139 - RNA, 19 nt, Artificial Sequence
  Description of Artificial Sequence: Synthetic oligonucleotide
  Sense Strand Starting at position 1292 of SEQ ID NO: 315513
ggacuuaaucgccacacua

SEQ ID NO: 420140 - RNA, 19 nt, Artificial Sequence
  Description of Artificial Sequence: Synthetic oligonucleotide
  Antisense Strand to SEQ ID NO: 420139
uaguguggcgauuaagucc

SEQ ID NO: 420141 - RNA, 19 nt, Artificial Sequence
  Description of Artificial Sequence: Synthetic oligonucleotide
  Sense Strand Starting at position 1292 of SEQ ID NO: 315532
uugggauacugccuauaga

SEQ ID NO: 420142 - RNA, 19 nt, Artificial Sequence
  Description of Artificial Sequence: Synthetic oligonucleotide
  Antisense Strand to SEQ ID NO: 420141
ucuauaggcaguaucccaa

SEQ ID NO: 420143 - RNA, 19 nt, Artificial Sequence
  Description of Artificial Sequence: Synthetic oligonucleotide
  Sense Strand Starting at position 1292 of SEQ ID NO: 315708
cgcuuuagacuacauuacu

SEQ ID NO: 420144 - RNA, 19 nt, Artificial Sequence
  Description of Artificial Sequence: Synthetic oligonucleotide
  Antisense Strand to SEQ ID NO: 420143
aguaauguagucuaaagcg

SEQ ID NO: 420145 - RNA, 19 nt, Artificial Sequence
  Description of Artificial Sequence: Synthetic oligonucleotide
  Sense Strand Starting at position 1292 of SEQ ID NO: 315911
gggaauuggcugcauacau

SEQ ID NO: 420146 - RNA, 19 nt, Artificial Sequence
  Description of Artificial Sequence: Synthetic oligonucleotide
  Antisense Strand to SEQ ID NO: 420145
auguaugcagccaauuccc

SEQ ID NO: 420147 - RNA, 19 nt, Artificial Sequence
  Description of Artificial Sequence: Synthetic oligonucleotide
  Sense Strand Starting at position 1292 of SEQ ID NO: 315940
cccacaagaugucuauugu

SEQ ID NO: 420148 - RNA, 19 nt, Artificial Sequence
  Description of Artificial Sequence: Synthetic oligonucleotide
  Antisense Strand to SEQ ID NO: 420147
acaauagacaucuuguggg

SEQ ID NO: 420149 - RNA, 19 nt, Artificial Sequence
  Description of Artificial Sequence: Synthetic oligonucleotide
  Sense Strand Starting at position 1292 of SEQ ID NO: 315941
ccacaagaugucuauuguu

SEQ ID NO: 420150 - RNA, 19 nt, Artificial Sequence
  Description of Artificial Sequence: Synthetic oligonucleotide
  Antisense Strand to SEQ ID NO: 420149
aacaauagacaucuugugg

SEQ ID NO: 420151 - RNA, 19 nt, Artificial Sequence
  Description of Artificial Sequence: Synthetic oligonucleotide
  Sense Strand Starting at position 1292 of SEQ ID NO: 316025
cugagucuggcuuauucua

SEQ ID NO: 420152 - RNA, 19 nt, Artificial Sequence
  Description of Artificial Sequence: Synthetic oligonucleotide
  Antisense Strand to SEQ ID NO: 420151
uagaauaagccagacucag

SEQ ID NO: 420153 - RNA, 19 nt, Artificial Sequence
  Description of Artificial Sequence: Synthetic oligonucleotide
  Sense Strand Starting at position 1292 of SEQ ID NO: 316337
uugacuuuguuggucauuu

SEQ ID NO: 420154 - RNA, 19 nt, Artificial Sequence
  Description of Artificial Sequence: Synthetic oligonucleotide
  Antisense Strand to SEQ ID NO: 420153
aaaugaccaacaaagucaa

SEQ ID NO: 420155 - RNA, 19 nt, Artificial Sequence
  Description of Artificial Sequence: Synthetic oligonucleotide
  Sense Strand Starting at position 1292 of SEQ ID NO: 316355
uuugcucuggaauaauaca

SEQ ID NO: 420156 - RNA, 19 nt, Artificial Sequence
  Description of Artificial Sequence: Synthetic oligonucleotide
  Antisense Strand to SEQ ID NO: 420155
uguauuauuccagagcaaa

SEQ ID NO: 420157 - RNA, 19 nt, Artificial Sequence
  Description of Artificial Sequence: Synthetic oligonucleotide
  Sense Strand Starting at position 1292 of SEQ ID NO: 316579
uuaauccaaugguugauua

SEQ ID NO: 420158 - RNA, 19 nt, Artificial Sequence
  Description of Artificial Sequence: Synthetic oligonucleotide
  Antisense Strand to SEQ ID NO: 420157
uaaucaaccauuggauuaa

SEQ ID NO: 420159 - RNA, 19 nt, Artificial Sequence
  Description of Artificial Sequence: Synthetic oligonucleotide
  Sense Strand Starting at position 1292 of SEQ ID NO: 316608
uuaaguguguaucugaaag

SEQ ID NO: 420160 - RNA, 19 nt, Artificial Sequence
  Description of Artificial Sequence: Synthetic oligonucleotide
  Antisense Strand to SEQ ID NO: 420159
cuuucagauacacacuuaa

SEQ ID NO: 420161 - RNA, 19 nt, Artificial Sequence
  Description of Artificial Sequence: Synthetic oligonucleotide
  Sense Strand Starting at position 1292 of SEQ ID NO: 316656
uuuguaagauaucugaaac

SEQ ID NO: 420162 - RNA, 19 nt, Artificial Sequence
  Description of Artificial Sequence: Synthetic oligonucleotide
  Antisense Strand to SEQ ID NO: 420161
guuucagauaucuuacaaa

SEQ ID NO: 420163 - RNA, 19 nt, Artificial Sequence
  Description of Artificial Sequence: Synthetic oligonucleotide
  Sense Strand Starting at position 1292 of SEQ ID NO: 316788
guuucuuugcugguugcaa

SEQ ID NO: 420164 - RNA, 19 nt, Artificial Sequence
  Description of Artificial Sequence: Synthetic oligonucleotide
  Antisense Strand to SEQ ID NO: 420163
uugcaaccagcaaagaaac

SEQ ID NO: 420165 - RNA, 19 nt, Artificial Sequence
  Description of Artificial Sequence: Synthetic oligonucleotide
  Sense Strand Starting at position 1292 of SEQ ID NO: 316973
ccgaaaugccugcauacau

SEQ ID NO: 420166 - RNA, 19 nt, Artificial Sequence
  Description of Artificial Sequence: Synthetic oligonucleotide
  Antisense Strand to SEQ ID NO: 420165
auguaugcaggcauuucgg

SEQ ID NO: 420167 - RNA, 19 nt, Artificial Sequence
  Description of Artificial Sequence: Synthetic oligonucleotide
  Sense Strand Starting at position 1292 of SEQ ID NO: 317017
gcuuuaucugcauaaucag

SEQ ID NO: 420168 - RNA, 19 nt, Artificial Sequence
  Description of Artificial Sequence: Synthetic oligonucleotide
  Antisense Strand to SEQ ID NO: 420167
cugauuaugcagauaaagc

SEQ ID NO: 420169 - RNA, 19 nt, Artificial Sequence
  Description of Artificial Sequence: Synthetic oligonucleotide
  Sense Strand Starting at position 1292 of SEQ ID NO: 317208
auccuugaucuuuagagca

SEQ ID NO: 420170 - RNA, 19 nt, Artificial Sequence
  Description of Artificial Sequence: Synthetic oligonucleotide
  Antisense Strand to SEQ ID NO: 420169
ugcucuaaagaucaaggau

SEQ ID NO: 420171 - RNA, 19 nt, Artificial Sequence
  Description of Artificial Sequence: Synthetic oligonucleotide
  Sense Strand Starting at position 1292 of SEQ ID NO: 317361
ugcggaaucaggcaaauga

SEQ ID NO: 420172 - RNA, 19 nt, Artificial Sequence
  Description of Artificial Sequence: Synthetic oligonucleotide
  Antisense Strand to SEQ ID NO: 420171
ucauuugccugauuccgca

SEQ ID NO: 420173 - RNA, 19 nt, Artificial Sequence
  Description of Artificial Sequence: Synthetic oligonucleotide
  Sense Strand Starting at position 1292 of SEQ ID NO: 317369
caggcaaaugaguaacuuu

SEQ ID NO: 420174 - RNA, 19 nt, Artificial Sequence
  Description of Artificial Sequence: Synthetic oligonucleotide
  Antisense Strand to SEQ ID NO: 420173
aaaguuacucauuugccug

SEQ ID NO: 420175 - RNA, 19 nt, Artificial Sequence
  Description of Artificial Sequence: Synthetic oligonucleotide
  Sense Strand Starting at position 1292 of SEQ ID NO: 317471
ugagcagaucuguaguuug

SEQ ID NO: 420176 - RNA, 19 nt, Artificial Sequence
  Description of Artificial Sequence: Synthetic oligonucleotide
  Antisense Strand to SEQ ID NO: 420175
caaacuacagaucugcuca

SEQ ID NO: 420177 - RNA, 19 nt, Artificial Sequence
  Description of Artificial Sequence: Synthetic oligonucleotide
  Sense Strand Starting at position 1292 of SEQ ID NO: 317476
agaucuguaguuugaaaga

SEQ ID NO: 420178 - RNA, 19 nt, Artificial Sequence
  Description of Artificial Sequence: Synthetic oligonucleotide
  Antisense Strand to SEQ ID NO: 420177
ucuuucaaacuacagaucu

SEQ ID NO: 420179 - RNA, 19 nt, Artificial Sequence
  Description of Artificial Sequence: Synthetic oligonucleotide
  Sense Strand Starting at position 1292 of SEQ ID NO: 317513
ccaguaauuuagguucugu

SEQ ID NO: 420180 - RNA, 19 nt, Artificial Sequence
  Description of Artificial Sequence: Synthetic oligonucleotide
  Antisense Strand to SEQ ID NO: 420179
acagaaccuaaauuacugg

SEQ ID NO: 420181 - RNA, 19 nt, Artificial Sequence
  Description of Artificial Sequence: Synthetic oligonucleotide
  Sense Strand Starting at position 1292 of SEQ ID NO: 317742
auugguauugcuuacgaaa

SEQ ID NO: 420182 - RNA, 19 nt, Artificial Sequence
  Description of Artificial Sequence: Synthetic oligonucleotide
  Antisense Strand to SEQ ID NO: 420181
uuucguaagcaauaccaau

SEQ ID NO: 420183 - RNA, 19 nt, Artificial Sequence
  Description of Artificial Sequence: Synthetic oligonucleotide
  Sense Strand Starting at position 1292 of SEQ ID NO: 318000
ugcccaguggauuauuaua

SEQ ID NO: 420184 - RNA, 19 nt, Artificial Sequence
  Description of Artificial Sequence: Synthetic oligonucleotide
  Antisense Strand to SEQ ID NO: 420183
uauaauaauccacugggca

SEQ ID NO: 420185 - RNA, 19 nt, Artificial Sequence
  Description of Artificial Sequence: Synthetic oligonucleotide
  Sense Strand Starting at position 1292 of SEQ ID NO: 318143
aaaccaugugaggguaaca

SEQ ID NO: 420186 - RNA, 19 nt, Artificial Sequence
  Description of Artificial Sequence: Synthetic oligonucleotide
  Antisense Strand to SEQ ID NO: 420185
uguuacccucacaugguuu

SEQ ID NO: 420187 - RNA, 19 nt, Artificial Sequence
  Description of Artificial Sequence: Synthetic oligonucleotide
  Sense Strand Starting at position 1292 of SEQ ID NO: 318189
gggaaagucagguguaaga

SEQ ID NO: 420188 - RNA, 19 nt, Artificial Sequence
  Description of Artificial Sequence: Synthetic oligonucleotide
  Antisense Strand to SEQ ID NO: 420187
ucuuacaccugacuuuccc

SEQ ID NO: 420189 - RNA, 19 nt, Artificial Sequence
  Description of Artificial Sequence: Synthetic oligonucleotide
  Sense Strand Starting at position 1292 of SEQ ID NO: 318196
ucagguguaagauguacaa

SEQ ID NO: 420190 - RNA, 19 nt, Artificial Sequence
  Description of Artificial Sequence: Synthetic oligonucleotide
  Antisense Strand to SEQ ID NO: 420189
uuguacaucuuacaccuga

SEQ ID NO: 420191 - RNA, 19 nt, Artificial Sequence
  Description of Artificial Sequence: Synthetic oligonucleotide
  Sense Strand Starting at position 1292 of SEQ ID NO: 318198
agguguaagauguacaagu

SEQ ID NO: 420192 - RNA, 19 nt, Artificial Sequence
  Description of Artificial Sequence: Synthetic oligonucleotide
  Antisense Strand to SEQ ID NO: 420191
acuuguacaucuuacaccu

SEQ ID NO: 420193 - RNA, 19 nt, Artificial Sequence
  Description of Artificial Sequence: Synthetic oligonucleotide
  Sense Strand Starting at position 1292 of SEQ ID NO: 318298
ggugaagauuacuuucucu

SEQ ID NO: 420194 - RNA, 19 nt, Artificial Sequence
  Description of Artificial Sequence: Synthetic oligonucleotide
  Antisense Strand to SEQ ID NO: 420193
agagaaaguaaucuucacc

SEQ ID NO: 420195 - RNA, 19 nt, Artificial Sequence
  Description of Artificial Sequence: Synthetic oligonucleotide
  Sense Strand Starting at position 1292 of SEQ ID NO: 318470
gaucauagugacuaaugca

SEQ ID NO: 420196 - RNA, 19 nt, Artificial Sequence
  Description of Artificial Sequence: Synthetic oligonucleotide
  Antisense Strand to SEQ ID NO: 420195
ugcauuagucacuaugauc

SEQ ID NO: 420197 - RNA, 19 nt, Artificial Sequence
  Description of Artificial Sequence: Synthetic oligonucleotide
  Sense Strand Starting at position 1292 of SEQ ID NO: 318564
gcugcuggacuugaugaua

SEQ ID NO: 420198 - RNA, 19 nt, Artificial Sequence
  Description of Artificial Sequence: Synthetic oligonucleotide
  Antisense Strand to SEQ ID NO: 420197
uaucaucaaguccagcagc

SEQ ID NO: 420199 - RNA, 19 nt, Artificial Sequence
  Description of Artificial Sequence: Synthetic oligonucleotide
  Sense Strand Starting at position 1292 of SEQ ID NO: 318709
uccuuaauagcuuaaguga

SEQ ID NO: 420200 - RNA, 19 nt, Artificial Sequence
  Description of Artificial Sequence: Synthetic oligonucleotide
  Antisense Strand to SEQ ID NO: 420199
ucacuuaagcuauuaagga

SEQ ID NO: 420201 - RNA, 19 nt, Artificial Sequence
  Description of Artificial Sequence: Synthetic oligonucleotide
  Sense Strand Starting at position 1292 of SEQ ID NO: 318897
acaggcuuccucugacaac

SEQ ID NO: 420202 - RNA, 19 nt, Artificial Sequence
  Description of Artificial Sequence: Synthetic oligonucleotide
  Antisense Strand to SEQ ID NO: 420201
guugucagaggaagccugu

SEQ ID NO: 420203 - RNA, 19 nt, Artificial Sequence
  Description of Artificial Sequence: Synthetic oligonucleotide
  Sense Strand Starting at position 1292 of SEQ ID NO: 319099
ucaauacccuugucaugga

SEQ ID NO: 420204 - RNA, 19 nt, Artificial Sequence
  Description of Artificial Sequence: Synthetic oligonucleotide
  Antisense Strand to SEQ ID NO: 420203
uccaugacaaggguauuga

SEQ ID NO: 420205 - RNA, 19 nt, Artificial Sequence
  Description of Artificial Sequence: Synthetic oligonucleotide
  Sense Strand Starting at position 1292 of SEQ ID NO: 319171
uaaggaauuuaucagugga

SEQ ID NO: 420206 - RNA, 19 nt, Artificial Sequence
  Description of Artificial Sequence: Synthetic oligonucleotide
  Antisense Strand to SEQ ID NO: 420205
uccacugauaaauuccuua

SEQ ID NO: 420207 - RNA, 19 nt, Artificial Sequence
  Description of Artificial Sequence: Synthetic oligonucleotide
  Sense Strand Starting at position 1293 of SEQ ID NO: 315253
uugggauacugccuauaga

SEQ ID NO: 420208 - RNA, 19 nt, Artificial Sequence
  Description of Artificial Sequence: Synthetic oligonucleotide
  Antisense Strand to SEQ ID NO: 420207
ucuauaggcaguaucccaa

SEQ ID NO: 420209 - RNA, 19 nt, Artificial Sequence
  Description of Artificial Sequence: Synthetic oligonucleotide
  Sense Strand Starting at position 1293 of SEQ ID NO: 315429
cgcuuuagacuacauuacu

SEQ ID NO: 420210 - RNA, 19 nt, Artificial Sequence
  Description of Artificial Sequence: Synthetic oligonucleotide
  Antisense Strand to SEQ ID NO: 420209
aguaauguagucuaaagcg

SEQ ID NO: 420211 - RNA, 19 nt, Artificial Sequence
  Description of Artificial Sequence: Synthetic oligonucleotide
  Sense Strand Starting at position 1293 of SEQ ID NO: 315632
gggaauuggcugcauacau

SEQ ID NO: 420212 - RNA, 19 nt, Artificial Sequence
  Description of Artificial Sequence: Synthetic oligonucleotide
  Antisense Strand to SEQ ID NO: 420211
auguaugcagccaauuccc

SEQ ID NO: 420213 - RNA, 19 nt, Artificial Sequence
  Description of Artificial Sequence: Synthetic oligonucleotide
  Sense Strand Starting at position 1293 of SEQ ID NO: 315661
cccacaagaugucuauugu

SEQ ID NO: 420214 - RNA, 19 nt, Artificial Sequence
  Description of Artificial Sequence: Synthetic oligonucleotide
  Antisense Strand to SEQ ID NO: 420213
acaauagacaucuuguggg

SEQ ID NO: 420215 - RNA, 19 nt, Artificial Sequence
  Description of Artificial Sequence: Synthetic oligonucleotide
  Sense Strand Starting at position 1293 of SEQ ID NO: 315662
ccacaagaugucuauuguu

SEQ ID NO: 420216 - RNA, 19 nt, Artificial Sequence
  Description of Artificial Sequence: Synthetic oligonucleotide
  Antisense Strand to SEQ ID NO: 420215
aacaauagacaucuugugg

SEQ ID NO: 420217 - RNA, 19 nt, Artificial Sequence
  Description of Artificial Sequence: Synthetic oligonucleotide
  Sense Strand Starting at position 1293 of SEQ ID NO: 315735
acugaaagccucugagucu

SEQ ID NO: 420218 - RNA, 19 nt, Artificial Sequence
  Description of Artificial Sequence: Synthetic oligonucleotide
  Antisense Strand to SEQ ID NO: 420217
agacucagaggcuuucagu

SEQ ID NO: 420219 - RNA, 19 nt, Artificial Sequence
  Description of Artificial Sequence: Synthetic oligonucleotide
  Sense Strand Starting at position 1293 of SEQ ID NO: 315746
cugagucuggcuuauucua

SEQ ID NO: 420220 - RNA, 19 nt, Artificial Sequence
  Description of Artificial Sequence: Synthetic oligonucleotide
  Antisense Strand to SEQ ID NO: 420219
uagaauaagccagacucag

SEQ ID NO: 420221 - RNA, 19 nt, Artificial Sequence
  Description of Artificial Sequence: Synthetic oligonucleotide
  Sense Strand Starting at position 1293 of SEQ ID NO: 315748
gagucuggcuuauucuaag

SEQ ID NO: 420222 - RNA, 19 nt, Artificial Sequence
  Description of Artificial Sequence: Synthetic oligonucleotide
  Antisense Strand to SEQ ID NO: 420221
cuuagaauaagccagacuc

SEQ ID NO: 420223 - RNA, 19 nt, Artificial Sequence
  Description of Artificial Sequence: Synthetic oligonucleotide
  Sense Strand Starting at position 1293 of SEQ ID NO: 316058
uugacuuuguuggucauuu

SEQ ID NO: 420224 - RNA, 19 nt, Artificial Sequence
  Description of Artificial Sequence: Synthetic oligonucleotide
  Antisense Strand to SEQ ID NO: 420223
aaaugaccaacaaagucaa

SEQ ID NO: 420225 - RNA, 19 nt, Artificial Sequence
  Description of Artificial Sequence: Synthetic oligonucleotide
  Sense Strand Starting at position 1293 of SEQ ID NO: 316076
uuugcucuggaauaauaca

SEQ ID NO: 420226 - RNA, 19 nt, Artificial Sequence
  Description of Artificial Sequence: Synthetic oligonucleotide
  Antisense Strand to SEQ ID NO: 420225
uguauuauuccagagcaaa

SEQ ID NO: 420227 - RNA, 19 nt, Artificial Sequence
  Description of Artificial Sequence: Synthetic oligonucleotide
  Sense Strand Starting at position 1293 of SEQ ID NO: 316300
uuaauccaaugguugauua

SEQ ID NO: 420228 - RNA, 19 nt, Artificial Sequence
  Description of Artificial Sequence: Synthetic oligonucleotide
  Antisense Strand to SEQ ID NO: 420227
uaaucaaccauuggauuaa

SEQ ID NO: 420229 - RNA, 19 nt, Artificial Sequence
  Description of Artificial Sequence: Synthetic oligonucleotide
  Sense Strand Starting at position 1293 of SEQ ID NO: 316329
uuaaguguguaucugaaag

SEQ ID NO: 420230 - RNA, 19 nt, Artificial Sequence
  Description of Artificial Sequence: Synthetic oligonucleotide
  Antisense Strand to SEQ ID NO: 420229
cuuucagauacacacuuaa

SEQ ID NO: 420231 - RNA, 19 nt, Artificial Sequence
  Description of Artificial Sequence: Synthetic oligonucleotide
  Sense Strand Starting at position 1293 of SEQ ID NO: 316377
uuuguaagauaucugaaac

SEQ ID NO: 420232 - RNA, 19 nt, Artificial Sequence
  Description of Artificial Sequence: Synthetic oligonucleotide
  Antisense Strand to SEQ ID NO: 420231
guuucagauaucuuacaaa

SEQ ID NO: 420233 - RNA, 19 nt, Artificial Sequence
  Description of Artificial Sequence: Synthetic oligonucleotide
  Sense Strand Starting at position 1293 of SEQ ID NO: 316509
guuucuuugcugguugcaa

SEQ ID NO: 420234 - RNA, 19 nt, Artificial Sequence
  Description of Artificial Sequence: Synthetic oligonucleotide
  Antisense Strand to SEQ ID NO: 420233
uugcaaccagcaaagaaac

SEQ ID NO: 420235 - RNA, 19 nt, Artificial Sequence
  Description of Artificial Sequence: Synthetic oligonucleotide
  Sense Strand Starting at position 1293 of SEQ ID NO: 316694
ccgaaaugccugcauacau

SEQ ID NO: 420236 - RNA, 19 nt, Artificial Sequence
  Description of Artificial Sequence: Synthetic oligonucleotide
  Antisense Strand to SEQ ID NO: 420235
auguaugcaggcauuucgg

SEQ ID NO: 420237 - RNA, 19 nt, Artificial Sequence
  Description of Artificial Sequence: Synthetic oligonucleotide
  Sense Strand Starting at position 1293 of SEQ ID NO: 316738
gcuuuaucugcauaaucag

SEQ ID NO: 420238 - RNA, 19 nt, Artificial Sequence
  Description of Artificial Sequence: Synthetic oligonucleotide
  Antisense Strand to SEQ ID NO: 420237
cugauuaugcagauaaagc

SEQ ID NO: 420239 - RNA, 19 nt, Artificial Sequence
  Description of Artificial Sequence: Synthetic oligonucleotide
  Sense Strand Starting at position 1293 of SEQ ID NO: 316929
auccuugaucuuuagagca

SEQ ID NO: 420240 - RNA, 19 nt, Artificial Sequence
  Description of Artificial Sequence: Synthetic oligonucleotide
  Antisense Strand to SEQ ID NO: 420239
ugcucuaaagaucaaggau

SEQ ID NO: 420241 - RNA, 19 nt, Artificial Sequence
  Description of Artificial Sequence: Synthetic oligonucleotide
  Sense Strand Starting at position 1293 of SEQ ID NO: 317082
ugcggaaucaggcaaauga

SEQ ID NO: 420242 - RNA, 19 nt, Artificial Sequence
  Description of Artificial Sequence: Synthetic oligonucleotide
  Antisense Strand to SEQ ID NO: 420241
ucauuugccugauuccgca

SEQ ID NO: 420243 - RNA, 19 nt, Artificial Sequence
  Description of Artificial Sequence: Synthetic oligonucleotide
  Sense Strand Starting at position 1293 of SEQ ID NO: 317090
caggcaaaugaguaacuuu

SEQ ID NO: 420244 - RNA, 19 nt, Artificial Sequence
  Description of Artificial Sequence: Synthetic oligonucleotide
  Antisense Strand to SEQ ID NO: 420243
aaaguuacucauuugccug

SEQ ID NO: 420245 - RNA, 19 nt, Artificial Sequence
  Description of Artificial Sequence: Synthetic oligonucleotide
  Sense Strand Starting at position 1293 of SEQ ID NO: 317192
ugagcagaucuguaguuug

SEQ ID NO: 420246 - RNA, 19 nt, Artificial Sequence
  Description of Artificial Sequence: Synthetic oligonucleotide
  Antisense Strand to SEQ ID NO: 420245
caaacuacagaucugcuca

SEQ ID NO: 420247 - RNA, 19 nt, Artificial Sequence
  Description of Artificial Sequence: Synthetic oligonucleotide
  Sense Strand Starting at position 1293 of SEQ ID NO: 317195
gcagaucuguaguuugaaa

SEQ ID NO: 420248 - RNA, 19 nt, Artificial Sequence
  Description of Artificial Sequence: Synthetic oligonucleotide
  Antisense Strand to SEQ ID NO: 420247
uuucaaacuacagaucugc

SEQ ID NO: 420249 - RNA, 19 nt, Artificial Sequence
  Description of Artificial Sequence: Synthetic oligonucleotide
  Sense Strand Starting at position 1293 of SEQ ID NO: 317197
agaucuguaguuugaaaga

SEQ ID NO: 420250 - RNA, 19 nt, Artificial Sequence
  Description of Artificial Sequence: Synthetic oligonucleotide
  Antisense Strand to SEQ ID NO: 420249
ucuuucaaacuacagaucu

SEQ ID NO: 420251 - RNA, 19 nt, Artificial Sequence
  Description of Artificial Sequence: Synthetic oligonucleotide
  Sense Strand Starting at position 1293 of SEQ ID NO: 317234
ccaguaauuuagguucugu

SEQ ID NO: 420252 - RNA, 19 nt, Artificial Sequence
  Description of Artificial Sequence: Synthetic oligonucleotide
  Antisense Strand to SEQ ID NO: 420251
acagaaccuaaauuacugg

SEQ ID NO: 420253 - RNA, 19 nt, Artificial Sequence
  Description of Artificial Sequence: Synthetic oligonucleotide
  Sense Strand Starting at position 1293 of SEQ ID NO: 317463
auugguauugcuuacgaaa

SEQ ID NO: 420254 - RNA, 19 nt, Artificial Sequence
  Description of Artificial Sequence: Synthetic oligonucleotide
  Antisense Strand to SEQ ID NO: 420253
uuucguaagcaauaccaau

SEQ ID NO: 420255 - RNA, 19 nt, Artificial Sequence
  Description of Artificial Sequence: Synthetic oligonucleotide
  Sense Strand Starting at position 1293 of SEQ ID NO: 317497
ugaaacuucccugguagca

SEQ ID NO: 420256 - RNA, 19 nt, Artificial Sequence
  Description of Artificial Sequence: Synthetic oligonucleotide
  Antisense Strand to SEQ ID NO: 420255
ugcuaccagggaaguuuca

SEQ ID NO: 420257 - RNA, 19 nt, Artificial Sequence
  Description of Artificial Sequence: Synthetic oligonucleotide
  Sense Strand Starting at position 1293 of SEQ ID NO: 317721
ugcccaguggauuauuaua

SEQ ID NO: 420258 - RNA, 19 nt, Artificial Sequence
  Description of Artificial Sequence: Synthetic oligonucleotide
  Antisense Strand to SEQ ID NO: 420257
uauaauaauccacugggca

SEQ ID NO: 420259 - RNA, 19 nt, Artificial Sequence
  Description of Artificial Sequence: Synthetic oligonucleotide
  Sense Strand Starting at position 1293 of SEQ ID NO: 317864
aaaccaugugaggguaaca

SEQ ID NO: 420260 - RNA, 19 nt, Artificial Sequence
  Description of Artificial Sequence: Synthetic oligonucleotide
  Antisense Strand to SEQ ID NO: 420259
uguuacccucacaugguuu

SEQ ID NO: 420261 - RNA, 19 nt, Artificial Sequence
  Description of Artificial Sequence: Synthetic oligonucleotide
  Sense Strand Starting at position 1293 of SEQ ID NO: 317910
gggaaagucagguguaaga

SEQ ID NO: 420262 - RNA, 19 nt, Artificial Sequence
  Description of Artificial Sequence: Synthetic oligonucleotide
  Antisense Strand to SEQ ID NO: 420261
ucuuacaccugacuuuccc

SEQ ID NO: 420263 - RNA, 19 nt, Artificial Sequence
  Description of Artificial Sequence: Synthetic oligonucleotide
  Sense Strand Starting at position 1293 of SEQ ID NO: 317917
ucagguguaagauguacaa

SEQ ID NO: 420264 - RNA, 19 nt, Artificial Sequence
  Description of Artificial Sequence: Synthetic oligonucleotide
  Antisense Strand to SEQ ID NO: 420263
uuguacaucuuacaccuga

SEQ ID NO: 420265 - RNA, 19 nt, Artificial Sequence
  Description of Artificial Sequence: Synthetic oligonucleotide
  Sense Strand Starting at position 1293 of SEQ ID NO: 317919
agguguaagauguacaagu

SEQ ID NO: 420266 - RNA, 19 nt, Artificial Sequence
  Description of Artificial Sequence: Synthetic oligonucleotide
  Antisense Strand to SEQ ID NO: 420265
acuuguacaucuuacaccu

SEQ ID NO: 420267 - RNA, 19 nt, Artificial Sequence
  Description of Artificial Sequence: Synthetic oligonucleotide
  Sense Strand Starting at position 1293 of SEQ ID NO: 318019
ggugaagauuacuuucucu

SEQ ID NO: 420268 - RNA, 19 nt, Artificial Sequence
  Description of Artificial Sequence: Synthetic oligonucleotide
  Antisense Strand to SEQ ID NO: 420267
agagaaaguaaucuucacc

SEQ ID NO: 420269 - RNA, 19 nt, Artificial Sequence
  Description of Artificial Sequence: Synthetic oligonucleotide
  Sense Strand Starting at position 1293 of SEQ ID NO: 318191
gaucauagugacuaaugca

SEQ ID NO: 420270 - RNA, 19 nt, Artificial Sequence
  Description of Artificial Sequence: Synthetic oligonucleotide
  Antisense Strand to SEQ ID NO: 420269
ugcauuagucacuaugauc

SEQ ID NO: 420271 - RNA, 19 nt, Artificial Sequence
  Description of Artificial Sequence: Synthetic oligonucleotide
  Sense Strand Starting at position 1293 of SEQ ID NO: 318285
gcugcuggacuugaugaua

SEQ ID NO: 420272 - RNA, 19 nt, Artificial Sequence
  Description of Artificial Sequence: Synthetic oligonucleotide
  Antisense Strand to SEQ ID NO: 420271
uaucaucaaguccagcagc

SEQ ID NO: 420273 - RNA, 19 nt, Artificial Sequence
  Description of Artificial Sequence: Synthetic oligonucleotide
  Sense Strand Starting at position 1293 of SEQ ID NO: 318430
uccuuaauagcuuaaguga

SEQ ID NO: 420274 - RNA, 19 nt, Artificial Sequence
  Description of Artificial Sequence: Synthetic oligonucleotide
  Antisense Strand to SEQ ID NO: 420273
ucacuuaagcuauuaagga

SEQ ID NO: 420275 - RNA, 19 nt, Artificial Sequence
  Description of Artificial Sequence: Synthetic oligonucleotide
  Sense Strand Starting at position 1293 of SEQ ID NO: 318618
acaggcuuccucugacaac

SEQ ID NO: 420276 - RNA, 19 nt, Artificial Sequence
  Description of Artificial Sequence: Synthetic oligonucleotide
  Antisense Strand to SEQ ID NO: 420275
guugucagaggaagccugu

SEQ ID NO: 420277 - RNA, 19 nt, Artificial Sequence
  Description of Artificial Sequence: Synthetic oligonucleotide
  Sense Strand Starting at position 1293 of SEQ ID NO: 318820
ucaauacccuugucaugga

SEQ ID NO: 420278 - RNA, 19 nt, Artificial Sequence
  Description of Artificial Sequence: Synthetic oligonucleotide
  Antisense Strand to SEQ ID NO: 420277
uccaugacaaggguauuga

SEQ ID NO: 420279 - RNA, 19 nt, Artificial Sequence
  Description of Artificial Sequence: Synthetic oligonucleotide
  Sense Strand Starting at position 1293 of SEQ ID NO: 318892
uaaggaauuuaucagugga

SEQ ID NO: 420280 - RNA, 19 nt, Artificial Sequence
  Description of Artificial Sequence: Synthetic oligonucleotide
  Antisense Strand to SEQ ID NO: 420279
uccacugauaaauuccuua

SEQ ID NO: 420281 - RNA, 19 nt, Artificial Sequence
  Description of Artificial Sequence: Synthetic oligonucleotide
  Sense Strand Starting at position 1293 of SEQ ID NO: 319012
auuacaccuguuugucaaa

SEQ ID NO: 420282 - RNA, 19 nt, Artificial Sequence
  Description of Artificial Sequence: Synthetic oligonucleotide
  Antisense Strand to SEQ ID NO: 420281
uuugacaaacagguguaau

SEQ ID NO: 420283 - RNA, 19 nt, Artificial Sequence
  Description of Artificial Sequence: Synthetic oligonucleotide
  Sense Strand Starting at position 1293 of SEQ ID NO: 319205
caacuuacauaggugaguu

SEQ ID NO: 420284 - RNA, 19 nt, Artificial Sequence
  Description of Artificial Sequence: Synthetic oligonucleotide
  Antisense Strand to SEQ ID NO: 420283
aacucaccuauguaaguug

SEQ ID NO: 420285 - RNA, 19 nt, Artificial Sequence
  Description of Artificial Sequence: Synthetic oligonucleotide
  Sense Strand Starting at position 1293 of SEQ ID NO: 319209
uuacauaggugaguuacau

SEQ ID NO: 420286 - RNA, 19 nt, Artificial Sequence
  Description of Artificial Sequence: Synthetic oligonucleotide
  Antisense Strand to SEQ ID NO: 420285
auguaacucaccuauguaa

SEQ ID NO: 420287 - RNA, 19 nt, Artificial Sequence
  Description of Artificial Sequence: Synthetic oligonucleotide
  Sense Strand Starting at position 1294 of SEQ ID NO: 315260
guuccaugagaggguuaca

SEQ ID NO: 420288 - RNA, 19 nt, Artificial Sequence
  Description of Artificial Sequence: Synthetic oligonucleotide
  Antisense Strand to SEQ ID NO: 420287
uguaacccucucauggaac

SEQ ID NO: 420289 - RNA, 19 nt, Artificial Sequence
  Description of Artificial Sequence: Synthetic oligonucleotide
  Sense Strand Starting at position 1294 of SEQ ID NO: 315291
gaagaaguaagauguggua

SEQ ID NO: 420290 - RNA, 19 nt, Artificial Sequence
  Description of Artificial Sequence: Synthetic oligonucleotide
  Antisense Strand to SEQ ID NO: 420289
uaccacaucuuacuucuuc

SEQ ID NO: 420291 - RNA, 19 nt, Artificial Sequence
  Description of Artificial Sequence: Synthetic oligonucleotide
  Sense Strand Starting at position 1294 of SEQ ID NO: 315293
agaaguaagaugugguaaa

SEQ ID NO: 420292 - RNA, 19 nt, Artificial Sequence
  Description of Artificial Sequence: Synthetic oligonucleotide
  Antisense Strand to SEQ ID NO: 420291
uuuaccacaucuuacuucu

SEQ ID NO: 420293 - RNA, 19 nt, Artificial Sequence
  Description of Artificial Sequence: Synthetic oligonucleotide
  Sense Strand Starting at position 1294 of SEQ ID NO: 315349
uccagaacuccugguagag

SEQ ID NO: 420294 - RNA, 19 nt, Artificial Sequence
  Description of Artificial Sequence: Synthetic oligonucleotide
  Antisense Strand to SEQ ID NO: 420293
cucuaccaggaguucugga

SEQ ID NO: 420295 - RNA, 19 nt, Artificial Sequence
  Description of Artificial Sequence: Synthetic oligonucleotide
  Sense Strand Starting at position 1294 of SEQ ID NO: 315385
agcuuaaugaauggacgau

SEQ ID NO: 420296 - RNA, 19 nt, Artificial Sequence
  Description of Artificial Sequence: Synthetic oligonucleotide
  Antisense Strand to SEQ ID NO: 420295
aucguccauucauuaagcu

SEQ ID NO: 420297 - RNA, 19 nt, Artificial Sequence
  Description of Artificial Sequence: Synthetic oligonucleotide
  Sense Strand Starting at position 1294 of SEQ ID NO: 315437
ggcuaaccaguggaguuau

SEQ ID NO: 420298 - RNA, 19 nt, Artificial Sequence
  Description of Artificial Sequence: Synthetic oligonucleotide
  Antisense Strand to SEQ ID NO: 420297
auaacuccacugguuagcc

SEQ ID NO: 420299 - RNA, 19 nt, Artificial Sequence
  Description of Artificial Sequence: Synthetic oligonucleotide
  Sense Strand Starting at position 1294 of SEQ ID NO: 315547
acuagugaccucuagugga

SEQ ID NO: 420300 - RNA, 19 nt, Artificial Sequence
  Description of Artificial Sequence: Synthetic oligonucleotide
  Antisense Strand to SEQ ID NO: 420299
uccacuagaggucacuagu

SEQ ID NO: 420301 - RNA, 19 nt, Artificial Sequence
  Description of Artificial Sequence: Synthetic oligonucleotide
  Sense Strand Starting at position 1294 of SEQ ID NO: 315567
guaggcuuuagggaacuua

SEQ ID NO: 420302 - RNA, 19 nt, Artificial Sequence
  Description of Artificial Sequence: Synthetic oligonucleotide
  Antisense Strand to SEQ ID NO: 420301
uaaguucccuaaagccuac

SEQ ID NO: 420303 - RNA, 19 nt, Artificial Sequence
  Description of Artificial Sequence: Synthetic oligonucleotide
  Sense Strand Starting at position 1294 of SEQ ID NO: 315575
uagggaacuuaugugaucu

SEQ ID NO: 420304 - RNA, 19 nt, Artificial Sequence
  Description of Artificial Sequence: Synthetic oligonucleotide
  Antisense Strand to SEQ ID NO: 420303
agaucacauaaguucccua

SEQ ID NO: 420305 - RNA, 19 nt, Artificial Sequence
  Description of Artificial Sequence: Synthetic oligonucleotide
  Sense Strand Starting at position 1294 of SEQ ID NO: 315576
agggaacuuaugugaucuu

SEQ ID NO: 420306 - RNA, 19 nt, Artificial Sequence
  Description of Artificial Sequence: Synthetic oligonucleotide
  Antisense Strand to SEQ ID NO: 420305
aagaucacauaaguucccu

SEQ ID NO: 420307 - RNA, 19 nt, Artificial Sequence
  Description of Artificial Sequence: Synthetic oligonucleotide
  Sense Strand Starting at position 1294 of SEQ ID NO: 315579
gaacuuaugugaucuuuga

SEQ ID NO: 420308 - RNA, 19 nt, Artificial Sequence
  Description of Artificial Sequence: Synthetic oligonucleotide
  Antisense Strand to SEQ ID NO: 420307
ucaaagaucacauaaguuc

SEQ ID NO: 420309 - RNA, 19 nt, Artificial Sequence
  Description of Artificial Sequence: Synthetic oligonucleotide
  Sense Strand Starting at position 1294 of SEQ ID NO: 315758
accuaaguugauuaauguu

SEQ ID NO: 420310 - RNA, 19 nt, Artificial Sequence
  Description of Artificial Sequence: Synthetic oligonucleotide
  Antisense Strand to SEQ ID NO: 420309
aacauuaaucaacuuaggu

SEQ ID NO: 420311 - RNA, 19 nt, Artificial Sequence
  Description of Artificial Sequence: Synthetic oligonucleotide
  Sense Strand Starting at position 1294 of SEQ ID NO: 315764
guugauuaauguucuggaa

SEQ ID NO: 420312 - RNA, 19 nt, Artificial Sequence
  Description of Artificial Sequence: Synthetic oligonucleotide
  Antisense Strand to SEQ ID NO: 420311
uuccagaacauuaaucaac

SEQ ID NO: 420313 - RNA, 19 nt, Artificial Sequence
  Description of Artificial Sequence: Synthetic oligonucleotide
  Sense Strand Starting at position 1294 of SEQ ID NO: 315795
aguaauugccaucaaagac

SEQ ID NO: 420314 - RNA, 19 nt, Artificial Sequence
  Description of Artificial Sequence: Synthetic oligonucleotide
  Antisense Strand to SEQ ID NO: 420313
gucuuugauggcaauuacu

SEQ ID NO: 420315 - RNA, 19 nt, Artificial Sequence
  Description of Artificial Sequence: Synthetic oligonucleotide
  Sense Strand Starting at position 1294 of SEQ ID NO: 315974
agcgcuguuguuucugaaa

SEQ ID NO: 420316 - RNA, 19 nt, Artificial Sequence
  Description of Artificial Sequence: Synthetic oligonucleotide
  Antisense Strand to SEQ ID NO: 420315
uuucagaaacaacagcgcu

SEQ ID NO: 420317 - RNA, 19 nt, Artificial Sequence
  Description of Artificial Sequence: Synthetic oligonucleotide
  Sense Strand Starting at position 1294 of SEQ ID NO: 316273
caaguauugaugggagguu

SEQ ID NO: 420318 - RNA, 19 nt, Artificial Sequence
  Description of Artificial Sequence: Synthetic oligonucleotide
  Antisense Strand to SEQ ID NO: 420317
aaccucccaucaauacuug

SEQ ID NO: 420319 - RNA, 19 nt, Artificial Sequence
  Description of Artificial Sequence: Synthetic oligonucleotide
  Sense Strand Starting at position 1294 of SEQ ID NO: 316294
acaucugucugaucacacu

SEQ ID NO: 420320 - RNA, 19 nt, Artificial Sequence
  Description of Artificial Sequence: Synthetic oligonucleotide
  Antisense Strand to SEQ ID NO: 420319
agugugaucagacagaugu

SEQ ID NO: 420321 - RNA, 19 nt, Artificial Sequence
  Description of Artificial Sequence: Synthetic oligonucleotide
  Sense Strand Starting at position 1294 of SEQ ID NO: 316324
auggguggguggaauuaaa

SEQ ID NO: 420322 - RNA, 19 nt, Artificial Sequence
  Description of Artificial Sequence: Synthetic oligonucleotide
  Antisense Strand to SEQ ID NO: 420321
uuuaauuccacccacccau

SEQ ID NO: 420323 - RNA, 19 nt, Artificial Sequence
  Description of Artificial Sequence: Synthetic oligonucleotide
  Sense Strand Starting at position 1294 of SEQ ID NO: 316466
gcagcaaagcgaucguugu

SEQ ID NO: 420324 - RNA, 19 nt, Artificial Sequence
  Description of Artificial Sequence: Synthetic oligonucleotide
  Antisense Strand to SEQ ID NO: 420323
acaacgaucgcuuugcugc

SEQ ID NO: 420325 - RNA, 19 nt, Artificial Sequence
  Description of Artificial Sequence: Synthetic oligonucleotide
  Sense Strand Starting at position 1294 of SEQ ID NO: 316820
agaccaauauuagugguau

SEQ ID NO: 420326 - RNA, 19 nt, Artificial Sequence
  Description of Artificial Sequence: Synthetic oligonucleotide
  Antisense Strand to SEQ ID NO: 420325
auaccacuaauauuggucu

SEQ ID NO: 420327 - RNA, 19 nt, Artificial Sequence
  Description of Artificial Sequence: Synthetic oligonucleotide
  Sense Strand Starting at position 1294 of SEQ ID NO: 316860
ucuuucugccaggauauaa

SEQ ID NO: 420328 - RNA, 19 nt, Artificial Sequence
  Description of Artificial Sequence: Synthetic oligonucleotide
  Antisense Strand to SEQ ID NO: 420327
uuauauccuggcagaaaga

SEQ ID NO: 420329 - RNA, 19 nt, Artificial Sequence
  Description of Artificial Sequence: Synthetic oligonucleotide
  Sense Strand Starting at position 1294 of SEQ ID NO: 317078
uggugaggaugaguuugau

SEQ ID NO: 420330 - RNA, 19 nt, Artificial Sequence
  Description of Artificial Sequence: Synthetic oligonucleotide
  Antisense Strand to SEQ ID NO: 420329
aucaaacucauccucacca

SEQ ID NO: 420331 - RNA, 19 nt, Artificial Sequence
  Description of Artificial Sequence: Synthetic oligonucleotide
  Sense Strand Starting at position 1294 of SEQ ID NO: 317081
ugaggaugaguuugaucag

SEQ ID NO: 420332 - RNA, 19 nt, Artificial Sequence
  Description of Artificial Sequence: Synthetic oligonucleotide
  Antisense Strand to SEQ ID NO: 420331
cugaucaaacucauccuca

SEQ ID NO: 420333 - RNA, 19 nt, Artificial Sequence
  Description of Artificial Sequence: Synthetic oligonucleotide
  Sense Strand Starting at position 1294 of SEQ ID NO: 317084
ggaugaguuugaucaguug

SEQ ID NO: 420334 - RNA, 19 nt, Artificial Sequence
  Description of Artificial Sequence: Synthetic oligonucleotide
  Antisense Strand to SEQ ID NO: 420333
caacugaucaaacucaucc

SEQ ID NO: 420335 - RNA, 19 nt, Artificial Sequence
  Description of Artificial Sequence: Synthetic oligonucleotide
  Sense Strand Starting at position 1294 of SEQ ID NO: 317096
ucaguugacuuucuacaga

SEQ ID NO: 420336 - RNA, 19 nt, Artificial Sequence
  Description of Artificial Sequence: Synthetic oligonucleotide
  Antisense Strand to SEQ ID NO: 420335
ucuguagaaagucaacuga

SEQ ID NO: 420337 - RNA, 19 nt, Artificial Sequence
  Description of Artificial Sequence: Synthetic oligonucleotide
  Sense Strand Starting at position 1294 of SEQ ID NO: 317178
cuucuuauuccaugaaagg

SEQ ID NO: 420338 - RNA, 19 nt, Artificial Sequence
  Description of Artificial Sequence: Synthetic oligonucleotide
  Antisense Strand to SEQ ID NO: 420337
ccuuucauggaauaagaag

SEQ ID NO: 420339 - RNA, 19 nt, Artificial Sequence
  Description of Artificial Sequence: Synthetic oligonucleotide
  Sense Strand Starting at position 1294 of SEQ ID NO: 317179
uucuuauuccaugaaaggu

SEQ ID NO: 420340 - RNA, 19 nt, Artificial Sequence
  Description of Artificial Sequence: Synthetic oligonucleotide
  Antisense Strand to SEQ ID NO: 420339
accuuucauggaauaagaa

SEQ ID NO: 420341 - RNA, 19 nt, Artificial Sequence
  Description of Artificial Sequence: Synthetic oligonucleotide
  Sense Strand Starting at position 1294 of SEQ ID NO: 317337
ggaaacaugugccuagacu

SEQ ID NO: 420342 - RNA, 19 nt, Artificial Sequence
  Description of Artificial Sequence: Synthetic oligonucleotide
  Antisense Strand to SEQ ID NO: 420341
agucuaggcacauguuucc

SEQ ID NO: 420343 - RNA, 19 nt, Artificial Sequence
  Description of Artificial Sequence: Synthetic oligonucleotide
  Sense Strand Starting at position 1294 of SEQ ID NO: 317338
gaaacaugugccuagacua

SEQ ID NO: 420344 - RNA, 19 nt, Artificial Sequence
  Description of Artificial Sequence: Synthetic oligonucleotide
  Antisense Strand to SEQ ID NO: 420343
uagucuaggcacauguuuc

SEQ ID NO: 420345 - RNA, 19 nt, Artificial Sequence
  Description of Artificial Sequence: Synthetic oligonucleotide
  Sense Strand Starting at position 1294 of SEQ ID NO: 317343
augugccuagacuaauaga

SEQ ID NO: 420346 - RNA, 19 nt, Artificial Sequence
  Description of Artificial Sequence: Synthetic oligonucleotide
  Antisense Strand to SEQ ID NO: 420345
ucuauuagucuaggcacau

SEQ ID NO: 420347 - RNA, 19 nt, Artificial Sequence
  Description of Artificial Sequence: Synthetic oligonucleotide
  Sense Strand Starting at position 1294 of SEQ ID NO: 317354
cuaauagauccuggcuuaa

SEQ ID NO: 420348 - RNA, 19 nt, Artificial Sequence
  Description of Artificial Sequence: Synthetic oligonucleotide
  Antisense Strand to SEQ ID NO: 420347
uuaagccaggaucuauuag

SEQ ID NO: 420349 - RNA, 19 nt, Artificial Sequence
  Description of Artificial Sequence: Synthetic oligonucleotide
  Sense Strand Starting at position 1294 of SEQ ID NO: 317367
gcuuaaugaucuuuaaaug

SEQ ID NO: 420350 - RNA, 19 nt, Artificial Sequence
  Description of Artificial Sequence: Synthetic oligonucleotide
  Antisense Strand to SEQ ID NO: 420349
cauuuaaagaucauuaagc

SEQ ID NO: 420351 - RNA, 19 nt, Artificial Sequence
  Description of Artificial Sequence: Synthetic oligonucleotide
  Sense Strand Starting at position 1294 of SEQ ID NO: 317426
auuacuagguuucuccaga

SEQ ID NO: 420352 - RNA, 19 nt, Artificial Sequence
  Description of Artificial Sequence: Synthetic oligonucleotide
  Antisense Strand to SEQ ID NO: 420351
ucuggagaaaccuaguaau

SEQ ID NO: 420353 - RNA, 19 nt, Artificial Sequence
  Description of Artificial Sequence: Synthetic oligonucleotide
  Sense Strand Starting at position 1294 of SEQ ID NO: 317427
uuacuagguuucuccagaa

SEQ ID NO: 420354 - RNA, 19 nt, Artificial Sequence
  Description of Artificial Sequence: Synthetic oligonucleotide
  Antisense Strand to SEQ ID NO: 420353
uucuggagaaaccuaguaa

SEQ ID NO: 420355 - RNA, 19 nt, Artificial Sequence
  Description of Artificial Sequence: Synthetic oligonucleotide
  Sense Strand Starting at position 1294 of SEQ ID NO: 317828
ggagaauggcguuagauaa

SEQ ID NO: 420356 - RNA, 19 nt, Artificial Sequence
  Description of Artificial Sequence: Synthetic oligonucleotide
  Antisense Strand to SEQ ID NO: 420355
uuaucuaacgccauucucc

SEQ ID NO: 420357 - RNA, 19 nt, Artificial Sequence
  Description of Artificial Sequence: Synthetic oligonucleotide
  Sense Strand Starting at position 1294 of SEQ ID NO: 317947
ucuauuccaguugaaguaa

SEQ ID NO: 420358 - RNA, 19 nt, Artificial Sequence
  Description of Artificial Sequence: Synthetic oligonucleotide
  Antisense Strand to SEQ ID NO: 420357
uuacuucaacuggaauaga

SEQ ID NO: 420359 - RNA, 19 nt, Artificial Sequence
  Description of Artificial Sequence: Synthetic oligonucleotide
  Sense Strand Starting at position 1294 of SEQ ID NO: 318055
cccuucugggccuaauaaa

SEQ ID NO: 420360 - RNA, 19 nt, Artificial Sequence
  Description of Artificial Sequence: Synthetic oligonucleotide
  Antisense Strand to SEQ ID NO: 420359
uuuauuaggcccagaaggg

SEQ ID NO: 420361 - RNA, 19 nt, Artificial Sequence
  Description of Artificial Sequence: Synthetic oligonucleotide
  Sense Strand Starting at position 1294 of SEQ ID NO: 318333
cugaaugguuugccagaaa

SEQ ID NO: 420362 - RNA, 19 nt, Artificial Sequence
  Description of Artificial Sequence: Synthetic oligonucleotide
  Antisense Strand to SEQ ID NO: 420361
uuucuggcaaaccauucag

SEQ ID NO: 420363 - RNA, 19 nt, Artificial Sequence
  Description of Artificial Sequence: Synthetic oligonucleotide
  Sense Strand Starting at position 1294 of SEQ ID NO: 318891
uacuguuaggaguaaaggu

SEQ ID NO: 420364 - RNA, 19 nt, Artificial Sequence
  Description of Artificial Sequence: Synthetic oligonucleotide
  Antisense Strand to SEQ ID NO: 420363
accuuuacuccuaacagua

SEQ ID NO: 420365 - RNA, 19 nt, Artificial Sequence
  Description of Artificial Sequence: Synthetic oligonucleotide
  Sense Strand Starting at position 1294 of SEQ ID NO: 318901
aguaaagguccucagagca

SEQ ID NO: 420366 - RNA, 19 nt, Artificial Sequence
  Description of Artificial Sequence: Synthetic oligonucleotide
  Antisense Strand to SEQ ID NO: 420365
ugcucugaggaccuuuacu

SEQ ID NO: 420367 - RNA, 19 nt, Artificial Sequence
  Description of Artificial Sequence: Synthetic oligonucleotide
  Sense Strand Starting at position 1295 of SEQ ID NO: 315248
gcaguaauacgugcuggua

SEQ ID NO: 420368 - RNA, 19 nt, Artificial Sequence
  Description of Artificial Sequence: Synthetic oligonucleotide
  Antisense Strand to SEQ ID NO: 420367
uaccagcacguauuacugc

SEQ ID NO: 420369 - RNA, 19 nt, Artificial Sequence
  Description of Artificial Sequence: Synthetic oligonucleotide
  Sense Strand Starting at position 1295 of SEQ ID NO: 315665
uagcuuuauggaggaaaug

SEQ ID NO: 420370 - RNA, 19 nt, Artificial Sequence
  Description of Artificial Sequence: Synthetic oligonucleotide
  Antisense Strand to SEQ ID NO: 420369
cauuuccuccauaaagcua

SEQ ID NO: 420371 - RNA, 19 nt, Artificial Sequence
  Description of Artificial Sequence: Synthetic oligonucleotide
  Sense Strand Starting at position 1295 of SEQ ID NO: 315695
gcaccuuuaggauagcuaa

SEQ ID NO: 420372 - RNA, 19 nt, Artificial Sequence
  Description of Artificial Sequence: Synthetic oligonucleotide
  Antisense Strand to SEQ ID NO: 420371
uuagcuauccuaaaggugc

SEQ ID NO: 420373 - RNA, 19 nt, Artificial Sequence
  Description of Artificial Sequence: Synthetic oligonucleotide
  Sense Strand Starting at position 1295 of SEQ ID NO: 315698
ccuuuaggauagcuaagau

SEQ ID NO: 420374 - RNA, 19 nt, Artificial Sequence
  Description of Artificial Sequence: Synthetic oligonucleotide
  Antisense Strand to SEQ ID NO: 420373
aucuuagcuauccuaaagg

SEQ ID NO: 420375 - RNA, 19 nt, Artificial Sequence
  Description of Artificial Sequence: Synthetic oligonucleotide
  Sense Strand Starting at position 1295 of SEQ ID NO: 315928
ggugauaaaguguaaacga

SEQ ID NO: 420376 - RNA, 19 nt, Artificial Sequence
  Description of Artificial Sequence: Synthetic oligonucleotide
  Antisense Strand to SEQ ID NO: 420375
ucguuuacacuuuaucacc

SEQ ID NO: 420377 - RNA, 19 nt, Artificial Sequence
  Description of Artificial Sequence: Synthetic oligonucleotide
  Sense Strand Starting at position 1295 of SEQ ID NO: 315972
ugacauuugguggguguuu

SEQ ID NO: 420378 - RNA, 19 nt, Artificial Sequence
  Description of Artificial Sequence: Synthetic oligonucleotide
  Antisense Strand to SEQ ID NO: 420377
aaacacccaccaaauguca

SEQ ID NO: 420379 - RNA, 19 nt, Artificial Sequence
  Description of Artificial Sequence: Synthetic oligonucleotide
  Sense Strand Starting at position 1295 of SEQ ID NO: 316073
gauguuuagagaggaaagu

SEQ ID NO: 420380 - RNA, 19 nt, Artificial Sequence
  Description of Artificial Sequence: Synthetic oligonucleotide
  Antisense Strand to SEQ ID NO: 420379
acuuuccucucuaaacauc

SEQ ID NO: 420381 - RNA, 19 nt, Artificial Sequence
  Description of Artificial Sequence: Synthetic oligonucleotide
  Sense Strand Starting at position 1295 of SEQ ID NO: 316122
uugccaagucaggauugaa

SEQ ID NO: 420382 - RNA, 19 nt, Artificial Sequence
  Description of Artificial Sequence: Synthetic oligonucleotide
  Antisense Strand to SEQ ID NO: 420381
uucaauccugacuuggcaa

SEQ ID NO: 420383 - RNA, 19 nt, Artificial Sequence
  Description of Artificial Sequence: Synthetic oligonucleotide
  Sense Strand Starting at position 1295 of SEQ ID NO: 316146
cuggucucccaggauaguu

SEQ ID NO: 420384 - RNA, 19 nt, Artificial Sequence
  Description of Artificial Sequence: Synthetic oligonucleotide
  Antisense Strand to SEQ ID NO: 420383
aacuauccugggagaccag

SEQ ID NO: 420385 - RNA, 19 nt, Artificial Sequence
  Description of Artificial Sequence: Synthetic oligonucleotide
  Sense Strand Starting at position 1295 of SEQ ID NO: 316439
cugugugcacguguacaua

SEQ ID NO: 420386 - RNA, 19 nt, Artificial Sequence
  Description of Artificial Sequence: Synthetic oligonucleotide
  Antisense Strand to SEQ ID NO: 420385
uauguacacgugcacacag

SEQ ID NO: 420387 - RNA, 19 nt, Artificial Sequence
  Description of Artificial Sequence: Synthetic oligonucleotide
  Sense Strand Starting at position 1295 of SEQ ID NO: 316637
aaguaucaugcccaagguu

SEQ ID NO: 420388 - RNA, 19 nt, Artificial Sequence
  Description of Artificial Sequence: Synthetic oligonucleotide
  Antisense Strand to SEQ ID NO: 420387
aaccuugggcaugauacuu

SEQ ID NO: 420389 - RNA, 19 nt, Artificial Sequence
  Description of Artificial Sequence: Synthetic oligonucleotide
  Sense Strand Starting at position 1295 of SEQ ID NO: 316851
cagguauuugcuggcgaau

SEQ ID NO: 420390 - RNA, 19 nt, Artificial Sequence
  Description of Artificial Sequence: Synthetic oligonucleotide
  Antisense Strand to SEQ ID NO: 420389
auucgccagcaaauaccug

SEQ ID NO: 420391 - RNA, 19 nt, Artificial Sequence
  Description of Artificial Sequence: Synthetic oligonucleotide
  Sense Strand Starting at position 1295 of SEQ ID NO: 317230
uguuuccugaggugaaaca

SEQ ID NO: 420392 - RNA, 19 nt, Artificial Sequence
  Description of Artificial Sequence: Synthetic oligonucleotide
  Antisense Strand to SEQ ID NO: 420391
uguuucaccucaggaaaca

SEQ ID NO: 420393 - RNA, 19 nt, Artificial Sequence
  Description of Artificial Sequence: Synthetic oligonucleotide
  Sense Strand Starting at position 1295 of SEQ ID NO: 317495
uuuggaaacacugaguguu

SEQ ID NO: 420394 - RNA, 19 nt, Artificial Sequence
  Description of Artificial Sequence: Synthetic oligonucleotide
  Antisense Strand to SEQ ID NO: 420393
aacacucaguguuuccaaa

SEQ ID NO: 420395 - RNA, 19 nt, Artificial Sequence
  Description of Artificial Sequence: Synthetic oligonucleotide
  Sense Strand Starting at position 1295 of SEQ ID NO: 317572
auuguugaaaguugaagua

SEQ ID NO: 420396 - RNA, 19 nt, Artificial Sequence
  Description of Artificial Sequence: Synthetic oligonucleotide
  Antisense Strand to SEQ ID NO: 420395
uacuucaacuuucaacaau

SEQ ID NO: 420397 - RNA, 19 nt, Artificial Sequence
  Description of Artificial Sequence: Synthetic oligonucleotide
  Sense Strand Starting at position 1295 of SEQ ID NO: 317645
uuucguuauuugcugggaa

SEQ ID NO: 420398 - RNA, 19 nt, Artificial Sequence
  Description of Artificial Sequence: Synthetic oligonucleotide
  Antisense Strand to SEQ ID NO: 420397
uucccagcaaauaacgaaa

SEQ ID NO: 420399 - RNA, 19 nt, Artificial Sequence
  Description of Artificial Sequence: Synthetic oligonucleotide
  Sense Strand Starting at position 1295 of SEQ ID NO: 317688
ccagaaauauuggauuugu

SEQ ID NO: 420400 - RNA, 19 nt, Artificial Sequence
  Description of Artificial Sequence: Synthetic oligonucleotide
  Antisense Strand to SEQ ID NO: 420399
acaaauccaauauuucugg

SEQ ID NO: 420401 - RNA, 19 nt, Artificial Sequence
  Description of Artificial Sequence: Synthetic oligonucleotide
  Sense Strand Starting at position 1295 of SEQ ID NO: 317760
cugacacuccgauggagaa

SEQ ID NO: 420402 - RNA, 19 nt, Artificial Sequence
  Description of Artificial Sequence: Synthetic oligonucleotide
  Antisense Strand to SEQ ID NO: 420401
uucuccaucggagugucag

SEQ ID NO: 420403 - RNA, 19 nt, Artificial Sequence
  Description of Artificial Sequence: Synthetic oligonucleotide
  Sense Strand Starting at position 1295 of SEQ ID NO: 317884
gugguagaucuauagcuau

SEQ ID NO: 420404 - RNA, 19 nt, Artificial Sequence
  Description of Artificial Sequence: Synthetic oligonucleotide
  Antisense Strand to SEQ ID NO: 420403
auagcuauagaucuaccac

SEQ ID NO: 420405 - RNA, 19 nt, Artificial Sequence
  Description of Artificial Sequence: Synthetic oligonucleotide
  Sense Strand Starting at position 1295 of SEQ ID NO: 317938
agcuauccugcagauaauc

SEQ ID NO: 420406 - RNA, 19 nt, Artificial Sequence
  Description of Artificial Sequence: Synthetic oligonucleotide
  Antisense Strand to SEQ ID NO: 420405
gauuaucugcaggauagcu

SEQ ID NO: 420407 - RNA, 19 nt, Artificial Sequence
  Description of Artificial Sequence: Synthetic oligonucleotide
  Sense Strand Starting at position 1295 of SEQ ID NO: 318011
acaguuaaaccaggucaua

SEQ ID NO: 420408 - RNA, 19 nt, Artificial Sequence
  Description of Artificial Sequence: Synthetic oligonucleotide
  Antisense Strand to SEQ ID NO: 420407
uaugaccugguuuaacugu

SEQ ID NO: 420409 - RNA, 19 nt, Artificial Sequence
  Description of Artificial Sequence: Synthetic oligonucleotide
  Sense Strand Starting at position 1295 of SEQ ID NO: 318025
ucauauguuccaggagaac

SEQ ID NO: 420410 - RNA, 19 nt, Artificial Sequence
  Description of Artificial Sequence: Synthetic oligonucleotide
  Antisense Strand to SEQ ID NO: 420409
guucuccuggaacauauga

SEQ ID NO: 420411 - RNA, 19 nt, Artificial Sequence
  Description of Artificial Sequence: Synthetic oligonucleotide
  Sense Strand Starting at position 1295 of SEQ ID NO: 318037
ggagaacgaccucguaaau

SEQ ID NO: 420412 - RNA, 19 nt, Artificial Sequence
  Description of Artificial Sequence: Synthetic oligonucleotide
  Antisense Strand to SEQ ID NO: 420411
auuuacgaggucguucucc

SEQ ID NO: 420413 - RNA, 19 nt, Artificial Sequence
  Description of Artificial Sequence: Synthetic oligonucleotide
  Sense Strand Starting at position 1295 of SEQ ID NO: 318049
cguaaaucugccuagacag

SEQ ID NO: 420414 - RNA, 19 nt, Artificial Sequence
  Description of Artificial Sequence: Synthetic oligonucleotide
  Antisense Strand to SEQ ID NO: 420413
cugucuaggcagauuuacg

SEQ ID NO: 420415 - RNA, 19 nt, Artificial Sequence
  Description of Artificial Sequence: Synthetic oligonucleotide
  Sense Strand Starting at position 1295 of SEQ ID NO: 318063
gacaguuggugaucaauca

SEQ ID NO: 420416 - RNA, 19 nt, Artificial Sequence
  Description of Artificial Sequence: Synthetic oligonucleotide
  Antisense Strand to SEQ ID NO: 420415
ugauugaucaccaacuguc

SEQ ID NO: 420417 - RNA, 19 nt, Artificial Sequence
  Description of Artificial Sequence: Synthetic oligonucleotide
  Sense Strand Starting at position 1295 of SEQ ID NO: 318064
acaguuggugaucaaucau

SEQ ID NO: 420418 - RNA, 19 nt, Artificial Sequence
  Description of Artificial Sequence: Synthetic oligonucleotide
  Antisense Strand to SEQ ID NO: 420417
augauugaucaccaacugu

SEQ ID NO: 420419 - RNA, 19 nt, Artificial Sequence
  Description of Artificial Sequence: Synthetic oligonucleotide
  Sense Strand Starting at position 1295 of SEQ ID NO: 318379
gugauaagaguaugggaau

SEQ ID NO: 420420 - RNA, 19 nt, Artificial Sequence
  Description of Artificial Sequence: Synthetic oligonucleotide
  Antisense Strand to SEQ ID NO: 420419
auucccauacucuuaucac

SEQ ID NO: 420421 - RNA, 19 nt, Artificial Sequence
  Description of Artificial Sequence: Synthetic oligonucleotide
  Sense Strand Starting at position 1295 of SEQ ID NO: 318488
uccuuugcuccugaggauu

SEQ ID NO: 420422 - RNA, 19 nt, Artificial Sequence
  Description of Artificial Sequence: Synthetic oligonucleotide
  Antisense Strand to SEQ ID NO: 420421
aauccucaggagcaaagga

SEQ ID NO: 420423 - RNA, 19 nt, Artificial Sequence
  Description of Artificial Sequence: Synthetic oligonucleotide
  Sense Strand Starting at position 1295 of SEQ ID NO: 318520
uugggagguuuaaggagau

SEQ ID NO: 420424 - RNA, 19 nt, Artificial Sequence
  Description of Artificial Sequence: Synthetic oligonucleotide
  Antisense Strand to SEQ ID NO: 420423
aucuccuuaaaccucccaa

SEQ ID NO: 420425 - RNA, 19 nt, Artificial Sequence
  Description of Artificial Sequence: Synthetic oligonucleotide
  Sense Strand Starting at position 1295 of SEQ ID NO: 318594
gcaaucauauccuuaagag

SEQ ID NO: 420426 - RNA, 19 nt, Artificial Sequence
  Description of Artificial Sequence: Synthetic oligonucleotide
  Antisense Strand to SEQ ID NO: 420425
cucuuaaggauaugauugc

SEQ ID NO: 420427 - RNA, 19 nt, Artificial Sequence
  Description of Artificial Sequence: Synthetic oligonucleotide
  Sense Strand Starting at position 1295 of SEQ ID NO: 318609
agaguacuauuauuccuau

SEQ ID NO: 420428 - RNA, 19 nt, Artificial Sequence
  Description of Artificial Sequence: Synthetic oligonucleotide
  Antisense Strand to SEQ ID NO: 420427
auaggaauaauaguacucu

SEQ ID NO: 420429 - RNA, 19 nt, Artificial Sequence
  Description of Artificial Sequence: Synthetic oligonucleotide
  Sense Strand Starting at position 1295 of SEQ ID NO: 318612
guacuauuauuccuauaga

SEQ ID NO: 420430 - RNA, 19 nt, Artificial Sequence
  Description of Artificial Sequence: Synthetic oligonucleotide
  Antisense Strand to SEQ ID NO: 420429
ucuauaggaauaauaguac

SEQ ID NO: 420431 - RNA, 19 nt, Artificial Sequence
  Description of Artificial Sequence: Synthetic oligonucleotide
  Sense Strand Starting at position 1295 of SEQ ID NO: 318733
guuuccauuugagccauau

SEQ ID NO: 420432 - RNA, 19 nt, Artificial Sequence
  Description of Artificial Sequence: Synthetic oligonucleotide
  Antisense Strand to SEQ ID NO: 420431
auauggcucaaauggaaac

SEQ ID NO: 420433 - RNA, 19 nt, Artificial Sequence
  Description of Artificial Sequence: Synthetic oligonucleotide
  Sense Strand Starting at position 1295 of SEQ ID NO: 318872
ucuuguuuccuggagagau

SEQ ID NO: 420434 - RNA, 19 nt, Artificial Sequence
  Description of Artificial Sequence: Synthetic oligonucleotide
  Antisense Strand to SEQ ID NO: 420433
aucucuccaggaaacaaga

SEQ ID NO: 420435 - RNA, 19 nt, Artificial Sequence
  Description of Artificial Sequence: Synthetic oligonucleotide
  Sense Strand Starting at position 1295 of SEQ ID NO: 318876
guuuccuggagagauaguu

SEQ ID NO: 420436 - RNA, 19 nt, Artificial Sequence
  Description of Artificial Sequence: Synthetic oligonucleotide
  Antisense Strand to SEQ ID NO: 420435
aacuaucucuccaggaaac

SEQ ID NO: 420437 - RNA, 19 nt, Artificial Sequence
  Description of Artificial Sequence: Synthetic oligonucleotide
  Sense Strand Starting at position 1295 of SEQ ID NO: 319033
gcacuccuucccguguuua

SEQ ID NO: 420438 - RNA, 19 nt, Artificial Sequence
  Description of Artificial Sequence: Synthetic oligonucleotide
  Antisense Strand to SEQ ID NO: 420437
uaaacacgggaaggagugc

SEQ ID NO: 420439 - RNA, 19 nt, Artificial Sequence
  Description of Artificial Sequence: Synthetic oligonucleotide
  Sense Strand Starting at position 1295 of SEQ ID NO: 319045
guguuuauuagugagaaag

SEQ ID NO: 420440 - RNA, 19 nt, Artificial Sequence
  Description of Artificial Sequence: Synthetic oligonucleotide
  Antisense Strand to SEQ ID NO: 420439
cuuucucacuaauaaacac

SEQ ID NO: 420441 - RNA, 19 nt, Artificial Sequence
  Description of Artificial Sequence: Synthetic oligonucleotide
  Sense Strand Starting at position 1295 of SEQ ID NO: 319139
acauuaguggcuuacucua

SEQ ID NO: 420442 - RNA, 19 nt, Artificial Sequence
  Description of Artificial Sequence: Synthetic oligonucleotide
  Antisense Strand to SEQ ID NO: 420441
uagaguaagccacuaaugu

SEQ ID NO: 420443 - RNA, 19 nt, Artificial Sequence
  Description of Artificial Sequence: Synthetic oligonucleotide
  Sense Strand Starting at position 1295 of SEQ ID NO: 319201
ggaggacuuaaucgccaca

SEQ ID NO: 420444 - RNA, 19 nt, Artificial Sequence
  Description of Artificial Sequence: Synthetic oligonucleotide
  Antisense Strand to SEQ ID NO: 420443
uguggcgauuaaguccucc

SEQ ID NO: 420445 - RNA, 19 nt, Artificial Sequence
  Description of Artificial Sequence: Synthetic oligonucleotide
  Sense Strand Starting at position 1295 of SEQ ID NO: 319204
ggacuuaaucgccacacua

SEQ ID NO: 420446 - RNA, 19 nt, Artificial Sequence
  Description of Artificial Sequence: Synthetic oligonucleotide
  Antisense Strand to SEQ ID NO: 420445
uaguguggcgauuaagucc

SEQ ID NO: 420447 - RNA, 19 nt, Artificial Sequence
  Description of Artificial Sequence: Synthetic oligonucleotide
  Sense Strand Starting at position 1296 of SEQ ID NO: 315294
cuucuacuaguuuguuauu

SEQ ID NO: 420448 - RNA, 19 nt, Artificial Sequence
  Description of Artificial Sequence: Synthetic oligonucleotide
  Antisense Strand to SEQ ID NO: 420447
aauaacaaacuaguagaag

SEQ ID NO: 420449 - RNA, 19 nt, Artificial Sequence
  Description of Artificial Sequence: Synthetic oligonucleotide
  Sense Strand Starting at position 1296 of SEQ ID NO: 315322
aggaaaguaucuuucugaa

SEQ ID NO: 420450 - RNA, 19 nt, Artificial Sequence
  Description of Artificial Sequence: Synthetic oligonucleotide
  Antisense Strand to SEQ ID NO: 420449
uucagaaagauacuuuccu

SEQ ID NO: 420451 - RNA, 19 nt, Artificial Sequence
  Description of Artificial Sequence: Synthetic oligonucleotide
  Sense Strand Starting at position 1296 of SEQ ID NO: 315388
auugaagaccucuguaaua

SEQ ID NO: 420452 - RNA, 19 nt, Artificial Sequence
  Description of Artificial Sequence: Synthetic oligonucleotide
  Antisense Strand to SEQ ID NO: 420451
uauuacagaggucuucaau

SEQ ID NO: 420453 - RNA, 19 nt, Artificial Sequence
  Description of Artificial Sequence: Synthetic oligonucleotide
  Sense Strand Starting at position 1296 of SEQ ID NO: 315511
gguacuauuuagcagauga

SEQ ID NO: 420454 - RNA, 19 nt, Artificial Sequence
  Description of Artificial Sequence: Synthetic oligonucleotide
  Antisense Strand to SEQ ID NO: 420453
ucaucugcuaaauaguacc

SEQ ID NO: 420455 - RNA, 19 nt, Artificial Sequence
  Description of Artificial Sequence: Synthetic oligonucleotide
  Sense Strand Starting at position 1296 of SEQ ID NO: 315546
cuuccagaauuagcugaau

SEQ ID NO: 420456 - RNA, 19 nt, Artificial Sequence
  Description of Artificial Sequence: Synthetic oligonucleotide
  Antisense Strand to SEQ ID NO: 420455
auucagcuaauucuggaag

SEQ ID NO: 420457 - RNA, 19 nt, Artificial Sequence
  Description of Artificial Sequence: Synthetic oligonucleotide
  Sense Strand Starting at position 1296 of SEQ ID NO: 315610
agaguagcacuguaauucu

SEQ ID NO: 420458 - RNA, 19 nt, Artificial Sequence
  Description of Artificial Sequence: Synthetic oligonucleotide
  Antisense Strand to SEQ ID NO: 420457
agaauuacagugcuacucu

SEQ ID NO: 420459 - RNA, 19 nt, Artificial Sequence
  Description of Artificial Sequence: Synthetic oligonucleotide
  Sense Strand Starting at position 1296 of SEQ ID NO: 315693
cuaagaagguuugcaauaa

SEQ ID NO: 420460 - RNA, 19 nt, Artificial Sequence
  Description of Artificial Sequence: Synthetic oligonucleotide
  Antisense Strand to SEQ ID NO: 420459
uuauugcaaaccuucuuag

SEQ ID NO: 420461 - RNA, 19 nt, Artificial Sequence
  Description of Artificial Sequence: Synthetic oligonucleotide
  Sense Strand Starting at position 1296 of SEQ ID NO: 315752
auauucuauggaugguaau

SEQ ID NO: 420462 - RNA, 19 nt, Artificial Sequence
  Description of Artificial Sequence: Synthetic oligonucleotide
  Antisense Strand to SEQ ID NO: 420461
auuaccauccauagaauau

SEQ ID NO: 420463 - RNA, 19 nt, Artificial Sequence
  Description of Artificial Sequence: Synthetic oligonucleotide
  Sense Strand Starting at position 1296 of SEQ ID NO: 315753
uauucuauggaugguaauu

SEQ ID NO: 420464 - RNA, 19 nt, Artificial Sequence
  Description of Artificial Sequence: Synthetic oligonucleotide
  Antisense Strand to SEQ ID NO: 420463
aauuaccauccauagaaua

SEQ ID NO: 420465 - RNA, 19 nt, Artificial Sequence
  Description of Artificial Sequence: Synthetic oligonucleotide
  Sense Strand Starting at position 1296 of SEQ ID NO: 315897
cuaacuaagccuuggcaca

SEQ ID NO: 420466 - RNA, 19 nt, Artificial Sequence
  Description of Artificial Sequence: Synthetic oligonucleotide
  Antisense Strand to SEQ ID NO: 420465
ugugccaaggcuuaguuag

SEQ ID NO: 420467 - RNA, 19 nt, Artificial Sequence
  Description of Artificial Sequence: Synthetic oligonucleotide
  Sense Strand Starting at position 1296 of SEQ ID NO: 315922
guuguauccagagaguaau

SEQ ID NO: 420468 - RNA, 19 nt, Artificial Sequence
  Description of Artificial Sequence: Synthetic oligonucleotide
  Antisense Strand to SEQ ID NO: 420467
auuacucucuggauacaac

SEQ ID NO: 420469 - RNA, 19 nt, Artificial Sequence
  Description of Artificial Sequence: Synthetic oligonucleotide
  Sense Strand Starting at position 1296 of SEQ ID NO: 316040
ucaguuacucuuggaagag

SEQ ID NO: 420470 - RNA, 19 nt, Artificial Sequence
  Description of Artificial Sequence: Synthetic oligonucleotide
  Antisense Strand to SEQ ID NO: 420469
cucuuccaagaguaacuga

SEQ ID NO: 420471 - RNA, 19 nt, Artificial Sequence
  Description of Artificial Sequence: Synthetic oligonucleotide
  Sense Strand Starting at position 1296 of SEQ ID NO: 316139
ugugcuuugcuggaauuaa

SEQ ID NO: 420472 - RNA, 19 nt, Artificial Sequence
  Description of Artificial Sequence: Synthetic oligonucleotide
  Antisense Strand to SEQ ID NO: 420471
uuaauuccagcaaagcaca

SEQ ID NO: 420473 - RNA, 19 nt, Artificial Sequence
  Description of Artificial Sequence: Synthetic oligonucleotide
  Sense Strand Starting at position 1296 of SEQ ID NO: 316166
ugaagaaccuuggaaucca

SEQ ID NO: 420474 - RNA, 19 nt, Artificial Sequence
  Description of Artificial Sequence: Synthetic oligonucleotide
  Antisense Strand to SEQ ID NO: 420473
uggauuccaagguucuuca

SEQ ID NO: 420475 - RNA, 19 nt, Artificial Sequence
  Description of Artificial Sequence: Synthetic oligonucleotide
  Sense Strand Starting at position 1296 of SEQ ID NO: 316199
gucacagucaccgggagaa

SEQ ID NO: 420476 - RNA, 19 nt, Artificial Sequence
  Description of Artificial Sequence: Synthetic oligonucleotide
  Antisense Strand to SEQ ID NO: 420475
uucucccggugacugugac

SEQ ID NO: 420477 - RNA, 19 nt, Artificial Sequence
  Description of Artificial Sequence: Synthetic oligonucleotide
  Sense Strand Starting at position 1296 of SEQ ID NO: 316245
cccgauagacauuaugcua

SEQ ID NO: 420478 - RNA, 19 nt, Artificial Sequence
  Description of Artificial Sequence: Synthetic oligonucleotide
  Antisense Strand to SEQ ID NO: 420477
uagcauaaugucuaucggg

SEQ ID NO: 420479 - RNA, 19 nt, Artificial Sequence
  Description of Artificial Sequence: Synthetic oligonucleotide
  Sense Strand Starting at position 1296 of SEQ ID NO: 316252
gacauuaugcuagaccagu

SEQ ID NO: 420480 - RNA, 19 nt, Artificial Sequence
  Description of Artificial Sequence: Synthetic oligonucleotide
  Antisense Strand to SEQ ID NO: 420479
acuggucuagcauaauguc

SEQ ID NO: 420481 - RNA, 19 nt, Artificial Sequence
  Description of Artificial Sequence: Synthetic oligonucleotide
  Sense Strand Starting at position 1296 of SEQ ID NO: 316403
guugguugaaaggaaguuu

SEQ ID NO: 420482 - RNA, 19 nt, Artificial Sequence
  Description of Artificial Sequence: Synthetic oligonucleotide
  Antisense Strand to SEQ ID NO: 420481
aaacuuccuuucaaccaac

SEQ ID NO: 420483 - RNA, 19 nt, Artificial Sequence
  Description of Artificial Sequence: Synthetic oligonucleotide
  Sense Strand Starting at position 1296 of SEQ ID NO: 316412
aaggaaguuuacucacaug

SEQ ID NO: 420484 - RNA, 19 nt, Artificial Sequence
  Description of Artificial Sequence: Synthetic oligonucleotide
  Antisense Strand to SEQ ID NO: 420483
caugugaguaaacuuccuu

SEQ ID NO: 420485 - RNA, 19 nt, Artificial Sequence
  Description of Artificial Sequence: Synthetic oligonucleotide
  Sense Strand Starting at position 1296 of SEQ ID NO: 316438
gauagaugcccuuggugag

SEQ ID NO: 420486 - RNA, 19 nt, Artificial Sequence
  Description of Artificial Sequence: Synthetic oligonucleotide
  Antisense Strand to SEQ ID NO: 420485
cucaccaagggcaucuauc

SEQ ID NO: 420487 - RNA, 19 nt, Artificial Sequence
  Description of Artificial Sequence: Synthetic oligonucleotide
  Sense Strand Starting at position 1296 of SEQ ID NO: 316448
cuuggugagcuucagagaa

SEQ ID NO: 420488 - RNA, 19 nt, Artificial Sequence
  Description of Artificial Sequence: Synthetic oligonucleotide
  Antisense Strand to SEQ ID NO: 420487
uucucugaagcucaccaag

SEQ ID NO: 420489 - RNA, 19 nt, Artificial Sequence
  Description of Artificial Sequence: Synthetic oligonucleotide
  Sense Strand Starting at position 1296 of SEQ ID NO: 316602
auggcuuucugcucaagga

SEQ ID NO: 420490 - RNA, 19 nt, Artificial Sequence
  Description of Artificial Sequence: Synthetic oligonucleotide
  Antisense Strand to SEQ ID NO: 420489
uccuugagcagaaagccau

SEQ ID NO: 420491 - RNA, 19 nt, Artificial Sequence
  Description of Artificial Sequence: Synthetic oligonucleotide
  Sense Strand Starting at position 1296 of SEQ ID NO: 317482
gcggauuggagcgaaguuu

SEQ ID NO: 420492 - RNA, 19 nt, Artificial Sequence
  Description of Artificial Sequence: Synthetic oligonucleotide
  Antisense Strand to SEQ ID NO: 420491
aaacuucgcuccaauccgc

SEQ ID NO: 420493 - RNA, 19 nt, Artificial Sequence
  Description of Artificial Sequence: Synthetic oligonucleotide
  Sense Strand Starting at position 1296 of SEQ ID NO: 317626
ucccuacuccaaggagauu

SEQ ID NO: 420494 - RNA, 19 nt, Artificial Sequence
  Description of Artificial Sequence: Synthetic oligonucleotide
  Antisense Strand to SEQ ID NO: 420493
aaucuccuuggaguaggga

SEQ ID NO: 420495 - RNA, 19 nt, Artificial Sequence
  Description of Artificial Sequence: Synthetic oligonucleotide
  Sense Strand Starting at position 1296 of SEQ ID NO: 317766
aguuaacaucucugcaagu

SEQ ID NO: 420496 - RNA, 19 nt, Artificial Sequence
  Description of Artificial Sequence: Synthetic oligonucleotide
  Antisense Strand to SEQ ID NO: 420495
acuugcagagauguuaacu

SEQ ID NO: 420497 - RNA, 19 nt, Artificial Sequence
  Description of Artificial Sequence: Synthetic oligonucleotide
  Sense Strand Starting at position 1296 of SEQ ID NO: 317794
ccaagaaugcaacacaguu

SEQ ID NO: 420498 - RNA, 19 nt, Artificial Sequence
  Description of Artificial Sequence: Synthetic oligonucleotide
  Antisense Strand to SEQ ID NO: 420497
aacuguguugcauucuugg

SEQ ID NO: 420499 - RNA, 19 nt, Artificial Sequence
  Description of Artificial Sequence: Synthetic oligonucleotide
  Sense Strand Starting at position 1296 of SEQ ID NO: 317863
cugugagacguccaccauu

SEQ ID NO: 420500 - RNA, 19 nt, Artificial Sequence
  Description of Artificial Sequence: Synthetic oligonucleotide
  Antisense Strand to SEQ ID NO: 420499
aaugguggacgucucacag

SEQ ID NO: 420501 - RNA, 19 nt, Artificial Sequence
  Description of Artificial Sequence: Synthetic oligonucleotide
  Sense Strand Starting at position 1296 of SEQ ID NO: 317913
aauaaaggguaguugauua

SEQ ID NO: 420502 - RNA, 19 nt, Artificial Sequence
  Description of Artificial Sequence: Synthetic oligonucleotide
  Antisense Strand to SEQ ID NO: 420501
uaaucaacuacccuuuauu

SEQ ID NO: 420503 - RNA, 19 nt, Artificial Sequence
  Description of Artificial Sequence: Synthetic oligonucleotide
  Sense Strand Starting at position 1296 of SEQ ID NO: 317949
agguuuaucucuuugcaau

SEQ ID NO: 420504 - RNA, 19 nt, Artificial Sequence
  Description of Artificial Sequence: Synthetic oligonucleotide
  Antisense Strand to SEQ ID NO: 420503
auugcaaagagauaaaccu

SEQ ID NO: 420505 - RNA, 19 nt, Artificial Sequence
  Description of Artificial Sequence: Synthetic oligonucleotide
  Sense Strand Starting at position 1296 of SEQ ID NO: 318006
gugagaauauacuuguauu

SEQ ID NO: 420506 - RNA, 19 nt, Artificial Sequence
  Description of Artificial Sequence: Synthetic oligonucleotide
  Antisense Strand to SEQ ID NO: 420505
aauacaaguauauucucac

SEQ ID NO: 420507 - RNA, 19 nt, Artificial Sequence
  Description of Artificial Sequence: Synthetic oligonucleotide
  Sense Strand Starting at position 1296 of SEQ ID NO: 318012
auauacuuguauucugaca

SEQ ID NO: 420508 - RNA, 19 nt, Artificial Sequence
  Description of Artificial Sequence: Synthetic oligonucleotide
  Antisense Strand to SEQ ID NO: 420507
ugucagaauacaaguauau

SEQ ID NO: 420509 - RNA, 19 nt, Artificial Sequence
  Description of Artificial Sequence: Synthetic oligonucleotide
  Sense Strand Starting at position 1296 of SEQ ID NO: 318500
agucaaaugcacuaauguu

SEQ ID NO: 420510 - RNA, 19 nt, Artificial Sequence
  Description of Artificial Sequence: Synthetic oligonucleotide
  Antisense Strand to SEQ ID NO: 420509
aacauuagugcauuugacu

SEQ ID NO: 420511 - RNA, 19 nt, Artificial Sequence
  Description of Artificial Sequence: Synthetic oligonucleotide
  Sense Strand Starting at position 1296 of SEQ ID NO: 318569
cccacaauauggcuguauu

SEQ ID NO: 420512 - RNA, 19 nt, Artificial Sequence
  Description of Artificial Sequence: Synthetic oligonucleotide
  Antisense Strand to SEQ ID NO: 420511
aauacagccauauuguggg

SEQ ID NO: 420513 - RNA, 19 nt, Artificial Sequence
  Description of Artificial Sequence: Synthetic oligonucleotide
  Sense Strand Starting at position 1296 of SEQ ID NO: 318634
aagguugggcccuaaucua

SEQ ID NO: 420514 - RNA, 19 nt, Artificial Sequence
  Description of Artificial Sequence: Synthetic oligonucleotide
  Antisense Strand to SEQ ID NO: 420513
uagauuagggcccaaccuu

SEQ ID NO: 420515 - RNA, 19 nt, Artificial Sequence
  Description of Artificial Sequence: Synthetic oligonucleotide
  Sense Strand Starting at position 1296 of SEQ ID NO: 318655
aggacuagguuccuuauaa

SEQ ID NO: 420516 - RNA, 19 nt, Artificial Sequence
  Description of Artificial Sequence: Synthetic oligonucleotide
  Antisense Strand to SEQ ID NO: 420515
uuauaaggaaccuaguccu

SEQ ID NO: 420517 - RNA, 19 nt, Artificial Sequence
  Description of Artificial Sequence: Synthetic oligonucleotide
  Sense Strand Starting at position 1296 of SEQ ID NO: 318656
ggacuagguuccuuauaag

SEQ ID NO: 420518 - RNA, 19 nt, Artificial Sequence
  Description of Artificial Sequence: Synthetic oligonucleotide
  Antisense Strand to SEQ ID NO: 420517
cuuauaaggaaccuagucc

SEQ ID NO: 420519 - RNA, 19 nt, Artificial Sequence
  Description of Artificial Sequence: Synthetic oligonucleotide
  Sense Strand Starting at position 1296 of SEQ ID NO: 318760
aagucauagugaguuaccu

SEQ ID NO: 420520 - RNA, 19 nt, Artificial Sequence
  Description of Artificial Sequence: Synthetic oligonucleotide
  Antisense Strand to SEQ ID NO: 420519
agguaacucacuaugacuu

SEQ ID NO: 420521 - RNA, 19 nt, Artificial Sequence
  Description of Artificial Sequence: Synthetic oligonucleotide
  Sense Strand Starting at position 1296 of SEQ ID NO: 318762
gucauagugaguuaccuac

SEQ ID NO: 420522 - RNA, 19 nt, Artificial Sequence
  Description of Artificial Sequence: Synthetic oligonucleotide
  Antisense Strand to SEQ ID NO: 420521
guagguaacucacuaugac

SEQ ID NO: 420523 - RNA, 19 nt, Artificial Sequence
  Description of Artificial Sequence: Synthetic oligonucleotide
  Sense Strand Starting at position 1296 of SEQ ID NO: 318768
gugaguuaccuacaagcca

SEQ ID NO: 420524 - RNA, 19 nt, Artificial Sequence
  Description of Artificial Sequence: Synthetic oligonucleotide
  Antisense Strand to SEQ ID NO: 420523
uggcuuguagguaacucac

SEQ ID NO: 420525 - RNA, 19 nt, Artificial Sequence
  Description of Artificial Sequence: Synthetic oligonucleotide
  Sense Strand Starting at position 1296 of SEQ ID NO: 318834
gugcuucuauccuccagaa

SEQ ID NO: 420526 - RNA, 19 nt, Artificial Sequence
  Description of Artificial Sequence: Synthetic oligonucleotide
  Antisense Strand to SEQ ID NO: 420525
uucuggaggauagaagcac

SEQ ID NO: 420527 - RNA, 19 nt, Artificial Sequence
  Description of Artificial Sequence: Synthetic oligonucleotide
  Sense Strand Starting at position 1297 of SEQ ID NO: 315309
cccugacuacaauguguga

SEQ ID NO: 420528 - RNA, 19 nt, Artificial Sequence
  Description of Artificial Sequence: Synthetic oligonucleotide
  Antisense Strand to SEQ ID NO: 420527
ucacacauuguagucaggg

SEQ ID NO: 420529 - RNA, 19 nt, Artificial Sequence
  Description of Artificial Sequence: Synthetic oligonucleotide
  Sense Strand Starting at position 1297 of SEQ ID NO: 315313
gacuacaaugugugaaugu

SEQ ID NO: 420530 - RNA, 19 nt, Artificial Sequence
  Description of Artificial Sequence: Synthetic oligonucleotide
  Antisense Strand to SEQ ID NO: 420529
acauucacacauuguaguc

SEQ ID NO: 420531 - RNA, 19 nt, Artificial Sequence
  Description of Artificial Sequence: Synthetic oligonucleotide
  Sense Strand Starting at position 1297 of SEQ ID NO: 315323
ugugaaugucacgggaaac

SEQ ID NO: 420532 - RNA, 19 nt, Artificial Sequence
  Description of Artificial Sequence: Synthetic oligonucleotide
  Antisense Strand to SEQ ID NO: 420531
guuucccgugacauucaca

SEQ ID NO: 420533 - RNA, 19 nt, Artificial Sequence
  Description of Artificial Sequence: Synthetic oligonucleotide
  Sense Strand Starting at position 1297 of SEQ ID NO: 315324
gugaaugucacgggaaaca

SEQ ID NO: 420534 - RNA, 19 nt, Artificial Sequence
  Description of Artificial Sequence: Synthetic oligonucleotide
  Antisense Strand to SEQ ID NO: 420533
uguuucccgugacauucac

SEQ ID NO: 420535 - RNA, 19 nt, Artificial Sequence
  Description of Artificial Sequence: Synthetic oligonucleotide
  Sense Strand Starting at position 1297 of SEQ ID NO: 315355
gcugcuuacggcuuucuaa

SEQ ID NO: 420536 - RNA, 19 nt, Artificial Sequence
  Description of Artificial Sequence: Synthetic oligonucleotide
  Antisense Strand to SEQ ID NO: 420535
uuagaaagccguaagcagc

SEQ ID NO: 420537 - RNA, 19 nt, Artificial Sequence
  Description of Artificial Sequence: Synthetic oligonucleotide
  Sense Strand Starting at position 1297 of SEQ ID NO: 315405
gcaagauguuacuuaacac

SEQ ID NO: 420538 - RNA, 19 nt, Artificial Sequence
  Description of Artificial Sequence: Synthetic oligonucleotide
  Antisense Strand to SEQ ID NO: 420537
guguuaaguaacaucuugc

SEQ ID NO: 420539 - RNA, 19 nt, Artificial Sequence
  Description of Artificial Sequence: Synthetic oligonucleotide
  Sense Strand Starting at position 1297 of SEQ ID NO: 315464
aggaacuaguaggaguaaa

SEQ ID NO: 420540 - RNA, 19 nt, Artificial Sequence
  Description of Artificial Sequence: Synthetic oligonucleotide
  Antisense Strand to SEQ ID NO: 420539
uuuacuccuacuaguuccu

SEQ ID NO: 420541 - RNA, 19 nt, Artificial Sequence
  Description of Artificial Sequence: Synthetic oligonucleotide
  Sense Strand Starting at position 1297 of SEQ ID NO: 315552
gugaaugaggguuguuguu

SEQ ID NO: 420542 - RNA, 19 nt, Artificial Sequence
  Description of Artificial Sequence: Synthetic oligonucleotide
  Antisense Strand to SEQ ID NO: 420541
aacaacaacccucauucac

SEQ ID NO: 420543 - RNA, 19 nt, Artificial Sequence
  Description of Artificial Sequence: Synthetic oligonucleotide
  Sense Strand Starting at position 1297 of SEQ ID NO: 315627
aggaaacaggccugaaguu

SEQ ID NO: 420544 - RNA, 19 nt, Artificial Sequence
  Description of Artificial Sequence: Synthetic oligonucleotide
  Antisense Strand to SEQ ID NO: 420543
aacuucaggccuguuuccu

SEQ ID NO: 420545 - RNA, 19 nt, Artificial Sequence
  Description of Artificial Sequence: Synthetic oligonucleotide
  Sense Strand Starting at position 1297 of SEQ ID NO: 315710
agaaaugucccguguauua

SEQ ID NO: 420546 - RNA, 19 nt, Artificial Sequence
  Description of Artificial Sequence: Synthetic oligonucleotide
  Antisense Strand to SEQ ID NO: 420545
uaauacacgggacauuucu

SEQ ID NO: 420547 - RNA, 19 nt, Artificial Sequence
  Description of Artificial Sequence: Synthetic oligonucleotide
  Sense Strand Starting at position 1297 of SEQ ID NO: 315712
aaaugucccguguauuauu

SEQ ID NO: 420548 - RNA, 19 nt, Artificial Sequence
  Description of Artificial Sequence: Synthetic oligonucleotide
  Antisense Strand to SEQ ID NO: 420547
aauaauacacgggacauuu

SEQ ID NO: 420549 - RNA, 19 nt, Artificial Sequence
  Description of Artificial Sequence: Synthetic oligonucleotide
  Sense Strand Starting at position 1297 of SEQ ID NO: 315717
ucccguguauuauuggaga

SEQ ID NO: 420550 - RNA, 19 nt, Artificial Sequence
  Description of Artificial Sequence: Synthetic oligonucleotide
  Antisense Strand to SEQ ID NO: 420549
ucuccaauaauacacggga

SEQ ID NO: 420551 - RNA, 19 nt, Artificial Sequence
  Description of Artificial Sequence: Synthetic oligonucleotide
  Sense Strand Starting at position 1297 of SEQ ID NO: 315719
ccguguauuauuggagaaa

SEQ ID NO: 420552 - RNA, 19 nt, Artificial Sequence
  Description of Artificial Sequence: Synthetic oligonucleotide
  Antisense Strand to SEQ ID NO: 420551
uuucuccaauaauacacgg

SEQ ID NO: 420553 - RNA, 19 nt, Artificial Sequence
  Description of Artificial Sequence: Synthetic oligonucleotide
  Sense Strand Starting at position 1297 of SEQ ID NO: 315749
gcuccugcugaaugagaaa

SEQ ID NO: 420554 - RNA, 19 nt, Artificial Sequence
  Description of Artificial Sequence: Synthetic oligonucleotide
  Antisense Strand to SEQ ID NO: 420553
uuucucauucagcaggagc

SEQ ID NO: 420555 - RNA, 19 nt, Artificial Sequence
  Description of Artificial Sequence: Synthetic oligonucleotide
  Sense Strand Starting at position 1297 of SEQ ID NO: 315769
agaagagucccggaugugu

SEQ ID NO: 420556 - RNA, 19 nt, Artificial Sequence
  Description of Artificial Sequence: Synthetic oligonucleotide
  Antisense Strand to SEQ ID NO: 420555
acacauccgggacucuucu

SEQ ID NO: 420557 - RNA, 19 nt, Artificial Sequence
  Description of Artificial Sequence: Synthetic oligonucleotide
  Sense Strand Starting at position 1297 of SEQ ID NO: 315891
gaggauguccgagggcuua

SEQ ID NO: 420558 - RNA, 19 nt, Artificial Sequence
  Description of Artificial Sequence: Synthetic oligonucleotide
  Antisense Strand to SEQ ID NO: 420557
uaagcccucggacauccuc

SEQ ID NO: 420559 - RNA, 19 nt, Artificial Sequence
  Description of Artificial Sequence: Synthetic oligonucleotide
  Sense Strand Starting at position 1297 of SEQ ID NO: 316050
uguuguguaaucgcuccca

SEQ ID NO: 420560 - RNA, 19 nt, Artificial Sequence
  Description of Artificial Sequence: Synthetic oligonucleotide
  Antisense Strand to SEQ ID NO: 420559
ugggagcgauuacacaaca

SEQ ID NO: 420561 - RNA, 19 nt, Artificial Sequence
  Description of Artificial Sequence: Synthetic oligonucleotide
  Sense Strand Starting at position 1297 of SEQ ID NO: 316671
guaauucuacaacgggaca

SEQ ID NO: 420562 - RNA, 19 nt, Artificial Sequence
  Description of Artificial Sequence: Synthetic oligonucleotide
  Antisense Strand to SEQ ID NO: 420561
ugucccguuguagaauuac

SEQ ID NO: 420563 - RNA, 19 nt, Artificial Sequence
  Description of Artificial Sequence: Synthetic oligonucleotide
  Sense Strand Starting at position 1297 of SEQ ID NO: 316683
cgggacaucuaccuucgua

SEQ ID NO: 420564 - RNA, 19 nt, Artificial Sequence
  Description of Artificial Sequence: Synthetic oligonucleotide
  Antisense Strand to SEQ ID NO: 420563
uacgaagguagaugucccg

SEQ ID NO: 420565 - RNA, 19 nt, Artificial Sequence
  Description of Artificial Sequence: Synthetic oligonucleotide
  Sense Strand Starting at position 1297 of SEQ ID NO: 316686
gacaucuaccuucguagca

SEQ ID NO: 420566 - RNA, 19 nt, Artificial Sequence
  Description of Artificial Sequence: Synthetic oligonucleotide
  Antisense Strand to SEQ ID NO: 420565
ugcuacgaagguagauguc

SEQ ID NO: 420567 - RNA, 19 nt, Artificial Sequence
  Description of Artificial Sequence: Synthetic oligonucleotide
  Sense Strand Starting at position 1297 of SEQ ID NO: 316704
acagaaugccgauauuguu

SEQ ID NO: 420568 - RNA, 19 nt, Artificial Sequence
  Description of Artificial Sequence: Synthetic oligonucleotide
  Antisense Strand to SEQ ID NO: 420567
aacaauaucggcauucugu

SEQ ID NO: 420569 - RNA, 19 nt, Artificial Sequence
  Description of Artificial Sequence: Synthetic oligonucleotide
  Sense Strand Starting at position 1297 of SEQ ID NO: 316731
uguccaaguacugauaguu

SEQ ID NO: 420570 - RNA, 19 nt, Artificial Sequence
  Description of Artificial Sequence: Synthetic oligonucleotide
  Antisense Strand to SEQ ID NO: 420569
aacuaucaguacuuggaca

SEQ ID NO: 420571 - RNA, 19 nt, Artificial Sequence
  Description of Artificial Sequence: Synthetic oligonucleotide
  Sense Strand Starting at position 1297 of SEQ ID NO: 316772
agcauuuauugggcuagca

SEQ ID NO: 420572 - RNA, 19 nt, Artificial Sequence
  Description of Artificial Sequence: Synthetic oligonucleotide
  Antisense Strand to SEQ ID NO: 420571
ugcuagcccaauaaaugcu

SEQ ID NO: 420573 - RNA, 19 nt, Artificial Sequence
  Description of Artificial Sequence: Synthetic oligonucleotide
  Sense Strand Starting at position 1297 of SEQ ID NO: 316838
aaucaauuguugcugagua

SEQ ID NO: 420574 - RNA, 19 nt, Artificial Sequence
  Description of Artificial Sequence: Synthetic oligonucleotide
  Antisense Strand to SEQ ID NO: 420573
uacucagcaacaauugauu

SEQ ID NO: 420575 - RNA, 19 nt, Artificial Sequence
  Description of Artificial Sequence: Synthetic oligonucleotide
  Sense Strand Starting at position 1297 of SEQ ID NO: 317051
caaguccuuccuggaaaug

SEQ ID NO: 420576 - RNA, 19 nt, Artificial Sequence
  Description of Artificial Sequence: Synthetic oligonucleotide
  Antisense Strand to SEQ ID NO: 420575
cauuuccaggaaggacuug

SEQ ID NO: 420577 - RNA, 19 nt, Artificial Sequence
  Description of Artificial Sequence: Synthetic oligonucleotide
  Sense Strand Starting at position 1297 of SEQ ID NO: 317097
gcccguuuccuaggacaaa

SEQ ID NO: 420578 - RNA, 19 nt, Artificial Sequence
  Description of Artificial Sequence: Synthetic oligonucleotide
  Antisense Strand to SEQ ID NO: 420577
uuuguccuaggaaacgggc

SEQ ID NO: 420579 - RNA, 19 nt, Artificial Sequence
  Description of Artificial Sequence: Synthetic oligonucleotide
  Sense Strand Starting at position 1297 of SEQ ID NO: 317159
ugacaugagggcuaugcuu

SEQ ID NO: 420580 - RNA, 19 nt, Artificial Sequence
  Description of Artificial Sequence: Synthetic oligonucleotide
  Antisense Strand to SEQ ID NO: 420579
aagcauagcccucauguca

SEQ ID NO: 420581 - RNA, 19 nt, Artificial Sequence
  Description of Artificial Sequence: Synthetic oligonucleotide
  Sense Strand Starting at position 1297 of SEQ ID NO: 317282
caauguagcaaguguugga

SEQ ID NO: 420582 - RNA, 19 nt, Artificial Sequence
  Description of Artificial Sequence: Synthetic oligonucleotide
  Antisense Strand to SEQ ID NO: 420581
uccaacacuugcuacauug

SEQ ID NO: 420583 - RNA, 19 nt, Artificial Sequence
  Description of Artificial Sequence: Synthetic oligonucleotide
  Sense Strand Starting at position 1297 of SEQ ID NO: 317286
guagcaaguguuggaaaga

SEQ ID NO: 420584 - RNA, 19 nt, Artificial Sequence
  Description of Artificial Sequence: Synthetic oligonucleotide
  Antisense Strand to SEQ ID NO: 420583
ucuuuccaacacuugcuac

SEQ ID NO: 420585 - RNA, 19 nt, Artificial Sequence
  Description of Artificial Sequence: Synthetic oligonucleotide
  Sense Strand Starting at position 1297 of SEQ ID NO: 317481
ugcaacuuucgugaaacuu

SEQ ID NO: 420586 - RNA, 19 nt, Artificial Sequence
  Description of Artificial Sequence: Synthetic oligonucleotide
  Antisense Strand to SEQ ID NO: 420585
aaguuucacgaaaguugca

SEQ ID NO: 420587 - RNA, 19 nt, Artificial Sequence
  Description of Artificial Sequence: Synthetic oligonucleotide
  Sense Strand Starting at position 1297 of SEQ ID NO: 317527
gcuagugaugcauaagcca

SEQ ID NO: 420588 - RNA, 19 nt, Artificial Sequence
  Description of Artificial Sequence: Synthetic oligonucleotide
  Antisense Strand to SEQ ID NO: 420587
uggcuuaugcaucacuagc

SEQ ID NO: 420589 - RNA, 19 nt, Artificial Sequence
  Description of Artificial Sequence: Synthetic oligonucleotide
  Sense Strand Starting at position 1297 of SEQ ID NO: 318157
auggaagaguguuuaagca

SEQ ID NO: 420590 - RNA, 19 nt, Artificial Sequence
  Description of Artificial Sequence: Synthetic oligonucleotide
  Antisense Strand to SEQ ID NO: 420589
ugcuuaaacacucuuccau

SEQ ID NO: 420591 - RNA, 19 nt, Artificial Sequence
  Description of Artificial Sequence: Synthetic oligonucleotide
  Sense Strand Starting at position 1297 of SEQ ID NO: 318161
aagaguguuuaagcaaaua

SEQ ID NO: 420592 - RNA, 19 nt, Artificial Sequence
  Description of Artificial Sequence: Synthetic oligonucleotide
  Antisense Strand to SEQ ID NO: 420591
uauuugcuuaaacacucuu

SEQ ID NO: 420593 - RNA, 19 nt, Artificial Sequence
  Description of Artificial Sequence: Synthetic oligonucleotide
  Sense Strand Starting at position 1297 of SEQ ID NO: 318323
gggcuuaaacuuugauuac

SEQ ID NO: 420594 - RNA, 19 nt, Artificial Sequence
  Description of Artificial Sequence: Synthetic oligonucleotide
  Antisense Strand to SEQ ID NO: 420593
guaaucaaaguuuaagccc

SEQ ID NO: 420595 - RNA, 19 nt, Artificial Sequence
  Description of Artificial Sequence: Synthetic oligonucleotide
  Sense Strand Starting at position 1297 of SEQ ID NO: 318379
cuguuuacugaacgaguga

SEQ ID NO: 420596 - RNA, 19 nt, Artificial Sequence
  Description of Artificial Sequence: Synthetic oligonucleotide
  Antisense Strand to SEQ ID NO: 420595
ucacucguucaguaaacag

SEQ ID NO: 420597 - RNA, 19 nt, Artificial Sequence
  Description of Artificial Sequence: Synthetic oligonucleotide
  Sense Strand Starting at position 1297 of SEQ ID NO: 318380
uguuuacugaacgagugaa

SEQ ID NO: 420598 - RNA, 19 nt, Artificial Sequence
  Description of Artificial Sequence: Synthetic oligonucleotide
  Antisense Strand to SEQ ID NO: 420597
uucacucguucaguaaaca

SEQ ID NO: 420599 - RNA, 19 nt, Artificial Sequence
  Description of Artificial Sequence: Synthetic oligonucleotide
  Sense Strand Starting at position 1297 of SEQ ID NO: 318420
gcacaucaagaacguguua

SEQ ID NO: 420600 - RNA, 19 nt, Artificial Sequence
  Description of Artificial Sequence: Synthetic oligonucleotide
  Antisense Strand to SEQ ID NO: 420599
uaacacguucuugaugugc

SEQ ID NO: 420601 - RNA, 19 nt, Artificial Sequence
  Description of Artificial Sequence: Synthetic oligonucleotide
  Sense Strand Starting at position 1297 of SEQ ID NO: 318897
guuuauuaggcacacucau

SEQ ID NO: 420602 - RNA, 19 nt, Artificial Sequence
  Description of Artificial Sequence: Synthetic oligonucleotide
  Antisense Strand to SEQ ID NO: 420601
augagugugccuaauaaac

SEQ ID NO: 420603 - RNA, 19 nt, Artificial Sequence
  Description of Artificial Sequence: Synthetic oligonucleotide
  Sense Strand Starting at position 1297 of SEQ ID NO: 318914
auggcaagguguucuaaug

SEQ ID NO: 420604 - RNA, 19 nt, Artificial Sequence
  Description of Artificial Sequence: Synthetic oligonucleotide
  Antisense Strand to SEQ ID NO: 420603
cauuagaacaccuugccau

SEQ ID NO: 420605 - RNA, 19 nt, Artificial Sequence
  Description of Artificial Sequence: Synthetic oligonucleotide
  Sense Strand Starting at position 1297 of SEQ ID NO: 318931
ugaaaucuuacuugggagu

SEQ ID NO: 420606 - RNA, 19 nt, Artificial Sequence
  Description of Artificial Sequence: Synthetic oligonucleotide
  Antisense Strand to SEQ ID NO: 420605
acucccaaguaagauuuca

SEQ ID NO: 420607 - RNA, 19 nt, Artificial Sequence
  Description of Artificial Sequence: Synthetic oligonucleotide
  Sense Strand Starting at position 1298 of SEQ ID NO: 315331
uucaguuauuucgugugua

SEQ ID NO: 420608 - RNA, 19 nt, Artificial Sequence
  Description of Artificial Sequence: Synthetic oligonucleotide
  Antisense Strand to SEQ ID NO: 420607
uacacacgaaauaacugaa

SEQ ID NO: 420609 - RNA, 19 nt, Artificial Sequence
  Description of Artificial Sequence: Synthetic oligonucleotide
  Sense Strand Starting at position 1298 of SEQ ID NO: 315334
aguuauuucguguguauac

SEQ ID NO: 420610 - RNA, 19 nt, Artificial Sequence
  Description of Artificial Sequence: Synthetic oligonucleotide
  Antisense Strand to SEQ ID NO: 420609
guauacacacgaaauaacu

SEQ ID NO: 420611 - RNA, 19 nt, Artificial Sequence
  Description of Artificial Sequence: Synthetic oligonucleotide
  Sense Strand Starting at position 1298 of SEQ ID NO: 315344
uguguauaccuauaagcag

SEQ ID NO: 420612 - RNA, 19 nt, Artificial Sequence
  Description of Artificial Sequence: Synthetic oligonucleotide
  Antisense Strand to SEQ ID NO: 420611
cugcuuauagguauacaca

SEQ ID NO: 420613 - RNA, 19 nt, Artificial Sequence
  Description of Artificial Sequence: Synthetic oligonucleotide
  Sense Strand Starting at position 1298 of SEQ ID NO: 315347
guauaccuauaagcagaau

SEQ ID NO: 420614 - RNA, 19 nt, Artificial Sequence
  Description of Artificial Sequence: Synthetic oligonucleotide
  Antisense Strand to SEQ ID NO: 420613
auucugcuuauagguauac

SEQ ID NO: 420615 - RNA, 19 nt, Artificial Sequence
  Description of Artificial Sequence: Synthetic oligonucleotide
  Sense Strand Starting at position 1298 of SEQ ID NO: 315397
ucaacacaucauugguagu

SEQ ID NO: 420616 - RNA, 19 nt, Artificial Sequence
  Description of Artificial Sequence: Synthetic oligonucleotide
  Antisense Strand to SEQ ID NO: 420615
acuaccaaugauguguuga

SEQ ID NO: 420617 - RNA, 19 nt, Artificial Sequence
  Description of Artificial Sequence: Synthetic oligonucleotide
  Sense Strand Starting at position 1298 of SEQ ID NO: 315498
gauggaucuuguccacaac

SEQ ID NO: 420618 - RNA, 19 nt, Artificial Sequence
  Description of Artificial Sequence: Synthetic oligonucleotide
  Antisense Strand to SEQ ID NO: 420617
guuguggacaagauccauc

SEQ ID NO: 420619 - RNA, 19 nt, Artificial Sequence
  Description of Artificial Sequence: Synthetic oligonucleotide
  Sense Strand Starting at position 1298 of SEQ ID NO: 315527
auuguaagccuuugugaaa

SEQ ID NO: 420620 - RNA, 19 nt, Artificial Sequence
  Description of Artificial Sequence: Synthetic oligonucleotide
  Antisense Strand to SEQ ID NO: 420619
uuucacaaaggcuuacaau

SEQ ID NO: 420621 - RNA, 19 nt, Artificial Sequence
  Description of Artificial Sequence: Synthetic oligonucleotide
  Sense Strand Starting at position 1298 of SEQ ID NO: 315549
gcccaagugguucaugaga

SEQ ID NO: 420622 - RNA, 19 nt, Artificial Sequence
  Description of Artificial Sequence: Synthetic oligonucleotide
  Antisense Strand to SEQ ID NO: 420621
ucucaugaaccacuugggc

SEQ ID NO: 420623 - RNA, 19 nt, Artificial Sequence
  Description of Artificial Sequence: Synthetic oligonucleotide
  Sense Strand Starting at position 1298 of SEQ ID NO: 315674
gcccacuggagucaaugau

SEQ ID NO: 420624 - RNA, 19 nt, Artificial Sequence
  Description of Artificial Sequence: Synthetic oligonucleotide
  Antisense Strand to SEQ ID NO: 420623
aucauugacuccagugggc

SEQ ID NO: 420625 - RNA, 19 nt, Artificial Sequence
  Description of Artificial Sequence: Synthetic oligonucleotide
  Sense Strand Starting at position 1298 of SEQ ID NO: 315695
uguaaucaacagugagcau

SEQ ID NO: 420626 - RNA, 19 nt, Artificial Sequence
  Description of Artificial Sequence: Synthetic oligonucleotide
  Antisense Strand to SEQ ID NO: 420625
augcucacuguugauuaca

SEQ ID NO: 420627 - RNA, 19 nt, Artificial Sequence
  Description of Artificial Sequence: Synthetic oligonucleotide
  Sense Strand Starting at position 1298 of SEQ ID NO: 315717
ggagacuuauaagcuacau

SEQ ID NO: 420628 - RNA, 19 nt, Artificial Sequence
  Description of Artificial Sequence: Synthetic oligonucleotide
  Antisense Strand to SEQ ID NO: 420627
auguagcuuauaagucucc

SEQ ID NO: 420629 - RNA, 19 nt, Artificial Sequence
  Description of Artificial Sequence: Synthetic oligonucleotide
  Sense Strand Starting at position 1298 of SEQ ID NO: 315776
guuucaagucaucggagga

SEQ ID NO: 420630 - RNA, 19 nt, Artificial Sequence
  Description of Artificial Sequence: Synthetic oligonucleotide
  Antisense Strand to SEQ ID NO: 420629
uccuccgaugacuugaaac

SEQ ID NO: 420631 - RNA, 19 nt, Artificial Sequence
  Description of Artificial Sequence: Synthetic oligonucleotide
  Sense Strand Starting at position 1298 of SEQ ID NO: 315827
uuuguauaacauuggugua

SEQ ID NO: 420632 - RNA, 19 nt, Artificial Sequence
  Description of Artificial Sequence: Synthetic oligonucleotide
  Antisense Strand to SEQ ID NO: 420631
uacaccaauguuauacaaa

SEQ ID NO: 420633 - RNA, 19 nt, Artificial Sequence
  Description of Artificial Sequence: Synthetic oligonucleotide
  Sense Strand Starting at position 1298 of SEQ ID NO: 315829
uguauaacauugguguaca

SEQ ID NO: 420634 - RNA, 19 nt, Artificial Sequence
  Description of Artificial Sequence: Synthetic oligonucleotide
  Antisense Strand to SEQ ID NO: 420633
uguacaccaauguuauaca

SEQ ID NO: 420635 - RNA, 19 nt, Artificial Sequence
  Description of Artificial Sequence: Synthetic oligonucleotide
  Sense Strand Starting at position 1298 of SEQ ID NO: 316219
ucucuuuaauggccagaaa

SEQ ID NO: 420636 - RNA, 19 nt, Artificial Sequence
  Description of Artificial Sequence: Synthetic oligonucleotide
  Antisense Strand to SEQ ID NO: 420635
uuucuggccauuaaagaga

SEQ ID NO: 420637 - RNA, 19 nt, Artificial Sequence
  Description of Artificial Sequence: Synthetic oligonucleotide
  Sense Strand Starting at position 1298 of SEQ ID NO: 316222
cuuuaauggccagaaagug

SEQ ID NO: 420638 - RNA, 19 nt, Artificial Sequence
  Description of Artificial Sequence: Synthetic oligonucleotide
  Antisense Strand to SEQ ID NO: 420637
cacuuucuggccauuaaag

SEQ ID NO: 420639 - RNA, 19 nt, Artificial Sequence
  Description of Artificial Sequence: Synthetic oligonucleotide
  Sense Strand Starting at position 1298 of SEQ ID NO: 316408
guggaaugaccguacaagu

SEQ ID NO: 420640 - RNA, 19 nt, Artificial Sequence
  Description of Artificial Sequence: Synthetic oligonucleotide
  Antisense Strand to SEQ ID NO: 420639
acuuguacggucauuccac

SEQ ID NO: 420641 - RNA, 19 nt, Artificial Sequence
  Description of Artificial Sequence: Synthetic oligonucleotide
  Sense Strand Starting at position 1298 of SEQ ID NO: 316466
ugugaaagaucucucaauc

SEQ ID NO: 420642 - RNA, 19 nt, Artificial Sequence
  Description of Artificial Sequence: Synthetic oligonucleotide
  Antisense Strand to SEQ ID NO: 420641
gauugagagaucuuucaca

SEQ ID NO: 420643 - RNA, 19 nt, Artificial Sequence
  Description of Artificial Sequence: Synthetic oligonucleotide
  Sense Strand Starting at position 1298 of SEQ ID NO: 316551
ggucaaauagcugagguca

SEQ ID NO: 420644 - RNA, 19 nt, Artificial Sequence
  Description of Artificial Sequence: Synthetic oligonucleotide
  Antisense Strand to SEQ ID NO: 420643
ugaccucagcuauuugacc

SEQ ID NO: 420645 - RNA, 19 nt, Artificial Sequence
  Description of Artificial Sequence: Synthetic oligonucleotide
  Sense Strand Starting at position 1298 of SEQ ID NO: 316772
accugaaacuugguuacuu

SEQ ID NO: 420646 - RNA, 19 nt, Artificial Sequence
  Description of Artificial Sequence: Synthetic oligonucleotide
  Antisense Strand to SEQ ID NO: 420645
aaguaaccaaguuucaggu

SEQ ID NO: 420647 - RNA, 19 nt, Artificial Sequence
  Description of Artificial Sequence: Synthetic oligonucleotide
  Sense Strand Starting at position 1298 of SEQ ID NO: 316918
gcacaaaucugauugggac

SEQ ID NO: 420648 - RNA, 19 nt, Artificial Sequence
  Description of Artificial Sequence: Synthetic oligonucleotide
  Antisense Strand to SEQ ID NO: 420647
gucccaaucagauuugugc

SEQ ID NO: 420649 - RNA, 19 nt, Artificial Sequence
  Description of Artificial Sequence: Synthetic oligonucleotide
  Sense Strand Starting at position 1298 of SEQ ID NO: 316984
ugucccuucuaagcaaaga

SEQ ID NO: 420650 - RNA, 19 nt, Artificial Sequence
  Description of Artificial Sequence: Synthetic oligonucleotide
  Antisense Strand to SEQ ID NO: 420649
ucuuugcuuagaagggaca

SEQ ID NO: 420651 - RNA, 19 nt, Artificial Sequence
  Description of Artificial Sequence: Synthetic oligonucleotide
  Sense Strand Starting at position 1298 of SEQ ID NO: 317025
ugcugucucgcaguuuaaa

SEQ ID NO: 420652 - RNA, 19 nt, Artificial Sequence
  Description of Artificial Sequence: Synthetic oligonucleotide
  Antisense Strand to SEQ ID NO: 420651
uuuaaacugcgagacagca

SEQ ID NO: 420653 - RNA, 19 nt, Artificial Sequence
  Description of Artificial Sequence: Synthetic oligonucleotide
  Sense Strand Starting at position 1298 of SEQ ID NO: 317026
gcugucucgcaguuuaaau

SEQ ID NO: 420654 - RNA, 19 nt, Artificial Sequence
  Description of Artificial Sequence: Synthetic oligonucleotide
  Antisense Strand to SEQ ID NO: 420653
auuuaaacugcgagacagc

SEQ ID NO: 420655 - RNA, 19 nt, Artificial Sequence
  Description of Artificial Sequence: Synthetic oligonucleotide
  Sense Strand Starting at position 1298 of SEQ ID NO: 317168
agcguccucccacaagaaa

SEQ ID NO: 420656 - RNA, 19 nt, Artificial Sequence
  Description of Artificial Sequence: Synthetic oligonucleotide
  Antisense Strand to SEQ ID NO: 420655
uuucuugugggaggacgcu

SEQ ID NO: 420657 - RNA, 19 nt, Artificial Sequence
  Description of Artificial Sequence: Synthetic oligonucleotide
  Sense Strand Starting at position 1298 of SEQ ID NO: 317457
gcgauuuccucuuucuuug

SEQ ID NO: 420658 - RNA, 19 nt, Artificial Sequence
  Description of Artificial Sequence: Synthetic oligonucleotide
  Antisense Strand to SEQ ID NO: 420657
caaagaaagaggaaaucgc

SEQ ID NO: 420659 - RNA, 19 nt, Artificial Sequence
  Description of Artificial Sequence: Synthetic oligonucleotide
  Sense Strand Starting at position 1298 of SEQ ID NO: 317722
agcagaacccuaggugaga

SEQ ID NO: 420660 - RNA, 19 nt, Artificial Sequence
  Description of Artificial Sequence: Synthetic oligonucleotide
  Antisense Strand to SEQ ID NO: 420659
ucucaccuaggguucugcu

SEQ ID NO: 420661 - RNA, 19 nt, Artificial Sequence
  Description of Artificial Sequence: Synthetic oligonucleotide
  Sense Strand Starting at position 1298 of SEQ ID NO: 317820
guuugucuuggugaacuua

SEQ ID NO: 420662 - RNA, 19 nt, Artificial Sequence
  Description of Artificial Sequence: Synthetic oligonucleotide
  Antisense Strand to SEQ ID NO: 420661
uaaguucaccaagacaaac

SEQ ID NO: 420663 - RNA, 19 nt, Artificial Sequence
  Description of Artificial Sequence: Synthetic oligonucleotide
  Sense Strand Starting at position 1298 of SEQ ID NO: 317893
ucaaguagcccggagaagu

SEQ ID NO: 420664 - RNA, 19 nt, Artificial Sequence
  Description of Artificial Sequence: Synthetic oligonucleotide
  Antisense Strand to SEQ ID NO: 420663
acuucuccgggcuacuuga

SEQ ID NO: 420665 - RNA, 19 nt, Artificial Sequence
  Description of Artificial Sequence: Synthetic oligonucleotide
  Sense Strand Starting at position 1298 of SEQ ID NO: 318223
cugacagaaucacugucua

SEQ ID NO: 420666 - RNA, 19 nt, Artificial Sequence
  Description of Artificial Sequence: Synthetic oligonucleotide
  Antisense Strand to SEQ ID NO: 420665
uagacagugauucugucag

SEQ ID NO: 420667 - RNA, 19 nt, Artificial Sequence
  Description of Artificial Sequence: Synthetic oligonucleotide
  Sense Strand Starting at position 1298 of SEQ ID NO: 318228
agaaucacugucuauagca

SEQ ID NO: 420668 - RNA, 19 nt, Artificial Sequence
  Description of Artificial Sequence: Synthetic oligonucleotide
  Antisense Strand to SEQ ID NO: 420667
ugcuauagacagugauucu

SEQ ID NO: 420669 - RNA, 19 nt, Artificial Sequence
  Description of Artificial Sequence: Synthetic oligonucleotide
  Sense Strand Starting at position 1298 of SEQ ID NO: 318243
agcaacaguguccauaaca

SEQ ID NO: 420670 - RNA, 19 nt, Artificial Sequence
  Description of Artificial Sequence: Synthetic oligonucleotide
  Antisense Strand to SEQ ID NO: 420669
uguuauggacacuguugcu

SEQ ID NO: 420671 - RNA, 19 nt, Artificial Sequence
  Description of Artificial Sequence: Synthetic oligonucleotide
  Sense Strand Starting at position 1298 of SEQ ID NO: 318263
uccaaaucucaggagugua

SEQ ID NO: 420672 - RNA, 19 nt, Artificial Sequence
  Description of Artificial Sequence: Synthetic oligonucleotide
  Antisense Strand to SEQ ID NO: 420671
uacacuccugagauuugga

SEQ ID NO: 420673 - RNA, 19 nt, Artificial Sequence
  Description of Artificial Sequence: Synthetic oligonucleotide
  Sense Strand Starting at position 1298 of SEQ ID NO: 318266
aaaucucaggaguguaacu

SEQ ID NO: 420674 - RNA, 19 nt, Artificial Sequence
  Description of Artificial Sequence: Synthetic oligonucleotide
  Antisense Strand to SEQ ID NO: 420673
aguuacacuccugagauuu

SEQ ID NO: 420675 - RNA, 19 nt, Artificial Sequence
  Description of Artificial Sequence: Synthetic oligonucleotide
  Sense Strand Starting at position 1298 of SEQ ID NO: 318271
ucaggaguguaacuuucua

SEQ ID NO: 420676 - RNA, 19 nt, Artificial Sequence
  Description of Artificial Sequence: Synthetic oligonucleotide
  Antisense Strand to SEQ ID NO: 420675
uagaaaguuacacuccuga

SEQ ID NO: 420677 - RNA, 19 nt, Artificial Sequence
  Description of Artificial Sequence: Synthetic oligonucleotide
  Sense Strand Starting at position 1298 of SEQ ID NO: 318275
gaguguaacuuucuaguaa

SEQ ID NO: 420678 - RNA, 19 nt, Artificial Sequence
  Description of Artificial Sequence: Synthetic oligonucleotide
  Antisense Strand to SEQ ID NO: 420677
uuacuagaaaguuacacuc

SEQ ID NO: 420679 - RNA, 19 nt, Artificial Sequence
  Description of Artificial Sequence: Synthetic oligonucleotide
  Sense Strand Starting at position 1298 of SEQ ID NO: 318629
ccuucucuggccuaguuaa

SEQ ID NO: 420680 - RNA, 19 nt, Artificial Sequence
  Description of Artificial Sequence: Synthetic oligonucleotide
  Antisense Strand to SEQ ID NO: 420679
uuaacuaggccagagaagg

SEQ ID NO: 420681 - RNA, 19 nt, Artificial Sequence
  Description of Artificial Sequence: Synthetic oligonucleotide
  Sense Strand Starting at position 1298 of SEQ ID NO: 318790
ggcagacauguguauuaaa

SEQ ID NO: 420682 - RNA, 19 nt, Artificial Sequence
  Description of Artificial Sequence: Synthetic oligonucleotide
  Antisense Strand to SEQ ID NO: 420681
uuuaauacacaugucugcc

SEQ ID NO: 420683 - RNA, 19 nt, Artificial Sequence
  Description of Artificial Sequence: Synthetic oligonucleotide
  Sense Strand Starting at position 1298 of SEQ ID NO: 318913
auuuaaugauuuggccaca

SEQ ID NO: 420684 - RNA, 19 nt, Artificial Sequence
  Description of Artificial Sequence: Synthetic oligonucleotide
  Antisense Strand to SEQ ID NO: 420683
uguggccaaaucauuaaau

SEQ ID NO: 420685 - RNA, 19 nt, Artificial Sequence
  Description of Artificial Sequence: Synthetic oligonucleotide
  Sense Strand Starting at position 1298 of SEQ ID NO: 319038
agagucguaacauaucaag

SEQ ID NO: 420686 - RNA, 19 nt, Artificial Sequence
  Description of Artificial Sequence: Synthetic oligonucleotide
  Antisense Strand to SEQ ID NO: 420685
cuugauauguuacgacucu

SEQ ID NO: 420687 - RNA, 19 nt, Artificial Sequence
  Description of Artificial Sequence: Synthetic oligonucleotide
  Sense Strand Starting at position 1299 of SEQ ID NO: 315242
gcagguaucguggagugga

SEQ ID NO: 420688 - RNA, 19 nt, Artificial Sequence
  Description of Artificial Sequence: Synthetic oligonucleotide
  Antisense Strand to SEQ ID NO: 420687
uccacuccacgauaccugc

SEQ ID NO: 420689 - RNA, 19 nt, Artificial Sequence
  Description of Artificial Sequence: Synthetic oligonucleotide
  Sense Strand Starting at position 1299 of SEQ ID NO: 315271
ggcagaaucauggagagcu

SEQ ID NO: 420690 - RNA, 19 nt, Artificial Sequence
  Description of Artificial Sequence: Synthetic oligonucleotide
  Antisense Strand to SEQ ID NO: 420689
agcucuccaugauucugcc

SEQ ID NO: 420691 - RNA, 19 nt, Artificial Sequence
  Description of Artificial Sequence: Synthetic oligonucleotide
  Sense Strand Starting at position 1299 of SEQ ID NO: 315464
cuuagugacccgaggcguu

SEQ ID NO: 420692 - RNA, 19 nt, Artificial Sequence
  Description of Artificial Sequence: Synthetic oligonucleotide
  Antisense Strand to SEQ ID NO: 420691
aacgccucgggucacuaag

SEQ ID NO: 420693 - RNA, 19 nt, Artificial Sequence
  Description of Artificial Sequence: Synthetic oligonucleotide
  Sense Strand Starting at position 1299 of SEQ ID NO: 315504
uaaccauguggucacagua

SEQ ID NO: 420694 - RNA, 19 nt, Artificial Sequence
  Description of Artificial Sequence: Synthetic oligonucleotide
  Antisense Strand to SEQ ID NO: 420693
uacugugaccacaugguua

SEQ ID NO: 420695 - RNA, 19 nt, Artificial Sequence
  Description of Artificial Sequence: Synthetic oligonucleotide
  Sense Strand Starting at position 1299 of SEQ ID NO: 315627
cccuaaaccgaguauauug

SEQ ID NO: 420696 - RNA, 19 nt, Artificial Sequence
  Description of Artificial Sequence: Synthetic oligonucleotide
  Antisense Strand to SEQ ID NO: 420695
caauauacucgguuuaggg

SEQ ID NO: 420697 - RNA, 19 nt, Artificial Sequence
  Description of Artificial Sequence: Synthetic oligonucleotide
  Sense Strand Starting at position 1299 of SEQ ID NO: 315635
cgaguauauugauuauagg

SEQ ID NO: 420698 - RNA, 19 nt, Artificial Sequence
  Description of Artificial Sequence: Synthetic oligonucleotide
  Antisense Strand to SEQ ID NO: 420697
ccuauaaucaauauacucg

SEQ ID NO: 420699 - RNA, 19 nt, Artificial Sequence
  Description of Artificial Sequence: Synthetic oligonucleotide
  Sense Strand Starting at position 1299 of SEQ ID NO: 315643
uugauuauagggugauuag

SEQ ID NO: 420700 - RNA, 19 nt, Artificial Sequence
  Description of Artificial Sequence: Synthetic oligonucleotide
  Antisense Strand to SEQ ID NO: 420699
cuaaucacccuauaaucaa

SEQ ID NO: 420701 - RNA, 19 nt, Artificial Sequence
  Description of Artificial Sequence: Synthetic oligonucleotide
  Sense Strand Starting at position 1299 of SEQ ID NO: 315650
uagggugauuagcuguaca

SEQ ID NO: 420702 - RNA, 19 nt, Artificial Sequence
  Description of Artificial Sequence: Synthetic oligonucleotide
  Antisense Strand to SEQ ID NO: 420701
uguacagcuaaucacccua

SEQ ID NO: 420703 - RNA, 19 nt, Artificial Sequence
  Description of Artificial Sequence: Synthetic oligonucleotide
  Sense Strand Starting at position 1299 of SEQ ID NO: 315653
ggugauuagcuguacagga

SEQ ID NO: 420704 - RNA, 19 nt, Artificial Sequence
  Description of Artificial Sequence: Synthetic oligonucleotide
  Antisense Strand to SEQ ID NO: 420703
uccuguacagcuaaucacc

SEQ ID NO: 420705 - RNA, 19 nt, Artificial Sequence
  Description of Artificial Sequence: Synthetic oligonucleotide
  Sense Strand Starting at position 1299 of SEQ ID NO: 315782
ggaagagaauguucuggca

SEQ ID NO: 420706 - RNA, 19 nt, Artificial Sequence
  Description of Artificial Sequence: Synthetic oligonucleotide
  Antisense Strand to SEQ ID NO: 420705
ugccagaacauucucuucc

SEQ ID NO: 420707 - RNA, 19 nt, Artificial Sequence
  Description of Artificial Sequence: Synthetic oligonucleotide
  Sense Strand Starting at position 1299 of SEQ ID NO: 315789
aauguucuggcagagucua

SEQ ID NO: 420708 - RNA, 19 nt, Artificial Sequence
  Description of Artificial Sequence: Synthetic oligonucleotide
  Antisense Strand to SEQ ID NO: 420707
uagacucugccagaacauu

SEQ ID NO: 420709 - RNA, 19 nt, Artificial Sequence
  Description of Artificial Sequence: Synthetic oligonucleotide
  Sense Strand Starting at position 1299 of SEQ ID NO: 315894
uccauaaugucaucugucu

SEQ ID NO: 420710 - RNA, 19 nt, Artificial Sequence
  Description of Artificial Sequence: Synthetic oligonucleotide
  Antisense Strand to SEQ ID NO: 420709
agacagaugacauuaugga

SEQ ID NO: 420711 - RNA, 19 nt, Artificial Sequence
  Description of Artificial Sequence: Synthetic oligonucleotide
  Sense Strand Starting at position 1299 of SEQ ID NO: 315944
caaugaaugccucaagggu

SEQ ID NO: 420712 - RNA, 19 nt, Artificial Sequence
  Description of Artificial Sequence: Synthetic oligonucleotide
  Antisense Strand to SEQ ID NO: 420711
acccuugaggcauucauug

SEQ ID NO: 420713 - RNA, 19 nt, Artificial Sequence
  Description of Artificial Sequence: Synthetic oligonucleotide
  Sense Strand Starting at position 1299 of SEQ ID NO: 316017
ccaagcaguccugagaucu

SEQ ID NO: 420714 - RNA, 19 nt, Artificial Sequence
  Description of Artificial Sequence: Synthetic oligonucleotide
  Antisense Strand to SEQ ID NO: 420713
agaucucaggacugcuugg

SEQ ID NO: 420715 - RNA, 19 nt, Artificial Sequence
  Description of Artificial Sequence: Synthetic oligonucleotide
  Sense Strand Starting at position 1299 of SEQ ID NO: 316054
gggacuugguuccugaaua

SEQ ID NO: 420716 - RNA, 19 nt, Artificial Sequence
  Description of Artificial Sequence: Synthetic oligonucleotide
  Antisense Strand to SEQ ID NO: 420715
uauucaggaaccaaguccc

SEQ ID NO: 420717 - RNA, 19 nt, Artificial Sequence
  Description of Artificial Sequence: Synthetic oligonucleotide
  Sense Strand Starting at position 1299 of SEQ ID NO: 316267
acagucugccuccgaauuu

SEQ ID NO: 420718 - RNA, 19 nt, Artificial Sequence
  Description of Artificial Sequence: Synthetic oligonucleotide
  Antisense Strand to SEQ ID NO: 420717
aaauucggaggcagacugu

SEQ ID NO: 420719 - RNA, 19 nt, Artificial Sequence
  Description of Artificial Sequence: Synthetic oligonucleotide
  Sense Strand Starting at position 1299 of SEQ ID NO: 316277
uccgaauuuagacgucugu

SEQ ID NO: 420720 - RNA, 19 nt, Artificial Sequence
  Description of Artificial Sequence: Synthetic oligonucleotide
  Antisense Strand to SEQ ID NO: 420719
acagacgucuaaauucgga

SEQ ID NO: 420721 - RNA, 19 nt, Artificial Sequence
  Description of Artificial Sequence: Synthetic oligonucleotide
  Sense Strand Starting at position 1299 of SEQ ID NO: 316281
aauuuagacgucuguuuac

SEQ ID NO: 420722 - RNA, 19 nt, Artificial Sequence
  Description of Artificial Sequence: Synthetic oligonucleotide
  Antisense Strand to SEQ ID NO: 420721
guaaacagacgucuaaauu

SEQ ID NO: 420723 - RNA, 19 nt, Artificial Sequence
  Description of Artificial Sequence: Synthetic oligonucleotide
  Sense Strand Starting at position 1299 of SEQ ID NO: 316433
ucuggauccgggcaaggau

SEQ ID NO: 420724 - RNA, 19 nt, Artificial Sequence
  Description of Artificial Sequence: Synthetic oligonucleotide
  Antisense Strand to SEQ ID NO: 420723
auccuugcccggauccaga

SEQ ID NO: 420725 - RNA, 19 nt, Artificial Sequence
  Description of Artificial Sequence: Synthetic oligonucleotide
  Sense Strand Starting at position 1299 of SEQ ID NO: 316871
uggagaacuggcugguuaa

SEQ ID NO: 420726 - RNA, 19 nt, Artificial Sequence
  Description of Artificial Sequence: Synthetic oligonucleotide
  Antisense Strand to SEQ ID NO: 420725
uuaaccagccaguucucca

SEQ ID NO: 420727 - RNA, 19 nt, Artificial Sequence
  Description of Artificial Sequence: Synthetic oligonucleotide
  Sense Strand Starting at position 1299 of SEQ ID NO: 316872
ggagaacuggcugguuaau

SEQ ID NO: 420728 - RNA, 19 nt, Artificial Sequence
  Description of Artificial Sequence: Synthetic oligonucleotide
  Antisense Strand to SEQ ID NO: 420727
auuaaccagccaguucucc

SEQ ID NO: 420729 - RNA, 19 nt, Artificial Sequence
  Description of Artificial Sequence: Synthetic oligonucleotide
  Sense Strand Starting at position 1299 of SEQ ID NO: 317092
caggacugugcccgagaga

SEQ ID NO: 420730 - RNA, 19 nt, Artificial Sequence
  Description of Artificial Sequence: Synthetic oligonucleotide
  Antisense Strand to SEQ ID NO: 420729
ucucucgggcacaguccug

SEQ ID NO: 420731 - RNA, 19 nt, Artificial Sequence
  Description of Artificial Sequence: Synthetic oligonucleotide
  Sense Strand Starting at position 1299 of SEQ ID NO: 317316
agagcuuucugaguacuga

SEQ ID NO: 420732 - RNA, 19 nt, Artificial Sequence
  Description of Artificial Sequence: Synthetic oligonucleotide
  Antisense Strand to SEQ ID NO: 420731
ucaguacucagaaagcucu

SEQ ID NO: 420733 - RNA, 19 nt, Artificial Sequence
  Description of Artificial Sequence: Synthetic oligonucleotide
  Sense Strand Starting at position 1299 of SEQ ID NO: 317317
gagcuuucugaguacugaa

SEQ ID NO: 420734 - RNA, 19 nt, Artificial Sequence
  Description of Artificial Sequence: Synthetic oligonucleotide
  Antisense Strand to SEQ ID NO: 420733
uucaguacucagaaagcuc

SEQ ID NO: 420735 - RNA, 19 nt, Artificial Sequence
  Description of Artificial Sequence: Synthetic oligonucleotide
  Sense Strand Starting at position 1299 of SEQ ID NO: 317399
gauuccaagcagugacauu

SEQ ID NO: 420736 - RNA, 19 nt, Artificial Sequence
  Description of Artificial Sequence: Synthetic oligonucleotide
  Antisense Strand to SEQ ID NO: 420735
aaugucacugcuuggaauc

SEQ ID NO: 420737 - RNA, 19 nt, Artificial Sequence
  Description of Artificial Sequence: Synthetic oligonucleotide
  Sense Strand Starting at position 1299 of SEQ ID NO: 317442
gugcacugcgucuauuuga

SEQ ID NO: 420738 - RNA, 19 nt, Artificial Sequence
  Description of Artificial Sequence: Synthetic oligonucleotide
  Antisense Strand to SEQ ID NO: 420737
ucaaauagacgcagugcac

SEQ ID NO: 420739 - RNA, 19 nt, Artificial Sequence
  Description of Artificial Sequence: Synthetic oligonucleotide
  Sense Strand Starting at position 1299 of SEQ ID NO: 317578
aagcuacacugaucugagu

SEQ ID NO: 420740 - RNA, 19 nt, Artificial Sequence
  Description of Artificial Sequence: Synthetic oligonucleotide
  Antisense Strand to SEQ ID NO: 420739
acucagaucaguguagcuu

SEQ ID NO: 420741 - RNA, 19 nt, Artificial Sequence
  Description of Artificial Sequence: Synthetic oligonucleotide
  Sense Strand Starting at position 1299 of SEQ ID NO: 317959
gcagcaguuacaggagaau

SEQ ID NO: 420742 - RNA, 19 nt, Artificial Sequence
  Description of Artificial Sequence: Synthetic oligonucleotide
  Antisense Strand to SEQ ID NO: 420741
auucuccuguaacugcugc

SEQ ID NO: 420743 - RNA, 19 nt, Artificial Sequence
  Description of Artificial Sequence: Synthetic oligonucleotide
  Sense Strand Starting at position 1299 of SEQ ID NO: 318259
acugaagggugcccugaaa

SEQ ID NO: 420744 - RNA, 19 nt, Artificial Sequence
  Description of Artificial Sequence: Synthetic oligonucleotide
  Antisense Strand to SEQ ID NO: 420743
uuucagggcacccuucagu

SEQ ID NO: 420745 - RNA, 19 nt, Artificial Sequence
  Description of Artificial Sequence: Synthetic oligonucleotide
  Sense Strand Starting at position 1299 of SEQ ID NO: 318271
ccugaaaccugguuaaagu

SEQ ID NO: 420746 - RNA, 19 nt, Artificial Sequence
  Description of Artificial Sequence: Synthetic oligonucleotide
  Antisense Strand to SEQ ID NO: 420745
acuuuaaccagguuucagg

SEQ ID NO: 420747 - RNA, 19 nt, Artificial Sequence
  Description of Artificial Sequence: Synthetic oligonucleotide
  Sense Strand Starting at position 1299 of SEQ ID NO: 318465
gaugaaggcuuugccuaga

SEQ ID NO: 420748 - RNA, 19 nt, Artificial Sequence
  Description of Artificial Sequence: Synthetic oligonucleotide
  Antisense Strand to SEQ ID NO: 420747
ucuaggcaaagccuucauc

SEQ ID NO: 420749 - RNA, 19 nt, Artificial Sequence
  Description of Artificial Sequence: Synthetic oligonucleotide
  Sense Strand Starting at position 1299 of SEQ ID NO: 318468
gaaggcuuugccuagacau

SEQ ID NO: 420750 - RNA, 19 nt, Artificial Sequence
  Description of Artificial Sequence: Synthetic oligonucleotide
  Antisense Strand to SEQ ID NO: 420749
augucuaggcaaagccuuc

SEQ ID NO: 420751 - RNA, 19 nt, Artificial Sequence
  Description of Artificial Sequence: Synthetic oligonucleotide
  Sense Strand Starting at position 1299 of SEQ ID NO: 318719
ggcuuucucagucaguaag

SEQ ID NO: 420752 - RNA, 19 nt, Artificial Sequence
  Description of Artificial Sequence: Synthetic oligonucleotide
  Antisense Strand to SEQ ID NO: 420751
cuuacugacugagaaagcc

SEQ ID NO: 420753 - RNA, 19 nt, Artificial Sequence
  Description of Artificial Sequence: Synthetic oligonucleotide
  Sense Strand Starting at position 1299 of SEQ ID NO: 318722
uuucucagucaguaagcuu

SEQ ID NO: 420754 - RNA, 19 nt, Artificial Sequence
  Description of Artificial Sequence: Synthetic oligonucleotide
  Antisense Strand to SEQ ID NO: 420753
aagcuuacugacugagaaa

SEQ ID NO: 420755 - RNA, 19 nt, Artificial Sequence
  Description of Artificial Sequence: Synthetic oligonucleotide
  Sense Strand Starting at position 1299 of SEQ ID NO: 318902
acacauaguaugugugagu

SEQ ID NO: 420756 - RNA, 19 nt, Artificial Sequence
  Description of Artificial Sequence: Synthetic oligonucleotide
  Antisense Strand to SEQ ID NO: 420755
acucacacauacuaugugu

SEQ ID NO: 420757 - RNA, 19 nt, Artificial Sequence
  Description of Artificial Sequence: Synthetic oligonucleotide
  Sense Strand Starting at position 1299 of SEQ ID NO: 318940
gcaaaugacaagggaguua

SEQ ID NO: 420758 - RNA, 19 nt, Artificial Sequence
  Description of Artificial Sequence: Synthetic oligonucleotide
  Antisense Strand to SEQ ID NO: 420757
uaacucccuugucauuugc

SEQ ID NO: 420759 - RNA, 19 nt, Artificial Sequence
  Description of Artificial Sequence: Synthetic oligonucleotide
  Sense Strand Starting at position 1299 of SEQ ID NO: 319025
uuuaaauguugggcauaaa

SEQ ID NO: 420760 - RNA, 19 nt, Artificial Sequence
  Description of Artificial Sequence: Synthetic oligonucleotide
  Antisense Strand to SEQ ID NO: 420759
uuuaugcccaacauuuaaa

SEQ ID NO: 420761 - RNA, 19 nt, Artificial Sequence
  Description of Artificial Sequence: Synthetic oligonucleotide
  Sense Strand Starting at position 1299 of SEQ ID NO: 319026
uuaaauguugggcauaaac

SEQ ID NO: 420762 - RNA, 19 nt, Artificial Sequence
  Description of Artificial Sequence: Synthetic oligonucleotide
  Antisense Strand to SEQ ID NO: 420761
guuuaugcccaacauuuaa

SEQ ID NO: 420763 - RNA, 19 nt, Artificial Sequence
  Description of Artificial Sequence: Synthetic oligonucleotide
  Sense Strand Starting at position 1299 of SEQ ID NO: 319036
ggcauaaacaguggugaga

SEQ ID NO: 420764 - RNA, 19 nt, Artificial Sequence
  Description of Artificial Sequence: Synthetic oligonucleotide
  Antisense Strand to SEQ ID NO: 420763
ucucaccacuguuuaugcc

SEQ ID NO: 420765 - RNA, 19 nt, Artificial Sequence
  Description of Artificial Sequence: Synthetic oligonucleotide
  Sense Strand Starting at position 1299 of SEQ ID NO: 319050
ugagaugucuucucccuuu

SEQ ID NO: 420766 - RNA, 19 nt, Artificial Sequence
  Description of Artificial Sequence: Synthetic oligonucleotide
  Antisense Strand to SEQ ID NO: 420765
aaagggagaagacaucuca

SEQ ID NO: 420767 - RNA, 19 nt, Artificial Sequence
  Description of Artificial Sequence: Synthetic oligonucleotide
  Sense Strand Starting at position 1300 of SEQ ID NO: 315276
gguucuuauuaaucacaga

SEQ ID NO: 420768 - RNA, 19 nt, Artificial Sequence
  Description of Artificial Sequence: Synthetic oligonucleotide
  Antisense Strand to SEQ ID NO: 420767
ucugugauuaauaagaacc

SEQ ID NO: 420769 - RNA, 19 nt, Artificial Sequence
  Description of Artificial Sequence: Synthetic oligonucleotide
  Sense Strand Starting at position 1300 of SEQ ID NO: 315382
gccagcaacguacauaaau

SEQ ID NO: 420770 - RNA, 19 nt, Artificial Sequence
  Description of Artificial Sequence: Synthetic oligonucleotide
  Antisense Strand to SEQ ID NO: 420769
auuuauguacguugcuggc

SEQ ID NO: 420771 - RNA, 19 nt, Artificial Sequence
  Description of Artificial Sequence: Synthetic oligonucleotide
  Sense Strand Starting at position 1300 of SEQ ID NO: 315446
aaugucucagggugaugaa

SEQ ID NO: 420772 - RNA, 19 nt, Artificial Sequence
  Description of Artificial Sequence: Synthetic oligonucleotide
  Antisense Strand to SEQ ID NO: 420771
uucaucacccugagacauu

SEQ ID NO: 420773 - RNA, 19 nt, Artificial Sequence
  Description of Artificial Sequence: Synthetic oligonucleotide
  Sense Strand Starting at position 1300 of SEQ ID NO: 315447
augucucagggugaugaau

SEQ ID NO: 420774 - RNA, 19 nt, Artificial Sequence
  Description of Artificial Sequence: Synthetic oligonucleotide
  Antisense Strand to SEQ ID NO: 420773
auucaucacccugagacau

SEQ ID NO: 420775 - RNA, 19 nt, Artificial Sequence
  Description of Artificial Sequence: Synthetic oligonucleotide
  Sense Strand Starting at position 1300 of SEQ ID NO: 317194
cccggacugcucugaaaug

SEQ ID NO: 420776 - RNA, 19 nt, Artificial Sequence
  Description of Artificial Sequence: Synthetic oligonucleotide
  Antisense Strand to SEQ ID NO: 420775
cauuucagagcaguccggg

SEQ ID NO: 420777 - RNA, 19 nt, Artificial Sequence
  Description of Artificial Sequence: Synthetic oligonucleotide
  Sense Strand Starting at position 1300 of SEQ ID NO: 317286
gcagacaugugaccacgaa

SEQ ID NO: 420778 - RNA, 19 nt, Artificial Sequence
  Description of Artificial Sequence: Synthetic oligonucleotide
  Antisense Strand to SEQ ID NO: 420777
uucguggucacaugucugc

SEQ ID NO: 420779 - RNA, 19 nt, Artificial Sequence
  Description of Artificial Sequence: Synthetic oligonucleotide
  Sense Strand Starting at position 1300 of SEQ ID NO: 317505
uccucugguuugcuuuaaa

SEQ ID NO: 420780 - RNA, 19 nt, Artificial Sequence
  Description of Artificial Sequence: Synthetic oligonucleotide
  Antisense Strand to SEQ ID NO: 420779
uuuaaagcaaaccagagga

SEQ ID NO: 420781 - RNA, 19 nt, Artificial Sequence
  Description of Artificial Sequence: Synthetic oligonucleotide
  Sense Strand Starting at position 1300 of SEQ ID NO: 317541
ccuucuggcuguucucaaa

SEQ ID NO: 420782 - RNA, 19 nt, Artificial Sequence
  Description of Artificial Sequence: Synthetic oligonucleotide
  Antisense Strand to SEQ ID NO: 420781
uuugagaacagccagaagg

SEQ ID NO: 420783 - RNA, 19 nt, Artificial Sequence
  Description of Artificial Sequence: Synthetic oligonucleotide
  Sense Strand Starting at position 1300 of SEQ ID NO: 317551
guucucaaaccucagucau

SEQ ID NO: 420784 - RNA, 19 nt, Artificial Sequence
  Description of Artificial Sequence: Synthetic oligonucleotide
  Antisense Strand to SEQ ID NO: 420783
augacugagguuugagaac

SEQ ID NO: 420785 - RNA, 19 nt, Artificial Sequence
  Description of Artificial Sequence: Synthetic oligonucleotide
  Sense Strand Starting at position 1300 of SEQ ID NO: 317589
aagggcuuucccugggaga

SEQ ID NO: 420786 - RNA, 19 nt, Artificial Sequence
  Description of Artificial Sequence: Synthetic oligonucleotide
  Antisense Strand to SEQ ID NO: 420785
ucucccagggaaagcccuu

SEQ ID NO: 420787 - RNA, 19 nt, Artificial Sequence
  Description of Artificial Sequence: Synthetic oligonucleotide
  Sense Strand Starting at position 1300 of SEQ ID NO: 317602
gggagagggcucugcugaa

SEQ ID NO: 420788 - RNA, 19 nt, Artificial Sequence
  Description of Artificial Sequence: Synthetic oligonucleotide
  Antisense Strand to SEQ ID NO: 420787
uucagcagagcccucuccc

SEQ ID NO: 420789 - RNA, 19 nt, Artificial Sequence
  Description of Artificial Sequence: Synthetic oligonucleotide
  Sense Strand Starting at position 1300 of SEQ ID NO: 317621
agggaaugauaacaaugaa

SEQ ID NO: 420790 - RNA, 19 nt, Artificial Sequence
  Description of Artificial Sequence: Synthetic oligonucleotide
  Antisense Strand to SEQ ID NO: 420789
uucauuguuaucauucccu

SEQ ID NO: 420791 - RNA, 19 nt, Artificial Sequence
  Description of Artificial Sequence: Synthetic oligonucleotide
  Sense Strand Starting at position 1300 of SEQ ID NO: 317718
aucugaucauaucaaggaa

SEQ ID NO: 420792 - RNA, 19 nt, Artificial Sequence
  Description of Artificial Sequence: Synthetic oligonucleotide
  Antisense Strand to SEQ ID NO: 420791
uuccuugauaugaucagau

SEQ ID NO: 420793 - RNA, 19 nt, Artificial Sequence
  Description of Artificial Sequence: Synthetic oligonucleotide
  Sense Strand Starting at position 1300 of SEQ ID NO: 317743
ggugucucacuggaucuua

SEQ ID NO: 420794 - RNA, 19 nt, Artificial Sequence
  Description of Artificial Sequence: Synthetic oligonucleotide
  Antisense Strand to SEQ ID NO: 420793
uaagauccagugagacacc

SEQ ID NO: 420795 - RNA, 19 nt, Artificial Sequence
  Description of Artificial Sequence: Synthetic oligonucleotide
  Sense Strand Starting at position 1300 of SEQ ID NO: 317765
ccuguuggauaugcaaaga

SEQ ID NO: 420796 - RNA, 19 nt, Artificial Sequence
  Description of Artificial Sequence: Synthetic oligonucleotide
  Antisense Strand to SEQ ID NO: 420795
ucuuugcauauccaacagg

SEQ ID NO: 420797 - RNA, 19 nt, Artificial Sequence
  Description of Artificial Sequence: Synthetic oligonucleotide
  Sense Strand Starting at position 1300 of SEQ ID NO: 317809
gugagauuaaaugguuuac

SEQ ID NO: 420798 - RNA, 19 nt, Artificial Sequence
  Description of Artificial Sequence: Synthetic oligonucleotide
  Antisense Strand to SEQ ID NO: 420797
guaaaccauuuaaucucac

SEQ ID NO: 420799 - RNA, 19 nt, Artificial Sequence
  Description of Artificial Sequence: Synthetic oligonucleotide
  Sense Strand Starting at position 1300 of SEQ ID NO: 317811
gagauuaaaugguuuaccu

SEQ ID NO: 420800 - RNA, 19 nt, Artificial Sequence
  Description of Artificial Sequence: Synthetic oligonucleotide
  Antisense Strand to SEQ ID NO: 420799
agguaaaccauuuaaucuc

SEQ ID NO: 420801 - RNA, 19 nt, Artificial Sequence
  Description of Artificial Sequence: Synthetic oligonucleotide
  Sense Strand Starting at position 1300 of SEQ ID NO: 317839
ggagguguugcccgaaacu

SEQ ID NO: 420802 - RNA, 19 nt, Artificial Sequence
  Description of Artificial Sequence: Synthetic oligonucleotide
  Antisense Strand to SEQ ID NO: 420801
aguuucgggcaacaccucc

SEQ ID NO: 420803 - RNA, 19 nt, Artificial Sequence
  Description of Artificial Sequence: Synthetic oligonucleotide
  Sense Strand Starting at position 1300 of SEQ ID NO: 317956
cuuuccugauuccuggaua

SEQ ID NO: 420804 - RNA, 19 nt, Artificial Sequence
  Description of Artificial Sequence: Synthetic oligonucleotide
  Antisense Strand to SEQ ID NO: 420803
uauccaggaaucaggaaag

SEQ ID NO: 420805 - RNA, 19 nt, Artificial Sequence
  Description of Artificial Sequence: Synthetic oligonucleotide
  Sense Strand Starting at position 1300 of SEQ ID NO: 317984
agauuaaagcucggaaggu

SEQ ID NO: 420806 - RNA, 19 nt, Artificial Sequence
  Description of Artificial Sequence: Synthetic oligonucleotide
  Antisense Strand to SEQ ID NO: 420805
accuuccgagcuuuaaucu

SEQ ID NO: 420807 - RNA, 19 nt, Artificial Sequence
  Description of Artificial Sequence: Synthetic oligonucleotide
  Sense Strand Starting at position 1300 of SEQ ID NO: 318000
gguucccagucuucccaaa

SEQ ID NO: 420808 - RNA, 19 nt, Artificial Sequence
  Description of Artificial Sequence: Synthetic oligonucleotide
  Antisense Strand to SEQ ID NO: 420807
uuugggaagacugggaacc

SEQ ID NO: 420809 - RNA, 19 nt, Artificial Sequence
  Description of Artificial Sequence: Synthetic oligonucleotide
  Sense Strand Starting at position 1300 of SEQ ID NO: 318053
guagucucggacuaggaaa

SEQ ID NO: 420810 - RNA, 19 nt, Artificial Sequence
  Description of Artificial Sequence: Synthetic oligonucleotide
  Antisense Strand to SEQ ID NO: 420809
uuuccuaguccgagacuac

SEQ ID NO: 420811 - RNA, 19 nt, Artificial Sequence
  Description of Artificial Sequence: Synthetic oligonucleotide
  Sense Strand Starting at position 1300 of SEQ ID NO: 318073
gagaaauccugagaaagac

SEQ ID NO: 420812 - RNA, 19 nt, Artificial Sequence
  Description of Artificial Sequence: Synthetic oligonucleotide
  Antisense Strand to SEQ ID NO: 420811
gucuuucucaggauuucuc

SEQ ID NO: 420813 - RNA, 19 nt, Artificial Sequence
  Description of Artificial Sequence: Synthetic oligonucleotide
  Sense Strand Starting at position 1300 of SEQ ID NO: 318165
caggaaauaugguaagaca

SEQ ID NO: 420814 - RNA, 19 nt, Artificial Sequence
  Description of Artificial Sequence: Synthetic oligonucleotide
  Antisense Strand to SEQ ID NO: 420813
ugucuuaccauauuuccug

SEQ ID NO: 420815 - RNA, 19 nt, Artificial Sequence
  Description of Artificial Sequence: Synthetic oligonucleotide
  Sense Strand Starting at position 1300 of SEQ ID NO: 318229
cucuauuuguuauaggauu

SEQ ID NO: 420816 - RNA, 19 nt, Artificial Sequence
  Description of Artificial Sequence: Synthetic oligonucleotide
  Antisense Strand to SEQ ID NO: 420815
aauccuauaacaaauagag

SEQ ID NO: 420817 - RNA, 19 nt, Artificial Sequence
  Description of Artificial Sequence: Synthetic oligonucleotide
  Sense Strand Starting at position 1300 of SEQ ID NO: 318291
agauaaugcuucuucgaag

SEQ ID NO: 420818 - RNA, 19 nt, Artificial Sequence
  Description of Artificial Sequence: Synthetic oligonucleotide
  Antisense Strand to SEQ ID NO: 420817
cuucgaagaagcauuaucu

SEQ ID NO: 420819 - RNA, 19 nt, Artificial Sequence
  Description of Artificial Sequence: Synthetic oligonucleotide
  Sense Strand Starting at position 1300 of SEQ ID NO: 318292
gauaaugcuucuucgaaga

SEQ ID NO: 420820 - RNA, 19 nt, Artificial Sequence
  Description of Artificial Sequence: Synthetic oligonucleotide
  Antisense Strand to SEQ ID NO: 420819
ucuucgaagaagcauuauc

SEQ ID NO: 420821 - RNA, 19 nt, Artificial Sequence
  Description of Artificial Sequence: Synthetic oligonucleotide
  Sense Strand Starting at position 1300 of SEQ ID NO: 318322
guuacaggcuucgcagaga

SEQ ID NO: 420822 - RNA, 19 nt, Artificial Sequence
  Description of Artificial Sequence: Synthetic oligonucleotide
  Antisense Strand to SEQ ID NO: 420821
ucucugcgaagccuguaac

SEQ ID NO: 420823 - RNA, 19 nt, Artificial Sequence
  Description of Artificial Sequence: Synthetic oligonucleotide
  Sense Strand Starting at position 1300 of SEQ ID NO: 318333
cgcagagacguuuaaugaa

SEQ ID NO: 420824 - RNA, 19 nt, Artificial Sequence
  Description of Artificial Sequence: Synthetic oligonucleotide
  Antisense Strand to SEQ ID NO: 420823
uucauuaaacgucucugcg

SEQ ID NO: 420825 - RNA, 19 nt, Artificial Sequence
  Description of Artificial Sequence: Synthetic oligonucleotide
  Sense Strand Starting at position 1300 of SEQ ID NO: 318497
uacaaaguguucccacgua

SEQ ID NO: 420826 - RNA, 19 nt, Artificial Sequence
  Description of Artificial Sequence: Synthetic oligonucleotide
  Antisense Strand to SEQ ID NO: 420825
uacgugggaacacuuugua

SEQ ID NO: 420827 - RNA, 19 nt, Artificial Sequence
  Description of Artificial Sequence: Synthetic oligonucleotide
  Sense Strand Starting at position 1300 of SEQ ID NO: 318502
aguguucccacguauuauu

SEQ ID NO: 420828 - RNA, 19 nt, Artificial Sequence
  Description of Artificial Sequence: Synthetic oligonucleotide
  Antisense Strand to SEQ ID NO: 420827
aauaauacgugggaacacu

SEQ ID NO: 420829 - RNA, 19 nt, Artificial Sequence
  Description of Artificial Sequence: Synthetic oligonucleotide
  Sense Strand Starting at position 1300 of SEQ ID NO: 318548
gccauuuguuugcugcuaa

SEQ ID NO: 420830 - RNA, 19 nt, Artificial Sequence
  Description of Artificial Sequence: Synthetic oligonucleotide
  Antisense Strand to SEQ ID NO: 420829
uuagcagcaaacaaauggc

SEQ ID NO: 420831 - RNA, 19 nt, Artificial Sequence
  Description of Artificial Sequence: Synthetic oligonucleotide
  Sense Strand Starting at position 1300 of SEQ ID NO: 318635
cgaaccuuacucugcaaau

SEQ ID NO: 420832 - RNA, 19 nt, Artificial Sequence
  Description of Artificial Sequence: Synthetic oligonucleotide
  Antisense Strand to SEQ ID NO: 420831
auuugcagaguaagguucg

SEQ ID NO: 420833 - RNA, 19 nt, Artificial Sequence
  Description of Artificial Sequence: Synthetic oligonucleotide
  Sense Strand Starting at position 1300 of SEQ ID NO: 318681
cauggaugugaccagucuu

SEQ ID NO: 420834 - RNA, 19 nt, Artificial Sequence
  Description of Artificial Sequence: Synthetic oligonucleotide
  Antisense Strand to SEQ ID NO: 420833
aagacuggucacauccaug

SEQ ID NO: 420835 - RNA, 19 nt, Artificial Sequence
  Description of Artificial Sequence: Synthetic oligonucleotide
  Sense Strand Starting at position 1300 of SEQ ID NO: 318700
cgaccuuugcaaggauuaa

SEQ ID NO: 420836 - RNA, 19 nt, Artificial Sequence
  Description of Artificial Sequence: Synthetic oligonucleotide
  Antisense Strand to SEQ ID NO: 420835
uuaauccuugcaaaggucg

SEQ ID NO: 420837 - RNA, 19 nt, Artificial Sequence
  Description of Artificial Sequence: Synthetic oligonucleotide
  Sense Strand Starting at position 1300 of SEQ ID NO: 318712
ggauuaaucucacucuuug

SEQ ID NO: 420838 - RNA, 19 nt, Artificial Sequence
  Description of Artificial Sequence: Synthetic oligonucleotide
  Antisense Strand to SEQ ID NO: 420837
caaagagugagauuaaucc

SEQ ID NO: 420839 - RNA, 19 nt, Artificial Sequence
  Description of Artificial Sequence: Synthetic oligonucleotide
  Sense Strand Starting at position 1300 of SEQ ID NO: 318747
gcgugacuuagcucuggca

SEQ ID NO: 420840 - RNA, 19 nt, Artificial Sequence
  Description of Artificial Sequence: Synthetic oligonucleotide
  Antisense Strand to SEQ ID NO: 420839
ugccagagcuaagucacgc

SEQ ID NO: 420841 - RNA, 19 nt, Artificial Sequence
  Description of Artificial Sequence: Synthetic oligonucleotide
  Sense Strand Starting at position 1300 of SEQ ID NO: 318749
gugacuuagcucuggcaac

SEQ ID NO: 420842 - RNA, 19 nt, Artificial Sequence
  Description of Artificial Sequence: Synthetic oligonucleotide
  Antisense Strand to SEQ ID NO: 420841
guugccagagcuaagucac

SEQ ID NO: 420843 - RNA, 19 nt, Artificial Sequence
  Description of Artificial Sequence: Synthetic oligonucleotide
  Sense Strand Starting at position 1300 of SEQ ID NO: 318956
gcaucuugacaauguuaac

SEQ ID NO: 420844 - RNA, 19 nt, Artificial Sequence
  Description of Artificial Sequence: Synthetic oligonucleotide
  Antisense Strand to SEQ ID NO: 420843
guuaacauugucaagaugc

SEQ ID NO: 420845 - RNA, 19 nt, Artificial Sequence
  Description of Artificial Sequence: Synthetic oligonucleotide
  Sense Strand Starting at position 1300 of SEQ ID NO: 319057
ugguacauauaucugcaau

SEQ ID NO: 420846 - RNA, 19 nt, Artificial Sequence
  Description of Artificial Sequence: Synthetic oligonucleotide
  Antisense Strand to SEQ ID NO: 420845
auugcagauauauguacca

SEQ ID NO: 420847 - RNA, 19 nt, Artificial Sequence
  Description of Artificial Sequence: Synthetic oligonucleotide
  Sense Strand Starting at position 1301 of SEQ ID NO: 315242
cuuacaguacgcuaaauau

SEQ ID NO: 420848 - RNA, 19 nt, Artificial Sequence
  Description of Artificial Sequence: Synthetic oligonucleotide
  Antisense Strand to SEQ ID NO: 420847
auauuuagcguacuguaag

SEQ ID NO: 420849 - RNA, 19 nt, Artificial Sequence
  Description of Artificial Sequence: Synthetic oligonucleotide
  Sense Strand Starting at position 1301 of SEQ ID NO: 315336
ucugaaacauguuucgaag

SEQ ID NO: 420850 - RNA, 19 nt, Artificial Sequence
  Description of Artificial Sequence: Synthetic oligonucleotide
  Antisense Strand to SEQ ID NO: 420849
cuucgaaacauguuucaga

SEQ ID NO: 420851 - RNA, 19 nt, Artificial Sequence
  Description of Artificial Sequence: Synthetic oligonucleotide
  Sense Strand Starting at position 1301 of SEQ ID NO: 315348
uucgaaguuaggcaaucaa

SEQ ID NO: 420852 - RNA, 19 nt, Artificial Sequence
  Description of Artificial Sequence: Synthetic oligonucleotide
  Antisense Strand to SEQ ID NO: 420851
uugauugccuaacuucgaa

SEQ ID NO: 420853 - RNA, 19 nt, Artificial Sequence
  Description of Artificial Sequence: Synthetic oligonucleotide
  Sense Strand Starting at position 1301 of SEQ ID NO: 315390
auuugacaucuuggcguuu

SEQ ID NO: 420854 - RNA, 19 nt, Artificial Sequence
  Description of Artificial Sequence: Synthetic oligonucleotide
  Antisense Strand to SEQ ID NO: 420853
aaacgccaagaugucaaau

SEQ ID NO: 420855 - RNA, 19 nt, Artificial Sequence
  Description of Artificial Sequence: Synthetic oligonucleotide
  Sense Strand Starting at position 1301 of SEQ ID NO: 315449
uugugccucgcugugaauu

SEQ ID NO: 420856 - RNA, 19 nt, Artificial Sequence
  Description of Artificial Sequence: Synthetic oligonucleotide
  Antisense Strand to SEQ ID NO: 420855
aauucacagcgaggcacaa

SEQ ID NO: 420857 - RNA, 19 nt, Artificial Sequence
  Description of Artificial Sequence: Synthetic oligonucleotide
  Sense Strand Starting at position 1301 of SEQ ID NO: 315525
gacgaaugauuacuuuaag

SEQ ID NO: 420858 - RNA, 19 nt, Artificial Sequence
  Description of Artificial Sequence: Synthetic oligonucleotide
  Antisense Strand to SEQ ID NO: 420857
cuuaaaguaaucauucguc

SEQ ID NO: 420859 - RNA, 19 nt, Artificial Sequence
  Description of Artificial Sequence: Synthetic oligonucleotide
  Sense Strand Starting at position 1301 of SEQ ID NO: 315609
uuuguugugcuguacauuu

SEQ ID NO: 420860 - RNA, 19 nt, Artificial Sequence
  Description of Artificial Sequence: Synthetic oligonucleotide
  Antisense Strand to SEQ ID NO: 420859
aaauguacagcacaacaaa

SEQ ID NO: 420861 - RNA, 19 nt, Artificial Sequence
  Description of Artificial Sequence: Synthetic oligonucleotide
  Sense Strand Starting at position 1301 of SEQ ID NO: 315662
uggucacaauuugagagua

SEQ ID NO: 420862 - RNA, 19 nt, Artificial Sequence
  Description of Artificial Sequence: Synthetic oligonucleotide
  Antisense Strand to SEQ ID NO: 420861
uacucucaaauugugacca

SEQ ID NO: 420863 - RNA, 19 nt, Artificial Sequence
  Description of Artificial Sequence: Synthetic oligonucleotide
  Sense Strand Starting at position 1301 of SEQ ID NO: 315664
gucacaauuugagaguaau

SEQ ID NO: 420864 - RNA, 19 nt, Artificial Sequence
  Description of Artificial Sequence: Synthetic oligonucleotide
  Antisense Strand to SEQ ID NO: 420863
auuacucucaaauugugac

SEQ ID NO: 420865 - RNA, 19 nt, Artificial Sequence
  Description of Artificial Sequence: Synthetic oligonucleotide
  Sense Strand Starting at position 1301 of SEQ ID NO: 315672
uugagaguaauacgaggau

SEQ ID NO: 420866 - RNA, 19 nt, Artificial Sequence
  Description of Artificial Sequence: Synthetic oligonucleotide
  Antisense Strand to SEQ ID NO: 420865
auccucguauuacucucaa

SEQ ID NO: 420867 - RNA, 19 nt, Artificial Sequence
  Description of Artificial Sequence: Synthetic oligonucleotide
  Sense Strand Starting at position 1301 of SEQ ID NO: 315729
aaggaaucuuuguuugcca

SEQ ID NO: 420868 - RNA, 19 nt, Artificial Sequence
  Description of Artificial Sequence: Synthetic oligonucleotide
  Antisense Strand to SEQ ID NO: 420867
uggcaaacaaagauuccuu

SEQ ID NO: 420869 - RNA, 19 nt, Artificial Sequence
  Description of Artificial Sequence: Synthetic oligonucleotide
  Sense Strand Starting at position 1301 of SEQ ID NO: 315857
cugaauauuuaccaggaaa

SEQ ID NO: 420870 - RNA, 19 nt, Artificial Sequence
  Description of Artificial Sequence: Synthetic oligonucleotide
  Antisense Strand to SEQ ID NO: 420869
uuuccugguaaauauucag

SEQ ID NO: 420871 - RNA, 19 nt, Artificial Sequence
  Description of Artificial Sequence: Synthetic oligonucleotide
  Sense Strand Starting at position 1301 of SEQ ID NO: 315916
gcaaauauacagugaccca

SEQ ID NO: 420872 - RNA, 19 nt, Artificial Sequence
  Description of Artificial Sequence: Synthetic oligonucleotide
  Antisense Strand to SEQ ID NO: 420871
ugggucacuguauauuugc

SEQ ID NO: 420873 - RNA, 19 nt, Artificial Sequence
  Description of Artificial Sequence: Synthetic oligonucleotide
  Sense Strand Starting at position 1301 of SEQ ID NO: 316168
uuaucuccguuauuuguga

SEQ ID NO: 420874 - RNA, 19 nt, Artificial Sequence
  Description of Artificial Sequence: Synthetic oligonucleotide
  Antisense Strand to SEQ ID NO: 420873
ucacaaauaacggagauaa

SEQ ID NO: 420875 - RNA, 19 nt, Artificial Sequence
  Description of Artificial Sequence: Synthetic oligonucleotide
  Sense Strand Starting at position 1301 of SEQ ID NO: 316182
ugugauacuuccuccucca

SEQ ID NO: 420876 - RNA, 19 nt, Artificial Sequence
  Description of Artificial Sequence: Synthetic oligonucleotide
  Antisense Strand to SEQ ID NO: 420875
uggaggaggaaguaucaca

SEQ ID NO: 420877 - RNA, 19 nt, Artificial Sequence
  Description of Artificial Sequence: Synthetic oligonucleotide
  Sense Strand Starting at position 1301 of SEQ ID NO: 316214
ggguguuuccaagggaaag

SEQ ID NO: 420878 - RNA, 19 nt, Artificial Sequence
  Description of Artificial Sequence: Synthetic oligonucleotide
  Antisense Strand to SEQ ID NO: 420877
cuuucccuuggaaacaccc

SEQ ID NO: 420879 - RNA, 19 nt, Artificial Sequence
  Description of Artificial Sequence: Synthetic oligonucleotide
  Sense Strand Starting at position 1301 of SEQ ID NO: 316249
ccagcuaacuuucugggaa

SEQ ID NO: 420880 - RNA, 19 nt, Artificial Sequence
  Description of Artificial Sequence: Synthetic oligonucleotide
  Antisense Strand to SEQ ID NO: 420879
uucccagaaaguuagcugg

SEQ ID NO: 420881 - RNA, 19 nt, Artificial Sequence
  Description of Artificial Sequence: Synthetic oligonucleotide
  Sense Strand Starting at position 1301 of SEQ ID NO: 316409
ccgaacuguggucaucauu

SEQ ID NO: 420882 - RNA, 19 nt, Artificial Sequence
  Description of Artificial Sequence: Synthetic oligonucleotide
  Antisense Strand to SEQ ID NO: 420881
aaugaugaccacaguucgg

SEQ ID NO: 420883 - RNA, 19 nt, Artificial Sequence
  Description of Artificial Sequence: Synthetic oligonucleotide
  Sense Strand Starting at position 1301 of SEQ ID NO: 316658
agugcuuaucuuuaagacu

SEQ ID NO: 420884 - RNA, 19 nt, Artificial Sequence
  Description of Artificial Sequence: Synthetic oligonucleotide
  Antisense Strand to SEQ ID NO: 420883
agucuuaaagauaagcacu

SEQ ID NO: 420885 - RNA, 19 nt, Artificial Sequence
  Description of Artificial Sequence: Synthetic oligonucleotide
  Sense Strand Starting at position 1301 of SEQ ID NO: 316729
acuggagauuucuaaccca

SEQ ID NO: 420886 - RNA, 19 nt, Artificial Sequence
  Description of Artificial Sequence: Synthetic oligonucleotide
  Antisense Strand to SEQ ID NO: 420885
uggguuagaaaucuccagu

SEQ ID NO: 420887 - RNA, 19 nt, Artificial Sequence
  Description of Artificial Sequence: Synthetic oligonucleotide
  Sense Strand Starting at position 1301 of SEQ ID NO: 316921
cgguuugccucauuugaug

SEQ ID NO: 420888 - RNA, 19 nt, Artificial Sequence
  Description of Artificial Sequence: Synthetic oligonucleotide
  Antisense Strand to SEQ ID NO: 420887
caucaaaugaggcaaaccg

SEQ ID NO: 420889 - RNA, 19 nt, Artificial Sequence
  Description of Artificial Sequence: Synthetic oligonucleotide
  Sense Strand Starting at position 1301 of SEQ ID NO: 316965
uagcgugacuuacccaaga

SEQ ID NO: 420890 - RNA, 19 nt, Artificial Sequence
  Description of Artificial Sequence: Synthetic oligonucleotide
  Antisense Strand to SEQ ID NO: 420889
ucuuggguaagucacgcua

SEQ ID NO: 420891 - RNA, 19 nt, Artificial Sequence
  Description of Artificial Sequence: Synthetic oligonucleotide
  Sense Strand Starting at position 1301 of SEQ ID NO: 316967
gcgugacuuacccaagauc

SEQ ID NO: 420892 - RNA, 19 nt, Artificial Sequence
  Description of Artificial Sequence: Synthetic oligonucleotide
  Antisense Strand to SEQ ID NO: 420891
gaucuuggguaagucacgc

SEQ ID NO: 420893 - RNA, 19 nt, Artificial Sequence
  Description of Artificial Sequence: Synthetic oligonucleotide
  Sense Strand Starting at position 1301 of SEQ ID NO: 317177
ccaacacuuguauguuaga

SEQ ID NO: 420894 - RNA, 19 nt, Artificial Sequence
  Description of Artificial Sequence: Synthetic oligonucleotide
  Antisense Strand to SEQ ID NO: 420893
ucuaacauacaaguguugg

SEQ ID NO: 420895 - RNA, 19 nt, Artificial Sequence
  Description of Artificial Sequence: Synthetic oligonucleotide
  Sense Strand Starting at position 1301 of SEQ ID NO: 317184
uuguauguuagacaagagu

SEQ ID NO: 420896 - RNA, 19 nt, Artificial Sequence
  Description of Artificial Sequence: Synthetic oligonucleotide
  Antisense Strand to SEQ ID NO: 420895
acucuugucuaacauacaa

SEQ ID NO: 420897 - RNA, 19 nt, Artificial Sequence
  Description of Artificial Sequence: Synthetic oligonucleotide
  Sense Strand Starting at position 1301 of SEQ ID NO: 317197
aagagugguaacuguugua

SEQ ID NO: 420898 - RNA, 19 nt, Artificial Sequence
  Description of Artificial Sequence: Synthetic oligonucleotide
  Antisense Strand to SEQ ID NO: 420897
uacaacaguuaccacucuu

SEQ ID NO: 420899 - RNA, 19 nt, Artificial Sequence
  Description of Artificial Sequence: Synthetic oligonucleotide
  Sense Strand Starting at position 1301 of SEQ ID NO: 317255
agacauuuguucugggaga

SEQ ID NO: 420900 - RNA, 19 nt, Artificial Sequence
  Description of Artificial Sequence: Synthetic oligonucleotide
  Antisense Strand to SEQ ID NO: 420899
ucucccagaacaaaugucu

SEQ ID NO: 420901 - RNA, 19 nt, Artificial Sequence
  Description of Artificial Sequence: Synthetic oligonucleotide
  Sense Strand Starting at position 1301 of SEQ ID NO: 317472
agaaauugcuacuugugua

SEQ ID NO: 420902 - RNA, 19 nt, Artificial Sequence
  Description of Artificial Sequence: Synthetic oligonucleotide
  Antisense Strand to SEQ ID NO: 420901
uacacaaguagcaauuucu

SEQ ID NO: 420903 - RNA, 19 nt, Artificial Sequence
  Description of Artificial Sequence: Synthetic oligonucleotide
  Sense Strand Starting at position 1301 of SEQ ID NO: 317484
uuguguaauggugaacuaa

SEQ ID NO: 420904 - RNA, 19 nt, Artificial Sequence
  Description of Artificial Sequence: Synthetic oligonucleotide
  Antisense Strand to SEQ ID NO: 420903
uuaguucaccauuacacaa

SEQ ID NO: 420905 - RNA, 19 nt, Artificial Sequence
  Description of Artificial Sequence: Synthetic oligonucleotide
  Sense Strand Starting at position 1301 of SEQ ID NO: 317515
caagguauguaccucagau

SEQ ID NO: 420906 - RNA, 19 nt, Artificial Sequence
  Description of Artificial Sequence: Synthetic oligonucleotide
  Antisense Strand to SEQ ID NO: 420905
aucugagguacauaccuug

SEQ ID NO: 420907 - RNA, 19 nt, Artificial Sequence
  Description of Artificial Sequence: Synthetic oligonucleotide
  Sense Strand Starting at position 1301 of SEQ ID NO: 317517
agguauguaccucagaugu

SEQ ID NO: 420908 - RNA, 19 nt, Artificial Sequence
  Description of Artificial Sequence: Synthetic oligonucleotide
  Antisense Strand to SEQ ID NO: 420907
acaucugagguacauaccu

SEQ ID NO: 420909 - RNA, 19 nt, Artificial Sequence
  Description of Artificial Sequence: Synthetic oligonucleotide
  Sense Strand Starting at position 1301 of SEQ ID NO: 317578
uuuggaaaccgugagauug

SEQ ID NO: 420910 - RNA, 19 nt, Artificial Sequence
  Description of Artificial Sequence: Synthetic oligonucleotide
  Antisense Strand to SEQ ID NO: 420909
caaucucacgguuuccaaa

SEQ ID NO: 420911 - RNA, 19 nt, Artificial Sequence
  Description of Artificial Sequence: Synthetic oligonucleotide
  Sense Strand Starting at position 1301 of SEQ ID NO: 317643
gcaucucagucucugagau

SEQ ID NO: 420912 - RNA, 19 nt, Artificial Sequence
  Description of Artificial Sequence: Synthetic oligonucleotide
  Antisense Strand to SEQ ID NO: 420911
aucucagagacugagaugc

SEQ ID NO: 420913 - RNA, 19 nt, Artificial Sequence
  Description of Artificial Sequence: Synthetic oligonucleotide
  Sense Strand Starting at position 1301 of SEQ ID NO: 318047
agacuucuucugcauucga

SEQ ID NO: 420914 - RNA, 19 nt, Artificial Sequence
  Description of Artificial Sequence: Synthetic oligonucleotide
  Antisense Strand to SEQ ID NO: 420913
ucgaaugcagaagaagucu

SEQ ID NO: 420915 - RNA, 19 nt, Artificial Sequence
  Description of Artificial Sequence: Synthetic oligonucleotide
  Sense Strand Starting at position 1301 of SEQ ID NO: 318449
agagcuuuaggauauguua

SEQ ID NO: 420916 - RNA, 19 nt, Artificial Sequence
  Description of Artificial Sequence: Synthetic oligonucleotide
  Antisense Strand to SEQ ID NO: 420915
uaacauauccuaaagcucu

SEQ ID NO: 420917 - RNA, 19 nt, Artificial Sequence
  Description of Artificial Sequence: Synthetic oligonucleotide
  Sense Strand Starting at position 1301 of SEQ ID NO: 318452
gcuuuaggauauguuaaag

SEQ ID NO: 420918 - RNA, 19 nt, Artificial Sequence
  Description of Artificial Sequence: Synthetic oligonucleotide
  Antisense Strand to SEQ ID NO: 420917
cuuuaacauauccuaaagc

SEQ ID NO: 420919 - RNA, 19 nt, Artificial Sequence
  Description of Artificial Sequence: Synthetic oligonucleotide
  Sense Strand Starting at position 1301 of SEQ ID NO: 318484
uagaauaaggaguguuuaa

SEQ ID NO: 420920 - RNA, 19 nt, Artificial Sequence
  Description of Artificial Sequence: Synthetic oligonucleotide
  Antisense Strand to SEQ ID NO: 420919
uuaaacacuccuuauucua

SEQ ID NO: 420921 - RNA, 19 nt, Artificial Sequence
  Description of Artificial Sequence: Synthetic oligonucleotide
  Sense Strand Starting at position 1301 of SEQ ID NO: 318572
auaggcauuuccgaagaga

SEQ ID NO: 420922 - RNA, 19 nt, Artificial Sequence
  Description of Artificial Sequence: Synthetic oligonucleotide
  Antisense Strand to SEQ ID NO: 420921
ucucuucggaaaugccuau

SEQ ID NO: 420923 - RNA, 19 nt, Artificial Sequence
  Description of Artificial Sequence: Synthetic oligonucleotide
  Sense Strand Starting at position 1301 of SEQ ID NO: 319131
agaauuguaaaguggcauu

SEQ ID NO: 420924 - RNA, 19 nt, Artificial Sequence
  Description of Artificial Sequence: Synthetic oligonucleotide
  Antisense Strand to SEQ ID NO: 420923
aaugccacuuuacaauucu

SEQ ID NO: 420925 - RNA, 19 nt, Artificial Sequence
  Description of Artificial Sequence: Synthetic oligonucleotide
  Sense Strand Starting at position 1301 of SEQ ID NO: 319167
ggacuuguagguuggguga

SEQ ID NO: 420926 - RNA, 19 nt, Artificial Sequence
  Description of Artificial Sequence: Synthetic oligonucleotide
  Antisense Strand to SEQ ID NO: 420925
ucacccaaccuacaagucc

SEQ ID NO: 420927 - RNA, 19 nt, Artificial Sequence
  Description of Artificial Sequence: Synthetic oligonucleotide
  Sense Strand Starting at position 1302 of SEQ ID NO: 315896
ggaagugcuccuuaacuga

SEQ ID NO: 420928 - RNA, 19 nt, Artificial Sequence
  Description of Artificial Sequence: Synthetic oligonucleotide
  Antisense Strand to SEQ ID NO: 420927
ucaguuaaggagcacuucc

SEQ ID NO: 420929 - RNA, 19 nt, Artificial Sequence
  Description of Artificial Sequence: Synthetic oligonucleotide
  Sense Strand Starting at position 1302 of SEQ ID NO: 315958
gucaauuucccacgccaca

SEQ ID NO: 420930 - RNA, 19 nt, Artificial Sequence
  Description of Artificial Sequence: Synthetic oligonucleotide
  Antisense Strand to SEQ ID NO: 420929
uguggcgugggaaauugac

SEQ ID NO: 420931 - RNA, 19 nt, Artificial Sequence
  Description of Artificial Sequence: Synthetic oligonucleotide
  Sense Strand Starting at position 1302 of SEQ ID NO: 316011
gcuuguuccugucuuugca

SEQ ID NO: 420932 - RNA, 19 nt, Artificial Sequence
  Description of Artificial Sequence: Synthetic oligonucleotide
  Antisense Strand to SEQ ID NO: 420931
ugcaaagacaggaacaagc

SEQ ID NO: 420933 - RNA, 19 nt, Artificial Sequence
  Description of Artificial Sequence: Synthetic oligonucleotide
  Sense Strand Starting at position 1302 of SEQ ID NO: 316046
ggaggaauguguucuccac

SEQ ID NO: 420934 - RNA, 19 nt, Artificial Sequence
  Description of Artificial Sequence: Synthetic oligonucleotide
  Antisense Strand to SEQ ID NO: 420933
guggagaacacauuccucc

SEQ ID NO: 420935 - RNA, 19 nt, Artificial Sequence
  Description of Artificial Sequence: Synthetic oligonucleotide
  Sense Strand Starting at position 1302 of SEQ ID NO: 316048
aggaauguguucuccacga

SEQ ID NO: 420936 - RNA, 19 nt, Artificial Sequence
  Description of Artificial Sequence: Synthetic oligonucleotide
  Antisense Strand to SEQ ID NO: 420935
ucguggagaacacauuccu

SEQ ID NO: 420937 - RNA, 19 nt, Artificial Sequence
  Description of Artificial Sequence: Synthetic oligonucleotide
  Sense Strand Starting at position 1302 of SEQ ID NO: 316196
gcaaacuauucggccuuau

SEQ ID NO: 420938 - RNA, 19 nt, Artificial Sequence
  Description of Artificial Sequence: Synthetic oligonucleotide
  Antisense Strand to SEQ ID NO: 420937
auaaggccgaauaguuugc

SEQ ID NO: 420939 - RNA, 19 nt, Artificial Sequence
  Description of Artificial Sequence: Synthetic oligonucleotide
  Sense Strand Starting at position 1302 of SEQ ID NO: 316200
acuauucggccuuauaaag

SEQ ID NO: 420940 - RNA, 19 nt, Artificial Sequence
  Description of Artificial Sequence: Synthetic oligonucleotide
  Antisense Strand to SEQ ID NO: 420939
cuuuauaaggccgaauagu

SEQ ID NO: 420941 - RNA, 19 nt, Artificial Sequence
  Description of Artificial Sequence: Synthetic oligonucleotide
  Sense Strand Starting at position 1302 of SEQ ID NO: 316527
aaagaaugcucugacgcuu

SEQ ID NO: 420942 - RNA, 19 nt, Artificial Sequence
  Description of Artificial Sequence: Synthetic oligonucleotide
  Antisense Strand to SEQ ID NO: 420941
aagcgucagagcauucuuu

SEQ ID NO: 420943 - RNA, 19 nt, Artificial Sequence
  Description of Artificial Sequence: Synthetic oligonucleotide
  Sense Strand Starting at position 1302 of SEQ ID NO: 317239
aggccaacucguuacugua

SEQ ID NO: 420944 - RNA, 19 nt, Artificial Sequence
  Description of Artificial Sequence: Synthetic oligonucleotide
  Antisense Strand to SEQ ID NO: 420943
uacaguaacgaguuggccu

SEQ ID NO: 420945 - RNA, 19 nt, Artificial Sequence
  Description of Artificial Sequence: Synthetic oligonucleotide
  Sense Strand Starting at position 1302 of SEQ ID NO: 317241
gccaacucguuacuguauu

SEQ ID NO: 420946 - RNA, 19 nt, Artificial Sequence
  Description of Artificial Sequence: Synthetic oligonucleotide
  Antisense Strand to SEQ ID NO: 420945
aauacaguaacgaguuggc

SEQ ID NO: 420947 - RNA, 19 nt, Artificial Sequence
  Description of Artificial Sequence: Synthetic oligonucleotide
  Sense Strand Starting at position 1302 of SEQ ID NO: 317242
ccaacucguuacuguauuu

SEQ ID NO: 420948 - RNA, 19 nt, Artificial Sequence
  Description of Artificial Sequence: Synthetic oligonucleotide
  Antisense Strand to SEQ ID NO: 420947
aaauacaguaacgaguugg

SEQ ID NO: 420949 - RNA, 19 nt, Artificial Sequence
  Description of Artificial Sequence: Synthetic oligonucleotide
  Sense Strand Starting at position 1302 of SEQ ID NO: 317419
ccgaguaguugguacugua

SEQ ID NO: 420950 - RNA, 19 nt, Artificial Sequence
  Description of Artificial Sequence: Synthetic oligonucleotide
  Antisense Strand to SEQ ID NO: 420949
uacaguaccaacuacucgg

SEQ ID NO: 420951 - RNA, 19 nt, Artificial Sequence
  Description of Artificial Sequence: Synthetic oligonucleotide
  Sense Strand Starting at position 1302 of SEQ ID NO: 317484
aacggagucucgcuauguu

SEQ ID NO: 420952 - RNA, 19 nt, Artificial Sequence
  Description of Artificial Sequence: Synthetic oligonucleotide
  Antisense Strand to SEQ ID NO: 420951
aacauagcgagacuccguu

SEQ ID NO: 420953 - RNA, 19 nt, Artificial Sequence
  Description of Artificial Sequence: Synthetic oligonucleotide
  Sense Strand Starting at position 1302 of SEQ ID NO: 317694
ucaucacgcuuauaaagua

SEQ ID NO: 420954 - RNA, 19 nt, Artificial Sequence
  Description of Artificial Sequence: Synthetic oligonucleotide
  Antisense Strand to SEQ ID NO: 420953
uacuuuauaagcgugauga

SEQ ID NO: 420955 - RNA, 19 nt, Artificial Sequence
  Description of Artificial Sequence: Synthetic oligonucleotide
  Sense Strand Starting at position 1302 of SEQ ID NO: 317727
acugaauucuuacaaggca

SEQ ID NO: 420956 - RNA, 19 nt, Artificial Sequence
  Description of Artificial Sequence: Synthetic oligonucleotide
  Antisense Strand to SEQ ID NO: 420955
ugccuuguaagaauucagu

SEQ ID NO: 420957 - RNA, 19 nt, Artificial Sequence
  Description of Artificial Sequence: Synthetic oligonucleotide
  Sense Strand Starting at position 1302 of SEQ ID NO: 317736
uuacaaggcaugggugauu

SEQ ID NO: 420958 - RNA, 19 nt, Artificial Sequence
  Description of Artificial Sequence: Synthetic oligonucleotide
  Antisense Strand to SEQ ID NO: 420957
aaucacccaugccuuguaa

SEQ ID NO: 420959 - RNA, 19 nt, Artificial Sequence
  Description of Artificial Sequence: Synthetic oligonucleotide
  Sense Strand Starting at position 1302 of SEQ ID NO: 317741
aggcaugggugauuaguaa

SEQ ID NO: 420960 - RNA, 19 nt, Artificial Sequence
  Description of Artificial Sequence: Synthetic oligonucleotide
  Antisense Strand to SEQ ID NO: 420959
uuacuaaucacccaugccu

SEQ ID NO: 420961 - RNA, 19 nt, Artificial Sequence
  Description of Artificial Sequence: Synthetic oligonucleotide
  Sense Strand Starting at position 1302 of SEQ ID NO: 317745
augggugauuaguaaagag

SEQ ID NO: 420962 - RNA, 19 nt, Artificial Sequence
  Description of Artificial Sequence: Synthetic oligonucleotide
  Antisense Strand to SEQ ID NO: 420961
cucuuuacuaaucacccau

SEQ ID NO: 420963 - RNA, 19 nt, Artificial Sequence
  Description of Artificial Sequence: Synthetic oligonucleotide
  Sense Strand Starting at position 1302 of SEQ ID NO: 317748
ggugauuaguaaagaggga

SEQ ID NO: 420964 - RNA, 19 nt, Artificial Sequence
  Description of Artificial Sequence: Synthetic oligonucleotide
  Antisense Strand to SEQ ID NO: 420963
ucccucuuuacuaaucacc

SEQ ID NO: 420965 - RNA, 19 nt, Artificial Sequence
  Description of Artificial Sequence: Synthetic oligonucleotide
  Sense Strand Starting at position 1302 of SEQ ID NO: 317791
agagcacucugguggaaau

SEQ ID NO: 420966 - RNA, 19 nt, Artificial Sequence
  Description of Artificial Sequence: Synthetic oligonucleotide
  Antisense Strand to SEQ ID NO: 420965
auuuccaccagagugcucu

SEQ ID NO: 420967 - RNA, 19 nt, Artificial Sequence
  Description of Artificial Sequence: Synthetic oligonucleotide
  Sense Strand Starting at position 1302 of SEQ ID NO: 317792
gagcacucugguggaaauu

SEQ ID NO: 420968 - RNA, 19 nt, Artificial Sequence
  Description of Artificial Sequence: Synthetic oligonucleotide
  Antisense Strand to SEQ ID NO: 420967
aauuuccaccagagugcuc

SEQ ID NO: 420969 - RNA, 19 nt, Artificial Sequence
  Description of Artificial Sequence: Synthetic oligonucleotide
  Sense Strand Starting at position 1302 of SEQ ID NO: 317906
uguaccaccuauggugaua

SEQ ID NO: 420970 - RNA, 19 nt, Artificial Sequence
  Description of Artificial Sequence: Synthetic oligonucleotide
  Antisense Strand to SEQ ID NO: 420969
uaucaccauaggugguaca

SEQ ID NO: 420971 - RNA, 19 nt, Artificial Sequence
  Description of Artificial Sequence: Synthetic oligonucleotide
  Sense Strand Starting at position 1302 of SEQ ID NO: 317909
accaccuauggugauaagu

SEQ ID NO: 420972 - RNA, 19 nt, Artificial Sequence
  Description of Artificial Sequence: Synthetic oligonucleotide
  Antisense Strand to SEQ ID NO: 420971
acuuaucaccauagguggu

SEQ ID NO: 420973 - RNA, 19 nt, Artificial Sequence
  Description of Artificial Sequence: Synthetic oligonucleotide
  Sense Strand Starting at position 1302 of SEQ ID NO: 317911
caccuauggugauaagugu

SEQ ID NO: 420974 - RNA, 19 nt, Artificial Sequence
  Description of Artificial Sequence: Synthetic oligonucleotide
  Antisense Strand to SEQ ID NO: 420973
acacuuaucaccauaggug

SEQ ID NO: 420975 - RNA, 19 nt, Artificial Sequence
  Description of Artificial Sequence: Synthetic oligonucleotide
  Sense Strand Starting at position 1302 of SEQ ID NO: 317915
uauggugauaaguguugaa

SEQ ID NO: 420976 - RNA, 19 nt, Artificial Sequence
  Description of Artificial Sequence: Synthetic oligonucleotide
  Antisense Strand to SEQ ID NO: 420975
uucaacacuuaucaccaua

SEQ ID NO: 420977 - RNA, 19 nt, Artificial Sequence
  Description of Artificial Sequence: Synthetic oligonucleotide
  Sense Strand Starting at position 1302 of SEQ ID NO: 317984
agcgucauacgguaaucaa

SEQ ID NO: 420978 - RNA, 19 nt, Artificial Sequence
  Description of Artificial Sequence: Synthetic oligonucleotide
  Antisense Strand to SEQ ID NO: 420977
uugauuaccguaugacgcu

SEQ ID NO: 420979 - RNA, 19 nt, Artificial Sequence
  Description of Artificial Sequence: Synthetic oligonucleotide
  Sense Strand Starting at position 1302 of SEQ ID NO: 317987
gucauacgguaaucaauca

SEQ ID NO: 420980 - RNA, 19 nt, Artificial Sequence
  Description of Artificial Sequence: Synthetic oligonucleotide
  Antisense Strand to SEQ ID NO: 420979
ugauugauuaccguaugac

SEQ ID NO: 420981 - RNA, 19 nt, Artificial Sequence
  Description of Artificial Sequence: Synthetic oligonucleotide
  Sense Strand Starting at position 1302 of SEQ ID NO: 318331
cugugacuaguacgacaaa

SEQ ID NO: 420982 - RNA, 19 nt, Artificial Sequence
  Description of Artificial Sequence: Synthetic oligonucleotide
  Antisense Strand to SEQ ID NO: 420981
uuugucguacuagucacag

SEQ ID NO: 420983 - RNA, 19 nt, Artificial Sequence
  Description of Artificial Sequence: Synthetic oligonucleotide
  Sense Strand Starting at position 1302 of SEQ ID NO: 318352
gagacaggguacuauagaa

SEQ ID NO: 420984 - RNA, 19 nt, Artificial Sequence
  Description of Artificial Sequence: Synthetic oligonucleotide
  Antisense Strand to SEQ ID NO: 420983
uucuauaguacccugucuc

SEQ ID NO: 420985 - RNA, 19 nt, Artificial Sequence
  Description of Artificial Sequence: Synthetic oligonucleotide
  Sense Strand Starting at position 1302 of SEQ ID NO: 318359
gguacuauagaaggcuaaa

SEQ ID NO: 420986 - RNA, 19 nt, Artificial Sequence
  Description of Artificial Sequence: Synthetic oligonucleotide
  Antisense Strand to SEQ ID NO: 420985
uuuagccuucuauaguacc

SEQ ID NO: 420987 - RNA, 19 nt, Artificial Sequence
  Description of Artificial Sequence: Synthetic oligonucleotide
  Sense Strand Starting at position 1302 of SEQ ID NO: 318399
gguacacaauucuguguaa

SEQ ID NO: 420988 - RNA, 19 nt, Artificial Sequence
  Description of Artificial Sequence: Synthetic oligonucleotide
  Antisense Strand to SEQ ID NO: 420987
uuacacagaauuguguacc

SEQ ID NO: 420989 - RNA, 19 nt, Artificial Sequence
  Description of Artificial Sequence: Synthetic oligonucleotide
  Sense Strand Starting at position 1302 of SEQ ID NO: 318400
guacacaauucuguguaau

SEQ ID NO: 420990 - RNA, 19 nt, Artificial Sequence
  Description of Artificial Sequence: Synthetic oligonucleotide
  Antisense Strand to SEQ ID NO: 420989
auuacacagaauuguguac

SEQ ID NO: 420991 - RNA, 19 nt, Artificial Sequence
  Description of Artificial Sequence: Synthetic oligonucleotide
  Sense Strand Starting at position 1302 of SEQ ID NO: 318402
acacaauucuguguaauua

SEQ ID NO: 420992 - RNA, 19 nt, Artificial Sequence
  Description of Artificial Sequence: Synthetic oligonucleotide
  Antisense Strand to SEQ ID NO: 420991
uaauuacacagaauugugu

SEQ ID NO: 420993 - RNA, 19 nt, Artificial Sequence
  Description of Artificial Sequence: Synthetic oligonucleotide
  Sense Strand Starting at position 1302 of SEQ ID NO: 318513
uuuagacagucucgcuuua

SEQ ID NO: 420994 - RNA, 19 nt, Artificial Sequence
  Description of Artificial Sequence: Synthetic oligonucleotide
  Antisense Strand to SEQ ID NO: 420993
uaaagcgagacugucuaaa

SEQ ID NO: 420995 - RNA, 19 nt, Artificial Sequence
  Description of Artificial Sequence: Synthetic oligonucleotide
  Sense Strand Starting at position 1302 of SEQ ID NO: 318515
uagacagucucgcuuuauc

SEQ ID NO: 420996 - RNA, 19 nt, Artificial Sequence
  Description of Artificial Sequence: Synthetic oligonucleotide
  Antisense Strand to SEQ ID NO: 420995
gauaaagcgagacugucua

SEQ ID NO: 420997 - RNA, 19 nt, Artificial Sequence
  Description of Artificial Sequence: Synthetic oligonucleotide
  Sense Strand Starting at position 1302 of SEQ ID NO: 318849
cuaagcaucccacgugaau

SEQ ID NO: 420998 - RNA, 19 nt, Artificial Sequence
  Description of Artificial Sequence: Synthetic oligonucleotide
  Antisense Strand to SEQ ID NO: 420997
auucacgugggaugcuuag

SEQ ID NO: 420999 - RNA, 19 nt, Artificial Sequence
  Description of Artificial Sequence: Synthetic oligonucleotide
  Sense Strand Starting at position 1302 of SEQ ID NO: 318852
agcaucccacgugaauuaa

SEQ ID NO: 421000 - RNA, 19 nt, Artificial Sequence
  Description of Artificial Sequence: Synthetic oligonucleotide
  Antisense Strand to SEQ ID NO: 420999
uuaauucacgugggaugcu

SEQ ID NO: 421001 - RNA, 19 nt, Artificial Sequence
  Description of Artificial Sequence: Synthetic oligonucleotide
  Sense Strand Starting at position 1302 of SEQ ID NO: 318862
gugaauuaaggcuauguca

SEQ ID NO: 421002 - RNA, 19 nt, Artificial Sequence
  Description of Artificial Sequence: Synthetic oligonucleotide
  Antisense Strand to SEQ ID NO: 421001
ugacauagccuuaauucac

SEQ ID NO: 421003 - RNA, 19 nt, Artificial Sequence
  Description of Artificial Sequence: Synthetic oligonucleotide
  Sense Strand Starting at position 1302 of SEQ ID NO: 318937
gcacuauacgccuguaauc

SEQ ID NO: 421004 - RNA, 19 nt, Artificial Sequence
  Description of Artificial Sequence: Synthetic oligonucleotide
  Antisense Strand to SEQ ID NO: 421003
gauuacaggcguauagugc

SEQ ID NO: 421005 - RNA, 19 nt, Artificial Sequence
  Description of Artificial Sequence: Synthetic oligonucleotide
  Sense Strand Starting at position 1302 of SEQ ID NO: 319028
gagguccugucucuauaaa

SEQ ID NO: 421006 - RNA, 19 nt, Artificial Sequence
  Description of Artificial Sequence: Synthetic oligonucleotide
  Antisense Strand to SEQ ID NO: 421005
uuuauagagacaggaccuc

SEQ ID NO: 421007 - RNA, 19 nt, Artificial Sequence
  Description of Artificial Sequence: Synthetic oligonucleotide
  Sense Strand Starting at position 1303 of SEQ ID NO: 315298
cguagucauguggacacau

SEQ ID NO: 421008 - RNA, 19 nt, Artificial Sequence
  Description of Artificial Sequence: Synthetic oligonucleotide
  Antisense Strand to SEQ ID NO: 421007
auguguccacaugacuacg

SEQ ID NO: 421009 - RNA, 19 nt, Artificial Sequence
  Description of Artificial Sequence: Synthetic oligonucleotide
  Sense Strand Starting at position 1303 of SEQ ID NO: 315350
cacacuguguauuuguuua

SEQ ID NO: 421010 - RNA, 19 nt, Artificial Sequence
  Description of Artificial Sequence: Synthetic oligonucleotide
  Antisense Strand to SEQ ID NO: 421009
uaaacaaauacacagugug

SEQ ID NO: 421011 - RNA, 19 nt, Artificial Sequence
  Description of Artificial Sequence: Synthetic oligonucleotide
  Sense Strand Starting at position 1303 of SEQ ID NO: 315358
guauuuguuuaucccugua

SEQ ID NO: 421012 - RNA, 19 nt, Artificial Sequence
  Description of Artificial Sequence: Synthetic oligonucleotide
  Antisense Strand to SEQ ID NO: 421011
uacagggauaaacaaauac

SEQ ID NO: 421013 - RNA, 19 nt, Artificial Sequence
  Description of Artificial Sequence: Synthetic oligonucleotide
  Sense Strand Starting at position 1303 of SEQ ID NO: 315374
guaagucuagauggugagu

SEQ ID NO: 421014 - RNA, 19 nt, Artificial Sequence
  Description of Artificial Sequence: Synthetic oligonucleotide
  Antisense Strand to SEQ ID NO: 421013
acucaccaucuagacuuac

SEQ ID NO: 421015 - RNA, 19 nt, Artificial Sequence
  Description of Artificial Sequence: Synthetic oligonucleotide
  Sense Strand Starting at position 1303 of SEQ ID NO: 315412
cauauauguguguagguga

SEQ ID NO: 421016 - RNA, 19 nt, Artificial Sequence
  Description of Artificial Sequence: Synthetic oligonucleotide
  Antisense Strand to SEQ ID NO: 421015
ucaccuacacacauauaug

SEQ ID NO: 421017 - RNA, 19 nt, Artificial Sequence
  Description of Artificial Sequence: Synthetic oligonucleotide
  Sense Strand Starting at position 1303 of SEQ ID NO: 315415
auauguguguaggugaaca

SEQ ID NO: 421018 - RNA, 19 nt, Artificial Sequence
  Description of Artificial Sequence: Synthetic oligonucleotide
  Antisense Strand to SEQ ID NO: 421017
uguucaccuacacacauau

SEQ ID NO: 421019 - RNA, 19 nt, Artificial Sequence
  Description of Artificial Sequence: Synthetic oligonucleotide
  Sense Strand Starting at position 1303 of SEQ ID NO: 315423
guaggugaacauggauauu

SEQ ID NO: 421020 - RNA, 19 nt, Artificial Sequence
  Description of Artificial Sequence: Synthetic oligonucleotide
  Antisense Strand to SEQ ID NO: 421019
aauauccauguucaccuac

SEQ ID NO: 421021 - RNA, 19 nt, Artificial Sequence
  Description of Artificial Sequence: Synthetic oligonucleotide
  Sense Strand Starting at position 1303 of SEQ ID NO: 315451
ccaucuauagguggacaua

SEQ ID NO: 421022 - RNA, 19 nt, Artificial Sequence
  Description of Artificial Sequence: Synthetic oligonucleotide
  Antisense Strand to SEQ ID NO: 421021
uauguccaccuauagaugg

SEQ ID NO: 421023 - RNA, 19 nt, Artificial Sequence
  Description of Artificial Sequence: Synthetic oligonucleotide
  Sense Strand Starting at position 1303 of SEQ ID NO: 315524
auguauaugcuauaugcau

SEQ ID NO: 421024 - RNA, 19 nt, Artificial Sequence
  Description of Artificial Sequence: Synthetic oligonucleotide
  Antisense Strand to SEQ ID NO: 421023
augcauauagcauauacau

SEQ ID NO: 421025 - RNA, 19 nt, Artificial Sequence
  Description of Artificial Sequence: Synthetic oligonucleotide
  Sense Strand Starting at position 1303 of SEQ ID NO: 315530
augcuauaugcauauauag

SEQ ID NO: 421026 - RNA, 19 nt, Artificial Sequence
  Description of Artificial Sequence: Synthetic oligonucleotide
  Antisense Strand to SEQ ID NO: 421025
cuauauaugcauauagcau

SEQ ID NO: 421027 - RNA, 19 nt, Artificial Sequence
  Description of Artificial Sequence: Synthetic oligonucleotide
  Sense Strand Starting at position 1303 of SEQ ID NO: 315817
aaugucuauuaagugauga

SEQ ID NO: 421028 - RNA, 19 nt, Artificial Sequence
  Description of Artificial Sequence: Synthetic oligonucleotide
  Antisense Strand to SEQ ID NO: 421027
ucaucacuuaauagacauu

SEQ ID NO: 421029 - RNA, 19 nt, Artificial Sequence
  Description of Artificial Sequence: Synthetic oligonucleotide
  Sense Strand Starting at position 1303 of SEQ ID NO: 315867
augcaauauuacuugguaa

SEQ ID NO: 421030 - RNA, 19 nt, Artificial Sequence
  Description of Artificial Sequence: Synthetic oligonucleotide
  Antisense Strand to SEQ ID NO: 421029
uuaccaaguaauauugcau

SEQ ID NO: 421031 - RNA, 19 nt, Artificial Sequence
  Description of Artificial Sequence: Synthetic oligonucleotide
  Sense Strand Starting at position 1303 of SEQ ID NO: 315869
gcaauauuacuugguaaua

SEQ ID NO: 421032 - RNA, 19 nt, Artificial Sequence
  Description of Artificial Sequence: Synthetic oligonucleotide
  Antisense Strand to SEQ ID NO: 421031
uauuaccaaguaauauugc

SEQ ID NO: 421033 - RNA, 19 nt, Artificial Sequence
  Description of Artificial Sequence: Synthetic oligonucleotide
  Sense Strand Starting at position 1303 of SEQ ID NO: 315965
aagaccauuuguugaauga

SEQ ID NO: 421034 - RNA, 19 nt, Artificial Sequence
  Description of Artificial Sequence: Synthetic oligonucleotide
  Antisense Strand to SEQ ID NO: 421033
ucauucaacaaauggucuu

SEQ ID NO: 421035 - RNA, 19 nt, Artificial Sequence
  Description of Artificial Sequence: Synthetic oligonucleotide
  Sense Strand Starting at position 1303 of SEQ ID NO: 315992
cuaugacaugcccggaaga

SEQ ID NO: 421036 - RNA, 19 nt, Artificial Sequence
  Description of Artificial Sequence: Synthetic oligonucleotide
  Antisense Strand to SEQ ID NO: 421035
ucuuccgggcaugucauag

SEQ ID NO: 421037 - RNA, 19 nt, Artificial Sequence
  Description of Artificial Sequence: Synthetic oligonucleotide
  Sense Strand Starting at position 1303 of SEQ ID NO: 316218
guuguaucucaauaaaggu

SEQ ID NO: 421038 - RNA, 19 nt, Artificial Sequence
  Description of Artificial Sequence: Synthetic oligonucleotide
  Antisense Strand to SEQ ID NO: 421037
accuuuauugagauacaac

SEQ ID NO: 421039 - RNA, 19 nt, Artificial Sequence
  Description of Artificial Sequence: Synthetic oligonucleotide
  Sense Strand Starting at position 1303 of SEQ ID NO: 316572
ggguguuuguguauaugug

SEQ ID NO: 421040 - RNA, 19 nt, Artificial Sequence
  Description of Artificial Sequence: Synthetic oligonucleotide
  Antisense Strand to SEQ ID NO: 421039
cacauauacacaaacaccc

SEQ ID NO: 421041 - RNA, 19 nt, Artificial Sequence
  Description of Artificial Sequence: Synthetic oligonucleotide
  Sense Strand Starting at position 1303 of SEQ ID NO: 316931
agaggagaguucccuguaa

SEQ ID NO: 421042 - RNA, 19 nt, Artificial Sequence
  Description of Artificial Sequence: Synthetic oligonucleotide
  Antisense Strand to SEQ ID NO: 421041
uuacagggaacucuccucu

SEQ ID NO: 421043 - RNA, 19 nt, Artificial Sequence
  Description of Artificial Sequence: Synthetic oligonucleotide
  Sense Strand Starting at position 1303 of SEQ ID NO: 316933
aggagaguucccuguaaca

SEQ ID NO: 421044 - RNA, 19 nt, Artificial Sequence
  Description of Artificial Sequence: Synthetic oligonucleotide
  Antisense Strand to SEQ ID NO: 421043
uguuacagggaacucuccu

SEQ ID NO: 421045 - RNA, 19 nt, Artificial Sequence
  Description of Artificial Sequence: Synthetic oligonucleotide
  Sense Strand Starting at position 1303 of SEQ ID NO: 316935
gagaguucccuguaacaac

SEQ ID NO: 421046 - RNA, 19 nt, Artificial Sequence
  Description of Artificial Sequence: Synthetic oligonucleotide
  Antisense Strand to SEQ ID NO: 421045
guuguuacagggaacucuc

SEQ ID NO: 421047 - RNA, 19 nt, Artificial Sequence
  Description of Artificial Sequence: Synthetic oligonucleotide
  Sense Strand Starting at position 1303 of SEQ ID NO: 317261
uuaggagggcucuguaaac

SEQ ID NO: 421048 - RNA, 19 nt, Artificial Sequence
  Description of Artificial Sequence: Synthetic oligonucleotide
  Antisense Strand to SEQ ID NO: 421047
guuuacagagcccuccuaa

SEQ ID NO: 421049 - RNA, 19 nt, Artificial Sequence
  Description of Artificial Sequence: Synthetic oligonucleotide
  Sense Strand Starting at position 1303 of SEQ ID NO: 317355
ugggcagauuaggcauaaa

SEQ ID NO: 421050 - RNA, 19 nt, Artificial Sequence
  Description of Artificial Sequence: Synthetic oligonucleotide
  Antisense Strand to SEQ ID NO: 421049
uuuaugccuaaucugccca

SEQ ID NO: 421051 - RNA, 19 nt, Artificial Sequence
  Description of Artificial Sequence: Synthetic oligonucleotide
  Sense Strand Starting at position 1303 of SEQ ID NO: 317358
gcagauuaggcauaaacac

SEQ ID NO: 421052 - RNA, 19 nt, Artificial Sequence
  Description of Artificial Sequence: Synthetic oligonucleotide
  Antisense Strand to SEQ ID NO: 421051
guguuuaugccuaaucugc

SEQ ID NO: 421053 - RNA, 19 nt, Artificial Sequence
  Description of Artificial Sequence: Synthetic oligonucleotide
  Sense Strand Starting at position 1303 of SEQ ID NO: 317440
gcaugauucgaacacacuu

SEQ ID NO: 421054 - RNA, 19 nt, Artificial Sequence
  Description of Artificial Sequence: Synthetic oligonucleotide
  Antisense Strand to SEQ ID NO: 421053
aaguguguucgaaucaugc

SEQ ID NO: 421055 - RNA, 19 nt, Artificial Sequence
  Description of Artificial Sequence: Synthetic oligonucleotide
  Sense Strand Starting at position 1303 of SEQ ID NO: 317504
gcugacaaauucuugaaac

SEQ ID NO: 421056 - RNA, 19 nt, Artificial Sequence
  Description of Artificial Sequence: Synthetic oligonucleotide
  Antisense Strand to SEQ ID NO: 421055
guuucaagaauuugucagc

SEQ ID NO: 421057 - RNA, 19 nt, Artificial Sequence
  Description of Artificial Sequence: Synthetic oligonucleotide
  Sense Strand Starting at position 1303 of SEQ ID NO: 317523
agagcugaacucuguauaa

SEQ ID NO: 421058 - RNA, 19 nt, Artificial Sequence
  Description of Artificial Sequence: Synthetic oligonucleotide
  Antisense Strand to SEQ ID NO: 421057
uuauacagaguucagcucu

SEQ ID NO: 421059 - RNA, 19 nt, Artificial Sequence
  Description of Artificial Sequence: Synthetic oligonucleotide
  Sense Strand Starting at position 1303 of SEQ ID NO: 317525
agcugaacucuguauaaac

SEQ ID NO: 421060 - RNA, 19 nt, Artificial Sequence
  Description of Artificial Sequence: Synthetic oligonucleotide
  Antisense Strand to SEQ ID NO: 421059
guuuauacagaguucagcu

SEQ ID NO: 421061 - RNA, 19 nt, Artificial Sequence
  Description of Artificial Sequence: Synthetic oligonucleotide
  Sense Strand Starting at position 1303 of SEQ ID NO: 317581
gauuuagcuugcucgaguc

SEQ ID NO: 421062 - RNA, 19 nt, Artificial Sequence
  Description of Artificial Sequence: Synthetic oligonucleotide
  Antisense Strand to SEQ ID NO: 421061
gacucgagcaagcuaaauc

SEQ ID NO: 421063 - RNA, 19 nt, Artificial Sequence
  Description of Artificial Sequence: Synthetic oligonucleotide
  Sense Strand Starting at position 1303 of SEQ ID NO: 317647
agugaaugacagugacaug

SEQ ID NO: 421064 - RNA, 19 nt, Artificial Sequence
  Description of Artificial Sequence: Synthetic oligonucleotide
  Antisense Strand to SEQ ID NO: 421063
caugucacugucauucacu

SEQ ID NO: 421065 - RNA, 19 nt, Artificial Sequence
  Description of Artificial Sequence: Synthetic oligonucleotide
  Sense Strand Starting at position 1303 of SEQ ID NO: 317953
uggcacaauaggugucaua

SEQ ID NO: 421066 - RNA, 19 nt, Artificial Sequence
  Description of Artificial Sequence: Synthetic oligonucleotide
  Antisense Strand to SEQ ID NO: 421065
uaugacaccuauugugcca

SEQ ID NO: 421067 - RNA, 19 nt, Artificial Sequence
  Description of Artificial Sequence: Synthetic oligonucleotide
  Sense Strand Starting at position 1303 of SEQ ID NO: 317966
gucauagaguggcucacau

SEQ ID NO: 421068 - RNA, 19 nt, Artificial Sequence
  Description of Artificial Sequence: Synthetic oligonucleotide
  Antisense Strand to SEQ ID NO: 421067
augugagccacucuaugac

SEQ ID NO: 421069 - RNA, 19 nt, Artificial Sequence
  Description of Artificial Sequence: Synthetic oligonucleotide
  Sense Strand Starting at position 1303 of SEQ ID NO: 318311
uguugaaugagugaagugu

SEQ ID NO: 421070 - RNA, 19 nt, Artificial Sequence
  Description of Artificial Sequence: Synthetic oligonucleotide
  Antisense Strand to SEQ ID NO: 421069
acacuucacucauucaaca

SEQ ID NO: 421071 - RNA, 19 nt, Artificial Sequence
  Description of Artificial Sequence: Synthetic oligonucleotide
  Sense Strand Starting at position 1303 of SEQ ID NO: 318397
caagaacuguugccacagu

SEQ ID NO: 421072 - RNA, 19 nt, Artificial Sequence
  Description of Artificial Sequence: Synthetic oligonucleotide
  Antisense Strand to SEQ ID NO: 421071
acuguggcaacaguucuug

SEQ ID NO: 421073 - RNA, 19 nt, Artificial Sequence
  Description of Artificial Sequence: Synthetic oligonucleotide
  Sense Strand Starting at position 1303 of SEQ ID NO: 318431
gugacaaugacaugaguga

SEQ ID NO: 421074 - RNA, 19 nt, Artificial Sequence
  Description of Artificial Sequence: Synthetic oligonucleotide
  Antisense Strand to SEQ ID NO: 421073
ucacucaugucauugucac

SEQ ID NO: 421075 - RNA, 19 nt, Artificial Sequence
  Description of Artificial Sequence: Synthetic oligonucleotide
  Sense Strand Starting at position 1303 of SEQ ID NO: 318454
cagacauaguggccaugaa

SEQ ID NO: 421076 - RNA, 19 nt, Artificial Sequence
  Description of Artificial Sequence: Synthetic oligonucleotide
  Antisense Strand to SEQ ID NO: 421075
uucauggccacuaugucug

SEQ ID NO: 421077 - RNA, 19 nt, Artificial Sequence
  Description of Artificial Sequence: Synthetic oligonucleotide
  Sense Strand Starting at position 1303 of SEQ ID NO: 318565
ggcagaaauagugaccagu

SEQ ID NO: 421078 - RNA, 19 nt, Artificial Sequence
  Description of Artificial Sequence: Synthetic oligonucleotide
  Antisense Strand to SEQ ID NO: 421077
acuggucacuauuucugcc

SEQ ID NO: 421079 - RNA, 19 nt, Artificial Sequence
  Description of Artificial Sequence: Synthetic oligonucleotide
  Sense Strand Starting at position 1303 of SEQ ID NO: 318571
aauagugaccagugacagu

SEQ ID NO: 421080 - RNA, 19 nt, Artificial Sequence
  Description of Artificial Sequence: Synthetic oligonucleotide
  Antisense Strand to SEQ ID NO: 421079
acugucacuggucacuauu

SEQ ID NO: 421081 - RNA, 19 nt, Artificial Sequence
  Description of Artificial Sequence: Synthetic oligonucleotide
  Sense Strand Starting at position 1303 of SEQ ID NO: 318637
ugagcuguagcucauggaa

SEQ ID NO: 421082 - RNA, 19 nt, Artificial Sequence
  Description of Artificial Sequence: Synthetic oligonucleotide
  Antisense Strand to SEQ ID NO: 421081
uuccaugagcuacagcuca

SEQ ID NO: 421083 - RNA, 19 nt, Artificial Sequence
  Description of Artificial Sequence: Synthetic oligonucleotide
  Sense Strand Starting at position 1303 of SEQ ID NO: 318770
ggcuggugucacugggaga

SEQ ID NO: 421084 - RNA, 19 nt, Artificial Sequence
  Description of Artificial Sequence: Synthetic oligonucleotide
  Antisense Strand to SEQ ID NO: 421083
ucucccagugacaccagcc

SEQ ID NO: 421085 - RNA, 19 nt, Artificial Sequence
  Description of Artificial Sequence: Synthetic oligonucleotide
  Sense Strand Starting at position 1303 of SEQ ID NO: 318925
aggaaugggugcucaaaga

SEQ ID NO: 421086 - RNA, 19 nt, Artificial Sequence
  Description of Artificial Sequence: Synthetic oligonucleotide
  Antisense Strand to SEQ ID NO: 421085
ucuuugagcacccauuccu

SEQ ID NO: 421087 - RNA, 19 nt, Artificial Sequence
  Description of Artificial Sequence: Synthetic oligonucleotide
  Sense Strand Starting at position 1304 of SEQ ID NO: 315273
aagugcuuugauugauaau

SEQ ID NO: 421088 - RNA, 19 nt, Artificial Sequence
  Description of Artificial Sequence: Synthetic oligonucleotide
  Antisense Strand to SEQ ID NO: 421087
auuaucaaucaaagcacuu

SEQ ID NO: 421089 - RNA, 19 nt, Artificial Sequence
  Description of Artificial Sequence: Synthetic oligonucleotide
  Sense Strand Starting at position 1304 of SEQ ID NO: 315568
uuaccaggcccugagugau

SEQ ID NO: 421090 - RNA, 19 nt, Artificial Sequence
  Description of Artificial Sequence: Synthetic oligonucleotide
  Antisense Strand to SEQ ID NO: 421089
aucacucagggccugguaa

SEQ ID NO: 421091 - RNA, 19 nt, Artificial Sequence
  Description of Artificial Sequence: Synthetic oligonucleotide
  Sense Strand Starting at position 1304 of SEQ ID NO: 315580
gagugaugccuccaucaca

SEQ ID NO: 421092 - RNA, 19 nt, Artificial Sequence
  Description of Artificial Sequence: Synthetic oligonucleotide
  Antisense Strand to SEQ ID NO: 421091
ugugauggaggcaucacuc

SEQ ID NO: 421093 - RNA, 19 nt, Artificial Sequence
  Description of Artificial Sequence: Synthetic oligonucleotide
  Sense Strand Starting at position 1304 of SEQ ID NO: 316150
ccuauucuugccugagaug

SEQ ID NO: 421094 - RNA, 19 nt, Artificial Sequence
  Description of Artificial Sequence: Synthetic oligonucleotide
  Antisense Strand to SEQ ID NO: 421093
caucucaggcaagaauagg

SEQ ID NO: 421095 - RNA, 19 nt, Artificial Sequence
  Description of Artificial Sequence: Synthetic oligonucleotide
  Sense Strand Starting at position 1304 of SEQ ID NO: 316155
ucuugccugagaugggaua

SEQ ID NO: 421096 - RNA, 19 nt, Artificial Sequence
  Description of Artificial Sequence: Synthetic oligonucleotide
  Antisense Strand to SEQ ID NO: 421095
uaucccaucucaggcaaga

SEQ ID NO: 421097 - RNA, 19 nt, Artificial Sequence
  Description of Artificial Sequence: Synthetic oligonucleotide
  Sense Strand Starting at position 1304 of SEQ ID NO: 316452
gagucucuuguaggaauga

SEQ ID NO: 421098 - RNA, 19 nt, Artificial Sequence
  Description of Artificial Sequence: Synthetic oligonucleotide
  Antisense Strand to SEQ ID NO: 421097
ucauuccuacaagagacuc

SEQ ID NO: 421099 - RNA, 19 nt, Artificial Sequence
  Description of Artificial Sequence: Synthetic oligonucleotide
  Sense Strand Starting at position 1304 of SEQ ID NO: 316545
ggaacugugcucugaagaa

SEQ ID NO: 421100 - RNA, 19 nt, Artificial Sequence
  Description of Artificial Sequence: Synthetic oligonucleotide
  Antisense Strand to SEQ ID NO: 421099
uucuucagagcacaguucc

SEQ ID NO: 421101 - RNA, 19 nt, Artificial Sequence
  Description of Artificial Sequence: Synthetic oligonucleotide
  Sense Strand Starting at position 1304 of SEQ ID NO: 316658
gaaggcuugcuggagcuaa

SEQ ID NO: 421102 - RNA, 19 nt, Artificial Sequence
  Description of Artificial Sequence: Synthetic oligonucleotide
  Antisense Strand to SEQ ID NO: 421101
uuagcuccagcaagccuuc

SEQ ID NO: 421103 - RNA, 19 nt, Artificial Sequence
  Description of Artificial Sequence: Synthetic oligonucleotide
  Sense Strand Starting at position 1304 of SEQ ID NO: 316714
cauacugcggaguaagaaa

SEQ ID NO: 421104 - RNA, 19 nt, Artificial Sequence
  Description of Artificial Sequence: Synthetic oligonucleotide
  Antisense Strand to SEQ ID NO: 421103
uuucuuacuccgcaguaug

SEQ ID NO: 421105 - RNA, 19 nt, Artificial Sequence
  Description of Artificial Sequence: Synthetic oligonucleotide
  Sense Strand Starting at position 1304 of SEQ ID NO: 316736
cagaacugugcguaacaaa

SEQ ID NO: 421106 - RNA, 19 nt, Artificial Sequence
  Description of Artificial Sequence: Synthetic oligonucleotide
  Antisense Strand to SEQ ID NO: 421105
uuuguuacgcacaguucug

SEQ ID NO: 421107 - RNA, 19 nt, Artificial Sequence
  Description of Artificial Sequence: Synthetic oligonucleotide
  Sense Strand Starting at position 1304 of SEQ ID NO: 316743
gugcguaacaaagaaaugu

SEQ ID NO: 421108 - RNA, 19 nt, Artificial Sequence
  Description of Artificial Sequence: Synthetic oligonucleotide
  Antisense Strand to SEQ ID NO: 421107
acauuucuuuguuacgcac

SEQ ID NO: 421109 - RNA, 19 nt, Artificial Sequence
  Description of Artificial Sequence: Synthetic oligonucleotide
  Sense Strand Starting at position 1304 of SEQ ID NO: 317296
aucagauccaagcgauaga

SEQ ID NO: 421110 - RNA, 19 nt, Artificial Sequence
  Description of Artificial Sequence: Synthetic oligonucleotide
  Antisense Strand to SEQ ID NO: 421109
ucuaucgcuuggaucugau

SEQ ID NO: 421111 - RNA, 19 nt, Artificial Sequence
  Description of Artificial Sequence: Synthetic oligonucleotide
  Sense Strand Starting at position 1304 of SEQ ID NO: 317317
uagacagauuucugaugac

SEQ ID NO: 421112 - RNA, 19 nt, Artificial Sequence
  Description of Artificial Sequence: Synthetic oligonucleotide
  Antisense Strand to SEQ ID NO: 421111
gucaucagaaaucugucua

SEQ ID NO: 421113 - RNA, 19 nt, Artificial Sequence
  Description of Artificial Sequence: Synthetic oligonucleotide
  Sense Strand Starting at position 1304 of SEQ ID NO: 317320
acagauuucugaugacauu

SEQ ID NO: 421114 - RNA, 19 nt, Artificial Sequence
  Description of Artificial Sequence: Synthetic oligonucleotide
  Antisense Strand to SEQ ID NO: 421113
aaugucaucagaaaucugu

SEQ ID NO: 421115 - RNA, 19 nt, Artificial Sequence
  Description of Artificial Sequence: Synthetic oligonucleotide
  Sense Strand Starting at position 1304 of SEQ ID NO: 317330
gaugacauuguuugaguuc

SEQ ID NO: 421116 - RNA, 19 nt, Artificial Sequence
  Description of Artificial Sequence: Synthetic oligonucleotide
  Antisense Strand to SEQ ID NO: 421115
gaacucaaacaaugucauc

SEQ ID NO: 421117 - RNA, 19 nt, Artificial Sequence
  Description of Artificial Sequence: Synthetic oligonucleotide
  Sense Strand Starting at position 1304 of SEQ ID NO: 317339
guuugaguuccugaaucca

SEQ ID NO: 421118 - RNA, 19 nt, Artificial Sequence
  Description of Artificial Sequence: Synthetic oligonucleotide
  Antisense Strand to SEQ ID NO: 421117
uggauucaggaacucaaac

SEQ ID NO: 421119 - RNA, 19 nt, Artificial Sequence
  Description of Artificial Sequence: Synthetic oligonucleotide
  Sense Strand Starting at position 1304 of SEQ ID NO: 317845
ggaagacagucuuuacaau

SEQ ID NO: 421120 - RNA, 19 nt, Artificial Sequence
  Description of Artificial Sequence: Synthetic oligonucleotide
  Antisense Strand to SEQ ID NO: 421119
auuguaaagacugucuucc

SEQ ID NO: 421121 - RNA, 19 nt, Artificial Sequence
  Description of Artificial Sequence: Synthetic oligonucleotide
  Sense Strand Starting at position 1304 of SEQ ID NO: 317863
ucuugaugacaguguugau

SEQ ID NO: 421122 - RNA, 19 nt, Artificial Sequence
  Description of Artificial Sequence: Synthetic oligonucleotide
  Antisense Strand to SEQ ID NO: 421121
aucaacacugucaucaaga

SEQ ID NO: 421123 - RNA, 19 nt, Artificial Sequence
  Description of Artificial Sequence: Synthetic oligonucleotide
  Sense Strand Starting at position 1304 of SEQ ID NO: 317964
cugaauuugugaggauaua

SEQ ID NO: 421124 - RNA, 19 nt, Artificial Sequence
  Description of Artificial Sequence: Synthetic oligonucleotide
  Antisense Strand to SEQ ID NO: 421123
uauauccucacaaauucag

SEQ ID NO: 421125 - RNA, 19 nt, Artificial Sequence
  Description of Artificial Sequence: Synthetic oligonucleotide
  Sense Strand Starting at position 1304 of SEQ ID NO: 317988
agcuacgugggcuagagau

SEQ ID NO: 421126 - RNA, 19 nt, Artificial Sequence
  Description of Artificial Sequence: Synthetic oligonucleotide
  Antisense Strand to SEQ ID NO: 421125
aucucuagcccacguagcu

SEQ ID NO: 421127 - RNA, 19 nt, Artificial Sequence
  Description of Artificial Sequence: Synthetic oligonucleotide
  Sense Strand Starting at position 1304 of SEQ ID NO: 318011
agaacagcggcuuaaauaa

SEQ ID NO: 421128 - RNA, 19 nt, Artificial Sequence
  Description of Artificial Sequence: Synthetic oligonucleotide
  Antisense Strand to SEQ ID NO: 421127
uuauuuaagccgcuguucu

SEQ ID NO: 421129 - RNA, 19 nt, Artificial Sequence
  Description of Artificial Sequence: Synthetic oligonucleotide
  Sense Strand Starting at position 1304 of SEQ ID NO: 318123
uccacuauccuuuggaugu

SEQ ID NO: 421130 - RNA, 19 nt, Artificial Sequence
  Description of Artificial Sequence: Synthetic oligonucleotide
  Antisense Strand to SEQ ID NO: 421129
acauccaaaggauagugga

SEQ ID NO: 421131 - RNA, 19 nt, Artificial Sequence
  Description of Artificial Sequence: Synthetic oligonucleotide
  Sense Strand Starting at position 1304 of SEQ ID NO: 318183
agccaaguaccauaaguuu

SEQ ID NO: 421132 - RNA, 19 nt, Artificial Sequence
  Description of Artificial Sequence: Synthetic oligonucleotide
  Antisense Strand to SEQ ID NO: 421131
aaacuuaugguacuuggcu

SEQ ID NO: 421133 - RNA, 19 nt, Artificial Sequence
  Description of Artificial Sequence: Synthetic oligonucleotide
  Sense Strand Starting at position 1304 of SEQ ID NO: 318273
uaggguugguuucuaagga

SEQ ID NO: 421134 - RNA, 19 nt, Artificial Sequence
  Description of Artificial Sequence: Synthetic oligonucleotide
  Antisense Strand to SEQ ID NO: 421133
uccuuagaaaccaacccua

SEQ ID NO: 421135 - RNA, 19 nt, Artificial Sequence
  Description of Artificial Sequence: Synthetic oligonucleotide
  Sense Strand Starting at position 1304 of SEQ ID NO: 318294
aggagaaucccaugccucu

SEQ ID NO: 421136 - RNA, 19 nt, Artificial Sequence
  Description of Artificial Sequence: Synthetic oligonucleotide
  Antisense Strand to SEQ ID NO: 421135
agaggcaugggauucuccu

SEQ ID NO: 421137 - RNA, 19 nt, Artificial Sequence
  Description of Artificial Sequence: Synthetic oligonucleotide
  Sense Strand Starting at position 1304 of SEQ ID NO: 318347
cacuccuuggcucgaagaa

SEQ ID NO: 421138 - RNA, 19 nt, Artificial Sequence
  Description of Artificial Sequence: Synthetic oligonucleotide
  Antisense Strand to SEQ ID NO: 421137
uucuucgagccaaggagug

SEQ ID NO: 421139 - RNA, 19 nt, Artificial Sequence
  Description of Artificial Sequence: Synthetic oligonucleotide
  Sense Strand Starting at position 1304 of SEQ ID NO: 318676
guuucugucgaucaggaau

SEQ ID NO: 421140 - RNA, 19 nt, Artificial Sequence
  Description of Artificial Sequence: Synthetic oligonucleotide
  Antisense Strand to SEQ ID NO: 421139
auuccugaucgacagaaac

SEQ ID NO: 421141 - RNA, 19 nt, Artificial Sequence
  Description of Artificial Sequence: Synthetic oligonucleotide
  Sense Strand Starting at position 1304 of SEQ ID NO: 318689
aggaauuuguaagaaacuu

SEQ ID NO: 421142 - RNA, 19 nt, Artificial Sequence
  Description of Artificial Sequence: Synthetic oligonucleotide
  Antisense Strand to SEQ ID NO: 421141
aaguuucuuacaaauuccu

SEQ ID NO: 421143 - RNA, 19 nt, Artificial Sequence
  Description of Artificial Sequence: Synthetic oligonucleotide
  Sense Strand Starting at position 1304 of SEQ ID NO: 318765
gcuguagucaucuaaaggu

SEQ ID NO: 421144 - RNA, 19 nt, Artificial Sequence
  Description of Artificial Sequence: Synthetic oligonucleotide
  Antisense Strand to SEQ ID NO: 421143
accuuuagaugacuacagc

SEQ ID NO: 421145 - RNA, 19 nt, Artificial Sequence
  Description of Artificial Sequence: Synthetic oligonucleotide
  Sense Strand Starting at position 1304 of SEQ ID NO: 318910
gguucuccugagugacaga

SEQ ID NO: 421146 - RNA, 19 nt, Artificial Sequence
  Description of Artificial Sequence: Synthetic oligonucleotide
  Antisense Strand to SEQ ID NO: 421145
ucugucacucaggagaacc

SEQ ID NO: 421147 - RNA, 19 nt, Artificial Sequence
  Description of Artificial Sequence: Synthetic oligonucleotide
  Sense Strand Starting at position 1304 of SEQ ID NO: 318962
uuaugacuaucugugagag

SEQ ID NO: 421148 - RNA, 19 nt, Artificial Sequence
  Description of Artificial Sequence: Synthetic oligonucleotide
  Antisense Strand to SEQ ID NO: 421147
cucucacagauagucauaa

SEQ ID NO: 421149 - RNA, 19 nt, Artificial Sequence
  Description of Artificial Sequence: Synthetic oligonucleotide
  Sense Strand Starting at position 1304 of SEQ ID NO: 318963
uaugacuaucugugagagu

SEQ ID NO: 421150 - RNA, 19 nt, Artificial Sequence
  Description of Artificial Sequence: Synthetic oligonucleotide
  Antisense Strand to SEQ ID NO: 421149
acucucacagauagucaua

SEQ ID NO: 421151 - RNA, 19 nt, Artificial Sequence
  Description of Artificial Sequence: Synthetic oligonucleotide
  Sense Strand Starting at position 1304 of SEQ ID NO: 318977
agagucauacacugucacu

SEQ ID NO: 421152 - RNA, 19 nt, Artificial Sequence
  Description of Artificial Sequence: Synthetic oligonucleotide
  Antisense Strand to SEQ ID NO: 421151
agugacaguguaugacucu

SEQ ID NO: 421153 - RNA, 19 nt, Artificial Sequence
  Description of Artificial Sequence: Synthetic oligonucleotide
  Sense Strand Starting at position 1304 of SEQ ID NO: 318988
cugucacuucugccguauu

SEQ ID NO: 421154 - RNA, 19 nt, Artificial Sequence
  Description of Artificial Sequence: Synthetic oligonucleotide
  Antisense Strand to SEQ ID NO: 421153
aauacggcagaagugacag

SEQ ID NO: 421155 - RNA, 19 nt, Artificial Sequence
  Description of Artificial Sequence: Synthetic oligonucleotide
  Sense Strand Starting at position 1304 of SEQ ID NO: 319002
guauucuauugaucacaga

SEQ ID NO: 421156 - RNA, 19 nt, Artificial Sequence
  Description of Artificial Sequence: Synthetic oligonucleotide
  Antisense Strand to SEQ ID NO: 421155
ucugugaucaauagaauac

SEQ ID NO: 421157 - RNA, 19 nt, Artificial Sequence
  Description of Artificial Sequence: Synthetic oligonucleotide
  Sense Strand Starting at position 1304 of SEQ ID NO: 319019
gaggccauucuugguugaa

SEQ ID NO: 421158 - RNA, 19 nt, Artificial Sequence
  Description of Artificial Sequence: Synthetic oligonucleotide
  Antisense Strand to SEQ ID NO: 421157
uucaaccaagaauggccuc

SEQ ID NO: 421159 - RNA, 19 nt, Artificial Sequence
  Description of Artificial Sequence: Synthetic oligonucleotide
  Sense Strand Starting at position 1304 of SEQ ID NO: 319020
aggccauucuugguugaau

SEQ ID NO: 421160 - RNA, 19 nt, Artificial Sequence
  Description of Artificial Sequence: Synthetic oligonucleotide
  Antisense Strand to SEQ ID NO: 421159
auucaaccaagaauggccu

SEQ ID NO: 421161 - RNA, 19 nt, Artificial Sequence
  Description of Artificial Sequence: Synthetic oligonucleotide
  Sense Strand Starting at position 1304 of SEQ ID NO: 319021
ggccauucuugguugaaug

SEQ ID NO: 421162 - RNA, 19 nt, Artificial Sequence
  Description of Artificial Sequence: Synthetic oligonucleotide
  Antisense Strand to SEQ ID NO: 421161
cauucaaccaagaauggcc

SEQ ID NO: 421163 - RNA, 19 nt, Artificial Sequence
  Description of Artificial Sequence: Synthetic oligonucleotide
  Sense Strand Starting at position 1304 of SEQ ID NO: 319075
gguaaagaccuuuguccac

SEQ ID NO: 421164 - RNA, 19 nt, Artificial Sequence
  Description of Artificial Sequence: Synthetic oligonucleotide
  Antisense Strand to SEQ ID NO: 421163
guggacaaaggucuuuacc

SEQ ID NO: 421165 - RNA, 19 nt, Artificial Sequence
  Description of Artificial Sequence: Synthetic oligonucleotide
  Sense Strand Starting at position 1304 of SEQ ID NO: 319110
cugcuuuccaggcagugaa

SEQ ID NO: 421166 - RNA, 19 nt, Artificial Sequence
  Description of Artificial Sequence: Synthetic oligonucleotide
  Antisense Strand to SEQ ID NO: 421165
uucacugccuggaaagcag

SEQ ID NO: 421167 - RNA, 19 nt, Artificial Sequence
  Description of Artificial Sequence: Synthetic oligonucleotide
  Sense Strand Starting at position 1305 of SEQ ID NO: 315260
ugcacugggcuguaagaaa

SEQ ID NO: 421168 - RNA, 19 nt, Artificial Sequence
  Description of Artificial Sequence: Synthetic oligonucleotide
  Antisense Strand to SEQ ID NO: 421167
uuucuuacagcccagugca

SEQ ID NO: 421169 - RNA, 19 nt, Artificial Sequence
  Description of Artificial Sequence: Synthetic oligonucleotide
  Sense Strand Starting at position 1305 of SEQ ID NO: 315310
cuuauaggauggccagaau

SEQ ID NO: 421170 - RNA, 19 nt, Artificial Sequence
  Description of Artificial Sequence: Synthetic oligonucleotide
  Antisense Strand to SEQ ID NO: 421169
auucuggccauccuauaag

SEQ ID NO: 421171 - RNA, 19 nt, Artificial Sequence
  Description of Artificial Sequence: Synthetic oligonucleotide
  Sense Strand Starting at position 1305 of SEQ ID NO: 315382
uugaguuggcuggagcaau

SEQ ID NO: 421172 - RNA, 19 nt, Artificial Sequence
  Description of Artificial Sequence: Synthetic oligonucleotide
  Antisense Strand to SEQ ID NO: 421171
auugcuccagccaacucaa

SEQ ID NO: 421173 - RNA, 19 nt, Artificial Sequence
  Description of Artificial Sequence: Synthetic oligonucleotide
  Sense Strand Starting at position 1305 of SEQ ID NO: 315428
agaguugggcacuaaacga

SEQ ID NO: 421174 - RNA, 19 nt, Artificial Sequence
  Description of Artificial Sequence: Synthetic oligonucleotide
  Antisense Strand to SEQ ID NO: 421173
ucguuuagugcccaacucu

SEQ ID NO: 421175 - RNA, 19 nt, Artificial Sequence
  Description of Artificial Sequence: Synthetic oligonucleotide
  Sense Strand Starting at position 1305 of SEQ ID NO: 315444
cgaauaagauguggaaaga

SEQ ID NO: 421176 - RNA, 19 nt, Artificial Sequence
  Description of Artificial Sequence: Synthetic oligonucleotide
  Antisense Strand to SEQ ID NO: 421175
ucuuuccacaucuuauucg

SEQ ID NO: 421177 - RNA, 19 nt, Artificial Sequence
  Description of Artificial Sequence: Synthetic oligonucleotide
  Sense Strand Starting at position 1305 of SEQ ID NO: 315512
ggaagugugaaguagaagu

SEQ ID NO: 421178 - RNA, 19 nt, Artificial Sequence
  Description of Artificial Sequence: Synthetic oligonucleotide
  Antisense Strand to SEQ ID NO: 421177
acuucuacuucacacuucc

SEQ ID NO: 421179 - RNA, 19 nt, Artificial Sequence
  Description of Artificial Sequence: Synthetic oligonucleotide
  Sense Strand Starting at position 1305 of SEQ ID NO: 315545
ggagaccucucugaaucca

SEQ ID NO: 421180 - RNA, 19 nt, Artificial Sequence
  Description of Artificial Sequence: Synthetic oligonucleotide
  Antisense Strand to SEQ ID NO: 421179
uggauucagagaggucucc

SEQ ID NO: 421181 - RNA, 19 nt, Artificial Sequence
  Description of Artificial Sequence: Synthetic oligonucleotide
  Sense Strand Starting at position 1305 of SEQ ID NO: 315577
cucagaagcuucucgggau

SEQ ID NO: 421182 - RNA, 19 nt, Artificial Sequence
  Description of Artificial Sequence: Synthetic oligonucleotide
  Antisense Strand to SEQ ID NO: 421181
aucccgagaagcuucugag

SEQ ID NO: 421183 - RNA, 19 nt, Artificial Sequence
  Description of Artificial Sequence: Synthetic oligonucleotide
  Sense Strand Starting at position 1305 of SEQ ID NO: 315632
cgguucauccaagaagagu

SEQ ID NO: 421184 - RNA, 19 nt, Artificial Sequence
  Description of Artificial Sequence: Synthetic oligonucleotide
  Antisense Strand to SEQ ID NO: 421183
acucuucuuggaugaaccg

SEQ ID NO: 421185 - RNA, 19 nt, Artificial Sequence
  Description of Artificial Sequence: Synthetic oligonucleotide
  Sense Strand Starting at position 1305 of SEQ ID NO: 315643
agaagaguuugaguggcuu

SEQ ID NO: 421186 - RNA, 19 nt, Artificial Sequence
  Description of Artificial Sequence: Synthetic oligonucleotide
  Antisense Strand to SEQ ID NO: 421185
aagccacucaaacucuucu

SEQ ID NO: 421187 - RNA, 19 nt, Artificial Sequence
  Description of Artificial Sequence: Synthetic oligonucleotide
  Sense Strand Starting at position 1305 of SEQ ID NO: 315647
gaguuugaguggcuugaac

SEQ ID NO: 421188 - RNA, 19 nt, Artificial Sequence
  Description of Artificial Sequence: Synthetic oligonucleotide
  Antisense Strand to SEQ ID NO: 421187
guucaagccacucaaacuc

SEQ ID NO: 421189 - RNA, 19 nt, Artificial Sequence
  Description of Artificial Sequence: Synthetic oligonucleotide
  Sense Strand Starting at position 1305 of SEQ ID NO: 315649
guuugaguggcuugaaccu

SEQ ID NO: 421190 - RNA, 19 nt, Artificial Sequence
  Description of Artificial Sequence: Synthetic oligonucleotide
  Antisense Strand to SEQ ID NO: 421189
agguucaagccacucaaac

SEQ ID NO: 421191 - RNA, 19 nt, Artificial Sequence
  Description of Artificial Sequence: Synthetic oligonucleotide
  Sense Strand Starting at position 1305 of SEQ ID NO: 315680
gccagauggugguuggaga

SEQ ID NO: 421192 - RNA, 19 nt, Artificial Sequence
  Description of Artificial Sequence: Synthetic oligonucleotide
  Antisense Strand to SEQ ID NO: 421191
ucuccaaccaccaucuggc

SEQ ID NO: 421193 - RNA, 19 nt, Artificial Sequence
  Description of Artificial Sequence: Synthetic oligonucleotide
  Sense Strand Starting at position 1305 of SEQ ID NO: 315742
gggacagagcuugguaaga

SEQ ID NO: 421194 - RNA, 19 nt, Artificial Sequence
  Description of Artificial Sequence: Synthetic oligonucleotide
  Antisense Strand to SEQ ID NO: 421193
ucuuaccaagcucuguccc

SEQ ID NO: 421195 - RNA, 19 nt, Artificial Sequence
  Description of Artificial Sequence: Synthetic oligonucleotide
  Sense Strand Starting at position 1305 of SEQ ID NO: 315744
gacagagcuugguaagauu

SEQ ID NO: 421196 - RNA, 19 nt, Artificial Sequence
  Description of Artificial Sequence: Synthetic oligonucleotide
  Antisense Strand to SEQ ID NO: 421195
aaucuuaccaagcucuguc

SEQ ID NO: 421197 - RNA, 19 nt, Artificial Sequence
  Description of Artificial Sequence: Synthetic oligonucleotide
  Sense Strand Starting at position 1305 of SEQ ID NO: 315873
gcucaagacauccgcuaga

SEQ ID NO: 421198 - RNA, 19 nt, Artificial Sequence
  Description of Artificial Sequence: Synthetic oligonucleotide
  Antisense Strand to SEQ ID NO: 421197
ucuagcggaugucuugagc

SEQ ID NO: 421199 - RNA, 19 nt, Artificial Sequence
  Description of Artificial Sequence: Synthetic oligonucleotide
  Sense Strand Starting at position 1305 of SEQ ID NO: 316025
gcagcaacucuagauuacu

SEQ ID NO: 421200 - RNA, 19 nt, Artificial Sequence
  Description of Artificial Sequence: Synthetic oligonucleotide
  Antisense Strand to SEQ ID NO: 421199
aguaaucuagaguugcugc

SEQ ID NO: 421201 - RNA, 19 nt, Artificial Sequence
  Description of Artificial Sequence: Synthetic oligonucleotide
  Sense Strand Starting at position 1305 of SEQ ID NO: 316126
ucgcuuugcccaucuguaa

SEQ ID NO: 421202 - RNA, 19 nt, Artificial Sequence
  Description of Artificial Sequence: Synthetic oligonucleotide
  Antisense Strand to SEQ ID NO: 421201
uuacagaugggcaaagcga

SEQ ID NO: 421203 - RNA, 19 nt, Artificial Sequence
  Description of Artificial Sequence: Synthetic oligonucleotide
  Sense Strand Starting at position 1305 of SEQ ID NO: 316183
ccuguucuagagugagaug

SEQ ID NO: 421204 - RNA, 19 nt, Artificial Sequence
  Description of Artificial Sequence: Synthetic oligonucleotide
  Antisense Strand to SEQ ID NO: 421203
caucucacucuagaacagg

SEQ ID NO: 421205 - RNA, 19 nt, Artificial Sequence
  Description of Artificial Sequence: Synthetic oligonucleotide
  Sense Strand Starting at position 1305 of SEQ ID NO: 316184
cuguucuagagugagauga

SEQ ID NO: 421206 - RNA, 19 nt, Artificial Sequence
  Description of Artificial Sequence: Synthetic oligonucleotide
  Antisense Strand to SEQ ID NO: 421205
ucaucucacucuagaacag

SEQ ID NO: 421207 - RNA, 19 nt, Artificial Sequence
  Description of Artificial Sequence: Synthetic oligonucleotide
  Sense Strand Starting at position 1305 of SEQ ID NO: 316186
guucuagagugagaugauc

SEQ ID NO: 421208 - RNA, 19 nt, Artificial Sequence
  Description of Artificial Sequence: Synthetic oligonucleotide
  Antisense Strand to SEQ ID NO: 421207
gaucaucucacucuagaac

SEQ ID NO: 421209 - RNA, 19 nt, Artificial Sequence
  Description of Artificial Sequence: Synthetic oligonucleotide
  Sense Strand Starting at position 1305 of SEQ ID NO: 316195
ugagaugauccaugcaucu

SEQ ID NO: 421210 - RNA, 19 nt, Artificial Sequence
  Description of Artificial Sequence: Synthetic oligonucleotide
  Antisense Strand to SEQ ID NO: 421209
agaugcauggaucaucuca

SEQ ID NO: 421211 - RNA, 19 nt, Artificial Sequence
  Description of Artificial Sequence: Synthetic oligonucleotide
  Sense Strand Starting at position 1305 of SEQ ID NO: 316293
cgaguacacauguaucaag

SEQ ID NO: 421212 - RNA, 19 nt, Artificial Sequence
  Description of Artificial Sequence: Synthetic oligonucleotide
  Antisense Strand to SEQ ID NO: 421211
cuugauacauguguacucg

SEQ ID NO: 421213 - RNA, 19 nt, Artificial Sequence
  Description of Artificial Sequence: Synthetic oligonucleotide
  Sense Strand Starting at position 1305 of SEQ ID NO: 316515
gagggaugugccugucacu

SEQ ID NO: 421214 - RNA, 19 nt, Artificial Sequence
  Description of Artificial Sequence: Synthetic oligonucleotide
  Antisense Strand to SEQ ID NO: 421213
agugacaggcacaucccuc

SEQ ID NO: 421215 - RNA, 19 nt, Artificial Sequence
  Description of Artificial Sequence: Synthetic oligonucleotide
  Sense Strand Starting at position 1305 of SEQ ID NO: 316898
agucgagaugcuugauguc

SEQ ID NO: 421216 - RNA, 19 nt, Artificial Sequence
  Description of Artificial Sequence: Synthetic oligonucleotide
  Antisense Strand to SEQ ID NO: 421215
gacaucaagcaucucgacu

SEQ ID NO: 421217 - RNA, 19 nt, Artificial Sequence
  Description of Artificial Sequence: Synthetic oligonucleotide
  Sense Strand Starting at position 1305 of SEQ ID NO: 317400
gucuuccgucgugagacau

SEQ ID NO: 421218 - RNA, 19 nt, Artificial Sequence
  Description of Artificial Sequence: Synthetic oligonucleotide
  Antisense Strand to SEQ ID NO: 421217
augucucacgacggaagac

SEQ ID NO: 421219 - RNA, 19 nt, Artificial Sequence
  Description of Artificial Sequence: Synthetic oligonucleotide
  Sense Strand Starting at position 1305 of SEQ ID NO: 317439
gggcucaucacccgggaau

SEQ ID NO: 421220 - RNA, 19 nt, Artificial Sequence
  Description of Artificial Sequence: Synthetic oligonucleotide
  Antisense Strand to SEQ ID NO: 421219
auucccgggugaugagccc

SEQ ID NO: 421221 - RNA, 19 nt, Artificial Sequence
  Description of Artificial Sequence: Synthetic oligonucleotide
  Sense Strand Starting at position 1305 of SEQ ID NO: 317644
cgcaaauccgauuacgaga

SEQ ID NO: 421222 - RNA, 19 nt, Artificial Sequence
  Description of Artificial Sequence: Synthetic oligonucleotide
  Antisense Strand to SEQ ID NO: 421221
ucucguaaucggauuugcg

SEQ ID NO: 421223 - RNA, 19 nt, Artificial Sequence
  Description of Artificial Sequence: Synthetic oligonucleotide
  Sense Strand Starting at position 1305 of SEQ ID NO: 317725
cagagaucggguuguuuga

SEQ ID NO: 421224 - RNA, 19 nt, Artificial Sequence
  Description of Artificial Sequence: Synthetic oligonucleotide
  Antisense Strand to SEQ ID NO: 421223
ucaaacaacccgaucucug

SEQ ID NO: 421225 - RNA, 19 nt, Artificial Sequence
  Description of Artificial Sequence: Synthetic oligonucleotide
  Sense Strand Starting at position 1305 of SEQ ID NO: 317732
cggguuguuugaucaauuu

SEQ ID NO: 421226 - RNA, 19 nt, Artificial Sequence
  Description of Artificial Sequence: Synthetic oligonucleotide
  Antisense Strand to SEQ ID NO: 421225
aaauugaucaaacaacccg

SEQ ID NO: 421227 - RNA, 19 nt, Artificial Sequence
  Description of Artificial Sequence: Synthetic oligonucleotide
  Sense Strand Starting at position 1305 of SEQ ID NO: 318221
cguuuauucgucccuggca

SEQ ID NO: 421228 - RNA, 19 nt, Artificial Sequence
  Description of Artificial Sequence: Synthetic oligonucleotide
  Antisense Strand to SEQ ID NO: 421227
ugccagggacgaauaaacg

SEQ ID NO: 421229 - RNA, 19 nt, Artificial Sequence
  Description of Artificial Sequence: Synthetic oligonucleotide
  Sense Strand Starting at position 1305 of SEQ ID NO: 318304
gcugcuagcccucuuucua

SEQ ID NO: 421230 - RNA, 19 nt, Artificial Sequence
  Description of Artificial Sequence: Synthetic oligonucleotide
  Antisense Strand to SEQ ID NO: 421229
uagaaagagggcuagcagc

SEQ ID NO: 421231 - RNA, 19 nt, Artificial Sequence
  Description of Artificial Sequence: Synthetic oligonucleotide
  Sense Strand Starting at position 1305 of SEQ ID NO: 318951
cgauauaaucagugaggcu

SEQ ID NO: 421232 - RNA, 19 nt, Artificial Sequence
  Description of Artificial Sequence: Synthetic oligonucleotide
  Antisense Strand to SEQ ID NO: 421231
agccucacugauuauaucg

SEQ ID NO: 421233 - RNA, 19 nt, Artificial Sequence
  Description of Artificial Sequence: Synthetic oligonucleotide
  Sense Strand Starting at position 1305 of SEQ ID NO: 318974
acaggccuuuccuuagauu

SEQ ID NO: 421234 - RNA, 19 nt, Artificial Sequence
  Description of Artificial Sequence: Synthetic oligonucleotide
  Antisense Strand to SEQ ID NO: 421233
aaucuaaggaaaggccugu

SEQ ID NO: 421235 - RNA, 19 nt, Artificial Sequence
  Description of Artificial Sequence: Synthetic oligonucleotide
  Sense Strand Starting at position 1305 of SEQ ID NO: 319002
uggagaugccucuguccua

SEQ ID NO: 421236 - RNA, 19 nt, Artificial Sequence
  Description of Artificial Sequence: Synthetic oligonucleotide
  Antisense Strand to SEQ ID NO: 421235
uaggacagaggcaucucca

SEQ ID NO: 421237 - RNA, 19 nt, Artificial Sequence
  Description of Artificial Sequence: Synthetic oligonucleotide
  Sense Strand Starting at position 1305 of SEQ ID NO: 319020
agccuuucuuggguuugua

SEQ ID NO: 421238 - RNA, 19 nt, Artificial Sequence
  Description of Artificial Sequence: Synthetic oligonucleotide
  Antisense Strand to SEQ ID NO: 421237
uacaaacccaagaaaggcu

SEQ ID NO: 421239 - RNA, 19 nt, Artificial Sequence
  Description of Artificial Sequence: Synthetic oligonucleotide
  Sense Strand Starting at position 1305 of SEQ ID NO: 319053
ggcgggaguguuugaauca

SEQ ID NO: 421240 - RNA, 19 nt, Artificial Sequence
  Description of Artificial Sequence: Synthetic oligonucleotide
  Antisense Strand to SEQ ID NO: 421239
ugauucaaacacucccgcc

SEQ ID NO: 421241 - RNA, 19 nt, Artificial Sequence
  Description of Artificial Sequence: Synthetic oligonucleotide
  Sense Strand Starting at position 1305 of SEQ ID NO: 319060
guguuugaaucauccucag

SEQ ID NO: 421242 - RNA, 19 nt, Artificial Sequence
  Description of Artificial Sequence: Synthetic oligonucleotide
  Antisense Strand to SEQ ID NO: 421241
cugaggaugauucaaacac

SEQ ID NO: 421243 - RNA, 19 nt, Artificial Sequence
  Description of Artificial Sequence: Synthetic oligonucleotide
  Sense Strand Starting at position 1305 of SEQ ID NO: 319108
ggcugcuguuagcucagaa

SEQ ID NO: 421244 - RNA, 19 nt, Artificial Sequence
  Description of Artificial Sequence: Synthetic oligonucleotide
  Antisense Strand to SEQ ID NO: 421243
uucugagcuaacagcagcc

SEQ ID NO: 421245 - RNA, 19 nt, Artificial Sequence
  Description of Artificial Sequence: Synthetic oligonucleotide
  Sense Strand Starting at position 1305 of SEQ ID NO: 319132
gggucuuugucucuccuua

SEQ ID NO: 421246 - RNA, 19 nt, Artificial Sequence
  Description of Artificial Sequence: Synthetic oligonucleotide
  Antisense Strand to SEQ ID NO: 421245
uaaggagagacaaagaccc

SEQ ID NO: 421247 - RNA, 19 nt, Artificial Sequence
  Description of Artificial Sequence: Synthetic oligonucleotide
  Sense Strand Starting at position 1306 of SEQ ID NO: 315783
ugagaccacugucucuaua

SEQ ID NO: 421248 - RNA, 19 nt, Artificial Sequence
  Description of Artificial Sequence: Synthetic oligonucleotide
  Antisense Strand to SEQ ID NO: 421247
uauagagacaguggucuca

SEQ ID NO: 421249 - RNA, 19 nt, Artificial Sequence
  Description of Artificial Sequence: Synthetic oligonucleotide
  Sense Strand Starting at position 1306 of SEQ ID NO: 315838
guauaauaggcagaacagu

SEQ ID NO: 421250 - RNA, 19 nt, Artificial Sequence
  Description of Artificial Sequence: Synthetic oligonucleotide
  Antisense Strand to SEQ ID NO: 421249
acuguucugccuauuauac

SEQ ID NO: 421251 - RNA, 19 nt, Artificial Sequence
  Description of Artificial Sequence: Synthetic oligonucleotide
  Sense Strand Starting at position 1306 of SEQ ID NO: 316077
gguaaacuccaguaagcug

SEQ ID NO: 421252 - RNA, 19 nt, Artificial Sequence
  Description of Artificial Sequence: Synthetic oligonucleotide
  Antisense Strand to SEQ ID NO: 421251
cagcuuacuggaguuuacc

SEQ ID NO: 421253 - RNA, 19 nt, Artificial Sequence
  Description of Artificial Sequence: Synthetic oligonucleotide
  Sense Strand Starting at position 1306 of SEQ ID NO: 316108
gcaggaugauauuaccaau

SEQ ID NO: 421254 - RNA, 19 nt, Artificial Sequence
  Description of Artificial Sequence: Synthetic oligonucleotide
  Antisense Strand to SEQ ID NO: 421253
auugguaauaucauccugc

SEQ ID NO: 421255 - RNA, 19 nt, Artificial Sequence
  Description of Artificial Sequence: Synthetic oligonucleotide
  Sense Strand Starting at position 1306 of SEQ ID NO: 316111
ggaugauauuaccaauuaa

SEQ ID NO: 421256 - RNA, 19 nt, Artificial Sequence
  Description of Artificial Sequence: Synthetic oligonucleotide
  Antisense Strand to SEQ ID NO: 421255
uuaauugguaauaucaucc

SEQ ID NO: 421257 - RNA, 19 nt, Artificial Sequence
  Description of Artificial Sequence: Synthetic oligonucleotide
  Sense Strand Starting at position 1306 of SEQ ID NO: 316141
guacauuaacgaugcauuu

SEQ ID NO: 421258 - RNA, 19 nt, Artificial Sequence
  Description of Artificial Sequence: Synthetic oligonucleotide
  Antisense Strand to SEQ ID NO: 421257
aaaugcaucguuaauguac

SEQ ID NO: 421259 - RNA, 19 nt, Artificial Sequence
  Description of Artificial Sequence: Synthetic oligonucleotide
  Sense Strand Starting at position 1306 of SEQ ID NO: 316163
acaggaagaugcuacuaau

SEQ ID NO: 421260 - RNA, 19 nt, Artificial Sequence
  Description of Artificial Sequence: Synthetic oligonucleotide
  Antisense Strand to SEQ ID NO: 421259
auuaguagcaucuuccugu

SEQ ID NO: 421261 - RNA, 19 nt, Artificial Sequence
  Description of Artificial Sequence: Synthetic oligonucleotide
  Sense Strand Starting at position 1306 of SEQ ID NO: 316166
ggaagaugcuacuaauaua

SEQ ID NO: 421262 - RNA, 19 nt, Artificial Sequence
  Description of Artificial Sequence: Synthetic oligonucleotide
  Antisense Strand to SEQ ID NO: 421261
uauauuaguagcaucuucc

SEQ ID NO: 421263 - RNA, 19 nt, Artificial Sequence
  Description of Artificial Sequence: Synthetic oligonucleotide
  Sense Strand Starting at position 1306 of SEQ ID NO: 316271
acgagucauuugugacuca

SEQ ID NO: 421264 - RNA, 19 nt, Artificial Sequence
  Description of Artificial Sequence: Synthetic oligonucleotide
  Antisense Strand to SEQ ID NO: 421263
ugagucacaaaugacucgu

SEQ ID NO: 421265 - RNA, 19 nt, Artificial Sequence
  Description of Artificial Sequence: Synthetic oligonucleotide
  Sense Strand Starting at position 1306 of SEQ ID NO: 316272
cgagucauuugugacucaa

SEQ ID NO: 421266 - RNA, 19 nt, Artificial Sequence
  Description of Artificial Sequence: Synthetic oligonucleotide
  Antisense Strand to SEQ ID NO: 421265
uugagucacaaaugacucg

SEQ ID NO: 421267 - RNA, 19 nt, Artificial Sequence
  Description of Artificial Sequence: Synthetic oligonucleotide
  Sense Strand Starting at position 1306 of SEQ ID NO: 316383
ccgucuaagaagugaaguu

SEQ ID NO: 421268 - RNA, 19 nt, Artificial Sequence
  Description of Artificial Sequence: Synthetic oligonucleotide
  Antisense Strand to SEQ ID NO: 421267
aacuucacuucuuagacgg

SEQ ID NO: 421269 - RNA, 19 nt, Artificial Sequence
  Description of Artificial Sequence: Synthetic oligonucleotide
  Sense Strand Starting at position 1306 of SEQ ID NO: 316696
cgccguauaguacggaaga

SEQ ID NO: 421270 - RNA, 19 nt, Artificial Sequence
  Description of Artificial Sequence: Synthetic oligonucleotide
  Antisense Strand to SEQ ID NO: 421269
ucuuccguacuauacggcg

SEQ ID NO: 421271 - RNA, 19 nt, Artificial Sequence
  Description of Artificial Sequence: Synthetic oligonucleotide
  Sense Strand Starting at position 1306 of SEQ ID NO: 316844
aguuacucucgggaagcuu

SEQ ID NO: 421272 - RNA, 19 nt, Artificial Sequence
  Description of Artificial Sequence: Synthetic oligonucleotide
  Antisense Strand to SEQ ID NO: 421271
aagcuucccgagaguaacu

SEQ ID NO: 421273 - RNA, 19 nt, Artificial Sequence
  Description of Artificial Sequence: Synthetic oligonucleotide
  Sense Strand Starting at position 1306 of SEQ ID NO: 317411
aaaugaaguuccgcgucua

SEQ ID NO: 421274 - RNA, 19 nt, Artificial Sequence
  Description of Artificial Sequence: Synthetic oligonucleotide
  Antisense Strand to SEQ ID NO: 421273
uagacgcggaacuucauuu

SEQ ID NO: 421275 - RNA, 19 nt, Artificial Sequence
  Description of Artificial Sequence: Synthetic oligonucleotide
  Sense Strand Starting at position 1306 of SEQ ID NO: 317577
cuucuaagacaguacugua

SEQ ID NO: 421276 - RNA, 19 nt, Artificial Sequence
  Description of Artificial Sequence: Synthetic oligonucleotide
  Antisense Strand to SEQ ID NO: 421275
uacaguacugucuuagaag

SEQ ID NO: 421277 - RNA, 19 nt, Artificial Sequence
  Description of Artificial Sequence: Synthetic oligonucleotide
  Sense Strand Starting at position 1306 of SEQ ID NO: 317590
acuguaaucgccugauacu

SEQ ID NO: 421278 - RNA, 19 nt, Artificial Sequence
  Description of Artificial Sequence: Synthetic oligonucleotide
  Antisense Strand to SEQ ID NO: 421277
aguaucaggcgauuacagu

SEQ ID NO: 421279 - RNA, 19 nt, Artificial Sequence
  Description of Artificial Sequence: Synthetic oligonucleotide
  Sense Strand Starting at position 1306 of SEQ ID NO: 317591
cuguaaucgccugauacuu

SEQ ID NO: 421280 - RNA, 19 nt, Artificial Sequence
  Description of Artificial Sequence: Synthetic oligonucleotide
  Antisense Strand to SEQ ID NO: 421279
aaguaucaggcgauuacag

SEQ ID NO: 421281 - RNA, 19 nt, Artificial Sequence
  Description of Artificial Sequence: Synthetic oligonucleotide
  Sense Strand Starting at position 1306 of SEQ ID NO: 317626
ugaccugugugcgcaaaga

SEQ ID NO: 421282 - RNA, 19 nt, Artificial Sequence
  Description of Artificial Sequence: Synthetic oligonucleotide
  Antisense Strand to SEQ ID NO: 421281
ucuuugcgcacacagguca

SEQ ID NO: 421283 - RNA, 19 nt, Artificial Sequence
  Description of Artificial Sequence: Synthetic oligonucleotide
  Sense Strand Starting at position 1306 of SEQ ID NO: 317636
gcgcaaagagccucuguuu

SEQ ID NO: 421284 - RNA, 19 nt, Artificial Sequence
  Description of Artificial Sequence: Synthetic oligonucleotide
  Antisense Strand to SEQ ID NO: 421283
aaacagaggcucuuugcgc

SEQ ID NO: 421285 - RNA, 19 nt, Artificial Sequence
  Description of Artificial Sequence: Synthetic oligonucleotide
  Sense Strand Starting at position 1306 of SEQ ID NO: 317681
uagaacauaccgugaucua

SEQ ID NO: 421286 - RNA, 19 nt, Artificial Sequence
  Description of Artificial Sequence: Synthetic oligonucleotide
  Antisense Strand to SEQ ID NO: 421285
uagaucacgguauguucua

SEQ ID NO: 421287 - RNA, 19 nt, Artificial Sequence
  Description of Artificial Sequence: Synthetic oligonucleotide
  Sense Strand Starting at position 1306 of SEQ ID NO: 317684
aacauaccgugaucuaaga

SEQ ID NO: 421288 - RNA, 19 nt, Artificial Sequence
  Description of Artificial Sequence: Synthetic oligonucleotide
  Antisense Strand to SEQ ID NO: 421287
ucuuagaucacgguauguu

SEQ ID NO: 421289 - RNA, 19 nt, Artificial Sequence
  Description of Artificial Sequence: Synthetic oligonucleotide
  Sense Strand Starting at position 1306 of SEQ ID NO: 317738
cucauuaaaucagaaggca

SEQ ID NO: 421290 - RNA, 19 nt, Artificial Sequence
  Description of Artificial Sequence: Synthetic oligonucleotide
  Antisense Strand to SEQ ID NO: 421289
ugccuucugauuuaaugag

SEQ ID NO: 421291 - RNA, 19 nt, Artificial Sequence
  Description of Artificial Sequence: Synthetic oligonucleotide
  Sense Strand Starting at position 1306 of SEQ ID NO: 317956
gcguguuugguagagacau

SEQ ID NO: 421292 - RNA, 19 nt, Artificial Sequence
  Description of Artificial Sequence: Synthetic oligonucleotide
  Antisense Strand to SEQ ID NO: 421291
augucucuaccaaacacgc

SEQ ID NO: 421293 - RNA, 19 nt, Artificial Sequence
  Description of Artificial Sequence: Synthetic oligonucleotide
  Sense Strand Starting at position 1306 of SEQ ID NO: 317957
cguguuugguagagacaug

SEQ ID NO: 421294 - RNA, 19 nt, Artificial Sequence
  Description of Artificial Sequence: Synthetic oligonucleotide
  Antisense Strand to SEQ ID NO: 421293
caugucucuaccaaacacg

SEQ ID NO: 421295 - RNA, 19 nt, Artificial Sequence
  Description of Artificial Sequence: Synthetic oligonucleotide
  Sense Strand Starting at position 1306 of SEQ ID NO: 318364
caagaccuagccuguaaga

SEQ ID NO: 421296 - RNA, 19 nt, Artificial Sequence
  Description of Artificial Sequence: Synthetic oligonucleotide
  Antisense Strand to SEQ ID NO: 421295
ucuuacaggcuaggucuug

SEQ ID NO: 421297 - RNA, 19 nt, Artificial Sequence
  Description of Artificial Sequence: Synthetic oligonucleotide
  Sense Strand Starting at position 1306 of SEQ ID NO: 318366
agaccuagccuguaagaau

SEQ ID NO: 421298 - RNA, 19 nt, Artificial Sequence
  Description of Artificial Sequence: Synthetic oligonucleotide
  Antisense Strand to SEQ ID NO: 421297
auucuuacaggcuaggucu

SEQ ID NO: 421299 - RNA, 19 nt, Artificial Sequence
  Description of Artificial Sequence: Synthetic oligonucleotide
  Sense Strand Starting at position 1306 of SEQ ID NO: 318389
agauacuuauugccagguu

SEQ ID NO: 421300 - RNA, 19 nt, Artificial Sequence
  Description of Artificial Sequence: Synthetic oligonucleotide
  Antisense Strand to SEQ ID NO: 421299
aaccuggcaauaaguaucu

SEQ ID NO: 421301 - RNA, 19 nt, Artificial Sequence
  Description of Artificial Sequence: Synthetic oligonucleotide
  Sense Strand Starting at position 1306 of SEQ ID NO: 318404
gguuauuauacgugaggca

SEQ ID NO: 421302 - RNA, 19 nt, Artificial Sequence
  Description of Artificial Sequence: Synthetic oligonucleotide
  Antisense Strand to SEQ ID NO: 421301
ugccucacguauaauaacc

SEQ ID NO: 421303 - RNA, 19 nt, Artificial Sequence
  Description of Artificial Sequence: Synthetic oligonucleotide
  Sense Strand Starting at position 1306 of SEQ ID NO: 318671
gcguucaaggccuuaugca

SEQ ID NO: 421304 - RNA, 19 nt, Artificial Sequence
  Description of Artificial Sequence: Synthetic oligonucleotide
  Antisense Strand to SEQ ID NO: 421303
ugcauaaggccuugaacgc

SEQ ID NO: 421305 - RNA, 19 nt, Artificial Sequence
  Description of Artificial Sequence: Synthetic oligonucleotide
  Sense Strand Starting at position 1306 of SEQ ID NO: 318691
cucauuaucucuccgggaa

SEQ ID NO: 421306 - RNA, 19 nt, Artificial Sequence
  Description of Artificial Sequence: Synthetic oligonucleotide
  Antisense Strand to SEQ ID NO: 421305
uucccggagagauaaugag

SEQ ID NO: 421307 - RNA, 19 nt, Artificial Sequence
  Description of Artificial Sequence: Synthetic oligonucleotide
  Sense Strand Starting at position 1306 of SEQ ID NO: 318692
ucauuaucucuccgggaau

SEQ ID NO: 421308 - RNA, 19 nt, Artificial Sequence
  Description of Artificial Sequence: Synthetic oligonucleotide
  Antisense Strand to SEQ ID NO: 421307
auucccggagagauaauga

SEQ ID NO: 421309 - RNA, 19 nt, Artificial Sequence
  Description of Artificial Sequence: Synthetic oligonucleotide
  Sense Strand Starting at position 1306 of SEQ ID NO: 318695
uuaucucuccgggaaugcu

SEQ ID NO: 421310 - RNA, 19 nt, Artificial Sequence
  Description of Artificial Sequence: Synthetic oligonucleotide
  Antisense Strand to SEQ ID NO: 421309
agcauucccggagagauaa

SEQ ID NO: 421311 - RNA, 19 nt, Artificial Sequence
  Description of Artificial Sequence: Synthetic oligonucleotide
  Sense Strand Starting at position 1306 of SEQ ID NO: 318714
gagcaagucuccgugcauc

SEQ ID NO: 421312 - RNA, 19 nt, Artificial Sequence
  Description of Artificial Sequence: Synthetic oligonucleotide
  Antisense Strand to SEQ ID NO: 421311
gaugcacggagacuugcuc

SEQ ID NO: 421313 - RNA, 19 nt, Artificial Sequence
  Description of Artificial Sequence: Synthetic oligonucleotide
  Sense Strand Starting at position 1306 of SEQ ID NO: 318725
cgugcaucuccaugagucu

SEQ ID NO: 421314 - RNA, 19 nt, Artificial Sequence
  Description of Artificial Sequence: Synthetic oligonucleotide
  Antisense Strand to SEQ ID NO: 421313
agacucauggagaugcacg

SEQ ID NO: 421315 - RNA, 19 nt, Artificial Sequence
  Description of Artificial Sequence: Synthetic oligonucleotide
  Sense Strand Starting at position 1306 of SEQ ID NO: 318726
gugcaucuccaugagucuu

SEQ ID NO: 421316 - RNA, 19 nt, Artificial Sequence
  Description of Artificial Sequence: Synthetic oligonucleotide
  Antisense Strand to SEQ ID NO: 421315
aagacucauggagaugcac

SEQ ID NO: 421317 - RNA, 19 nt, Artificial Sequence
  Description of Artificial Sequence: Synthetic oligonucleotide
  Sense Strand Starting at position 1306 of SEQ ID NO: 318897
cucuuaaauguguaacuug

SEQ ID NO: 421318 - RNA, 19 nt, Artificial Sequence
  Description of Artificial Sequence: Synthetic oligonucleotide
  Antisense Strand to SEQ ID NO: 421317
caaguuacacauuuaagag

SEQ ID NO: 421319 - RNA, 19 nt, Artificial Sequence
  Description of Artificial Sequence: Synthetic oligonucleotide
  Sense Strand Starting at position 1306 of SEQ ID NO: 318930
agcagagauucucuaauau

SEQ ID NO: 421320 - RNA, 19 nt, Artificial Sequence
  Description of Artificial Sequence: Synthetic oligonucleotide
  Antisense Strand to SEQ ID NO: 421319
auauuagagaaucucugcu

SEQ ID NO: 421321 - RNA, 19 nt, Artificial Sequence
  Description of Artificial Sequence: Synthetic oligonucleotide
  Sense Strand Starting at position 1306 of SEQ ID NO: 319047
aguaauggccaguaccauu

SEQ ID NO: 421322 - RNA, 19 nt, Artificial Sequence
  Description of Artificial Sequence: Synthetic oligonucleotide
  Antisense Strand to SEQ ID NO: 421321
aaugguacuggccauuacu

SEQ ID NO: 421323 - RNA, 19 nt, Artificial Sequence
  Description of Artificial Sequence: Synthetic oligonucleotide
  Sense Strand Starting at position 1306 of SEQ ID NO: 319152
cagggaagauaugguuaau

SEQ ID NO: 421324 - RNA, 19 nt, Artificial Sequence
  Description of Artificial Sequence: Synthetic oligonucleotide
  Antisense Strand to SEQ ID NO: 421323
auuaaccauaucuucccug

SEQ ID NO: 421325 - RNA, 19 nt, Artificial Sequence
  Description of Artificial Sequence: Synthetic oligonucleotide
  Sense Strand Starting at position 1306 of SEQ ID NO: 319158
agauaugguuaaucaccuu

SEQ ID NO: 421326 - RNA, 19 nt, Artificial Sequence
  Description of Artificial Sequence: Synthetic oligonucleotide
  Antisense Strand to SEQ ID NO: 421325
aaggugauuaaccauaucu

SEQ ID NO: 421327 - RNA, 19 nt, Artificial Sequence
  Description of Artificial Sequence: Synthetic oligonucleotide
  Sense Strand Starting at position 1307 of SEQ ID NO: 315349
gucauacagcgugaagaua

SEQ ID NO: 421328 - RNA, 19 nt, Artificial Sequence
  Description of Artificial Sequence: Synthetic oligonucleotide
  Antisense Strand to SEQ ID NO: 421327
uaucuucacgcuguaugac

SEQ ID NO: 421329 - RNA, 19 nt, Artificial Sequence
  Description of Artificial Sequence: Synthetic oligonucleotide
  Sense Strand Starting at position 1307 of SEQ ID NO: 315357
gcgugaagauaagucaaau

SEQ ID NO: 421330 - RNA, 19 nt, Artificial Sequence
  Description of Artificial Sequence: Synthetic oligonucleotide
  Antisense Strand to SEQ ID NO: 421329
auuugacuuaucuucacgc

SEQ ID NO: 421331 - RNA, 19 nt, Artificial Sequence
  Description of Artificial Sequence: Synthetic oligonucleotide
  Sense Strand Starting at position 1307 of SEQ ID NO: 315658
ugcugacaaugguccagau

SEQ ID NO: 421332 - RNA, 19 nt, Artificial Sequence
  Description of Artificial Sequence: Synthetic oligonucleotide
  Antisense Strand to SEQ ID NO: 421331
aucuggaccauugucagca

SEQ ID NO: 421333 - RNA, 19 nt, Artificial Sequence
  Description of Artificial Sequence: Synthetic oligonucleotide
  Sense Strand Starting at position 1307 of SEQ ID NO: 315712
acauauuacucuguuagag

SEQ ID NO: 421334 - RNA, 19 nt, Artificial Sequence
  Description of Artificial Sequence: Synthetic oligonucleotide
  Antisense Strand to SEQ ID NO: 421333
cucuaacagaguaauaugu

SEQ ID NO: 421335 - RNA, 19 nt, Artificial Sequence
  Description of Artificial Sequence: Synthetic oligonucleotide
  Sense Strand Starting at position 1307 of SEQ ID NO: 315722
cuguuagagcucuggaaag

SEQ ID NO: 421336 - RNA, 19 nt, Artificial Sequence
  Description of Artificial Sequence: Synthetic oligonucleotide
  Antisense Strand to SEQ ID NO: 421335
cuuuccagagcucuaacag

SEQ ID NO: 421337 - RNA, 19 nt, Artificial Sequence
  Description of Artificial Sequence: Synthetic oligonucleotide
  Sense Strand Starting at position 1307 of SEQ ID NO: 315814
uugcauauucuauggaaca

SEQ ID NO: 421338 - RNA, 19 nt, Artificial Sequence
  Description of Artificial Sequence: Synthetic oligonucleotide
  Antisense Strand to SEQ ID NO: 421337
uguuccauagaauaugcaa

SEQ ID NO: 421339 - RNA, 19 nt, Artificial Sequence
  Description of Artificial Sequence: Synthetic oligonucleotide
  Sense Strand Starting at position 1307 of SEQ ID NO: 315836
cagcuauugccagaggauu

SEQ ID NO: 421340 - RNA, 19 nt, Artificial Sequence
  Description of Artificial Sequence: Synthetic oligonucleotide
  Antisense Strand to SEQ ID NO: 421339
aauccucuggcaauagcug

SEQ ID NO: 421341 - RNA, 19 nt, Artificial Sequence
  Description of Artificial Sequence: Synthetic oligonucleotide
  Sense Strand Starting at position 1307 of SEQ ID NO: 315991
acauguaauugucucccaa

SEQ ID NO: 421342 - RNA, 19 nt, Artificial Sequence
  Description of Artificial Sequence: Synthetic oligonucleotide
  Antisense Strand to SEQ ID NO: 421341
uugggagacaauuacaugu

SEQ ID NO: 421343 - RNA, 19 nt, Artificial Sequence
  Description of Artificial Sequence: Synthetic oligonucleotide
  Sense Strand Starting at position 1307 of SEQ ID NO: 315993
auguaauugucucccaaau

SEQ ID NO: 421344 - RNA, 19 nt, Artificial Sequence
  Description of Artificial Sequence: Synthetic oligonucleotide
  Antisense Strand to SEQ ID NO: 421343
auuugggagacaauuacau

SEQ ID NO: 421345 - RNA, 19 nt, Artificial Sequence
  Description of Artificial Sequence: Synthetic oligonucleotide
  Sense Strand Starting at position 1307 of SEQ ID NO: 316093
gaaaguagaguaugguaga

SEQ ID NO: 421346 - RNA, 19 nt, Artificial Sequence
  Description of Artificial Sequence: Synthetic oligonucleotide
  Antisense Strand to SEQ ID NO: 421345
ucuaccauacucuacuuuc

SEQ ID NO: 421347 - RNA, 19 nt, Artificial Sequence
  Description of Artificial Sequence: Synthetic oligonucleotide
  Sense Strand Starting at position 1307 of SEQ ID NO: 316699
cagaaugaggcuugcaauu

SEQ ID NO: 421348 - RNA, 19 nt, Artificial Sequence
  Description of Artificial Sequence: Synthetic oligonucleotide
  Antisense Strand to SEQ ID NO: 421347
aauugcaagccucauucug

SEQ ID NO: 421349 - RNA, 19 nt, Artificial Sequence
  Description of Artificial Sequence: Synthetic oligonucleotide
  Sense Strand Starting at position 1307 of SEQ ID NO: 316802
uggauuuagugauaccuca

SEQ ID NO: 421350 - RNA, 19 nt, Artificial Sequence
  Description of Artificial Sequence: Synthetic oligonucleotide
  Antisense Strand to SEQ ID NO: 421349
ugagguaucacuaaaucca

SEQ ID NO: 421351 - RNA, 19 nt, Artificial Sequence
  Description of Artificial Sequence: Synthetic oligonucleotide
  Sense Strand Starting at position 1307 of SEQ ID NO: 317139
cuggaaacucguuaccuga

SEQ ID NO: 421352 - RNA, 19 nt, Artificial Sequence
  Description of Artificial Sequence: Synthetic oligonucleotide
  Antisense Strand to SEQ ID NO: 421351
ucagguaacgaguuuccag

SEQ ID NO: 421353 - RNA, 19 nt, Artificial Sequence
  Description of Artificial Sequence: Synthetic oligonucleotide
  Sense Strand Starting at position 1307 of SEQ ID NO: 317326
gccagagauacgccgucuu

SEQ ID NO: 421354 - RNA, 19 nt, Artificial Sequence
  Description of Artificial Sequence: Synthetic oligonucleotide
  Antisense Strand to SEQ ID NO: 421353
aagacggcguaucucuggc

SEQ ID NO: 421355 - RNA, 19 nt, Artificial Sequence
  Description of Artificial Sequence: Synthetic oligonucleotide
  Sense Strand Starting at position 1307 of SEQ ID NO: 317392
auggaaacgucgaaagagu

SEQ ID NO: 421356 - RNA, 19 nt, Artificial Sequence
  Description of Artificial Sequence: Synthetic oligonucleotide
  Antisense Strand to SEQ ID NO: 421355
acucuuucgacguuuccau

SEQ ID NO: 421357 - RNA, 19 nt, Artificial Sequence
  Description of Artificial Sequence: Synthetic oligonucleotide
  Sense Strand Starting at position 1307 of SEQ ID NO: 317403
gaaagaguagcgcagacaa

SEQ ID NO: 421358 - RNA, 19 nt, Artificial Sequence
  Description of Artificial Sequence: Synthetic oligonucleotide
  Antisense Strand to SEQ ID NO: 421357
uugucugcgcuacucuuuc

SEQ ID NO: 421359 - RNA, 19 nt, Artificial Sequence
  Description of Artificial Sequence: Synthetic oligonucleotide
  Sense Strand Starting at position 1307 of SEQ ID NO: 317405
aagaguagcgcagacaaau

SEQ ID NO: 421360 - RNA, 19 nt, Artificial Sequence
  Description of Artificial Sequence: Synthetic oligonucleotide
  Antisense Strand to SEQ ID NO: 421359
auuugucugcgcuacucuu

SEQ ID NO: 421361 - RNA, 19 nt, Artificial Sequence
  Description of Artificial Sequence: Synthetic oligonucleotide
  Sense Strand Starting at position 1307 of SEQ ID NO: 317424
aaauaacaguccuugaggu

SEQ ID NO: 421362 - RNA, 19 nt, Artificial Sequence
  Description of Artificial Sequence: Synthetic oligonucleotide
  Antisense Strand to SEQ ID NO: 421361
accucaaggacuguuauuu

SEQ ID NO: 421363 - RNA, 19 nt, Artificial Sequence
  Description of Artificial Sequence: Synthetic oligonucleotide
  Sense Strand Starting at position 1307 of SEQ ID NO: 317447
ggagaaagcuccuccuuua

SEQ ID NO: 421364 - RNA, 19 nt, Artificial Sequence
  Description of Artificial Sequence: Synthetic oligonucleotide
  Antisense Strand to SEQ ID NO: 421363
uaaaggaggagcuuucucc

SEQ ID NO: 421365 - RNA, 19 nt, Artificial Sequence
  Description of Artificial Sequence: Synthetic oligonucleotide
  Sense Strand Starting at position 1307 of SEQ ID NO: 317521
ggaguuugcaaccaguaaa

SEQ ID NO: 421366 - RNA, 19 nt, Artificial Sequence
  Description of Artificial Sequence: Synthetic oligonucleotide
  Antisense Strand to SEQ ID NO: 421365
uuuacugguugcaaacucc

SEQ ID NO: 421367 - RNA, 19 nt, Artificial Sequence
  Description of Artificial Sequence: Synthetic oligonucleotide
  Sense Strand Starting at position 1307 of SEQ ID NO: 317648
guaauauaucaucaguguu

SEQ ID NO: 421368 - RNA, 19 nt, Artificial Sequence
  Description of Artificial Sequence: Synthetic oligonucleotide
  Antisense Strand to SEQ ID NO: 421367
aacacugaugauauauuac

SEQ ID NO: 421369 - RNA, 19 nt, Artificial Sequence
  Description of Artificial Sequence: Synthetic oligonucleotide
  Sense Strand Starting at position 1307 of SEQ ID NO: 317751
guaugcuuauuucucuuau

SEQ ID NO: 421370 - RNA, 19 nt, Artificial Sequence
  Description of Artificial Sequence: Synthetic oligonucleotide
  Antisense Strand to SEQ ID NO: 421369
auaagagaaauaagcauac

SEQ ID NO: 421371 - RNA, 19 nt, Artificial Sequence
  Description of Artificial Sequence: Synthetic oligonucleotide
  Sense Strand Starting at position 1307 of SEQ ID NO: 317765
cuuaucgcuccugaagaaa

SEQ ID NO: 421372 - RNA, 19 nt, Artificial Sequence
  Description of Artificial Sequence: Synthetic oligonucleotide
  Antisense Strand to SEQ ID NO: 421371
uuucuucaggagcgauaag

SEQ ID NO: 421373 - RNA, 19 nt, Artificial Sequence
  Description of Artificial Sequence: Synthetic oligonucleotide
  Sense Strand Starting at position 1307 of SEQ ID NO: 317800
acagacugguuucuagagu

SEQ ID NO: 421374 - RNA, 19 nt, Artificial Sequence
  Description of Artificial Sequence: Synthetic oligonucleotide
  Antisense Strand to SEQ ID NO: 421373
acucuagaaaccagucugu

SEQ ID NO: 421375 - RNA, 19 nt, Artificial Sequence
  Description of Artificial Sequence: Synthetic oligonucleotide
  Sense Strand Starting at position 1307 of SEQ ID NO: 317815
gagucaucacuguacguaa

SEQ ID NO: 421376 - RNA, 19 nt, Artificial Sequence
  Description of Artificial Sequence: Synthetic oligonucleotide
  Antisense Strand to SEQ ID NO: 421375
uuacguacagugaugacuc

SEQ ID NO: 421377 - RNA, 19 nt, Artificial Sequence
  Description of Artificial Sequence: Synthetic oligonucleotide
  Sense Strand Starting at position 1307 of SEQ ID NO: 317934
aaauauucgguugggcaga

SEQ ID NO: 421378 - RNA, 19 nt, Artificial Sequence
  Description of Artificial Sequence: Synthetic oligonucleotide
  Antisense Strand to SEQ ID NO: 421377
ucugcccaaccgaauauuu

SEQ ID NO: 421379 - RNA, 19 nt, Artificial Sequence
  Description of Artificial Sequence: Synthetic oligonucleotide
  Sense Strand Starting at position 1307 of SEQ ID NO: 318015
cccuguccuccagguauuu

SEQ ID NO: 421380 - RNA, 19 nt, Artificial Sequence
  Description of Artificial Sequence: Synthetic oligonucleotide
  Antisense Strand to SEQ ID NO: 421379
aaauaccuggaggacaggg

SEQ ID NO: 421381 - RNA, 19 nt, Artificial Sequence
  Description of Artificial Sequence: Synthetic oligonucleotide
  Sense Strand Starting at position 1307 of SEQ ID NO: 318187
ggauuucaguagcagagag

SEQ ID NO: 421382 - RNA, 19 nt, Artificial Sequence
  Description of Artificial Sequence: Synthetic oligonucleotide
  Antisense Strand to SEQ ID NO: 421381
cucucugcuacugaaaucc

SEQ ID NO: 421383 - RNA, 19 nt, Artificial Sequence
  Description of Artificial Sequence: Synthetic oligonucleotide
  Sense Strand Starting at position 1307 of SEQ ID NO: 318267
acuaguuauuggccugaug

SEQ ID NO: 421384 - RNA, 19 nt, Artificial Sequence
  Description of Artificial Sequence: Synthetic oligonucleotide
  Antisense Strand to SEQ ID NO: 421383
caucaggccaauaacuagu

SEQ ID NO: 421385 - RNA, 19 nt, Artificial Sequence
  Description of Artificial Sequence: Synthetic oligonucleotide
  Sense Strand Starting at position 1307 of SEQ ID NO: 318270
aguuauuggccugauguag

SEQ ID NO: 421386 - RNA, 19 nt, Artificial Sequence
  Description of Artificial Sequence: Synthetic oligonucleotide
  Antisense Strand to SEQ ID NO: 421385
cuacaucaggccaauaacu

SEQ ID NO: 421387 - RNA, 19 nt, Artificial Sequence
  Description of Artificial Sequence: Synthetic oligonucleotide
  Sense Strand Starting at position 1307 of SEQ ID NO: 318649
ucagccauggccuaguaua

SEQ ID NO: 421388 - RNA, 19 nt, Artificial Sequence
  Description of Artificial Sequence: Synthetic oligonucleotide
  Antisense Strand to SEQ ID NO: 421387
uauacuaggccauggcuga

SEQ ID NO: 421389 - RNA, 19 nt, Artificial Sequence
  Description of Artificial Sequence: Synthetic oligonucleotide
  Sense Strand Starting at position 1307 of SEQ ID NO: 318698
gugugcauuauagauagau

SEQ ID NO: 421390 - RNA, 19 nt, Artificial Sequence
  Description of Artificial Sequence: Synthetic oligonucleotide
  Antisense Strand to SEQ ID NO: 421389
aucuaucuauaaugcacac

SEQ ID NO: 421391 - RNA, 19 nt, Artificial Sequence
  Description of Artificial Sequence: Synthetic oligonucleotide
  Sense Strand Starting at position 1307 of SEQ ID NO: 318755
aguaauugcccuuagagug

SEQ ID NO: 421392 - RNA, 19 nt, Artificial Sequence
  Description of Artificial Sequence: Synthetic oligonucleotide
  Antisense Strand to SEQ ID NO: 421391
cacucuaagggcaauuacu

SEQ ID NO: 421393 - RNA, 19 nt, Artificial Sequence
  Description of Artificial Sequence: Synthetic oligonucleotide
  Sense Strand Starting at position 1307 of SEQ ID NO: 318813
uuaagugcugguuacugaa

SEQ ID NO: 421394 - RNA, 19 nt, Artificial Sequence
  Description of Artificial Sequence: Synthetic oligonucleotide
  Antisense Strand to SEQ ID NO: 421393
uucaguaaccagcacuuaa

SEQ ID NO: 421395 - RNA, 19 nt, Artificial Sequence
  Description of Artificial Sequence: Synthetic oligonucleotide
  Sense Strand Starting at position 1307 of SEQ ID NO: 318868
guuugaagacacuggugua

SEQ ID NO: 421396 - RNA, 19 nt, Artificial Sequence
  Description of Artificial Sequence: Synthetic oligonucleotide
  Antisense Strand to SEQ ID NO: 421395
uacaccagugucuucaaac

SEQ ID NO: 421397 - RNA, 19 nt, Artificial Sequence
  Description of Artificial Sequence: Synthetic oligonucleotide
  Sense Strand Starting at position 1307 of SEQ ID NO: 318881
gguguaguguguauuagag

SEQ ID NO: 421398 - RNA, 19 nt, Artificial Sequence
  Description of Artificial Sequence: Synthetic oligonucleotide
  Antisense Strand to SEQ ID NO: 421397
cucuaauacacacuacacc

SEQ ID NO: 421399 - RNA, 19 nt, Artificial Sequence
  Description of Artificial Sequence: Synthetic oligonucleotide
  Sense Strand Starting at position 1307 of SEQ ID NO: 319034
gcuuuagaaggcuggaaac

SEQ ID NO: 421400 - RNA, 19 nt, Artificial Sequence
  Description of Artificial Sequence: Synthetic oligonucleotide
  Antisense Strand to SEQ ID NO: 421399
guuuccagccuucuaaagc

SEQ ID NO: 421401 - RNA, 19 nt, Artificial Sequence
  Description of Artificial Sequence: Synthetic oligonucleotide
  Sense Strand Starting at position 1307 of SEQ ID NO: 319058
uuugguucugaauaucaca

SEQ ID NO: 421402 - RNA, 19 nt, Artificial Sequence
  Description of Artificial Sequence: Synthetic oligonucleotide
  Antisense Strand to SEQ ID NO: 421401
ugugauauucagaaccaaa

SEQ ID NO: 421403 - RNA, 19 nt, Artificial Sequence
  Description of Artificial Sequence: Synthetic oligonucleotide
  Sense Strand Starting at position 1307 of SEQ ID NO: 319098
acuagagacugucuacaga

SEQ ID NO: 421404 - RNA, 19 nt, Artificial Sequence
  Description of Artificial Sequence: Synthetic oligonucleotide
  Antisense Strand to SEQ ID NO: 421403
ucuguagacagucucuagu

SEQ ID NO: 421405 - RNA, 19 nt, Artificial Sequence
  Description of Artificial Sequence: Synthetic oligonucleotide
  Sense Strand Starting at position 1307 of SEQ ID NO: 319147
cugugugacagagaacuuu

SEQ ID NO: 421406 - RNA, 19 nt, Artificial Sequence
  Description of Artificial Sequence: Synthetic oligonucleotide
  Antisense Strand to SEQ ID NO: 421405
aaaguucucugucacacag

SEQ ID NO: 421407 - RNA, 19 nt, Artificial Sequence
  Description of Artificial Sequence: Synthetic oligonucleotide
  Sense Strand Starting at position 1308 of SEQ ID NO: 315421
cucggugaccucuaauuga

SEQ ID NO: 421408 - RNA, 19 nt, Artificial Sequence
  Description of Artificial Sequence: Synthetic oligonucleotide
  Antisense Strand to SEQ ID NO: 421407
ucaauuagaggucaccgag

SEQ ID NO: 421409 - RNA, 19 nt, Artificial Sequence
  Description of Artificial Sequence: Synthetic oligonucleotide
  Sense Strand Starting at position 1308 of SEQ ID NO: 315432
cuaauugaguccuuuggca

SEQ ID NO: 421410 - RNA, 19 nt, Artificial Sequence
  Description of Artificial Sequence: Synthetic oligonucleotide
  Antisense Strand to SEQ ID NO: 421409
ugccaaaggacucaauuag

SEQ ID NO: 421411 - RNA, 19 nt, Artificial Sequence
  Description of Artificial Sequence: Synthetic oligonucleotide
  Sense Strand Starting at position 1308 of SEQ ID NO: 315499
auaauaacucugugauugu

SEQ ID NO: 421412 - RNA, 19 nt, Artificial Sequence
  Description of Artificial Sequence: Synthetic oligonucleotide
  Antisense Strand to SEQ ID NO: 421411
acaaucacagaguuauuau

SEQ ID NO: 421413 - RNA, 19 nt, Artificial Sequence
  Description of Artificial Sequence: Synthetic oligonucleotide
  Sense Strand Starting at position 1308 of SEQ ID NO: 315500
uaauaacucugugauugug

SEQ ID NO: 421414 - RNA, 19 nt, Artificial Sequence
  Description of Artificial Sequence: Synthetic oligonucleotide
  Antisense Strand to SEQ ID NO: 421413
cacaaucacagaguuauua

SEQ ID NO: 421415 - RNA, 19 nt, Artificial Sequence
  Description of Artificial Sequence: Synthetic oligonucleotide
  Sense Strand Starting at position 1308 of SEQ ID NO: 315508
cugugauuguggugaggaa

SEQ ID NO: 421416 - RNA, 19 nt, Artificial Sequence
  Description of Artificial Sequence: Synthetic oligonucleotide
  Antisense Strand to SEQ ID NO: 421415
uuccucaccacaaucacag

SEQ ID NO: 421417 - RNA, 19 nt, Artificial Sequence
  Description of Artificial Sequence: Synthetic oligonucleotide
  Sense Strand Starting at position 1308 of SEQ ID NO: 315639
caggaagaagccugcauua

SEQ ID NO: 421418 - RNA, 19 nt, Artificial Sequence
  Description of Artificial Sequence: Synthetic oligonucleotide
  Antisense Strand to SEQ ID NO: 421417
uaaugcaggcuucuuccug

SEQ ID NO: 421419 - RNA, 19 nt, Artificial Sequence
  Description of Artificial Sequence: Synthetic oligonucleotide
  Sense Strand Starting at position 1308 of SEQ ID NO: 315669
ggauucaaaugaggugaua

SEQ ID NO: 421420 - RNA, 19 nt, Artificial Sequence
  Description of Artificial Sequence: Synthetic oligonucleotide
  Antisense Strand to SEQ ID NO: 421419
uaucaccucauuugaaucc

SEQ ID NO: 421421 - RNA, 19 nt, Artificial Sequence
  Description of Artificial Sequence: Synthetic oligonucleotide
  Sense Strand Starting at position 1308 of SEQ ID NO: 315680
aggugauacuagcgauugu

SEQ ID NO: 421422 - RNA, 19 nt, Artificial Sequence
  Description of Artificial Sequence: Synthetic oligonucleotide
  Antisense Strand to SEQ ID NO: 421421
acaaucgcuaguaucaccu

SEQ ID NO: 421423 - RNA, 19 nt, Artificial Sequence
  Description of Artificial Sequence: Synthetic oligonucleotide
  Sense Strand Starting at position 1308 of SEQ ID NO: 315681
ggugauacuagcgauugua

SEQ ID NO: 421424 - RNA, 19 nt, Artificial Sequence
  Description of Artificial Sequence: Synthetic oligonucleotide
  Antisense Strand to SEQ ID NO: 421423
uacaaucgcuaguaucacc

SEQ ID NO: 421425 - RNA, 19 nt, Artificial Sequence
  Description of Artificial Sequence: Synthetic oligonucleotide
  Sense Strand Starting at position 1308 of SEQ ID NO: 315684
gauacuagcgauuguaaac

SEQ ID NO: 421426 - RNA, 19 nt, Artificial Sequence
  Description of Artificial Sequence: Synthetic oligonucleotide
  Antisense Strand to SEQ ID NO: 421425
guuuacaaucgcuaguauc

SEQ ID NO: 421427 - RNA, 19 nt, Artificial Sequence
  Description of Artificial Sequence: Synthetic oligonucleotide
  Sense Strand Starting at position 1308 of SEQ ID NO: 315691
gcgauuguaaacuguaaau

SEQ ID NO: 421428 - RNA, 19 nt, Artificial Sequence
  Description of Artificial Sequence: Synthetic oligonucleotide
  Antisense Strand to SEQ ID NO: 421427
auuuacaguuuacaaucgc

SEQ ID NO: 421429 - RNA, 19 nt, Artificial Sequence
  Description of Artificial Sequence: Synthetic oligonucleotide
  Sense Strand Starting at position 1308 of SEQ ID NO: 315820
cagucaaaugcuggcucua

SEQ ID NO: 421430 - RNA, 19 nt, Artificial Sequence
  Description of Artificial Sequence: Synthetic oligonucleotide
  Antisense Strand to SEQ ID NO: 421429
uagagccagcauuugacug

SEQ ID NO: 421431 - RNA, 19 nt, Artificial Sequence
  Description of Artificial Sequence: Synthetic oligonucleotide
  Sense Strand Starting at position 1308 of SEQ ID NO: 316108
gugugaggugcugggauuu

SEQ ID NO: 421432 - RNA, 19 nt, Artificial Sequence
  Description of Artificial Sequence: Synthetic oligonucleotide
  Antisense Strand to SEQ ID NO: 421431
aaaucccagcaccucacac

SEQ ID NO: 421433 - RNA, 19 nt, Artificial Sequence
  Description of Artificial Sequence: Synthetic oligonucleotide
  Sense Strand Starting at position 1308 of SEQ ID NO: 316151
acaggcagaucugugacaa

SEQ ID NO: 421434 - RNA, 19 nt, Artificial Sequence
  Description of Artificial Sequence: Synthetic oligonucleotide
  Antisense Strand to SEQ ID NO: 421433
uugucacagaucugccugu

SEQ ID NO: 421435 - RNA, 19 nt, Artificial Sequence
  Description of Artificial Sequence: Synthetic oligonucleotide
  Sense Strand Starting at position 1308 of SEQ ID NO: 316152
caggcagaucugugacaau

SEQ ID NO: 421436 - RNA, 19 nt, Artificial Sequence
  Description of Artificial Sequence: Synthetic oligonucleotide
  Antisense Strand to SEQ ID NO: 421435
auugucacagaucugccug

SEQ ID NO: 421437 - RNA, 19 nt, Artificial Sequence
  Description of Artificial Sequence: Synthetic oligonucleotide
  Sense Strand Starting at position 1308 of SEQ ID NO: 316155
gcagaucugugacaaugac

SEQ ID NO: 421438 - RNA, 19 nt, Artificial Sequence
  Description of Artificial Sequence: Synthetic oligonucleotide
  Antisense Strand to SEQ ID NO: 421437
gucauugucacagaucugc

SEQ ID NO: 421439 - RNA, 19 nt, Artificial Sequence
  Description of Artificial Sequence: Synthetic oligonucleotide
  Sense Strand Starting at position 1308 of SEQ ID NO: 316230
ugcagcuauuugugggaga

SEQ ID NO: 421440 - RNA, 19 nt, Artificial Sequence
  Description of Artificial Sequence: Synthetic oligonucleotide
  Antisense Strand to SEQ ID NO: 421439
ucucccacaaauagcugca

SEQ ID NO: 421441 - RNA, 19 nt, Artificial Sequence
  Description of Artificial Sequence: Synthetic oligonucleotide
  Sense Strand Starting at position 1308 of SEQ ID NO: 316256
aggguuucccuaggaauga

SEQ ID NO: 421442 - RNA, 19 nt, Artificial Sequence
  Description of Artificial Sequence: Synthetic oligonucleotide
  Antisense Strand to SEQ ID NO: 421441
ucauuccuagggaaacccu

SEQ ID NO: 421443 - RNA, 19 nt, Artificial Sequence
  Description of Artificial Sequence: Synthetic oligonucleotide
  Sense Strand Starting at position 1308 of SEQ ID NO: 316257
ggguuucccuaggaaugac

SEQ ID NO: 421444 - RNA, 19 nt, Artificial Sequence
  Description of Artificial Sequence: Synthetic oligonucleotide
  Antisense Strand to SEQ ID NO: 421443
gucauuccuagggaaaccc

SEQ ID NO: 421445 - RNA, 19 nt, Artificial Sequence
  Description of Artificial Sequence: Synthetic oligonucleotide
  Sense Strand Starting at position 1308 of SEQ ID NO: 316267
aggaaugacguuuagugga

SEQ ID NO: 421446 - RNA, 19 nt, Artificial Sequence
  Description of Artificial Sequence: Synthetic oligonucleotide
  Antisense Strand to SEQ ID NO: 421445
uccacuaaacgucauuccu

SEQ ID NO: 421447 - RNA, 19 nt, Artificial Sequence
  Description of Artificial Sequence: Synthetic oligonucleotide
  Sense Strand Starting at position 1308 of SEQ ID NO: 316272
ugacguuuaguggaucuua

SEQ ID NO: 421448 - RNA, 19 nt, Artificial Sequence
  Description of Artificial Sequence: Synthetic oligonucleotide
  Antisense Strand to SEQ ID NO: 421447
uaagauccacuaaacguca

SEQ ID NO: 421449 - RNA, 19 nt, Artificial Sequence
  Description of Artificial Sequence: Synthetic oligonucleotide
  Sense Strand Starting at position 1308 of SEQ ID NO: 316277
uuuaguggaucuuaaagga

SEQ ID NO: 421450 - RNA, 19 nt, Artificial Sequence
  Description of Artificial Sequence: Synthetic oligonucleotide
  Antisense Strand to SEQ ID NO: 421449
uccuuuaagauccacuaaa

SEQ ID NO: 421451 - RNA, 19 nt, Artificial Sequence
  Description of Artificial Sequence: Synthetic oligonucleotide
  Sense Strand Starting at position 1308 of SEQ ID NO: 316343
ugggaaaggaccugucagu

SEQ ID NO: 421452 - RNA, 19 nt, Artificial Sequence
  Description of Artificial Sequence: Synthetic oligonucleotide
  Antisense Strand to SEQ ID NO: 421451
acugacagguccuuuccca

SEQ ID NO: 421453 - RNA, 19 nt, Artificial Sequence
  Description of Artificial Sequence: Synthetic oligonucleotide
  Sense Strand Starting at position 1308 of SEQ ID NO: 316541
ggagaaggcucccuuugca

SEQ ID NO: 421454 - RNA, 19 nt, Artificial Sequence
  Description of Artificial Sequence: Synthetic oligonucleotide
  Antisense Strand to SEQ ID NO: 421453
ugcaaagggagccuucucc

SEQ ID NO: 421455 - RNA, 19 nt, Artificial Sequence
  Description of Artificial Sequence: Synthetic oligonucleotide
  Sense Strand Starting at position 1308 of SEQ ID NO: 317484
uaaugauuaacgcgcgcuu

SEQ ID NO: 421456 - RNA, 19 nt, Artificial Sequence
  Description of Artificial Sequence: Synthetic oligonucleotide
  Antisense Strand to SEQ ID NO: 421455
aagcgcgcguuaaucauua

SEQ ID NO: 421457 - RNA, 19 nt, Artificial Sequence
  Description of Artificial Sequence: Synthetic oligonucleotide
  Sense Strand Starting at position 1308 of SEQ ID NO: 318754
gggauuccucaucacugca

SEQ ID NO: 421458 - RNA, 19 nt, Artificial Sequence
  Description of Artificial Sequence: Synthetic oligonucleotide
  Antisense Strand to SEQ ID NO: 421457
ugcagugaugaggaauccc

SEQ ID NO: 421459 - RNA, 19 nt, Artificial Sequence
  Description of Artificial Sequence: Synthetic oligonucleotide
  Sense Strand Starting at position 1308 of SEQ ID NO: 318914
agccuucuagccugaagag

SEQ ID NO: 421460 - RNA, 19 nt, Artificial Sequence
  Description of Artificial Sequence: Synthetic oligonucleotide
  Antisense Strand to SEQ ID NO: 421459
cucuucaggcuagaaggcu

SEQ ID NO: 421461 - RNA, 19 nt, Artificial Sequence
  Description of Artificial Sequence: Synthetic oligonucleotide
  Sense Strand Starting at position 1308 of SEQ ID NO: 319027
ccuuguuauuggcagacuu

SEQ ID NO: 421462 - RNA, 19 nt, Artificial Sequence
  Description of Artificial Sequence: Synthetic oligonucleotide
  Antisense Strand to SEQ ID NO: 421461
aagucugccaauaacaagg

SEQ ID NO: 421463 - RNA, 19 nt, Artificial Sequence
  Description of Artificial Sequence: Synthetic oligonucleotide
  Sense Strand Starting at position 1308 of SEQ ID NO: 319040
agacuuugcaugugcuuga

SEQ ID NO: 421464 - RNA, 19 nt, Artificial Sequence
  Description of Artificial Sequence: Synthetic oligonucleotide
  Antisense Strand to SEQ ID NO: 421463
ucaagcacaugcaaagucu

SEQ ID NO: 421465 - RNA, 19 nt, Artificial Sequence
  Description of Artificial Sequence: Synthetic oligonucleotide
  Sense Strand Starting at position 1308 of SEQ ID NO: 319044
uuugcaugugcuugacagu

SEQ ID NO: 421466 - RNA, 19 nt, Artificial Sequence
  Description of Artificial Sequence: Synthetic oligonucleotide
  Antisense Strand to SEQ ID NO: 421465
acugucaagcacaugcaaa

SEQ ID NO: 421467 - RNA, 19 nt, Artificial Sequence
  Description of Artificial Sequence: Synthetic oligonucleotide
  Sense Strand Starting at position 1308 of SEQ ID NO: 319047
gcaugugcuugacaguguu

SEQ ID NO: 421468 - RNA, 19 nt, Artificial Sequence
  Description of Artificial Sequence: Synthetic oligonucleotide
  Antisense Strand to SEQ ID NO: 421467
aacacugucaagcacaugc

SEQ ID NO: 421469 - RNA, 19 nt, Artificial Sequence
  Description of Artificial Sequence: Synthetic oligonucleotide
  Sense Strand Starting at position 1308 of SEQ ID NO: 319050
ugugcuugacaguguuaug

SEQ ID NO: 421470 - RNA, 19 nt, Artificial Sequence
  Description of Artificial Sequence: Synthetic oligonucleotide
  Antisense Strand to SEQ ID NO: 421469
cauaacacugucaagcaca

SEQ ID NO: 421471 - RNA, 19 nt, Artificial Sequence
  Description of Artificial Sequence: Synthetic oligonucleotide
  Sense Strand Starting at position 1308 of SEQ ID NO: 319198
uacugagauucugcagaga

SEQ ID NO: 421472 - RNA, 19 nt, Artificial Sequence
  Description of Artificial Sequence: Synthetic oligonucleotide
  Antisense Strand to SEQ ID NO: 421471
ucucugcagaaucucagua

SEQ ID NO: 421473 - RNA, 19 nt, Artificial Sequence
  Description of Artificial Sequence: Synthetic oligonucleotide
  Sense Strand Starting at position 1309 of SEQ ID NO: 315287
ucugauugcuaccuaugaa

SEQ ID NO: 421474 - RNA, 19 nt, Artificial Sequence
  Description of Artificial Sequence: Synthetic oligonucleotide
  Antisense Strand to SEQ ID NO: 421473
uucauagguagcaaucaga

SEQ ID NO: 421475 - RNA, 19 nt, Artificial Sequence
  Description of Artificial Sequence: Synthetic oligonucleotide
  Sense Strand Starting at position 1309 of SEQ ID NO: 315343
uuguacuuugaccagugaa

SEQ ID NO: 421476 - RNA, 19 nt, Artificial Sequence
  Description of Artificial Sequence: Synthetic oligonucleotide
  Antisense Strand to SEQ ID NO: 421475
uucacuggucaaaguacaa

SEQ ID NO: 421477 - RNA, 19 nt, Artificial Sequence
  Description of Artificial Sequence: Synthetic oligonucleotide
  Sense Strand Starting at position 1309 of SEQ ID NO: 315596
gucuuaaugcaauaaacug

SEQ ID NO: 421478 - RNA, 19 nt, Artificial Sequence
  Description of Artificial Sequence: Synthetic oligonucleotide
  Antisense Strand to SEQ ID NO: 421477
caguuuauugcauuaagac

SEQ ID NO: 421479 - RNA, 19 nt, Artificial Sequence
  Description of Artificial Sequence: Synthetic oligonucleotide
  Sense Strand Starting at position 1309 of SEQ ID NO: 315780
caccuaauagggugaguuu

SEQ ID NO: 421480 - RNA, 19 nt, Artificial Sequence
  Description of Artificial Sequence: Synthetic oligonucleotide
  Antisense Strand to SEQ ID NO: 421479
aaacucacccuauuaggug

SEQ ID NO: 421481 - RNA, 19 nt, Artificial Sequence
  Description of Artificial Sequence: Synthetic oligonucleotide
  Sense Strand Starting at position 1309 of SEQ ID NO: 315783
cuaauagggugaguuuaga

SEQ ID NO: 421482 - RNA, 19 nt, Artificial Sequence
  Description of Artificial Sequence: Synthetic oligonucleotide
  Antisense Strand to SEQ ID NO: 421481
ucuaaacucacccuauuag

SEQ ID NO: 421483 - RNA, 19 nt, Artificial Sequence
  Description of Artificial Sequence: Synthetic oligonucleotide
  Sense Strand Starting at position 1309 of SEQ ID NO: 315851
cuguacugaucagugagau

SEQ ID NO: 421484 - RNA, 19 nt, Artificial Sequence
  Description of Artificial Sequence: Synthetic oligonucleotide
  Antisense Strand to SEQ ID NO: 421483
aucucacugaucaguacag

SEQ ID NO: 421485 - RNA, 19 nt, Artificial Sequence
  Description of Artificial Sequence: Synthetic oligonucleotide
  Sense Strand Starting at position 1309 of SEQ ID NO: 315852
uguacugaucagugagauc

SEQ ID NO: 421486 - RNA, 19 nt, Artificial Sequence
  Description of Artificial Sequence: Synthetic oligonucleotide
  Antisense Strand to SEQ ID NO: 421485
gaucucacugaucaguaca

SEQ ID NO: 421487 - RNA, 19 nt, Artificial Sequence
  Description of Artificial Sequence: Synthetic oligonucleotide
  Sense Strand Starting at position 1309 of SEQ ID NO: 315986
cccgcagaacuccauauaa

SEQ ID NO: 421488 - RNA, 19 nt, Artificial Sequence
  Description of Artificial Sequence: Synthetic oligonucleotide
  Antisense Strand to SEQ ID NO: 421487
uuauauggaguucugcggg

SEQ ID NO: 421489 - RNA, 19 nt, Artificial Sequence
  Description of Artificial Sequence: Synthetic oligonucleotide
  Sense Strand Starting at position 1309 of SEQ ID NO: 315988
cgcagaacuccauauaaug

SEQ ID NO: 421490 - RNA, 19 nt, Artificial Sequence
  Description of Artificial Sequence: Synthetic oligonucleotide
  Antisense Strand to SEQ ID NO: 421489
cauuauauggaguucugcg

SEQ ID NO: 421491 - RNA, 19 nt, Artificial Sequence
  Description of Artificial Sequence: Synthetic oligonucleotide
  Sense Strand Starting at position 1309 of SEQ ID NO: 316018
aaagaaagccuagguguua

SEQ ID NO: 421492 - RNA, 19 nt, Artificial Sequence
  Description of Artificial Sequence: Synthetic oligonucleotide
  Antisense Strand to SEQ ID NO: 421491
uaacaccuaggcuuucuuu

SEQ ID NO: 421493 - RNA, 19 nt, Artificial Sequence
  Description of Artificial Sequence: Synthetic oligonucleotide
  Sense Strand Starting at position 1309 of SEQ ID NO: 316019
aagaaagccuagguguuaa

SEQ ID NO: 421494 - RNA, 19 nt, Artificial Sequence
  Description of Artificial Sequence: Synthetic oligonucleotide
  Antisense Strand to SEQ ID NO: 421493
uuaacaccuaggcuuucuu

SEQ ID NO: 421495 - RNA, 19 nt, Artificial Sequence
  Description of Artificial Sequence: Synthetic oligonucleotide
  Sense Strand Starting at position 1309 of SEQ ID NO: 316083
cuaagugcuagguaaaugu

SEQ ID NO: 421496 - RNA, 19 nt, Artificial Sequence
  Description of Artificial Sequence: Synthetic oligonucleotide
  Antisense Strand to SEQ ID NO: 421495
acauuuaccuagcacuuag

SEQ ID NO: 421497 - RNA, 19 nt, Artificial Sequence
  Description of Artificial Sequence: Synthetic oligonucleotide
  Sense Strand Starting at position 1309 of SEQ ID NO: 316090
cuagguaaauguuuaauga

SEQ ID NO: 421498 - RNA, 19 nt, Artificial Sequence
  Description of Artificial Sequence: Synthetic oligonucleotide
  Antisense Strand to SEQ ID NO: 421497
ucauuaaacauuuaccuag

SEQ ID NO: 421499 - RNA, 19 nt, Artificial Sequence
  Description of Artificial Sequence: Synthetic oligonucleotide
  Sense Strand Starting at position 1309 of SEQ ID NO: 316696
gcggaauccucagcagaaa

SEQ ID NO: 421500 - RNA, 19 nt, Artificial Sequence
  Description of Artificial Sequence: Synthetic oligonucleotide
  Antisense Strand to SEQ ID NO: 421499
uuucugcugaggauuccgc

SEQ ID NO: 421501 - RNA, 19 nt, Artificial Sequence
  Description of Artificial Sequence: Synthetic oligonucleotide
  Sense Strand Starting at position 1309 of SEQ ID NO: 316697
cggaauccucagcagaaac

SEQ ID NO: 421502 - RNA, 19 nt, Artificial Sequence
  Description of Artificial Sequence: Synthetic oligonucleotide
  Antisense Strand to SEQ ID NO: 421501
guuucugcugaggauuccg

SEQ ID NO: 421503 - RNA, 19 nt, Artificial Sequence
  Description of Artificial Sequence: Synthetic oligonucleotide
  Sense Strand Starting at position 1309 of SEQ ID NO: 317588
ggaccaucuccugaccuuu

SEQ ID NO: 421504 - RNA, 19 nt, Artificial Sequence
  Description of Artificial Sequence: Synthetic oligonucleotide
  Antisense Strand to SEQ ID NO: 421503
aaaggucaggagauggucc

SEQ ID NO: 421505 - RNA, 19 nt, Artificial Sequence
  Description of Artificial Sequence: Synthetic oligonucleotide
  Sense Strand Starting at position 1309 of SEQ ID NO: 317699
gauagaaguccuugcaaag

SEQ ID NO: 421506 - RNA, 19 nt, Artificial Sequence
  Description of Artificial Sequence: Synthetic oligonucleotide
  Antisense Strand to SEQ ID NO: 421505
cuuugcaaggacuucuauc

SEQ ID NO: 421507 - RNA, 19 nt, Artificial Sequence
  Description of Artificial Sequence: Synthetic oligonucleotide
  Sense Strand Starting at position 1309 of SEQ ID NO: 317742
agcaaagaauccguuuaaa

SEQ ID NO: 421508 - RNA, 19 nt, Artificial Sequence
  Description of Artificial Sequence: Synthetic oligonucleotide
  Antisense Strand to SEQ ID NO: 421507
uuuaaacggauucuuugcu

SEQ ID NO: 421509 - RNA, 19 nt, Artificial Sequence
  Description of Artificial Sequence: Synthetic oligonucleotide
  Sense Strand Starting at position 1309 of SEQ ID NO: 317831
ggcccuuauccuuaagcaa

SEQ ID NO: 421510 - RNA, 19 nt, Artificial Sequence
  Description of Artificial Sequence: Synthetic oligonucleotide
  Antisense Strand to SEQ ID NO: 421509
uugcuuaaggauaagggcc

SEQ ID NO: 421511 - RNA, 19 nt, Artificial Sequence
  Description of Artificial Sequence: Synthetic oligonucleotide
  Sense Strand Starting at position 1309 of SEQ ID NO: 318144
auguuauaggaaggcgaaa

SEQ ID NO: 421512 - RNA, 19 nt, Artificial Sequence
  Description of Artificial Sequence: Synthetic oligonucleotide
  Antisense Strand to SEQ ID NO: 421511
uuucgccuuccuauaacau

SEQ ID NO: 421513 - RNA, 19 nt, Artificial Sequence
  Description of Artificial Sequence: Synthetic oligonucleotide
  Sense Strand Starting at position 1309 of SEQ ID NO: 318212
ucucuuauacuggaacagu

SEQ ID NO: 421514 - RNA, 19 nt, Artificial Sequence
  Description of Artificial Sequence: Synthetic oligonucleotide
  Antisense Strand to SEQ ID NO: 421513
acuguuccaguauaagaga

SEQ ID NO: 421515 - RNA, 19 nt, Artificial Sequence
  Description of Artificial Sequence: Synthetic oligonucleotide
  Sense Strand Starting at position 1309 of SEQ ID NO: 318225
aacaguuagguuugacuua

SEQ ID NO: 421516 - RNA, 19 nt, Artificial Sequence
  Description of Artificial Sequence: Synthetic oligonucleotide
  Antisense Strand to SEQ ID NO: 421515
uaagucaaaccuaacuguu

SEQ ID NO: 421517 - RNA, 19 nt, Artificial Sequence
  Description of Artificial Sequence: Synthetic oligonucleotide
  Sense Strand Starting at position 1309 of SEQ ID NO: 318318
aacuacacugugggauaua

SEQ ID NO: 421518 - RNA, 19 nt, Artificial Sequence
  Description of Artificial Sequence: Synthetic oligonucleotide
  Antisense Strand to SEQ ID NO: 421517
uauaucccacaguguaguu

SEQ ID NO: 421519 - RNA, 19 nt, Artificial Sequence
  Description of Artificial Sequence: Synthetic oligonucleotide
  Sense Strand Starting at position 1309 of SEQ ID NO: 318330
ggauauagcauaugaugua

SEQ ID NO: 421520 - RNA, 19 nt, Artificial Sequence
  Description of Artificial Sequence: Synthetic oligonucleotide
  Antisense Strand to SEQ ID NO: 421519
uacaucauaugcuauaucc

SEQ ID NO: 421521 - RNA, 19 nt, Artificial Sequence
  Description of Artificial Sequence: Synthetic oligonucleotide
  Sense Strand Starting at position 1309 of SEQ ID NO: 318346
guaucugcuagucauuugu

SEQ ID NO: 421522 - RNA, 19 nt, Artificial Sequence
  Description of Artificial Sequence: Synthetic oligonucleotide
  Antisense Strand to SEQ ID NO: 421521
acaaaugacuagcagauac

SEQ ID NO: 421523 - RNA, 19 nt, Artificial Sequence
  Description of Artificial Sequence: Synthetic oligonucleotide
  Sense Strand Starting at position 1309 of SEQ ID NO: 318355
agucauuuguggcucuuga

SEQ ID NO: 421524 - RNA, 19 nt, Artificial Sequence
  Description of Artificial Sequence: Synthetic oligonucleotide
  Antisense Strand to SEQ ID NO: 421523
ucaagagccacaaaugacu

SEQ ID NO: 421525 - RNA, 19 nt, Artificial Sequence
  Description of Artificial Sequence: Synthetic oligonucleotide
  Sense Strand Starting at position 1309 of SEQ ID NO: 318389
cuaguuccaguugagauau

SEQ ID NO: 421526 - RNA, 19 nt, Artificial Sequence
  Description of Artificial Sequence: Synthetic oligonucleotide
  Antisense Strand to SEQ ID NO: 421525
auaucucaacuggaacuag

SEQ ID NO: 421527 - RNA, 19 nt, Artificial Sequence
  Description of Artificial Sequence: Synthetic oligonucleotide
  Sense Strand Starting at position 1309 of SEQ ID NO: 318397
aguugagauauguaauugu

SEQ ID NO: 421528 - RNA, 19 nt, Artificial Sequence
  Description of Artificial Sequence: Synthetic oligonucleotide
  Antisense Strand to SEQ ID NO: 421527
acaauuacauaucucaacu

SEQ ID NO: 421529 - RNA, 19 nt, Artificial Sequence
  Description of Artificial Sequence: Synthetic oligonucleotide
  Sense Strand Starting at position 1309 of SEQ ID NO: 318596
uguugcauagugcuaguau

SEQ ID NO: 421530 - RNA, 19 nt, Artificial Sequence
  Description of Artificial Sequence: Synthetic oligonucleotide
  Antisense Strand to SEQ ID NO: 421529
auacuagcacuaugcaaca

SEQ ID NO: 421531 - RNA, 19 nt, Artificial Sequence
  Description of Artificial Sequence: Synthetic oligonucleotide
  Sense Strand Starting at position 1309 of SEQ ID NO: 318670
augugaauuagaugaguaa

SEQ ID NO: 421532 - RNA, 19 nt, Artificial Sequence
  Description of Artificial Sequence: Synthetic oligonucleotide
  Antisense Strand to SEQ ID NO: 421531
uuacucaucuaauucacau

SEQ ID NO: 421533 - RNA, 19 nt, Artificial Sequence
  Description of Artificial Sequence: Synthetic oligonucleotide
  Sense Strand Starting at position 1309 of SEQ ID NO: 318865
gagugcacauagucauaga

SEQ ID NO: 421534 - RNA, 19 nt, Artificial Sequence
  Description of Artificial Sequence: Synthetic oligonucleotide
  Antisense Strand to SEQ ID NO: 421533
ucuaugacuaugugcacuc

SEQ ID NO: 421535 - RNA, 19 nt, Artificial Sequence
  Description of Artificial Sequence: Synthetic oligonucleotide
  Sense Strand Starting at position 1309 of SEQ ID NO: 318956
gaaguaucuugagucaaga

SEQ ID NO: 421536 - RNA, 19 nt, Artificial Sequence
  Description of Artificial Sequence: Synthetic oligonucleotide
  Antisense Strand to SEQ ID NO: 421535
ucuugacucaagauacuuc

SEQ ID NO: 421537 - RNA, 19 nt, Artificial Sequence
  Description of Artificial Sequence: Synthetic oligonucleotide
  Sense Strand Starting at position 1309 of SEQ ID NO: 318958
aguaucuugagucaagagu

SEQ ID NO: 421538 - RNA, 19 nt, Artificial Sequence
  Description of Artificial Sequence: Synthetic oligonucleotide
  Antisense Strand to SEQ ID NO: 421537
acucuugacucaagauacu

SEQ ID NO: 421539 - RNA, 19 nt, Artificial Sequence
  Description of Artificial Sequence: Synthetic oligonucleotide
  Sense Strand Starting at position 1309 of SEQ ID NO: 318972
agaguuaacuaggcaagga

SEQ ID NO: 421540 - RNA, 19 nt, Artificial Sequence
  Description of Artificial Sequence: Synthetic oligonucleotide
  Antisense Strand to SEQ ID NO: 421539
uccuugccuaguuaacucu

SEQ ID NO: 421541 - RNA, 19 nt, Artificial Sequence
  Description of Artificial Sequence: Synthetic oligonucleotide
  Sense Strand Starting at position 1309 of SEQ ID NO: 318991
gagggaacagucugagcaa

SEQ ID NO: 421542 - RNA, 19 nt, Artificial Sequence
  Description of Artificial Sequence: Synthetic oligonucleotide
  Antisense Strand to SEQ ID NO: 421541
uugcucagacuguucccuc

SEQ ID NO: 421543 - RNA, 19 nt, Artificial Sequence
  Description of Artificial Sequence: Synthetic oligonucleotide
  Sense Strand Starting at position 1309 of SEQ ID NO: 319011
ggucuuguagcaggagaga

SEQ ID NO: 421544 - RNA, 19 nt, Artificial Sequence
  Description of Artificial Sequence: Synthetic oligonucleotide
  Antisense Strand to SEQ ID NO: 421543
ucucuccugcuacaagacc

SEQ ID NO: 421545 - RNA, 19 nt, Artificial Sequence
  Description of Artificial Sequence: Synthetic oligonucleotide
  Sense Strand Starting at position 1309 of SEQ ID NO: 319084
ggaguaugcagaggccaua

SEQ ID NO: 421546 - RNA, 19 nt, Artificial Sequence
  Description of Artificial Sequence: Synthetic oligonucleotide
  Antisense Strand to SEQ ID NO: 421545
uauggccucugcauacucc

SEQ ID NO: 421547 - RNA, 19 nt, Artificial Sequence
  Description of Artificial Sequence: Synthetic oligonucleotide
  Sense Strand Starting at position 1309 of SEQ ID NO: 319149
agggaaauaauaugucugu

SEQ ID NO: 421548 - RNA, 19 nt, Artificial Sequence
  Description of Artificial Sequence: Synthetic oligonucleotide
  Antisense Strand to SEQ ID NO: 421547
acagacauauuauuucccu

SEQ ID NO: 421549 - RNA, 19 nt, Artificial Sequence
  Description of Artificial Sequence: Synthetic oligonucleotide
  Sense Strand Starting at position 1309 of SEQ ID NO: 319150
gggaaauaauaugucugua

SEQ ID NO: 421550 - RNA, 19 nt, Artificial Sequence
  Description of Artificial Sequence: Synthetic oligonucleotide
  Antisense Strand to SEQ ID NO: 421549
uacagacauauuauuuccc

SEQ ID NO: 421551 - RNA, 19 nt, Artificial Sequence
  Description of Artificial Sequence: Synthetic oligonucleotide
  Sense Strand Starting at position 1309 of SEQ ID NO: 319179
ugcuuaagugucuauugag

SEQ ID NO: 421552 - RNA, 19 nt, Artificial Sequence
  Description of Artificial Sequence: Synthetic oligonucleotide
  Antisense Strand to SEQ ID NO: 421551
cucaauagacacuuaagca

SEQ ID NO: 421553 - RNA, 19 nt, Artificial Sequence
  Description of Artificial Sequence: Synthetic oligonucleotide
  Sense Strand Starting at position 1310 of SEQ ID NO: 315267
acaugugccaugggauuau

SEQ ID NO: 421554 - RNA, 19 nt, Artificial Sequence
  Description of Artificial Sequence: Synthetic oligonucleotide
  Antisense Strand to SEQ ID NO: 421553
auaaucccauggcacaugu

SEQ ID NO: 421555 - RNA, 19 nt, Artificial Sequence
  Description of Artificial Sequence: Synthetic oligonucleotide
  Sense Strand Starting at position 1310 of SEQ ID NO: 315271
gugccaugggauuauucca

SEQ ID NO: 421556 - RNA, 19 nt, Artificial Sequence
  Description of Artificial Sequence: Synthetic oligonucleotide
  Antisense Strand to SEQ ID NO: 421555
uggaauaaucccauggcac

SEQ ID NO: 421557 - RNA, 19 nt, Artificial Sequence
  Description of Artificial Sequence: Synthetic oligonucleotide
  Sense Strand Starting at position 1310 of SEQ ID NO: 315391
ucauacaagcuccgaauua

SEQ ID NO: 421558 - RNA, 19 nt, Artificial Sequence
  Description of Artificial Sequence: Synthetic oligonucleotide
  Antisense Strand to SEQ ID NO: 421557
uaauucggagcuuguauga

SEQ ID NO: 421559 - RNA, 19 nt, Artificial Sequence
  Description of Artificial Sequence: Synthetic oligonucleotide
  Sense Strand Starting at position 1310 of SEQ ID NO: 315420
uccucuuugguccauuagu

SEQ ID NO: 421560 - RNA, 19 nt, Artificial Sequence
  Description of Artificial Sequence: Synthetic oligonucleotide
  Antisense Strand to SEQ ID NO: 421559
acuaauggaccaaagagga

SEQ ID NO: 421561 - RNA, 19 nt, Artificial Sequence
  Description of Artificial Sequence: Synthetic oligonucleotide
  Sense Strand Starting at position 1310 of SEQ ID NO: 315644
ccuaauaggcccuagcauu

SEQ ID NO: 421562 - RNA, 19 nt, Artificial Sequence
  Description of Artificial Sequence: Synthetic oligonucleotide
  Antisense Strand to SEQ ID NO: 421561
aaugcuagggccuauuagg

SEQ ID NO: 421563 - RNA, 19 nt, Artificial Sequence
  Description of Artificial Sequence: Synthetic oligonucleotide
  Sense Strand Starting at position 1310 of SEQ ID NO: 315779
guuugcuaugucuaucaaa

SEQ ID NO: 421564 - RNA, 19 nt, Artificial Sequence
  Description of Artificial Sequence: Synthetic oligonucleotide
  Antisense Strand to SEQ ID NO: 421563
uuugauagacauagcaaac

SEQ ID NO: 421565 - RNA, 19 nt, Artificial Sequence
  Description of Artificial Sequence: Synthetic oligonucleotide
  Sense Strand Starting at position 1310 of SEQ ID NO: 315853
gacaaaugagguugguuga

SEQ ID NO: 421566 - RNA, 19 nt, Artificial Sequence
  Description of Artificial Sequence: Synthetic oligonucleotide
  Antisense Strand to SEQ ID NO: 421565
ucaaccaaccucauuuguc

SEQ ID NO: 421567 - RNA, 19 nt, Artificial Sequence
  Description of Artificial Sequence: Synthetic oligonucleotide
  Sense Strand Starting at position 1310 of SEQ ID NO: 315854
acaaaugagguugguugaa

SEQ ID NO: 421568 - RNA, 19 nt, Artificial Sequence
  Description of Artificial Sequence: Synthetic oligonucleotide
  Antisense Strand to SEQ ID NO: 421567
uucaaccaaccucauuugu

SEQ ID NO: 421569 - RNA, 19 nt, Artificial Sequence
  Description of Artificial Sequence: Synthetic oligonucleotide
  Sense Strand Starting at position 1310 of SEQ ID NO: 315856
aaaugagguugguugaaua

SEQ ID NO: 421570 - RNA, 19 nt, Artificial Sequence
  Description of Artificial Sequence: Synthetic oligonucleotide
  Antisense Strand to SEQ ID NO: 421569
uauucaaccaaccucauuu

SEQ ID NO: 421571 - RNA, 19 nt, Artificial Sequence
  Description of Artificial Sequence: Synthetic oligonucleotide
  Sense Strand Starting at position 1310 of SEQ ID NO: 316177
ccuagaucauacuuuagua

SEQ ID NO: 421572 - RNA, 19 nt, Artificial Sequence
  Description of Artificial Sequence: Synthetic oligonucleotide
  Antisense Strand to SEQ ID NO: 421571
uacuaaaguaugaucuagg

SEQ ID NO: 421573 - RNA, 19 nt, Artificial Sequence
  Description of Artificial Sequence: Synthetic oligonucleotide
  Sense Strand Starting at position 1310 of SEQ ID NO: 316209
agaaauguuggaggcucau

SEQ ID NO: 421574 - RNA, 19 nt, Artificial Sequence
  Description of Artificial Sequence: Synthetic oligonucleotide
  Antisense Strand to SEQ ID NO: 421573
augagccuccaacauuucu

SEQ ID NO: 421575 - RNA, 19 nt, Artificial Sequence
  Description of Artificial Sequence: Synthetic oligonucleotide
  Sense Strand Starting at position 1310 of SEQ ID NO: 316232
accuaaauucuacgucaug

SEQ ID NO: 421576 - RNA, 19 nt, Artificial Sequence
  Description of Artificial Sequence: Synthetic oligonucleotide
  Antisense Strand to SEQ ID NO: 421575
caugacguagaauuuaggu

SEQ ID NO: 421577 - RNA, 19 nt, Artificial Sequence
  Description of Artificial Sequence: Synthetic oligonucleotide
  Sense Strand Starting at position 1310 of SEQ ID NO: 316235
uaaauucuacgucauggaa

SEQ ID NO: 421578 - RNA, 19 nt, Artificial Sequence
  Description of Artificial Sequence: Synthetic oligonucleotide
  Antisense Strand to SEQ ID NO: 421577
uuccaugacguagaauuua

SEQ ID NO: 421579 - RNA, 19 nt, Artificial Sequence
  Description of Artificial Sequence: Synthetic oligonucleotide
  Sense Strand Starting at position 1310 of SEQ ID NO: 316370
acaguuaaauuccuauggu

SEQ ID NO: 421580 - RNA, 19 nt, Artificial Sequence
  Description of Artificial Sequence: Synthetic oligonucleotide
  Antisense Strand to SEQ ID NO: 421579
accauaggaauuuaacugu

SEQ ID NO: 421581 - RNA, 19 nt, Artificial Sequence
  Description of Artificial Sequence: Synthetic oligonucleotide
  Sense Strand Starting at position 1310 of SEQ ID NO: 316373
guuaaauuccuaugguuua

SEQ ID NO: 421582 - RNA, 19 nt, Artificial Sequence
  Description of Artificial Sequence: Synthetic oligonucleotide
  Antisense Strand to SEQ ID NO: 421581
uaaaccauaggaauuuaac

SEQ ID NO: 421583 - RNA, 19 nt, Artificial Sequence
  Description of Artificial Sequence: Synthetic oligonucleotide
  Sense Strand Starting at position 1310 of SEQ ID NO: 316468
ggagacucgucccucauaa

SEQ ID NO: 421584 - RNA, 19 nt, Artificial Sequence
  Description of Artificial Sequence: Synthetic oligonucleotide
  Antisense Strand to SEQ ID NO: 421583
uuaugagggacgagucucc

SEQ ID NO: 421585 - RNA, 19 nt, Artificial Sequence
  Description of Artificial Sequence: Synthetic oligonucleotide
  Sense Strand Starting at position 1310 of SEQ ID NO: 316485
aagggaucuugggacaaca

SEQ ID NO: 421586 - RNA, 19 nt, Artificial Sequence
  Description of Artificial Sequence: Synthetic oligonucleotide
  Antisense Strand to SEQ ID NO: 421585
uguugucccaagaucccuu

SEQ ID NO: 421587 - RNA, 19 nt, Artificial Sequence
  Description of Artificial Sequence: Synthetic oligonucleotide
  Sense Strand Starting at position 1310 of SEQ ID NO: 316579
ggguaugcauauuugcauu

SEQ ID NO: 421588 - RNA, 19 nt, Artificial Sequence
  Description of Artificial Sequence: Synthetic oligonucleotide
  Antisense Strand to SEQ ID NO: 421587
aaugcaaauaugcauaccc

SEQ ID NO: 421589 - RNA, 19 nt, Artificial Sequence
  Description of Artificial Sequence: Synthetic oligonucleotide
  Sense Strand Starting at position 1310 of SEQ ID NO: 316592
ugcauuugcugaguucuau

SEQ ID NO: 421590 - RNA, 19 nt, Artificial Sequence
  Description of Artificial Sequence: Synthetic oligonucleotide
  Antisense Strand to SEQ ID NO: 421589
auagaacucagcaaaugca

SEQ ID NO: 421591 - RNA, 19 nt, Artificial Sequence
  Description of Artificial Sequence: Synthetic oligonucleotide
  Sense Strand Starting at position 1310 of SEQ ID NO: 316630
acaauuauuccuggagguc

SEQ ID NO: 421592 - RNA, 19 nt, Artificial Sequence
  Description of Artificial Sequence: Synthetic oligonucleotide
  Antisense Strand to SEQ ID NO: 421591
gaccuccaggaauaauugu

SEQ ID NO: 421593 - RNA, 19 nt, Artificial Sequence
  Description of Artificial Sequence: Synthetic oligonucleotide
  Sense Strand Starting at position 1310 of SEQ ID NO: 316703
auauguugaucucuaagaa

SEQ ID NO: 421594 - RNA, 19 nt, Artificial Sequence
  Description of Artificial Sequence: Synthetic oligonucleotide
  Antisense Strand to SEQ ID NO: 421593
uucuuagagaucaacauau

SEQ ID NO: 421595 - RNA, 19 nt, Artificial Sequence
  Description of Artificial Sequence: Synthetic oligonucleotide
  Sense Strand Starting at position 1310 of SEQ ID NO: 316967
cuaucuggucaauaagcuu

SEQ ID NO: 421596 - RNA, 19 nt, Artificial Sequence
  Description of Artificial Sequence: Synthetic oligonucleotide
  Antisense Strand to SEQ ID NO: 421595
aagcuuauugaccagauag

SEQ ID NO: 421597 - RNA, 19 nt, Artificial Sequence
  Description of Artificial Sequence: Synthetic oligonucleotide
  Sense Strand Starting at position 1310 of SEQ ID NO: 317115
cugugacccuauguuuaac

SEQ ID NO: 421598 - RNA, 19 nt, Artificial Sequence
  Description of Artificial Sequence: Synthetic oligonucleotide
  Antisense Strand to SEQ ID NO: 421597
guuaaacauagggucacag

SEQ ID NO: 421599 - RNA, 19 nt, Artificial Sequence
  Description of Artificial Sequence: Synthetic oligonucleotide
  Sense Strand Starting at position 1310 of SEQ ID NO: 317121
cccuauguuuaacucaagu

SEQ ID NO: 421600 - RNA, 19 nt, Artificial Sequence
  Description of Artificial Sequence: Synthetic oligonucleotide
  Antisense Strand to SEQ ID NO: 421599
acuugaguuaaacauaggg

SEQ ID NO: 421601 - RNA, 19 nt, Artificial Sequence
  Description of Artificial Sequence: Synthetic oligonucleotide
  Sense Strand Starting at position 1310 of SEQ ID NO: 317191
cuauuucuauaaggaugga

SEQ ID NO: 421602 - RNA, 19 nt, Artificial Sequence
  Description of Artificial Sequence: Synthetic oligonucleotide
  Antisense Strand to SEQ ID NO: 421601
uccauccuuauagaaauag

SEQ ID NO: 421603 - RNA, 19 nt, Artificial Sequence
  Description of Artificial Sequence: Synthetic oligonucleotide
  Sense Strand Starting at position 1310 of SEQ ID NO: 317439
uuuaaccuggcuugauuaa

SEQ ID NO: 421604 - RNA, 19 nt, Artificial Sequence
  Description of Artificial Sequence: Synthetic oligonucleotide
  Antisense Strand to SEQ ID NO: 421603
uuaaucaagccagguuaaa

SEQ ID NO: 421605 - RNA, 19 nt, Artificial Sequence
  Description of Artificial Sequence: Synthetic oligonucleotide
  Sense Strand Starting at position 1310 of SEQ ID NO: 317440
uuaaccuggcuugauuaaa

SEQ ID NO: 421606 - RNA, 19 nt, Artificial Sequence
  Description of Artificial Sequence: Synthetic oligonucleotide
  Antisense Strand to SEQ ID NO: 421605
uuuaaucaagccagguuaa

SEQ ID NO: 421607 - RNA, 19 nt, Artificial Sequence
  Description of Artificial Sequence: Synthetic oligonucleotide
  Sense Strand Starting at position 1310 of SEQ ID NO: 317600
uccacuuucuugucuggaa

SEQ ID NO: 421608 - RNA, 19 nt, Artificial Sequence
  Description of Artificial Sequence: Synthetic oligonucleotide
  Antisense Strand to SEQ ID NO: 421607
uuccagacaagaaagugga

SEQ ID NO: 421609 - RNA, 19 nt, Artificial Sequence
  Description of Artificial Sequence: Synthetic oligonucleotide
  Sense Strand Starting at position 1310 of SEQ ID NO: 317604
cuuucuugucuggaagagu

SEQ ID NO: 421610 - RNA, 19 nt, Artificial Sequence
  Description of Artificial Sequence: Synthetic oligonucleotide
  Antisense Strand to SEQ ID NO: 421609
acucuuccagacaagaaag

SEQ ID NO: 421611 - RNA, 19 nt, Artificial Sequence
  Description of Artificial Sequence: Synthetic oligonucleotide
  Sense Strand Starting at position 1310 of SEQ ID NO: 317636
ugcagaguuucccuaccaa

SEQ ID NO: 421612 - RNA, 19 nt, Artificial Sequence
  Description of Artificial Sequence: Synthetic oligonucleotide
  Antisense Strand to SEQ ID NO: 421611
uugguagggaaacucugca

SEQ ID NO: 421613 - RNA, 19 nt, Artificial Sequence
  Description of Artificial Sequence: Synthetic oligonucleotide
  Sense Strand Starting at position 1310 of SEQ ID NO: 317655
ugaaguacuugacucugaa

SEQ ID NO: 421614 - RNA, 19 nt, Artificial Sequence
  Description of Artificial Sequence: Synthetic oligonucleotide
  Antisense Strand to SEQ ID NO: 421613
uucagagucaaguacuuca

SEQ ID NO: 421615 - RNA, 19 nt, Artificial Sequence
  Description of Artificial Sequence: Synthetic oligonucleotide
  Sense Strand Starting at position 1310 of SEQ ID NO: 318017
aggaaucuguuucuuauau

SEQ ID NO: 421616 - RNA, 19 nt, Artificial Sequence
  Description of Artificial Sequence: Synthetic oligonucleotide
  Antisense Strand to SEQ ID NO: 421615
auauaagaaacagauuccu

SEQ ID NO: 421617 - RNA, 19 nt, Artificial Sequence
  Description of Artificial Sequence: Synthetic oligonucleotide
  Sense Strand Starting at position 1310 of SEQ ID NO: 318297
cuacaaggcagaugugauc

SEQ ID NO: 421618 - RNA, 19 nt, Artificial Sequence
  Description of Artificial Sequence: Synthetic oligonucleotide
  Antisense Strand to SEQ ID NO: 421617
gaucacaucugccuuguag

SEQ ID NO: 421619 - RNA, 19 nt, Artificial Sequence
  Description of Artificial Sequence: Synthetic oligonucleotide
  Sense Strand Starting at position 1310 of SEQ ID NO: 318303
ggcagaugugaucauuauc

SEQ ID NO: 421620 - RNA, 19 nt, Artificial Sequence
  Description of Artificial Sequence: Synthetic oligonucleotide
  Antisense Strand to SEQ ID NO: 421619
gauaaugaucacaucugcc

SEQ ID NO: 421621 - RNA, 19 nt, Artificial Sequence
  Description of Artificial Sequence: Synthetic oligonucleotide
  Sense Strand Starting at position 1310 of SEQ ID NO: 318451
gagacauuguaucuaguaa

SEQ ID NO: 421622 - RNA, 19 nt, Artificial Sequence
  Description of Artificial Sequence: Synthetic oligonucleotide
  Antisense Strand to SEQ ID NO: 421621
uuacuagauacaaugucuc

SEQ ID NO: 421623 - RNA, 19 nt, Artificial Sequence
  Description of Artificial Sequence: Synthetic oligonucleotide
  Sense Strand Starting at position 1310 of SEQ ID NO: 318719
ucagauacugcauguauua

SEQ ID NO: 421624 - RNA, 19 nt, Artificial Sequence
  Description of Artificial Sequence: Synthetic oligonucleotide
  Antisense Strand to SEQ ID NO: 421623
uaauacaugcaguaucuga

SEQ ID NO: 421625 - RNA, 19 nt, Artificial Sequence
  Description of Artificial Sequence: Synthetic oligonucleotide
  Sense Strand Starting at position 1310 of SEQ ID NO: 318863
gggcaaagucaugacuuac

SEQ ID NO: 421626 - RNA, 19 nt, Artificial Sequence
  Description of Artificial Sequence: Synthetic oligonucleotide
  Antisense Strand to SEQ ID NO: 421625
guaagucaugacuuugccc

SEQ ID NO: 421627 - RNA, 19 nt, Artificial Sequence
  Description of Artificial Sequence: Synthetic oligonucleotide
  Sense Strand Starting at position 1310 of SEQ ID NO: 319020
uugucaugugaggauuauu

SEQ ID NO: 421628 - RNA, 19 nt, Artificial Sequence
  Description of Artificial Sequence: Synthetic oligonucleotide
  Antisense Strand to SEQ ID NO: 421627
aauaauccucacaugacaa

SEQ ID NO: 421629 - RNA, 19 nt, Artificial Sequence
  Description of Artificial Sequence: Synthetic oligonucleotide
  Sense Strand Starting at position 1310 of SEQ ID NO: 319076
acuguaucacugcacuuua

SEQ ID NO: 421630 - RNA, 19 nt, Artificial Sequence
  Description of Artificial Sequence: Synthetic oligonucleotide
  Antisense Strand to SEQ ID NO: 421629
uaaagugcagugauacagu

SEQ ID NO: 421631 - RNA, 19 nt, Artificial Sequence
  Description of Artificial Sequence: Synthetic oligonucleotide
  Sense Strand Starting at position 1310 of SEQ ID NO: 319194
ugguguucacuagaggcau

SEQ ID NO: 421632 - RNA, 19 nt, Artificial Sequence
  Description of Artificial Sequence: Synthetic oligonucleotide
  Antisense Strand to SEQ ID NO: 421631
augccucuagugaacacca

SEQ ID NO: 421633 - RNA, 19 nt, Artificial Sequence
  Description of Artificial Sequence: Synthetic oligonucleotide
  Sense Strand Starting at position 1311 of SEQ ID NO: 315507
gggugaugagcaggugaaa

SEQ ID NO: 421634 - RNA, 19 nt, Artificial Sequence
  Description of Artificial Sequence: Synthetic oligonucleotide
  Antisense Strand to SEQ ID NO: 421633
uuucaccugcucaucaccc

SEQ ID NO: 421635 - RNA, 19 nt, Artificial Sequence
  Description of Artificial Sequence: Synthetic oligonucleotide
  Sense Strand Starting at position 1311 of SEQ ID NO: 315552
ugagaaggguaaucuuacu

SEQ ID NO: 421636 - RNA, 19 nt, Artificial Sequence
  Description of Artificial Sequence: Synthetic oligonucleotide
  Antisense Strand to SEQ ID NO: 421635
aguaagauuacccuucuca

SEQ ID NO: 421637 - RNA, 19 nt, Artificial Sequence
  Description of Artificial Sequence: Synthetic oligonucleotide
  Sense Strand Starting at position 1311 of SEQ ID NO: 315557
aggguaaucuuacuuugaa

SEQ ID NO: 421638 - RNA, 19 nt, Artificial Sequence
  Description of Artificial Sequence: Synthetic oligonucleotide
  Antisense Strand to SEQ ID NO: 421637
uucaaaguaagauuacccu

SEQ ID NO: 421639 - RNA, 19 nt, Artificial Sequence
  Description of Artificial Sequence: Synthetic oligonucleotide
  Sense Strand Starting at position 1311 of SEQ ID NO: 315558
ggguaaucuuacuuugaaa

SEQ ID NO: 421640 - RNA, 19 nt, Artificial Sequence
  Description of Artificial Sequence: Synthetic oligonucleotide
  Antisense Strand to SEQ ID NO: 421639
uuucaaaguaagauuaccc

SEQ ID NO: 421641 - RNA, 19 nt, Artificial Sequence
  Description of Artificial Sequence: Synthetic oligonucleotide
  Sense Strand Starting at position 1311 of SEQ ID NO: 315631
ggacuagauuaguaagaau

SEQ ID NO: 421642 - RNA, 19 nt, Artificial Sequence
  Description of Artificial Sequence: Synthetic oligonucleotide
  Antisense Strand to SEQ ID NO: 421641
auucuuacuaaucuagucc

SEQ ID NO: 421643 - RNA, 19 nt, Artificial Sequence
  Description of Artificial Sequence: Synthetic oligonucleotide
  Sense Strand Starting at position 1311 of SEQ ID NO: 315685
ugcacugagacacgauaaa

SEQ ID NO: 421644 - RNA, 19 nt, Artificial Sequence
  Description of Artificial Sequence: Synthetic oligonucleotide
  Antisense Strand to SEQ ID NO: 421643
uuuaucgugucucagugca

SEQ ID NO: 421645 - RNA, 19 nt, Artificial Sequence
  Description of Artificial Sequence: Synthetic oligonucleotide
  Sense Strand Starting at position 1311 of SEQ ID NO: 315817
ccuuucucagauggaucaa

SEQ ID NO: 421646 - RNA, 19 nt, Artificial Sequence
  Description of Artificial Sequence: Synthetic oligonucleotide
  Antisense Strand to SEQ ID NO: 421645
uugauccaucugagaaagg

SEQ ID NO: 421647 - RNA, 19 nt, Artificial Sequence
  Description of Artificial Sequence: Synthetic oligonucleotide
  Sense Strand Starting at position 1311 of SEQ ID NO: 315827
auggaucaacucugcuuau

SEQ ID NO: 421648 - RNA, 19 nt, Artificial Sequence
  Description of Artificial Sequence: Synthetic oligonucleotide
  Antisense Strand to SEQ ID NO: 421647
auaagcagaguugauccau

SEQ ID NO: 421649 - RNA, 19 nt, Artificial Sequence
  Description of Artificial Sequence: Synthetic oligonucleotide
  Sense Strand Starting at position 1311 of SEQ ID NO: 315836
cucugcuuauccuugaaga

SEQ ID NO: 421650 - RNA, 19 nt, Artificial Sequence
  Description of Artificial Sequence: Synthetic oligonucleotide
  Antisense Strand to SEQ ID NO: 421649
ucuucaaggauaagcagag

SEQ ID NO: 421651 - RNA, 19 nt, Artificial Sequence
  Description of Artificial Sequence: Synthetic oligonucleotide
  Sense Strand Starting at position 1311 of SEQ ID NO: 315837
ucugcuuauccuugaagac

SEQ ID NO: 421652 - RNA, 19 nt, Artificial Sequence
  Description of Artificial Sequence: Synthetic oligonucleotide
  Antisense Strand to SEQ ID NO: 421651
gucuucaaggauaagcaga

SEQ ID NO: 421653 - RNA, 19 nt, Artificial Sequence
  Description of Artificial Sequence: Synthetic oligonucleotide
  Sense Strand Starting at position 1311 of SEQ ID NO: 315939
uuggacuugauguggagaa

SEQ ID NO: 421654 - RNA, 19 nt, Artificial Sequence
  Description of Artificial Sequence: Synthetic oligonucleotide
  Antisense Strand to SEQ ID NO: 421653
uucuccacaucaaguccaa

SEQ ID NO: 421655 - RNA, 19 nt, Artificial Sequence
  Description of Artificial Sequence: Synthetic oligonucleotide
  Sense Strand Starting at position 1311 of SEQ ID NO: 316024
gguuacuggacuuggugaa

SEQ ID NO: 421656 - RNA, 19 nt, Artificial Sequence
  Description of Artificial Sequence: Synthetic oligonucleotide
  Antisense Strand to SEQ ID NO: 421655
uucaccaaguccaguaacc

SEQ ID NO: 421657 - RNA, 19 nt, Artificial Sequence
  Description of Artificial Sequence: Synthetic oligonucleotide
  Sense Strand Starting at position 1311 of SEQ ID NO: 316025
guuacuggacuuggugaaa

SEQ ID NO: 421658 - RNA, 19 nt, Artificial Sequence
  Description of Artificial Sequence: Synthetic oligonucleotide
  Antisense Strand to SEQ ID NO: 421657
uuucaccaaguccaguaac

SEQ ID NO: 421659 - RNA, 19 nt, Artificial Sequence
  Description of Artificial Sequence: Synthetic oligonucleotide
  Sense Strand Starting at position 1311 of SEQ ID NO: 316196
guuccaagacauuggaguu

SEQ ID NO: 421660 - RNA, 19 nt, Artificial Sequence
  Description of Artificial Sequence: Synthetic oligonucleotide
  Antisense Strand to SEQ ID NO: 421659
aacuccaaugucuuggaac

SEQ ID NO: 421661 - RNA, 19 nt, Artificial Sequence
  Description of Artificial Sequence: Synthetic oligonucleotide
  Sense Strand Starting at position 1311 of SEQ ID NO: 316225
gucugugaacccuauuauu

SEQ ID NO: 421662 - RNA, 19 nt, Artificial Sequence
  Description of Artificial Sequence: Synthetic oligonucleotide
  Antisense Strand to SEQ ID NO: 421661
aauaauaggguucacagac

SEQ ID NO: 421663 - RNA, 19 nt, Artificial Sequence
  Description of Artificial Sequence: Synthetic oligonucleotide
  Sense Strand Starting at position 1311 of SEQ ID NO: 316295
gcguaaaugacguaguaua

SEQ ID NO: 421664 - RNA, 19 nt, Artificial Sequence
  Description of Artificial Sequence: Synthetic oligonucleotide
  Antisense Strand to SEQ ID NO: 421663
uauacuacgucauuuacgc

SEQ ID NO: 421665 - RNA, 19 nt, Artificial Sequence
  Description of Artificial Sequence: Synthetic oligonucleotide
  Sense Strand Starting at position 1311 of SEQ ID NO: 316334
ggcucaaaugaugguuauu

SEQ ID NO: 421666 - RNA, 19 nt, Artificial Sequence
  Description of Artificial Sequence: Synthetic oligonucleotide
  Antisense Strand to SEQ ID NO: 421665
aauaaccaucauuugagcc

SEQ ID NO: 421667 - RNA, 19 nt, Artificial Sequence
  Description of Artificial Sequence: Synthetic oligonucleotide
  Sense Strand Starting at position 1311 of SEQ ID NO: 316336
cucaaaugaugguuauuau

SEQ ID NO: 421668 - RNA, 19 nt, Artificial Sequence
  Description of Artificial Sequence: Synthetic oligonucleotide
  Antisense Strand to SEQ ID NO: 421667
auaauaaccaucauuugag

SEQ ID NO: 421669 - RNA, 19 nt, Artificial Sequence
  Description of Artificial Sequence: Synthetic oligonucleotide
  Sense Strand Starting at position 1311 of SEQ ID NO: 316410
gaaaucguaguauaaucaa

SEQ ID NO: 421670 - RNA, 19 nt, Artificial Sequence
  Description of Artificial Sequence: Synthetic oligonucleotide
  Antisense Strand to SEQ ID NO: 421669
uugauuauacuacgauuuc

SEQ ID NO: 421671 - RNA, 19 nt, Artificial Sequence
  Description of Artificial Sequence: Synthetic oligonucleotide
  Sense Strand Starting at position 1311 of SEQ ID NO: 316712
cgucauucucccuauugga

SEQ ID NO: 421672 - RNA, 19 nt, Artificial Sequence
  Description of Artificial Sequence: Synthetic oligonucleotide
  Antisense Strand to SEQ ID NO: 421671
uccaauagggagaaugacg

SEQ ID NO: 421673 - RNA, 19 nt, Artificial Sequence
  Description of Artificial Sequence: Synthetic oligonucleotide
  Sense Strand Starting at position 1311 of SEQ ID NO: 316720
ucccuauuggaauguuuaa

SEQ ID NO: 421674 - RNA, 19 nt, Artificial Sequence
  Description of Artificial Sequence: Synthetic oligonucleotide
  Antisense Strand to SEQ ID NO: 421673
uuaaacauuccaauaggga

SEQ ID NO: 421675 - RNA, 19 nt, Artificial Sequence
  Description of Artificial Sequence: Synthetic oligonucleotide
  Sense Strand Starting at position 1311 of SEQ ID NO: 316727
uggaauguuuaauugacua

SEQ ID NO: 421676 - RNA, 19 nt, Artificial Sequence
  Description of Artificial Sequence: Synthetic oligonucleotide
  Antisense Strand to SEQ ID NO: 421675
uagucaauuaaacauucca

SEQ ID NO: 421677 - RNA, 19 nt, Artificial Sequence
  Description of Artificial Sequence: Synthetic oligonucleotide
  Sense Strand Starting at position 1311 of SEQ ID NO: 317078
agggaaacgucacaggaaa

SEQ ID NO: 421678 - RNA, 19 nt, Artificial Sequence
  Description of Artificial Sequence: Synthetic oligonucleotide
  Antisense Strand to SEQ ID NO: 421677
uuuccugugacguuucccu

SEQ ID NO: 421679 - RNA, 19 nt, Artificial Sequence
  Description of Artificial Sequence: Synthetic oligonucleotide
  Sense Strand Starting at position 1311 of SEQ ID NO: 317481
gugcgucugcccucaguga

SEQ ID NO: 421680 - RNA, 19 nt, Artificial Sequence
  Description of Artificial Sequence: Synthetic oligonucleotide
  Antisense Strand to SEQ ID NO: 421679
ucacugagggcagacgcac

SEQ ID NO: 421681 - RNA, 19 nt, Artificial Sequence
  Description of Artificial Sequence: Synthetic oligonucleotide
  Sense Strand Starting at position 1311 of SEQ ID NO: 318065
ccgagcuucugagucagaa

SEQ ID NO: 421682 - RNA, 19 nt, Artificial Sequence
  Description of Artificial Sequence: Synthetic oligonucleotide
  Antisense Strand to SEQ ID NO: 421681
uucugacucagaagcucgg

SEQ ID NO: 421683 - RNA, 19 nt, Artificial Sequence
  Description of Artificial Sequence: Synthetic oligonucleotide
  Sense Strand Starting at position 1311 of SEQ ID NO: 318226
gguaguuugccucacucau

SEQ ID NO: 421684 - RNA, 19 nt, Artificial Sequence
  Description of Artificial Sequence: Synthetic oligonucleotide
  Antisense Strand to SEQ ID NO: 421683
augagugaggcaaacuacc

SEQ ID NO: 421685 - RNA, 19 nt, Artificial Sequence
  Description of Artificial Sequence: Synthetic oligonucleotide
  Sense Strand Starting at position 1311 of SEQ ID NO: 318378
cuuaguuucuaaguuucua

SEQ ID NO: 421686 - RNA, 19 nt, Artificial Sequence
  Description of Artificial Sequence: Synthetic oligonucleotide
  Antisense Strand to SEQ ID NO: 421685
uagaaacuuagaaacuaag

SEQ ID NO: 421687 - RNA, 19 nt, Artificial Sequence
  Description of Artificial Sequence: Synthetic oligonucleotide
  Sense Strand Starting at position 1311 of SEQ ID NO: 318511
gaggcuuacaagugagugu

SEQ ID NO: 421688 - RNA, 19 nt, Artificial Sequence
  Description of Artificial Sequence: Synthetic oligonucleotide
  Antisense Strand to SEQ ID NO: 421687
acacucacuuguaagccuc

SEQ ID NO: 421689 - RNA, 19 nt, Artificial Sequence
  Description of Artificial Sequence: Synthetic oligonucleotide
  Sense Strand Starting at position 1311 of SEQ ID NO: 318512
aggcuuacaagugagugua

SEQ ID NO: 421690 - RNA, 19 nt, Artificial Sequence
  Description of Artificial Sequence: Synthetic oligonucleotide
  Antisense Strand to SEQ ID NO: 421689
uacacucacuuguaagccu

SEQ ID NO: 421691 - RNA, 19 nt, Artificial Sequence
  Description of Artificial Sequence: Synthetic oligonucleotide
  Sense Strand Starting at position 1311 of SEQ ID NO: 318515
cuuacaagugaguguaguu

SEQ ID NO: 421692 - RNA, 19 nt, Artificial Sequence
  Description of Artificial Sequence: Synthetic oligonucleotide
  Antisense Strand to SEQ ID NO: 421691
aacuacacucacuuguaag

SEQ ID NO: 421693 - RNA, 19 nt, Artificial Sequence
  Description of Artificial Sequence: Synthetic oligonucleotide
  Sense Strand Starting at position 1311 of SEQ ID NO: 318600
cugcuuuguccugcuguua

SEQ ID NO: 421694 - RNA, 19 nt, Artificial Sequence
  Description of Artificial Sequence: Synthetic oligonucleotide
  Antisense Strand to SEQ ID NO: 421693
uaacagcaggacaaagcag

SEQ ID NO: 421695 - RNA, 19 nt, Artificial Sequence
  Description of Artificial Sequence: Synthetic oligonucleotide
  Sense Strand Starting at position 1311 of SEQ ID NO: 318761
caaggaacaaguuguggua

SEQ ID NO: 421696 - RNA, 19 nt, Artificial Sequence
  Description of Artificial Sequence: Synthetic oligonucleotide
  Antisense Strand to SEQ ID NO: 421695
uaccacaacuuguuccuug

SEQ ID NO: 421697 - RNA, 19 nt, Artificial Sequence
  Description of Artificial Sequence: Synthetic oligonucleotide
  Sense Strand Starting at position 1311 of SEQ ID NO: 318789
ggacucucaggccgaauaa

SEQ ID NO: 421698 - RNA, 19 nt, Artificial Sequence
  Description of Artificial Sequence: Synthetic oligonucleotide
  Antisense Strand to SEQ ID NO: 421697
uuauucggccugagagucc

SEQ ID NO: 421699 - RNA, 19 nt, Artificial Sequence
  Description of Artificial Sequence: Synthetic oligonucleotide
  Sense Strand Starting at position 1311 of SEQ ID NO: 318790
gacucucaggccgaauaaa

SEQ ID NO: 421700 - RNA, 19 nt, Artificial Sequence
  Description of Artificial Sequence: Synthetic oligonucleotide
  Antisense Strand to SEQ ID NO: 421699
uuuauucggccugagaguc

SEQ ID NO: 421701 - RNA, 19 nt, Artificial Sequence
  Description of Artificial Sequence: Synthetic oligonucleotide
  Sense Strand Starting at position 1311 of SEQ ID NO: 318814
ggucuuggucuugaguuga

SEQ ID NO: 421702 - RNA, 19 nt, Artificial Sequence
  Description of Artificial Sequence: Synthetic oligonucleotide
  Antisense Strand to SEQ ID NO: 421701
ucaacucaagaccaagacc

SEQ ID NO: 421703 - RNA, 19 nt, Artificial Sequence
  Description of Artificial Sequence: Synthetic oligonucleotide
  Sense Strand Starting at position 1311 of SEQ ID NO: 318827
aguugaguugaaugguuaa

SEQ ID NO: 421704 - RNA, 19 nt, Artificial Sequence
  Description of Artificial Sequence: Synthetic oligonucleotide
  Antisense Strand to SEQ ID NO: 421703
uuaaccauucaacucaacu

SEQ ID NO: 421705 - RNA, 19 nt, Artificial Sequence
  Description of Artificial Sequence: Synthetic oligonucleotide
  Sense Strand Starting at position 1311 of SEQ ID NO: 318830
ugaguugaaugguuaacag

SEQ ID NO: 421706 - RNA, 19 nt, Artificial Sequence
  Description of Artificial Sequence: Synthetic oligonucleotide
  Antisense Strand to SEQ ID NO: 421705
cuguuaaccauucaacuca

SEQ ID NO: 421707 - RNA, 19 nt, Artificial Sequence
  Description of Artificial Sequence: Synthetic oligonucleotide
  Sense Strand Starting at position 1311 of SEQ ID NO: 318861
gcagucaaucaagaucaua

SEQ ID NO: 421708 - RNA, 19 nt, Artificial Sequence
  Description of Artificial Sequence: Synthetic oligonucleotide
  Antisense Strand to SEQ ID NO: 421707
uaugaucuugauugacugc

SEQ ID NO: 421709 - RNA, 19 nt, Artificial Sequence
  Description of Artificial Sequence: Synthetic oligonucleotide
  Sense Strand Starting at position 1311 of SEQ ID NO: 318890
gauaaagucugauugcaau

SEQ ID NO: 421710 - RNA, 19 nt, Artificial Sequence
  Description of Artificial Sequence: Synthetic oligonucleotide
  Antisense Strand to SEQ ID NO: 421709
auugcaaucagacuuuauc

SEQ ID NO: 421711 - RNA, 19 nt, Artificial Sequence
  Description of Artificial Sequence: Synthetic oligonucleotide
  Sense Strand Starting at position 1311 of SEQ ID NO: 318921
augaaugcauuaguaacua

SEQ ID NO: 421712 - RNA, 19 nt, Artificial Sequence
  Description of Artificial Sequence: Synthetic oligonucleotide
  Antisense Strand to SEQ ID NO: 421711
uaguuacuaaugcauucau

SEQ ID NO: 421713 - RNA, 19 nt, Artificial Sequence
  Description of Artificial Sequence: Synthetic oligonucleotide
  Sense Strand Starting at position 1312 of SEQ ID NO: 315268
aggccauuaagugaaguaa

SEQ ID NO: 421714 - RNA, 19 nt, Artificial Sequence
  Description of Artificial Sequence: Synthetic oligonucleotide
  Antisense Strand to SEQ ID NO: 421713
uuacuucacuuaauggccu

SEQ ID NO: 421715 - RNA, 19 nt, Artificial Sequence
  Description of Artificial Sequence: Synthetic oligonucleotide
  Sense Strand Starting at position 1312 of SEQ ID NO: 315325
ggagauaaacaauguguac

SEQ ID NO: 421716 - RNA, 19 nt, Artificial Sequence
  Description of Artificial Sequence: Synthetic oligonucleotide
  Antisense Strand to SEQ ID NO: 421715
guacacauuguuuaucucc

SEQ ID NO: 421717 - RNA, 19 nt, Artificial Sequence
  Description of Artificial Sequence: Synthetic oligonucleotide
  Sense Strand Starting at position 1312 of SEQ ID NO: 315411
gaaaguauuuacuagguac

SEQ ID NO: 421718 - RNA, 19 nt, Artificial Sequence
  Description of Artificial Sequence: Synthetic oligonucleotide
  Antisense Strand to SEQ ID NO: 421717
guaccuaguaaauacuuuc

SEQ ID NO: 421719 - RNA, 19 nt, Artificial Sequence
  Description of Artificial Sequence: Synthetic oligonucleotide
  Sense Strand Starting at position 1312 of SEQ ID NO: 315597
guaaauguaguguaugaau

SEQ ID NO: 421720 - RNA, 19 nt, Artificial Sequence
  Description of Artificial Sequence: Synthetic oligonucleotide
  Antisense Strand to SEQ ID NO: 421719
auucauacacuacauuuac

SEQ ID NO: 421721 - RNA, 19 nt, Artificial Sequence
  Description of Artificial Sequence: Synthetic oligonucleotide
  Sense Strand Starting at position 1312 of SEQ ID NO: 315599
aaauguaguguaugaaucu

SEQ ID NO: 421722 - RNA, 19 nt, Artificial Sequence
  Description of Artificial Sequence: Synthetic oligonucleotide
  Antisense Strand to SEQ ID NO: 421721
agauucauacacuacauuu

SEQ ID NO: 421723 - RNA, 19 nt, Artificial Sequence
  Description of Artificial Sequence: Synthetic oligonucleotide
  Sense Strand Starting at position 1312 of SEQ ID NO: 315731
agggauuagugguuacuca

SEQ ID NO: 421724 - RNA, 19 nt, Artificial Sequence
  Description of Artificial Sequence: Synthetic oligonucleotide
  Antisense Strand to SEQ ID NO: 421723
ugaguaaccacuaaucccu

SEQ ID NO: 421725 - RNA, 19 nt, Artificial Sequence
  Description of Artificial Sequence: Synthetic oligonucleotide
  Sense Strand Starting at position 1312 of SEQ ID NO: 315732
gggauuagugguuacucau

SEQ ID NO: 421726 - RNA, 19 nt, Artificial Sequence
  Description of Artificial Sequence: Synthetic oligonucleotide
  Antisense Strand to SEQ ID NO: 421725
augaguaaccacuaauccc

SEQ ID NO: 421727 - RNA, 19 nt, Artificial Sequence
  Description of Artificial Sequence: Synthetic oligonucleotide
  Sense Strand Starting at position 1312 of SEQ ID NO: 315742
guuacucauccacaguuua

SEQ ID NO: 421728 - RNA, 19 nt, Artificial Sequence
  Description of Artificial Sequence: Synthetic oligonucleotide
  Antisense Strand to SEQ ID NO: 421727
uaaacuguggaugaguaac

SEQ ID NO: 421729 - RNA, 19 nt, Artificial Sequence
  Description of Artificial Sequence: Synthetic oligonucleotide
  Sense Strand Starting at position 1312 of SEQ ID NO: 315895
cagguuauccucggaacca

SEQ ID NO: 421730 - RNA, 19 nt, Artificial Sequence
  Description of Artificial Sequence: Synthetic oligonucleotide
  Antisense Strand to SEQ ID NO: 421729
ugguuccgaggauaaccug

SEQ ID NO: 421731 - RNA, 19 nt, Artificial Sequence
  Description of Artificial Sequence: Synthetic oligonucleotide
  Sense Strand Starting at position 1312 of SEQ ID NO: 315974
uuaugaccaguguauguuu

SEQ ID NO: 421732 - RNA, 19 nt, Artificial Sequence
  Description of Artificial Sequence: Synthetic oligonucleotide
  Antisense Strand to SEQ ID NO: 421731
aaacauacacuggucauaa

SEQ ID NO: 421733 - RNA, 19 nt, Artificial Sequence
  Description of Artificial Sequence: Synthetic oligonucleotide
  Sense Strand Starting at position 1312 of SEQ ID NO: 316025
uuaagaguguuguccaaag

SEQ ID NO: 421734 - RNA, 19 nt, Artificial Sequence
  Description of Artificial Sequence: Synthetic oligonucleotide
  Antisense Strand to SEQ ID NO: 421733
cuuuggacaacacucuuaa

SEQ ID NO: 421735 - RNA, 19 nt, Artificial Sequence
  Description of Artificial Sequence: Synthetic oligonucleotide
  Sense Strand Starting at position 1312 of SEQ ID NO: 316027
aagaguguuguccaaaguu

SEQ ID NO: 421736 - RNA, 19 nt, Artificial Sequence
  Description of Artificial Sequence: Synthetic oligonucleotide
  Antisense Strand to SEQ ID NO: 421735
aacuuuggacaacacucuu

SEQ ID NO: 421737 - RNA, 19 nt, Artificial Sequence
  Description of Artificial Sequence: Synthetic oligonucleotide
  Sense Strand Starting at position 1312 of SEQ ID NO: 316095
gaggguuaucgucaucaac

SEQ ID NO: 421738 - RNA, 19 nt, Artificial Sequence
  Description of Artificial Sequence: Synthetic oligonucleotide
  Antisense Strand to SEQ ID NO: 421737
guugaugacgauaacccuc

SEQ ID NO: 421739 - RNA, 19 nt, Artificial Sequence
  Description of Artificial Sequence: Synthetic oligonucleotide
  Sense Strand Starting at position 1312 of SEQ ID NO: 316138
ugcagcaucccagauucua

SEQ ID NO: 421740 - RNA, 19 nt, Artificial Sequence
  Description of Artificial Sequence: Synthetic oligonucleotide
  Antisense Strand to SEQ ID NO: 421739
uagaaucugggaugcugca

SEQ ID NO: 421741 - RNA, 19 nt, Artificial Sequence
  Description of Artificial Sequence: Synthetic oligonucleotide
  Sense Strand Starting at position 1312 of SEQ ID NO: 316314
gguuggauggcggauugaa

SEQ ID NO: 421742 - RNA, 19 nt, Artificial Sequence
  Description of Artificial Sequence: Synthetic oligonucleotide
  Antisense Strand to SEQ ID NO: 421741
uucaauccgccauccaacc

SEQ ID NO: 421743 - RNA, 19 nt, Artificial Sequence
  Description of Artificial Sequence: Synthetic oligonucleotide
  Sense Strand Starting at position 1312 of SEQ ID NO: 316323
gcggauugaaguuacaaca

SEQ ID NO: 421744 - RNA, 19 nt, Artificial Sequence
  Description of Artificial Sequence: Synthetic oligonucleotide
  Antisense Strand to SEQ ID NO: 421743
uguuguaacuucaauccgc

SEQ ID NO: 421745 - RNA, 19 nt, Artificial Sequence
  Description of Artificial Sequence: Synthetic oligonucleotide
  Sense Strand Starting at position 1312 of SEQ ID NO: 316563
gccauucuccauuaggacu

SEQ ID NO: 421746 - RNA, 19 nt, Artificial Sequence
  Description of Artificial Sequence: Synthetic oligonucleotide
  Antisense Strand to SEQ ID NO: 421745
aguccuaauggagaauggc

SEQ ID NO: 421747 - RNA, 19 nt, Artificial Sequence
  Description of Artificial Sequence: Synthetic oligonucleotide
  Sense Strand Starting at position 1312 of SEQ ID NO: 316695
gugcuuuggcgucucuuga

SEQ ID NO: 421748 - RNA, 19 nt, Artificial Sequence
  Description of Artificial Sequence: Synthetic oligonucleotide
  Antisense Strand to SEQ ID NO: 421747
ucaagagacgccaaagcac

SEQ ID NO: 421749 - RNA, 19 nt, Artificial Sequence
  Description of Artificial Sequence: Synthetic oligonucleotide
  Sense Strand Starting at position 1312 of SEQ ID NO: 316856
agcuuaaaguuucuggaca

SEQ ID NO: 421750 - RNA, 19 nt, Artificial Sequence
  Description of Artificial Sequence: Synthetic oligonucleotide
  Antisense Strand to SEQ ID NO: 421749
uguccagaaacuuuaagcu

SEQ ID NO: 421751 - RNA, 19 nt, Artificial Sequence
  Description of Artificial Sequence: Synthetic oligonucleotide
  Sense Strand Starting at position 1312 of SEQ ID NO: 316932
uuuguuaaguacuugagaa

SEQ ID NO: 421752 - RNA, 19 nt, Artificial Sequence
  Description of Artificial Sequence: Synthetic oligonucleotide
  Antisense Strand to SEQ ID NO: 421751
uucucaaguacuuaacaaa

SEQ ID NO: 421753 - RNA, 19 nt, Artificial Sequence
  Description of Artificial Sequence: Synthetic oligonucleotide
  Sense Strand Starting at position 1312 of SEQ ID NO: 316981
gcaaguaggacacaaaugu

SEQ ID NO: 421754 - RNA, 19 nt, Artificial Sequence
  Description of Artificial Sequence: Synthetic oligonucleotide
  Antisense Strand to SEQ ID NO: 421753
acauuuguguccuacuugc

SEQ ID NO: 421755 - RNA, 19 nt, Artificial Sequence
  Description of Artificial Sequence: Synthetic oligonucleotide
  Sense Strand Starting at position 1312 of SEQ ID NO: 317133
caggcuagguacuugaaga

SEQ ID NO: 421756 - RNA, 19 nt, Artificial Sequence
  Description of Artificial Sequence: Synthetic oligonucleotide
  Antisense Strand to SEQ ID NO: 421755
ucuucaaguaccuagccug

SEQ ID NO: 421757 - RNA, 19 nt, Artificial Sequence
  Description of Artificial Sequence: Synthetic oligonucleotide
  Sense Strand Starting at position 1312 of SEQ ID NO: 317134
aggcuagguacuugaagau

SEQ ID NO: 421758 - RNA, 19 nt, Artificial Sequence
  Description of Artificial Sequence: Synthetic oligonucleotide
  Antisense Strand to SEQ ID NO: 421757
aucuucaaguaccuagccu

SEQ ID NO: 421759 - RNA, 19 nt, Artificial Sequence
  Description of Artificial Sequence: Synthetic oligonucleotide
  Sense Strand Starting at position 1312 of SEQ ID NO: 317471
gggucugucccggaccuaa

SEQ ID NO: 421760 - RNA, 19 nt, Artificial Sequence
  Description of Artificial Sequence: Synthetic oligonucleotide
  Antisense Strand to SEQ ID NO: 421759
uuagguccgggacagaccc

SEQ ID NO: 421761 - RNA, 19 nt, Artificial Sequence
  Description of Artificial Sequence: Synthetic oligonucleotide
  Sense Strand Starting at position 1312 of SEQ ID NO: 317813
uuucguaaagguuaagaaa

SEQ ID NO: 421762 - RNA, 19 nt, Artificial Sequence
  Description of Artificial Sequence: Synthetic oligonucleotide
  Antisense Strand to SEQ ID NO: 421761
uuucuuaaccuuuacgaaa

SEQ ID NO: 421763 - RNA, 19 nt, Artificial Sequence
  Description of Artificial Sequence: Synthetic oligonucleotide
  Sense Strand Starting at position 1312 of SEQ ID NO: 317917
cauagagaagucgguaucu

SEQ ID NO: 421764 - RNA, 19 nt, Artificial Sequence
  Description of Artificial Sequence: Synthetic oligonucleotide
  Antisense Strand to SEQ ID NO: 421763
agauaccgacuucucuaug

SEQ ID NO: 421765 - RNA, 19 nt, Artificial Sequence
  Description of Artificial Sequence: Synthetic oligonucleotide
  Sense Strand Starting at position 1312 of SEQ ID NO: 317919
uagagaagucgguaucuca

SEQ ID NO: 421766 - RNA, 19 nt, Artificial Sequence
  Description of Artificial Sequence: Synthetic oligonucleotide
  Antisense Strand to SEQ ID NO: 421765
ugagauaccgacuucucua

SEQ ID NO: 421767 - RNA, 19 nt, Artificial Sequence
  Description of Artificial Sequence: Synthetic oligonucleotide
  Sense Strand Starting at position 1312 of SEQ ID NO: 317932
aucucaaaguugcuugaaa

SEQ ID NO: 421768 - RNA, 19 nt, Artificial Sequence
  Description of Artificial Sequence: Synthetic oligonucleotide
  Antisense Strand to SEQ ID NO: 421767
uuucaagcaacuuugagau

SEQ ID NO: 421769 - RNA, 19 nt, Artificial Sequence
  Description of Artificial Sequence: Synthetic oligonucleotide
  Sense Strand Starting at position 1312 of SEQ ID NO: 317933
ucucaaaguugcuugaaac

SEQ ID NO: 421770 - RNA, 19 nt, Artificial Sequence
  Description of Artificial Sequence: Synthetic oligonucleotide
  Antisense Strand to SEQ ID NO: 421769
guuucaagcaacuuugaga

SEQ ID NO: 421771 - RNA, 19 nt, Artificial Sequence
  Description of Artificial Sequence: Synthetic oligonucleotide
  Sense Strand Starting at position 1312 of SEQ ID NO: 317934
cucaaaguugcuugaaaca

SEQ ID NO: 421772 - RNA, 19 nt, Artificial Sequence
  Description of Artificial Sequence: Synthetic oligonucleotide
  Antisense Strand to SEQ ID NO: 421771
uguuucaagcaacuuugag

SEQ ID NO: 421773 - RNA, 19 nt, Artificial Sequence
  Description of Artificial Sequence: Synthetic oligonucleotide
  Sense Strand Starting at position 1312 of SEQ ID NO: 317986
cggauaagguuacucuuaa

SEQ ID NO: 421774 - RNA, 19 nt, Artificial Sequence
  Description of Artificial Sequence: Synthetic oligonucleotide
  Antisense Strand to SEQ ID NO: 421773
uuaagaguaaccuuauccg

SEQ ID NO: 421775 - RNA, 19 nt, Artificial Sequence
  Description of Artificial Sequence: Synthetic oligonucleotide
  Sense Strand Starting at position 1312 of SEQ ID NO: 317987
ggauaagguuacucuuaag

SEQ ID NO: 421776 - RNA, 19 nt, Artificial Sequence
  Description of Artificial Sequence: Synthetic oligonucleotide
  Antisense Strand to SEQ ID NO: 421775
cuuaagaguaaccuuaucc

SEQ ID NO: 421777 - RNA, 19 nt, Artificial Sequence
  Description of Artificial Sequence: Synthetic oligonucleotide
  Sense Strand Starting at position 1312 of SEQ ID NO: 317994
guuacucuuaaggagguuu

SEQ ID NO: 421778 - RNA, 19 nt, Artificial Sequence
  Description of Artificial Sequence: Synthetic oligonucleotide
  Antisense Strand to SEQ ID NO: 421777
aaaccuccuuaagaguaac

SEQ ID NO: 421779 - RNA, 19 nt, Artificial Sequence
  Description of Artificial Sequence: Synthetic oligonucleotide
  Sense Strand Starting at position 1312 of SEQ ID NO: 318300
cgagcacucacgccuguaa

SEQ ID NO: 421780 - RNA, 19 nt, Artificial Sequence
  Description of Artificial Sequence: Synthetic oligonucleotide
  Antisense Strand to SEQ ID NO: 421779
uuacaggcgugagugcucg

SEQ ID NO: 421781 - RNA, 19 nt, Artificial Sequence
  Description of Artificial Sequence: Synthetic oligonucleotide
  Sense Strand Starting at position 1312 of SEQ ID NO: 318654
ucucaucagcgucaagaau

SEQ ID NO: 421782 - RNA, 19 nt, Artificial Sequence
  Description of Artificial Sequence: Synthetic oligonucleotide
  Antisense Strand to SEQ ID NO: 421781
auucuugacgcugaugaga

SEQ ID NO: 421783 - RNA, 19 nt, Artificial Sequence
  Description of Artificial Sequence: Synthetic oligonucleotide
  Sense Strand Starting at position 1312 of SEQ ID NO: 318703
auuguauacuuauuaggga

SEQ ID NO: 421784 - RNA, 19 nt, Artificial Sequence
  Description of Artificial Sequence: Synthetic oligonucleotide
  Antisense Strand to SEQ ID NO: 421783
ucccuaauaaguauacaau

SEQ ID NO: 421785 - RNA, 19 nt, Artificial Sequence
  Description of Artificial Sequence: Synthetic oligonucleotide
  Sense Strand Starting at position 1312 of SEQ ID NO: 318763
uuaggucaccuguaauaaa

SEQ ID NO: 421786 - RNA, 19 nt, Artificial Sequence
  Description of Artificial Sequence: Synthetic oligonucleotide
  Antisense Strand to SEQ ID NO: 421785
uuuauuacaggugaccuaa

SEQ ID NO: 421787 - RNA, 19 nt, Artificial Sequence
  Description of Artificial Sequence: Synthetic oligonucleotide
  Sense Strand Starting at position 1312 of SEQ ID NO: 318886
guauaaacacagugaggua

SEQ ID NO: 421788 - RNA, 19 nt, Artificial Sequence
  Description of Artificial Sequence: Synthetic oligonucleotide
  Antisense Strand to SEQ ID NO: 421787
uaccucacuguguuuauac

SEQ ID NO: 421789 - RNA, 19 nt, Artificial Sequence
  Description of Artificial Sequence: Synthetic oligonucleotide
  Sense Strand Starting at position 1312 of SEQ ID NO: 318976
cuauuaaggucuccaugga

SEQ ID NO: 421790 - RNA, 19 nt, Artificial Sequence
  Description of Artificial Sequence: Synthetic oligonucleotide
  Antisense Strand to SEQ ID NO: 421789
uccauggagaccuuaauag

SEQ ID NO: 421791 - RNA, 19 nt, Artificial Sequence
  Description of Artificial Sequence: Synthetic oligonucleotide
  Sense Strand Starting at position 1312 of SEQ ID NO: 319085
cccauuagccuggauuagu

SEQ ID NO: 421792 - RNA, 19 nt, Artificial Sequence
  Description of Artificial Sequence: Synthetic oligonucleotide
  Antisense Strand to SEQ ID NO: 421791
acuaauccaggcuaauggg

SEQ ID NO: 421793 - RNA, 19 nt, Artificial Sequence
  Description of Artificial Sequence: Synthetic oligonucleotide
  Sense Strand Starting at position 1313 of SEQ ID NO: 315576
acagaauuguagcuauaua

SEQ ID NO: 421794 - RNA, 19 nt, Artificial Sequence
  Description of Artificial Sequence: Synthetic oligonucleotide
  Antisense Strand to SEQ ID NO: 421793
uauauagcuacaauucugu

SEQ ID NO: 421795 - RNA, 19 nt, Artificial Sequence
  Description of Artificial Sequence: Synthetic oligonucleotide
  Sense Strand Starting at position 1313 of SEQ ID NO: 315634
ugcagagcuucuuaaacug

SEQ ID NO: 421796 - RNA, 19 nt, Artificial Sequence
  Description of Artificial Sequence: Synthetic oligonucleotide
  Antisense Strand to SEQ ID NO: 421795
caguuuaagaagcucugca

SEQ ID NO: 421797 - RNA, 19 nt, Artificial Sequence
  Description of Artificial Sequence: Synthetic oligonucleotide
  Sense Strand Starting at position 1313 of SEQ ID NO: 315712
gggauaaagucagaucaag

SEQ ID NO: 421798 - RNA, 19 nt, Artificial Sequence
  Description of Artificial Sequence: Synthetic oligonucleotide
  Antisense Strand to SEQ ID NO: 421797
cuugaucugacuuuauccc

SEQ ID NO: 421799 - RNA, 19 nt, Artificial Sequence
  Description of Artificial Sequence: Synthetic oligonucleotide
  Sense Strand Starting at position 1313 of SEQ ID NO: 315906
ucuugugguucuuugaguu

SEQ ID NO: 421800 - RNA, 19 nt, Artificial Sequence
  Description of Artificial Sequence: Synthetic oligonucleotide
  Antisense Strand to SEQ ID NO: 421799
aacucaaagaaccacaaga

SEQ ID NO: 421801 - RNA, 19 nt, Artificial Sequence
  Description of Artificial Sequence: Synthetic oligonucleotide
  Sense Strand Starting at position 1313 of SEQ ID NO: 315945
caaggagccuuaggaguuu

SEQ ID NO: 421802 - RNA, 19 nt, Artificial Sequence
  Description of Artificial Sequence: Synthetic oligonucleotide
  Antisense Strand to SEQ ID NO: 421801
aaacuccuaaggcuccuug

SEQ ID NO: 421803 - RNA, 19 nt, Artificial Sequence
  Description of Artificial Sequence: Synthetic oligonucleotide
  Sense Strand Starting at position 1313 of SEQ ID NO: 315956
aggaguuuagcucgcggua

SEQ ID NO: 421804 - RNA, 19 nt, Artificial Sequence
  Description of Artificial Sequence: Synthetic oligonucleotide
  Antisense Strand to SEQ ID NO: 421803
uaccgcgagcuaaacuccu

SEQ ID NO: 421805 - RNA, 19 nt, Artificial Sequence
  Description of Artificial Sequence: Synthetic oligonucleotide
  Sense Strand Starting at position 1313 of SEQ ID NO: 316129
ggucauuaguggcuucaug

SEQ ID NO: 421806 - RNA, 19 nt, Artificial Sequence
  Description of Artificial Sequence: Synthetic oligonucleotide
  Antisense Strand to SEQ ID NO: 421805
caugaagccacuaaugacc

SEQ ID NO: 421807 - RNA, 19 nt, Artificial Sequence
  Description of Artificial Sequence: Synthetic oligonucleotide
  Sense Strand Starting at position 1313 of SEQ ID NO: 316143
ucauguaaugacuguucga

SEQ ID NO: 421808 - RNA, 19 nt, Artificial Sequence
  Description of Artificial Sequence: Synthetic oligonucleotide
  Antisense Strand to SEQ ID NO: 421807
ucgaacagucauuacauga

SEQ ID NO: 421809 - RNA, 19 nt, Artificial Sequence
  Description of Artificial Sequence: Synthetic oligonucleotide
  Sense Strand Starting at position 1313 of SEQ ID NO: 316146
uguaaugacuguucgagac

SEQ ID NO: 421810 - RNA, 19 nt, Artificial Sequence
  Description of Artificial Sequence: Synthetic oligonucleotide
  Antisense Strand to SEQ ID NO: 421809
gucucgaacagucauuaca

SEQ ID NO: 421811 - RNA, 19 nt, Artificial Sequence
  Description of Artificial Sequence: Synthetic oligonucleotide
  Sense Strand Starting at position 1313 of SEQ ID NO: 316148
uaaugacuguucgagacca

SEQ ID NO: 421812 - RNA, 19 nt, Artificial Sequence
  Description of Artificial Sequence: Synthetic oligonucleotide
  Antisense Strand to SEQ ID NO: 421811
uggucucgaacagucauua

SEQ ID NO: 421813 - RNA, 19 nt, Artificial Sequence
  Description of Artificial Sequence: Synthetic oligonucleotide
  Sense Strand Starting at position 1313 of SEQ ID NO: 317793
gccagagcuuggccucaua

SEQ ID NO: 421814 - RNA, 19 nt, Artificial Sequence
  Description of Artificial Sequence: Synthetic oligonucleotide
  Antisense Strand to SEQ ID NO: 421813
uaugaggccaagcucuggc

SEQ ID NO: 421815 - RNA, 19 nt, Artificial Sequence
  Description of Artificial Sequence: Synthetic oligonucleotide
  Sense Strand Starting at position 1313 of SEQ ID NO: 317843
cuaugcauuccuuguguag

SEQ ID NO: 421816 - RNA, 19 nt, Artificial Sequence
  Description of Artificial Sequence: Synthetic oligonucleotide
  Antisense Strand to SEQ ID NO: 421815
cuacacaaggaaugcauag

SEQ ID NO: 421817 - RNA, 19 nt, Artificial Sequence
  Description of Artificial Sequence: Synthetic oligonucleotide
  Sense Strand Starting at position 1313 of SEQ ID NO: 317846
ugcauuccuuguguagcaa

SEQ ID NO: 421818 - RNA, 19 nt, Artificial Sequence
  Description of Artificial Sequence: Synthetic oligonucleotide
  Antisense Strand to SEQ ID NO: 421817
uugcuacacaaggaaugca

SEQ ID NO: 421819 - RNA, 19 nt, Artificial Sequence
  Description of Artificial Sequence: Synthetic oligonucleotide
  Sense Strand Starting at position 1313 of SEQ ID NO: 317847
gcauuccuuguguagcaaa

SEQ ID NO: 421820 - RNA, 19 nt, Artificial Sequence
  Description of Artificial Sequence: Synthetic oligonucleotide
  Antisense Strand to SEQ ID NO: 421819
uuugcuacacaaggaaugc

SEQ ID NO: 421821 - RNA, 19 nt, Artificial Sequence
  Description of Artificial Sequence: Synthetic oligonucleotide
  Sense Strand Starting at position 1313 of SEQ ID NO: 317906
cccacuaauguauagucaa

SEQ ID NO: 421822 - RNA, 19 nt, Artificial Sequence
  Description of Artificial Sequence: Synthetic oligonucleotide
  Antisense Strand to SEQ ID NO: 421821
uugacuauacauuaguggg

SEQ ID NO: 421823 - RNA, 19 nt, Artificial Sequence
  Description of Artificial Sequence: Synthetic oligonucleotide
  Sense Strand Starting at position 1313 of SEQ ID NO: 317913
auguauagucaacacuacu

SEQ ID NO: 421824 - RNA, 19 nt, Artificial Sequence
  Description of Artificial Sequence: Synthetic oligonucleotide
  Antisense Strand to SEQ ID NO: 421823
aguaguguugacuauacau

SEQ ID NO: 421825 - RNA, 19 nt, Artificial Sequence
  Description of Artificial Sequence: Synthetic oligonucleotide
  Sense Strand Starting at position 1313 of SEQ ID NO: 318097
cugcuaaagucacuaagga

SEQ ID NO: 421826 - RNA, 19 nt, Artificial Sequence
  Description of Artificial Sequence: Synthetic oligonucleotide
  Antisense Strand to SEQ ID NO: 421825
uccuuagugacuuuagcag

SEQ ID NO: 421827 - RNA, 19 nt, Artificial Sequence
  Description of Artificial Sequence: Synthetic oligonucleotide
  Sense Strand Starting at position 1313 of SEQ ID NO: 318098
ugcuaaagucacuaaggau

SEQ ID NO: 421828 - RNA, 19 nt, Artificial Sequence
  Description of Artificial Sequence: Synthetic oligonucleotide
  Antisense Strand to SEQ ID NO: 421827
auccuuagugacuuuagca

SEQ ID NO: 421829 - RNA, 19 nt, Artificial Sequence
  Description of Artificial Sequence: Synthetic oligonucleotide
  Sense Strand Starting at position 1313 of SEQ ID NO: 318500
ccuggagagguguguacuu

SEQ ID NO: 421830 - RNA, 19 nt, Artificial Sequence
  Description of Artificial Sequence: Synthetic oligonucleotide
  Antisense Strand to SEQ ID NO: 421829
aaguacacaccucuccagg

SEQ ID NO: 421831 - RNA, 19 nt, Artificial Sequence
  Description of Artificial Sequence: Synthetic oligonucleotide
  Sense Strand Starting at position 1313 of SEQ ID NO: 318502
uggagagguguguacuuca

SEQ ID NO: 421832 - RNA, 19 nt, Artificial Sequence
  Description of Artificial Sequence: Synthetic oligonucleotide
  Antisense Strand to SEQ ID NO: 421831
ugaaguacacaccucucca

SEQ ID NO: 421833 - RNA, 19 nt, Artificial Sequence
  Description of Artificial Sequence: Synthetic oligonucleotide
  Sense Strand Starting at position 1313 of SEQ ID NO: 318547
agaguaauagcccaguuga

SEQ ID NO: 421834 - RNA, 19 nt, Artificial Sequence
  Description of Artificial Sequence: Synthetic oligonucleotide
  Antisense Strand to SEQ ID NO: 421833
ucaacugggcuauuacucu

SEQ ID NO: 421835 - RNA, 19 nt, Artificial Sequence
  Description of Artificial Sequence: Synthetic oligonucleotide
  Sense Strand Starting at position 1313 of SEQ ID NO: 318558
ccaguugacccuuaccauu

SEQ ID NO: 421836 - RNA, 19 nt, Artificial Sequence
  Description of Artificial Sequence: Synthetic oligonucleotide
  Antisense Strand to SEQ ID NO: 421835
aaugguaagggucaacugg

SEQ ID NO: 421837 - RNA, 19 nt, Artificial Sequence
  Description of Artificial Sequence: Synthetic oligonucleotide
  Sense Strand Starting at position 1313 of SEQ ID NO: 318838
ccagucucuuacugugagu

SEQ ID NO: 421838 - RNA, 19 nt, Artificial Sequence
  Description of Artificial Sequence: Synthetic oligonucleotide
  Antisense Strand to SEQ ID NO: 421837
acucacaguaagagacugg

SEQ ID NO: 421839 - RNA, 19 nt, Artificial Sequence
  Description of Artificial Sequence: Synthetic oligonucleotide
  Sense Strand Starting at position 1313 of SEQ ID NO: 318843
cucuuacugugaguugcaa

SEQ ID NO: 421840 - RNA, 19 nt, Artificial Sequence
  Description of Artificial Sequence: Synthetic oligonucleotide
  Antisense Strand to SEQ ID NO: 421839
uugcaacucacaguaagag

SEQ ID NO: 421841 - RNA, 19 nt, Artificial Sequence
  Description of Artificial Sequence: Synthetic oligonucleotide
  Sense Strand Starting at position 1313 of SEQ ID NO: 319167
guacaucagucuguguuga

SEQ ID NO: 421842 - RNA, 19 nt, Artificial Sequence
  Description of Artificial Sequence: Synthetic oligonucleotide
  Antisense Strand to SEQ ID NO: 421841
ucaacacagacugauguac

SEQ ID NO: 421843 - RNA, 19 nt, Artificial Sequence
  Description of Artificial Sequence: Synthetic oligonucleotide
  Sense Strand Starting at position 1313 of SEQ ID NO: 319169
acaucagucuguguugacu

SEQ ID NO: 421844 - RNA, 19 nt, Artificial Sequence
  Description of Artificial Sequence: Synthetic oligonucleotide
  Antisense Strand to SEQ ID NO: 421843
agucaacacagacugaugu

SEQ ID NO: 421845 - RNA, 19 nt, Artificial Sequence
  Description of Artificial Sequence: Synthetic oligonucleotide
  Sense Strand Starting at position 1314 of SEQ ID NO: 315451
uccagagccgguuacauaa

SEQ ID NO: 421846 - RNA, 19 nt, Artificial Sequence
  Description of Artificial Sequence: Synthetic oligonucleotide
  Antisense Strand to SEQ ID NO: 421845
uuauguaaccggcucugga

SEQ ID NO: 421847 - RNA, 19 nt, Artificial Sequence
  Description of Artificial Sequence: Synthetic oligonucleotide
  Sense Strand Starting at position 1314 of SEQ ID NO: 315694
aucuguuacuaggugacaa

SEQ ID NO: 421848 - RNA, 19 nt, Artificial Sequence
  Description of Artificial Sequence: Synthetic oligonucleotide
  Antisense Strand to SEQ ID NO: 421847
uugucaccuaguaacagau

SEQ ID NO: 421849 - RNA, 19 nt, Artificial Sequence
  Description of Artificial Sequence: Synthetic oligonucleotide
  Sense Strand Starting at position 1314 of SEQ ID NO: 315890
aagugcugugcuuagauuu

SEQ ID NO: 421850 - RNA, 19 nt, Artificial Sequence
  Description of Artificial Sequence: Synthetic oligonucleotide
  Antisense Strand to SEQ ID NO: 421849
aaaucuaagcacagcacuu

SEQ ID NO: 421851 - RNA, 19 nt, Artificial Sequence
  Description of Artificial Sequence: Synthetic oligonucleotide
  Sense Strand Starting at position 1314 of SEQ ID NO: 316032
accugaaauuguucuacga

SEQ ID NO: 421852 - RNA, 19 nt, Artificial Sequence
  Description of Artificial Sequence: Synthetic oligonucleotide
  Antisense Strand to SEQ ID NO: 421851
ucguagaacaauuucaggu

SEQ ID NO: 421853 - RNA, 19 nt, Artificial Sequence
  Description of Artificial Sequence: Synthetic oligonucleotide
  Sense Strand Starting at position 1314 of SEQ ID NO: 316036
gaaauuguucuacgaugcu

SEQ ID NO: 421854 - RNA, 19 nt, Artificial Sequence
  Description of Artificial Sequence: Synthetic oligonucleotide
  Antisense Strand to SEQ ID NO: 421853
agcaucguagaacaauuuc

SEQ ID NO: 421855 - RNA, 19 nt, Artificial Sequence
  Description of Artificial Sequence: Synthetic oligonucleotide
  Sense Strand Starting at position 1314 of SEQ ID NO: 316334
gggcggaaucgaggucaca

SEQ ID NO: 421856 - RNA, 19 nt, Artificial Sequence
  Description of Artificial Sequence: Synthetic oligonucleotide
  Antisense Strand to SEQ ID NO: 421855
ugugaccucgauuccgccc

SEQ ID NO: 421857 - RNA, 19 nt, Artificial Sequence
  Description of Artificial Sequence: Synthetic oligonucleotide
  Sense Strand Starting at position 1314 of SEQ ID NO: 316527
ggguuuggcaagugaugca

SEQ ID NO: 421858 - RNA, 19 nt, Artificial Sequence
  Description of Artificial Sequence: Synthetic oligonucleotide
  Antisense Strand to SEQ ID NO: 421857
ugcaucacuugccaaaccc

SEQ ID NO: 421859 - RNA, 19 nt, Artificial Sequence
  Description of Artificial Sequence: Synthetic oligonucleotide
  Sense Strand Starting at position 1314 of SEQ ID NO: 316541
augcauagcgcucaaagga

SEQ ID NO: 421860 - RNA, 19 nt, Artificial Sequence
  Description of Artificial Sequence: Synthetic oligonucleotide
  Antisense Strand to SEQ ID NO: 421859
uccuuugagcgcuaugcau

SEQ ID NO: 421861 - RNA, 19 nt, Artificial Sequence
  Description of Artificial Sequence: Synthetic oligonucleotide
  Sense Strand Starting at position 1314 of SEQ ID NO: 316819
gauggagucgucgucgcua

SEQ ID NO: 421862 - RNA, 19 nt, Artificial Sequence
  Description of Artificial Sequence: Synthetic oligonucleotide
  Antisense Strand to SEQ ID NO: 421861
uagcgacgacgacuccauc

SEQ ID NO: 421863 - RNA, 19 nt, Artificial Sequence
  Description of Artificial Sequence: Synthetic oligonucleotide
  Sense Strand Starting at position 1314 of SEQ ID NO: 317200
cucauuguguccgccauuu

SEQ ID NO: 421864 - RNA, 19 nt, Artificial Sequence
  Description of Artificial Sequence: Synthetic oligonucleotide
  Antisense Strand to SEQ ID NO: 421863
aaauggcggacacaaugag

SEQ ID NO: 421865 - RNA, 19 nt, Artificial Sequence
  Description of Artificial Sequence: Synthetic oligonucleotide
  Sense Strand Starting at position 1314 of SEQ ID NO: 317790
uuucuuaaucgagguagac

SEQ ID NO: 421866 - RNA, 19 nt, Artificial Sequence
  Description of Artificial Sequence: Synthetic oligonucleotide
  Antisense Strand to SEQ ID NO: 421865
gucuaccucgauuaagaaa

SEQ ID NO: 421867 - RNA, 19 nt, Artificial Sequence
  Description of Artificial Sequence: Synthetic oligonucleotide
  Sense Strand Starting at position 1314 of SEQ ID NO: 317792
ucuuaaucgagguagacuu

SEQ ID NO: 421868 - RNA, 19 nt, Artificial Sequence
  Description of Artificial Sequence: Synthetic oligonucleotide
  Antisense Strand to SEQ ID NO: 421867
aagucuaccucgauuaaga

SEQ ID NO: 421869 - RNA, 19 nt, Artificial Sequence
  Description of Artificial Sequence: Synthetic oligonucleotide
  Sense Strand Starting at position 1314 of SEQ ID NO: 317802
gguagacuuuagguacagu

SEQ ID NO: 421870 - RNA, 19 nt, Artificial Sequence
  Description of Artificial Sequence: Synthetic oligonucleotide
  Antisense Strand to SEQ ID NO: 421869
acuguaccuaaagucuacc

SEQ ID NO: 421871 - RNA, 19 nt, Artificial Sequence
  Description of Artificial Sequence: Synthetic oligonucleotide
  Sense Strand Starting at position 1314 of SEQ ID NO: 317803
guagacuuuagguacagua

SEQ ID NO: 421872 - RNA, 19 nt, Artificial Sequence
  Description of Artificial Sequence: Synthetic oligonucleotide
  Antisense Strand to SEQ ID NO: 421871
uacuguaccuaaagucuac

SEQ ID NO: 421873 - RNA, 19 nt, Artificial Sequence
  Description of Artificial Sequence: Synthetic oligonucleotide
  Sense Strand Starting at position 1314 of SEQ ID NO: 318186
guuuguagucaacaggauu

SEQ ID NO: 421874 - RNA, 19 nt, Artificial Sequence
  Description of Artificial Sequence: Synthetic oligonucleotide
  Antisense Strand to SEQ ID NO: 421873
aauccuguugacuacaaac

SEQ ID NO: 421875 - RNA, 19 nt, Artificial Sequence
  Description of Artificial Sequence: Synthetic oligonucleotide
  Sense Strand Starting at position 1314 of SEQ ID NO: 318189
uguagucaacaggauuauu

SEQ ID NO: 421876 - RNA, 19 nt, Artificial Sequence
  Description of Artificial Sequence: Synthetic oligonucleotide
  Antisense Strand to SEQ ID NO: 421875
aauaauccuguugacuaca

SEQ ID NO: 421877 - RNA, 19 nt, Artificial Sequence
  Description of Artificial Sequence: Synthetic oligonucleotide
  Sense Strand Starting at position 1314 of SEQ ID NO: 318408
gguuuccaacaaugaagau

SEQ ID NO: 421878 - RNA, 19 nt, Artificial Sequence
  Description of Artificial Sequence: Synthetic oligonucleotide
  Antisense Strand to SEQ ID NO: 421877
aucuucauuguuggaaacc

SEQ ID NO: 421879 - RNA, 19 nt, Artificial Sequence
  Description of Artificial Sequence: Synthetic oligonucleotide
  Sense Strand Starting at position 1314 of SEQ ID NO: 318442
uugcuuucuuuagcuaaag

SEQ ID NO: 421880 - RNA, 19 nt, Artificial Sequence
  Description of Artificial Sequence: Synthetic oligonucleotide
  Antisense Strand to SEQ ID NO: 421879
cuuuagcuaaagaaagcaa

SEQ ID NO: 421881 - RNA, 19 nt, Artificial Sequence
  Description of Artificial Sequence: Synthetic oligonucleotide
  Sense Strand Starting at position 1314 of SEQ ID NO: 318443
ugcuuucuuuagcuaaaga

SEQ ID NO: 421882 - RNA, 19 nt, Artificial Sequence
  Description of Artificial Sequence: Synthetic oligonucleotide
  Antisense Strand to SEQ ID NO: 421881
ucuuuagcuaaagaaagca

SEQ ID NO: 421883 - RNA, 19 nt, Artificial Sequence
  Description of Artificial Sequence: Synthetic oligonucleotide
  Sense Strand Starting at position 1314 of SEQ ID NO: 318473
gaggaaaggcugugagaca

SEQ ID NO: 421884 - RNA, 19 nt, Artificial Sequence
  Description of Artificial Sequence: Synthetic oligonucleotide
  Antisense Strand to SEQ ID NO: 421883
ugucucacagccuuuccuc

SEQ ID NO: 421885 - RNA, 19 nt, Artificial Sequence
  Description of Artificial Sequence: Synthetic oligonucleotide
  Sense Strand Starting at position 1314 of SEQ ID NO: 318499
cgcuauuaggaagguuauu

SEQ ID NO: 421886 - RNA, 19 nt, Artificial Sequence
  Description of Artificial Sequence: Synthetic oligonucleotide
  Antisense Strand to SEQ ID NO: 421885
aauaaccuuccuaauagcg

SEQ ID NO: 421887 - RNA, 19 nt, Artificial Sequence
  Description of Artificial Sequence: Synthetic oligonucleotide
  Sense Strand Starting at position 1314 of SEQ ID NO: 318504
uuaggaagguuauuaucca

SEQ ID NO: 421888 - RNA, 19 nt, Artificial Sequence
  Description of Artificial Sequence: Synthetic oligonucleotide
  Antisense Strand to SEQ ID NO: 421887
uggauaauaaccuuccuaa

SEQ ID NO: 421889 - RNA, 19 nt, Artificial Sequence
  Description of Artificial Sequence: Synthetic oligonucleotide
  Sense Strand Starting at position 1314 of SEQ ID NO: 318519
uccagagaccugugcaaug

SEQ ID NO: 421890 - RNA, 19 nt, Artificial Sequence
  Description of Artificial Sequence: Synthetic oligonucleotide
  Antisense Strand to SEQ ID NO: 421889
cauugcacaggucucugga

SEQ ID NO: 421891 - RNA, 19 nt, Artificial Sequence
  Description of Artificial Sequence: Synthetic oligonucleotide
  Sense Strand Starting at position 1314 of SEQ ID NO: 318524
agaccugugcaaugguaaa

SEQ ID NO: 421892 - RNA, 19 nt, Artificial Sequence
  Description of Artificial Sequence: Synthetic oligonucleotide
  Antisense Strand to SEQ ID NO: 421891
uuuaccauugcacaggucu

SEQ ID NO: 421893 - RNA, 19 nt, Artificial Sequence
  Description of Artificial Sequence: Synthetic oligonucleotide
  Sense Strand Starting at position 1314 of SEQ ID NO: 318645
aagagaaguuguucucuaa

SEQ ID NO: 421894 - RNA, 19 nt, Artificial Sequence
  Description of Artificial Sequence: Synthetic oligonucleotide
  Antisense Strand to SEQ ID NO: 421893
uuagagaacaacuucucuu

SEQ ID NO: 421895 - RNA, 19 nt, Artificial Sequence
  Description of Artificial Sequence: Synthetic oligonucleotide
  Sense Strand Starting at position 1314 of SEQ ID NO: 318649
gaaguuguucucuaaggga

SEQ ID NO: 421896 - RNA, 19 nt, Artificial Sequence
  Description of Artificial Sequence: Synthetic oligonucleotide
  Antisense Strand to SEQ ID NO: 421895
ucccuuagagaacaacuuc

SEQ ID NO: 421897 - RNA, 19 nt, Artificial Sequence
  Description of Artificial Sequence: Synthetic oligonucleotide
  Sense Strand Starting at position 1314 of SEQ ID NO: 318693
ggguauaauugccuccuga

SEQ ID NO: 421898 - RNA, 19 nt, Artificial Sequence
  Description of Artificial Sequence: Synthetic oligonucleotide
  Antisense Strand to SEQ ID NO: 421897
ucaggaggcaauuauaccc

SEQ ID NO: 421899 - RNA, 19 nt, Artificial Sequence
  Description of Artificial Sequence: Synthetic oligonucleotide
  Sense Strand Starting at position 1314 of SEQ ID NO: 318720
agagcuucuggcuacaauu

SEQ ID NO: 421900 - RNA, 19 nt, Artificial Sequence
  Description of Artificial Sequence: Synthetic oligonucleotide
  Antisense Strand to SEQ ID NO: 421899
aauuguagccagaagcucu

SEQ ID NO: 421901 - RNA, 19 nt, Artificial Sequence
  Description of Artificial Sequence: Synthetic oligonucleotide
  Sense Strand Starting at position 1314 of SEQ ID NO: 318759
gccgguuugagugaaaccu

SEQ ID NO: 421902 - RNA, 19 nt, Artificial Sequence
  Description of Artificial Sequence: Synthetic oligonucleotide
  Antisense Strand to SEQ ID NO: 421901
agguuucacucaaaccggc

SEQ ID NO: 421903 - RNA, 19 nt, Artificial Sequence
  Description of Artificial Sequence: Synthetic oligonucleotide
  Sense Strand Starting at position 1314 of SEQ ID NO: 318902
gucugcuucgaauaguuua

SEQ ID NO: 421904 - RNA, 19 nt, Artificial Sequence
  Description of Artificial Sequence: Synthetic oligonucleotide
  Antisense Strand to SEQ ID NO: 421903
uaaacuauucgaagcagac

SEQ ID NO: 421905 - RNA, 19 nt, Artificial Sequence
  Description of Artificial Sequence: Synthetic oligonucleotide
  Sense Strand Starting at position 1314 of SEQ ID NO: 318905
ugcuucgaauaguuuagaa

SEQ ID NO: 421906 - RNA, 19 nt, Artificial Sequence
  Description of Artificial Sequence: Synthetic oligonucleotide
  Antisense Strand to SEQ ID NO: 421905
uucuaaacuauucgaagca

SEQ ID NO: 421907 - RNA, 19 nt, Artificial Sequence
  Description of Artificial Sequence: Synthetic oligonucleotide
  Sense Strand Starting at position 1314 of SEQ ID NO: 318937
gaucgaguaccauguucua

SEQ ID NO: 421908 - RNA, 19 nt, Artificial Sequence
  Description of Artificial Sequence: Synthetic oligonucleotide
  Antisense Strand to SEQ ID NO: 421907
uagaacaugguacucgauc

SEQ ID NO: 421909 - RNA, 19 nt, Artificial Sequence
  Description of Artificial Sequence: Synthetic oligonucleotide
  Sense Strand Starting at position 1314 of SEQ ID NO: 318940
cgaguaccauguucuagaa

SEQ ID NO: 421910 - RNA, 19 nt, Artificial Sequence
  Description of Artificial Sequence: Synthetic oligonucleotide
  Antisense Strand to SEQ ID NO: 421909
uucuagaacaugguacucg

SEQ ID NO: 421911 - RNA, 19 nt, Artificial Sequence
  Description of Artificial Sequence: Synthetic oligonucleotide
  Sense Strand Starting at position 1314 of SEQ ID NO: 318952
ucuagaacugucgggaagu

SEQ ID NO: 421912 - RNA, 19 nt, Artificial Sequence
  Description of Artificial Sequence: Synthetic oligonucleotide
  Antisense Strand to SEQ ID NO: 421911
acuucccgacaguucuaga

SEQ ID NO: 421913 - RNA, 19 nt, Artificial Sequence
  Description of Artificial Sequence: Synthetic oligonucleotide
  Sense Strand Starting at position 1314 of SEQ ID NO: 318954
uagaacugucgggaaguga

SEQ ID NO: 421914 - RNA, 19 nt, Artificial Sequence
  Description of Artificial Sequence: Synthetic oligonucleotide
  Antisense Strand to SEQ ID NO: 421913
ucacuucccgacaguucua

SEQ ID NO: 421915 - RNA, 19 nt, Artificial Sequence
  Description of Artificial Sequence: Synthetic oligonucleotide
  Sense Strand Starting at position 1314 of SEQ ID NO: 318982
guaagaugaugccauauuu

SEQ ID NO: 421916 - RNA, 19 nt, Artificial Sequence
  Description of Artificial Sequence: Synthetic oligonucleotide
  Antisense Strand to SEQ ID NO: 421915
aaauauggcaucaucuuac

SEQ ID NO: 421917 - RNA, 19 nt, Artificial Sequence
  Description of Artificial Sequence: Synthetic oligonucleotide
  Sense Strand Starting at position 1314 of SEQ ID NO: 319002
gguccauguuaaucuacaa

SEQ ID NO: 421918 - RNA, 19 nt, Artificial Sequence
  Description of Artificial Sequence: Synthetic oligonucleotide
  Antisense Strand to SEQ ID NO: 421917
uuguagauuaacauggacc

SEQ ID NO: 421919 - RNA, 19 nt, Artificial Sequence
  Description of Artificial Sequence: Synthetic oligonucleotide
  Sense Strand Starting at position 1314 of SEQ ID NO: 319066
aaauaaaucuuugcagggu

SEQ ID NO: 421920 - RNA, 19 nt, Artificial Sequence
  Description of Artificial Sequence: Synthetic oligonucleotide
  Antisense Strand to SEQ ID NO: 421919
acccugcaaagauuuauuu

SEQ ID NO: 421921 - RNA, 19 nt, Artificial Sequence
  Description of Artificial Sequence: Synthetic oligonucleotide
  Sense Strand Starting at position 1314 of SEQ ID NO: 319069
uaaaucuuugcaggguauu

SEQ ID NO: 421922 - RNA, 19 nt, Artificial Sequence
  Description of Artificial Sequence: Synthetic oligonucleotide
  Antisense Strand to SEQ ID NO: 421921
aauacccugcaaagauuua

SEQ ID NO: 421923 - RNA, 19 nt, Artificial Sequence
  Description of Artificial Sequence: Synthetic oligonucleotide
  Sense Strand Starting at position 1314 of SEQ ID NO: 319152
agacuugacuuucugcauu

SEQ ID NO: 421924 - RNA, 19 nt, Artificial Sequence
  Description of Artificial Sequence: Synthetic oligonucleotide
  Antisense Strand to SEQ ID NO: 421923
aaugcagaaagucaagucu

SEQ ID NO: 421925 - RNA, 19 nt, Artificial Sequence
  Description of Artificial Sequence: Synthetic oligonucleotide
  Sense Strand Starting at position 1315 of SEQ ID NO: 315271
gcaugugguccugauacaa

SEQ ID NO: 421926 - RNA, 19 nt, Artificial Sequence
  Description of Artificial Sequence: Synthetic oligonucleotide
  Antisense Strand to SEQ ID NO: 421925
uuguaucaggaccacaugc

SEQ ID NO: 421927 - RNA, 19 nt, Artificial Sequence
  Description of Artificial Sequence: Synthetic oligonucleotide
  Sense Strand Starting at position 1315 of SEQ ID NO: 315299
uuucuucuguccuugagaa

SEQ ID NO: 421928 - RNA, 19 nt, Artificial Sequence
  Description of Artificial Sequence: Synthetic oligonucleotide
  Antisense Strand to SEQ ID NO: 421927
uucucaaggacagaagaaa

SEQ ID NO: 421929 - RNA, 19 nt, Artificial Sequence
  Description of Artificial Sequence: Synthetic oligonucleotide
  Sense Strand Starting at position 1315 of SEQ ID NO: 315300
uucuucuguccuugagaaa

SEQ ID NO: 421930 - RNA, 19 nt, Artificial Sequence
  Description of Artificial Sequence: Synthetic oligonucleotide
  Antisense Strand to SEQ ID NO: 421929
uuucucaaggacagaagaa

SEQ ID NO: 421931 - RNA, 19 nt, Artificial Sequence
  Description of Artificial Sequence: Synthetic oligonucleotide
  Sense Strand Starting at position 1315 of SEQ ID NO: 315301
ucuucuguccuugagaaag

SEQ ID NO: 421932 - RNA, 19 nt, Artificial Sequence
  Description of Artificial Sequence: Synthetic oligonucleotide
  Antisense Strand to SEQ ID NO: 421931
cuuucucaaggacagaaga

SEQ ID NO: 421933 - RNA, 19 nt, Artificial Sequence
  Description of Artificial Sequence: Synthetic oligonucleotide
  Sense Strand Starting at position 1315 of SEQ ID NO: 315370
acaucugaacaggguuauu

SEQ ID NO: 421934 - RNA, 19 nt, Artificial Sequence
  Description of Artificial Sequence: Synthetic oligonucleotide
  Antisense Strand to SEQ ID NO: 421933
aauaacccuguucagaugu

SEQ ID NO: 421935 - RNA, 19 nt, Artificial Sequence
  Description of Artificial Sequence: Synthetic oligonucleotide
  Sense Strand Starting at position 1315 of SEQ ID NO: 315460
gaaagcaugucagcaauac

SEQ ID NO: 421936 - RNA, 19 nt, Artificial Sequence
  Description of Artificial Sequence: Synthetic oligonucleotide
  Antisense Strand to SEQ ID NO: 421935
guauugcugacaugcuuuc

SEQ ID NO: 421937 - RNA, 19 nt, Artificial Sequence
  Description of Artificial Sequence: Synthetic oligonucleotide
  Sense Strand Starting at position 1315 of SEQ ID NO: 315464
gcaugucagcaauacauag

SEQ ID NO: 421938 - RNA, 19 nt, Artificial Sequence
  Description of Artificial Sequence: Synthetic oligonucleotide
  Antisense Strand to SEQ ID NO: 421937
cuauguauugcugacaugc

SEQ ID NO: 421939 - RNA, 19 nt, Artificial Sequence
  Description of Artificial Sequence: Synthetic oligonucleotide
  Sense Strand Starting at position 1315 of SEQ ID NO: 315511
ccugcuuguccucaugaca

SEQ ID NO: 421940 - RNA, 19 nt, Artificial Sequence
  Description of Artificial Sequence: Synthetic oligonucleotide
  Antisense Strand to SEQ ID NO: 421939
ugucaugaggacaagcagg

SEQ ID NO: 421941 - RNA, 19 nt, Artificial Sequence
  Description of Artificial Sequence: Synthetic oligonucleotide
  Sense Strand Starting at position 1315 of SEQ ID NO: 315514
gcuuguccucaugacaaag

SEQ ID NO: 421942 - RNA, 19 nt, Artificial Sequence
  Description of Artificial Sequence: Synthetic oligonucleotide
  Antisense Strand to SEQ ID NO: 421941
cuuugucaugaggacaagc

SEQ ID NO: 421943 - RNA, 19 nt, Artificial Sequence
  Description of Artificial Sequence: Synthetic oligonucleotide
  Sense Strand Starting at position 1315 of SEQ ID NO: 315609
ccaucuggcuccucaguua

SEQ ID NO: 421944 - RNA, 19 nt, Artificial Sequence
  Description of Artificial Sequence: Synthetic oligonucleotide
  Antisense Strand to SEQ ID NO: 421943
uaacugaggagccagaugg

SEQ ID NO: 421945 - RNA, 19 nt, Artificial Sequence
  Description of Artificial Sequence: Synthetic oligonucleotide
  Sense Strand Starting at position 1315 of SEQ ID NO: 315718
gggacaggccucugacauu

SEQ ID NO: 421946 - RNA, 19 nt, Artificial Sequence
  Description of Artificial Sequence: Synthetic oligonucleotide
  Antisense Strand to SEQ ID NO: 421945
aaugucagaggccuguccc

SEQ ID NO: 421947 - RNA, 19 nt, Artificial Sequence
  Description of Artificial Sequence: Synthetic oligonucleotide
  Sense Strand Starting at position 1315 of SEQ ID NO: 315768
ggaccaaucugccuugaaa

SEQ ID NO: 421948 - RNA, 19 nt, Artificial Sequence
  Description of Artificial Sequence: Synthetic oligonucleotide
  Antisense Strand to SEQ ID NO: 421947
uuucaaggcagauuggucc

SEQ ID NO: 421949 - RNA, 19 nt, Artificial Sequence
  Description of Artificial Sequence: Synthetic oligonucleotide
  Sense Strand Starting at position 1315 of SEQ ID NO: 315811
caauuagauacggguagga

SEQ ID NO: 421950 - RNA, 19 nt, Artificial Sequence
  Description of Artificial Sequence: Synthetic oligonucleotide
  Antisense Strand to SEQ ID NO: 421949
uccuacccguaucuaauug

SEQ ID NO: 421951 - RNA, 19 nt, Artificial Sequence
  Description of Artificial Sequence: Synthetic oligonucleotide
  Sense Strand Starting at position 1315 of SEQ ID NO: 315960
gugaacagaagucauguuu

SEQ ID NO: 421952 - RNA, 19 nt, Artificial Sequence
  Description of Artificial Sequence: Synthetic oligonucleotide
  Antisense Strand to SEQ ID NO: 421951
aaacaugacuucuguucac

SEQ ID NO: 421953 - RNA, 19 nt, Artificial Sequence
  Description of Artificial Sequence: Synthetic oligonucleotide
  Sense Strand Starting at position 1315 of SEQ ID NO: 315966
agaagucauguuugacagu

SEQ ID NO: 421954 - RNA, 19 nt, Artificial Sequence
  Description of Artificial Sequence: Synthetic oligonucleotide
  Antisense Strand to SEQ ID NO: 421953
acugucaaacaugacuucu

SEQ ID NO: 421955 - RNA, 19 nt, Artificial Sequence
  Description of Artificial Sequence: Synthetic oligonucleotide
  Sense Strand Starting at position 1315 of SEQ ID NO: 316203
ucaaacucuguagguuaau

SEQ ID NO: 421956 - RNA, 19 nt, Artificial Sequence
  Description of Artificial Sequence: Synthetic oligonucleotide
  Antisense Strand to SEQ ID NO: 421955
auuaaccuacagaguuuga

SEQ ID NO: 421957 - RNA, 19 nt, Artificial Sequence
  Description of Artificial Sequence: Synthetic oligonucleotide
  Sense Strand Starting at position 1315 of SEQ ID NO: 316294
uguagauaggcuuacaauu

SEQ ID NO: 421958 - RNA, 19 nt, Artificial Sequence
  Description of Artificial Sequence: Synthetic oligonucleotide
  Antisense Strand to SEQ ID NO: 421957
aauuguaagccuaucuaca

SEQ ID NO: 421959 - RNA, 19 nt, Artificial Sequence
  Description of Artificial Sequence: Synthetic oligonucleotide
  Sense Strand Starting at position 1315 of SEQ ID NO: 316496
guauacauaugucuugcaa

SEQ ID NO: 421960 - RNA, 19 nt, Artificial Sequence
  Description of Artificial Sequence: Synthetic oligonucleotide
  Antisense Strand to SEQ ID NO: 421959
uugcaagacauauguauac

SEQ ID NO: 421961 - RNA, 19 nt, Artificial Sequence
  Description of Artificial Sequence: Synthetic oligonucleotide
  Sense Strand Starting at position 1315 of SEQ ID NO: 316723
agcaacuccugggcuuaau

SEQ ID NO: 421962 - RNA, 19 nt, Artificial Sequence
  Description of Artificial Sequence: Synthetic oligonucleotide
  Antisense Strand to SEQ ID NO: 421961
auuaagcccaggaguugcu

SEQ ID NO: 421963 - RNA, 19 nt, Artificial Sequence
  Description of Artificial Sequence: Synthetic oligonucleotide
  Sense Strand Starting at position 1315 of SEQ ID NO: 316777
agauguuuauugccucuca

SEQ ID NO: 421964 - RNA, 19 nt, Artificial Sequence
  Description of Artificial Sequence: Synthetic oligonucleotide
  Antisense Strand to SEQ ID NO: 421963
ugagaggcaauaaacaucu

SEQ ID NO: 421965 - RNA, 19 nt, Artificial Sequence
  Description of Artificial Sequence: Synthetic oligonucleotide
  Sense Strand Starting at position 1315 of SEQ ID NO: 316816
guuuaaacaacggaagcau

SEQ ID NO: 421966 - RNA, 19 nt, Artificial Sequence
  Description of Artificial Sequence: Synthetic oligonucleotide
  Antisense Strand to SEQ ID NO: 421965
augcuuccguuguuuaaac

SEQ ID NO: 421967 - RNA, 19 nt, Artificial Sequence
  Description of Artificial Sequence: Synthetic oligonucleotide
  Sense Strand Starting at position 1315 of SEQ ID NO: 316895
gcaagauauaggcaguuuc

SEQ ID NO: 421968 - RNA, 19 nt, Artificial Sequence
  Description of Artificial Sequence: Synthetic oligonucleotide
  Antisense Strand to SEQ ID NO: 421967
gaaacugccuauaucuugc

SEQ ID NO: 421969 - RNA, 19 nt, Artificial Sequence
  Description of Artificial Sequence: Synthetic oligonucleotide
  Sense Strand Starting at position 1315 of SEQ ID NO: 316995
uuacaaacgugucucaauu

SEQ ID NO: 421970 - RNA, 19 nt, Artificial Sequence
  Description of Artificial Sequence: Synthetic oligonucleotide
  Antisense Strand to SEQ ID NO: 421969
aauugagacacguuuguaa

SEQ ID NO: 421971 - RNA, 19 nt, Artificial Sequence
  Description of Artificial Sequence: Synthetic oligonucleotide
  Sense Strand Starting at position 1315 of SEQ ID NO: 317007
cucaauucuguugagucaa

SEQ ID NO: 421972 - RNA, 19 nt, Artificial Sequence
  Description of Artificial Sequence: Synthetic oligonucleotide
  Antisense Strand to SEQ ID NO: 421971
uugacucaacagaauugag

SEQ ID NO: 421973 - RNA, 19 nt, Artificial Sequence
  Description of Artificial Sequence: Synthetic oligonucleotide
  Sense Strand Starting at position 1315 of SEQ ID NO: 317009
caauucuguugagucaaag

SEQ ID NO: 421974 - RNA, 19 nt, Artificial Sequence
  Description of Artificial Sequence: Synthetic oligonucleotide
  Antisense Strand to SEQ ID NO: 421973
cuuugacucaacagaauug

SEQ ID NO: 421975 - RNA, 19 nt, Artificial Sequence
  Description of Artificial Sequence: Synthetic oligonucleotide
  Sense Strand Starting at position 1315 of SEQ ID NO: 317106
cagucccuccuggguaauu

SEQ ID NO: 421976 - RNA, 19 nt, Artificial Sequence
  Description of Artificial Sequence: Synthetic oligonucleotide
  Antisense Strand to SEQ ID NO: 421975
aauuacccaggagggacug

SEQ ID NO: 421977 - RNA, 19 nt, Artificial Sequence
  Description of Artificial Sequence: Synthetic oligonucleotide
  Sense Strand Starting at position 1315 of SEQ ID NO: 317193
gaauuaauuccaugggcga

SEQ ID NO: 421978 - RNA, 19 nt, Artificial Sequence
  Description of Artificial Sequence: Synthetic oligonucleotide
  Antisense Strand to SEQ ID NO: 421977
ucgcccauggaauuaauuc

SEQ ID NO: 421979 - RNA, 19 nt, Artificial Sequence
  Description of Artificial Sequence: Synthetic oligonucleotide
  Sense Strand Starting at position 1315 of SEQ ID NO: 317195
auuaauuccaugggcgaga

SEQ ID NO: 421980 - RNA, 19 nt, Artificial Sequence
  Description of Artificial Sequence: Synthetic oligonucleotide
  Antisense Strand to SEQ ID NO: 421979
ucucgcccauggaauuaau

SEQ ID NO: 421981 - RNA, 19 nt, Artificial Sequence
  Description of Artificial Sequence: Synthetic oligonucleotide
  Sense Strand Starting at position 1315 of SEQ ID NO: 317382
ccgaauuaacaucguaugu

SEQ ID NO: 421982 - RNA, 19 nt, Artificial Sequence
  Description of Artificial Sequence: Synthetic oligonucleotide
  Antisense Strand to SEQ ID NO: 421981
acauacgauguuaauucgg

SEQ ID NO: 421983 - RNA, 19 nt, Artificial Sequence
  Description of Artificial Sequence: Synthetic oligonucleotide
  Sense Strand Starting at position 1315 of SEQ ID NO: 318020
caucgauuccagggcaaag

SEQ ID NO: 421984 - RNA, 19 nt, Artificial Sequence
  Description of Artificial Sequence: Synthetic oligonucleotide
  Antisense Strand to SEQ ID NO: 421983
cuuugcccuggaaucgaug

SEQ ID NO: 421985 - RNA, 19 nt, Artificial Sequence
  Description of Artificial Sequence: Synthetic oligonucleotide
  Sense Strand Starting at position 1315 of SEQ ID NO: 318054
aagguucccuuccugaaga

SEQ ID NO: 421986 - RNA, 19 nt, Artificial Sequence
  Description of Artificial Sequence: Synthetic oligonucleotide
  Antisense Strand to SEQ ID NO: 421985
ucuucaggaagggaaccuu

SEQ ID NO: 421987 - RNA, 19 nt, Artificial Sequence
  Description of Artificial Sequence: Synthetic oligonucleotide
  Sense Strand Starting at position 1315 of SEQ ID NO: 318056
gguucccuuccugaagaau

SEQ ID NO: 421988 - RNA, 19 nt, Artificial Sequence
  Description of Artificial Sequence: Synthetic oligonucleotide
  Antisense Strand to SEQ ID NO: 421987
auucuucaggaagggaacc

SEQ ID NO: 421989 - RNA, 19 nt, Artificial Sequence
  Description of Artificial Sequence: Synthetic oligonucleotide
  Sense Strand Starting at position 1315 of SEQ ID NO: 318580
gagagaaggcuccggcuau

SEQ ID NO: 421990 - RNA, 19 nt, Artificial Sequence
  Description of Artificial Sequence: Synthetic oligonucleotide
  Antisense Strand to SEQ ID NO: 421989
auagccggagccuucucuc

SEQ ID NO: 421991 - RNA, 19 nt, Artificial Sequence
  Description of Artificial Sequence: Synthetic oligonucleotide
  Sense Strand Starting at position 1315 of SEQ ID NO: 318787
cugcgacauguuuccgagu

SEQ ID NO: 421992 - RNA, 19 nt, Artificial Sequence
  Description of Artificial Sequence: Synthetic oligonucleotide
  Antisense Strand to SEQ ID NO: 421991
acucggaaacaugucgcag

SEQ ID NO: 421993 - RNA, 19 nt, Artificial Sequence
  Description of Artificial Sequence: Synthetic oligonucleotide
  Sense Strand Starting at position 1315 of SEQ ID NO: 318876
gcucaagcagcagagaaau

SEQ ID NO: 421994 - RNA, 19 nt, Artificial Sequence
  Description of Artificial Sequence: Synthetic oligonucleotide
  Antisense Strand to SEQ ID NO: 421993
auuucucugcugcuugagc

SEQ ID NO: 421995 - RNA, 19 nt, Artificial Sequence
  Description of Artificial Sequence: Synthetic oligonucleotide
  Sense Strand Starting at position 1315 of SEQ ID NO: 318897
auaacagauucggcggauu

SEQ ID NO: 421996 - RNA, 19 nt, Artificial Sequence
  Description of Artificial Sequence: Synthetic oligonucleotide
  Antisense Strand to SEQ ID NO: 421995
aauccgccgaaucuguuau

SEQ ID NO: 421997 - RNA, 19 nt, Artificial Sequence
  Description of Artificial Sequence: Synthetic oligonucleotide
  Sense Strand Starting at position 1315 of SEQ ID NO: 318899
aacagauucggcggauuac

SEQ ID NO: 421998 - RNA, 19 nt, Artificial Sequence
  Description of Artificial Sequence: Synthetic oligonucleotide
  Antisense Strand to SEQ ID NO: 421997
guaauccgccgaaucuguu

SEQ ID NO: 421999 - RNA, 19 nt, Artificial Sequence
  Description of Artificial Sequence: Synthetic oligonucleotide
  Sense Strand Starting at position 1315 of SEQ ID NO: 318900
acagauucggcggauuaca

SEQ ID NO: 422000 - RNA, 19 nt, Artificial Sequence
  Description of Artificial Sequence: Synthetic oligonucleotide
  Antisense Strand to SEQ ID NO: 421999
uguaauccgccgaaucugu

SEQ ID NO: 422001 - RNA, 19 nt, Artificial Sequence
  Description of Artificial Sequence: Synthetic oligonucleotide
  Sense Strand Starting at position 1315 of SEQ ID NO: 318918
agcggaucucuuuguuaga

SEQ ID NO: 422002 - RNA, 19 nt, Artificial Sequence
  Description of Artificial Sequence: Synthetic oligonucleotide
  Antisense Strand to SEQ ID NO: 422001
ucuaacaaagagauccgcu

SEQ ID NO: 422003 - RNA, 19 nt, Artificial Sequence
  Description of Artificial Sequence: Synthetic oligonucleotide
  Sense Strand Starting at position 1315 of SEQ ID NO: 318919
gcggaucucuuuguuagag

SEQ ID NO: 422004 - RNA, 19 nt, Artificial Sequence
  Description of Artificial Sequence: Synthetic oligonucleotide
  Antisense Strand to SEQ ID NO: 422003
cucuaacaaagagauccgc

SEQ ID NO: 422005 - RNA, 19 nt, Artificial Sequence
  Description of Artificial Sequence: Synthetic oligonucleotide
  Sense Strand Starting at position 1316 of SEQ ID NO: 315300
ggcccaaguuacuuccaaa

SEQ ID NO: 422006 - RNA, 19 nt, Artificial Sequence
  Description of Artificial Sequence: Synthetic oligonucleotide
  Antisense Strand to SEQ ID NO: 422005
uuuggaaguaacuugggcc

SEQ ID NO: 422007 - RNA, 19 nt, Artificial Sequence
  Description of Artificial Sequence: Synthetic oligonucleotide
  Sense Strand Starting at position 1316 of SEQ ID NO: 315421
ggucuccagacuugaaguu

SEQ ID NO: 422008 - RNA, 19 nt, Artificial Sequence
  Description of Artificial Sequence: Synthetic oligonucleotide
  Antisense Strand to SEQ ID NO: 422007
aacuucaagucuggagacc

SEQ ID NO: 422009 - RNA, 19 nt, Artificial Sequence
  Description of Artificial Sequence: Synthetic oligonucleotide
  Sense Strand Starting at position 1316 of SEQ ID NO: 315480
guuauuugcuuccaggaaa

SEQ ID NO: 422010 - RNA, 19 nt, Artificial Sequence
  Description of Artificial Sequence: Synthetic oligonucleotide
  Antisense Strand to SEQ ID NO: 422009
uuuccuggaagcaaauaac

SEQ ID NO: 422011 - RNA, 19 nt, Artificial Sequence
  Description of Artificial Sequence: Synthetic oligonucleotide
  Sense Strand Starting at position 1316 of SEQ ID NO: 315618
acuuauguugcaggaagaa

SEQ ID NO: 422012 - RNA, 19 nt, Artificial Sequence
  Description of Artificial Sequence: Synthetic oligonucleotide
  Antisense Strand to SEQ ID NO: 422011
uucuuccugcaacauaagu

SEQ ID NO: 422013 - RNA, 19 nt, Artificial Sequence
  Description of Artificial Sequence: Synthetic oligonucleotide
  Sense Strand Starting at position 1316 of SEQ ID NO: 315677
gagugugugauucggcuuu

SEQ ID NO: 422014 - RNA, 19 nt, Artificial Sequence
  Description of Artificial Sequence: Synthetic oligonucleotide
  Antisense Strand to SEQ ID NO: 422013
aaagccgaaucacacacuc

SEQ ID NO: 422015 - RNA, 19 nt, Artificial Sequence
  Description of Artificial Sequence: Synthetic oligonucleotide
  Sense Strand Starting at position 1316 of SEQ ID NO: 315679
gugugugauucggcuuuaa

SEQ ID NO: 422016 - RNA, 19 nt, Artificial Sequence
  Description of Artificial Sequence: Synthetic oligonucleotide
  Antisense Strand to SEQ ID NO: 422015
uuaaagccgaaucacacac

SEQ ID NO: 422017 - RNA, 19 nt, Artificial Sequence
  Description of Artificial Sequence: Synthetic oligonucleotide
  Sense Strand Starting at position 1316 of SEQ ID NO: 315683
gugauucggcuuuaacaua

SEQ ID NO: 422018 - RNA, 19 nt, Artificial Sequence
  Description of Artificial Sequence: Synthetic oligonucleotide
  Antisense Strand to SEQ ID NO: 422017
uauguuaaagccgaaucac

SEQ ID NO: 422019 - RNA, 19 nt, Artificial Sequence
  Description of Artificial Sequence: Synthetic oligonucleotide
  Sense Strand Starting at position 1316 of SEQ ID NO: 315898
cccaguggcggcuaauaau

SEQ ID NO: 422020 - RNA, 19 nt, Artificial Sequence
  Description of Artificial Sequence: Synthetic oligonucleotide
  Antisense Strand to SEQ ID NO: 422019
auuauuagccgccacuggg

SEQ ID NO: 422021 - RNA, 19 nt, Artificial Sequence
  Description of Artificial Sequence: Synthetic oligonucleotide
  Sense Strand Starting at position 1316 of SEQ ID NO: 315907
ggcuaauaaugcuaauaac

SEQ ID NO: 422022 - RNA, 19 nt, Artificial Sequence
  Description of Artificial Sequence: Synthetic oligonucleotide
  Antisense Strand to SEQ ID NO: 422021
guuauuagcauuauuagcc

SEQ ID NO: 422023 - RNA, 19 nt, Artificial Sequence
  Description of Artificial Sequence: Synthetic oligonucleotide
  Sense Strand Starting at position 1316 of SEQ ID NO: 315991
gccugaagcgcucgaguua

SEQ ID NO: 422024 - RNA, 19 nt, Artificial Sequence
  Description of Artificial Sequence: Synthetic oligonucleotide
  Antisense Strand to SEQ ID NO: 422023
uaacucgagcgcuucaggc

SEQ ID NO: 422025 - RNA, 19 nt, Artificial Sequence
  Description of Artificial Sequence: Synthetic oligonucleotide
  Sense Strand Starting at position 1316 of SEQ ID NO: 316000
gcucgaguuacucggccaa

SEQ ID NO: 422026 - RNA, 19 nt, Artificial Sequence
  Description of Artificial Sequence: Synthetic oligonucleotide
  Antisense Strand to SEQ ID NO: 422025
uuggccgaguaacucgagc

SEQ ID NO: 422027 - RNA, 19 nt, Artificial Sequence
  Description of Artificial Sequence: Synthetic oligonucleotide
  Sense Strand Starting at position 1316 of SEQ ID NO: 316177
gcagugggcgcuugguaaa

SEQ ID NO: 422028 - RNA, 19 nt, Artificial Sequence
  Description of Artificial Sequence: Synthetic oligonucleotide
  Antisense Strand to SEQ ID NO: 422027
uuuaccaagcgcccacugc

SEQ ID NO: 422029 - RNA, 19 nt, Artificial Sequence
  Description of Artificial Sequence: Synthetic oligonucleotide
  Sense Strand Starting at position 1316 of SEQ ID NO: 316180
gugggcgcuugguaaauau

SEQ ID NO: 422030 - RNA, 19 nt, Artificial Sequence
  Description of Artificial Sequence: Synthetic oligonucleotide
  Antisense Strand to SEQ ID NO: 422029
auauuuaccaagcgcccac

SEQ ID NO: 422031 - RNA, 19 nt, Artificial Sequence
  Description of Artificial Sequence: Synthetic oligonucleotide
  Sense Strand Starting at position 1316 of SEQ ID NO: 316249
acucgauguucucagagca

SEQ ID NO: 422032 - RNA, 19 nt, Artificial Sequence
  Description of Artificial Sequence: Synthetic oligonucleotide
  Antisense Strand to SEQ ID NO: 422031
ugcucugagaacaucgagu

SEQ ID NO: 422033 - RNA, 19 nt, Artificial Sequence
  Description of Artificial Sequence: Synthetic oligonucleotide
  Sense Strand Starting at position 1316 of SEQ ID NO: 316268
aaaggaaagucgucaguga

SEQ ID NO: 422034 - RNA, 19 nt, Artificial Sequence
  Description of Artificial Sequence: Synthetic oligonucleotide
  Antisense Strand to SEQ ID NO: 422033
ucacugacgacuuuccuuu

SEQ ID NO: 422035 - RNA, 19 nt, Artificial Sequence
  Description of Artificial Sequence: Synthetic oligonucleotide
  Sense Strand Starting at position 1316 of SEQ ID NO: 316269
aaggaaagucgucagugaa

SEQ ID NO: 422036 - RNA, 19 nt, Artificial Sequence
  Description of Artificial Sequence: Synthetic oligonucleotide
  Antisense Strand to SEQ ID NO: 422035
uucacugacgacuuuccuu

SEQ ID NO: 422037 - RNA, 19 nt, Artificial Sequence
  Description of Artificial Sequence: Synthetic oligonucleotide
  Sense Strand Starting at position 1316 of SEQ ID NO: 316290
gcacucaguuugucuacua

SEQ ID NO: 422038 - RNA, 19 nt, Artificial Sequence
  Description of Artificial Sequence: Synthetic oligonucleotide
  Antisense Strand to SEQ ID NO: 422037
uaguagacaaacugagugc

SEQ ID NO: 422039 - RNA, 19 nt, Artificial Sequence
  Description of Artificial Sequence: Synthetic oligonucleotide
  Sense Strand Starting at position 1316 of SEQ ID NO: 316370
aagugaucuccugggacac

SEQ ID NO: 422040 - RNA, 19 nt, Artificial Sequence
  Description of Artificial Sequence: Synthetic oligonucleotide
  Antisense Strand to SEQ ID NO: 422039
gugucccaggagaucacuu

SEQ ID NO: 422041 - RNA, 19 nt, Artificial Sequence
  Description of Artificial Sequence: Synthetic oligonucleotide
  Sense Strand Starting at position 1316 of SEQ ID NO: 316371
agugaucuccugggacacu

SEQ ID NO: 422042 - RNA, 19 nt, Artificial Sequence
  Description of Artificial Sequence: Synthetic oligonucleotide
  Antisense Strand to SEQ ID NO: 422041
agugucccaggagaucacu

SEQ ID NO: 422043 - RNA, 19 nt, Artificial Sequence
  Description of Artificial Sequence: Synthetic oligonucleotide
  Sense Strand Starting at position 1316 of SEQ ID NO: 316781
cugggaugcgcccaggaau

SEQ ID NO: 422044 - RNA, 19 nt, Artificial Sequence
  Description of Artificial Sequence: Synthetic oligonucleotide
  Antisense Strand to SEQ ID NO: 422043
auuccugggcgcaucccag

SEQ ID NO: 422045 - RNA, 19 nt, Artificial Sequence
  Description of Artificial Sequence: Synthetic oligonucleotide
  Sense Strand Starting at position 1316 of SEQ ID NO: 316962
cccaaaugugggcgugauu

SEQ ID NO: 422046 - RNA, 19 nt, Artificial Sequence
  Description of Artificial Sequence: Synthetic oligonucleotide
  Antisense Strand to SEQ ID NO: 422045
aaucacgcccacauuuggg

SEQ ID NO: 422047 - RNA, 19 nt, Artificial Sequence
  Description of Artificial Sequence: Synthetic oligonucleotide
  Sense Strand Starting at position 1316 of SEQ ID NO: 317189
gccgaaacgucugcuucca

SEQ ID NO: 422048 - RNA, 19 nt, Artificial Sequence
  Description of Artificial Sequence: Synthetic oligonucleotide
  Antisense Strand to SEQ ID NO: 422047
uggaagcagacguuucggc

SEQ ID NO: 422049 - RNA, 19 nt, Artificial Sequence
  Description of Artificial Sequence: Synthetic oligonucleotide
  Sense Strand Starting at position 1316 of SEQ ID NO: 317191
cgaaacgucugcuuccaga

SEQ ID NO: 422050 - RNA, 19 nt, Artificial Sequence
  Description of Artificial Sequence: Synthetic oligonucleotide
  Antisense Strand to SEQ ID NO: 422049
ucuggaagcagacguuucg

SEQ ID NO: 422051 - RNA, 19 nt, Artificial Sequence
  Description of Artificial Sequence: Synthetic oligonucleotide
  Sense Strand Starting at position 1316 of SEQ ID NO: 317365
ccaucugagcugcaagagu

SEQ ID NO: 422052 - RNA, 19 nt, Artificial Sequence
  Description of Artificial Sequence: Synthetic oligonucleotide
  Antisense Strand to SEQ ID NO: 422051
acucuugcagcucagaugg

SEQ ID NO: 422053 - RNA, 19 nt, Artificial Sequence
  Description of Artificial Sequence: Synthetic oligonucleotide
  Sense Strand Starting at position 1316 of SEQ ID NO: 317541
uuucucucuucggguugau

SEQ ID NO: 422054 - RNA, 19 nt, Artificial Sequence
  Description of Artificial Sequence: Synthetic oligonucleotide
  Antisense Strand to SEQ ID NO: 422053
aucaacccgaagagagaaa

SEQ ID NO: 422055 - RNA, 19 nt, Artificial Sequence
  Description of Artificial Sequence: Synthetic oligonucleotide
  Sense Strand Starting at position 1316 of SEQ ID NO: 317852
agcagauuuccacgcgauc

SEQ ID NO: 422056 - RNA, 19 nt, Artificial Sequence
  Description of Artificial Sequence: Synthetic oligonucleotide
  Antisense Strand to SEQ ID NO: 422055
gaucgcguggaaaucugcu

SEQ ID NO: 422057 - RNA, 19 nt, Artificial Sequence
  Description of Artificial Sequence: Synthetic oligonucleotide
  Sense Strand Starting at position 1316 of SEQ ID NO: 317990
guguucucagaaggaagaa

SEQ ID NO: 422058 - RNA, 19 nt, Artificial Sequence
  Description of Artificial Sequence: Synthetic oligonucleotide
  Antisense Strand to SEQ ID NO: 422057
uucuuccuucugagaacac

SEQ ID NO: 422059 - RNA, 19 nt, Artificial Sequence
  Description of Artificial Sequence: Synthetic oligonucleotide
  Sense Strand Starting at position 1316 of SEQ ID NO: 318149
augacaaacucugcaggau

SEQ ID NO: 422060 - RNA, 19 nt, Artificial Sequence
  Description of Artificial Sequence: Synthetic oligonucleotide
  Antisense Strand to SEQ ID NO: 422059
auccugcagaguuugucau

SEQ ID NO: 422061 - RNA, 19 nt, Artificial Sequence
  Description of Artificial Sequence: Synthetic oligonucleotide
  Sense Strand Starting at position 1316 of SEQ ID NO: 318420
ggagacugcugccuugaca

SEQ ID NO: 422062 - RNA, 19 nt, Artificial Sequence
  Description of Artificial Sequence: Synthetic oligonucleotide
  Antisense Strand to SEQ ID NO: 422061
ugucaaggcagcagucucc

SEQ ID NO: 422063 - RNA, 19 nt, Artificial Sequence
  Description of Artificial Sequence: Synthetic oligonucleotide
  Sense Strand Starting at position 1316 of SEQ ID NO: 318558
gguagugggaugcaugauu

SEQ ID NO: 422064 - RNA, 19 nt, Artificial Sequence
  Description of Artificial Sequence: Synthetic oligonucleotide
  Antisense Strand to SEQ ID NO: 422063
aaucaugcaucccacuacc

SEQ ID NO: 422065 - RNA, 19 nt, Artificial Sequence
  Description of Artificial Sequence: Synthetic oligonucleotide
  Sense Strand Starting at position 1316 of SEQ ID NO: 318566
gaugcaugauugcucaucu

SEQ ID NO: 422066 - RNA, 19 nt, Artificial Sequence
  Description of Artificial Sequence: Synthetic oligonucleotide
  Antisense Strand to SEQ ID NO: 422065
agaugagcaaucaugcauc

SEQ ID NO: 422067 - RNA, 19 nt, Artificial Sequence
  Description of Artificial Sequence: Synthetic oligonucleotide
  Sense Strand Starting at position 1316 of SEQ ID NO: 318652
gugaggagauugcgaaguu

SEQ ID NO: 422068 - RNA, 19 nt, Artificial Sequence
  Description of Artificial Sequence: Synthetic oligonucleotide
  Antisense Strand to SEQ ID NO: 422067
aacuucgcaaucuccucac

SEQ ID NO: 422069 - RNA, 19 nt, Artificial Sequence
  Description of Artificial Sequence: Synthetic oligonucleotide
  Sense Strand Starting at position 1316 of SEQ ID NO: 318653
ugaggagauugcgaaguuu

SEQ ID NO: 422070 - RNA, 19 nt, Artificial Sequence
  Description of Artificial Sequence: Synthetic oligonucleotide
  Antisense Strand to SEQ ID NO: 422069
aaacuucgcaaucuccuca

SEQ ID NO: 422071 - RNA, 19 nt, Artificial Sequence
  Description of Artificial Sequence: Synthetic oligonucleotide
  Sense Strand Starting at position 1316 of SEQ ID NO: 318659
gauugcgaaguuuggcaaa

SEQ ID NO: 422072 - RNA, 19 nt, Artificial Sequence
  Description of Artificial Sequence: Synthetic oligonucleotide
  Antisense Strand to SEQ ID NO: 422071
uuugccaaacuucgcaauc

SEQ ID NO: 422073 - RNA, 19 nt, Artificial Sequence
  Description of Artificial Sequence: Synthetic oligonucleotide
  Sense Strand Starting at position 1316 of SEQ ID NO: 318754
guggauuuguguccgcuac

SEQ ID NO: 422074 - RNA, 19 nt, Artificial Sequence
  Description of Artificial Sequence: Synthetic oligonucleotide
  Antisense Strand to SEQ ID NO: 422073
guagcggacacaaauccac

SEQ ID NO: 422075 - RNA, 19 nt, Artificial Sequence
  Description of Artificial Sequence: Synthetic oligonucleotide
  Sense Strand Starting at position 1316 of SEQ ID NO: 318756
ggauuuguguccgcuaccu

SEQ ID NO: 422076 - RNA, 19 nt, Artificial Sequence
  Description of Artificial Sequence: Synthetic oligonucleotide
  Antisense Strand to SEQ ID NO: 422075
agguagcggacacaaaucc

SEQ ID NO: 422077 - RNA, 19 nt, Artificial Sequence
  Description of Artificial Sequence: Synthetic oligonucleotide
  Sense Strand Starting at position 1316 of SEQ ID NO: 318815
acuggagcguaauaguuau

SEQ ID NO: 422078 - RNA, 19 nt, Artificial Sequence
  Description of Artificial Sequence: Synthetic oligonucleotide
  Antisense Strand to SEQ ID NO: 422077
auaacuauuacgcuccagu

SEQ ID NO: 422079 - RNA, 19 nt, Artificial Sequence
  Description of Artificial Sequence: Synthetic oligonucleotide
  Sense Strand Starting at position 1316 of SEQ ID NO: 319163
caaagauggcagugugaac

SEQ ID NO: 422080 - RNA, 19 nt, Artificial Sequence
  Description of Artificial Sequence: Synthetic oligonucleotide
  Antisense Strand to SEQ ID NO: 422079
guucacacugccaucuuug

SEQ ID NO: 422081 - RNA, 19 nt, Artificial Sequence
  Description of Artificial Sequence: Synthetic oligonucleotide
  Sense Strand Starting at position 1316 of SEQ ID NO: 319174
gugugaacuucccaccaag

SEQ ID NO: 422082 - RNA, 19 nt, Artificial Sequence
  Description of Artificial Sequence: Synthetic oligonucleotide
  Antisense Strand to SEQ ID NO: 422081
cuuggugggaaguucacac

SEQ ID NO: 422083 - RNA, 19 nt, Artificial Sequence
  Description of Artificial Sequence: Synthetic oligonucleotide
  Sense Strand Starting at position 1316 of SEQ ID NO: 319200
gacagaugcuccugcuuag

SEQ ID NO: 422084 - RNA, 19 nt, Artificial Sequence
  Description of Artificial Sequence: Synthetic oligonucleotide
  Antisense Strand to SEQ ID NO: 422083
cuaagcaggagcaucuguc

SEQ ID NO: 422085 - RNA, 19 nt, Artificial Sequence
  Description of Artificial Sequence: Synthetic oligonucleotide
  Sense Strand Starting at position 1317 of SEQ ID NO: 315562
gcgaaucaauaacacuuaa

SEQ ID NO: 422086 - RNA, 19 nt, Artificial Sequence
  Description of Artificial Sequence: Synthetic oligonucleotide
  Antisense Strand to SEQ ID NO: 422085
uuaaguguuauugauucgc

SEQ ID NO: 422087 - RNA, 19 nt, Artificial Sequence
  Description of Artificial Sequence: Synthetic oligonucleotide
  Sense Strand Starting at position 1317 of SEQ ID NO: 315871
gugugugagaccuaccaag

SEQ ID NO: 422088 - RNA, 19 nt, Artificial Sequence
  Description of Artificial Sequence: Synthetic oligonucleotide
  Antisense Strand to SEQ ID NO: 422087
cuugguaggucucacacac

SEQ ID NO: 422089 - RNA, 19 nt, Artificial Sequence
  Description of Artificial Sequence: Synthetic oligonucleotide
  Sense Strand Starting at position 1317 of SEQ ID NO: 315958
acacgcguugucuuaagua

SEQ ID NO: 422090 - RNA, 19 nt, Artificial Sequence
  Description of Artificial Sequence: Synthetic oligonucleotide
  Antisense Strand to SEQ ID NO: 422089
uacuuaagacaacgcgugu

SEQ ID NO: 422091 - RNA, 19 nt, Artificial Sequence
  Description of Artificial Sequence: Synthetic oligonucleotide
  Sense Strand Starting at position 1317 of SEQ ID NO: 316493
gcuugauguuccugcuaga

SEQ ID NO: 422092 - RNA, 19 nt, Artificial Sequence
  Description of Artificial Sequence: Synthetic oligonucleotide
  Antisense Strand to SEQ ID NO: 422091
ucuagcaggaacaucaagc

SEQ ID NO: 422093 - RNA, 19 nt, Artificial Sequence
  Description of Artificial Sequence: Synthetic oligonucleotide
  Sense Strand Starting at position 1317 of SEQ ID NO: 316496
ugauguuccugcuagaccu

SEQ ID NO: 422094 - RNA, 19 nt, Artificial Sequence
  Description of Artificial Sequence: Synthetic oligonucleotide
  Antisense Strand to SEQ ID NO: 422093
aggucuagcaggaacauca

SEQ ID NO: 422095 - RNA, 19 nt, Artificial Sequence
  Description of Artificial Sequence: Synthetic oligonucleotide
  Sense Strand Starting at position 1317 of SEQ ID NO: 316749
cagagaagcuguggaaguu

SEQ ID NO: 422096 - RNA, 19 nt, Artificial Sequence
  Description of Artificial Sequence: Synthetic oligonucleotide
  Antisense Strand to SEQ ID NO: 422095
aacuuccacagcuucucug

SEQ ID NO: 422097 - RNA, 19 nt, Artificial Sequence
  Description of Artificial Sequence: Synthetic oligonucleotide
  Sense Strand Starting at position 1317 of SEQ ID NO: 316810
cgugccaacuuugucgaaa

SEQ ID NO: 422098 - RNA, 19 nt, Artificial Sequence
  Description of Artificial Sequence: Synthetic oligonucleotide
  Antisense Strand to SEQ ID NO: 422097
uuucgacaaaguuggcacg

SEQ ID NO: 422099 - RNA, 19 nt, Artificial Sequence
  Description of Artificial Sequence: Synthetic oligonucleotide
  Sense Strand Starting at position 1317 of SEQ ID NO: 316811
gugccaacuuugucgaaac

SEQ ID NO: 422100 - RNA, 19 nt, Artificial Sequence
  Description of Artificial Sequence: Synthetic oligonucleotide
  Antisense Strand to SEQ ID NO: 422099
guuucgacaaaguuggcac

SEQ ID NO: 422101 - RNA, 19 nt, Artificial Sequence
  Description of Artificial Sequence: Synthetic oligonucleotide
  Sense Strand Starting at position 1317 of SEQ ID NO: 316812
ugccaacuuugucgaaaca

SEQ ID NO: 422102 - RNA, 19 nt, Artificial Sequence
  Description of Artificial Sequence: Synthetic oligonucleotide
  Antisense Strand to SEQ ID NO: 422101
uguuucgacaaaguuggca

SEQ ID NO: 422103 - RNA, 19 nt, Artificial Sequence
  Description of Artificial Sequence: Synthetic oligonucleotide
  Sense Strand Starting at position 1317 of SEQ ID NO: 316913
ccgcgcuuuccgguucaua

SEQ ID NO: 422104 - RNA, 19 nt, Artificial Sequence
  Description of Artificial Sequence: Synthetic oligonucleotide
  Antisense Strand to SEQ ID NO: 422103
uaugaaccggaaagcgcgg

SEQ ID NO: 422105 - RNA, 19 nt, Artificial Sequence
  Description of Artificial Sequence: Synthetic oligonucleotide
  Sense Strand Starting at position 1317 of SEQ ID NO: 316915
gcgcuuuccgguucauagu

SEQ ID NO: 422106 - RNA, 19 nt, Artificial Sequence
  Description of Artificial Sequence: Synthetic oligonucleotide
  Antisense Strand to SEQ ID NO: 422105
acuaugaaccggaaagcgc

SEQ ID NO: 422107 - RNA, 19 nt, Artificial Sequence
  Description of Artificial Sequence: Synthetic oligonucleotide
  Sense Strand Starting at position 1317 of SEQ ID NO: 317660
ggcugacuggcucagugua

SEQ ID NO: 422108 - RNA, 19 nt, Artificial Sequence
  Description of Artificial Sequence: Synthetic oligonucleotide
  Antisense Strand to SEQ ID NO: 422107
uacacugagccagucagcc

SEQ ID NO: 422109 - RNA, 19 nt, Artificial Sequence
  Description of Artificial Sequence: Synthetic oligonucleotide
  Sense Strand Starting at position 1317 of SEQ ID NO: 317662
cugacuggcucaguguauu

SEQ ID NO: 422110 - RNA, 19 nt, Artificial Sequence
  Description of Artificial Sequence: Synthetic oligonucleotide
  Antisense Strand to SEQ ID NO: 422109
aauacacugagccagucag

SEQ ID NO: 422111 - RNA, 19 nt, Artificial Sequence
  Description of Artificial Sequence: Synthetic oligonucleotide
  Sense Strand Starting at position 1317 of SEQ ID NO: 317674
guguauuucuucccuacuc

SEQ ID NO: 422112 - RNA, 19 nt, Artificial Sequence
  Description of Artificial Sequence: Synthetic oligonucleotide
  Antisense Strand to SEQ ID NO: 422111
gaguagggaagaaauacac

SEQ ID NO: 422113 - RNA, 19 nt, Artificial Sequence
  Description of Artificial Sequence: Synthetic oligonucleotide
  Sense Strand Starting at position 1317 of SEQ ID NO: 317750
ccugcuguuagccgacaga

SEQ ID NO: 422114 - RNA, 19 nt, Artificial Sequence
  Description of Artificial Sequence: Synthetic oligonucleotide
  Antisense Strand to SEQ ID NO: 422113
ucugucggcuaacagcagg

SEQ ID NO: 422115 - RNA, 19 nt, Artificial Sequence
  Description of Artificial Sequence: Synthetic oligonucleotide
  Sense Strand Starting at position 1317 of SEQ ID NO: 318005
gucuaaccgucccuggaaa

SEQ ID NO: 422116 - RNA, 19 nt, Artificial Sequence
  Description of Artificial Sequence: Synthetic oligonucleotide
  Antisense Strand to SEQ ID NO: 422115
uuuccagggacgguuagac

SEQ ID NO: 422117 - RNA, 19 nt, Artificial Sequence
  Description of Artificial Sequence: Synthetic oligonucleotide
  Sense Strand Starting at position 1317 of SEQ ID NO: 318006
ucuaaccgucccuggaaau

SEQ ID NO: 422118 - RNA, 19 nt, Artificial Sequence
  Description of Artificial Sequence: Synthetic oligonucleotide
  Antisense Strand to SEQ ID NO: 422117
auuuccagggacgguuaga

SEQ ID NO: 422119 - RNA, 19 nt, Artificial Sequence
  Description of Artificial Sequence: Synthetic oligonucleotide
  Sense Strand Starting at position 1317 of SEQ ID NO: 318007
cuaaccgucccuggaaauu

SEQ ID NO: 422120 - RNA, 19 nt, Artificial Sequence
  Description of Artificial Sequence: Synthetic oligonucleotide
  Antisense Strand to SEQ ID NO: 422119
aauuuccagggacgguuag

SEQ ID NO: 422121 - RNA, 19 nt, Artificial Sequence
  Description of Artificial Sequence: Synthetic oligonucleotide
  Sense Strand Starting at position 1317 of SEQ ID NO: 318198
gacugagcucccugggagu

SEQ ID NO: 422122 - RNA, 19 nt, Artificial Sequence
  Description of Artificial Sequence: Synthetic oligonucleotide
  Antisense Strand to SEQ ID NO: 422121
acucccagggagcucaguc

SEQ ID NO: 422123 - RNA, 19 nt, Artificial Sequence
  Description of Artificial Sequence: Synthetic oligonucleotide
  Sense Strand Starting at position 1317 of SEQ ID NO: 318323
gaagguguuugcccagagu

SEQ ID NO: 422124 - RNA, 19 nt, Artificial Sequence
  Description of Artificial Sequence: Synthetic oligonucleotide
  Antisense Strand to SEQ ID NO: 422123
acucugggcaaacaccuuc

SEQ ID NO: 422125 - RNA, 19 nt, Artificial Sequence
  Description of Artificial Sequence: Synthetic oligonucleotide
  Sense Strand Starting at position 1317 of SEQ ID NO: 318614
aacagaguugcagauagua

SEQ ID NO: 422126 - RNA, 19 nt, Artificial Sequence
  Description of Artificial Sequence: Synthetic oligonucleotide
  Antisense Strand to SEQ ID NO: 422125
uacuaucugcaacucuguu

SEQ ID NO: 422127 - RNA, 19 nt, Artificial Sequence
  Description of Artificial Sequence: Synthetic oligonucleotide
  Sense Strand Starting at position 1317 of SEQ ID NO: 318616
cagaguugcagauaguaga

SEQ ID NO: 422128 - RNA, 19 nt, Artificial Sequence
  Description of Artificial Sequence: Synthetic oligonucleotide
  Antisense Strand to SEQ ID NO: 422127
ucuacuaucugcaacucug

SEQ ID NO: 422129 - RNA, 19 nt, Artificial Sequence
  Description of Artificial Sequence: Synthetic oligonucleotide
  Sense Strand Starting at position 1317 of SEQ ID NO: 318633
gaccauuaagcagggugau

SEQ ID NO: 422130 - RNA, 19 nt, Artificial Sequence
  Description of Artificial Sequence: Synthetic oligonucleotide
  Antisense Strand to SEQ ID NO: 422129
aucacccugcuuaaugguc

SEQ ID NO: 422131 - RNA, 19 nt, Artificial Sequence
  Description of Artificial Sequence: Synthetic oligonucleotide
  Sense Strand Starting at position 1317 of SEQ ID NO: 318658
gggaauacuggguguugga

SEQ ID NO: 422132 - RNA, 19 nt, Artificial Sequence
  Description of Artificial Sequence: Synthetic oligonucleotide
  Antisense Strand to SEQ ID NO: 422131
uccaacacccaguauuccc

SEQ ID NO: 422133 - RNA, 19 nt, Artificial Sequence
  Description of Artificial Sequence: Synthetic oligonucleotide
  Sense Strand Starting at position 1317 of SEQ ID NO: 318665
cuggguguuggaggguuaa

SEQ ID NO: 422134 - RNA, 19 nt, Artificial Sequence
  Description of Artificial Sequence: Synthetic oligonucleotide
  Antisense Strand to SEQ ID NO: 422133
uuaacccuccaacacccag

SEQ ID NO: 422135 - RNA, 19 nt, Artificial Sequence
  Description of Artificial Sequence: Synthetic oligonucleotide
  Sense Strand Starting at position 1317 of SEQ ID NO: 318666
uggguguuggaggguuaau

SEQ ID NO: 422136 - RNA, 19 nt, Artificial Sequence
  Description of Artificial Sequence: Synthetic oligonucleotide
  Antisense Strand to SEQ ID NO: 422135
auuaacccuccaacaccca

SEQ ID NO: 422137 - RNA, 19 nt, Artificial Sequence
  Description of Artificial Sequence: Synthetic oligonucleotide
  Sense Strand Starting at position 1317 of SEQ ID NO: 318892
cgucaaggagcuuggauuu

SEQ ID NO: 422138 - RNA, 19 nt, Artificial Sequence
  Description of Artificial Sequence: Synthetic oligonucleotide
  Antisense Strand to SEQ ID NO: 422137
aaauccaagcuccuugacg

SEQ ID NO: 422139 - RNA, 19 nt, Artificial Sequence
  Description of Artificial Sequence: Synthetic oligonucleotide
  Sense Strand Starting at position 1317 of SEQ ID NO: 318902
cuuggauuucaguggugug

SEQ ID NO: 422140 - RNA, 19 nt, Artificial Sequence
  Description of Artificial Sequence: Synthetic oligonucleotide
  Antisense Strand to SEQ ID NO: 422139
cacaccacugaaauccaag

SEQ ID NO: 422141 - RNA, 19 nt, Artificial Sequence
  Description of Artificial Sequence: Synthetic oligonucleotide
  Sense Strand Starting at position 1317 of SEQ ID NO: 318905
ggauuucagugguguguuc

SEQ ID NO: 422142 - RNA, 19 nt, Artificial Sequence
  Description of Artificial Sequence: Synthetic oligonucleotide
  Antisense Strand to SEQ ID NO: 422141
gaacacaccacugaaaucc

SEQ ID NO: 422143 - RNA, 19 nt, Artificial Sequence
  Description of Artificial Sequence: Synthetic oligonucleotide
  Sense Strand Starting at position 1317 of SEQ ID NO: 318954
ggugacugaucugauuugu

SEQ ID NO: 422144 - RNA, 19 nt, Artificial Sequence
  Description of Artificial Sequence: Synthetic oligonucleotide
  Antisense Strand to SEQ ID NO: 422143
acaaaucagaucagucacc

SEQ ID NO: 422145 - RNA, 19 nt, Artificial Sequence
  Description of Artificial Sequence: Synthetic oligonucleotide
  Sense Strand Starting at position 1317 of SEQ ID NO: 319033
aguaaagugcgccaucaag

SEQ ID NO: 422146 - RNA, 19 nt, Artificial Sequence
  Description of Artificial Sequence: Synthetic oligonucleotide
  Antisense Strand to SEQ ID NO: 422145
cuugauggcgcacuuuacu

SEQ ID NO: 422147 - RNA, 19 nt, Artificial Sequence
  Description of Artificial Sequence: Synthetic oligonucleotide
  Sense Strand Starting at position 1317 of SEQ ID NO: 319083
aggugagacauugguaguu

SEQ ID NO: 422148 - RNA, 19 nt, Artificial Sequence
  Description of Artificial Sequence: Synthetic oligonucleotide
  Antisense Strand to SEQ ID NO: 422147
aacuaccaaugucucaccu

SEQ ID NO: 422149 - RNA, 19 nt, Artificial Sequence
  Description of Artificial Sequence: Synthetic oligonucleotide
  Sense Strand Starting at position 1317 of SEQ ID NO: 319085
gugagacauugguaguuug

SEQ ID NO: 422150 - RNA, 19 nt, Artificial Sequence
  Description of Artificial Sequence: Synthetic oligonucleotide
  Antisense Strand to SEQ ID NO: 422149
caaacuaccaaugucucac

SEQ ID NO: 422151 - RNA, 19 nt, Artificial Sequence
  Description of Artificial Sequence: Synthetic oligonucleotide
  Sense Strand Starting at position 1317 of SEQ ID NO: 319175
ugugcucugccugcgugaa

SEQ ID NO: 422152 - RNA, 19 nt, Artificial Sequence
  Description of Artificial Sequence: Synthetic oligonucleotide
  Antisense Strand to SEQ ID NO: 422151
uucacgcaggcagagcaca

SEQ ID NO: 422153 - RNA, 19 nt, Artificial Sequence
  Description of Artificial Sequence: Synthetic oligonucleotide
  Sense Strand Starting at position 1317 of SEQ ID NO: 319176
gugcucugccugcgugaau

SEQ ID NO: 422154 - RNA, 19 nt, Artificial Sequence
  Description of Artificial Sequence: Synthetic oligonucleotide
  Antisense Strand to SEQ ID NO: 422153
auucacgcaggcagagcac

SEQ ID NO: 422155 - RNA, 19 nt, Artificial Sequence
  Description of Artificial Sequence: Synthetic oligonucleotide
  Sense Strand Starting at position 1317 of SEQ ID NO: 319206
ugugauggcuuccaccaau

SEQ ID NO: 422156 - RNA, 19 nt, Artificial Sequence
  Description of Artificial Sequence: Synthetic oligonucleotide
  Antisense Strand to SEQ ID NO: 422155
auugguggaagccaucaca

SEQ ID NO: 422157 - RNA, 19 nt, Artificial Sequence
  Description of Artificial Sequence: Synthetic oligonucleotide
  Sense Strand Starting at position 1318 of SEQ ID NO: 315240
cugccuggaucuuugugaa

SEQ ID NO: 422158 - RNA, 19 nt, Artificial Sequence
  Description of Artificial Sequence: Synthetic oligonucleotide
  Antisense Strand to SEQ ID NO: 422157
uucacaaagauccaggcag

SEQ ID NO: 422159 - RNA, 19 nt, Artificial Sequence
  Description of Artificial Sequence: Synthetic oligonucleotide
  Sense Strand Starting at position 1318 of SEQ ID NO: 315652
uuuggaguuucuuugguua

SEQ ID NO: 422160 - RNA, 19 nt, Artificial Sequence
  Description of Artificial Sequence: Synthetic oligonucleotide
  Antisense Strand to SEQ ID NO: 422159
uaaccaaagaaacuccaaa

SEQ ID NO: 422161 - RNA, 19 nt, Artificial Sequence
  Description of Artificial Sequence: Synthetic oligonucleotide
  Sense Strand Starting at position 1318 of SEQ ID NO: 316078
cguacucuguauuugucau

SEQ ID NO: 422162 - RNA, 19 nt, Artificial Sequence
  Description of Artificial Sequence: Synthetic oligonucleotide
  Antisense Strand to SEQ ID NO: 422161
augacaaauacagaguacg

SEQ ID NO: 422163 - RNA, 19 nt, Artificial Sequence
  Description of Artificial Sequence: Synthetic oligonucleotide
  Sense Strand Starting at position 1318 of SEQ ID NO: 316086
guauuugucaucuguguac

SEQ ID NO: 422164 - RNA, 19 nt, Artificial Sequence
  Description of Artificial Sequence: Synthetic oligonucleotide
  Antisense Strand to SEQ ID NO: 422163
guacacagaugacaaauac

SEQ ID NO: 422165 - RNA, 19 nt, Artificial Sequence
  Description of Artificial Sequence: Synthetic oligonucleotide
  Sense Strand Starting at position 1318 of SEQ ID NO: 316115
aggugauuugcugggcuga

SEQ ID NO: 422166 - RNA, 19 nt, Artificial Sequence
  Description of Artificial Sequence: Synthetic oligonucleotide
  Antisense Strand to SEQ ID NO: 422165
ucagcccagcaaaucaccu

SEQ ID NO: 422167 - RNA, 19 nt, Artificial Sequence
  Description of Artificial Sequence: Synthetic oligonucleotide
  Sense Strand Starting at position 1318 of SEQ ID NO: 316116
ggugauuugcugggcugau

SEQ ID NO: 422168 - RNA, 19 nt, Artificial Sequence
  Description of Artificial Sequence: Synthetic oligonucleotide
  Antisense Strand to SEQ ID NO: 422167
aucagcccagcaaaucacc

SEQ ID NO: 422169 - RNA, 19 nt, Artificial Sequence
  Description of Artificial Sequence: Synthetic oligonucleotide
  Sense Strand Starting at position 1318 of SEQ ID NO: 316128
ggcugaugacagcagucau

SEQ ID NO: 422170 - RNA, 19 nt, Artificial Sequence
  Description of Artificial Sequence: Synthetic oligonucleotide
  Antisense Strand to SEQ ID NO: 422169
augacugcugucaucagcc

SEQ ID NO: 422171 - RNA, 19 nt, Artificial Sequence
  Description of Artificial Sequence: Synthetic oligonucleotide
  Sense Strand Starting at position 1318 of SEQ ID NO: 316205
augauuccucuugguaugu

SEQ ID NO: 422172 - RNA, 19 nt, Artificial Sequence
  Description of Artificial Sequence: Synthetic oligonucleotide
  Antisense Strand to SEQ ID NO: 422171
acauaccaagaggaaucau

SEQ ID NO: 422173 - RNA, 19 nt, Artificial Sequence
  Description of Artificial Sequence: Synthetic oligonucleotide
  Sense Strand Starting at position 1318 of SEQ ID NO: 316206
ugauuccucuugguaugua

SEQ ID NO: 422174 - RNA, 19 nt, Artificial Sequence
  Description of Artificial Sequence: Synthetic oligonucleotide
  Antisense Strand to SEQ ID NO: 422173
uacauaccaagaggaauca

SEQ ID NO: 422175 - RNA, 19 nt, Artificial Sequence
  Description of Artificial Sequence: Synthetic oligonucleotide
  Sense Strand Starting at position 1318 of SEQ ID NO: 316209
uuccucuugguauguauga

SEQ ID NO: 422176 - RNA, 19 nt, Artificial Sequence
  Description of Artificial Sequence: Synthetic oligonucleotide
  Antisense Strand to SEQ ID NO: 422175
ucauacauaccaagaggaa

SEQ ID NO: 422177 - RNA, 19 nt, Artificial Sequence
  Description of Artificial Sequence: Synthetic oligonucleotide
  Sense Strand Starting at position 1318 of SEQ ID NO: 316210
uccucuugguauguaugaa

SEQ ID NO: 422178 - RNA, 19 nt, Artificial Sequence
  Description of Artificial Sequence: Synthetic oligonucleotide
  Antisense Strand to SEQ ID NO: 422177
uucauacauaccaagagga

SEQ ID NO: 422179 - RNA, 19 nt, Artificial Sequence
  Description of Artificial Sequence: Synthetic oligonucleotide
  Sense Strand Starting at position 1318 of SEQ ID NO: 316282
aauguugucugucucagaa

SEQ ID NO: 422180 - RNA, 19 nt, Artificial Sequence
  Description of Artificial Sequence: Synthetic oligonucleotide
  Antisense Strand to SEQ ID NO: 422179
uucugagacagacaacauu

SEQ ID NO: 422181 - RNA, 19 nt, Artificial Sequence
  Description of Artificial Sequence: Synthetic oligonucleotide
  Sense Strand Starting at position 1318 of SEQ ID NO: 316642
acacauccugauuggcaaa

SEQ ID NO: 422182 - RNA, 19 nt, Artificial Sequence
  Description of Artificial Sequence: Synthetic oligonucleotide
  Antisense Strand to SEQ ID NO: 422181
uuugccaaucaggaugugu

SEQ ID NO: 422183 - RNA, 19 nt, Artificial Sequence
  Description of Artificial Sequence: Synthetic oligonucleotide
  Sense Strand Starting at position 1318 of SEQ ID NO: 316690
aggaucaguucuccuuuga

SEQ ID NO: 422184 - RNA, 19 nt, Artificial Sequence
  Description of Artificial Sequence: Synthetic oligonucleotide
  Antisense Strand to SEQ ID NO: 422183
ucaaaggagaacugauccu

SEQ ID NO: 422185 - RNA, 19 nt, Artificial Sequence
  Description of Artificial Sequence: Synthetic oligonucleotide
  Sense Strand Starting at position 1318 of SEQ ID NO: 316694
ucaguucuccuuugaccau

SEQ ID NO: 422186 - RNA, 19 nt, Artificial Sequence
  Description of Artificial Sequence: Synthetic oligonucleotide
  Antisense Strand to SEQ ID NO: 422185
auggucaaaggagaacuga

SEQ ID NO: 422187 - RNA, 19 nt, Artificial Sequence
  Description of Artificial Sequence: Synthetic oligonucleotide
  Sense Strand Starting at position 1318 of SEQ ID NO: 316746
uugacuauugcuuaccaga

SEQ ID NO: 422188 - RNA, 19 nt, Artificial Sequence
  Description of Artificial Sequence: Synthetic oligonucleotide
  Antisense Strand to SEQ ID NO: 422187
ucugguaagcaauagucaa

SEQ ID NO: 422189 - RNA, 19 nt, Artificial Sequence
  Description of Artificial Sequence: Synthetic oligonucleotide
  Sense Strand Starting at position 1318 of SEQ ID NO: 316863
ugaguugccuuuccugaag

SEQ ID NO: 422190 - RNA, 19 nt, Artificial Sequence
  Description of Artificial Sequence: Synthetic oligonucleotide
  Antisense Strand to SEQ ID NO: 422189
cuucaggaaaggcaacuca

SEQ ID NO: 422191 - RNA, 19 nt, Artificial Sequence
  Description of Artificial Sequence: Synthetic oligonucleotide
  Sense Strand Starting at position 1318 of SEQ ID NO: 316883
caguucugccaggaaggua

SEQ ID NO: 422192 - RNA, 19 nt, Artificial Sequence
  Description of Artificial Sequence: Synthetic oligonucleotide
  Antisense Strand to SEQ ID NO: 422191
uaccuuccuggcagaacug

SEQ ID NO: 422193 - RNA, 19 nt, Artificial Sequence
  Description of Artificial Sequence: Synthetic oligonucleotide
  Sense Strand Starting at position 1318 of SEQ ID NO: 316946
agauguagaaaguguuaac

SEQ ID NO: 422194 - RNA, 19 nt, Artificial Sequence
  Description of Artificial Sequence: Synthetic oligonucleotide
  Antisense Strand to SEQ ID NO: 422193
guuaacacuuucuacaucu

SEQ ID NO: 422195 - RNA, 19 nt, Artificial Sequence
  Description of Artificial Sequence: Synthetic oligonucleotide
  Sense Strand Starting at position 1318 of SEQ ID NO: 316974
ggaguuaauuccuugcuua

SEQ ID NO: 422196 - RNA, 19 nt, Artificial Sequence
  Description of Artificial Sequence: Synthetic oligonucleotide
  Antisense Strand to SEQ ID NO: 422195
uaagcaaggaauuaacucc

SEQ ID NO: 422197 - RNA, 19 nt, Artificial Sequence
  Description of Artificial Sequence: Synthetic oligonucleotide
  Sense Strand Starting at position 1318 of SEQ ID NO: 317043
cgucuuacucuacagaaag

SEQ ID NO: 422198 - RNA, 19 nt, Artificial Sequence
  Description of Artificial Sequence: Synthetic oligonucleotide
  Antisense Strand to SEQ ID NO: 422197
cuuucuguagaguaagacg

SEQ ID NO: 422199 - RNA, 19 nt, Artificial Sequence
  Description of Artificial Sequence: Synthetic oligonucleotide
  Sense Strand Starting at position 1318 of SEQ ID NO: 317139
ugagguuucucucuugaga

SEQ ID NO: 422200 - RNA, 19 nt, Artificial Sequence
  Description of Artificial Sequence: Synthetic oligonucleotide
  Antisense Strand to SEQ ID NO: 422199
ucucaagagagaaaccuca

SEQ ID NO: 422201 - RNA, 19 nt, Artificial Sequence
  Description of Artificial Sequence: Synthetic oligonucleotide
  Sense Strand Starting at position 1318 of SEQ ID NO: 317163
caggaugugagcugaaaug

SEQ ID NO: 422202 - RNA, 19 nt, Artificial Sequence
  Description of Artificial Sequence: Synthetic oligonucleotide
  Antisense Strand to SEQ ID NO: 422201
cauuucagcucacauccug

SEQ ID NO: 422203 - RNA, 19 nt, Artificial Sequence
  Description of Artificial Sequence: Synthetic oligonucleotide
  Sense Strand Starting at position 1318 of SEQ ID NO: 317220
uguagaggagugugucaua

SEQ ID NO: 422204 - RNA, 19 nt, Artificial Sequence
  Description of Artificial Sequence: Synthetic oligonucleotide
  Antisense Strand to SEQ ID NO: 422203
uaugacacacuccucuaca

SEQ ID NO: 422205 - RNA, 19 nt, Artificial Sequence
  Description of Artificial Sequence: Synthetic oligonucleotide
  Sense Strand Starting at position 1318 of SEQ ID NO: 317360
aacaguuaugacggccaaa

SEQ ID NO: 422206 - RNA, 19 nt, Artificial Sequence
  Description of Artificial Sequence: Synthetic oligonucleotide
  Antisense Strand to SEQ ID NO: 422205
uuuggccgucauaacuguu

SEQ ID NO: 422207 - RNA, 19 nt, Artificial Sequence
  Description of Artificial Sequence: Synthetic oligonucleotide
  Sense Strand Starting at position 1318 of SEQ ID NO: 317656
ugcuguccucgacauaaug

SEQ ID NO: 422208 - RNA, 19 nt, Artificial Sequence
  Description of Artificial Sequence: Synthetic oligonucleotide
  Antisense Strand to SEQ ID NO: 422207
cauuaugucgaggacagca

SEQ ID NO: 422209 - RNA, 19 nt, Artificial Sequence
  Description of Artificial Sequence: Synthetic oligonucleotide
  Sense Strand Starting at position 1318 of SEQ ID NO: 317664
ucgacauaaugagugaguu

SEQ ID NO: 422210 - RNA, 19 nt, Artificial Sequence
  Description of Artificial Sequence: Synthetic oligonucleotide
  Antisense Strand to SEQ ID NO: 422209
aacucacucauuaugucga

SEQ ID NO: 422211 - RNA, 19 nt, Artificial Sequence
  Description of Artificial Sequence: Synthetic oligonucleotide
  Sense Strand Starting at position 1318 of SEQ ID NO: 317665
cgacauaaugagugaguuc

SEQ ID NO: 422212 - RNA, 19 nt, Artificial Sequence
  Description of Artificial Sequence: Synthetic oligonucleotide
  Antisense Strand to SEQ ID NO: 422211
gaacucacucauuaugucg

SEQ ID NO: 422213 - RNA, 19 nt, Artificial Sequence
  Description of Artificial Sequence: Synthetic oligonucleotide
  Sense Strand Starting at position 1318 of SEQ ID NO: 318125
gcugauuaaagauggcuga

SEQ ID NO: 422214 - RNA, 19 nt, Artificial Sequence
  Description of Artificial Sequence: Synthetic oligonucleotide
  Antisense Strand to SEQ ID NO: 422213
ucagccaucuuuaaucagc

SEQ ID NO: 422215 - RNA, 19 nt, Artificial Sequence
  Description of Artificial Sequence: Synthetic oligonucleotide
  Sense Strand Starting at position 1318 of SEQ ID NO: 318126
cugauuaaagauggcugau

SEQ ID NO: 422216 - RNA, 19 nt, Artificial Sequence
  Description of Artificial Sequence: Synthetic oligonucleotide
  Antisense Strand to SEQ ID NO: 422215
aucagccaucuuuaaucag

SEQ ID NO: 422217 - RNA, 19 nt, Artificial Sequence
  Description of Artificial Sequence: Synthetic oligonucleotide
  Sense Strand Starting at position 1318 of SEQ ID NO: 318129
auuaaagauggcugauuga

SEQ ID NO: 422218 - RNA, 19 nt, Artificial Sequence
  Description of Artificial Sequence: Synthetic oligonucleotide
  Antisense Strand to SEQ ID NO: 422217
ucaaucagccaucuuuaau

SEQ ID NO: 422219 - RNA, 19 nt, Artificial Sequence
  Description of Artificial Sequence: Synthetic oligonucleotide
  Sense Strand Starting at position 1318 of SEQ ID NO: 318255
auaggauacuuugcauauc

SEQ ID NO: 422220 - RNA, 19 nt, Artificial Sequence
  Description of Artificial Sequence: Synthetic oligonucleotide
  Antisense Strand to SEQ ID NO: 422219
gauaugcaaaguauccuau

SEQ ID NO: 422221 - RNA, 19 nt, Artificial Sequence
  Description of Artificial Sequence: Synthetic oligonucleotide
  Sense Strand Starting at position 1318 of SEQ ID NO: 318381
uagugacugcugcagaaga

SEQ ID NO: 422222 - RNA, 19 nt, Artificial Sequence
  Description of Artificial Sequence: Synthetic oligonucleotide
  Antisense Strand to SEQ ID NO: 422221
ucuucugcagcagucacua

SEQ ID NO: 422223 - RNA, 19 nt, Artificial Sequence
  Description of Artificial Sequence: Synthetic oligonucleotide
  Sense Strand Starting at position 1318 of SEQ ID NO: 318383
gugacugcugcagaagaua

SEQ ID NO: 422224 - RNA, 19 nt, Artificial Sequence
  Description of Artificial Sequence: Synthetic oligonucleotide
  Antisense Strand to SEQ ID NO: 422223
uaucuucugcagcagucac

SEQ ID NO: 422225 - RNA, 19 nt, Artificial Sequence
  Description of Artificial Sequence: Synthetic oligonucleotide
  Sense Strand Starting at position 1318 of SEQ ID NO: 318429
ggacacuaggcacgauaaa

SEQ ID NO: 422226 - RNA, 19 nt, Artificial Sequence
  Description of Artificial Sequence: Synthetic oligonucleotide
  Antisense Strand to SEQ ID NO: 422225
uuuaucgugccuagugucc

SEQ ID NO: 422227 - RNA, 19 nt, Artificial Sequence
  Description of Artificial Sequence: Synthetic oligonucleotide
  Sense Strand Starting at position 1318 of SEQ ID NO: 318442
gauaaagacugggaauauu

SEQ ID NO: 422228 - RNA, 19 nt, Artificial Sequence
  Description of Artificial Sequence: Synthetic oligonucleotide
  Antisense Strand to SEQ ID NO: 422227
aauauucccagucuuuauc

SEQ ID NO: 422229 - RNA, 19 nt, Artificial Sequence
  Description of Artificial Sequence: Synthetic oligonucleotide
  Sense Strand Starting at position 1318 of SEQ ID NO: 318451
ugggaauauuaugcugaaa

SEQ ID NO: 422230 - RNA, 19 nt, Artificial Sequence
  Description of Artificial Sequence: Synthetic oligonucleotide
  Antisense Strand to SEQ ID NO: 422229
uuucagcauaauauuccca

SEQ ID NO: 422231 - RNA, 19 nt, Artificial Sequence
  Description of Artificial Sequence: Synthetic oligonucleotide
  Sense Strand Starting at position 1318 of SEQ ID NO: 318556
gaaccauucuaggaaggag

SEQ ID NO: 422232 - RNA, 19 nt, Artificial Sequence
  Description of Artificial Sequence: Synthetic oligonucleotide
  Antisense Strand to SEQ ID NO: 422231
cuccuuccuagaaugguuc

SEQ ID NO: 422233 - RNA, 19 nt, Artificial Sequence
  Description of Artificial Sequence: Synthetic oligonucleotide
  Sense Strand Starting at position 1318 of SEQ ID NO: 318656
ggcccagacugaucauucu

SEQ ID NO: 422234 - RNA, 19 nt, Artificial Sequence
  Description of Artificial Sequence: Synthetic oligonucleotide
  Antisense Strand to SEQ ID NO: 422233
agaaugaucagucugggcc

SEQ ID NO: 422235 - RNA, 19 nt, Artificial Sequence
  Description of Artificial Sequence: Synthetic oligonucleotide
  Sense Strand Starting at position 1318 of SEQ ID NO: 318742
gggccagaauuaucagaca

SEQ ID NO: 422236 - RNA, 19 nt, Artificial Sequence
  Description of Artificial Sequence: Synthetic oligonucleotide
  Antisense Strand to SEQ ID NO: 422235
ugucugauaauucuggccc

SEQ ID NO: 422237 - RNA, 19 nt, Artificial Sequence
  Description of Artificial Sequence: Synthetic oligonucleotide
  Sense Strand Starting at position 1319 of SEQ ID NO: 315254
guuucuccugaggaaugua

SEQ ID NO: 422238 - RNA, 19 nt, Artificial Sequence
  Description of Artificial Sequence: Synthetic oligonucleotide
  Antisense Strand to SEQ ID NO: 422237
uacauuccucaggagaaac

SEQ ID NO: 422239 - RNA, 19 nt, Artificial Sequence
  Description of Artificial Sequence: Synthetic oligonucleotide
  Sense Strand Starting at position 1319 of SEQ ID NO: 315257
ucuccugaggaauguaguu

SEQ ID NO: 422240 - RNA, 19 nt, Artificial Sequence
  Description of Artificial Sequence: Synthetic oligonucleotide
  Antisense Strand to SEQ ID NO: 422239
aacuacauuccucaggaga

SEQ ID NO: 422241 - RNA, 19 nt, Artificial Sequence
  Description of Artificial Sequence: Synthetic oligonucleotide
  Sense Strand Starting at position 1319 of SEQ ID NO: 315259
uccugaggaauguaguuau

SEQ ID NO: 422242 - RNA, 19 nt, Artificial Sequence
  Description of Artificial Sequence: Synthetic oligonucleotide
  Antisense Strand to SEQ ID NO: 422241
auaacuacauuccucagga

SEQ ID NO: 422243 - RNA, 19 nt, Artificial Sequence
  Description of Artificial Sequence: Synthetic oligonucleotide
  Sense Strand Starting at position 1319 of SEQ ID NO: 315262
ugaggaauguaguuaucuu

SEQ ID NO: 422244 - RNA, 19 nt, Artificial Sequence
  Description of Artificial Sequence: Synthetic oligonucleotide
  Antisense Strand to SEQ ID NO: 422243
aagauaacuacauuccuca

SEQ ID NO: 422245 - RNA, 19 nt, Artificial Sequence
  Description of Artificial Sequence: Synthetic oligonucleotide
  Sense Strand Starting at position 1319 of SEQ ID NO: 315273
guuaucuuaggguaccaca

SEQ ID NO: 422246 - RNA, 19 nt, Artificial Sequence
  Description of Artificial Sequence: Synthetic oligonucleotide
  Antisense Strand to SEQ ID NO: 422245
ugugguacccuaagauaac

SEQ ID NO: 422247 - RNA, 19 nt, Artificial Sequence
  Description of Artificial Sequence: Synthetic oligonucleotide
  Sense Strand Starting at position 1319 of SEQ ID NO: 315303
cuccucuaguguuugagaa

SEQ ID NO: 422248 - RNA, 19 nt, Artificial Sequence
  Description of Artificial Sequence: Synthetic oligonucleotide
  Antisense Strand to SEQ ID NO: 422247
uucucaaacacuagaggag

SEQ ID NO: 422249 - RNA, 19 nt, Artificial Sequence
  Description of Artificial Sequence: Synthetic oligonucleotide
  Sense Strand Starting at position 1319 of SEQ ID NO: 315304
uccucuaguguuugagaau

SEQ ID NO: 422250 - RNA, 19 nt, Artificial Sequence
  Description of Artificial Sequence: Synthetic oligonucleotide
  Antisense Strand to SEQ ID NO: 422249
auucucaaacacuagagga

SEQ ID NO: 422251 - RNA, 19 nt, Artificial Sequence
  Description of Artificial Sequence: Synthetic oligonucleotide
  Sense Strand Starting at position 1319 of SEQ ID NO: 315419
gcaggcuugugauuugaug

SEQ ID NO: 422252 - RNA, 19 nt, Artificial Sequence
  Description of Artificial Sequence: Synthetic oligonucleotide
  Antisense Strand to SEQ ID NO: 422251
caucaaaucacaagccugc

SEQ ID NO: 422253 - RNA, 19 nt, Artificial Sequence
  Description of Artificial Sequence: Synthetic oligonucleotide
  Sense Strand Starting at position 1319 of SEQ ID NO: 315421
aggcuugugauuugauggu

SEQ ID NO: 422254 - RNA, 19 nt, Artificial Sequence
  Description of Artificial Sequence: Synthetic oligonucleotide
  Antisense Strand to SEQ ID NO: 422253
accaucaaaucacaagccu

SEQ ID NO: 422255 - RNA, 19 nt, Artificial Sequence
  Description of Artificial Sequence: Synthetic oligonucleotide
  Sense Strand Starting at position 1319 of SEQ ID NO: 315446
gguuaacaaguuuaaugua

SEQ ID NO: 422256 - RNA, 19 nt, Artificial Sequence
  Description of Artificial Sequence: Synthetic oligonucleotide
  Antisense Strand to SEQ ID NO: 422255
uacauuaaacuuguuaacc

SEQ ID NO: 422257 - RNA, 19 nt, Artificial Sequence
  Description of Artificial Sequence: Synthetic oligonucleotide
  Sense Strand Starting at position 1319 of SEQ ID NO: 315543
cugugcuguguggucauua

SEQ ID NO: 422258 - RNA, 19 nt, Artificial Sequence
  Description of Artificial Sequence: Synthetic oligonucleotide
  Antisense Strand to SEQ ID NO: 422257
uaaugaccacacagcacag

SEQ ID NO: 422259 - RNA, 19 nt, Artificial Sequence
  Description of Artificial Sequence: Synthetic oligonucleotide
  Sense Strand Starting at position 1319 of SEQ ID NO: 315548
cuguguggucauuauguca

SEQ ID NO: 422260 - RNA, 19 nt, Artificial Sequence
  Description of Artificial Sequence: Synthetic oligonucleotide
  Antisense Strand to SEQ ID NO: 422259
ugacauaaugaccacacag

SEQ ID NO: 422261 - RNA, 19 nt, Artificial Sequence
  Description of Artificial Sequence: Synthetic oligonucleotide
  Sense Strand Starting at position 1319 of SEQ ID NO: 315555
gucauuaugucacccagcu

SEQ ID NO: 422262 - RNA, 19 nt, Artificial Sequence
  Description of Artificial Sequence: Synthetic oligonucleotide
  Antisense Strand to SEQ ID NO: 422261
agcugggugacauaaugac

SEQ ID NO: 422263 - RNA, 19 nt, Artificial Sequence
  Description of Artificial Sequence: Synthetic oligonucleotide
  Sense Strand Starting at position 1319 of SEQ ID NO: 315697
cugauuuaucucgguguca

SEQ ID NO: 422264 - RNA, 19 nt, Artificial Sequence
  Description of Artificial Sequence: Synthetic oligonucleotide
  Antisense Strand to SEQ ID NO: 422263
ugacaccgagauaaaucag

SEQ ID NO: 422265 - RNA, 19 nt, Artificial Sequence
  Description of Artificial Sequence: Synthetic oligonucleotide
  Sense Strand Starting at position 1319 of SEQ ID NO: 315698
ugauuuaucucggugucac

SEQ ID NO: 422266 - RNA, 19 nt, Artificial Sequence
  Description of Artificial Sequence: Synthetic oligonucleotide
  Antisense Strand to SEQ ID NO: 422265
gugacaccgagauaaauca

SEQ ID NO: 422267 - RNA, 19 nt, Artificial Sequence
  Description of Artificial Sequence: Synthetic oligonucleotide
  Sense Strand Starting at position 1319 of SEQ ID NO: 315699
gauuuaucucggugucaca

SEQ ID NO: 422268 - RNA, 19 nt, Artificial Sequence
  Description of Artificial Sequence: Synthetic oligonucleotide
  Antisense Strand to SEQ ID NO: 422267
ugugacaccgagauaaauc

SEQ ID NO: 422269 - RNA, 19 nt, Artificial Sequence
  Description of Artificial Sequence: Synthetic oligonucleotide
  Sense Strand Starting at position 1319 of SEQ ID NO: 315815
ggcaaagucaccugugugu

SEQ ID NO: 422270 - RNA, 19 nt, Artificial Sequence
  Description of Artificial Sequence: Synthetic oligonucleotide
  Antisense Strand to SEQ ID NO: 422269
acacacaggugacuuugcc

SEQ ID NO: 422271 - RNA, 19 nt, Artificial Sequence
  Description of Artificial Sequence: Synthetic oligonucleotide
  Sense Strand Starting at position 1319 of SEQ ID NO: 315817
caaagucaccuguguguuu

SEQ ID NO: 422272 - RNA, 19 nt, Artificial Sequence
  Description of Artificial Sequence: Synthetic oligonucleotide
  Antisense Strand to SEQ ID NO: 422271
aaacacacaggugacuuug

SEQ ID NO: 422273 - RNA, 19 nt, Artificial Sequence
  Description of Artificial Sequence: Synthetic oligonucleotide
  Sense Strand Starting at position 1319 of SEQ ID NO: 315934
cugugaaauaaccguggaa

SEQ ID NO: 422274 - RNA, 19 nt, Artificial Sequence
  Description of Artificial Sequence: Synthetic oligonucleotide
  Antisense Strand to SEQ ID NO: 422273
uuccacgguuauuucacag

SEQ ID NO: 422275 - RNA, 19 nt, Artificial Sequence
  Description of Artificial Sequence: Synthetic oligonucleotide
  Sense Strand Starting at position 1319 of SEQ ID NO: 316075
ggcugacuuacuugaggaa

SEQ ID NO: 422276 - RNA, 19 nt, Artificial Sequence
  Description of Artificial Sequence: Synthetic oligonucleotide
  Antisense Strand to SEQ ID NO: 422275
uuccucaaguaagucagcc

SEQ ID NO: 422277 - RNA, 19 nt, Artificial Sequence
  Description of Artificial Sequence: Synthetic oligonucleotide
  Sense Strand Starting at position 1319 of SEQ ID NO: 316548
uauuuaaagucggaggaag

SEQ ID NO: 422278 - RNA, 19 nt, Artificial Sequence
  Description of Artificial Sequence: Synthetic oligonucleotide
  Antisense Strand to SEQ ID NO: 422277
cuuccuccgacuuuaaaua

SEQ ID NO: 422279 - RNA, 19 nt, Artificial Sequence
  Description of Artificial Sequence: Synthetic oligonucleotide
  Sense Strand Starting at position 1319 of SEQ ID NO: 316704
cccuccuggccucgagaau

SEQ ID NO: 422280 - RNA, 19 nt, Artificial Sequence
  Description of Artificial Sequence: Synthetic oligonucleotide
  Antisense Strand to SEQ ID NO: 422279
auucucgaggccaggaggg

SEQ ID NO: 422281 - RNA, 19 nt, Artificial Sequence
  Description of Artificial Sequence: Synthetic oligonucleotide
  Sense Strand Starting at position 1319 of SEQ ID NO: 316705
ccuccuggccucgagaauu

SEQ ID NO: 422282 - RNA, 19 nt, Artificial Sequence
  Description of Artificial Sequence: Synthetic oligonucleotide
  Antisense Strand to SEQ ID NO: 422281
aauucucgaggccaggagg

SEQ ID NO: 422283 - RNA, 19 nt, Artificial Sequence
  Description of Artificial Sequence: Synthetic oligonucleotide
  Sense Strand Starting at position 1319 of SEQ ID NO: 316711
ggccucgagaauuaugcaa

SEQ ID NO: 422284 - RNA, 19 nt, Artificial Sequence
  Description of Artificial Sequence: Synthetic oligonucleotide
  Antisense Strand to SEQ ID NO: 422283
uugcauaauucucgaggcc

SEQ ID NO: 422285 - RNA, 19 nt, Artificial Sequence
  Description of Artificial Sequence: Synthetic oligonucleotide
  Sense Strand Starting at position 1319 of SEQ ID NO: 316725
ugcaacuuucuugaagcaa

SEQ ID NO: 422286 - RNA, 19 nt, Artificial Sequence
  Description of Artificial Sequence: Synthetic oligonucleotide
  Antisense Strand to SEQ ID NO: 422285
uugcuucaagaaaguugca

SEQ ID NO: 422287 - RNA, 19 nt, Artificial Sequence
  Description of Artificial Sequence: Synthetic oligonucleotide
  Sense Strand Starting at position 1319 of SEQ ID NO: 316742
aaagaaguugccuggagga

SEQ ID NO: 422288 - RNA, 19 nt, Artificial Sequence
  Description of Artificial Sequence: Synthetic oligonucleotide
  Antisense Strand to SEQ ID NO: 422287
uccuccaggcaacuucuuu

SEQ ID NO: 422289 - RNA, 19 nt, Artificial Sequence
  Description of Artificial Sequence: Synthetic oligonucleotide
  Sense Strand Starting at position 1319 of SEQ ID NO: 317084
cgaggcuuggcugacaaau

SEQ ID NO: 422290 - RNA, 19 nt, Artificial Sequence
  Description of Artificial Sequence: Synthetic oligonucleotide
  Antisense Strand to SEQ ID NO: 422289
auuugucagccaagccucg

SEQ ID NO: 422291 - RNA, 19 nt, Artificial Sequence
  Description of Artificial Sequence: Synthetic oligonucleotide
  Sense Strand Starting at position 1319 of SEQ ID NO: 317230
cggacugucccauaaacaa

SEQ ID NO: 422292 - RNA, 19 nt, Artificial Sequence
  Description of Artificial Sequence: Synthetic oligonucleotide
  Antisense Strand to SEQ ID NO: 422291
uuguuuaugggacaguccg

SEQ ID NO: 422293 - RNA, 19 nt, Artificial Sequence
  Description of Artificial Sequence: Synthetic oligonucleotide
  Sense Strand Starting at position 1319 of SEQ ID NO: 317293
aguugagcuguugaauuau

SEQ ID NO: 422294 - RNA, 19 nt, Artificial Sequence
  Description of Artificial Sequence: Synthetic oligonucleotide
  Antisense Strand to SEQ ID NO: 422293
auaauucaacagcucaacu

SEQ ID NO: 422295 - RNA, 19 nt, Artificial Sequence
  Description of Artificial Sequence: Synthetic oligonucleotide
  Sense Strand Starting at position 1319 of SEQ ID NO: 317401
gggcgugauggguacuuua

SEQ ID NO: 422296 - RNA, 19 nt, Artificial Sequence
  Description of Artificial Sequence: Synthetic oligonucleotide
  Antisense Strand to SEQ ID NO: 422295
uaaaguacccaucacgccc

SEQ ID NO: 422297 - RNA, 19 nt, Artificial Sequence
  Description of Artificial Sequence: Synthetic oligonucleotide
  Sense Strand Starting at position 1319 of SEQ ID NO: 317411
gguacuuuacuggguaaga

SEQ ID NO: 422298 - RNA, 19 nt, Artificial Sequence
  Description of Artificial Sequence: Synthetic oligonucleotide
  Antisense Strand to SEQ ID NO: 422297
ucuuacccaguaaaguacc

SEQ ID NO: 422299 - RNA, 19 nt, Artificial Sequence
  Description of Artificial Sequence: Synthetic oligonucleotide
  Sense Strand Starting at position 1319 of SEQ ID NO: 317412
guacuuuacuggguaagag

SEQ ID NO: 422300 - RNA, 19 nt, Artificial Sequence
  Description of Artificial Sequence: Synthetic oligonucleotide
  Antisense Strand to SEQ ID NO: 422299
cucuuacccaguaaaguac

SEQ ID NO: 422301 - RNA, 19 nt, Artificial Sequence
  Description of Artificial Sequence: Synthetic oligonucleotide
  Sense Strand Starting at position 1319 of SEQ ID NO: 317990
acuagagauugagaagaaa

SEQ ID NO: 422302 - RNA, 19 nt, Artificial Sequence
  Description of Artificial Sequence: Synthetic oligonucleotide
  Antisense Strand to SEQ ID NO: 422301
uuucuucucaaucucuagu

SEQ ID NO: 422303 - RNA, 19 nt, Artificial Sequence
  Description of Artificial Sequence: Synthetic oligonucleotide
  Sense Strand Starting at position 1319 of SEQ ID NO: 318417
ggaguuuauuaaguaaauc

SEQ ID NO: 422304 - RNA, 19 nt, Artificial Sequence
  Description of Artificial Sequence: Synthetic oligonucleotide
  Antisense Strand to SEQ ID NO: 422303
gauuuacuuaauaaacucc

SEQ ID NO: 422305 - RNA, 19 nt, Artificial Sequence
  Description of Artificial Sequence: Synthetic oligonucleotide
  Sense Strand Starting at position 1319 of SEQ ID NO: 318472
gcugguuacguaaguguuu

SEQ ID NO: 422306 - RNA, 19 nt, Artificial Sequence
  Description of Artificial Sequence: Synthetic oligonucleotide
  Antisense Strand to SEQ ID NO: 422305
aaacacuuacguaaccagc

SEQ ID NO: 422307 - RNA, 19 nt, Artificial Sequence
  Description of Artificial Sequence: Synthetic oligonucleotide
  Sense Strand Starting at position 1319 of SEQ ID NO: 318477
uuacguaaguguuuguuaa

SEQ ID NO: 422308 - RNA, 19 nt, Artificial Sequence
  Description of Artificial Sequence: Synthetic oligonucleotide
  Antisense Strand to SEQ ID NO: 422307
uuaacaaacacuuacguaa

SEQ ID NO: 422309 - RNA, 19 nt, Artificial Sequence
  Description of Artificial Sequence: Synthetic oligonucleotide
  Sense Strand Starting at position 1319 of SEQ ID NO: 318478
uacguaaguguuuguuaaa

SEQ ID NO: 422310 - RNA, 19 nt, Artificial Sequence
  Description of Artificial Sequence: Synthetic oligonucleotide
  Antisense Strand to SEQ ID NO: 422309
uuuaacaaacacuuacgua

SEQ ID NO: 422311 - RNA, 19 nt, Artificial Sequence
  Description of Artificial Sequence: Synthetic oligonucleotide
  Sense Strand Starting at position 1319 of SEQ ID NO: 318479
acguaaguguuuguuaaau

SEQ ID NO: 422312 - RNA, 19 nt, Artificial Sequence
  Description of Artificial Sequence: Synthetic oligonucleotide
  Antisense Strand to SEQ ID NO: 422311
auuuaacaaacacuuacgu

SEQ ID NO: 422313 - RNA, 19 nt, Artificial Sequence
  Description of Artificial Sequence: Synthetic oligonucleotide
  Sense Strand Starting at position 1319 of SEQ ID NO: 318500
aagagaacuguauguucuu

SEQ ID NO: 422314 - RNA, 19 nt, Artificial Sequence
  Description of Artificial Sequence: Synthetic oligonucleotide
  Antisense Strand to SEQ ID NO: 422313
aagaacauacaguucucuu

SEQ ID NO: 422315 - RNA, 19 nt, Artificial Sequence
  Description of Artificial Sequence: Synthetic oligonucleotide
  Sense Strand Starting at position 1319 of SEQ ID NO: 318525
cacguauugugccuuaauu

SEQ ID NO: 422316 - RNA, 19 nt, Artificial Sequence
  Description of Artificial Sequence: Synthetic oligonucleotide
  Antisense Strand to SEQ ID NO: 422315
aauuaaggcacaauacgug

SEQ ID NO: 422317 - RNA, 19 nt, Artificial Sequence
  Description of Artificial Sequence: Synthetic oligonucleotide
  Sense Strand Starting at position 1320 of SEQ ID NO: 315343
gcaggcuugugauuugaug

SEQ ID NO: 422318 - RNA, 19 nt, Artificial Sequence
  Description of Artificial Sequence: Synthetic oligonucleotide
  Antisense Strand to SEQ ID NO: 422317
caucaaaucacaagccugc

SEQ ID NO: 422319 - RNA, 19 nt, Artificial Sequence
  Description of Artificial Sequence: Synthetic oligonucleotide
  Sense Strand Starting at position 1320 of SEQ ID NO: 315345
aggcuugugauuugauggu

SEQ ID NO: 422320 - RNA, 19 nt, Artificial Sequence
  Description of Artificial Sequence: Synthetic oligonucleotide
  Antisense Strand to SEQ ID NO: 422319
accaucaaaucacaagccu

SEQ ID NO: 422321 - RNA, 19 nt, Artificial Sequence
  Description of Artificial Sequence: Synthetic oligonucleotide
  Sense Strand Starting at position 1320 of SEQ ID NO: 315370
gguuaacaaguuuaaugua

SEQ ID NO: 422322 - RNA, 19 nt, Artificial Sequence
  Description of Artificial Sequence: Synthetic oligonucleotide
  Antisense Strand to SEQ ID NO: 422321
uacauuaaacuuguuaacc

SEQ ID NO: 422323 - RNA, 19 nt, Artificial Sequence
  Description of Artificial Sequence: Synthetic oligonucleotide
  Sense Strand Starting at position 1320 of SEQ ID NO: 315467
cugugcuguguggucauua

SEQ ID NO: 422324 - RNA, 19 nt, Artificial Sequence
  Description of Artificial Sequence: Synthetic oligonucleotide
  Antisense Strand to SEQ ID NO: 422323
uaaugaccacacagcacag

SEQ ID NO: 422325 - RNA, 19 nt, Artificial Sequence
  Description of Artificial Sequence: Synthetic oligonucleotide
  Sense Strand Starting at position 1320 of SEQ ID NO: 315468
ugugcuguguggucauuau

SEQ ID NO: 422326 - RNA, 19 nt, Artificial Sequence
  Description of Artificial Sequence: Synthetic oligonucleotide
  Antisense Strand to SEQ ID NO: 422325
auaaugaccacacagcaca

SEQ ID NO: 422327 - RNA, 19 nt, Artificial Sequence
  Description of Artificial Sequence: Synthetic oligonucleotide
  Sense Strand Starting at position 1320 of SEQ ID NO: 315472
cuguguggucauuauguca

SEQ ID NO: 422328 - RNA, 19 nt, Artificial Sequence
  Description of Artificial Sequence: Synthetic oligonucleotide
  Antisense Strand to SEQ ID NO: 422327
ugacauaaugaccacacag

SEQ ID NO: 422329 - RNA, 19 nt, Artificial Sequence
  Description of Artificial Sequence: Synthetic oligonucleotide
  Sense Strand Starting at position 1320 of SEQ ID NO: 315479
gucauuaugucacccagcu

SEQ ID NO: 422330 - RNA, 19 nt, Artificial Sequence
  Description of Artificial Sequence: Synthetic oligonucleotide
  Antisense Strand to SEQ ID NO: 422329
agcugggugacauaaugac

SEQ ID NO: 422331 - RNA, 19 nt, Artificial Sequence
  Description of Artificial Sequence: Synthetic oligonucleotide
  Sense Strand Starting at position 1320 of SEQ ID NO: 315621
cugauuuaucucgguguca

SEQ ID NO: 422332 - RNA, 19 nt, Artificial Sequence
  Description of Artificial Sequence: Synthetic oligonucleotide
  Antisense Strand to SEQ ID NO: 422331
ugacaccgagauaaaucag

SEQ ID NO: 422333 - RNA, 19 nt, Artificial Sequence
  Description of Artificial Sequence: Synthetic oligonucleotide
  Sense Strand Starting at position 1320 of SEQ ID NO: 315622
ugauuuaucucggugucac

SEQ ID NO: 422334 - RNA, 19 nt, Artificial Sequence
  Description of Artificial Sequence: Synthetic oligonucleotide
  Antisense Strand to SEQ ID NO: 422333
gugacaccgagauaaauca

SEQ ID NO: 422335 - RNA, 19 nt, Artificial Sequence
  Description of Artificial Sequence: Synthetic oligonucleotide
  Sense Strand Starting at position 1320 of SEQ ID NO: 315623
gauuuaucucggugucaca

SEQ ID NO: 422336 - RNA, 19 nt, Artificial Sequence
  Description of Artificial Sequence: Synthetic oligonucleotide
  Antisense Strand to SEQ ID NO: 422335
ugugacaccgagauaaauc

SEQ ID NO: 422337 - RNA, 19 nt, Artificial Sequence
  Description of Artificial Sequence: Synthetic oligonucleotide
  Sense Strand Starting at position 1320 of SEQ ID NO: 315739
ggcaaagucaccugugugu

SEQ ID NO: 422338 - RNA, 19 nt, Artificial Sequence
  Description of Artificial Sequence: Synthetic oligonucleotide
  Antisense Strand to SEQ ID NO: 422337
acacacaggugacuuugcc

SEQ ID NO: 422339 - RNA, 19 nt, Artificial Sequence
  Description of Artificial Sequence: Synthetic oligonucleotide
  Sense Strand Starting at position 1320 of SEQ ID NO: 315741
caaagucaccuguguguuu

SEQ ID NO: 422340 - RNA, 19 nt, Artificial Sequence
  Description of Artificial Sequence: Synthetic oligonucleotide
  Antisense Strand to SEQ ID NO: 422339
aaacacacaggugacuuug

SEQ ID NO: 422341 - RNA, 19 nt, Artificial Sequence
  Description of Artificial Sequence: Synthetic oligonucleotide
  Sense Strand Starting at position 1320 of SEQ ID NO: 315858
cugugaaauaaccguggaa

SEQ ID NO: 422342 - RNA, 19 nt, Artificial Sequence
  Description of Artificial Sequence: Synthetic oligonucleotide
  Antisense Strand to SEQ ID NO: 422341
uuccacgguuauuucacag

SEQ ID NO: 422343 - RNA, 19 nt, Artificial Sequence
  Description of Artificial Sequence: Synthetic oligonucleotide
  Sense Strand Starting at position 1320 of SEQ ID NO: 315999
ggcugacuuacuugaggaa

SEQ ID NO: 422344 - RNA, 19 nt, Artificial Sequence
  Description of Artificial Sequence: Synthetic oligonucleotide
  Antisense Strand to SEQ ID NO: 422343
uuccucaaguaagucagcc

SEQ ID NO: 422345 - RNA, 19 nt, Artificial Sequence
  Description of Artificial Sequence: Synthetic oligonucleotide
  Sense Strand Starting at position 1320 of SEQ ID NO: 316002
ugacuuacuugaggaagua

SEQ ID NO: 422346 - RNA, 19 nt, Artificial Sequence
  Description of Artificial Sequence: Synthetic oligonucleotide
  Antisense Strand to SEQ ID NO: 422345
uacuuccucaaguaaguca

SEQ ID NO: 422347 - RNA, 19 nt, Artificial Sequence
  Description of Artificial Sequence: Synthetic oligonucleotide
  Sense Strand Starting at position 1320 of SEQ ID NO: 316326
ucggauucaugacagaguu

SEQ ID NO: 422348 - RNA, 19 nt, Artificial Sequence
  Description of Artificial Sequence: Synthetic oligonucleotide
  Antisense Strand to SEQ ID NO: 422347
aacucugucaugaauccga

SEQ ID NO: 422349 - RNA, 19 nt, Artificial Sequence
  Description of Artificial Sequence: Synthetic oligonucleotide
  Sense Strand Starting at position 1320 of SEQ ID NO: 316472
uauuuaaagucggaggaag

SEQ ID NO: 422350 - RNA, 19 nt, Artificial Sequence
  Description of Artificial Sequence: Synthetic oligonucleotide
  Antisense Strand to SEQ ID NO: 422349
cuuccuccgacuuuaaaua

SEQ ID NO: 422351 - RNA, 19 nt, Artificial Sequence
  Description of Artificial Sequence: Synthetic oligonucleotide
  Sense Strand Starting at position 1320 of SEQ ID NO: 316628
cccuccuggccucgagaau

SEQ ID NO: 422352 - RNA, 19 nt, Artificial Sequence
  Description of Artificial Sequence: Synthetic oligonucleotide
  Antisense Strand to SEQ ID NO: 422351
auucucgaggccaggaggg

SEQ ID NO: 422353 - RNA, 19 nt, Artificial Sequence
  Description of Artificial Sequence: Synthetic oligonucleotide
  Sense Strand Starting at position 1320 of SEQ ID NO: 316629
ccuccuggccucgagaauu

SEQ ID NO: 422354 - RNA, 19 nt, Artificial Sequence
  Description of Artificial Sequence: Synthetic oligonucleotide
  Antisense Strand to SEQ ID NO: 422353
aauucucgaggccaggagg

SEQ ID NO: 422355 - RNA, 19 nt, Artificial Sequence
  Description of Artificial Sequence: Synthetic oligonucleotide
  Sense Strand Starting at position 1320 of SEQ ID NO: 316635
ggccucgagaauuaugcaa

SEQ ID NO: 422356 - RNA, 19 nt, Artificial Sequence
  Description of Artificial Sequence: Synthetic oligonucleotide
  Antisense Strand to SEQ ID NO: 422355
uugcauaauucucgaggcc

SEQ ID NO: 422357 - RNA, 19 nt, Artificial Sequence
  Description of Artificial Sequence: Synthetic oligonucleotide
  Sense Strand Starting at position 1320 of SEQ ID NO: 316649
ugcaacuuucuugaagcaa

SEQ ID NO: 422358 - RNA, 19 nt, Artificial Sequence
  Description of Artificial Sequence: Synthetic oligonucleotide
  Antisense Strand to SEQ ID NO: 422357
uugcuucaagaaaguugca

SEQ ID NO: 422359 - RNA, 19 nt, Artificial Sequence
  Description of Artificial Sequence: Synthetic oligonucleotide
  Sense Strand Starting at position 1320 of SEQ ID NO: 316666
aaagaaguugccuggagga

SEQ ID NO: 422360 - RNA, 19 nt, Artificial Sequence
  Description of Artificial Sequence: Synthetic oligonucleotide
  Antisense Strand to SEQ ID NO: 422359
uccuccaggcaacuucuuu

SEQ ID NO: 422361 - RNA, 19 nt, Artificial Sequence
  Description of Artificial Sequence: Synthetic oligonucleotide
  Sense Strand Starting at position 1320 of SEQ ID NO: 316751
aaggaaaggucgcacgauu

SEQ ID NO: 422362 - RNA, 19 nt, Artificial Sequence
  Description of Artificial Sequence: Synthetic oligonucleotide
  Antisense Strand to SEQ ID NO: 422361
aaucgugcgaccuuuccuu

SEQ ID NO: 422363 - RNA, 19 nt, Artificial Sequence
  Description of Artificial Sequence: Synthetic oligonucleotide
  Sense Strand Starting at position 1320 of SEQ ID NO: 317008
cgaggcuuggcugacaaau

SEQ ID NO: 422364 - RNA, 19 nt, Artificial Sequence
  Description of Artificial Sequence: Synthetic oligonucleotide
  Antisense Strand to SEQ ID NO: 422363
auuugucagccaagccucg

SEQ ID NO: 422365 - RNA, 19 nt, Artificial Sequence
  Description of Artificial Sequence: Synthetic oligonucleotide
  Sense Strand Starting at position 1320 of SEQ ID NO: 317154
cggacugucccauaaacaa

SEQ ID NO: 422366 - RNA, 19 nt, Artificial Sequence
  Description of Artificial Sequence: Synthetic oligonucleotide
  Antisense Strand to SEQ ID NO: 422365
uuguuuaugggacaguccg

SEQ ID NO: 422367 - RNA, 19 nt, Artificial Sequence
  Description of Artificial Sequence: Synthetic oligonucleotide
  Sense Strand Starting at position 1320 of SEQ ID NO: 317217
aguugagcuguugaauuau

SEQ ID NO: 422368 - RNA, 19 nt, Artificial Sequence
  Description of Artificial Sequence: Synthetic oligonucleotide
  Antisense Strand to SEQ ID NO: 422367
auaauucaacagcucaacu

SEQ ID NO: 422369 - RNA, 19 nt, Artificial Sequence
  Description of Artificial Sequence: Synthetic oligonucleotide
  Sense Strand Starting at position 1320 of SEQ ID NO: 317325
gggcgugauggguacuuua

SEQ ID NO: 422370 - RNA, 19 nt, Artificial Sequence
  Description of Artificial Sequence: Synthetic oligonucleotide
  Antisense Strand to SEQ ID NO: 422369
uaaaguacccaucacgccc

SEQ ID NO: 422371 - RNA, 19 nt, Artificial Sequence
  Description of Artificial Sequence: Synthetic oligonucleotide
  Sense Strand Starting at position 1320 of SEQ ID NO: 317333
uggguacuuuacuggguaa

SEQ ID NO: 422372 - RNA, 19 nt, Artificial Sequence
  Description of Artificial Sequence: Synthetic oligonucleotide
  Antisense Strand to SEQ ID NO: 422371
uuacccaguaaaguaccca

SEQ ID NO: 422373 - RNA, 19 nt, Artificial Sequence
  Description of Artificial Sequence: Synthetic oligonucleotide
  Sense Strand Starting at position 1320 of SEQ ID NO: 317335
gguacuuuacuggguaaga

SEQ ID NO: 422374 - RNA, 19 nt, Artificial Sequence
  Description of Artificial Sequence: Synthetic oligonucleotide
  Antisense Strand to SEQ ID NO: 422373
ucuuacccaguaaaguacc

SEQ ID NO: 422375 - RNA, 19 nt, Artificial Sequence
  Description of Artificial Sequence: Synthetic oligonucleotide
  Sense Strand Starting at position 1320 of SEQ ID NO: 317336
guacuuuacuggguaagag

SEQ ID NO: 422376 - RNA, 19 nt, Artificial Sequence
  Description of Artificial Sequence: Synthetic oligonucleotide
  Antisense Strand to SEQ ID NO: 422375
cucuuacccaguaaaguac

SEQ ID NO: 422377 - RNA, 19 nt, Artificial Sequence
  Description of Artificial Sequence: Synthetic oligonucleotide
  Sense Strand Starting at position 1320 of SEQ ID NO: 317839
acggguggguuguaaacaa

SEQ ID NO: 422378 - RNA, 19 nt, Artificial Sequence
  Description of Artificial Sequence: Synthetic oligonucleotide
  Antisense Strand to SEQ ID NO: 422377
uuguuuacaacccacccgu

SEQ ID NO: 422379 - RNA, 19 nt, Artificial Sequence
  Description of Artificial Sequence: Synthetic oligonucleotide
  Sense Strand Starting at position 1320 of SEQ ID NO: 317914
acuagagauugagaagaaa

SEQ ID NO: 422380 - RNA, 19 nt, Artificial Sequence
  Description of Artificial Sequence: Synthetic oligonucleotide
  Antisense Strand to SEQ ID NO: 422379
uuucuucucaaucucuagu

SEQ ID NO: 422381 - RNA, 19 nt, Artificial Sequence
  Description of Artificial Sequence: Synthetic oligonucleotide
  Sense Strand Starting at position 1320 of SEQ ID NO: 317987
ugaggguugugggaggauu

SEQ ID NO: 422382 - RNA, 19 nt, Artificial Sequence
  Description of Artificial Sequence: Synthetic oligonucleotide
  Antisense Strand to SEQ ID NO: 422381
aauccucccacaacccuca

SEQ ID NO: 422383 - RNA, 19 nt, Artificial Sequence
  Description of Artificial Sequence: Synthetic oligonucleotide
  Sense Strand Starting at position 1320 of SEQ ID NO: 318341
ggaguuuauuaaguaaauc

SEQ ID NO: 422384 - RNA, 19 nt, Artificial Sequence
  Description of Artificial Sequence: Synthetic oligonucleotide
  Antisense Strand to SEQ ID NO: 422383
gauuuacuuaauaaacucc

SEQ ID NO: 422385 - RNA, 19 nt, Artificial Sequence
  Description of Artificial Sequence: Synthetic oligonucleotide
  Sense Strand Starting at position 1320 of SEQ ID NO: 318396
gcugguuacguaaguguuu

SEQ ID NO: 422386 - RNA, 19 nt, Artificial Sequence
  Description of Artificial Sequence: Synthetic oligonucleotide
  Antisense Strand to SEQ ID NO: 422385
aaacacuuacguaaccagc

SEQ ID NO: 422387 - RNA, 19 nt, Artificial Sequence
  Description of Artificial Sequence: Synthetic oligonucleotide
  Sense Strand Starting at position 1320 of SEQ ID NO: 318401
uuacguaaguguuuguuaa

SEQ ID NO: 422388 - RNA, 19 nt, Artificial Sequence
  Description of Artificial Sequence: Synthetic oligonucleotide
  Antisense Strand to SEQ ID NO: 422387
uuaacaaacacuuacguaa

SEQ ID NO: 422389 - RNA, 19 nt, Artificial Sequence
  Description of Artificial Sequence: Synthetic oligonucleotide
  Sense Strand Starting at position 1320 of SEQ ID NO: 318402
uacguaaguguuuguuaaa

SEQ ID NO: 422390 - RNA, 19 nt, Artificial Sequence
  Description of Artificial Sequence: Synthetic oligonucleotide
  Antisense Strand to SEQ ID NO: 422389
uuuaacaaacacuuacgua

SEQ ID NO: 422391 - RNA, 19 nt, Artificial Sequence
  Description of Artificial Sequence: Synthetic oligonucleotide
  Sense Strand Starting at position 1320 of SEQ ID NO: 318403
acguaaguguuuguuaaau

SEQ ID NO: 422392 - RNA, 19 nt, Artificial Sequence
  Description of Artificial Sequence: Synthetic oligonucleotide
  Antisense Strand to SEQ ID NO: 422391
auuuaacaaacacuuacgu

SEQ ID NO: 422393 - RNA, 19 nt, Artificial Sequence
  Description of Artificial Sequence: Synthetic oligonucleotide
  Sense Strand Starting at position 1320 of SEQ ID NO: 318424
aagagaacuguauguucuu

SEQ ID NO: 422394 - RNA, 19 nt, Artificial Sequence
  Description of Artificial Sequence: Synthetic oligonucleotide
  Antisense Strand to SEQ ID NO: 422393
aagaacauacaguucucuu

SEQ ID NO: 422395 - RNA, 19 nt, Artificial Sequence
  Description of Artificial Sequence: Synthetic oligonucleotide
  Sense Strand Starting at position 1320 of SEQ ID NO: 318449
cacguauugugccuuaauu

SEQ ID NO: 422396 - RNA, 19 nt, Artificial Sequence
  Description of Artificial Sequence: Synthetic oligonucleotide
  Antisense Strand to SEQ ID NO: 422395
aauuaaggcacaauacgug

SEQ ID NO: 422397 - RNA, 19 nt, Artificial Sequence
  Description of Artificial Sequence: Synthetic oligonucleotide
  Sense Strand Starting at position 1321 of SEQ ID NO: 315373
ugauauggcaaaugugaau

SEQ ID NO: 422398 - RNA, 19 nt, Artificial Sequence
  Description of Artificial Sequence: Synthetic oligonucleotide
  Antisense Strand to SEQ ID NO: 422397
auucacauuugccauauca

SEQ ID NO: 422399 - RNA, 19 nt, Artificial Sequence
  Description of Artificial Sequence: Synthetic oligonucleotide
  Sense Strand Starting at position 1321 of SEQ ID NO: 315631
agaacaauauuccucguga

SEQ ID NO: 422400 - RNA, 19 nt, Artificial Sequence
  Description of Artificial Sequence: Synthetic oligonucleotide
  Antisense Strand to SEQ ID NO: 422399
ucacgaggaauauuguucu

SEQ ID NO: 422401 - RNA, 19 nt, Artificial Sequence
  Description of Artificial Sequence: Synthetic oligonucleotide
  Sense Strand Starting at position 1321 of SEQ ID NO: 315670
aacgaaauauuggcagauc

SEQ ID NO: 422402 - RNA, 19 nt, Artificial Sequence
  Description of Artificial Sequence: Synthetic oligonucleotide
  Antisense Strand to SEQ ID NO: 422401
gaucugccaauauuucguu

SEQ ID NO: 422403 - RNA, 19 nt, Artificial Sequence
  Description of Artificial Sequence: Synthetic oligonucleotide
  Sense Strand Starting at position 1321 of SEQ ID NO: 315731
aguugaguuuaucccagaa

SEQ ID NO: 422404 - RNA, 19 nt, Artificial Sequence
  Description of Artificial Sequence: Synthetic oligonucleotide
  Antisense Strand to SEQ ID NO: 422403
uucugggauaaacucaacu

SEQ ID NO: 422405 - RNA, 19 nt, Artificial Sequence
  Description of Artificial Sequence: Synthetic oligonucleotide
  Sense Strand Starting at position 1321 of SEQ ID NO: 316139
uuuagcuuucuggacugua

SEQ ID NO: 422406 - RNA, 19 nt, Artificial Sequence
  Description of Artificial Sequence: Synthetic oligonucleotide
  Antisense Strand to SEQ ID NO: 422405
uacaguccagaaagcuaaa

SEQ ID NO: 422407 - RNA, 19 nt, Artificial Sequence
  Description of Artificial Sequence: Synthetic oligonucleotide
  Sense Strand Starting at position 1321 of SEQ ID NO: 316142
agcuuucuggacuguaaua

SEQ ID NO: 422408 - RNA, 19 nt, Artificial Sequence
  Description of Artificial Sequence: Synthetic oligonucleotide
  Antisense Strand to SEQ ID NO: 422407
uauuacaguccagaaagcu

SEQ ID NO: 422409 - RNA, 19 nt, Artificial Sequence
  Description of Artificial Sequence: Synthetic oligonucleotide
  Sense Strand Starting at position 1321 of SEQ ID NO: 316144
cuuucuggacuguaauaua

SEQ ID NO: 422410 - RNA, 19 nt, Artificial Sequence
  Description of Artificial Sequence: Synthetic oligonucleotide
  Antisense Strand to SEQ ID NO: 422409
uauauuacaguccagaaag

SEQ ID NO: 422411 - RNA, 19 nt, Artificial Sequence
  Description of Artificial Sequence: Synthetic oligonucleotide
  Sense Strand Starting at position 1321 of SEQ ID NO: 316279
uuuauauguuaggucuacu

SEQ ID NO: 422412 - RNA, 19 nt, Artificial Sequence
  Description of Artificial Sequence: Synthetic oligonucleotide
  Antisense Strand to SEQ ID NO: 422411
aguagaccuaacauauaaa

SEQ ID NO: 422413 - RNA, 19 nt, Artificial Sequence
  Description of Artificial Sequence: Synthetic oligonucleotide
  Sense Strand Starting at position 1321 of SEQ ID NO: 316282
auauguuaggucuacucaa

SEQ ID NO: 422414 - RNA, 19 nt, Artificial Sequence
  Description of Artificial Sequence: Synthetic oligonucleotide
  Antisense Strand to SEQ ID NO: 422413
uugaguagaccuaacauau

SEQ ID NO: 422415 - RNA, 19 nt, Artificial Sequence
  Description of Artificial Sequence: Synthetic oligonucleotide
  Sense Strand Starting at position 1321 of SEQ ID NO: 316299
aaaguaugguucccagauc

SEQ ID NO: 422416 - RNA, 19 nt, Artificial Sequence
  Description of Artificial Sequence: Synthetic oligonucleotide
  Antisense Strand to SEQ ID NO: 422415
gaucugggaaccauacuuu

SEQ ID NO: 422417 - RNA, 19 nt, Artificial Sequence
  Description of Artificial Sequence: Synthetic oligonucleotide
  Sense Strand Starting at position 1321 of SEQ ID NO: 316828
ucaucauguuagguaagga

SEQ ID NO: 422418 - RNA, 19 nt, Artificial Sequence
  Description of Artificial Sequence: Synthetic oligonucleotide
  Antisense Strand to SEQ ID NO: 422417
uccuuaccuaacaugauga

SEQ ID NO: 422419 - RNA, 19 nt, Artificial Sequence
  Description of Artificial Sequence: Synthetic oligonucleotide
  Sense Strand Starting at position 1321 of SEQ ID NO: 316860
agaaaucugccaggccaau

SEQ ID NO: 422420 - RNA, 19 nt, Artificial Sequence
  Description of Artificial Sequence: Synthetic oligonucleotide
  Antisense Strand to SEQ ID NO: 422419
auuggccuggcagauuucu

SEQ ID NO: 422421 - RNA, 19 nt, Artificial Sequence
  Description of Artificial Sequence: Synthetic oligonucleotide
  Sense Strand Starting at position 1321 of SEQ ID NO: 316878
uccggaacuccuggacuua

SEQ ID NO: 422422 - RNA, 19 nt, Artificial Sequence
  Description of Artificial Sequence: Synthetic oligonucleotide
  Antisense Strand to SEQ ID NO: 422421
uaaguccaggaguuccgga

SEQ ID NO: 422423 - RNA, 19 nt, Artificial Sequence
  Description of Artificial Sequence: Synthetic oligonucleotide
  Sense Strand Starting at position 1321 of SEQ ID NO: 316982
gaaugcagauucuugggaa

SEQ ID NO: 422424 - RNA, 19 nt, Artificial Sequence
  Description of Artificial Sequence: Synthetic oligonucleotide
  Antisense Strand to SEQ ID NO: 422423
uucccaagaaucugcauuc

SEQ ID NO: 422425 - RNA, 19 nt, Artificial Sequence
  Description of Artificial Sequence: Synthetic oligonucleotide
  Sense Strand Starting at position 1321 of SEQ ID NO: 317072
gguucugaugugcagcaaa

SEQ ID NO: 422426 - RNA, 19 nt, Artificial Sequence
  Description of Artificial Sequence: Synthetic oligonucleotide
  Antisense Strand to SEQ ID NO: 422425
uuugcugcacaucagaacc

SEQ ID NO: 422427 - RNA, 19 nt, Artificial Sequence
  Description of Artificial Sequence: Synthetic oligonucleotide
  Sense Strand Starting at position 1321 of SEQ ID NO: 317102
ccugauauaggcuguuaca

SEQ ID NO: 422428 - RNA, 19 nt, Artificial Sequence
  Description of Artificial Sequence: Synthetic oligonucleotide
  Antisense Strand to SEQ ID NO: 422427
uguaacagccuauaucagg

SEQ ID NO: 422429 - RNA, 19 nt, Artificial Sequence
  Description of Artificial Sequence: Synthetic oligonucleotide
  Sense Strand Starting at position 1321 of SEQ ID NO: 317186
ugcgucuugaggcagaaau

SEQ ID NO: 422430 - RNA, 19 nt, Artificial Sequence
  Description of Artificial Sequence: Synthetic oligonucleotide
  Antisense Strand to SEQ ID NO: 422429
auuucugccucaagacgca

SEQ ID NO: 422431 - RNA, 19 nt, Artificial Sequence
  Description of Artificial Sequence: Synthetic oligonucleotide
  Sense Strand Starting at position 1321 of SEQ ID NO: 317367
ggguggauccuugguggaa

SEQ ID NO: 422432 - RNA, 19 nt, Artificial Sequence
  Description of Artificial Sequence: Synthetic oligonucleotide
  Antisense Strand to SEQ ID NO: 422431
uuccaccaaggauccaccc

SEQ ID NO: 422433 - RNA, 19 nt, Artificial Sequence
  Description of Artificial Sequence: Synthetic oligonucleotide
  Sense Strand Starting at position 1321 of SEQ ID NO: 317442
gagccugcauguuugaaua

SEQ ID NO: 422434 - RNA, 19 nt, Artificial Sequence
  Description of Artificial Sequence: Synthetic oligonucleotide
  Antisense Strand to SEQ ID NO: 422433
uauucaaacaugcaggcuc

SEQ ID NO: 422435 - RNA, 19 nt, Artificial Sequence
  Description of Artificial Sequence: Synthetic oligonucleotide
  Sense Strand Starting at position 1321 of SEQ ID NO: 317562
ccgauugguccuuaccuuu

SEQ ID NO: 422436 - RNA, 19 nt, Artificial Sequence
  Description of Artificial Sequence: Synthetic oligonucleotide
  Antisense Strand to SEQ ID NO: 422435
aaagguaaggaccaaucgg

SEQ ID NO: 422437 - RNA, 19 nt, Artificial Sequence
  Description of Artificial Sequence: Synthetic oligonucleotide
  Sense Strand Starting at position 1321 of SEQ ID NO: 317597
accuaucuuucugugauua

SEQ ID NO: 422438 - RNA, 19 nt, Artificial Sequence
  Description of Artificial Sequence: Synthetic oligonucleotide
  Antisense Strand to SEQ ID NO: 422437
uaaucacagaaagauaggu

SEQ ID NO: 422439 - RNA, 19 nt, Artificial Sequence
  Description of Artificial Sequence: Synthetic oligonucleotide
  Sense Strand Starting at position 1321 of SEQ ID NO: 317598
ccuaucuuucugugauuag

SEQ ID NO: 422440 - RNA, 19 nt, Artificial Sequence
  Description of Artificial Sequence: Synthetic oligonucleotide
  Antisense Strand to SEQ ID NO: 422439
cuaaucacagaaagauagg

SEQ ID NO: 422441 - RNA, 19 nt, Artificial Sequence
  Description of Artificial Sequence: Synthetic oligonucleotide
  Sense Strand Starting at position 1321 of SEQ ID NO: 317613
uuagcugcucgccaaauuu

SEQ ID NO: 422442 - RNA, 19 nt, Artificial Sequence
  Description of Artificial Sequence: Synthetic oligonucleotide
  Antisense Strand to SEQ ID NO: 422441
aaauuuggcgagcagcuaa

SEQ ID NO: 422443 - RNA, 19 nt, Artificial Sequence
  Description of Artificial Sequence: Synthetic oligonucleotide
  Sense Strand Starting at position 1321 of SEQ ID NO: 317733
uuguaccucuuccugagua

SEQ ID NO: 422444 - RNA, 19 nt, Artificial Sequence
  Description of Artificial Sequence: Synthetic oligonucleotide
  Antisense Strand to SEQ ID NO: 422443
uacucaggaagagguacaa

SEQ ID NO: 422445 - RNA, 19 nt, Artificial Sequence
  Description of Artificial Sequence: Synthetic oligonucleotide
  Sense Strand Starting at position 1321 of SEQ ID NO: 317735
guaccucuuccugaguagu

SEQ ID NO: 422446 - RNA, 19 nt, Artificial Sequence
  Description of Artificial Sequence: Synthetic oligonucleotide
  Antisense Strand to SEQ ID NO: 422445
acuacucaggaagagguac

SEQ ID NO: 422447 - RNA, 19 nt, Artificial Sequence
  Description of Artificial Sequence: Synthetic oligonucleotide
  Sense Strand Starting at position 1321 of SEQ ID NO: 317785
gcacguauuuccucauucu

SEQ ID NO: 422448 - RNA, 19 nt, Artificial Sequence
  Description of Artificial Sequence: Synthetic oligonucleotide
  Antisense Strand to SEQ ID NO: 422447
agaaugaggaaauacgugc

SEQ ID NO: 422449 - RNA, 19 nt, Artificial Sequence
  Description of Artificial Sequence: Synthetic oligonucleotide
  Sense Strand Starting at position 1321 of SEQ ID NO: 317940
uuucuuggucgugggacaa

SEQ ID NO: 422450 - RNA, 19 nt, Artificial Sequence
  Description of Artificial Sequence: Synthetic oligonucleotide
  Antisense Strand to SEQ ID NO: 422449
uugucccacgaccaagaaa

SEQ ID NO: 422451 - RNA, 19 nt, Artificial Sequence
  Description of Artificial Sequence: Synthetic oligonucleotide
  Sense Strand Starting at position 1321 of SEQ ID NO: 318100
auauguguauuggucauuu

SEQ ID NO: 422452 - RNA, 19 nt, Artificial Sequence
  Description of Artificial Sequence: Synthetic oligonucleotide
  Antisense Strand to SEQ ID NO: 422451
aaaugaccaauacacauau

SEQ ID NO: 422453 - RNA, 19 nt, Artificial Sequence
  Description of Artificial Sequence: Synthetic oligonucleotide
  Sense Strand Starting at position 1321 of SEQ ID NO: 318102
auguguauuggucauuugu

SEQ ID NO: 422454 - RNA, 19 nt, Artificial Sequence
  Description of Artificial Sequence: Synthetic oligonucleotide
  Antisense Strand to SEQ ID NO: 422453
acaaaugaccaauacacau

SEQ ID NO: 422455 - RNA, 19 nt, Artificial Sequence
  Description of Artificial Sequence: Synthetic oligonucleotide
  Sense Strand Starting at position 1321 of SEQ ID NO: 318104
guguauuggucauuugugu

SEQ ID NO: 422456 - RNA, 19 nt, Artificial Sequence
  Description of Artificial Sequence: Synthetic oligonucleotide
  Antisense Strand to SEQ ID NO: 422455
acacaaaugaccaauacac

SEQ ID NO: 422457 - RNA, 19 nt, Artificial Sequence
  Description of Artificial Sequence: Synthetic oligonucleotide
  Sense Strand Starting at position 1321 of SEQ ID NO: 318115
auuuguguaucucuuugua

SEQ ID NO: 422458 - RNA, 19 nt, Artificial Sequence
  Description of Artificial Sequence: Synthetic oligonucleotide
  Antisense Strand to SEQ ID NO: 422457
uacaaagagauacacaaau

SEQ ID NO: 422459 - RNA, 19 nt, Artificial Sequence
  Description of Artificial Sequence: Synthetic oligonucleotide
  Sense Strand Starting at position 1321 of SEQ ID NO: 318119
guguaucucuuuguagaag

SEQ ID NO: 422460 - RNA, 19 nt, Artificial Sequence
  Description of Artificial Sequence: Synthetic oligonucleotide
  Antisense Strand to SEQ ID NO: 422459
cuucuacaaagagauacac

SEQ ID NO: 422461 - RNA, 19 nt, Artificial Sequence
  Description of Artificial Sequence: Synthetic oligonucleotide
  Sense Strand Starting at position 1321 of SEQ ID NO: 318698
ugcuguuguaguuaagaaa

SEQ ID NO: 422462 - RNA, 19 nt, Artificial Sequence
  Description of Artificial Sequence: Synthetic oligonucleotide
  Antisense Strand to SEQ ID NO: 422461
uuucuuaacuacaacagca

SEQ ID NO: 422463 - RNA, 19 nt, Artificial Sequence
  Description of Artificial Sequence: Synthetic oligonucleotide
  Sense Strand Starting at position 1321 of SEQ ID NO: 318709
uuaagaaauccuugccuag

SEQ ID NO: 422464 - RNA, 19 nt, Artificial Sequence
  Description of Artificial Sequence: Synthetic oligonucleotide
  Antisense Strand to SEQ ID NO: 422463
cuaggcaaggauuucuuaa

SEQ ID NO: 422465 - RNA, 19 nt, Artificial Sequence
  Description of Artificial Sequence: Synthetic oligonucleotide
  Sense Strand Starting at position 1321 of SEQ ID NO: 318712
agaaauccuugccuaguca

SEQ ID NO: 422466 - RNA, 19 nt, Artificial Sequence
  Description of Artificial Sequence: Synthetic oligonucleotide
  Antisense Strand to SEQ ID NO: 422465
ugacuaggcaaggauuucu

SEQ ID NO: 422467 - RNA, 19 nt, Artificial Sequence
  Description of Artificial Sequence: Synthetic oligonucleotide
  Sense Strand Starting at position 1321 of SEQ ID NO: 318792
ugcaucuauccuuauguca

SEQ ID NO: 422468 - RNA, 19 nt, Artificial Sequence
  Description of Artificial Sequence: Synthetic oligonucleotide
  Antisense Strand to SEQ ID NO: 422467
ugacauaaggauagaugca

SEQ ID NO: 422469 - RNA, 19 nt, Artificial Sequence
  Description of Artificial Sequence: Synthetic oligonucleotide
  Sense Strand Starting at position 1321 of SEQ ID NO: 318799
auccuuaugucaguaccau

SEQ ID NO: 422470 - RNA, 19 nt, Artificial Sequence
  Description of Artificial Sequence: Synthetic oligonucleotide
  Antisense Strand to SEQ ID NO: 422469
augguacugacauaaggau

SEQ ID NO: 422471 - RNA, 19 nt, Artificial Sequence
  Description of Artificial Sequence: Synthetic oligonucleotide
  Sense Strand Starting at position 1321 of SEQ ID NO: 318805
augucaguaccauagaguu

SEQ ID NO: 422472 - RNA, 19 nt, Artificial Sequence
  Description of Artificial Sequence: Synthetic oligonucleotide
  Antisense Strand to SEQ ID NO: 422471
aacucuaugguacugacau

SEQ ID NO: 422473 - RNA, 19 nt, Artificial Sequence
  Description of Artificial Sequence: Synthetic oligonucleotide
  Sense Strand Starting at position 1321 of SEQ ID NO: 318823
uuugauuaccuuuguagua

SEQ ID NO: 422474 - RNA, 19 nt, Artificial Sequence
  Description of Artificial Sequence: Synthetic oligonucleotide
  Antisense Strand to SEQ ID NO: 422473
uacuacaaagguaaucaaa

SEQ ID NO: 422475 - RNA, 19 nt, Artificial Sequence
  Description of Artificial Sequence: Synthetic oligonucleotide
  Sense Strand Starting at position 1321 of SEQ ID NO: 318824
uugauuaccuuuguaguaa

SEQ ID NO: 422476 - RNA, 19 nt, Artificial Sequence
  Description of Artificial Sequence: Synthetic oligonucleotide
  Antisense Strand to SEQ ID NO: 422475
uuacuacaaagguaaucaa

SEQ ID NO: 422477 - RNA, 19 nt, Artificial Sequence
  Description of Artificial Sequence: Synthetic oligonucleotide
  Sense Strand Starting at position 1322 of SEQ ID NO: 315329
ggucucuguccauguaugu

SEQ ID NO: 422478 - RNA, 19 nt, Artificial Sequence
  Description of Artificial Sequence: Synthetic oligonucleotide
  Antisense Strand to SEQ ID NO: 422477
acauacauggacagagacc

SEQ ID NO: 422479 - RNA, 19 nt, Artificial Sequence
  Description of Artificial Sequence: Synthetic oligonucleotide
  Sense Strand Starting at position 1322 of SEQ ID NO: 315345
ugucuuaucucucuuguga

SEQ ID NO: 422480 - RNA, 19 nt, Artificial Sequence
  Description of Artificial Sequence: Synthetic oligonucleotide
  Antisense Strand to SEQ ID NO: 422479
ucacaagagagauaagaca

SEQ ID NO: 422481 - RNA, 19 nt, Artificial Sequence
  Description of Artificial Sequence: Synthetic oligonucleotide
  Sense Strand Starting at position 1322 of SEQ ID NO: 315356
ucuugugacagguguacua

SEQ ID NO: 422482 - RNA, 19 nt, Artificial Sequence
  Description of Artificial Sequence: Synthetic oligonucleotide
  Antisense Strand to SEQ ID NO: 422481
uaguacaccugucacaaga

SEQ ID NO: 422483 - RNA, 19 nt, Artificial Sequence
  Description of Artificial Sequence: Synthetic oligonucleotide
  Sense Strand Starting at position 1322 of SEQ ID NO: 315462
gcuaaauauagcugagguc

SEQ ID NO: 422484 - RNA, 19 nt, Artificial Sequence
  Description of Artificial Sequence: Synthetic oligonucleotide
  Antisense Strand to SEQ ID NO: 422483
gaccucagcuauauuuagc

SEQ ID NO: 422485 - RNA, 19 nt, Artificial Sequence
  Description of Artificial Sequence: Synthetic oligonucleotide
  Sense Strand Starting at position 1322 of SEQ ID NO: 315840
gccugagucucaucaaagc

SEQ ID NO: 422486 - RNA, 19 nt, Artificial Sequence
  Description of Artificial Sequence: Synthetic oligonucleotide
  Antisense Strand to SEQ ID NO: 422485
gcuuugaugagacucaggc

SEQ ID NO: 422487 - RNA, 19 nt, Artificial Sequence
  Description of Artificial Sequence: Synthetic oligonucleotide
  Sense Strand Starting at position 1322 of SEQ ID NO: 316045
gacaguuauuaucauggag

SEQ ID NO: 422488 - RNA, 19 nt, Artificial Sequence
  Description of Artificial Sequence: Synthetic oligonucleotide
  Antisense Strand to SEQ ID NO: 422487
cuccaugauaauaacuguc

SEQ ID NO: 422489 - RNA, 19 nt, Artificial Sequence
  Description of Artificial Sequence: Synthetic oligonucleotide
  Sense Strand Starting at position 1322 of SEQ ID NO: 316185
guagcaaagccugaagcau

SEQ ID NO: 422490 - RNA, 19 nt, Artificial Sequence
  Description of Artificial Sequence: Synthetic oligonucleotide
  Antisense Strand to SEQ ID NO: 422489
augcuucaggcuuugcuac

SEQ ID NO: 422491 - RNA, 19 nt, Artificial Sequence
  Description of Artificial Sequence: Synthetic oligonucleotide
  Sense Strand Starting at position 1322 of SEQ ID NO: 316196
ugaagcaugucuccugacu

SEQ ID NO: 422492 - RNA, 19 nt, Artificial Sequence
  Description of Artificial Sequence: Synthetic oligonucleotide
  Antisense Strand to SEQ ID NO: 422491
agucaggagacaugcuuca

SEQ ID NO: 422493 - RNA, 19 nt, Artificial Sequence
  Description of Artificial Sequence: Synthetic oligonucleotide
  Sense Strand Starting at position 1322 of SEQ ID NO: 316231
ccaucuuugccuggcuuga

SEQ ID NO: 422494 - RNA, 19 nt, Artificial Sequence
  Description of Artificial Sequence: Synthetic oligonucleotide
  Antisense Strand to SEQ ID NO: 422493
ucaagccaggcaaagaugg

SEQ ID NO: 422495 - RNA, 19 nt, Artificial Sequence
  Description of Artificial Sequence: Synthetic oligonucleotide
  Sense Strand Starting at position 1322 of SEQ ID NO: 316233
aucuuugccuggcuugaga

SEQ ID NO: 422496 - RNA, 19 nt, Artificial Sequence
  Description of Artificial Sequence: Synthetic oligonucleotide
  Antisense Strand to SEQ ID NO: 422495
ucucaagccaggcaaagau

SEQ ID NO: 422497 - RNA, 19 nt, Artificial Sequence
  Description of Artificial Sequence: Synthetic oligonucleotide
  Sense Strand Starting at position 1322 of SEQ ID NO: 316329
ccuagagcuuggucuccua

SEQ ID NO: 422498 - RNA, 19 nt, Artificial Sequence
  Description of Artificial Sequence: Synthetic oligonucleotide
  Antisense Strand to SEQ ID NO: 422497
uaggagaccaagcucuagg

SEQ ID NO: 422499 - RNA, 19 nt, Artificial Sequence
  Description of Artificial Sequence: Synthetic oligonucleotide
  Sense Strand Starting at position 1322 of SEQ ID NO: 316414
ggcuccauaugucuuuaca

SEQ ID NO: 422500 - RNA, 19 nt, Artificial Sequence
  Description of Artificial Sequence: Synthetic oligonucleotide
  Antisense Strand to SEQ ID NO: 422499
uguaaagacauauggagcc

SEQ ID NO: 422501 - RNA, 19 nt, Artificial Sequence
  Description of Artificial Sequence: Synthetic oligonucleotide
  Sense Strand Starting at position 1322 of SEQ ID NO: 316425
ucuuuacaucugggcaaau

SEQ ID NO: 422502 - RNA, 19 nt, Artificial Sequence
  Description of Artificial Sequence: Synthetic oligonucleotide
  Antisense Strand to SEQ ID NO: 422501
auuugcccagauguaaaga

SEQ ID NO: 422503 - RNA, 19 nt, Artificial Sequence
  Description of Artificial Sequence: Synthetic oligonucleotide
  Sense Strand Starting at position 1322 of SEQ ID NO: 316426
cuuuacaucugggcaaauu

SEQ ID NO: 422504 - RNA, 19 nt, Artificial Sequence
  Description of Artificial Sequence: Synthetic oligonucleotide
  Antisense Strand to SEQ ID NO: 422503
aauuugcccagauguaaag

SEQ ID NO: 422505 - RNA, 19 nt, Artificial Sequence
  Description of Artificial Sequence: Synthetic oligonucleotide
  Sense Strand Starting at position 1322 of SEQ ID NO: 316488
gggcuuucccacugggcaa

SEQ ID NO: 422506 - RNA, 19 nt, Artificial Sequence
  Description of Artificial Sequence: Synthetic oligonucleotide
  Antisense Strand to SEQ ID NO: 422505
uugcccagugggaaagccc

SEQ ID NO: 422507 - RNA, 19 nt, Artificial Sequence
  Description of Artificial Sequence: Synthetic oligonucleotide
  Sense Strand Starting at position 1322 of SEQ ID NO: 316549
aggcuaugauauguaggga

SEQ ID NO: 422508 - RNA, 19 nt, Artificial Sequence
  Description of Artificial Sequence: Synthetic oligonucleotide
  Antisense Strand to SEQ ID NO: 422507
ucccuacauaucauagccu

SEQ ID NO: 422509 - RNA, 19 nt, Artificial Sequence
  Description of Artificial Sequence: Synthetic oligonucleotide
  Sense Strand Starting at position 1322 of SEQ ID NO: 316552
cuaugauauguagggagcu

SEQ ID NO: 422510 - RNA, 19 nt, Artificial Sequence
  Description of Artificial Sequence: Synthetic oligonucleotide
  Antisense Strand to SEQ ID NO: 422509
agcucccuacauaucauag

SEQ ID NO: 422511 - RNA, 19 nt, Artificial Sequence
  Description of Artificial Sequence: Synthetic oligonucleotide
  Sense Strand Starting at position 1322 of SEQ ID NO: 316589
gggagcuaucccugggcca

SEQ ID NO: 422512 - RNA, 19 nt, Artificial Sequence
  Description of Artificial Sequence: Synthetic oligonucleotide
  Antisense Strand to SEQ ID NO: 422511
uggcccagggauagcuccc

SEQ ID NO: 422513 - RNA, 19 nt, Artificial Sequence
  Description of Artificial Sequence: Synthetic oligonucleotide
  Sense Strand Starting at position 1322 of SEQ ID NO: 316614
ccaagagugucauccacaa

SEQ ID NO: 422514 - RNA, 19 nt, Artificial Sequence
  Description of Artificial Sequence: Synthetic oligonucleotide
  Antisense Strand to SEQ ID NO: 422513
uuguggaugacacucuugg

SEQ ID NO: 422515 - RNA, 19 nt, Artificial Sequence
  Description of Artificial Sequence: Synthetic oligonucleotide
  Sense Strand Starting at position 1322 of SEQ ID NO: 316738
ugaagcuucccugggagga

SEQ ID NO: 422516 - RNA, 19 nt, Artificial Sequence
  Description of Artificial Sequence: Synthetic oligonucleotide
  Antisense Strand to SEQ ID NO: 422515
uccucccagggaagcuuca

SEQ ID NO: 422517 - RNA, 19 nt, Artificial Sequence
  Description of Artificial Sequence: Synthetic oligonucleotide
  Sense Strand Starting at position 1322 of SEQ ID NO: 316924
gguucuuuaugucugagac

SEQ ID NO: 422518 - RNA, 19 nt, Artificial Sequence
  Description of Artificial Sequence: Synthetic oligonucleotide
  Antisense Strand to SEQ ID NO: 422517
gucucagacauaaagaacc

SEQ ID NO: 422519 - RNA, 19 nt, Artificial Sequence
  Description of Artificial Sequence: Synthetic oligonucleotide
  Sense Strand Starting at position 1322 of SEQ ID NO: 316925
guucuuuaugucugagacu

SEQ ID NO: 422520 - RNA, 19 nt, Artificial Sequence
  Description of Artificial Sequence: Synthetic oligonucleotide
  Antisense Strand to SEQ ID NO: 422519
agucucagacauaaagaac

SEQ ID NO: 422521 - RNA, 19 nt, Artificial Sequence
  Description of Artificial Sequence: Synthetic oligonucleotide
  Sense Strand Starting at position 1322 of SEQ ID NO: 317071
gagguagguuacucaccaa

SEQ ID NO: 422522 - RNA, 19 nt, Artificial Sequence
  Description of Artificial Sequence: Synthetic oligonucleotide
  Antisense Strand to SEQ ID NO: 422521
uuggugaguaaccuaccuc

SEQ ID NO: 422523 - RNA, 19 nt, Artificial Sequence
  Description of Artificial Sequence: Synthetic oligonucleotide
  Sense Strand Starting at position 1322 of SEQ ID NO: 317109
ggguguuuguggucuguag

SEQ ID NO: 422524 - RNA, 19 nt, Artificial Sequence
  Description of Artificial Sequence: Synthetic oligonucleotide
  Antisense Strand to SEQ ID NO: 422523
cuacagaccacaaacaccc

SEQ ID NO: 422525 - RNA, 19 nt, Artificial Sequence
  Description of Artificial Sequence: Synthetic oligonucleotide
  Sense Strand Starting at position 1322 of SEQ ID NO: 317311
cuauguuccgaguauuaag

SEQ ID NO: 422526 - RNA, 19 nt, Artificial Sequence
  Description of Artificial Sequence: Synthetic oligonucleotide
  Antisense Strand to SEQ ID NO: 422525
cuuaauacucggaacauag

SEQ ID NO: 422527 - RNA, 19 nt, Artificial Sequence
  Description of Artificial Sequence: Synthetic oligonucleotide
  Sense Strand Starting at position 1322 of SEQ ID NO: 317321
aguauuaagugguucgguu

SEQ ID NO: 422528 - RNA, 19 nt, Artificial Sequence
  Description of Artificial Sequence: Synthetic oligonucleotide
  Antisense Strand to SEQ ID NO: 422527
aaccgaaccacuuaauacu

SEQ ID NO: 422529 - RNA, 19 nt, Artificial Sequence
  Description of Artificial Sequence: Synthetic oligonucleotide
  Sense Strand Starting at position 1322 of SEQ ID NO: 317323
uauuaagugguucgguuau

SEQ ID NO: 422530 - RNA, 19 nt, Artificial Sequence
  Description of Artificial Sequence: Synthetic oligonucleotide
  Antisense Strand to SEQ ID NO: 422529
auaaccgaaccacuuaaua

SEQ ID NO: 422531 - RNA, 19 nt, Artificial Sequence
  Description of Artificial Sequence: Synthetic oligonucleotide
  Sense Strand Starting at position 1322 of SEQ ID NO: 317325
uuaagugguucgguuauuu

SEQ ID NO: 422532 - RNA, 19 nt, Artificial Sequence
  Description of Artificial Sequence: Synthetic oligonucleotide
  Antisense Strand to SEQ ID NO: 422531
aaauaaccgaaccacuuaa

SEQ ID NO: 422533 - RNA, 19 nt, Artificial Sequence
  Description of Artificial Sequence: Synthetic oligonucleotide
  Sense Strand Starting at position 1322 of SEQ ID NO: 317344
uuaggucuuguggaaguca

SEQ ID NO: 422534 - RNA, 19 nt, Artificial Sequence
  Description of Artificial Sequence: Synthetic oligonucleotide
  Antisense Strand to SEQ ID NO: 422533
ugacuuccacaagaccuaa

SEQ ID NO: 422535 - RNA, 19 nt, Artificial Sequence
  Description of Artificial Sequence: Synthetic oligonucleotide
  Sense Strand Starting at position 1322 of SEQ ID NO: 317551
gcuugcucccgucuuguga

SEQ ID NO: 422536 - RNA, 19 nt, Artificial Sequence
  Description of Artificial Sequence: Synthetic oligonucleotide
  Antisense Strand to SEQ ID NO: 422535
ucacaagacgggagcaagc

SEQ ID NO: 422537 - RNA, 19 nt, Artificial Sequence
  Description of Artificial Sequence: Synthetic oligonucleotide
  Sense Strand Starting at position 1322 of SEQ ID NO: 317688
ccuggauaccucugagugu

SEQ ID NO: 422538 - RNA, 19 nt, Artificial Sequence
  Description of Artificial Sequence: Synthetic oligonucleotide
  Antisense Strand to SEQ ID NO: 422537
acacucagagguauccagg

SEQ ID NO: 422539 - RNA, 19 nt, Artificial Sequence
  Description of Artificial Sequence: Synthetic oligonucleotide
  Sense Strand Starting at position 1322 of SEQ ID NO: 317691
ggauaccucugagugugau

SEQ ID NO: 422540 - RNA, 19 nt, Artificial Sequence
  Description of Artificial Sequence: Synthetic oligonucleotide
  Antisense Strand to SEQ ID NO: 422539
aucacacucagagguaucc

SEQ ID NO: 422541 - RNA, 19 nt, Artificial Sequence
  Description of Artificial Sequence: Synthetic oligonucleotide
  Sense Strand Starting at position 1322 of SEQ ID NO: 318469
gccagacauugcucacuuu

SEQ ID NO: 422542 - RNA, 19 nt, Artificial Sequence
  Description of Artificial Sequence: Synthetic oligonucleotide
  Antisense Strand to SEQ ID NO: 422541
aaagugagcaaugucuggc

SEQ ID NO: 422543 - RNA, 19 nt, Artificial Sequence
  Description of Artificial Sequence: Synthetic oligonucleotide
  Sense Strand Starting at position 1322 of SEQ ID NO: 318490
ccauguagucaaugucagu

SEQ ID NO: 422544 - RNA, 19 nt, Artificial Sequence
  Description of Artificial Sequence: Synthetic oligonucleotide
  Antisense Strand to SEQ ID NO: 422543
acugacauugacuacaugg

SEQ ID NO: 422545 - RNA, 19 nt, Artificial Sequence
  Description of Artificial Sequence: Synthetic oligonucleotide
  Sense Strand Starting at position 1322 of SEQ ID NO: 318683
gccuuagguuucucaggau

SEQ ID NO: 422546 - RNA, 19 nt, Artificial Sequence
  Description of Artificial Sequence: Synthetic oligonucleotide
  Antisense Strand to SEQ ID NO: 422545
auccugagaaaccuaaggc

SEQ ID NO: 422547 - RNA, 19 nt, Artificial Sequence
  Description of Artificial Sequence: Synthetic oligonucleotide
  Sense Strand Starting at position 1322 of SEQ ID NO: 318686
uuagguuucucaggauuuc

SEQ ID NO: 422548 - RNA, 19 nt, Artificial Sequence
  Description of Artificial Sequence: Synthetic oligonucleotide
  Antisense Strand to SEQ ID NO: 422547
gaaauccugagaaaccuaa

SEQ ID NO: 422549 - RNA, 19 nt, Artificial Sequence
  Description of Artificial Sequence: Synthetic oligonucleotide
  Sense Strand Starting at position 1322 of SEQ ID NO: 318696
caggauuucuccugggagg

SEQ ID NO: 422550 - RNA, 19 nt, Artificial Sequence
  Description of Artificial Sequence: Synthetic oligonucleotide
  Antisense Strand to SEQ ID NO: 422549
ccucccaggagaaauccug

SEQ ID NO: 422551 - RNA, 19 nt, Artificial Sequence
  Description of Artificial Sequence: Synthetic oligonucleotide
  Sense Strand Starting at position 1322 of SEQ ID NO: 318742
ucuuacuuucuaggauagu

SEQ ID NO: 422552 - RNA, 19 nt, Artificial Sequence
  Description of Artificial Sequence: Synthetic oligonucleotide
  Antisense Strand to SEQ ID NO: 422551
acuauccuagaaaguaaga

SEQ ID NO: 422553 - RNA, 19 nt, Artificial Sequence
  Description of Artificial Sequence: Synthetic oligonucleotide
  Sense Strand Starting at position 1322 of SEQ ID NO: 319114
gcacauagccuaugcuuua

SEQ ID NO: 422554 - RNA, 19 nt, Artificial Sequence
  Description of Artificial Sequence: Synthetic oligonucleotide
  Antisense Strand to SEQ ID NO: 422553
uaaagcauaggcuaugugc

SEQ ID NO: 422555 - RNA, 19 nt, Artificial Sequence
  Description of Artificial Sequence: Synthetic oligonucleotide
  Sense Strand Starting at position 1322 of SEQ ID NO: 319214
gauaacucaugggagaaau

SEQ ID NO: 422556 - RNA, 19 nt, Artificial Sequence
  Description of Artificial Sequence: Synthetic oligonucleotide
  Antisense Strand to SEQ ID NO: 422555
auuucucccaugaguuauc

SEQ ID NO: 422557 - RNA, 19 nt, Artificial Sequence
  Description of Artificial Sequence: Synthetic oligonucleotide
  Sense Strand Starting at position 1323 of SEQ ID NO: 315337
ggucucuguccauguaugu

SEQ ID NO: 422558 - RNA, 19 nt, Artificial Sequence
  Description of Artificial Sequence: Synthetic oligonucleotide
  Antisense Strand to SEQ ID NO: 422557
acauacauggacagagacc

SEQ ID NO: 422559 - RNA, 19 nt, Artificial Sequence
  Description of Artificial Sequence: Synthetic oligonucleotide
  Sense Strand Starting at position 1323 of SEQ ID NO: 315353
ugucuuaucucucuuguga

SEQ ID NO: 422560 - RNA, 19 nt, Artificial Sequence
  Description of Artificial Sequence: Synthetic oligonucleotide
  Antisense Strand to SEQ ID NO: 422559
ucacaagagagauaagaca

SEQ ID NO: 422561 - RNA, 19 nt, Artificial Sequence
  Description of Artificial Sequence: Synthetic oligonucleotide
  Sense Strand Starting at position 1323 of SEQ ID NO: 315364
ucuugugacagguguacua

SEQ ID NO: 422562 - RNA, 19 nt, Artificial Sequence
  Description of Artificial Sequence: Synthetic oligonucleotide
  Antisense Strand to SEQ ID NO: 422561
uaguacaccugucacaaga

SEQ ID NO: 422563 - RNA, 19 nt, Artificial Sequence
  Description of Artificial Sequence: Synthetic oligonucleotide
  Sense Strand Starting at position 1323 of SEQ ID NO: 315470
gcuaaauauagcugagguc

SEQ ID NO: 422564 - RNA, 19 nt, Artificial Sequence
  Description of Artificial Sequence: Synthetic oligonucleotide
  Antisense Strand to SEQ ID NO: 422563
gaccucagcuauauuuagc

SEQ ID NO: 422565 - RNA, 19 nt, Artificial Sequence
  Description of Artificial Sequence: Synthetic oligonucleotide
  Sense Strand Starting at position 1323 of SEQ ID NO: 315848
gccugagucucaucaaagc

SEQ ID NO: 422566 - RNA, 19 nt, Artificial Sequence
  Description of Artificial Sequence: Synthetic oligonucleotide
  Antisense Strand to SEQ ID NO: 422565
gcuuugaugagacucaggc

SEQ ID NO: 422567 - RNA, 19 nt, Artificial Sequence
  Description of Artificial Sequence: Synthetic oligonucleotide
  Sense Strand Starting at position 1323 of SEQ ID NO: 316053
gacaguuauuaucauggag

SEQ ID NO: 422568 - RNA, 19 nt, Artificial Sequence
  Description of Artificial Sequence: Synthetic oligonucleotide
  Antisense Strand to SEQ ID NO: 422567
cuccaugauaauaacuguc

SEQ ID NO: 422569 - RNA, 19 nt, Artificial Sequence
  Description of Artificial Sequence: Synthetic oligonucleotide
  Sense Strand Starting at position 1323 of SEQ ID NO: 316193
guagcaaagccugaagcau

SEQ ID NO: 422570 - RNA, 19 nt, Artificial Sequence
  Description of Artificial Sequence: Synthetic oligonucleotide
  Antisense Strand to SEQ ID NO: 422569
augcuucaggcuuugcuac

SEQ ID NO: 422571 - RNA, 19 nt, Artificial Sequence
  Description of Artificial Sequence: Synthetic oligonucleotide
  Sense Strand Starting at position 1323 of SEQ ID NO: 316204
ugaagcaugucuccugacu

SEQ ID NO: 422572 - RNA, 19 nt, Artificial Sequence
  Description of Artificial Sequence: Synthetic oligonucleotide
  Antisense Strand to SEQ ID NO: 422571
agucaggagacaugcuuca

SEQ ID NO: 422573 - RNA, 19 nt, Artificial Sequence
  Description of Artificial Sequence: Synthetic oligonucleotide
  Sense Strand Starting at position 1323 of SEQ ID NO: 316239
ccaucuuugccuggcuuga

SEQ ID NO: 422574 - RNA, 19 nt, Artificial Sequence
  Description of Artificial Sequence: Synthetic oligonucleotide
  Antisense Strand to SEQ ID NO: 422573
ucaagccaggcaaagaugg

SEQ ID NO: 422575 - RNA, 19 nt, Artificial Sequence
  Description of Artificial Sequence: Synthetic oligonucleotide
  Sense Strand Starting at position 1323 of SEQ ID NO: 316241
aucuuugccuggcuugaga

SEQ ID NO: 422576 - RNA, 19 nt, Artificial Sequence
  Description of Artificial Sequence: Synthetic oligonucleotide
  Antisense Strand to SEQ ID NO: 422575
ucucaagccaggcaaagau

SEQ ID NO: 422577 - RNA, 19 nt, Artificial Sequence
  Description of Artificial Sequence: Synthetic oligonucleotide
  Sense Strand Starting at position 1323 of SEQ ID NO: 316337
ccuagagcuuggucuccua

SEQ ID NO: 422578 - RNA, 19 nt, Artificial Sequence
  Description of Artificial Sequence: Synthetic oligonucleotide
  Antisense Strand to SEQ ID NO: 422577
uaggagaccaagcucuagg

SEQ ID NO: 422579 - RNA, 19 nt, Artificial Sequence
  Description of Artificial Sequence: Synthetic oligonucleotide
  Sense Strand Starting at position 1323 of SEQ ID NO: 316422
ggcuccauaugucuuuaca

SEQ ID NO: 422580 - RNA, 19 nt, Artificial Sequence
  Description of Artificial Sequence: Synthetic oligonucleotide
  Antisense Strand to SEQ ID NO: 422579
uguaaagacauauggagcc

SEQ ID NO: 422581 - RNA, 19 nt, Artificial Sequence
  Description of Artificial Sequence: Synthetic oligonucleotide
  Sense Strand Starting at position 1323 of SEQ ID NO: 316433
ucuuuacaucugggcaaau

SEQ ID NO: 422582 - RNA, 19 nt, Artificial Sequence
  Description of Artificial Sequence: Synthetic oligonucleotide
  Antisense Strand to SEQ ID NO: 422581
auuugcccagauguaaaga

SEQ ID NO: 422583 - RNA, 19 nt, Artificial Sequence
  Description of Artificial Sequence: Synthetic oligonucleotide
  Sense Strand Starting at position 1323 of SEQ ID NO: 316434
cuuuacaucugggcaaauu

SEQ ID NO: 422584 - RNA, 19 nt, Artificial Sequence
  Description of Artificial Sequence: Synthetic oligonucleotide
  Antisense Strand to SEQ ID NO: 422583
aauuugcccagauguaaag

SEQ ID NO: 422585 - RNA, 19 nt, Artificial Sequence
  Description of Artificial Sequence: Synthetic oligonucleotide
  Sense Strand Starting at position 1323 of SEQ ID NO: 316496
gggcuuucccacugggcaa

SEQ ID NO: 422586 - RNA, 19 nt, Artificial Sequence
  Description of Artificial Sequence: Synthetic oligonucleotide
  Antisense Strand to SEQ ID NO: 422585
uugcccagugggaaagccc

SEQ ID NO: 422587 - RNA, 19 nt, Artificial Sequence
  Description of Artificial Sequence: Synthetic oligonucleotide
  Sense Strand Starting at position 1323 of SEQ ID NO: 316557
aggcuaugauauguaggga

SEQ ID NO: 422588 - RNA, 19 nt, Artificial Sequence
  Description of Artificial Sequence: Synthetic oligonucleotide
  Antisense Strand to SEQ ID NO: 422587
ucccuacauaucauagccu

SEQ ID NO: 422589 - RNA, 19 nt, Artificial Sequence
  Description of Artificial Sequence: Synthetic oligonucleotide
  Sense Strand Starting at position 1323 of SEQ ID NO: 316560
cuaugauauguagggagcu

SEQ ID NO: 422590 - RNA, 19 nt, Artificial Sequence
  Description of Artificial Sequence: Synthetic oligonucleotide
  Antisense Strand to SEQ ID NO: 422589
agcucccuacauaucauag

SEQ ID NO: 422591 - RNA, 19 nt, Artificial Sequence
  Description of Artificial Sequence: Synthetic oligonucleotide
  Sense Strand Starting at position 1323 of SEQ ID NO: 316597
gggagcuaucccugggcca

SEQ ID NO: 422592 - RNA, 19 nt, Artificial Sequence
  Description of Artificial Sequence: Synthetic oligonucleotide
  Antisense Strand to SEQ ID NO: 422591
uggcccagggauagcuccc

SEQ ID NO: 422593 - RNA, 19 nt, Artificial Sequence
  Description of Artificial Sequence: Synthetic oligonucleotide
  Sense Strand Starting at position 1323 of SEQ ID NO: 316622
ccaagagugucauccacaa

SEQ ID NO: 422594 - RNA, 19 nt, Artificial Sequence
  Description of Artificial Sequence: Synthetic oligonucleotide
  Antisense Strand to SEQ ID NO: 422593
uuguggaugacacucuugg

SEQ ID NO: 422595 - RNA, 19 nt, Artificial Sequence
  Description of Artificial Sequence: Synthetic oligonucleotide
  Sense Strand Starting at position 1323 of SEQ ID NO: 316746
ugaagcuucccugggagga

SEQ ID NO: 422596 - RNA, 19 nt, Artificial Sequence
  Description of Artificial Sequence: Synthetic oligonucleotide
  Antisense Strand to SEQ ID NO: 422595
uccucccagggaagcuuca

SEQ ID NO: 422597 - RNA, 19 nt, Artificial Sequence
  Description of Artificial Sequence: Synthetic oligonucleotide
  Sense Strand Starting at position 1323 of SEQ ID NO: 316932
gguucuuuaugucugagac

SEQ ID NO: 422598 - RNA, 19 nt, Artificial Sequence
  Description of Artificial Sequence: Synthetic oligonucleotide
  Antisense Strand to SEQ ID NO: 422597
gucucagacauaaagaacc

SEQ ID NO: 422599 - RNA, 19 nt, Artificial Sequence
  Description of Artificial Sequence: Synthetic oligonucleotide
  Sense Strand Starting at position 1323 of SEQ ID NO: 316933
guucuuuaugucugagacu

SEQ ID NO: 422600 - RNA, 19 nt, Artificial Sequence
  Description of Artificial Sequence: Synthetic oligonucleotide
  Antisense Strand to SEQ ID NO: 422599
agucucagacauaaagaac

SEQ ID NO: 422601 - RNA, 19 nt, Artificial Sequence
  Description of Artificial Sequence: Synthetic oligonucleotide
  Sense Strand Starting at position 1323 of SEQ ID NO: 317079
gagguagguuacucaccaa

SEQ ID NO: 422602 - RNA, 19 nt, Artificial Sequence
  Description of Artificial Sequence: Synthetic oligonucleotide
  Antisense Strand to SEQ ID NO: 422601
uuggugaguaaccuaccuc

SEQ ID NO: 422603 - RNA, 19 nt, Artificial Sequence
  Description of Artificial Sequence: Synthetic oligonucleotide
  Sense Strand Starting at position 1323 of SEQ ID NO: 317117
ggguguuuguggucuguag

SEQ ID NO: 422604 - RNA, 19 nt, Artificial Sequence
  Description of Artificial Sequence: Synthetic oligonucleotide
  Antisense Strand to SEQ ID NO: 422603
cuacagaccacaaacaccc

SEQ ID NO: 422605 - RNA, 19 nt, Artificial Sequence
  Description of Artificial Sequence: Synthetic oligonucleotide
  Sense Strand Starting at position 1323 of SEQ ID NO: 317319
cuauguuccgaguauuaag

SEQ ID NO: 422606 - RNA, 19 nt, Artificial Sequence
  Description of Artificial Sequence: Synthetic oligonucleotide
  Antisense Strand to SEQ ID NO: 422605
cuuaauacucggaacauag

SEQ ID NO: 422607 - RNA, 19 nt, Artificial Sequence
  Description of Artificial Sequence: Synthetic oligonucleotide
  Sense Strand Starting at position 1323 of SEQ ID NO: 317329
aguauuaagugguucgguu

SEQ ID NO: 422608 - RNA, 19 nt, Artificial Sequence
  Description of Artificial Sequence: Synthetic oligonucleotide
  Antisense Strand to SEQ ID NO: 422607
aaccgaaccacuuaauacu

SEQ ID NO: 422609 - RNA, 19 nt, Artificial Sequence
  Description of Artificial Sequence: Synthetic oligonucleotide
  Sense Strand Starting at position 1323 of SEQ ID NO: 317331
uauuaagugguucgguuau

SEQ ID NO: 422610 - RNA, 19 nt, Artificial Sequence
  Description of Artificial Sequence: Synthetic oligonucleotide
  Antisense Strand to SEQ ID NO: 422609
auaaccgaaccacuuaaua

SEQ ID NO: 422611 - RNA, 19 nt, Artificial Sequence
  Description of Artificial Sequence: Synthetic oligonucleotide
  Sense Strand Starting at position 1323 of SEQ ID NO: 317333
uuaagugguucgguuauuu

SEQ ID NO: 422612 - RNA, 19 nt, Artificial Sequence
  Description of Artificial Sequence: Synthetic oligonucleotide
  Antisense Strand to SEQ ID NO: 422611
aaauaaccgaaccacuuaa

SEQ ID NO: 422613 - RNA, 19 nt, Artificial Sequence
  Description of Artificial Sequence: Synthetic oligonucleotide
  Sense Strand Starting at position 1323 of SEQ ID NO: 317352
uuaggucuuguggaaguca

SEQ ID NO: 422614 - RNA, 19 nt, Artificial Sequence
  Description of Artificial Sequence: Synthetic oligonucleotide
  Antisense Strand to SEQ ID NO: 422613
ugacuuccacaagaccuaa

SEQ ID NO: 422615 - RNA, 19 nt, Artificial Sequence
  Description of Artificial Sequence: Synthetic oligonucleotide
  Sense Strand Starting at position 1323 of SEQ ID NO: 317559
gcuugcucccgucuuguga

SEQ ID NO: 422616 - RNA, 19 nt, Artificial Sequence
  Description of Artificial Sequence: Synthetic oligonucleotide
  Antisense Strand to SEQ ID NO: 422615
ucacaagacgggagcaagc

SEQ ID NO: 422617 - RNA, 19 nt, Artificial Sequence
  Description of Artificial Sequence: Synthetic oligonucleotide
  Sense Strand Starting at position 1323 of SEQ ID NO: 317696
ccuggauaccucugagugu

SEQ ID NO: 422618 - RNA, 19 nt, Artificial Sequence
  Description of Artificial Sequence: Synthetic oligonucleotide
  Antisense Strand to SEQ ID NO: 422617
acacucagagguauccagg

SEQ ID NO: 422619 - RNA, 19 nt, Artificial Sequence
  Description of Artificial Sequence: Synthetic oligonucleotide
  Sense Strand Starting at position 1323 of SEQ ID NO: 317699
ggauaccucugagugugau

SEQ ID NO: 422620 - RNA, 19 nt, Artificial Sequence
  Description of Artificial Sequence: Synthetic oligonucleotide
  Antisense Strand to SEQ ID NO: 422619
aucacacucagagguaucc

SEQ ID NO: 422621 - RNA, 19 nt, Artificial Sequence
  Description of Artificial Sequence: Synthetic oligonucleotide
  Sense Strand Starting at position 1323 of SEQ ID NO: 318107
caggcuuucugggaaugga

SEQ ID NO: 422622 - RNA, 19 nt, Artificial Sequence
  Description of Artificial Sequence: Synthetic oligonucleotide
  Antisense Strand to SEQ ID NO: 422621
uccauucccagaaagccug

SEQ ID NO: 422623 - RNA, 19 nt, Artificial Sequence
  Description of Artificial Sequence: Synthetic oligonucleotide
  Sense Strand Starting at position 1323 of SEQ ID NO: 318477
gccagacauugcucacuuu

SEQ ID NO: 422624 - RNA, 19 nt, Artificial Sequence
  Description of Artificial Sequence: Synthetic oligonucleotide
  Antisense Strand to SEQ ID NO: 422623
aaagugagcaaugucuggc

SEQ ID NO: 422625 - RNA, 19 nt, Artificial Sequence
  Description of Artificial Sequence: Synthetic oligonucleotide
  Sense Strand Starting at position 1323 of SEQ ID NO: 318498
ccauguagucaaugucagu

SEQ ID NO: 422626 - RNA, 19 nt, Artificial Sequence
  Description of Artificial Sequence: Synthetic oligonucleotide
  Antisense Strand to SEQ ID NO: 422625
acugacauugacuacaugg

SEQ ID NO: 422627 - RNA, 19 nt, Artificial Sequence
  Description of Artificial Sequence: Synthetic oligonucleotide
  Sense Strand Starting at position 1323 of SEQ ID NO: 318691
gccuuagguuucucaggau

SEQ ID NO: 422628 - RNA, 19 nt, Artificial Sequence
  Description of Artificial Sequence: Synthetic oligonucleotide
  Antisense Strand to SEQ ID NO: 422627
auccugagaaaccuaaggc

SEQ ID NO: 422629 - RNA, 19 nt, Artificial Sequence
  Description of Artificial Sequence: Synthetic oligonucleotide
  Sense Strand Starting at position 1323 of SEQ ID NO: 318694
uuagguuucucaggauuuc

SEQ ID NO: 422630 - RNA, 19 nt, Artificial Sequence
  Description of Artificial Sequence: Synthetic oligonucleotide
  Antisense Strand to SEQ ID NO: 422629
gaaauccugagaaaccuaa

SEQ ID NO: 422631 - RNA, 19 nt, Artificial Sequence
  Description of Artificial Sequence: Synthetic oligonucleotide
  Sense Strand Starting at position 1323 of SEQ ID NO: 318704
caggauuucuccugggagg

SEQ ID NO: 422632 - RNA, 19 nt, Artificial Sequence
  Description of Artificial Sequence: Synthetic oligonucleotide
  Antisense Strand to SEQ ID NO: 422631
ccucccaggagaaauccug

SEQ ID NO: 422633 - RNA, 19 nt, Artificial Sequence
  Description of Artificial Sequence: Synthetic oligonucleotide
  Sense Strand Starting at position 1323 of SEQ ID NO: 318750
ucuuacuuucuaggauagu

SEQ ID NO: 422634 - RNA, 19 nt, Artificial Sequence
  Description of Artificial Sequence: Synthetic oligonucleotide
  Antisense Strand to SEQ ID NO: 422633
acuauccuagaaaguaaga

SEQ ID NO: 422635 - RNA, 19 nt, Artificial Sequence
  Description of Artificial Sequence: Synthetic oligonucleotide
  Sense Strand Starting at position 1323 of SEQ ID NO: 319122
gcacauagccuaugcuuua

SEQ ID NO: 422636 - RNA, 19 nt, Artificial Sequence
  Description of Artificial Sequence: Synthetic oligonucleotide
  Antisense Strand to SEQ ID NO: 422635
uaaagcauaggcuaugugc

SEQ ID NO: 422637 - RNA, 19 nt, Artificial Sequence
  Description of Artificial Sequence: Synthetic oligonucleotide
  Sense Strand Starting at position 1324 of SEQ ID NO: 315283
agccuuugccgguuaccua

SEQ ID NO: 422638 - RNA, 19 nt, Artificial Sequence
  Description of Artificial Sequence: Synthetic oligonucleotide
  Antisense Strand to SEQ ID NO: 422637
uagguaaccggcaaaggcu

SEQ ID NO: 422639 - RNA, 19 nt, Artificial Sequence
  Description of Artificial Sequence: Synthetic oligonucleotide
  Sense Strand Starting at position 1324 of SEQ ID NO: 315293
gguuaccuagucuaaucua

SEQ ID NO: 422640 - RNA, 19 nt, Artificial Sequence
  Description of Artificial Sequence: Synthetic oligonucleotide
  Antisense Strand to SEQ ID NO: 422639
uagauuagacuagguaacc

SEQ ID NO: 422641 - RNA, 19 nt, Artificial Sequence
  Description of Artificial Sequence: Synthetic oligonucleotide
  Sense Strand Starting at position 1324 of SEQ ID NO: 315736
augaauauauuucgggaaa

SEQ ID NO: 422642 - RNA, 19 nt, Artificial Sequence
  Description of Artificial Sequence: Synthetic oligonucleotide
  Antisense Strand to SEQ ID NO: 422641
uuucccgaaauauauucau

SEQ ID NO: 422643 - RNA, 19 nt, Artificial Sequence
  Description of Artificial Sequence: Synthetic oligonucleotide
  Sense Strand Starting at position 1324 of SEQ ID NO: 315814
uagguauuauuagugaucu

SEQ ID NO: 422644 - RNA, 19 nt, Artificial Sequence
  Description of Artificial Sequence: Synthetic oligonucleotide
  Antisense Strand to SEQ ID NO: 422643
agaucacuaauaauaccua

SEQ ID NO: 422645 - RNA, 19 nt, Artificial Sequence
  Description of Artificial Sequence: Synthetic oligonucleotide
  Sense Strand Starting at position 1324 of SEQ ID NO: 315816
gguauuauuagugaucuag

SEQ ID NO: 422646 - RNA, 19 nt, Artificial Sequence
  Description of Artificial Sequence: Synthetic oligonucleotide
  Antisense Strand to SEQ ID NO: 422645
cuagaucacuaauaauacc

SEQ ID NO: 422647 - RNA, 19 nt, Artificial Sequence
  Description of Artificial Sequence: Synthetic oligonucleotide
  Sense Strand Starting at position 1324 of SEQ ID NO: 315818
uauuauuagugaucuagag

SEQ ID NO: 422648 - RNA, 19 nt, Artificial Sequence
  Description of Artificial Sequence: Synthetic oligonucleotide
  Antisense Strand to SEQ ID NO: 422647
cucuagaucacuaauaaua

SEQ ID NO: 422649 - RNA, 19 nt, Artificial Sequence
  Description of Artificial Sequence: Synthetic oligonucleotide
  Sense Strand Starting at position 1324 of SEQ ID NO: 315894
gauauaagguacuugagca

SEQ ID NO: 422650 - RNA, 19 nt, Artificial Sequence
  Description of Artificial Sequence: Synthetic oligonucleotide
  Antisense Strand to SEQ ID NO: 422649
ugcucaaguaccuuauauc

SEQ ID NO: 422651 - RNA, 19 nt, Artificial Sequence
  Description of Artificial Sequence: Synthetic oligonucleotide
  Sense Strand Starting at position 1324 of SEQ ID NO: 315960
uugcucaaggaaugucuaa

SEQ ID NO: 422652 - RNA, 19 nt, Artificial Sequence
  Description of Artificial Sequence: Synthetic oligonucleotide
  Antisense Strand to SEQ ID NO: 422651
uuagacauuccuugagcaa

SEQ ID NO: 422653 - RNA, 19 nt, Artificial Sequence
  Description of Artificial Sequence: Synthetic oligonucleotide
  Sense Strand Starting at position 1324 of SEQ ID NO: 315967
aggaaugucuaacuugagu

SEQ ID NO: 422654 - RNA, 19 nt, Artificial Sequence
  Description of Artificial Sequence: Synthetic oligonucleotide
  Antisense Strand to SEQ ID NO: 422653
acucaaguuagacauuccu

SEQ ID NO: 422655 - RNA, 19 nt, Artificial Sequence
  Description of Artificial Sequence: Synthetic oligonucleotide
  Sense Strand Starting at position 1324 of SEQ ID NO: 316028
ggguucacucuaggcagaa

SEQ ID NO: 422656 - RNA, 19 nt, Artificial Sequence
  Description of Artificial Sequence: Synthetic oligonucleotide
  Antisense Strand to SEQ ID NO: 422655
uucugccuagagugaaccc

SEQ ID NO: 422657 - RNA, 19 nt, Artificial Sequence
  Description of Artificial Sequence: Synthetic oligonucleotide
  Sense Strand Starting at position 1324 of SEQ ID NO: 316029
gguucacucuaggcagaag

SEQ ID NO: 422658 - RNA, 19 nt, Artificial Sequence
  Description of Artificial Sequence: Synthetic oligonucleotide
  Antisense Strand to SEQ ID NO: 422657
cuucugccuagagugaacc

SEQ ID NO: 422659 - RNA, 19 nt, Artificial Sequence
  Description of Artificial Sequence: Synthetic oligonucleotide
  Sense Strand Starting at position 1324 of SEQ ID NO: 316070
aggaauaacuuggcauauu

SEQ ID NO: 422660 - RNA, 19 nt, Artificial Sequence
  Description of Artificial Sequence: Synthetic oligonucleotide
  Antisense Strand to SEQ ID NO: 422659
aauaugccaaguuauuccu

SEQ ID NO: 422661 - RNA, 19 nt, Artificial Sequence
  Description of Artificial Sequence: Synthetic oligonucleotide
  Sense Strand Starting at position 1324 of SEQ ID NO: 316118
gguaucuggcaaggaaaca

SEQ ID NO: 422662 - RNA, 19 nt, Artificial Sequence
  Description of Artificial Sequence: Synthetic oligonucleotide
  Antisense Strand to SEQ ID NO: 422661
uguuuccuugccagauacc

SEQ ID NO: 422663 - RNA, 19 nt, Artificial Sequence
  Description of Artificial Sequence: Synthetic oligonucleotide
  Sense Strand Starting at position 1324 of SEQ ID NO: 316182
uaucuuguaggccaggaua

SEQ ID NO: 422664 - RNA, 19 nt, Artificial Sequence
  Description of Artificial Sequence: Synthetic oligonucleotide
  Antisense Strand to SEQ ID NO: 422663
uauccuggccuacaagaua

SEQ ID NO: 422665 - RNA, 19 nt, Artificial Sequence
  Description of Artificial Sequence: Synthetic oligonucleotide
  Sense Strand Starting at position 1324 of SEQ ID NO: 316184
ucuuguaggccaggauaaa

SEQ ID NO: 422666 - RNA, 19 nt, Artificial Sequence
  Description of Artificial Sequence: Synthetic oligonucleotide
  Antisense Strand to SEQ ID NO: 422665
uuuauccuggccuacaaga

SEQ ID NO: 422667 - RNA, 19 nt, Artificial Sequence
  Description of Artificial Sequence: Synthetic oligonucleotide
  Sense Strand Starting at position 1324 of SEQ ID NO: 316482
ugggcuuugcuuuauaaca

SEQ ID NO: 422668 - RNA, 19 nt, Artificial Sequence
  Description of Artificial Sequence: Synthetic oligonucleotide
  Antisense Strand to SEQ ID NO: 422667
uguuauaaagcaaagccca

SEQ ID NO: 422669 - RNA, 19 nt, Artificial Sequence
  Description of Artificial Sequence: Synthetic oligonucleotide
  Sense Strand Starting at position 1324 of SEQ ID NO: 316560
ugcauugcccaugacaaau

SEQ ID NO: 422670 - RNA, 19 nt, Artificial Sequence
  Description of Artificial Sequence: Synthetic oligonucleotide
  Antisense Strand to SEQ ID NO: 422669
auuugucaugggcaaugca

SEQ ID NO: 422671 - RNA, 19 nt, Artificial Sequence
  Description of Artificial Sequence: Synthetic oligonucleotide
  Sense Strand Starting at position 1324 of SEQ ID NO: 316616
gugggaucccacuguggaa

SEQ ID NO: 422672 - RNA, 19 nt, Artificial Sequence
  Description of Artificial Sequence: Synthetic oligonucleotide
  Antisense Strand to SEQ ID NO: 422671
uuccacagugggaucccac

SEQ ID NO: 422673 - RNA, 19 nt, Artificial Sequence
  Description of Artificial Sequence: Synthetic oligonucleotide
  Sense Strand Starting at position 1324 of SEQ ID NO: 316628
uguggaacucugggugaga

SEQ ID NO: 422674 - RNA, 19 nt, Artificial Sequence
  Description of Artificial Sequence: Synthetic oligonucleotide
  Antisense Strand to SEQ ID NO: 422673
ucucacccagaguuccaca

SEQ ID NO: 422675 - RNA, 19 nt, Artificial Sequence
  Description of Artificial Sequence: Synthetic oligonucleotide
  Sense Strand Starting at position 1324 of SEQ ID NO: 316630
uggaacucugggugagacu

SEQ ID NO: 422676 - RNA, 19 nt, Artificial Sequence
  Description of Artificial Sequence: Synthetic oligonucleotide
  Antisense Strand to SEQ ID NO: 422675
agucucacccagaguucca

SEQ ID NO: 422677 - RNA, 19 nt, Artificial Sequence
  Description of Artificial Sequence: Synthetic oligonucleotide
  Sense Strand Starting at position 1324 of SEQ ID NO: 316639
gggugagacucagcugaag

SEQ ID NO: 422678 - RNA, 19 nt, Artificial Sequence
  Description of Artificial Sequence: Synthetic oligonucleotide
  Antisense Strand to SEQ ID NO: 422677
cuucagcugagucucaccc

SEQ ID NO: 422679 - RNA, 19 nt, Artificial Sequence
  Description of Artificial Sequence: Synthetic oligonucleotide
  Sense Strand Starting at position 1324 of SEQ ID NO: 316642
ugagacucagcugaaguua

SEQ ID NO: 422680 - RNA, 19 nt, Artificial Sequence
  Description of Artificial Sequence: Synthetic oligonucleotide
  Antisense Strand to SEQ ID NO: 422679
uaacuucagcugagucuca

SEQ ID NO: 422681 - RNA, 19 nt, Artificial Sequence
  Description of Artificial Sequence: Synthetic oligonucleotide
  Sense Strand Starting at position 1324 of SEQ ID NO: 316709
ucugucuuccugggacaca

SEQ ID NO: 422682 - RNA, 19 nt, Artificial Sequence
  Description of Artificial Sequence: Synthetic oligonucleotide
  Antisense Strand to SEQ ID NO: 422681
ugugucccaggaagacaga

SEQ ID NO: 422683 - RNA, 19 nt, Artificial Sequence
  Description of Artificial Sequence: Synthetic oligonucleotide
  Sense Strand Starting at position 1324 of SEQ ID NO: 316760
aucuguauccucuggacaa

SEQ ID NO: 422684 - RNA, 19 nt, Artificial Sequence
  Description of Artificial Sequence: Synthetic oligonucleotide
  Antisense Strand to SEQ ID NO: 422683
uuguccagaggauacagau

SEQ ID NO: 422685 - RNA, 19 nt, Artificial Sequence
  Description of Artificial Sequence: Synthetic oligonucleotide
  Sense Strand Starting at position 1324 of SEQ ID NO: 317676
uguagauuauuauccuuag

SEQ ID NO: 422686 - RNA, 19 nt, Artificial Sequence
  Description of Artificial Sequence: Synthetic oligonucleotide
  Antisense Strand to SEQ ID NO: 422685
cuaaggauaauaaucuaca

SEQ ID NO: 422687 - RNA, 19 nt, Artificial Sequence
  Description of Artificial Sequence: Synthetic oligonucleotide
  Sense Strand Starting at position 1324 of SEQ ID NO: 317748
aguuguuaucauuagugag

SEQ ID NO: 422688 - RNA, 19 nt, Artificial Sequence
  Description of Artificial Sequence: Synthetic oligonucleotide
  Antisense Strand to SEQ ID NO: 422687
cucacuaaugauaacaacu

SEQ ID NO: 422689 - RNA, 19 nt, Artificial Sequence
  Description of Artificial Sequence: Synthetic oligonucleotide
  Sense Strand Starting at position 1324 of SEQ ID NO: 317795
uagagugaacaucagcuuu

SEQ ID NO: 422690 - RNA, 19 nt, Artificial Sequence
  Description of Artificial Sequence: Synthetic oligonucleotide
  Antisense Strand to SEQ ID NO: 422689
aaagcugauguucacucua

SEQ ID NO: 422691 - RNA, 19 nt, Artificial Sequence
  Description of Artificial Sequence: Synthetic oligonucleotide
  Sense Strand Starting at position 1324 of SEQ ID NO: 317843
ggacacugacaucgacaua

SEQ ID NO: 422692 - RNA, 19 nt, Artificial Sequence
  Description of Artificial Sequence: Synthetic oligonucleotide
  Antisense Strand to SEQ ID NO: 422691
uaugucgaugucagugucc

SEQ ID NO: 422693 - RNA, 19 nt, Artificial Sequence
  Description of Artificial Sequence: Synthetic oligonucleotide
  Sense Strand Starting at position 1324 of SEQ ID NO: 317861
auaagagauccuugccauu

SEQ ID NO: 422694 - RNA, 19 nt, Artificial Sequence
  Description of Artificial Sequence: Synthetic oligonucleotide
  Antisense Strand to SEQ ID NO: 422693
aauggcaaggaucucuuau

SEQ ID NO: 422695 - RNA, 19 nt, Artificial Sequence
  Description of Artificial Sequence: Synthetic oligonucleotide
  Sense Strand Starting at position 1324 of SEQ ID NO: 317930
guaagacuuccaggaacug

SEQ ID NO: 422696 - RNA, 19 nt, Artificial Sequence
  Description of Artificial Sequence: Synthetic oligonucleotide
  Antisense Strand to SEQ ID NO: 422695
caguuccuggaagucuuac

SEQ ID NO: 422697 - RNA, 19 nt, Artificial Sequence
  Description of Artificial Sequence: Synthetic oligonucleotide
  Sense Strand Starting at position 1324 of SEQ ID NO: 317952
ugugcugugaaggaaacaa

SEQ ID NO: 422698 - RNA, 19 nt, Artificial Sequence
  Description of Artificial Sequence: Synthetic oligonucleotide
  Antisense Strand to SEQ ID NO: 422697
uuguuuccuucacagcaca

SEQ ID NO: 422699 - RNA, 19 nt, Artificial Sequence
  Description of Artificial Sequence: Synthetic oligonucleotide
  Sense Strand Starting at position 1324 of SEQ ID NO: 318031
cucaaauaucuuuggagau

SEQ ID NO: 422700 - RNA, 19 nt, Artificial Sequence
  Description of Artificial Sequence: Synthetic oligonucleotide
  Antisense Strand to SEQ ID NO: 422699
aucuccaaagauauuugag

SEQ ID NO: 422701 - RNA, 19 nt, Artificial Sequence
  Description of Artificial Sequence: Synthetic oligonucleotide
  Sense Strand Starting at position 1324 of SEQ ID NO: 318307
uugagugaaugaguuagau

SEQ ID NO: 422702 - RNA, 19 nt, Artificial Sequence
  Description of Artificial Sequence: Synthetic oligonucleotide
  Antisense Strand to SEQ ID NO: 422701
aucuaacucauucacucaa

SEQ ID NO: 422703 - RNA, 19 nt, Artificial Sequence
  Description of Artificial Sequence: Synthetic oligonucleotide
  Sense Strand Starting at position 1324 of SEQ ID NO: 318331
gaggaagccucuuugagaa

SEQ ID NO: 422704 - RNA, 19 nt, Artificial Sequence
  Description of Artificial Sequence: Synthetic oligonucleotide
  Antisense Strand to SEQ ID NO: 422703
uucucaaagaggcuuccuc

SEQ ID NO: 422705 - RNA, 19 nt, Artificial Sequence
  Description of Artificial Sequence: Synthetic oligonucleotide
  Sense Strand Starting at position 1324 of SEQ ID NO: 318481
gaaugagcuccuugagggu

SEQ ID NO: 422706 - RNA, 19 nt, Artificial Sequence
  Description of Artificial Sequence: Synthetic oligonucleotide
  Antisense Strand to SEQ ID NO: 422705
acccucaaggagcucauuc

SEQ ID NO: 422707 - RNA, 19 nt, Artificial Sequence
  Description of Artificial Sequence: Synthetic oligonucleotide
  Sense Strand Starting at position 1324 of SEQ ID NO: 318505
uugugacuucucuaucauu

SEQ ID NO: 422708 - RNA, 19 nt, Artificial Sequence
  Description of Artificial Sequence: Synthetic oligonucleotide
  Antisense Strand to SEQ ID NO: 422707
aaugauagagaagucacaa

SEQ ID NO: 422709 - RNA, 19 nt, Artificial Sequence
  Description of Artificial Sequence: Synthetic oligonucleotide
  Sense Strand Starting at position 1324 of SEQ ID NO: 318529
cuaacaguugguuaucuga

SEQ ID NO: 422710 - RNA, 19 nt, Artificial Sequence
  Description of Artificial Sequence: Synthetic oligonucleotide
  Antisense Strand to SEQ ID NO: 422709
ucagauaaccaacuguuag

SEQ ID NO: 422711 - RNA, 19 nt, Artificial Sequence
  Description of Artificial Sequence: Synthetic oligonucleotide
  Sense Strand Starting at position 1324 of SEQ ID NO: 318687
ugaagaagcucuccuugaa

SEQ ID NO: 422712 - RNA, 19 nt, Artificial Sequence
  Description of Artificial Sequence: Synthetic oligonucleotide
  Antisense Strand to SEQ ID NO: 422711
uucaaggagagcuucuuca

SEQ ID NO: 422713 - RNA, 19 nt, Artificial Sequence
  Description of Artificial Sequence: Synthetic oligonucleotide
  Sense Strand Starting at position 1324 of SEQ ID NO: 318690
agaagcucuccuugaauaa

SEQ ID NO: 422714 - RNA, 19 nt, Artificial Sequence
  Description of Artificial Sequence: Synthetic oligonucleotide
  Antisense Strand to SEQ ID NO: 422713
uuauucaaggagagcuucu

SEQ ID NO: 422715 - RNA, 19 nt, Artificial Sequence
  Description of Artificial Sequence: Synthetic oligonucleotide
  Sense Strand Starting at position 1324 of SEQ ID NO: 318795
ccagcaguucuguaauaau

SEQ ID NO: 422716 - RNA, 19 nt, Artificial Sequence
  Description of Artificial Sequence: Synthetic oligonucleotide
  Antisense Strand to SEQ ID NO: 422715
auuauuacagaacugcugg

SEQ ID NO: 422717 - RNA, 19 nt, Artificial Sequence
  Description of Artificial Sequence: Synthetic oligonucleotide
  Sense Strand Starting at position 1325 of SEQ ID NO: 315353
acugacuucccguaacuua

SEQ ID NO: 422718 - RNA, 19 nt, Artificial Sequence
  Description of Artificial Sequence: Synthetic oligonucleotide
  Antisense Strand to SEQ ID NO: 422717
uaaguuacgggaagucagu

SEQ ID NO: 422719 - RNA, 19 nt, Artificial Sequence
  Description of Artificial Sequence: Synthetic oligonucleotide
  Sense Strand Starting at position 1325 of SEQ ID NO: 315752
uguauuaaaucaucacgaa

SEQ ID NO: 422720 - RNA, 19 nt, Artificial Sequence
  Description of Artificial Sequence: Synthetic oligonucleotide
  Antisense Strand to SEQ ID NO: 422719
uucgugaugauuuaauaca

SEQ ID NO: 422721 - RNA, 19 nt, Artificial Sequence
  Description of Artificial Sequence: Synthetic oligonucleotide
  Sense Strand Starting at position 1325 of SEQ ID NO: 315855
guugguugucuccauuucu

SEQ ID NO: 422722 - RNA, 19 nt, Artificial Sequence
  Description of Artificial Sequence: Synthetic oligonucleotide
  Antisense Strand to SEQ ID NO: 422721
agaaauggagacaaccaac

SEQ ID NO: 422723 - RNA, 19 nt, Artificial Sequence
  Description of Artificial Sequence: Synthetic oligonucleotide
  Sense Strand Starting at position 1325 of SEQ ID NO: 315984
uuuguagucuauuucucau

SEQ ID NO: 422724 - RNA, 19 nt, Artificial Sequence
  Description of Artificial Sequence: Synthetic oligonucleotide
  Antisense Strand to SEQ ID NO: 422723
augagaaauagacuacaaa

SEQ ID NO: 422725 - RNA, 19 nt, Artificial Sequence
  Description of Artificial Sequence: Synthetic oligonucleotide
  Sense Strand Starting at position 1325 of SEQ ID NO: 316065
uucguaaaugccgauuaaa

SEQ ID NO: 422726 - RNA, 19 nt, Artificial Sequence
  Description of Artificial Sequence: Synthetic oligonucleotide
  Antisense Strand to SEQ ID NO: 422725
uuuaaucggcauuuacgaa

SEQ ID NO: 422727 - RNA, 19 nt, Artificial Sequence
  Description of Artificial Sequence: Synthetic oligonucleotide
  Sense Strand Starting at position 1325 of SEQ ID NO: 316068
guaaaugccgauuaaacca

SEQ ID NO: 422728 - RNA, 19 nt, Artificial Sequence
  Description of Artificial Sequence: Synthetic oligonucleotide
  Antisense Strand to SEQ ID NO: 422727
ugguuuaaucggcauuuac

SEQ ID NO: 422729 - RNA, 19 nt, Artificial Sequence
  Description of Artificial Sequence: Synthetic oligonucleotide
  Sense Strand Starting at position 1325 of SEQ ID NO: 316224
agucuaguuuaccuaauag

SEQ ID NO: 422730 - RNA, 19 nt, Artificial Sequence
  Description of Artificial Sequence: Synthetic oligonucleotide
  Antisense Strand to SEQ ID NO: 422729
cuauuagguaaacuagacu

SEQ ID NO: 422731 - RNA, 19 nt, Artificial Sequence
  Description of Artificial Sequence: Synthetic oligonucleotide
  Sense Strand Starting at position 1325 of SEQ ID NO: 316394
cagugaggccuccaaauaa

SEQ ID NO: 422732 - RNA, 19 nt, Artificial Sequence
  Description of Artificial Sequence: Synthetic oligonucleotide
  Antisense Strand to SEQ ID NO: 422731
uuauuuggaggccucacug

SEQ ID NO: 422733 - RNA, 19 nt, Artificial Sequence
  Description of Artificial Sequence: Synthetic oligonucleotide
  Sense Strand Starting at position 1325 of SEQ ID NO: 316572
gcucuagaucagggaaagu

SEQ ID NO: 422734 - RNA, 19 nt, Artificial Sequence
  Description of Artificial Sequence: Synthetic oligonucleotide
  Antisense Strand to SEQ ID NO: 422733
acuuucccugaucuagagc

SEQ ID NO: 422735 - RNA, 19 nt, Artificial Sequence
  Description of Artificial Sequence: Synthetic oligonucleotide
  Sense Strand Starting at position 1325 of SEQ ID NO: 316614
gcggcuguuaucgucugua

SEQ ID NO: 422736 - RNA, 19 nt, Artificial Sequence
  Description of Artificial Sequence: Synthetic oligonucleotide
  Antisense Strand to SEQ ID NO: 422735
uacagacgauaacagccgc

SEQ ID NO: 422737 - RNA, 19 nt, Artificial Sequence
  Description of Artificial Sequence: Synthetic oligonucleotide
  Sense Strand Starting at position 1325 of SEQ ID NO: 316800
agaagcaagagcugucaga

SEQ ID NO: 422738 - RNA, 19 nt, Artificial Sequence
  Description of Artificial Sequence: Synthetic oligonucleotide
  Antisense Strand to SEQ ID NO: 422737
ucugacagcucuugcuucu

SEQ ID NO: 422739 - RNA, 19 nt, Artificial Sequence
  Description of Artificial Sequence: Synthetic oligonucleotide
  Sense Strand Starting at position 1325 of SEQ ID NO: 316923
ccacuaaucguccagacga

SEQ ID NO: 422740 - RNA, 19 nt, Artificial Sequence
  Description of Artificial Sequence: Synthetic oligonucleotide
  Antisense Strand to SEQ ID NO: 422739
ucgucuggacgauuagugg

SEQ ID NO: 422741 - RNA, 19 nt, Artificial Sequence
  Description of Artificial Sequence: Synthetic oligonucleotide
  Sense Strand Starting at position 1325 of SEQ ID NO: 317054
ucaccacuucgcugagaca

SEQ ID NO: 422742 - RNA, 19 nt, Artificial Sequence
  Description of Artificial Sequence: Synthetic oligonucleotide
  Antisense Strand to SEQ ID NO: 422741
ugucucagcgaagugguga

SEQ ID NO: 422743 - RNA, 19 nt, Artificial Sequence
  Description of Artificial Sequence: Synthetic oligonucleotide
  Sense Strand Starting at position 1325 of SEQ ID NO: 317073
gggauaccgcucugagauc

SEQ ID NO: 422744 - RNA, 19 nt, Artificial Sequence
  Description of Artificial Sequence: Synthetic oligonucleotide
  Antisense Strand to SEQ ID NO: 422743
gaucucagagcgguauccc

SEQ ID NO: 422745 - RNA, 19 nt, Artificial Sequence
  Description of Artificial Sequence: Synthetic oligonucleotide
  Sense Strand Starting at position 1325 of SEQ ID NO: 317118
uucgaucgucaacacuaau

SEQ ID NO: 422746 - RNA, 19 nt, Artificial Sequence
  Description of Artificial Sequence: Synthetic oligonucleotide
  Antisense Strand to SEQ ID NO: 422745
auuaguguugacgaucgaa

SEQ ID NO: 422747 - RNA, 19 nt, Artificial Sequence
  Description of Artificial Sequence: Synthetic oligonucleotide
  Sense Strand Starting at position 1325 of SEQ ID NO: 317346
agggaaucugcggagguuu

SEQ ID NO: 422748 - RNA, 19 nt, Artificial Sequence
  Description of Artificial Sequence: Synthetic oligonucleotide
  Antisense Strand to SEQ ID NO: 422747
aaaccuccgcagauucccu

SEQ ID NO: 422749 - RNA, 19 nt, Artificial Sequence
  Description of Artificial Sequence: Synthetic oligonucleotide
  Sense Strand Starting at position 1325 of SEQ ID NO: 317411
gugcuuucuaaguggauuu

SEQ ID NO: 422750 - RNA, 19 nt, Artificial Sequence
  Description of Artificial Sequence: Synthetic oligonucleotide
  Antisense Strand to SEQ ID NO: 422749
aaauccacuuagaaagcac

SEQ ID NO: 422751 - RNA, 19 nt, Artificial Sequence
  Description of Artificial Sequence: Synthetic oligonucleotide
  Sense Strand Starting at position 1325 of SEQ ID NO: 317534
uuucgaaagaucuggugau

SEQ ID NO: 422752 - RNA, 19 nt, Artificial Sequence
  Description of Artificial Sequence: Synthetic oligonucleotide
  Antisense Strand to SEQ ID NO: 422751
aucaccagaucuuucgaaa

SEQ ID NO: 422753 - RNA, 19 nt, Artificial Sequence
  Description of Artificial Sequence: Synthetic oligonucleotide
  Sense Strand Starting at position 1325 of SEQ ID NO: 317548
gugauuuacuuggcuuagu

SEQ ID NO: 422754 - RNA, 19 nt, Artificial Sequence
  Description of Artificial Sequence: Synthetic oligonucleotide
  Antisense Strand to SEQ ID NO: 422753
acuaagccaaguaaaucac

SEQ ID NO: 422755 - RNA, 19 nt, Artificial Sequence
  Description of Artificial Sequence: Synthetic oligonucleotide
  Sense Strand Starting at position 1325 of SEQ ID NO: 317549
ugauuuacuuggcuuaguu

SEQ ID NO: 422756 - RNA, 19 nt, Artificial Sequence
  Description of Artificial Sequence: Synthetic oligonucleotide
  Antisense Strand to SEQ ID NO: 422755
aacuaagccaaguaaauca

SEQ ID NO: 422757 - RNA, 19 nt, Artificial Sequence
  Description of Artificial Sequence: Synthetic oligonucleotide
  Sense Strand Starting at position 1325 of SEQ ID NO: 317746
ugcauccggguuuaucaua

SEQ ID NO: 422758 - RNA, 19 nt, Artificial Sequence
  Description of Artificial Sequence: Synthetic oligonucleotide
  Antisense Strand to SEQ ID NO: 422757
uaugauaaacccggaugca

SEQ ID NO: 422759 - RNA, 19 nt, Artificial Sequence
  Description of Artificial Sequence: Synthetic oligonucleotide
  Sense Strand Starting at position 1325 of SEQ ID NO: 317865
guauuaacccguuacuuug

SEQ ID NO: 422760 - RNA, 19 nt, Artificial Sequence
  Description of Artificial Sequence: Synthetic oligonucleotide
  Antisense Strand to SEQ ID NO: 422759
caaaguaacggguuaauac

SEQ ID NO: 422761 - RNA, 19 nt, Artificial Sequence
  Description of Artificial Sequence: Synthetic oligonucleotide
  Sense Strand Starting at position 1325 of SEQ ID NO: 317871
acccguuacuuuguauuua

SEQ ID NO: 422762 - RNA, 19 nt, Artificial Sequence
  Description of Artificial Sequence: Synthetic oligonucleotide
  Antisense Strand to SEQ ID NO: 422761
uaaauacaaaguaacgggu

SEQ ID NO: 422763 - RNA, 19 nt, Artificial Sequence
  Description of Artificial Sequence: Synthetic oligonucleotide
  Sense Strand Starting at position 1325 of SEQ ID NO: 317957
ggaaauguuaaguaucgcu

SEQ ID NO: 422764 - RNA, 19 nt, Artificial Sequence
  Description of Artificial Sequence: Synthetic oligonucleotide
  Antisense Strand to SEQ ID NO: 422763
agcgauacuuaacauuucc

SEQ ID NO: 422765 - RNA, 19 nt, Artificial Sequence
  Description of Artificial Sequence: Synthetic oligonucleotide
  Sense Strand Starting at position 1325 of SEQ ID NO: 318037
acagaauguuuauuucguu

SEQ ID NO: 422766 - RNA, 19 nt, Artificial Sequence
  Description of Artificial Sequence: Synthetic oligonucleotide
  Antisense Strand to SEQ ID NO: 422765
aacgaaauaaacauucugu

SEQ ID NO: 422767 - RNA, 19 nt, Artificial Sequence
  Description of Artificial Sequence: Synthetic oligonucleotide
  Sense Strand Starting at position 1325 of SEQ ID NO: 318038
cagaauguuuauuucguuu

SEQ ID NO: 422768 - RNA, 19 nt, Artificial Sequence
  Description of Artificial Sequence: Synthetic oligonucleotide
  Antisense Strand to SEQ ID NO: 422767
aaacgaaauaaacauucug

SEQ ID NO: 422769 - RNA, 19 nt, Artificial Sequence
  Description of Artificial Sequence: Synthetic oligonucleotide
  Sense Strand Starting at position 1325 of SEQ ID NO: 318066
cgcuucuuggcuuauauuu

SEQ ID NO: 422770 - RNA, 19 nt, Artificial Sequence
  Description of Artificial Sequence: Synthetic oligonucleotide
  Antisense Strand to SEQ ID NO: 422769
aaauauaagccaagaagcg

SEQ ID NO: 422771 - RNA, 19 nt, Artificial Sequence
  Description of Artificial Sequence: Synthetic oligonucleotide
  Sense Strand Starting at position 1325 of SEQ ID NO: 318192
aggguagcucuaugcacaa

SEQ ID NO: 422772 - RNA, 19 nt, Artificial Sequence
  Description of Artificial Sequence: Synthetic oligonucleotide
  Antisense Strand to SEQ ID NO: 422771
uugugcauagagcuacccu

SEQ ID NO: 422773 - RNA, 19 nt, Artificial Sequence
  Description of Artificial Sequence: Synthetic oligonucleotide
  Sense Strand Starting at position 1325 of SEQ ID NO: 318273
uuacaauagcuaggacuuu

SEQ ID NO: 422774 - RNA, 19 nt, Artificial Sequence
  Description of Artificial Sequence: Synthetic oligonucleotide
  Antisense Strand to SEQ ID NO: 422773
aaaguccuagcuauuguaa

SEQ ID NO: 422775 - RNA, 19 nt, Artificial Sequence
  Description of Artificial Sequence: Synthetic oligonucleotide
  Sense Strand Starting at position 1325 of SEQ ID NO: 318626
auacaucuggcauaguaag

SEQ ID NO: 422776 - RNA, 19 nt, Artificial Sequence
  Description of Artificial Sequence: Synthetic oligonucleotide
  Antisense Strand to SEQ ID NO: 422775
cuuacuaugccagauguau

SEQ ID NO: 422777 - RNA, 19 nt, Artificial Sequence
  Description of Artificial Sequence: Synthetic oligonucleotide
  Sense Strand Starting at position 1325 of SEQ ID NO: 318655
uagcuuccuguauaaggua

SEQ ID NO: 422778 - RNA, 19 nt, Artificial Sequence
  Description of Artificial Sequence: Synthetic oligonucleotide
  Antisense Strand to SEQ ID NO: 422777
uaccuuauacaggaagcua

SEQ ID NO: 422779 - RNA, 19 nt, Artificial Sequence
  Description of Artificial Sequence: Synthetic oligonucleotide
  Sense Strand Starting at position 1325 of SEQ ID NO: 318726
uugauuacaccuuguaguc

SEQ ID NO: 422780 - RNA, 19 nt, Artificial Sequence
  Description of Artificial Sequence: Synthetic oligonucleotide
  Antisense Strand to SEQ ID NO: 422779
gacuacaagguguaaucaa

SEQ ID NO: 422781 - RNA, 19 nt, Artificial Sequence
  Description of Artificial Sequence: Synthetic oligonucleotide
  Sense Strand Starting at position 1325 of SEQ ID NO: 318748
gcucaaugucaagaacaug

SEQ ID NO: 422782 - RNA, 19 nt, Artificial Sequence
  Description of Artificial Sequence: Synthetic oligonucleotide
  Antisense Strand to SEQ ID NO: 422781
cauguucuugacauugagc

SEQ ID NO: 422783 - RNA, 19 nt, Artificial Sequence
  Description of Artificial Sequence: Synthetic oligonucleotide
  Sense Strand Starting at position 1325 of SEQ ID NO: 318955
ggaggcucgcaagauugau

SEQ ID NO: 422784 - RNA, 19 nt, Artificial Sequence
  Description of Artificial Sequence: Synthetic oligonucleotide
  Antisense Strand to SEQ ID NO: 422783
aucaaucuugcgagccucc

SEQ ID NO: 422785 - RNA, 19 nt, Artificial Sequence
  Description of Artificial Sequence: Synthetic oligonucleotide
  Sense Strand Starting at position 1325 of SEQ ID NO: 318977
acaucaacugcuuggacau

SEQ ID NO: 422786 - RNA, 19 nt, Artificial Sequence
  Description of Artificial Sequence: Synthetic oligonucleotide
  Antisense Strand to SEQ ID NO: 422785
auguccaagcaguugaugu

SEQ ID NO: 422787 - RNA, 19 nt, Artificial Sequence
  Description of Artificial Sequence: Synthetic oligonucleotide
  Sense Strand Starting at position 1325 of SEQ ID NO: 318996
guuucuggacuacgugaaa

SEQ ID NO: 422788 - RNA, 19 nt, Artificial Sequence
  Description of Artificial Sequence: Synthetic oligonucleotide
  Antisense Strand to SEQ ID NO: 422787
uuucacguaguccagaaac

SEQ ID NO: 422789 - RNA, 19 nt, Artificial Sequence
  Description of Artificial Sequence: Synthetic oligonucleotide
  Sense Strand Starting at position 1325 of SEQ ID NO: 319008
cgugaaauaccagggaauu

SEQ ID NO: 422790 - RNA, 19 nt, Artificial Sequence
  Description of Artificial Sequence: Synthetic oligonucleotide
  Antisense Strand to SEQ ID NO: 422789
aauucccugguauuucacg

SEQ ID NO: 422791 - RNA, 19 nt, Artificial Sequence
  Description of Artificial Sequence: Synthetic oligonucleotide
  Sense Strand Starting at position 1325 of SEQ ID NO: 319020
gggaauuauuuacacauua

SEQ ID NO: 422792 - RNA, 19 nt, Artificial Sequence
  Description of Artificial Sequence: Synthetic oligonucleotide
  Antisense Strand to SEQ ID NO: 422791
uaauguguaaauaauuccc

SEQ ID NO: 422793 - RNA, 19 nt, Artificial Sequence
  Description of Artificial Sequence: Synthetic oligonucleotide
  Sense Strand Starting at position 1325 of SEQ ID NO: 319060
uuaaaucugcuuuggaagu

SEQ ID NO: 422794 - RNA, 19 nt, Artificial Sequence
  Description of Artificial Sequence: Synthetic oligonucleotide
  Antisense Strand to SEQ ID NO: 422793
acuuccaaagcagauuuaa

SEQ ID NO: 422795 - RNA, 19 nt, Artificial Sequence
  Description of Artificial Sequence: Synthetic oligonucleotide
  Sense Strand Starting at position 1325 of SEQ ID NO: 319070
uuuggaaguguuuaggacu

SEQ ID NO: 422796 - RNA, 19 nt, Artificial Sequence
  Description of Artificial Sequence: Synthetic oligonucleotide
  Antisense Strand to SEQ ID NO: 422795
aguccuaaacacuuccaaa

SEQ ID NO: 422797 - RNA, 19 nt, Artificial Sequence
  Description of Artificial Sequence: Synthetic oligonucleotide
  Sense Strand Starting at position 1326 of SEQ ID NO: 315339
cgugaacuagugcaaaguu

SEQ ID NO: 422798 - RNA, 19 nt, Artificial Sequence
  Description of Artificial Sequence: Synthetic oligonucleotide
  Antisense Strand to SEQ ID NO: 422797
aacuuugcacuaguucacg

SEQ ID NO: 422799 - RNA, 19 nt, Artificial Sequence
  Description of Artificial Sequence: Synthetic oligonucleotide
  Sense Strand Starting at position 1326 of SEQ ID NO: 315347
agugcaaaguuucucaaau

SEQ ID NO: 422800 - RNA, 19 nt, Artificial Sequence
  Description of Artificial Sequence: Synthetic oligonucleotide
  Antisense Strand to SEQ ID NO: 422799
auuugagaaacuuugcacu

SEQ ID NO: 422801 - RNA, 19 nt, Artificial Sequence
  Description of Artificial Sequence: Synthetic oligonucleotide
  Sense Strand Starting at position 1326 of SEQ ID NO: 315348
gugcaaaguuucucaaaua

SEQ ID NO: 422802 - RNA, 19 nt, Artificial Sequence
  Description of Artificial Sequence: Synthetic oligonucleotide
  Antisense Strand to SEQ ID NO: 422801
uauuugagaaacuuugcac

SEQ ID NO: 422803 - RNA, 19 nt, Artificial Sequence
  Description of Artificial Sequence: Synthetic oligonucleotide
  Sense Strand Starting at position 1326 of SEQ ID NO: 315364
auauuagggucauuaggau

SEQ ID NO: 422804 - RNA, 19 nt, Artificial Sequence
  Description of Artificial Sequence: Synthetic oligonucleotide
  Antisense Strand to SEQ ID NO: 422803
auccuaaugacccuaauau

SEQ ID NO: 422805 - RNA, 19 nt, Artificial Sequence
  Description of Artificial Sequence: Synthetic oligonucleotide
  Sense Strand Starting at position 1326 of SEQ ID NO: 315442
uagggacuuucucaggaga

SEQ ID NO: 422806 - RNA, 19 nt, Artificial Sequence
  Description of Artificial Sequence: Synthetic oligonucleotide
  Antisense Strand to SEQ ID NO: 422805
ucuccugagaaagucccua

SEQ ID NO: 422807 - RNA, 19 nt, Artificial Sequence
  Description of Artificial Sequence: Synthetic oligonucleotide
  Sense Strand Starting at position 1326 of SEQ ID NO: 315458
agaggugaaagcugaguaa

SEQ ID NO: 422808 - RNA, 19 nt, Artificial Sequence
  Description of Artificial Sequence: Synthetic oligonucleotide
  Antisense Strand to SEQ ID NO: 422807
uuacucagcuuucaccucu

SEQ ID NO: 422809 - RNA, 19 nt, Artificial Sequence
  Description of Artificial Sequence: Synthetic oligonucleotide
  Sense Strand Starting at position 1326 of SEQ ID NO: 315461
ggugaaagcugaguaaaga

SEQ ID NO: 422810 - RNA, 19 nt, Artificial Sequence
  Description of Artificial Sequence: Synthetic oligonucleotide
  Antisense Strand to SEQ ID NO: 422809
ucuuuacucagcuuucacc

SEQ ID NO: 422811 - RNA, 19 nt, Artificial Sequence
  Description of Artificial Sequence: Synthetic oligonucleotide
  Sense Strand Starting at position 1326 of SEQ ID NO: 315512
gacaguacagcauguauaa

SEQ ID NO: 422812 - RNA, 19 nt, Artificial Sequence
  Description of Artificial Sequence: Synthetic oligonucleotide
  Antisense Strand to SEQ ID NO: 422811
uuauacaugcuguacuguc

SEQ ID NO: 422813 - RNA, 19 nt, Artificial Sequence
  Description of Artificial Sequence: Synthetic oligonucleotide
  Sense Strand Starting at position 1326 of SEQ ID NO: 315541
cuacauagcuaagguauga

SEQ ID NO: 422814 - RNA, 19 nt, Artificial Sequence
  Description of Artificial Sequence: Synthetic oligonucleotide
  Antisense Strand to SEQ ID NO: 422813
ucauaccuuagcuauguag

SEQ ID NO: 422815 - RNA, 19 nt, Artificial Sequence
  Description of Artificial Sequence: Synthetic oligonucleotide
  Sense Strand Starting at position 1326 of SEQ ID NO: 315824
guacaacuauuaggucaaa

SEQ ID NO: 422816 - RNA, 19 nt, Artificial Sequence
  Description of Artificial Sequence: Synthetic oligonucleotide
  Antisense Strand to SEQ ID NO: 422815
uuugaccuaauaguuguac

SEQ ID NO: 422817 - RNA, 19 nt, Artificial Sequence
  Description of Artificial Sequence: Synthetic oligonucleotide
  Sense Strand Starting at position 1326 of SEQ ID NO: 316069
guucaugacccuuggagga

SEQ ID NO: 422818 - RNA, 19 nt, Artificial Sequence
  Description of Artificial Sequence: Synthetic oligonucleotide
  Antisense Strand to SEQ ID NO: 422817
uccuccaagggucaugaac

SEQ ID NO: 422819 - RNA, 19 nt, Artificial Sequence
  Description of Artificial Sequence: Synthetic oligonucleotide
  Sense Strand Starting at position 1326 of SEQ ID NO: 316125
cacaaugaguuugaccaga

SEQ ID NO: 422820 - RNA, 19 nt, Artificial Sequence
  Description of Artificial Sequence: Synthetic oligonucleotide
  Antisense Strand to SEQ ID NO: 422819
ucuggucaaacucauugug

SEQ ID NO: 422821 - RNA, 19 nt, Artificial Sequence
  Description of Artificial Sequence: Synthetic oligonucleotide
  Sense Strand Starting at position 1326 of SEQ ID NO: 316127
caaugaguuugaccagauc

SEQ ID NO: 422822 - RNA, 19 nt, Artificial Sequence
  Description of Artificial Sequence: Synthetic oligonucleotide
  Antisense Strand to SEQ ID NO: 422821
gaucuggucaaacucauug

SEQ ID NO: 422823 - RNA, 19 nt, Artificial Sequence
  Description of Artificial Sequence: Synthetic oligonucleotide
  Sense Strand Starting at position 1326 of SEQ ID NO: 316164
agcaaugagaagugucacu

SEQ ID NO: 422824 - RNA, 19 nt, Artificial Sequence
  Description of Artificial Sequence: Synthetic oligonucleotide
  Antisense Strand to SEQ ID NO: 422823
agugacacuucucauugcu

SEQ ID NO: 422825 - RNA, 19 nt, Artificial Sequence
  Description of Artificial Sequence: Synthetic oligonucleotide
  Sense Strand Starting at position 1326 of SEQ ID NO: 316169
ugagaagugucacugcaac

SEQ ID NO: 422826 - RNA, 19 nt, Artificial Sequence
  Description of Artificial Sequence: Synthetic oligonucleotide
  Antisense Strand to SEQ ID NO: 422825
guugcagugacacuucuca

SEQ ID NO: 422827 - RNA, 19 nt, Artificial Sequence
  Description of Artificial Sequence: Synthetic oligonucleotide
  Sense Strand Starting at position 1326 of SEQ ID NO: 316222
ccaguugcucaggaugacu

SEQ ID NO: 422828 - RNA, 19 nt, Artificial Sequence
  Description of Artificial Sequence: Synthetic oligonucleotide
  Antisense Strand to SEQ ID NO: 422827
agucauccugagcaacugg

SEQ ID NO: 422829 - RNA, 19 nt, Artificial Sequence
  Description of Artificial Sequence: Synthetic oligonucleotide
  Sense Strand Starting at position 1326 of SEQ ID NO: 316252
gucccauccucagaaguca

SEQ ID NO: 422830 - RNA, 19 nt, Artificial Sequence
  Description of Artificial Sequence: Synthetic oligonucleotide
  Antisense Strand to SEQ ID NO: 422829
ugacuucugaggaugggac

SEQ ID NO: 422831 - RNA, 19 nt, Artificial Sequence
  Description of Artificial Sequence: Synthetic oligonucleotide
  Sense Strand Starting at position 1326 of SEQ ID NO: 316388
aaacgaggcggucauuaaa

SEQ ID NO: 422832 - RNA, 19 nt, Artificial Sequence
  Description of Artificial Sequence: Synthetic oligonucleotide
  Antisense Strand to SEQ ID NO: 422831
uuuaaugaccgccucguuu

SEQ ID NO: 422833 - RNA, 19 nt, Artificial Sequence
  Description of Artificial Sequence: Synthetic oligonucleotide
  Sense Strand Starting at position 1326 of SEQ ID NO: 316478
gcagguugugaacacuaca

SEQ ID NO: 422834 - RNA, 19 nt, Artificial Sequence
  Description of Artificial Sequence: Synthetic oligonucleotide
  Antisense Strand to SEQ ID NO: 422833
uguaguguucacaaccugc

SEQ ID NO: 422835 - RNA, 19 nt, Artificial Sequence
  Description of Artificial Sequence: Synthetic oligonucleotide
  Sense Strand Starting at position 1326 of SEQ ID NO: 316481
gguugugaacacuacauug

SEQ ID NO: 422836 - RNA, 19 nt, Artificial Sequence
  Description of Artificial Sequence: Synthetic oligonucleotide
  Antisense Strand to SEQ ID NO: 422835
caauguaguguucacaacc

SEQ ID NO: 422837 - RNA, 19 nt, Artificial Sequence
  Description of Artificial Sequence: Synthetic oligonucleotide
  Sense Strand Starting at position 1326 of SEQ ID NO: 317316
cuagguuccaaggguauua

SEQ ID NO: 422838 - RNA, 19 nt, Artificial Sequence
  Description of Artificial Sequence: Synthetic oligonucleotide
  Antisense Strand to SEQ ID NO: 422837
uaauacccuuggaaccuag

SEQ ID NO: 422839 - RNA, 19 nt, Artificial Sequence
  Description of Artificial Sequence: Synthetic oligonucleotide
  Sense Strand Starting at position 1326 of SEQ ID NO: 317413
cgcugucccggcugagaaa

SEQ ID NO: 422840 - RNA, 19 nt, Artificial Sequence
  Description of Artificial Sequence: Synthetic oligonucleotide
  Antisense Strand to SEQ ID NO: 422839
uuucucagccgggacagcg

SEQ ID NO: 422841 - RNA, 19 nt, Artificial Sequence
  Description of Artificial Sequence: Synthetic oligonucleotide
  Sense Strand Starting at position 1326 of SEQ ID NO: 317414
gcugucccggcugagaaau

SEQ ID NO: 422842 - RNA, 19 nt, Artificial Sequence
  Description of Artificial Sequence: Synthetic oligonucleotide
  Antisense Strand to SEQ ID NO: 422841
auuucucagccgggacagc

SEQ ID NO: 422843 - RNA, 19 nt, Artificial Sequence
  Description of Artificial Sequence: Synthetic oligonucleotide
  Sense Strand Starting at position 1326 of SEQ ID NO: 317467
agcugaguguugaagggaa

SEQ ID NO: 422844 - RNA, 19 nt, Artificial Sequence
  Description of Artificial Sequence: Synthetic oligonucleotide
  Antisense Strand to SEQ ID NO: 422843
uucccuucaacacucagcu

SEQ ID NO: 422845 - RNA, 19 nt, Artificial Sequence
  Description of Artificial Sequence: Synthetic oligonucleotide
  Sense Strand Starting at position 1326 of SEQ ID NO: 317961
gcacacugcuaacuagaua

SEQ ID NO: 422846 - RNA, 19 nt, Artificial Sequence
  Description of Artificial Sequence: Synthetic oligonucleotide
  Antisense Strand to SEQ ID NO: 422845
uaucuaguuagcagugugc

SEQ ID NO: 422847 - RNA, 19 nt, Artificial Sequence
  Description of Artificial Sequence: Synthetic oligonucleotide
  Sense Strand Starting at position 1326 of SEQ ID NO: 317994
ucagucuucuaagaauuga

SEQ ID NO: 422848 - RNA, 19 nt, Artificial Sequence
  Description of Artificial Sequence: Synthetic oligonucleotide
  Antisense Strand to SEQ ID NO: 422847
ucaauucuuagaagacuga

SEQ ID NO: 422849 - RNA, 19 nt, Artificial Sequence
  Description of Artificial Sequence: Synthetic oligonucleotide
  Sense Strand Starting at position 1326 of SEQ ID NO: 318053
gugcaugcugucuaaauag

SEQ ID NO: 422850 - RNA, 19 nt, Artificial Sequence
  Description of Artificial Sequence: Synthetic oligonucleotide
  Antisense Strand to SEQ ID NO: 422849
cuauuuagacagcaugcac

SEQ ID NO: 422851 - RNA, 19 nt, Artificial Sequence
  Description of Artificial Sequence: Synthetic oligonucleotide
  Sense Strand Starting at position 1326 of SEQ ID NO: 318102
ucaguucuuuggccaaguu

SEQ ID NO: 422852 - RNA, 19 nt, Artificial Sequence
  Description of Artificial Sequence: Synthetic oligonucleotide
  Antisense Strand to SEQ ID NO: 422851
aacuuggccaaagaacuga

SEQ ID NO: 422853 - RNA, 19 nt, Artificial Sequence
  Description of Artificial Sequence: Synthetic oligonucleotide
  Sense Strand Starting at position 1326 of SEQ ID NO: 318110
uuggccaaguucucugauu

SEQ ID NO: 422854 - RNA, 19 nt, Artificial Sequence
  Description of Artificial Sequence: Synthetic oligonucleotide
  Antisense Strand to SEQ ID NO: 422853
aaucagagaacuuggccaa

SEQ ID NO: 422855 - RNA, 19 nt, Artificial Sequence
  Description of Artificial Sequence: Synthetic oligonucleotide
  Sense Strand Starting at position 1326 of SEQ ID NO: 318111
uggccaaguucucugauuu

SEQ ID NO: 422856 - RNA, 19 nt, Artificial Sequence
  Description of Artificial Sequence: Synthetic oligonucleotide
  Antisense Strand to SEQ ID NO: 422855
aaaucagagaacuuggcca

SEQ ID NO: 422857 - RNA, 19 nt, Artificial Sequence
  Description of Artificial Sequence: Synthetic oligonucleotide
  Sense Strand Starting at position 1326 of SEQ ID NO: 318112
ggccaaguucucugauuuc

SEQ ID NO: 422858 - RNA, 19 nt, Artificial Sequence
  Description of Artificial Sequence: Synthetic oligonucleotide
  Antisense Strand to SEQ ID NO: 422857
gaaaucagagaacuuggcc

SEQ ID NO: 422859 - RNA, 19 nt, Artificial Sequence
  Description of Artificial Sequence: Synthetic oligonucleotide
  Sense Strand Starting at position 1326 of SEQ ID NO: 318172
auuguaagguugcauggau

SEQ ID NO: 422860 - RNA, 19 nt, Artificial Sequence
  Description of Artificial Sequence: Synthetic oligonucleotide
  Antisense Strand to SEQ ID NO: 422859
auccaugcaaccuuacaau

SEQ ID NO: 422861 - RNA, 19 nt, Artificial Sequence
  Description of Artificial Sequence: Synthetic oligonucleotide
  Sense Strand Starting at position 1326 of SEQ ID NO: 318179
gguugcauggauuauccaa

SEQ ID NO: 422862 - RNA, 19 nt, Artificial Sequence
  Description of Artificial Sequence: Synthetic oligonucleotide
  Antisense Strand to SEQ ID NO: 422861
uuggauaauccaugcaacc

SEQ ID NO: 422863 - RNA, 19 nt, Artificial Sequence
  Description of Artificial Sequence: Synthetic oligonucleotide
  Sense Strand Starting at position 1326 of SEQ ID NO: 318218
gcuuacaugucacuaccua

SEQ ID NO: 422864 - RNA, 19 nt, Artificial Sequence
  Description of Artificial Sequence: Synthetic oligonucleotide
  Antisense Strand to SEQ ID NO: 422863
uagguagugacauguaagc

SEQ ID NO: 422865 - RNA, 19 nt, Artificial Sequence
  Description of Artificial Sequence: Synthetic oligonucleotide
  Sense Strand Starting at position 1326 of SEQ ID NO: 318263
uccagugucugggcuaagu

SEQ ID NO: 422866 - RNA, 19 nt, Artificial Sequence
  Description of Artificial Sequence: Synthetic oligonucleotide
  Antisense Strand to SEQ ID NO: 422865
acuuagcccagacacugga

SEQ ID NO: 422867 - RNA, 19 nt, Artificial Sequence
  Description of Artificial Sequence: Synthetic oligonucleotide
  Sense Strand Starting at position 1327 of SEQ ID NO: 315509
guacuaacgucaccagaug

SEQ ID NO: 422868 - RNA, 19 nt, Artificial Sequence
  Description of Artificial Sequence: Synthetic oligonucleotide
  Antisense Strand to SEQ ID NO: 422867
caucuggugacguuaguac

SEQ ID NO: 422869 - RNA, 19 nt, Artificial Sequence
  Description of Artificial Sequence: Synthetic oligonucleotide
  Sense Strand Starting at position 1327 of SEQ ID NO: 315586
caccguaaucgugguaaca

SEQ ID NO: 422870 - RNA, 19 nt, Artificial Sequence
  Description of Artificial Sequence: Synthetic oligonucleotide
  Antisense Strand to SEQ ID NO: 422869
uguuaccacgauuacggug

SEQ ID NO: 422871 - RNA, 19 nt, Artificial Sequence
  Description of Artificial Sequence: Synthetic oligonucleotide
  Sense Strand Starting at position 1327 of SEQ ID NO: 315728
ggaagauguucacagauga

SEQ ID NO: 422872 - RNA, 19 nt, Artificial Sequence
  Description of Artificial Sequence: Synthetic oligonucleotide
  Antisense Strand to SEQ ID NO: 422871
ucaucugugaacaucuucc

SEQ ID NO: 422873 - RNA, 19 nt, Artificial Sequence
  Description of Artificial Sequence: Synthetic oligonucleotide
  Sense Strand Starting at position 1327 of SEQ ID NO: 315885
ccaugauugugguccagag

SEQ ID NO: 422874 - RNA, 19 nt, Artificial Sequence
  Description of Artificial Sequence: Synthetic oligonucleotide
  Antisense Strand to SEQ ID NO: 422873
cucuggaccacaaucaugg

SEQ ID NO: 422875 - RNA, 19 nt, Artificial Sequence
  Description of Artificial Sequence: Synthetic oligonucleotide
  Sense Strand Starting at position 1327 of SEQ ID NO: 315889
gauugugguccagagacau

SEQ ID NO: 422876 - RNA, 19 nt, Artificial Sequence
  Description of Artificial Sequence: Synthetic oligonucleotide
  Antisense Strand to SEQ ID NO: 422875
augucucuggaccacaauc

SEQ ID NO: 422877 - RNA, 19 nt, Artificial Sequence
  Description of Artificial Sequence: Synthetic oligonucleotide
  Sense Strand Starting at position 1327 of SEQ ID NO: 315919
ugaagcaaucuccaagcuu

SEQ ID NO: 422878 - RNA, 19 nt, Artificial Sequence
  Description of Artificial Sequence: Synthetic oligonucleotide
  Antisense Strand to SEQ ID NO: 422877
aagcuuggagauugcuuca

SEQ ID NO: 422879 - RNA, 19 nt, Artificial Sequence
  Description of Artificial Sequence: Synthetic oligonucleotide
  Sense Strand Starting at position 1327 of SEQ ID NO: 315931
caagcuugggaguauaacu

SEQ ID NO: 422880 - RNA, 19 nt, Artificial Sequence
  Description of Artificial Sequence: Synthetic oligonucleotide
  Antisense Strand to SEQ ID NO: 422879
aguuauacucccaagcuug

SEQ ID NO: 422881 - RNA, 19 nt, Artificial Sequence
  Description of Artificial Sequence: Synthetic oligonucleotide
  Sense Strand Starting at position 1327 of SEQ ID NO: 315991
acucgagucauccagaguc

SEQ ID NO: 422882 - RNA, 19 nt, Artificial Sequence
  Description of Artificial Sequence: Synthetic oligonucleotide
  Antisense Strand to SEQ ID NO: 422881
gacucuggaugacucgagu

SEQ ID NO: 422883 - RNA, 19 nt, Artificial Sequence
  Description of Artificial Sequence: Synthetic oligonucleotide
  Sense Strand Starting at position 1327 of SEQ ID NO: 316051
ccuugacccauucgagaag

SEQ ID NO: 422884 - RNA, 19 nt, Artificial Sequence
  Description of Artificial Sequence: Synthetic oligonucleotide
  Antisense Strand to SEQ ID NO: 422883
cuucucgaaugggucaagg

SEQ ID NO: 422885 - RNA, 19 nt, Artificial Sequence
  Description of Artificial Sequence: Synthetic oligonucleotide
  Sense Strand Starting at position 1327 of SEQ ID NO: 316078
gacugcaacuguguauauu

SEQ ID NO: 422886 - RNA, 19 nt, Artificial Sequence
  Description of Artificial Sequence: Synthetic oligonucleotide
  Antisense Strand to SEQ ID NO: 422885
aauauacacaguugcaguc

SEQ ID NO: 422887 - RNA, 19 nt, Artificial Sequence
  Description of Artificial Sequence: Synthetic oligonucleotide
  Sense Strand Starting at position 1327 of SEQ ID NO: 316086
cuguguauauuucccaagu

SEQ ID NO: 422888 - RNA, 19 nt, Artificial Sequence
  Description of Artificial Sequence: Synthetic oligonucleotide
  Antisense Strand to SEQ ID NO: 422887
acuugggaaauauacacag

SEQ ID NO: 422889 - RNA, 19 nt, Artificial Sequence
  Description of Artificial Sequence: Synthetic oligonucleotide
  Sense Strand Starting at position 1327 of SEQ ID NO: 316087
uguguauauuucccaagua

SEQ ID NO: 422890 - RNA, 19 nt, Artificial Sequence
  Description of Artificial Sequence: Synthetic oligonucleotide
  Antisense Strand to SEQ ID NO: 422889
uacuugggaaauauacaca

SEQ ID NO: 422891 - RNA, 19 nt, Artificial Sequence
  Description of Artificial Sequence: Synthetic oligonucleotide
  Sense Strand Starting at position 1327 of SEQ ID NO: 316088
guguauauuucccaaguac

SEQ ID NO: 422892 - RNA, 19 nt, Artificial Sequence
  Description of Artificial Sequence: Synthetic oligonucleotide
  Antisense Strand to SEQ ID NO: 422891
guacuugggaaauauacac

SEQ ID NO: 422893 - RNA, 19 nt, Artificial Sequence
  Description of Artificial Sequence: Synthetic oligonucleotide
  Sense Strand Starting at position 1327 of SEQ ID NO: 316139
gcccucuuugaaggcaaau

SEQ ID NO: 422894 - RNA, 19 nt, Artificial Sequence
  Description of Artificial Sequence: Synthetic oligonucleotide
  Antisense Strand to SEQ ID NO: 422893
auuugccuucaaagagggc

SEQ ID NO: 422895 - RNA, 19 nt, Artificial Sequence
  Description of Artificial Sequence: Synthetic oligonucleotide
  Sense Strand Starting at position 1327 of SEQ ID NO: 316627
gggcuauaaucugcuucca

SEQ ID NO: 422896 - RNA, 19 nt, Artificial Sequence
  Description of Artificial Sequence: Synthetic oligonucleotide
  Antisense Strand to SEQ ID NO: 422895
uggaagcagauuauagccc

SEQ ID NO: 422897 - RNA, 19 nt, Artificial Sequence
  Description of Artificial Sequence: Synthetic oligonucleotide
  Sense Strand Starting at position 1327 of SEQ ID NO: 317425
ccuggcuucccuuagagga

SEQ ID NO: 422898 - RNA, 19 nt, Artificial Sequence
  Description of Artificial Sequence: Synthetic oligonucleotide
  Antisense Strand to SEQ ID NO: 422897
uccucuaagggaagccagg

SEQ ID NO: 422899 - RNA, 19 nt, Artificial Sequence
  Description of Artificial Sequence: Synthetic oligonucleotide
  Sense Strand Starting at position 1327 of SEQ ID NO: 317659
aaugguucccaguguguca

SEQ ID NO: 422900 - RNA, 19 nt, Artificial Sequence
  Description of Artificial Sequence: Synthetic oligonucleotide
  Antisense Strand to SEQ ID NO: 422899
ugacacacugggaaccauu

SEQ ID NO: 422901 - RNA, 19 nt, Artificial Sequence
  Description of Artificial Sequence: Synthetic oligonucleotide
  Sense Strand Starting at position 1327 of SEQ ID NO: 317738
ccuggagucaauugguauu

SEQ ID NO: 422902 - RNA, 19 nt, Artificial Sequence
  Description of Artificial Sequence: Synthetic oligonucleotide
  Antisense Strand to SEQ ID NO: 422901
aauaccaauugacuccagg

SEQ ID NO: 422903 - RNA, 19 nt, Artificial Sequence
  Description of Artificial Sequence: Synthetic oligonucleotide
  Sense Strand Starting at position 1327 of SEQ ID NO: 317740
uggagucaauugguauuga

SEQ ID NO: 422904 - RNA, 19 nt, Artificial Sequence
  Description of Artificial Sequence: Synthetic oligonucleotide
  Antisense Strand to SEQ ID NO: 422903
ucaauaccaauugacucca

SEQ ID NO: 422905 - RNA, 19 nt, Artificial Sequence
  Description of Artificial Sequence: Synthetic oligonucleotide
  Sense Strand Starting at position 1327 of SEQ ID NO: 317748
auugguauugauggucuaa

SEQ ID NO: 422906 - RNA, 19 nt, Artificial Sequence
  Description of Artificial Sequence: Synthetic oligonucleotide
  Antisense Strand to SEQ ID NO: 422905
uuagaccaucaauaccaau

SEQ ID NO: 422907 - RNA, 19 nt, Artificial Sequence
  Description of Artificial Sequence: Synthetic oligonucleotide
  Sense Strand Starting at position 1327 of SEQ ID NO: 317750
ugguauugauggucuaaug

SEQ ID NO: 422908 - RNA, 19 nt, Artificial Sequence
  Description of Artificial Sequence: Synthetic oligonucleotide
  Antisense Strand to SEQ ID NO: 422907
cauuagaccaucaauacca

SEQ ID NO: 422909 - RNA, 19 nt, Artificial Sequence
  Description of Artificial Sequence: Synthetic oligonucleotide
  Sense Strand Starting at position 1327 of SEQ ID NO: 317768
gugugccaggcaugguaaa

SEQ ID NO: 422910 - RNA, 19 nt, Artificial Sequence
  Description of Artificial Sequence: Synthetic oligonucleotide
  Antisense Strand to SEQ ID NO: 422909
uuuaccaugccuggcacac

SEQ ID NO: 422911 - RNA, 19 nt, Artificial Sequence
  Description of Artificial Sequence: Synthetic oligonucleotide
  Sense Strand Starting at position 1327 of SEQ ID NO: 317975
gucugucucccuugcugaa

SEQ ID NO: 422912 - RNA, 19 nt, Artificial Sequence
  Description of Artificial Sequence: Synthetic oligonucleotide
  Antisense Strand to SEQ ID NO: 422911
uucagcaagggagacagac

SEQ ID NO: 422913 - RNA, 19 nt, Artificial Sequence
  Description of Artificial Sequence: Synthetic oligonucleotide
  Sense Strand Starting at position 1327 of SEQ ID NO: 318106
agucaccaccugugacaau

SEQ ID NO: 422914 - RNA, 19 nt, Artificial Sequence
  Description of Artificial Sequence: Synthetic oligonucleotide
  Antisense Strand to SEQ ID NO: 422913
auugucacagguggugacu

SEQ ID NO: 422915 - RNA, 19 nt, Artificial Sequence
  Description of Artificial Sequence: Synthetic oligonucleotide
  Sense Strand Starting at position 1327 of SEQ ID NO: 318133
acuggauacuagcuagauc

SEQ ID NO: 422916 - RNA, 19 nt, Artificial Sequence
  Description of Artificial Sequence: Synthetic oligonucleotide
  Antisense Strand to SEQ ID NO: 422915
gaucuagcuaguauccagu

SEQ ID NO: 422917 - RNA, 19 nt, Artificial Sequence
  Description of Artificial Sequence: Synthetic oligonucleotide
  Sense Strand Starting at position 1327 of SEQ ID NO: 318141
cuagcuagaucagaaacaa

SEQ ID NO: 422918 - RNA, 19 nt, Artificial Sequence
  Description of Artificial Sequence: Synthetic oligonucleotide
  Antisense Strand to SEQ ID NO: 422917
uuguuucugaucuagcuag

SEQ ID NO: 422919 - RNA, 19 nt, Artificial Sequence
  Description of Artificial Sequence: Synthetic oligonucleotide
  Sense Strand Starting at position 1327 of SEQ ID NO: 318180
auuuaaucgucacaaugau

SEQ ID NO: 422920 - RNA, 19 nt, Artificial Sequence
  Description of Artificial Sequence: Synthetic oligonucleotide
  Antisense Strand to SEQ ID NO: 422919
aucauugugacgauuaaau

SEQ ID NO: 422921 - RNA, 19 nt, Artificial Sequence
  Description of Artificial Sequence: Synthetic oligonucleotide
  Sense Strand Starting at position 1327 of SEQ ID NO: 318190
cacaaugaugcugggaagu

SEQ ID NO: 422922 - RNA, 19 nt, Artificial Sequence
  Description of Artificial Sequence: Synthetic oligonucleotide
  Antisense Strand to SEQ ID NO: 422921
acuucccagcaucauugug

SEQ ID NO: 422923 - RNA, 19 nt, Artificial Sequence
  Description of Artificial Sequence: Synthetic oligonucleotide
  Sense Strand Starting at position 1327 of SEQ ID NO: 318200
cugggaaguagguacuauu

SEQ ID NO: 422924 - RNA, 19 nt, Artificial Sequence
  Description of Artificial Sequence: Synthetic oligonucleotide
  Antisense Strand to SEQ ID NO: 422923
aauaguaccuacuucccag

SEQ ID NO: 422925 - RNA, 19 nt, Artificial Sequence
  Description of Artificial Sequence: Synthetic oligonucleotide
  Sense Strand Starting at position 1327 of SEQ ID NO: 318249
guaucuaaguaucuaaucu

SEQ ID NO: 422926 - RNA, 19 nt, Artificial Sequence
  Description of Artificial Sequence: Synthetic oligonucleotide
  Antisense Strand to SEQ ID NO: 422925
agauuagauacuuagauac

SEQ ID NO: 422927 - RNA, 19 nt, Artificial Sequence
  Description of Artificial Sequence: Synthetic oligonucleotide
  Sense Strand Starting at position 1327 of SEQ ID NO: 318273
agauuagauuacugcauuu

SEQ ID NO: 422928 - RNA, 19 nt, Artificial Sequence
  Description of Artificial Sequence: Synthetic oligonucleotide
  Antisense Strand to SEQ ID NO: 422927
aaaugcaguaaucuaaucu

SEQ ID NO: 422929 - RNA, 19 nt, Artificial Sequence
  Description of Artificial Sequence: Synthetic oligonucleotide
  Sense Strand Starting at position 1327 of SEQ ID NO: 318299
aucuuaacugcuugaugac

SEQ ID NO: 422930 - RNA, 19 nt, Artificial Sequence
  Description of Artificial Sequence: Synthetic oligonucleotide
  Antisense Strand to SEQ ID NO: 422929
gucaucaagcaguuaagau

SEQ ID NO: 422931 - RNA, 19 nt, Artificial Sequence
  Description of Artificial Sequence: Synthetic oligonucleotide
  Sense Strand Starting at position 1327 of SEQ ID NO: 318300
ucuuaacugcuugaugacu

SEQ ID NO: 422932 - RNA, 19 nt, Artificial Sequence
  Description of Artificial Sequence: Synthetic oligonucleotide
  Antisense Strand to SEQ ID NO: 422931
agucaucaagcaguuaaga

SEQ ID NO: 422933 - RNA, 19 nt, Artificial Sequence
  Description of Artificial Sequence: Synthetic oligonucleotide
  Sense Strand Starting at position 1327 of SEQ ID NO: 318931
guauguauauacccauaua

SEQ ID NO: 422934 - RNA, 19 nt, Artificial Sequence
  Description of Artificial Sequence: Synthetic oligonucleotide
  Antisense Strand to SEQ ID NO: 422933
uauauggguauauacauac

SEQ ID NO: 422935 - RNA, 19 nt, Artificial Sequence
  Description of Artificial Sequence: Synthetic oligonucleotide
  Sense Strand Starting at position 1327 of SEQ ID NO: 319021
ggcaaucacuauucugaug

SEQ ID NO: 422936 - RNA, 19 nt, Artificial Sequence
  Description of Artificial Sequence: Synthetic oligonucleotide
  Antisense Strand to SEQ ID NO: 422935
caucagaauagugauugcc

SEQ ID NO: 422937 - RNA, 19 nt, Artificial Sequence
  Description of Artificial Sequence: Synthetic oligonucleotide
  Sense Strand Starting at position 1327 of SEQ ID NO: 319060
uugaacuucguauaacuua

SEQ ID NO: 422938 - RNA, 19 nt, Artificial Sequence
  Description of Artificial Sequence: Synthetic oligonucleotide
  Antisense Strand to SEQ ID NO: 422937
uaaguuauacgaaguucaa

SEQ ID NO: 422939 - RNA, 19 nt, Artificial Sequence
  Description of Artificial Sequence: Synthetic oligonucleotide
  Sense Strand Starting at position 1327 of SEQ ID NO: 319113
uagagaaguuaguuaacgu

SEQ ID NO: 422940 - RNA, 19 nt, Artificial Sequence
  Description of Artificial Sequence: Synthetic oligonucleotide
  Antisense Strand to SEQ ID NO: 422939
acguuaacuaacuucucua

SEQ ID NO: 422941 - RNA, 19 nt, Artificial Sequence
  Description of Artificial Sequence: Synthetic oligonucleotide
  Sense Strand Starting at position 1327 of SEQ ID NO: 319114
agagaaguuaguuaacgug

SEQ ID NO: 422942 - RNA, 19 nt, Artificial Sequence
  Description of Artificial Sequence: Synthetic oligonucleotide
  Antisense Strand to SEQ ID NO: 422941
cacguuaacuaacuucucu

SEQ ID NO: 422943 - RNA, 19 nt, Artificial Sequence
  Description of Artificial Sequence: Synthetic oligonucleotide
  Sense Strand Starting at position 1327 of SEQ ID NO: 319124
guuaacguggccuaaugaa

SEQ ID NO: 422944 - RNA, 19 nt, Artificial Sequence
  Description of Artificial Sequence: Synthetic oligonucleotide
  Antisense Strand to SEQ ID NO: 422943
uucauuaggccacguuaac

SEQ ID NO: 422945 - RNA, 19 nt, Artificial Sequence
  Description of Artificial Sequence: Synthetic oligonucleotide
  Sense Strand Starting at position 1327 of SEQ ID NO: 319216
ccaagcugucauugcuuau

SEQ ID NO: 422946 - RNA, 19 nt, Artificial Sequence
  Description of Artificial Sequence: Synthetic oligonucleotide
  Antisense Strand to SEQ ID NO: 422945
auaagcaaugacagcuugg

SEQ ID NO: 422947 - RNA, 19 nt, Artificial Sequence
  Description of Artificial Sequence: Synthetic oligonucleotide
  Sense Strand Starting at position 1328 of SEQ ID NO: 315282
uuuggcugccaugauacau

SEQ ID NO: 422948 - RNA, 19 nt, Artificial Sequence
  Description of Artificial Sequence: Synthetic oligonucleotide
  Antisense Strand to SEQ ID NO: 422947
auguaucauggcagccaaa

SEQ ID NO: 422949 - RNA, 19 nt, Artificial Sequence
  Description of Artificial Sequence: Synthetic oligonucleotide
  Sense Strand Starting at position 1328 of SEQ ID NO: 315458
cuuugaauaucaucuacgu

SEQ ID NO: 422950 - RNA, 19 nt, Artificial Sequence
  Description of Artificial Sequence: Synthetic oligonucleotide
  Antisense Strand to SEQ ID NO: 422949
acguagaugauauucaaag

SEQ ID NO: 422951 - RNA, 19 nt, Artificial Sequence
  Description of Artificial Sequence: Synthetic oligonucleotide
  Sense Strand Starting at position 1328 of SEQ ID NO: 315532
agccaaggcuggucuagaa

SEQ ID NO: 422952 - RNA, 19 nt, Artificial Sequence
  Description of Artificial Sequence: Synthetic oligonucleotide
  Antisense Strand to SEQ ID NO: 422951
uucuagaccagccuuggcu

SEQ ID NO: 422953 - RNA, 19 nt, Artificial Sequence
  Description of Artificial Sequence: Synthetic oligonucleotide
  Sense Strand Starting at position 1328 of SEQ ID NO: 315536
aaggcuggucuagaauauc

SEQ ID NO: 422954 - RNA, 19 nt, Artificial Sequence
  Description of Artificial Sequence: Synthetic oligonucleotide
  Antisense Strand to SEQ ID NO: 422953
gauauucuagaccagccuu

SEQ ID NO: 422955 - RNA, 19 nt, Artificial Sequence
  Description of Artificial Sequence: Synthetic oligonucleotide
  Sense Strand Starting at position 1328 of SEQ ID NO: 315545
cuagaauaucugggcucaa

SEQ ID NO: 422956 - RNA, 19 nt, Artificial Sequence
  Description of Artificial Sequence: Synthetic oligonucleotide
  Antisense Strand to SEQ ID NO: 422955
uugagcccagauauucuag

SEQ ID NO: 422957 - RNA, 19 nt, Artificial Sequence
  Description of Artificial Sequence: Synthetic oligonucleotide
  Sense Strand Starting at position 1328 of SEQ ID NO: 315546
uagaauaucugggcucaag

SEQ ID NO: 422958 - RNA, 19 nt, Artificial Sequence
  Description of Artificial Sequence: Synthetic oligonucleotide
  Antisense Strand to SEQ ID NO: 422957
cuugagcccagauauucua

SEQ ID NO: 422959 - RNA, 19 nt, Artificial Sequence
  Description of Artificial Sequence: Synthetic oligonucleotide
  Sense Strand Starting at position 1328 of SEQ ID NO: 316143
aggguaguaucucuagauc

SEQ ID NO: 422960 - RNA, 19 nt, Artificial Sequence
  Description of Artificial Sequence: Synthetic oligonucleotide
  Antisense Strand to SEQ ID NO: 422959
gaucuagagauacuacccu

SEQ ID NO: 422961 - RNA, 19 nt, Artificial Sequence
  Description of Artificial Sequence: Synthetic oligonucleotide
  Sense Strand Starting at position 1328 of SEQ ID NO: 316146
guaguaucucuagaucgua

SEQ ID NO: 422962 - RNA, 19 nt, Artificial Sequence
  Description of Artificial Sequence: Synthetic oligonucleotide
  Antisense Strand to SEQ ID NO: 422961
uacgaucuagagauacuac

SEQ ID NO: 422963 - RNA, 19 nt, Artificial Sequence
  Description of Artificial Sequence: Synthetic oligonucleotide
  Sense Strand Starting at position 1328 of SEQ ID NO: 316288
uuuacaugugagcgagaaa

SEQ ID NO: 422964 - RNA, 19 nt, Artificial Sequence
  Description of Artificial Sequence: Synthetic oligonucleotide
  Antisense Strand to SEQ ID NO: 422963
uuucucgcucacauguaaa

SEQ ID NO: 422965 - RNA, 19 nt, Artificial Sequence
  Description of Artificial Sequence: Synthetic oligonucleotide
  Sense Strand Starting at position 1328 of SEQ ID NO: 316321
gugggucaacucuguaacu

SEQ ID NO: 422966 - RNA, 19 nt, Artificial Sequence
  Description of Artificial Sequence: Synthetic oligonucleotide
  Antisense Strand to SEQ ID NO: 422965
aguuacagaguugacccac

SEQ ID NO: 422967 - RNA, 19 nt, Artificial Sequence
  Description of Artificial Sequence: Synthetic oligonucleotide
  Sense Strand Starting at position 1328 of SEQ ID NO: 316390
augugucaggccuguaaga

SEQ ID NO: 422968 - RNA, 19 nt, Artificial Sequence
  Description of Artificial Sequence: Synthetic oligonucleotide
  Antisense Strand to SEQ ID NO: 422967
ucuuacaggccugacacau

SEQ ID NO: 422969 - RNA, 19 nt, Artificial Sequence
  Description of Artificial Sequence: Synthetic oligonucleotide
  Sense Strand Starting at position 1328 of SEQ ID NO: 316392
gugucaggccuguaagauu

SEQ ID NO: 422970 - RNA, 19 nt, Artificial Sequence
  Description of Artificial Sequence: Synthetic oligonucleotide
  Antisense Strand to SEQ ID NO: 422969
aaucuuacaggccugacac

SEQ ID NO: 422971 - RNA, 19 nt, Artificial Sequence
  Description of Artificial Sequence: Synthetic oligonucleotide
  Sense Strand Starting at position 1328 of SEQ ID NO: 316515
cagccuuuccugcaggagu

SEQ ID NO: 422972 - RNA, 19 nt, Artificial Sequence
  Description of Artificial Sequence: Synthetic oligonucleotide
  Antisense Strand to SEQ ID NO: 422971
acuccugcaggaaaggcug

SEQ ID NO: 422973 - RNA, 19 nt, Artificial Sequence
  Description of Artificial Sequence: Synthetic oligonucleotide
  Sense Strand Starting at position 1328 of SEQ ID NO: 316697
ucgguaaacccacgacuuu

SEQ ID NO: 422974 - RNA, 19 nt, Artificial Sequence
  Description of Artificial Sequence: Synthetic oligonucleotide
  Antisense Strand to SEQ ID NO: 422973
aaagucguggguuuaccga

SEQ ID NO: 422975 - RNA, 19 nt, Artificial Sequence
  Description of Artificial Sequence: Synthetic oligonucleotide
  Sense Strand Starting at position 1328 of SEQ ID NO: 316726
ggccaaaucuugccuccaa

SEQ ID NO: 422976 - RNA, 19 nt, Artificial Sequence
  Description of Artificial Sequence: Synthetic oligonucleotide
  Antisense Strand to SEQ ID NO: 422975
uuggaggcaagauuuggcc

SEQ ID NO: 422977 - RNA, 19 nt, Artificial Sequence
  Description of Artificial Sequence: Synthetic oligonucleotide
  Sense Strand Starting at position 1328 of SEQ ID NO: 316727
gccaaaucuugccuccaag

SEQ ID NO: 422978 - RNA, 19 nt, Artificial Sequence
  Description of Artificial Sequence: Synthetic oligonucleotide
  Antisense Strand to SEQ ID NO: 422977
cuuggaggcaagauuuggc

SEQ ID NO: 422979 - RNA, 19 nt, Artificial Sequence
  Description of Artificial Sequence: Synthetic oligonucleotide
  Sense Strand Starting at position 1328 of SEQ ID NO: 317381
gggcgucgauucuugcaaa

SEQ ID NO: 422980 - RNA, 19 nt, Artificial Sequence
  Description of Artificial Sequence: Synthetic oligonucleotide
  Antisense Strand to SEQ ID NO: 422979
uuugcaagaaucgacgccc

SEQ ID NO: 422981 - RNA, 19 nt, Artificial Sequence
  Description of Artificial Sequence: Synthetic oligonucleotide
  Sense Strand Starting at position 1328 of SEQ ID NO: 317426
cccagaagauggcgaauuu

SEQ ID NO: 422982 - RNA, 19 nt, Artificial Sequence
  Description of Artificial Sequence: Synthetic oligonucleotide
  Antisense Strand to SEQ ID NO: 422981
aaauucgccaucuucuggg

SEQ ID NO: 422983 - RNA, 19 nt, Artificial Sequence
  Description of Artificial Sequence: Synthetic oligonucleotide
  Sense Strand Starting at position 1328 of SEQ ID NO: 317479
gcguguaugagcuucccua

SEQ ID NO: 422984 - RNA, 19 nt, Artificial Sequence
  Description of Artificial Sequence: Synthetic oligonucleotide
  Antisense Strand to SEQ ID NO: 422983
uagggaagcucauacacgc

SEQ ID NO: 422985 - RNA, 19 nt, Artificial Sequence
  Description of Artificial Sequence: Synthetic oligonucleotide
  Sense Strand Starting at position 1328 of SEQ ID NO: 317483
guaugagcuucccuauuaa

SEQ ID NO: 422986 - RNA, 19 nt, Artificial Sequence
  Description of Artificial Sequence: Synthetic oligonucleotide
  Antisense Strand to SEQ ID NO: 422985
uuaauagggaagcucauac

SEQ ID NO: 422987 - RNA, 19 nt, Artificial Sequence
  Description of Artificial Sequence: Synthetic oligonucleotide
  Sense Strand Starting at position 1328 of SEQ ID NO: 317502
ucacaauagugacuaugau

SEQ ID NO: 422988 - RNA, 19 nt, Artificial Sequence
  Description of Artificial Sequence: Synthetic oligonucleotide
  Antisense Strand to SEQ ID NO: 422987
aucauagucacuauuguga

SEQ ID NO: 422989 - RNA, 19 nt, Artificial Sequence
  Description of Artificial Sequence: Synthetic oligonucleotide
  Sense Strand Starting at position 1328 of SEQ ID NO: 317512
gacuaugauguuugugugu

SEQ ID NO: 422990 - RNA, 19 nt, Artificial Sequence
  Description of Artificial Sequence: Synthetic oligonucleotide
  Antisense Strand to SEQ ID NO: 422989
acacacaaacaucauaguc

SEQ ID NO: 422991 - RNA, 19 nt, Artificial Sequence
  Description of Artificial Sequence: Synthetic oligonucleotide
  Sense Strand Starting at position 1328 of SEQ ID NO: 317580
aguaguuauuucuagccca

SEQ ID NO: 422992 - RNA, 19 nt, Artificial Sequence
  Description of Artificial Sequence: Synthetic oligonucleotide
  Antisense Strand to SEQ ID NO: 422991
ugggcuagaaauaacuacu

SEQ ID NO: 422993 - RNA, 19 nt, Artificial Sequence
  Description of Artificial Sequence: Synthetic oligonucleotide
  Sense Strand Starting at position 1328 of SEQ ID NO: 317630
gcuugagacuuaucucagu

SEQ ID NO: 422994 - RNA, 19 nt, Artificial Sequence
  Description of Artificial Sequence: Synthetic oligonucleotide
  Antisense Strand to SEQ ID NO: 422993
acugagauaagucucaagc

SEQ ID NO: 422995 - RNA, 19 nt, Artificial Sequence
  Description of Artificial Sequence: Synthetic oligonucleotide
  Sense Strand Starting at position 1328 of SEQ ID NO: 317635
agacuuaucucagucacac

SEQ ID NO: 422996 - RNA, 19 nt, Artificial Sequence
  Description of Artificial Sequence: Synthetic oligonucleotide
  Antisense Strand to SEQ ID NO: 422995
gugugacugagauaagucu

SEQ ID NO: 422997 - RNA, 19 nt, Artificial Sequence
  Description of Artificial Sequence: Synthetic oligonucleotide
  Sense Strand Starting at position 1328 of SEQ ID NO: 317706
acauucucuuucguuguaa

SEQ ID NO: 422998 - RNA, 19 nt, Artificial Sequence
  Description of Artificial Sequence: Synthetic oligonucleotide
  Antisense Strand to SEQ ID NO: 422997
uuacaacgaaagagaaugu

SEQ ID NO: 422999 - RNA, 19 nt, Artificial Sequence
  Description of Artificial Sequence: Synthetic oligonucleotide
  Sense Strand Starting at position 1328 of SEQ ID NO: 317708
auucucuuucguuguaacu

SEQ ID NO: 423000 - RNA, 19 nt, Artificial Sequence
  Description of Artificial Sequence: Synthetic oligonucleotide
  Antisense Strand to SEQ ID NO: 422999
aguuacaacgaaagagaau

SEQ ID NO: 423001 - RNA, 19 nt, Artificial Sequence
  Description of Artificial Sequence: Synthetic oligonucleotide
  Sense Strand Starting at position 1328 of SEQ ID NO: 317823
cucacuguauaacgauuua

SEQ ID NO: 423002 - RNA, 19 nt, Artificial Sequence
  Description of Artificial Sequence: Synthetic oligonucleotide
  Antisense Strand to SEQ ID NO: 423001
uaaaucguuauacagugag

SEQ ID NO: 423003 - RNA, 19 nt, Artificial Sequence
  Description of Artificial Sequence: Synthetic oligonucleotide
  Sense Strand Starting at position 1328 of SEQ ID NO: 318757
acucuuaggguuuaacagu

SEQ ID NO: 423004 - RNA, 19 nt, Artificial Sequence
  Description of Artificial Sequence: Synthetic oligonucleotide
  Antisense Strand to SEQ ID NO: 423003
acuguuaaacccuaagagu

SEQ ID NO: 423005 - RNA, 19 nt, Artificial Sequence
  Description of Artificial Sequence: Synthetic oligonucleotide
  Sense Strand Starting at position 1328 of SEQ ID NO: 318798
ccagauaagugccaagaaa

SEQ ID NO: 423006 - RNA, 19 nt, Artificial Sequence
  Description of Artificial Sequence: Synthetic oligonucleotide
  Antisense Strand to SEQ ID NO: 423005
uuucuuggcacuuaucugg

SEQ ID NO: 423007 - RNA, 19 nt, Artificial Sequence
  Description of Artificial Sequence: Synthetic oligonucleotide
  Sense Strand Starting at position 1328 of SEQ ID NO: 318824
gcugacuucccuuggugua

SEQ ID NO: 423008 - RNA, 19 nt, Artificial Sequence
  Description of Artificial Sequence: Synthetic oligonucleotide
  Antisense Strand to SEQ ID NO: 423007
uacaccaagggaagucagc

SEQ ID NO: 423009 - RNA, 19 nt, Artificial Sequence
  Description of Artificial Sequence: Synthetic oligonucleotide
  Sense Strand Starting at position 1328 of SEQ ID NO: 318852
gcuguccaagucugugaga

SEQ ID NO: 423010 - RNA, 19 nt, Artificial Sequence
  Description of Artificial Sequence: Synthetic oligonucleotide
  Antisense Strand to SEQ ID NO: 423009
ucucacagacuuggacagc

SEQ ID NO: 423011 - RNA, 19 nt, Artificial Sequence
  Description of Artificial Sequence: Synthetic oligonucleotide
  Sense Strand Starting at position 1328 of SEQ ID NO: 318853
cuguccaagucugugagaa

SEQ ID NO: 423012 - RNA, 19 nt, Artificial Sequence
  Description of Artificial Sequence: Synthetic oligonucleotide
  Antisense Strand to SEQ ID NO: 423011
uucucacagacuuggacag

SEQ ID NO: 423013 - RNA, 19 nt, Artificial Sequence
  Description of Artificial Sequence: Synthetic oligonucleotide
  Sense Strand Starting at position 1328 of SEQ ID NO: 318854
uguccaagucugugagaag

SEQ ID NO: 423014 - RNA, 19 nt, Artificial Sequence
  Description of Artificial Sequence: Synthetic oligonucleotide
  Antisense Strand to SEQ ID NO: 423013
cuucucacagacuuggaca

SEQ ID NO: 423015 - RNA, 19 nt, Artificial Sequence
  Description of Artificial Sequence: Synthetic oligonucleotide
  Sense Strand Starting at position 1328 of SEQ ID NO: 318866
ugagaaggcucacacagua

SEQ ID NO: 423016 - RNA, 19 nt, Artificial Sequence
  Description of Artificial Sequence: Synthetic oligonucleotide
  Antisense Strand to SEQ ID NO: 423015
uacugugugagccuucuca

SEQ ID NO: 423017 - RNA, 19 nt, Artificial Sequence
  Description of Artificial Sequence: Synthetic oligonucleotide
  Sense Strand Starting at position 1328 of SEQ ID NO: 318908
uugggaggagucugcaaua

SEQ ID NO: 423018 - RNA, 19 nt, Artificial Sequence
  Description of Artificial Sequence: Synthetic oligonucleotide
  Antisense Strand to SEQ ID NO: 423017
uauugcagacuccucccaa

SEQ ID NO: 423019 - RNA, 19 nt, Artificial Sequence
  Description of Artificial Sequence: Synthetic oligonucleotide
  Sense Strand Starting at position 1328 of SEQ ID NO: 318911
ggaggagucugcaauagug

SEQ ID NO: 423020 - RNA, 19 nt, Artificial Sequence
  Description of Artificial Sequence: Synthetic oligonucleotide
  Antisense Strand to SEQ ID NO: 423019
cacuauugcagacuccucc

SEQ ID NO: 423021 - RNA, 19 nt, Artificial Sequence
  Description of Artificial Sequence: Synthetic oligonucleotide
  Sense Strand Starting at position 1328 of SEQ ID NO: 318962
augucagaauuccagacuu

SEQ ID NO: 423022 - RNA, 19 nt, Artificial Sequence
  Description of Artificial Sequence: Synthetic oligonucleotide
  Antisense Strand to SEQ ID NO: 423021
aagucuggaauucugacau

SEQ ID NO: 423023 - RNA, 19 nt, Artificial Sequence
  Description of Artificial Sequence: Synthetic oligonucleotide
  Sense Strand Starting at position 1328 of SEQ ID NO: 318970
auuccagacuucucuuguu

SEQ ID NO: 423024 - RNA, 19 nt, Artificial Sequence
  Description of Artificial Sequence: Synthetic oligonucleotide
  Antisense Strand to SEQ ID NO: 423023
aacaagagaagucuggaau

SEQ ID NO: 423025 - RNA, 19 nt, Artificial Sequence
  Description of Artificial Sequence: Synthetic oligonucleotide
  Sense Strand Starting at position 1328 of SEQ ID NO: 319006
cagaaaguagcaugguuaa

SEQ ID NO: 423026 - RNA, 19 nt, Artificial Sequence
  Description of Artificial Sequence: Synthetic oligonucleotide
  Antisense Strand to SEQ ID NO: 423025
uuaaccaugcuacuuucug

SEQ ID NO: 423027 - RNA, 19 nt, Artificial Sequence
  Description of Artificial Sequence: Synthetic oligonucleotide
  Sense Strand Starting at position 1329 of SEQ ID NO: 315240
uaggcagguucucuugaga

SEQ ID NO: 423028 - RNA, 19 nt, Artificial Sequence
  Description of Artificial Sequence: Synthetic oligonucleotide
  Antisense Strand to SEQ ID NO: 423027
ucucaagagaaccugccua

SEQ ID NO: 423029 - RNA, 19 nt, Artificial Sequence
  Description of Artificial Sequence: Synthetic oligonucleotide
  Sense Strand Starting at position 1329 of SEQ ID NO: 315243
gcagguucucuugagaaca

SEQ ID NO: 423030 - RNA, 19 nt, Artificial Sequence
  Description of Artificial Sequence: Synthetic oligonucleotide
  Antisense Strand to SEQ ID NO: 423029
uguucucaagagaaccugc

SEQ ID NO: 423031 - RNA, 19 nt, Artificial Sequence
  Description of Artificial Sequence: Synthetic oligonucleotide
  Sense Strand Starting at position 1329 of SEQ ID NO: 315263
cugagaaacuuugccuuua

SEQ ID NO: 423032 - RNA, 19 nt, Artificial Sequence
  Description of Artificial Sequence: Synthetic oligonucleotide
  Antisense Strand to SEQ ID NO: 423031
uaaaggcaaaguuucucag

SEQ ID NO: 423033 - RNA, 19 nt, Artificial Sequence
  Description of Artificial Sequence: Synthetic oligonucleotide
  Sense Strand Starting at position 1329 of SEQ ID NO: 315264
ugagaaacuuugccuuuag

SEQ ID NO: 423034 - RNA, 19 nt, Artificial Sequence
  Description of Artificial Sequence: Synthetic oligonucleotide
  Antisense Strand to SEQ ID NO: 423033
cuaaaggcaaaguuucuca

SEQ ID NO: 423035 - RNA, 19 nt, Artificial Sequence
  Description of Artificial Sequence: Synthetic oligonucleotide
  Sense Strand Starting at position 1329 of SEQ ID NO: 315401
ucauaagaucuuuguguga

SEQ ID NO: 423036 - RNA, 19 nt, Artificial Sequence
  Description of Artificial Sequence: Synthetic oligonucleotide
  Antisense Strand to SEQ ID NO: 423035
ucacacaaagaucuuauga

SEQ ID NO: 423037 - RNA, 19 nt, Artificial Sequence
  Description of Artificial Sequence: Synthetic oligonucleotide
  Sense Strand Starting at position 1329 of SEQ ID NO: 315404
uaagaucuuugugugauag

SEQ ID NO: 423038 - RNA, 19 nt, Artificial Sequence
  Description of Artificial Sequence: Synthetic oligonucleotide
  Antisense Strand to SEQ ID NO: 423037
cuaucacacaaagaucuua

SEQ ID NO: 423039 - RNA, 19 nt, Artificial Sequence
  Description of Artificial Sequence: Synthetic oligonucleotide
  Sense Strand Starting at position 1329 of SEQ ID NO: 315405
aagaucuuugugugauaga

SEQ ID NO: 423040 - RNA, 19 nt, Artificial Sequence
  Description of Artificial Sequence: Synthetic oligonucleotide
  Antisense Strand to SEQ ID NO: 423039
ucuaucacacaaagaucuu

SEQ ID NO: 423041 - RNA, 19 nt, Artificial Sequence
  Description of Artificial Sequence: Synthetic oligonucleotide
  Sense Strand Starting at position 1329 of SEQ ID NO: 315502
aggugucugauuugugacu

SEQ ID NO: 423042 - RNA, 19 nt, Artificial Sequence
  Description of Artificial Sequence: Synthetic oligonucleotide
  Antisense Strand to SEQ ID NO: 423041
agucacaaaucagacaccu

SEQ ID NO: 423043 - RNA, 19 nt, Artificial Sequence
  Description of Artificial Sequence: Synthetic oligonucleotide
  Sense Strand Starting at position 1329 of SEQ ID NO: 315503
ggugucugauuugugacuu

SEQ ID NO: 423044 - RNA, 19 nt, Artificial Sequence
  Description of Artificial Sequence: Synthetic oligonucleotide
  Antisense Strand to SEQ ID NO: 423043
aagucacaaaucagacacc

SEQ ID NO: 423045 - RNA, 19 nt, Artificial Sequence
  Description of Artificial Sequence: Synthetic oligonucleotide
  Sense Strand Starting at position 1329 of SEQ ID NO: 315693
cauaaugagcuuuaguguu

SEQ ID NO: 423046 - RNA, 19 nt, Artificial Sequence
  Description of Artificial Sequence: Synthetic oligonucleotide
  Antisense Strand to SEQ ID NO: 423045
aacacuaaagcucauuaug

SEQ ID NO: 423047 - RNA, 19 nt, Artificial Sequence
  Description of Artificial Sequence: Synthetic oligonucleotide
  Sense Strand Starting at position 1329 of SEQ ID NO: 315848
auguuaccuuguguuauuu

SEQ ID NO: 423048 - RNA, 19 nt, Artificial Sequence
  Description of Artificial Sequence: Synthetic oligonucleotide
  Antisense Strand to SEQ ID NO: 423047
aaauaacacaagguaacau

SEQ ID NO: 423049 - RNA, 19 nt, Artificial Sequence
  Description of Artificial Sequence: Synthetic oligonucleotide
  Sense Strand Starting at position 1329 of SEQ ID NO: 315995
ugugcuaaguauguaauuu

SEQ ID NO: 423050 - RNA, 19 nt, Artificial Sequence
  Description of Artificial Sequence: Synthetic oligonucleotide
  Antisense Strand to SEQ ID NO: 423049
aaauuacauacuuagcaca

SEQ ID NO: 423051 - RNA, 19 nt, Artificial Sequence
  Description of Artificial Sequence: Synthetic oligonucleotide
  Sense Strand Starting at position 1329 of SEQ ID NO: 316123
aacgaucuugaugagcaau

SEQ ID NO: 423052 - RNA, 19 nt, Artificial Sequence
  Description of Artificial Sequence: Synthetic oligonucleotide
  Antisense Strand to SEQ ID NO: 423051
auugcucaucaagaucguu

SEQ ID NO: 423053 - RNA, 19 nt, Artificial Sequence
  Description of Artificial Sequence: Synthetic oligonucleotide
  Sense Strand Starting at position 1329 of SEQ ID NO: 316125
cgaucuugaugagcaauca

SEQ ID NO: 423054 - RNA, 19 nt, Artificial Sequence
  Description of Artificial Sequence: Synthetic oligonucleotide
  Antisense Strand to SEQ ID NO: 423053
ugauugcucaucaagaucg

SEQ ID NO: 423055 - RNA, 19 nt, Artificial Sequence
  Description of Artificial Sequence: Synthetic oligonucleotide
  Sense Strand Starting at position 1329 of SEQ ID NO: 316181
cagguuaagcacugaggau

SEQ ID NO: 423056 - RNA, 19 nt, Artificial Sequence
  Description of Artificial Sequence: Synthetic oligonucleotide
  Antisense Strand to SEQ ID NO: 423055
auccucagugcuuaaccug

SEQ ID NO: 423057 - RNA, 19 nt, Artificial Sequence
  Description of Artificial Sequence: Synthetic oligonucleotide
  Sense Strand Starting at position 1329 of SEQ ID NO: 316237
gaacuuacacucuggugaa

SEQ ID NO: 423058 - RNA, 19 nt, Artificial Sequence
  Description of Artificial Sequence: Synthetic oligonucleotide
  Antisense Strand to SEQ ID NO: 423057
uucaccagaguguaaguuc

SEQ ID NO: 423059 - RNA, 19 nt, Artificial Sequence
  Description of Artificial Sequence: Synthetic oligonucleotide
  Sense Strand Starting at position 1329 of SEQ ID NO: 316291
uugcaagaauuauuaagug

SEQ ID NO: 423060 - RNA, 19 nt, Artificial Sequence
  Description of Artificial Sequence: Synthetic oligonucleotide
  Antisense Strand to SEQ ID NO: 423059
cacuuaauaauucuugcaa

SEQ ID NO: 423061 - RNA, 19 nt, Artificial Sequence
  Description of Artificial Sequence: Synthetic oligonucleotide
  Sense Strand Starting at position 1329 of SEQ ID NO: 316390
cucuguguagacuauaaga

SEQ ID NO: 423062 - RNA, 19 nt, Artificial Sequence
  Description of Artificial Sequence: Synthetic oligonucleotide
  Antisense Strand to SEQ ID NO: 423061
ucuuauagucuacacagag

SEQ ID NO: 423063 - RNA, 19 nt, Artificial Sequence
  Description of Artificial Sequence: Synthetic oligonucleotide
  Sense Strand Starting at position 1329 of SEQ ID NO: 316665
cuuacuugugaggaguaga

SEQ ID NO: 423064 - RNA, 19 nt, Artificial Sequence
  Description of Artificial Sequence: Synthetic oligonucleotide
  Antisense Strand to SEQ ID NO: 423063
ucuacuccucacaaguaag

SEQ ID NO: 423065 - RNA, 19 nt, Artificial Sequence
  Description of Artificial Sequence: Synthetic oligonucleotide
  Sense Strand Starting at position 1329 of SEQ ID NO: 316668
acuugugaggaguagacuu

SEQ ID NO: 423066 - RNA, 19 nt, Artificial Sequence
  Description of Artificial Sequence: Synthetic oligonucleotide
  Antisense Strand to SEQ ID NO: 423065
aagucuacuccucacaagu

SEQ ID NO: 423067 - RNA, 19 nt, Artificial Sequence
  Description of Artificial Sequence: Synthetic oligonucleotide
  Sense Strand Starting at position 1329 of SEQ ID NO: 316742
gaugaaauaugguuucuca

SEQ ID NO: 423068 - RNA, 19 nt, Artificial Sequence
  Description of Artificial Sequence: Synthetic oligonucleotide
  Antisense Strand to SEQ ID NO: 423067
ugagaaaccauauuucauc

SEQ ID NO: 423069 - RNA, 19 nt, Artificial Sequence
  Description of Artificial Sequence: Synthetic oligonucleotide
  Sense Strand Starting at position 1329 of SEQ ID NO: 316921
aagucuuugguguauacca

SEQ ID NO: 423070 - RNA, 19 nt, Artificial Sequence
  Description of Artificial Sequence: Synthetic oligonucleotide
  Antisense Strand to SEQ ID NO: 423069
ugguauacaccaaagacuu

SEQ ID NO: 423071 - RNA, 19 nt, Artificial Sequence
  Description of Artificial Sequence: Synthetic oligonucleotide
  Sense Strand Starting at position 1329 of SEQ ID NO: 316923
gucuuugguguauaccaaa

SEQ ID NO: 423072 - RNA, 19 nt, Artificial Sequence
  Description of Artificial Sequence: Synthetic oligonucleotide
  Antisense Strand to SEQ ID NO: 423071
uuugguauacaccaaagac

SEQ ID NO: 423073 - RNA, 19 nt, Artificial Sequence
  Description of Artificial Sequence: Synthetic oligonucleotide
  Sense Strand Starting at position 1329 of SEQ ID NO: 317238
cgggaguuuccgucuuggu

SEQ ID NO: 423074 - RNA, 19 nt, Artificial Sequence
  Description of Artificial Sequence: Synthetic oligonucleotide
  Antisense Strand to SEQ ID NO: 423073
accaagacggaaacucccg

SEQ ID NO: 423075 - RNA, 19 nt, Artificial Sequence
  Description of Artificial Sequence: Synthetic oligonucleotide
  Sense Strand Starting at position 1329 of SEQ ID NO: 317408
gaagcuuuccgccagagag

SEQ ID NO: 423076 - RNA, 19 nt, Artificial Sequence
  Description of Artificial Sequence: Synthetic oligonucleotide
  Antisense Strand to SEQ ID NO: 423075
cucucuggcggaaagcuuc

SEQ ID NO: 423077 - RNA, 19 nt, Artificial Sequence
  Description of Artificial Sequence: Synthetic oligonucleotide
  Sense Strand Starting at position 1329 of SEQ ID NO: 317486
agagacuuauaugucauau

SEQ ID NO: 423078 - RNA, 19 nt, Artificial Sequence
  Description of Artificial Sequence: Synthetic oligonucleotide
  Antisense Strand to SEQ ID NO: 423077
auaugacauauaagucucu

SEQ ID NO: 423079 - RNA, 19 nt, Artificial Sequence
  Description of Artificial Sequence: Synthetic oligonucleotide
  Sense Strand Starting at position 1329 of SEQ ID NO: 317619
caaggaguuuagucucaga

SEQ ID NO: 423080 - RNA, 19 nt, Artificial Sequence
  Description of Artificial Sequence: Synthetic oligonucleotide
  Antisense Strand to SEQ ID NO: 423079
ucugagacuaaacuccuug

SEQ ID NO: 423081 - RNA, 19 nt, Artificial Sequence
  Description of Artificial Sequence: Synthetic oligonucleotide
  Sense Strand Starting at position 1329 of SEQ ID NO: 317738
cuuuguaccgaauacauga

SEQ ID NO: 423082 - RNA, 19 nt, Artificial Sequence
  Description of Artificial Sequence: Synthetic oligonucleotide
  Antisense Strand to SEQ ID NO: 423081
ucauguauucgguacaaag

SEQ ID NO: 423083 - RNA, 19 nt, Artificial Sequence
  Description of Artificial Sequence: Synthetic oligonucleotide
  Sense Strand Starting at position 1329 of SEQ ID NO: 317761
uggagucuaauggguauaa

SEQ ID NO: 423084 - RNA, 19 nt, Artificial Sequence
  Description of Artificial Sequence: Synthetic oligonucleotide
  Antisense Strand to SEQ ID NO: 423083
uuauacccauuagacucca

SEQ ID NO: 423085 - RNA, 19 nt, Artificial Sequence
  Description of Artificial Sequence: Synthetic oligonucleotide
  Sense Strand Starting at position 1329 of SEQ ID NO: 317762
ggagucuaauggguauaaa

SEQ ID NO: 423086 - RNA, 19 nt, Artificial Sequence
  Description of Artificial Sequence: Synthetic oligonucleotide
  Antisense Strand to SEQ ID NO: 423085
uuuauacccauuagacucc

SEQ ID NO: 423087 - RNA, 19 nt, Artificial Sequence
  Description of Artificial Sequence: Synthetic oligonucleotide
  Sense Strand Starting at position 1329 of SEQ ID NO: 317895
gugaauuuaucuuuggcuu

SEQ ID NO: 423088 - RNA, 19 nt, Artificial Sequence
  Description of Artificial Sequence: Synthetic oligonucleotide
  Antisense Strand to SEQ ID NO: 423087
aagccaaagauaaauucac

SEQ ID NO: 423089 - RNA, 19 nt, Artificial Sequence
  Description of Artificial Sequence: Synthetic oligonucleotide
  Sense Strand Starting at position 1329 of SEQ ID NO: 318018
ucgguaccagacuaacaau

SEQ ID NO: 423090 - RNA, 19 nt, Artificial Sequence
  Description of Artificial Sequence: Synthetic oligonucleotide
  Antisense Strand to SEQ ID NO: 423089
auuguuagucugguaccga

SEQ ID NO: 423091 - RNA, 19 nt, Artificial Sequence
  Description of Artificial Sequence: Synthetic oligonucleotide
  Sense Strand Starting at position 1329 of SEQ ID NO: 318282
aguaacaaugcucagucua

SEQ ID NO: 423092 - RNA, 19 nt, Artificial Sequence
  Description of Artificial Sequence: Synthetic oligonucleotide
  Antisense Strand to SEQ ID NO: 423091
uagacugagcauuguuacu

SEQ ID NO: 423093 - RNA, 19 nt, Artificial Sequence
  Description of Artificial Sequence: Synthetic oligonucleotide
  Sense Strand Starting at position 1329 of SEQ ID NO: 318295
agucuaacugcuuaaauga

SEQ ID NO: 423094 - RNA, 19 nt, Artificial Sequence
  Description of Artificial Sequence: Synthetic oligonucleotide
  Antisense Strand to SEQ ID NO: 423093
ucauuuaagcaguuagacu

SEQ ID NO: 423095 - RNA, 19 nt, Artificial Sequence
  Description of Artificial Sequence: Synthetic oligonucleotide
  Sense Strand Starting at position 1329 of SEQ ID NO: 318323
acaguuaguccauacguaa

SEQ ID NO: 423096 - RNA, 19 nt, Artificial Sequence
  Description of Artificial Sequence: Synthetic oligonucleotide
  Antisense Strand to SEQ ID NO: 423095
uuacguauggacuaacugu

SEQ ID NO: 423097 - RNA, 19 nt, Artificial Sequence
  Description of Artificial Sequence: Synthetic oligonucleotide
  Sense Strand Starting at position 1329 of SEQ ID NO: 318339
uaauguaguauggaagagu

SEQ ID NO: 423098 - RNA, 19 nt, Artificial Sequence
  Description of Artificial Sequence: Synthetic oligonucleotide
  Antisense Strand to SEQ ID NO: 423097
acucuuccauacuacauua

SEQ ID NO: 423099 - RNA, 19 nt, Artificial Sequence
  Description of Artificial Sequence: Synthetic oligonucleotide
  Sense Strand Starting at position 1329 of SEQ ID NO: 318823
gaaacuaauugaguucugu

SEQ ID NO: 423100 - RNA, 19 nt, Artificial Sequence
  Description of Artificial Sequence: Synthetic oligonucleotide
  Antisense Strand to SEQ ID NO: 423099
acagaacucaauuaguuuc

SEQ ID NO: 423101 - RNA, 19 nt, Artificial Sequence
  Description of Artificial Sequence: Synthetic oligonucleotide
  Sense Strand Starting at position 1329 of SEQ ID NO: 318847
gguagauggccagggaagu

SEQ ID NO: 423102 - RNA, 19 nt, Artificial Sequence
  Description of Artificial Sequence: Synthetic oligonucleotide
  Antisense Strand to SEQ ID NO: 423101
acuucccuggccaucuacc

SEQ ID NO: 423103 - RNA, 19 nt, Artificial Sequence
  Description of Artificial Sequence: Synthetic oligonucleotide
  Sense Strand Starting at position 1329 of SEQ ID NO: 318848
guagauggccagggaagua

SEQ ID NO: 423104 - RNA, 19 nt, Artificial Sequence
  Description of Artificial Sequence: Synthetic oligonucleotide
  Antisense Strand to SEQ ID NO: 423103
uacuucccuggccaucuac

SEQ ID NO: 423105 - RNA, 19 nt, Artificial Sequence
  Description of Artificial Sequence: Synthetic oligonucleotide
  Sense Strand Starting at position 1329 of SEQ ID NO: 318861
gaaguaucugaaugcaagg

SEQ ID NO: 423106 - RNA, 19 nt, Artificial Sequence
  Description of Artificial Sequence: Synthetic oligonucleotide
  Antisense Strand to SEQ ID NO: 423105
ccuugcauucagauacuuc

SEQ ID NO: 423107 - RNA, 19 nt, Artificial Sequence
  Description of Artificial Sequence: Synthetic oligonucleotide
  Sense Strand Starting at position 1330 of SEQ ID NO: 315254
uaggcagguucucuugaga

SEQ ID NO: 423108 - RNA, 19 nt, Artificial Sequence
  Description of Artificial Sequence: Synthetic oligonucleotide
  Antisense Strand to SEQ ID NO: 423107
ucucaagagaaccugccua

SEQ ID NO: 423109 - RNA, 19 nt, Artificial Sequence
  Description of Artificial Sequence: Synthetic oligonucleotide
  Sense Strand Starting at position 1330 of SEQ ID NO: 315257
gcagguucucuugagaaca

SEQ ID NO: 423110 - RNA, 19 nt, Artificial Sequence
  Description of Artificial Sequence: Synthetic oligonucleotide
  Antisense Strand to SEQ ID NO: 423109
uguucucaagagaaccugc

SEQ ID NO: 423111 - RNA, 19 nt, Artificial Sequence
  Description of Artificial Sequence: Synthetic oligonucleotide
  Sense Strand Starting at position 1330 of SEQ ID NO: 315277
cugagaaacuuugccuuua

SEQ ID NO: 423112 - RNA, 19 nt, Artificial Sequence
  Description of Artificial Sequence: Synthetic oligonucleotide
  Antisense Strand to SEQ ID NO: 423111
uaaaggcaaaguuucucag

SEQ ID NO: 423113 - RNA, 19 nt, Artificial Sequence
  Description of Artificial Sequence: Synthetic oligonucleotide
  Sense Strand Starting at position 1330 of SEQ ID NO: 315278
ugagaaacuuugccuuuag

SEQ ID NO: 423114 - RNA, 19 nt, Artificial Sequence
  Description of Artificial Sequence: Synthetic oligonucleotide
  Antisense Strand to SEQ ID NO: 423113
cuaaaggcaaaguuucuca

SEQ ID NO: 423115 - RNA, 19 nt, Artificial Sequence
  Description of Artificial Sequence: Synthetic oligonucleotide
  Sense Strand Starting at position 1330 of SEQ ID NO: 315415
ucauaagaucuuuguguga

SEQ ID NO: 423116 - RNA, 19 nt, Artificial Sequence
  Description of Artificial Sequence: Synthetic oligonucleotide
  Antisense Strand to SEQ ID NO: 423115
ucacacaaagaucuuauga

SEQ ID NO: 423117 - RNA, 19 nt, Artificial Sequence
  Description of Artificial Sequence: Synthetic oligonucleotide
  Sense Strand Starting at position 1330 of SEQ ID NO: 315418
uaagaucuuugugugauag

SEQ ID NO: 423118 - RNA, 19 nt, Artificial Sequence
  Description of Artificial Sequence: Synthetic oligonucleotide
  Antisense Strand to SEQ ID NO: 423117
cuaucacacaaagaucuua

SEQ ID NO: 423119 - RNA, 19 nt, Artificial Sequence
  Description of Artificial Sequence: Synthetic oligonucleotide
  Sense Strand Starting at position 1330 of SEQ ID NO: 315419
aagaucuuugugugauaga

SEQ ID NO: 423120 - RNA, 19 nt, Artificial Sequence
  Description of Artificial Sequence: Synthetic oligonucleotide
  Antisense Strand to SEQ ID NO: 423119
ucuaucacacaaagaucuu

SEQ ID NO: 423121 - RNA, 19 nt, Artificial Sequence
  Description of Artificial Sequence: Synthetic oligonucleotide
  Sense Strand Starting at position 1330 of SEQ ID NO: 315516
aggugucugauuugugacu

SEQ ID NO: 423122 - RNA, 19 nt, Artificial Sequence
  Description of Artificial Sequence: Synthetic oligonucleotide
  Antisense Strand to SEQ ID NO: 423121
agucacaaaucagacaccu

SEQ ID NO: 423123 - RNA, 19 nt, Artificial Sequence
  Description of Artificial Sequence: Synthetic oligonucleotide
  Sense Strand Starting at position 1330 of SEQ ID NO: 315517
ggugucugauuugugacuu

SEQ ID NO: 423124 - RNA, 19 nt, Artificial Sequence
  Description of Artificial Sequence: Synthetic oligonucleotide
  Antisense Strand to SEQ ID NO: 423123
aagucacaaaucagacacc

SEQ ID NO: 423125 - RNA, 19 nt, Artificial Sequence
  Description of Artificial Sequence: Synthetic oligonucleotide
  Sense Strand Starting at position 1330 of SEQ ID NO: 315707
cauaaugagcuuuaguguu

SEQ ID NO: 423126 - RNA, 19 nt, Artificial Sequence
  Description of Artificial Sequence: Synthetic oligonucleotide
  Antisense Strand to SEQ ID NO: 423125
aacacuaaagcucauuaug

SEQ ID NO: 423127 - RNA, 19 nt, Artificial Sequence
  Description of Artificial Sequence: Synthetic oligonucleotide
  Sense Strand Starting at position 1330 of SEQ ID NO: 315862
auguuaccuuguguuauuu

SEQ ID NO: 423128 - RNA, 19 nt, Artificial Sequence
  Description of Artificial Sequence: Synthetic oligonucleotide
  Antisense Strand to SEQ ID NO: 423127
aaauaacacaagguaacau

SEQ ID NO: 423129 - RNA, 19 nt, Artificial Sequence
  Description of Artificial Sequence: Synthetic oligonucleotide
  Sense Strand Starting at position 1330 of SEQ ID NO: 316009
ugugcuaaguauguaauuu

SEQ ID NO: 423130 - RNA, 19 nt, Artificial Sequence
  Description of Artificial Sequence: Synthetic oligonucleotide
  Antisense Strand to SEQ ID NO: 423129
aaauuacauacuuagcaca

SEQ ID NO: 423131 - RNA, 19 nt, Artificial Sequence
  Description of Artificial Sequence: Synthetic oligonucleotide
  Sense Strand Starting at position 1330 of SEQ ID NO: 316137
aacgaucuugaugagcaau

SEQ ID NO: 423132 - RNA, 19 nt, Artificial Sequence
  Description of Artificial Sequence: Synthetic oligonucleotide
  Antisense Strand to SEQ ID NO: 423131
auugcucaucaagaucguu

SEQ ID NO: 423133 - RNA, 19 nt, Artificial Sequence
  Description of Artificial Sequence: Synthetic oligonucleotide
  Sense Strand Starting at position 1330 of SEQ ID NO: 316139
cgaucuugaugagcaauca

SEQ ID NO: 423134 - RNA, 19 nt, Artificial Sequence
  Description of Artificial Sequence: Synthetic oligonucleotide
  Antisense Strand to SEQ ID NO: 423133
ugauugcucaucaagaucg

SEQ ID NO: 423135 - RNA, 19 nt, Artificial Sequence
  Description of Artificial Sequence: Synthetic oligonucleotide
  Sense Strand Starting at position 1330 of SEQ ID NO: 316195
cagguuaagcacugaggau

SEQ ID NO: 423136 - RNA, 19 nt, Artificial Sequence
  Description of Artificial Sequence: Synthetic oligonucleotide
  Antisense Strand to SEQ ID NO: 423135
auccucagugcuuaaccug

SEQ ID NO: 423137 - RNA, 19 nt, Artificial Sequence
  Description of Artificial Sequence: Synthetic oligonucleotide
  Sense Strand Starting at position 1330 of SEQ ID NO: 316251
gaacuuacacucuggugaa

SEQ ID NO: 423138 - RNA, 19 nt, Artificial Sequence
  Description of Artificial Sequence: Synthetic oligonucleotide
  Antisense Strand to SEQ ID NO: 423137
uucaccagaguguaaguuc

SEQ ID NO: 423139 - RNA, 19 nt, Artificial Sequence
  Description of Artificial Sequence: Synthetic oligonucleotide
  Sense Strand Starting at position 1330 of SEQ ID NO: 316305
uugcaagaauuauuaagug

SEQ ID NO: 423140 - RNA, 19 nt, Artificial Sequence
  Description of Artificial Sequence: Synthetic oligonucleotide
  Antisense Strand to SEQ ID NO: 423139
cacuuaauaauucuugcaa

SEQ ID NO: 423141 - RNA, 19 nt, Artificial Sequence
  Description of Artificial Sequence: Synthetic oligonucleotide
  Sense Strand Starting at position 1330 of SEQ ID NO: 316404
cucuguguagacuauaaga

SEQ ID NO: 423142 - RNA, 19 nt, Artificial Sequence
  Description of Artificial Sequence: Synthetic oligonucleotide
  Antisense Strand to SEQ ID NO: 423141
ucuuauagucuacacagag

SEQ ID NO: 423143 - RNA, 19 nt, Artificial Sequence
  Description of Artificial Sequence: Synthetic oligonucleotide
  Sense Strand Starting at position 1330 of SEQ ID NO: 316679
cuuacuugugaggaguaga

SEQ ID NO: 423144 - RNA, 19 nt, Artificial Sequence
  Description of Artificial Sequence: Synthetic oligonucleotide
  Antisense Strand to SEQ ID NO: 423143
ucuacuccucacaaguaag

SEQ ID NO: 423145 - RNA, 19 nt, Artificial Sequence
  Description of Artificial Sequence: Synthetic oligonucleotide
  Sense Strand Starting at position 1330 of SEQ ID NO: 316682
acuugugaggaguagacuu

SEQ ID NO: 423146 - RNA, 19 nt, Artificial Sequence
  Description of Artificial Sequence: Synthetic oligonucleotide
  Antisense Strand to SEQ ID NO: 423145
aagucuacuccucacaagu

SEQ ID NO: 423147 - RNA, 19 nt, Artificial Sequence
  Description of Artificial Sequence: Synthetic oligonucleotide
  Sense Strand Starting at position 1330 of SEQ ID NO: 316756
gaugaaauaugguuucuca

SEQ ID NO: 423148 - RNA, 19 nt, Artificial Sequence
  Description of Artificial Sequence: Synthetic oligonucleotide
  Antisense Strand to SEQ ID NO: 423147
ugagaaaccauauuucauc

SEQ ID NO: 423149 - RNA, 19 nt, Artificial Sequence
  Description of Artificial Sequence: Synthetic oligonucleotide
  Sense Strand Starting at position 1330 of SEQ ID NO: 316935
aagucuuugguguauacca

SEQ ID NO: 423150 - RNA, 19 nt, Artificial Sequence
  Description of Artificial Sequence: Synthetic oligonucleotide
  Antisense Strand to SEQ ID NO: 423149
ugguauacaccaaagacuu

SEQ ID NO: 423151 - RNA, 19 nt, Artificial Sequence
  Description of Artificial Sequence: Synthetic oligonucleotide
  Sense Strand Starting at position 1330 of SEQ ID NO: 316937
gucuuugguguauaccaaa

SEQ ID NO: 423152 - RNA, 19 nt, Artificial Sequence
  Description of Artificial Sequence: Synthetic oligonucleotide
  Antisense Strand to SEQ ID NO: 423151
uuugguauacaccaaagac

SEQ ID NO: 423153 - RNA, 19 nt, Artificial Sequence
  Description of Artificial Sequence: Synthetic oligonucleotide
  Sense Strand Starting at position 1330 of SEQ ID NO: 317252
cgggaguuuccgucuuggu

SEQ ID NO: 423154 - RNA, 19 nt, Artificial Sequence
  Description of Artificial Sequence: Synthetic oligonucleotide
  Antisense Strand to SEQ ID NO: 423153
accaagacggaaacucccg

SEQ ID NO: 423155 - RNA, 19 nt, Artificial Sequence
  Description of Artificial Sequence: Synthetic oligonucleotide
  Sense Strand Starting at position 1330 of SEQ ID NO: 317422
gaagcuuuccgccagagag

SEQ ID NO: 423156 - RNA, 19 nt, Artificial Sequence
  Description of Artificial Sequence: Synthetic oligonucleotide
  Antisense Strand to SEQ ID NO: 423155
cucucuggcggaaagcuuc

SEQ ID NO: 423157 - RNA, 19 nt, Artificial Sequence
  Description of Artificial Sequence: Synthetic oligonucleotide
  Sense Strand Starting at position 1330 of SEQ ID NO: 317500
agagacuuauaugucauau

SEQ ID NO: 423158 - RNA, 19 nt, Artificial Sequence
  Description of Artificial Sequence: Synthetic oligonucleotide
  Antisense Strand to SEQ ID NO: 423157
auaugacauauaagucucu

SEQ ID NO: 423159 - RNA, 19 nt, Artificial Sequence
  Description of Artificial Sequence: Synthetic oligonucleotide
  Sense Strand Starting at position 1330 of SEQ ID NO: 317633
caaggaguuuagucucaga

SEQ ID NO: 423160 - RNA, 19 nt, Artificial Sequence
  Description of Artificial Sequence: Synthetic oligonucleotide
  Antisense Strand to SEQ ID NO: 423159
ucugagacuaaacuccuug

SEQ ID NO: 423161 - RNA, 19 nt, Artificial Sequence
  Description of Artificial Sequence: Synthetic oligonucleotide
  Sense Strand Starting at position 1330 of SEQ ID NO: 317752
cuuuguaccgaauacauga

SEQ ID NO: 423162 - RNA, 19 nt, Artificial Sequence
  Description of Artificial Sequence: Synthetic oligonucleotide
  Antisense Strand to SEQ ID NO: 423161
ucauguauucgguacaaag

SEQ ID NO: 423163 - RNA, 19 nt, Artificial Sequence
  Description of Artificial Sequence: Synthetic oligonucleotide
  Sense Strand Starting at position 1330 of SEQ ID NO: 317775
uggagucuaauggguauaa

SEQ ID NO: 423164 - RNA, 19 nt, Artificial Sequence
  Description of Artificial Sequence: Synthetic oligonucleotide
  Antisense Strand to SEQ ID NO: 423163
uuauacccauuagacucca

SEQ ID NO: 423165 - RNA, 19 nt, Artificial Sequence
  Description of Artificial Sequence: Synthetic oligonucleotide
  Sense Strand Starting at position 1330 of SEQ ID NO: 317776
ggagucuaauggguauaaa

SEQ ID NO: 423166 - RNA, 19 nt, Artificial Sequence
  Description of Artificial Sequence: Synthetic oligonucleotide
  Antisense Strand to SEQ ID NO: 423165
uuuauacccauuagacucc

SEQ ID NO: 423167 - RNA, 19 nt, Artificial Sequence
  Description of Artificial Sequence: Synthetic oligonucleotide
  Sense Strand Starting at position 1330 of SEQ ID NO: 317909
gugaauuuaucuuuggcuu

SEQ ID NO: 423168 - RNA, 19 nt, Artificial Sequence
  Description of Artificial Sequence: Synthetic oligonucleotide
  Antisense Strand to SEQ ID NO: 423167
aagccaaagauaaauucac

SEQ ID NO: 423169 - RNA, 19 nt, Artificial Sequence
  Description of Artificial Sequence: Synthetic oligonucleotide
  Sense Strand Starting at position 1330 of SEQ ID NO: 318032
ucgguaccagacuaacaau

SEQ ID NO: 423170 - RNA, 19 nt, Artificial Sequence
  Description of Artificial Sequence: Synthetic oligonucleotide
  Antisense Strand to SEQ ID NO: 423169
auuguuagucugguaccga

SEQ ID NO: 423171 - RNA, 19 nt, Artificial Sequence
  Description of Artificial Sequence: Synthetic oligonucleotide
  Sense Strand Starting at position 1330 of SEQ ID NO: 318296
aguaacaaugcucagucua

SEQ ID NO: 423172 - RNA, 19 nt, Artificial Sequence
  Description of Artificial Sequence: Synthetic oligonucleotide
  Antisense Strand to SEQ ID NO: 423171
uagacugagcauuguuacu

SEQ ID NO: 423173 - RNA, 19 nt, Artificial Sequence
  Description of Artificial Sequence: Synthetic oligonucleotide
  Sense Strand Starting at position 1330 of SEQ ID NO: 318309
agucuaacugcuuaaauga

SEQ ID NO: 423174 - RNA, 19 nt, Artificial Sequence
  Description of Artificial Sequence: Synthetic oligonucleotide
  Antisense Strand to SEQ ID NO: 423173
ucauuuaagcaguuagacu

SEQ ID NO: 423175 - RNA, 19 nt, Artificial Sequence
  Description of Artificial Sequence: Synthetic oligonucleotide
  Sense Strand Starting at position 1330 of SEQ ID NO: 318337
acaguuaguccauacguaa

SEQ ID NO: 423176 - RNA, 19 nt, Artificial Sequence
  Description of Artificial Sequence: Synthetic oligonucleotide
  Antisense Strand to SEQ ID NO: 423175
uuacguauggacuaacugu

SEQ ID NO: 423177 - RNA, 19 nt, Artificial Sequence
  Description of Artificial Sequence: Synthetic oligonucleotide
  Sense Strand Starting at position 1330 of SEQ ID NO: 318353
uaauguaguauggaagagu

SEQ ID NO: 423178 - RNA, 19 nt, Artificial Sequence
  Description of Artificial Sequence: Synthetic oligonucleotide
  Antisense Strand to SEQ ID NO: 423177
acucuuccauacuacauua

SEQ ID NO: 423179 - RNA, 19 nt, Artificial Sequence
  Description of Artificial Sequence: Synthetic oligonucleotide
  Sense Strand Starting at position 1330 of SEQ ID NO: 318837
gaaacuaauugaguucugu

SEQ ID NO: 423180 - RNA, 19 nt, Artificial Sequence
  Description of Artificial Sequence: Synthetic oligonucleotide
  Antisense Strand to SEQ ID NO: 423179
acagaacucaauuaguuuc

SEQ ID NO: 423181 - RNA, 19 nt, Artificial Sequence
  Description of Artificial Sequence: Synthetic oligonucleotide
  Sense Strand Starting at position 1330 of SEQ ID NO: 318861
gguagauggccagggaagu

SEQ ID NO: 423182 - RNA, 19 nt, Artificial Sequence
  Description of Artificial Sequence: Synthetic oligonucleotide
  Antisense Strand to SEQ ID NO: 423181
acuucccuggccaucuacc

SEQ ID NO: 423183 - RNA, 19 nt, Artificial Sequence
  Description of Artificial Sequence: Synthetic oligonucleotide
  Sense Strand Starting at position 1330 of SEQ ID NO: 318862
guagauggccagggaagua

SEQ ID NO: 423184 - RNA, 19 nt, Artificial Sequence
  Description of Artificial Sequence: Synthetic oligonucleotide
  Antisense Strand to SEQ ID NO: 423183
uacuucccuggccaucuac

SEQ ID NO: 423185 - RNA, 19 nt, Artificial Sequence
  Description of Artificial Sequence: Synthetic oligonucleotide
  Sense Strand Starting at position 1330 of SEQ ID NO: 318875
gaaguaucugaaugcaagg

SEQ ID NO: 423186 - RNA, 19 nt, Artificial Sequence
  Description of Artificial Sequence: Synthetic oligonucleotide
  Antisense Strand to SEQ ID NO: 423185
ccuugcauucagauacuuc

SEQ ID NO: 423187 - RNA, 19 nt, Artificial Sequence
  Description of Artificial Sequence: Synthetic oligonucleotide
  Sense Strand Starting at position 1331 of SEQ ID NO: 315396
ucuacaagucuagagucaa

SEQ ID NO: 423188 - RNA, 19 nt, Artificial Sequence
  Description of Artificial Sequence: Synthetic oligonucleotide
  Antisense Strand to SEQ ID NO: 423187
uugacucuagacuuguaga

SEQ ID NO: 423189 - RNA, 19 nt, Artificial Sequence
  Description of Artificial Sequence: Synthetic oligonucleotide
  Sense Strand Starting at position 1331 of SEQ ID NO: 315905
gcaggagcuagguggaaau

SEQ ID NO: 423190 - RNA, 19 nt, Artificial Sequence
  Description of Artificial Sequence: Synthetic oligonucleotide
  Antisense Strand to SEQ ID NO: 423189
auuuccaccuagcuccugc

SEQ ID NO: 423191 - RNA, 19 nt, Artificial Sequence
  Description of Artificial Sequence: Synthetic oligonucleotide
  Sense Strand Starting at position 1331 of SEQ ID NO: 315924
auucccaugccucagagaa

SEQ ID NO: 423192 - RNA, 19 nt, Artificial Sequence
  Description of Artificial Sequence: Synthetic oligonucleotide
  Antisense Strand to SEQ ID NO: 423191
uucucugaggcaugggaau

SEQ ID NO: 423193 - RNA, 19 nt, Artificial Sequence
  Description of Artificial Sequence: Synthetic oligonucleotide
  Sense Strand Starting at position 1331 of SEQ ID NO: 316124
uuaugaugugcuuagaugu

SEQ ID NO: 423194 - RNA, 19 nt, Artificial Sequence
  Description of Artificial Sequence: Synthetic oligonucleotide
  Antisense Strand to SEQ ID NO: 423193
acaucuaagcacaucauaa

SEQ ID NO: 423195 - RNA, 19 nt, Artificial Sequence
  Description of Artificial Sequence: Synthetic oligonucleotide
  Sense Strand Starting at position 1331 of SEQ ID NO: 316214
ucacaauaauggccaaagu

SEQ ID NO: 423196 - RNA, 19 nt, Artificial Sequence
  Description of Artificial Sequence: Synthetic oligonucleotide
  Antisense Strand to SEQ ID NO: 423195
acuuuggccauuauuguga

SEQ ID NO: 423197 - RNA, 19 nt, Artificial Sequence
  Description of Artificial Sequence: Synthetic oligonucleotide
  Sense Strand Starting at position 1331 of SEQ ID NO: 316408
gguucucugguccaacaau

SEQ ID NO: 423198 - RNA, 19 nt, Artificial Sequence
  Description of Artificial Sequence: Synthetic oligonucleotide
  Antisense Strand to SEQ ID NO: 423197
auuguuggaccagagaacc

SEQ ID NO: 423199 - RNA, 19 nt, Artificial Sequence
  Description of Artificial Sequence: Synthetic oligonucleotide
  Sense Strand Starting at position 1331 of SEQ ID NO: 316536
uguuucugugcuucuuauu

SEQ ID NO: 423200 - RNA, 19 nt, Artificial Sequence
  Description of Artificial Sequence: Synthetic oligonucleotide
  Antisense Strand to SEQ ID NO: 423199
aauaagaagcacagaaaca

SEQ ID NO: 423201 - RNA, 19 nt, Artificial Sequence
  Description of Artificial Sequence: Synthetic oligonucleotide
  Sense Strand Starting at position 1331 of SEQ ID NO: 316541
cugugcuucuuauuuccua

SEQ ID NO: 423202 - RNA, 19 nt, Artificial Sequence
  Description of Artificial Sequence: Synthetic oligonucleotide
  Antisense Strand to SEQ ID NO: 423201
uaggaaauaagaagcacag

SEQ ID NO: 423203 - RNA, 19 nt, Artificial Sequence
  Description of Artificial Sequence: Synthetic oligonucleotide
  Sense Strand Starting at position 1331 of SEQ ID NO: 316633
cugggucuugcucaaagua

SEQ ID NO: 423204 - RNA, 19 nt, Artificial Sequence
  Description of Artificial Sequence: Synthetic oligonucleotide
  Antisense Strand to SEQ ID NO: 423203
uacuuugagcaagacccag

SEQ ID NO: 423205 - RNA, 19 nt, Artificial Sequence
  Description of Artificial Sequence: Synthetic oligonucleotide
  Sense Strand Starting at position 1331 of SEQ ID NO: 316778
ucaguuuguccuuagaggu

SEQ ID NO: 423206 - RNA, 19 nt, Artificial Sequence
  Description of Artificial Sequence: Synthetic oligonucleotide
  Antisense Strand to SEQ ID NO: 423205
accucuaaggacaaacuga

SEQ ID NO: 423207 - RNA, 19 nt, Artificial Sequence
  Description of Artificial Sequence: Synthetic oligonucleotide
  Sense Strand Starting at position 1331 of SEQ ID NO: 317000
ggcaacuuacuccagaugu

SEQ ID NO: 423208 - RNA, 19 nt, Artificial Sequence
  Description of Artificial Sequence: Synthetic oligonucleotide
  Antisense Strand to SEQ ID NO: 423207
acaucuggaguaaguugcc

SEQ ID NO: 423209 - RNA, 19 nt, Artificial Sequence
  Description of Artificial Sequence: Synthetic oligonucleotide
  Sense Strand Starting at position 1331 of SEQ ID NO: 317105
ugggucauuucuuaaacua

SEQ ID NO: 423210 - RNA, 19 nt, Artificial Sequence
  Description of Artificial Sequence: Synthetic oligonucleotide
  Antisense Strand to SEQ ID NO: 423209
uaguuuaagaaaugaccca

SEQ ID NO: 423211 - RNA, 19 nt, Artificial Sequence
  Description of Artificial Sequence: Synthetic oligonucleotide
  Sense Strand Starting at position 1331 of SEQ ID NO: 317215
uggacuucucucugaucuu

SEQ ID NO: 423212 - RNA, 19 nt, Artificial Sequence
  Description of Artificial Sequence: Synthetic oligonucleotide
  Antisense Strand to SEQ ID NO: 423211
aagaucagagagaagucca

SEQ ID NO: 423213 - RNA, 19 nt, Artificial Sequence
  Description of Artificial Sequence: Synthetic oligonucleotide
  Sense Strand Starting at position 1331 of SEQ ID NO: 317268
ggaugucuauuagcugacu

SEQ ID NO: 423214 - RNA, 19 nt, Artificial Sequence
  Description of Artificial Sequence: Synthetic oligonucleotide
  Antisense Strand to SEQ ID NO: 423213
agucagcuaauagacaucc

SEQ ID NO: 423215 - RNA, 19 nt, Artificial Sequence
  Description of Artificial Sequence: Synthetic oligonucleotide
  Sense Strand Starting at position 1331 of SEQ ID NO: 317440
aaggauguuccuggcauau

SEQ ID NO: 423216 - RNA, 19 nt, Artificial Sequence
  Description of Artificial Sequence: Synthetic oligonucleotide
  Antisense Strand to SEQ ID NO: 423215
auaugccaggaacauccuu

SEQ ID NO: 423217 - RNA, 19 nt, Artificial Sequence
  Description of Artificial Sequence: Synthetic oligonucleotide
  Sense Strand Starting at position 1331 of SEQ ID NO: 318137
auauguagagguugacagu

SEQ ID NO: 423218 - RNA, 19 nt, Artificial Sequence
  Description of Artificial Sequence: Synthetic oligonucleotide
  Antisense Strand to SEQ ID NO: 423217
acugucaaccucuacauau

SEQ ID NO: 423219 - RNA, 19 nt, Artificial Sequence
  Description of Artificial Sequence: Synthetic oligonucleotide
  Sense Strand Starting at position 1331 of SEQ ID NO: 318273
gagagucuagaauguuuga

SEQ ID NO: 423220 - RNA, 19 nt, Artificial Sequence
  Description of Artificial Sequence: Synthetic oligonucleotide
  Antisense Strand to SEQ ID NO: 423219
ucaaacauucuagacucuc

SEQ ID NO: 423221 - RNA, 19 nt, Artificial Sequence
  Description of Artificial Sequence: Synthetic oligonucleotide
  Sense Strand Starting at position 1331 of SEQ ID NO: 318276
agucuagaauguuugaaau

SEQ ID NO: 423222 - RNA, 19 nt, Artificial Sequence
  Description of Artificial Sequence: Synthetic oligonucleotide
  Antisense Strand to SEQ ID NO: 423221
auuucaaacauucuagacu

SEQ ID NO: 423223 - RNA, 19 nt, Artificial Sequence
  Description of Artificial Sequence: Synthetic oligonucleotide
  Sense Strand Starting at position 1331 of SEQ ID NO: 318286
guuugaaauuuggaucauu

SEQ ID NO: 423224 - RNA, 19 nt, Artificial Sequence
  Description of Artificial Sequence: Synthetic oligonucleotide
  Antisense Strand to SEQ ID NO: 423223
aaugauccaaauuucaaac

SEQ ID NO: 423225 - RNA, 19 nt, Artificial Sequence
  Description of Artificial Sequence: Synthetic oligonucleotide
  Sense Strand Starting at position 1331 of SEQ ID NO: 318359
agacguuaaccagaguucu

SEQ ID NO: 423226 - RNA, 19 nt, Artificial Sequence
  Description of Artificial Sequence: Synthetic oligonucleotide
  Antisense Strand to SEQ ID NO: 423225
agaacucugguuaacgucu

SEQ ID NO: 423227 - RNA, 19 nt, Artificial Sequence
  Description of Artificial Sequence: Synthetic oligonucleotide
  Sense Strand Starting at position 1331 of SEQ ID NO: 318383
gagccaguugccuucguaa

SEQ ID NO: 423228 - RNA, 19 nt, Artificial Sequence
  Description of Artificial Sequence: Synthetic oligonucleotide
  Antisense Strand to SEQ ID NO: 423227
uuacgaaggcaacuggcuc

SEQ ID NO: 423229 - RNA, 19 nt, Artificial Sequence
  Description of Artificial Sequence: Synthetic oligonucleotide
  Sense Strand Starting at position 1331 of SEQ ID NO: 318425
cugauauuaccauaucguc

SEQ ID NO: 423230 - RNA, 19 nt, Artificial Sequence
  Description of Artificial Sequence: Synthetic oligonucleotide
  Antisense Strand to SEQ ID NO: 423229
gacgauaugguaauaucag

SEQ ID NO: 423231 - RNA, 19 nt, Artificial Sequence
  Description of Artificial Sequence: Synthetic oligonucleotide
  Sense Strand Starting at position 1331 of SEQ ID NO: 318431
uuaccauaucgucaucuuu

SEQ ID NO: 423232 - RNA, 19 nt, Artificial Sequence
  Description of Artificial Sequence: Synthetic oligonucleotide
  Antisense Strand to SEQ ID NO: 423231
aaagaugacgauaugguaa

SEQ ID NO: 423233 - RNA, 19 nt, Artificial Sequence
  Description of Artificial Sequence: Synthetic oligonucleotide
  Sense Strand Starting at position 1331 of SEQ ID NO: 318471
ggaaaugaaucauaagaau

SEQ ID NO: 423234 - RNA, 19 nt, Artificial Sequence
  Description of Artificial Sequence: Synthetic oligonucleotide
  Antisense Strand to SEQ ID NO: 423233
auucuuaugauucauuucc

SEQ ID NO: 423235 - RNA, 19 nt, Artificial Sequence
  Description of Artificial Sequence: Synthetic oligonucleotide
  Sense Strand Starting at position 1331 of SEQ ID NO: 318480
ucauaagaaugguuaaugu

SEQ ID NO: 423236 - RNA, 19 nt, Artificial Sequence
  Description of Artificial Sequence: Synthetic oligonucleotide
  Antisense Strand to SEQ ID NO: 423235
acauuaaccauucuuauga

SEQ ID NO: 423237 - RNA, 19 nt, Artificial Sequence
  Description of Artificial Sequence: Synthetic oligonucleotide
  Sense Strand Starting at position 1331 of SEQ ID NO: 318489
ugguuaaugucacuggauu

SEQ ID NO: 423238 - RNA, 19 nt, Artificial Sequence
  Description of Artificial Sequence: Synthetic oligonucleotide
  Antisense Strand to SEQ ID NO: 423237
aauccagugacauuaacca

SEQ ID NO: 423239 - RNA, 19 nt, Artificial Sequence
  Description of Artificial Sequence: Synthetic oligonucleotide
  Sense Strand Starting at position 1331 of SEQ ID NO: 318490
gguuaaugucacuggauua

SEQ ID NO: 423240 - RNA, 19 nt, Artificial Sequence
  Description of Artificial Sequence: Synthetic oligonucleotide
  Antisense Strand to SEQ ID NO: 423239
uaauccagugacauuaacc

SEQ ID NO: 423241 - RNA, 19 nt, Artificial Sequence
  Description of Artificial Sequence: Synthetic oligonucleotide
  Sense Strand Starting at position 1331 of SEQ ID NO: 318567
uugucucuuccuggaccaa

SEQ ID NO: 423242 - RNA, 19 nt, Artificial Sequence
  Description of Artificial Sequence: Synthetic oligonucleotide
  Antisense Strand to SEQ ID NO: 423241
uugguccaggaagagacaa

SEQ ID NO: 423243 - RNA, 19 nt, Artificial Sequence
  Description of Artificial Sequence: Synthetic oligonucleotide
  Sense Strand Starting at position 1331 of SEQ ID NO: 318737
uggaaaggcaaguguugaa

SEQ ID NO: 423244 - RNA, 19 nt, Artificial Sequence
  Description of Artificial Sequence: Synthetic oligonucleotide
  Antisense Strand to SEQ ID NO: 423243
uucaacacuugccuuucca

SEQ ID NO: 423245 - RNA, 19 nt, Artificial Sequence
  Description of Artificial Sequence: Synthetic oligonucleotide
  Sense Strand Starting at position 1331 of SEQ ID NO: 318749
uguugaacggaugggaaua

SEQ ID NO: 423246 - RNA, 19 nt, Artificial Sequence
  Description of Artificial Sequence: Synthetic oligonucleotide
  Antisense Strand to SEQ ID NO: 423245
uauucccauccguucaaca

SEQ ID NO: 423247 - RNA, 19 nt, Artificial Sequence
  Description of Artificial Sequence: Synthetic oligonucleotide
  Sense Strand Starting at position 1331 of SEQ ID NO: 318759
augggaauacugggagcua

SEQ ID NO: 423248 - RNA, 19 nt, Artificial Sequence
  Description of Artificial Sequence: Synthetic oligonucleotide
  Antisense Strand to SEQ ID NO: 423247
uagcucccaguauucccau

SEQ ID NO: 423249 - RNA, 19 nt, Artificial Sequence
  Description of Artificial Sequence: Synthetic oligonucleotide
  Sense Strand Starting at position 1331 of SEQ ID NO: 318792
cagcaucuuggauaugcua

SEQ ID NO: 423250 - RNA, 19 nt, Artificial Sequence
  Description of Artificial Sequence: Synthetic oligonucleotide
  Antisense Strand to SEQ ID NO: 423249
uagcauauccaagaugcug

SEQ ID NO: 423251 - RNA, 19 nt, Artificial Sequence
  Description of Artificial Sequence: Synthetic oligonucleotide
  Sense Strand Starting at position 1331 of SEQ ID NO: 318794
gcaucuuggauaugcuaga

SEQ ID NO: 423252 - RNA, 19 nt, Artificial Sequence
  Description of Artificial Sequence: Synthetic oligonucleotide
  Antisense Strand to SEQ ID NO: 423251
ucuagcauauccaagaugc

SEQ ID NO: 423253 - RNA, 19 nt, Artificial Sequence
  Description of Artificial Sequence: Synthetic oligonucleotide
  Sense Strand Starting at position 1331 of SEQ ID NO: 318871
uaguaaacuucuguaggau

SEQ ID NO: 423254 - RNA, 19 nt, Artificial Sequence
  Description of Artificial Sequence: Synthetic oligonucleotide
  Antisense Strand to SEQ ID NO: 423253
auccuacagaaguuuacua

SEQ ID NO: 423255 - RNA, 19 nt, Artificial Sequence
  Description of Artificial Sequence: Synthetic oligonucleotide
  Sense Strand Starting at position 1331 of SEQ ID NO: 318872
aguaaacuucuguaggauu

SEQ ID NO: 423256 - RNA, 19 nt, Artificial Sequence
  Description of Artificial Sequence: Synthetic oligonucleotide
  Antisense Strand to SEQ ID NO: 423255
aauccuacagaaguuuacu

SEQ ID NO: 423257 - RNA, 19 nt, Artificial Sequence
  Description of Artificial Sequence: Synthetic oligonucleotide
  Sense Strand Starting at position 1331 of SEQ ID NO: 318916
ucucgaauuugguuucuca

SEQ ID NO: 423258 - RNA, 19 nt, Artificial Sequence
  Description of Artificial Sequence: Synthetic oligonucleotide
  Antisense Strand to SEQ ID NO: 423257
ugagaaaccaaauucgaga

SEQ ID NO: 423259 - RNA, 19 nt, Artificial Sequence
  Description of Artificial Sequence: Synthetic oligonucleotide
  Sense Strand Starting at position 1331 of SEQ ID NO: 318935
gcucuauaggcccagacuu

SEQ ID NO: 423260 - RNA, 19 nt, Artificial Sequence
  Description of Artificial Sequence: Synthetic oligonucleotide
  Antisense Strand to SEQ ID NO: 423259
aagucugggccuauagagc

SEQ ID NO: 423261 - RNA, 19 nt, Artificial Sequence
  Description of Artificial Sequence: Synthetic oligonucleotide
  Sense Strand Starting at position 1331 of SEQ ID NO: 318945
cccagacuucuugggagua

SEQ ID NO: 423262 - RNA, 19 nt, Artificial Sequence
  Description of Artificial Sequence: Synthetic oligonucleotide
  Antisense Strand to SEQ ID NO: 423261
uacucccaagaagucuggg

SEQ ID NO: 423263 - RNA, 19 nt, Artificial Sequence
  Description of Artificial Sequence: Synthetic oligonucleotide
  Sense Strand Starting at position 1331 of SEQ ID NO: 318959
gaguaacuagucugaggau

SEQ ID NO: 423264 - RNA, 19 nt, Artificial Sequence
  Description of Artificial Sequence: Synthetic oligonucleotide
  Antisense Strand to SEQ ID NO: 423263
auccucagacuaguuacuc

SEQ ID NO: 423265 - RNA, 19 nt, Artificial Sequence
  Description of Artificial Sequence: Synthetic oligonucleotide
  Sense Strand Starting at position 1331 of SEQ ID NO: 319063
agaacuagggcuggucaua

SEQ ID NO: 423266 - RNA, 19 nt, Artificial Sequence
  Description of Artificial Sequence: Synthetic oligonucleotide
  Antisense Strand to SEQ ID NO: 423265
uaugaccagcccuaguucu

SEQ ID NO: 423267 - RNA, 19 nt, Artificial Sequence
  Description of Artificial Sequence: Synthetic oligonucleotide
  Sense Strand Starting at position 1332 of SEQ ID NO: 315242
ugaucaauguuaccuauag

SEQ ID NO: 423268 - RNA, 19 nt, Artificial Sequence
  Description of Artificial Sequence: Synthetic oligonucleotide
  Antisense Strand to SEQ ID NO: 423267
cuauagguaacauugauca

SEQ ID NO: 423269 - RNA, 19 nt, Artificial Sequence
  Description of Artificial Sequence: Synthetic oligonucleotide
  Sense Strand Starting at position 1332 of SEQ ID NO: 315249
uguuaccuauaguuacaau

SEQ ID NO: 423270 - RNA, 19 nt, Artificial Sequence
  Description of Artificial Sequence: Synthetic oligonucleotide
  Antisense Strand to SEQ ID NO: 423269
auuguaacuauagguaaca

SEQ ID NO: 423271 - RNA, 19 nt, Artificial Sequence
  Description of Artificial Sequence: Synthetic oligonucleotide
  Sense Strand Starting at position 1332 of SEQ ID NO: 315378
auuuaaucuucgcauuugu

SEQ ID NO: 423272 - RNA, 19 nt, Artificial Sequence
  Description of Artificial Sequence: Synthetic oligonucleotide
  Antisense Strand to SEQ ID NO: 423271
acaaaugcgaagauuaaau

SEQ ID NO: 423273 - RNA, 19 nt, Artificial Sequence
  Description of Artificial Sequence: Synthetic oligonucleotide
  Sense Strand Starting at position 1332 of SEQ ID NO: 315387
ucgcauuugucuguccuua

SEQ ID NO: 423274 - RNA, 19 nt, Artificial Sequence
  Description of Artificial Sequence: Synthetic oligonucleotide
  Antisense Strand to SEQ ID NO: 423273
uaaggacagacaaaugcga

SEQ ID NO: 423275 - RNA, 19 nt, Artificial Sequence
  Description of Artificial Sequence: Synthetic oligonucleotide
  Sense Strand Starting at position 1332 of SEQ ID NO: 315389
gcauuugucuguccuuaca

SEQ ID NO: 423276 - RNA, 19 nt, Artificial Sequence
  Description of Artificial Sequence: Synthetic oligonucleotide
  Antisense Strand to SEQ ID NO: 423275
uguaaggacagacaaaugc

SEQ ID NO: 423277 - RNA, 19 nt, Artificial Sequence
  Description of Artificial Sequence: Synthetic oligonucleotide
  Sense Strand Starting at position 1332 of SEQ ID NO: 315446
auggaagaauuugauuauc

SEQ ID NO: 423278 - RNA, 19 nt, Artificial Sequence
  Description of Artificial Sequence: Synthetic oligonucleotide
  Antisense Strand to SEQ ID NO: 423277
gauaaucaaauucuuccau

SEQ ID NO: 423279 - RNA, 19 nt, Artificial Sequence
  Description of Artificial Sequence: Synthetic oligonucleotide
  Sense Strand Starting at position 1332 of SEQ ID NO: 315463
uccaauaguucguaaacga

SEQ ID NO: 423280 - RNA, 19 nt, Artificial Sequence
  Description of Artificial Sequence: Synthetic oligonucleotide
  Antisense Strand to SEQ ID NO: 423279
ucguuuacgaacuauugga

SEQ ID NO: 423281 - RNA, 19 nt, Artificial Sequence
  Description of Artificial Sequence: Synthetic oligonucleotide
  Sense Strand Starting at position 1332 of SEQ ID NO: 315467
auaguucguaaacgaauaa

SEQ ID NO: 423282 - RNA, 19 nt, Artificial Sequence
  Description of Artificial Sequence: Synthetic oligonucleotide
  Antisense Strand to SEQ ID NO: 423281
uuauucguuuacgaacuau

SEQ ID NO: 423283 - RNA, 19 nt, Artificial Sequence
  Description of Artificial Sequence: Synthetic oligonucleotide
  Sense Strand Starting at position 1332 of SEQ ID NO: 315471
uucguaaacgaauaaacuu

SEQ ID NO: 423284 - RNA, 19 nt, Artificial Sequence
  Description of Artificial Sequence: Synthetic oligonucleotide
  Antisense Strand to SEQ ID NO: 423283
aaguuuauucguuuacgaa

SEQ ID NO: 423285 - RNA, 19 nt, Artificial Sequence
  Description of Artificial Sequence: Synthetic oligonucleotide
  Sense Strand Starting at position 1332 of SEQ ID NO: 315626
uuucuuaaaugggacuaua

SEQ ID NO: 423286 - RNA, 19 nt, Artificial Sequence
  Description of Artificial Sequence: Synthetic oligonucleotide
  Antisense Strand to SEQ ID NO: 423285
uauagucccauuuaagaaa

SEQ ID NO: 423287 - RNA, 19 nt, Artificial Sequence
  Description of Artificial Sequence: Synthetic oligonucleotide
  Sense Strand Starting at position 1332 of SEQ ID NO: 315658
uucugacaguuugaauauu

SEQ ID NO: 423288 - RNA, 19 nt, Artificial Sequence
  Description of Artificial Sequence: Synthetic oligonucleotide
  Antisense Strand to SEQ ID NO: 423287
aauauucaaacugucagaa

SEQ ID NO: 423289 - RNA, 19 nt, Artificial Sequence
  Description of Artificial Sequence: Synthetic oligonucleotide
  Sense Strand Starting at position 1332 of SEQ ID NO: 315738
acugguucccaaggaguca

SEQ ID NO: 423290 - RNA, 19 nt, Artificial Sequence
  Description of Artificial Sequence: Synthetic oligonucleotide
  Antisense Strand to SEQ ID NO: 423289
ugacuccuugggaaccagu

SEQ ID NO: 423291 - RNA, 19 nt, Artificial Sequence
  Description of Artificial Sequence: Synthetic oligonucleotide
  Sense Strand Starting at position 1332 of SEQ ID NO: 315816
gcguauauacaaugcuaca

SEQ ID NO: 423292 - RNA, 19 nt, Artificial Sequence
  Description of Artificial Sequence: Synthetic oligonucleotide
  Antisense Strand to SEQ ID NO: 423291
uguagcauuguauauacgc

SEQ ID NO: 423293 - RNA, 19 nt, Artificial Sequence
  Description of Artificial Sequence: Synthetic oligonucleotide
  Sense Strand Starting at position 1332 of SEQ ID NO: 316007
acccgugucuacucaaaca

SEQ ID NO: 423294 - RNA, 19 nt, Artificial Sequence
  Description of Artificial Sequence: Synthetic oligonucleotide
  Antisense Strand to SEQ ID NO: 423293
uguuugaguagacacgggu

SEQ ID NO: 423295 - RNA, 19 nt, Artificial Sequence
  Description of Artificial Sequence: Synthetic oligonucleotide
  Sense Strand Starting at position 1332 of SEQ ID NO: 316196
agcgaauguguccagagca

SEQ ID NO: 423296 - RNA, 19 nt, Artificial Sequence
  Description of Artificial Sequence: Synthetic oligonucleotide
  Antisense Strand to SEQ ID NO: 423295
ugcucuggacacauucgcu

SEQ ID NO: 423297 - RNA, 19 nt, Artificial Sequence
  Description of Artificial Sequence: Synthetic oligonucleotide
  Sense Strand Starting at position 1332 of SEQ ID NO: 316197
gcgaauguguccagagcag

SEQ ID NO: 423298 - RNA, 19 nt, Artificial Sequence
  Description of Artificial Sequence: Synthetic oligonucleotide
  Antisense Strand to SEQ ID NO: 423297
cugcucuggacacauucgc

SEQ ID NO: 423299 - RNA, 19 nt, Artificial Sequence
  Description of Artificial Sequence: Synthetic oligonucleotide
  Sense Strand Starting at position 1332 of SEQ ID NO: 316216
cucauacucgcucgccaaa

SEQ ID NO: 423300 - RNA, 19 nt, Artificial Sequence
  Description of Artificial Sequence: Synthetic oligonucleotide
  Antisense Strand to SEQ ID NO: 423299
uuuggcgagcgaguaugag

SEQ ID NO: 423301 - RNA, 19 nt, Artificial Sequence
  Description of Artificial Sequence: Synthetic oligonucleotide
  Sense Strand Starting at position 1333 of SEQ ID NO: 315262
acuuguuaugcagaauauu

SEQ ID NO: 423302 - RNA, 19 nt, Artificial Sequence
  Description of Artificial Sequence: Synthetic oligonucleotide
  Antisense Strand to SEQ ID NO: 423301
aauauucugcauaacaagu

SEQ ID NO: 423303 - RNA, 19 nt, Artificial Sequence
  Description of Artificial Sequence: Synthetic oligonucleotide
  Sense Strand Starting at position 1333 of SEQ ID NO: 315331
ugguguuaugauuaguaug

SEQ ID NO: 423304 - RNA, 19 nt, Artificial Sequence
  Description of Artificial Sequence: Synthetic oligonucleotide
  Antisense Strand to SEQ ID NO: 423303
cauacuaaucauaacacca

SEQ ID NO: 423305 - RNA, 19 nt, Artificial Sequence
  Description of Artificial Sequence: Synthetic oligonucleotide
  Sense Strand Starting at position 1333 of SEQ ID NO: 315360
aguccaacagguugugaaa

SEQ ID NO: 423306 - RNA, 19 nt, Artificial Sequence
  Description of Artificial Sequence: Synthetic oligonucleotide
  Antisense Strand to SEQ ID NO: 423305
uuucacaaccuguuggacu

SEQ ID NO: 423307 - RNA, 19 nt, Artificial Sequence
  Description of Artificial Sequence: Synthetic oligonucleotide
  Sense Strand Starting at position 1333 of SEQ ID NO: 315547
cccaaaucuugagugucua

SEQ ID NO: 423308 - RNA, 19 nt, Artificial Sequence
  Description of Artificial Sequence: Synthetic oligonucleotide
  Antisense Strand to SEQ ID NO: 423307
uagacacucaagauuuggg

SEQ ID NO: 423309 - RNA, 19 nt, Artificial Sequence
  Description of Artificial Sequence: Synthetic oligonucleotide
  Sense Strand Starting at position 1333 of SEQ ID NO: 315671
gguccauaucucuaucacu

SEQ ID NO: 423310 - RNA, 19 nt, Artificial Sequence
  Description of Artificial Sequence: Synthetic oligonucleotide
  Antisense Strand to SEQ ID NO: 423309
agugauagagauauggacc

SEQ ID NO: 423311 - RNA, 19 nt, Artificial Sequence
  Description of Artificial Sequence: Synthetic oligonucleotide
  Sense Strand Starting at position 1333 of SEQ ID NO: 315993
guauauuggccauacugua

SEQ ID NO: 423312 - RNA, 19 nt, Artificial Sequence
  Description of Artificial Sequence: Synthetic oligonucleotide
  Antisense Strand to SEQ ID NO: 423311
uacaguauggccaauauac

SEQ ID NO: 423313 - RNA, 19 nt, Artificial Sequence
  Description of Artificial Sequence: Synthetic oligonucleotide
  Sense Strand Starting at position 1333 of SEQ ID NO: 316310
auggcuauuuaugugcaua

SEQ ID NO: 423314 - RNA, 19 nt, Artificial Sequence
  Description of Artificial Sequence: Synthetic oligonucleotide
  Antisense Strand to SEQ ID NO: 423313
uaugcacauaaauagccau

SEQ ID NO: 423315 - RNA, 19 nt, Artificial Sequence
  Description of Artificial Sequence: Synthetic oligonucleotide
  Sense Strand Starting at position 1333 of SEQ ID NO: 316312
ggcuauuuaugugcauauc

SEQ ID NO: 423316 - RNA, 19 nt, Artificial Sequence
  Description of Artificial Sequence: Synthetic oligonucleotide
  Antisense Strand to SEQ ID NO: 423315
gauaugcacauaaauagcc

SEQ ID NO: 423317 - RNA, 19 nt, Artificial Sequence
  Description of Artificial Sequence: Synthetic oligonucleotide
  Sense Strand Starting at position 1333 of SEQ ID NO: 316520
ccuucccucccagaguuua

SEQ ID NO: 423318 - RNA, 19 nt, Artificial Sequence
  Description of Artificial Sequence: Synthetic oligonucleotide
  Antisense Strand to SEQ ID NO: 423317
uaaacucugggagggaagg

SEQ ID NO: 423319 - RNA, 19 nt, Artificial Sequence
  Description of Artificial Sequence: Synthetic oligonucleotide
  Sense Strand Starting at position 1333 of SEQ ID NO: 316559
agcaauguagcuuagacaa

SEQ ID NO: 423320 - RNA, 19 nt, Artificial Sequence
  Description of Artificial Sequence: Synthetic oligonucleotide
  Antisense Strand to SEQ ID NO: 423319
uugucuaagcuacauugcu

SEQ ID NO: 423321 - RNA, 19 nt, Artificial Sequence
  Description of Artificial Sequence: Synthetic oligonucleotide
  Sense Strand Starting at position 1333 of SEQ ID NO: 316587
ucaauaauugauuguggac

SEQ ID NO: 423322 - RNA, 19 nt, Artificial Sequence
  Description of Artificial Sequence: Synthetic oligonucleotide
  Antisense Strand to SEQ ID NO: 423321
guccacaaucaauuauuga

SEQ ID NO: 423323 - RNA, 19 nt, Artificial Sequence
  Description of Artificial Sequence: Synthetic oligonucleotide
  Sense Strand Starting at position 1333 of SEQ ID NO: 316745
uuaauaagagcaggacuau

SEQ ID NO: 423324 - RNA, 19 nt, Artificial Sequence
  Description of Artificial Sequence: Synthetic oligonucleotide
  Antisense Strand to SEQ ID NO: 423323
auaguccugcucuuauuaa

SEQ ID NO: 423325 - RNA, 19 nt, Artificial Sequence
  Description of Artificial Sequence: Synthetic oligonucleotide
  Sense Strand Starting at position 1333 of SEQ ID NO: 316779
uaggcuggcccucaugauu

SEQ ID NO: 423326 - RNA, 19 nt, Artificial Sequence
  Description of Artificial Sequence: Synthetic oligonucleotide
  Antisense Strand to SEQ ID NO: 423325
aaucaugagggccagccua

SEQ ID NO: 423327 - RNA, 19 nt, Artificial Sequence
  Description of Artificial Sequence: Synthetic oligonucleotide
  Sense Strand Starting at position 1333 of SEQ ID NO: 316825
ugacauaugucaccuagca

SEQ ID NO: 423328 - RNA, 19 nt, Artificial Sequence
  Description of Artificial Sequence: Synthetic oligonucleotide
  Antisense Strand to SEQ ID NO: 423327
ugcuaggugacauauguca

SEQ ID NO: 423329 - RNA, 19 nt, Artificial Sequence
  Description of Artificial Sequence: Synthetic oligonucleotide
  Sense Strand Starting at position 1333 of SEQ ID NO: 317085
cagugaucacuuugggaga

SEQ ID NO: 423330 - RNA, 19 nt, Artificial Sequence
  Description of Artificial Sequence: Synthetic oligonucleotide
  Antisense Strand to SEQ ID NO: 423329
ucucccaaagugaucacug

SEQ ID NO: 423331 - RNA, 19 nt, Artificial Sequence
  Description of Artificial Sequence: Synthetic oligonucleotide
  Sense Strand Starting at position 1333 of SEQ ID NO: 317125
uggagcuaccucuauaaac

SEQ ID NO: 423332 - RNA, 19 nt, Artificial Sequence
  Description of Artificial Sequence: Synthetic oligonucleotide
  Antisense Strand to SEQ ID NO: 423331
guuuauagagguagcucca

SEQ ID NO: 423333 - RNA, 19 nt, Artificial Sequence
  Description of Artificial Sequence: Synthetic oligonucleotide
  Sense Strand Starting at position 1333 of SEQ ID NO: 317438
cugucauaauuaguugaaa

SEQ ID NO: 423334 - RNA, 19 nt, Artificial Sequence
  Description of Artificial Sequence: Synthetic oligonucleotide
  Antisense Strand to SEQ ID NO: 423333
uuucaacuaauuaugacag

SEQ ID NO: 423335 - RNA, 19 nt, Artificial Sequence
  Description of Artificial Sequence: Synthetic oligonucleotide
  Sense Strand Starting at position 1333 of SEQ ID NO: 317574
ggcugacuccagcggauuu

SEQ ID NO: 423336 - RNA, 19 nt, Artificial Sequence
  Description of Artificial Sequence: Synthetic oligonucleotide
  Antisense Strand to SEQ ID NO: 423335
aaauccgcuggagucagcc

SEQ ID NO: 423337 - RNA, 19 nt, Artificial Sequence
  Description of Artificial Sequence: Synthetic oligonucleotide
  Sense Strand Starting at position 1333 of SEQ ID NO: 318121
ugacauucugacugaacau

SEQ ID NO: 423338 - RNA, 19 nt, Artificial Sequence
  Description of Artificial Sequence: Synthetic oligonucleotide
  Antisense Strand to SEQ ID NO: 423337
auguucagucagaauguca

SEQ ID NO: 423339 - RNA, 19 nt, Artificial Sequence
  Description of Artificial Sequence: Synthetic oligonucleotide
  Sense Strand Starting at position 1333 of SEQ ID NO: 318143
ucaauuguccaaggagaac

SEQ ID NO: 423340 - RNA, 19 nt, Artificial Sequence
  Description of Artificial Sequence: Synthetic oligonucleotide
  Antisense Strand to SEQ ID NO: 423339
guucuccuuggacaauuga

SEQ ID NO: 423341 - RNA, 19 nt, Artificial Sequence
  Description of Artificial Sequence: Synthetic oligonucleotide
  Sense Strand Starting at position 1333 of SEQ ID NO: 318218
aagaauugggaguguguuu

SEQ ID NO: 423342 - RNA, 19 nt, Artificial Sequence
  Description of Artificial Sequence: Synthetic oligonucleotide
  Antisense Strand to SEQ ID NO: 423341
aaacacacucccaauucuu

SEQ ID NO: 423343 - RNA, 19 nt, Artificial Sequence
  Description of Artificial Sequence: Synthetic oligonucleotide
  Sense Strand Starting at position 1333 of SEQ ID NO: 318322
gaaacauagcagugaguaa

SEQ ID NO: 423344 - RNA, 19 nt, Artificial Sequence
  Description of Artificial Sequence: Synthetic oligonucleotide
  Antisense Strand to SEQ ID NO: 423343
uuacucacugcuauguuuc

SEQ ID NO: 423345 - RNA, 19 nt, Artificial Sequence
  Description of Artificial Sequence: Synthetic oligonucleotide
  Sense Strand Starting at position 1333 of SEQ ID NO: 318373
gaccauauuguauguggaa

SEQ ID NO: 423346 - RNA, 19 nt, Artificial Sequence
  Description of Artificial Sequence: Synthetic oligonucleotide
  Antisense Strand to SEQ ID NO: 423345
uuccacauacaauaugguc

SEQ ID NO: 423347 - RNA, 19 nt, Artificial Sequence
  Description of Artificial Sequence: Synthetic oligonucleotide
  Sense Strand Starting at position 1333 of SEQ ID NO: 318374
accauauuguauguggaaa

SEQ ID NO: 423348 - RNA, 19 nt, Artificial Sequence
  Description of Artificial Sequence: Synthetic oligonucleotide
  Antisense Strand to SEQ ID NO: 423347
uuuccacauacaauauggu

SEQ ID NO: 423349 - RNA, 19 nt, Artificial Sequence
  Description of Artificial Sequence: Synthetic oligonucleotide
  Sense Strand Starting at position 1333 of SEQ ID NO: 318375
ccauauuguauguggaaag

SEQ ID NO: 423350 - RNA, 19 nt, Artificial Sequence
  Description of Artificial Sequence: Synthetic oligonucleotide
  Antisense Strand to SEQ ID NO: 423349
cuuuccacauacaauaugg

SEQ ID NO: 423351 - RNA, 19 nt, Artificial Sequence
  Description of Artificial Sequence: Synthetic oligonucleotide
  Sense Strand Starting at position 1333 of SEQ ID NO: 318415
gaugauaugguagguauua

SEQ ID NO: 423352 - RNA, 19 nt, Artificial Sequence
  Description of Artificial Sequence: Synthetic oligonucleotide
  Antisense Strand to SEQ ID NO: 423351
uaauaccuaccauaucauc

SEQ ID NO: 423353 - RNA, 19 nt, Artificial Sequence
  Description of Artificial Sequence: Synthetic oligonucleotide
  Sense Strand Starting at position 1333 of SEQ ID NO: 318416
augauaugguagguauuaa

SEQ ID NO: 423354 - RNA, 19 nt, Artificial Sequence
  Description of Artificial Sequence: Synthetic oligonucleotide
  Antisense Strand to SEQ ID NO: 423353
uuaauaccuaccauaucau

SEQ ID NO: 423355 - RNA, 19 nt, Artificial Sequence
  Description of Artificial Sequence: Synthetic oligonucleotide
  Sense Strand Starting at position 1333 of SEQ ID NO: 318424
guagguauuaagcauguua

SEQ ID NO: 423356 - RNA, 19 nt, Artificial Sequence
  Description of Artificial Sequence: Synthetic oligonucleotide
  Antisense Strand to SEQ ID NO: 423355
uaacaugcuuaauaccuac

SEQ ID NO: 423357 - RNA, 19 nt, Artificial Sequence
  Description of Artificial Sequence: Synthetic oligonucleotide
  Sense Strand Starting at position 1333 of SEQ ID NO: 318426
agguauuaagcauguuaaa

SEQ ID NO: 423358 - RNA, 19 nt, Artificial Sequence
  Description of Artificial Sequence: Synthetic oligonucleotide
  Antisense Strand to SEQ ID NO: 423357
uuuaacaugcuuaauaccu

SEQ ID NO: 423359 - RNA, 19 nt, Artificial Sequence
  Description of Artificial Sequence: Synthetic oligonucleotide
  Sense Strand Starting at position 1333 of SEQ ID NO: 318435
gcauguuaaaugcauggaa

SEQ ID NO: 423360 - RNA, 19 nt, Artificial Sequence
  Description of Artificial Sequence: Synthetic oligonucleotide
  Antisense Strand to SEQ ID NO: 423359
uuccaugcauuuaacaugc

SEQ ID NO: 423361 - RNA, 19 nt, Artificial Sequence
  Description of Artificial Sequence: Synthetic oligonucleotide
  Sense Strand Starting at position 1333 of SEQ ID NO: 318437
auguuaaaugcauggaaau

SEQ ID NO: 423362 - RNA, 19 nt, Artificial Sequence
  Description of Artificial Sequence: Synthetic oligonucleotide
  Antisense Strand to SEQ ID NO: 423361
auuuccaugcauuuaacau

SEQ ID NO: 423363 - RNA, 19 nt, Artificial Sequence
  Description of Artificial Sequence: Synthetic oligonucleotide
  Sense Strand Starting at position 1333 of SEQ ID NO: 318438
uguuaaaugcauggaaauu

SEQ ID NO: 423364 - RNA, 19 nt, Artificial Sequence
  Description of Artificial Sequence: Synthetic oligonucleotide
  Antisense Strand to SEQ ID NO: 423363
aauuuccaugcauuuaaca

SEQ ID NO: 423365 - RNA, 19 nt, Artificial Sequence
  Description of Artificial Sequence: Synthetic oligonucleotide
  Sense Strand Starting at position 1333 of SEQ ID NO: 318758
cuccuauuggcucaugaua

SEQ ID NO: 423366 - RNA, 19 nt, Artificial Sequence
  Description of Artificial Sequence: Synthetic oligonucleotide
  Antisense Strand to SEQ ID NO: 423365
uaucaugagccaauaggag

SEQ ID NO: 423367 - RNA, 19 nt, Artificial Sequence
  Description of Artificial Sequence: Synthetic oligonucleotide
  Sense Strand Starting at position 1333 of SEQ ID NO: 318850
auuaaauaggcuuaguauc

SEQ ID NO: 423368 - RNA, 19 nt, Artificial Sequence
  Description of Artificial Sequence: Synthetic oligonucleotide
  Antisense Strand to SEQ ID NO: 423367
gauacuaagccuauuuaau

SEQ ID NO: 423369 - RNA, 19 nt, Artificial Sequence
  Description of Artificial Sequence: Synthetic oligonucleotide
  Sense Strand Starting at position 1333 of SEQ ID NO: 318861
uuaguaucugggcaggaga

SEQ ID NO: 423370 - RNA, 19 nt, Artificial Sequence
  Description of Artificial Sequence: Synthetic oligonucleotide
  Antisense Strand to SEQ ID NO: 423369
ucuccugcccagauacuaa

SEQ ID NO: 423371 - RNA, 19 nt, Artificial Sequence
  Description of Artificial Sequence: Synthetic oligonucleotide
  Sense Strand Starting at position 1333 of SEQ ID NO: 318950
guauguccuggguagauua

SEQ ID NO: 423372 - RNA, 19 nt, Artificial Sequence
  Description of Artificial Sequence: Synthetic oligonucleotide
  Antisense Strand to SEQ ID NO: 423371
uaaucuacccaggacauac

SEQ ID NO: 423373 - RNA, 19 nt, Artificial Sequence
  Description of Artificial Sequence: Synthetic oligonucleotide
  Sense Strand Starting at position 1333 of SEQ ID NO: 319062
cauguaaagugauuugccu

SEQ ID NO: 423374 - RNA, 19 nt, Artificial Sequence
  Description of Artificial Sequence: Synthetic oligonucleotide
  Antisense Strand to SEQ ID NO: 423373
aggcaaaucacuuuacaug

SEQ ID NO: 423375 - RNA, 19 nt, Artificial Sequence
  Description of Artificial Sequence: Synthetic oligonucleotide
  Sense Strand Starting at position 1333 of SEQ ID NO: 319095
guaagagcucaauaauggu

SEQ ID NO: 423376 - RNA, 19 nt, Artificial Sequence
  Description of Artificial Sequence: Synthetic oligonucleotide
  Antisense Strand to SEQ ID NO: 423375
accauuauugagcucuuac

SEQ ID NO: 423377 - RNA, 19 nt, Artificial Sequence
  Description of Artificial Sequence: Synthetic oligonucleotide
  Sense Strand Starting at position 1333 of SEQ ID NO: 319120
ucucauagggauuguuagu

SEQ ID NO: 423378 - RNA, 19 nt, Artificial Sequence
  Description of Artificial Sequence: Synthetic oligonucleotide
  Antisense Strand to SEQ ID NO: 423377
acuaacaaucccuaugaga

SEQ ID NO: 423379 - RNA, 19 nt, Artificial Sequence
  Description of Artificial Sequence: Synthetic oligonucleotide
  Sense Strand Starting at position 1333 of SEQ ID NO: 319152
ucauguuagcuuuaagaag

SEQ ID NO: 423380 - RNA, 19 nt, Artificial Sequence
  Description of Artificial Sequence: Synthetic oligonucleotide
  Antisense Strand to SEQ ID NO: 423379
cuucuuaaagcuaacauga

SEQ ID NO: 423381 - RNA, 19 nt, Artificial Sequence
  Description of Artificial Sequence: Synthetic oligonucleotide
  Sense Strand Starting at position 1334 of SEQ ID NO: 315256
cuaauaugccacgaacucu

SEQ ID NO: 423382 - RNA, 19 nt, Artificial Sequence
  Description of Artificial Sequence: Synthetic oligonucleotide
  Antisense Strand to SEQ ID NO: 423381
agaguucguggcauauuag

SEQ ID NO: 423383 - RNA, 19 nt, Artificial Sequence
  Description of Artificial Sequence: Synthetic oligonucleotide
  Sense Strand Starting at position 1334 of SEQ ID NO: 315367
ugacauagguaguuaccau

SEQ ID NO: 423384 - RNA, 19 nt, Artificial Sequence
  Description of Artificial Sequence: Synthetic oligonucleotide
  Antisense Strand to SEQ ID NO: 423383
augguaacuaccuauguca

SEQ ID NO: 423385 - RNA, 19 nt, Artificial Sequence
  Description of Artificial Sequence: Synthetic oligonucleotide
  Sense Strand Starting at position 1334 of SEQ ID NO: 315374
gguaguuaccaucaaacuu

SEQ ID NO: 423386 - RNA, 19 nt, Artificial Sequence
  Description of Artificial Sequence: Synthetic oligonucleotide
  Antisense Strand to SEQ ID NO: 423385
aaguuugaugguaacuacc

SEQ ID NO: 423387 - RNA, 19 nt, Artificial Sequence
  Description of Artificial Sequence: Synthetic oligonucleotide
  Sense Strand Starting at position 1334 of SEQ ID NO: 315443
gacagaaugucucugcuaa

SEQ ID NO: 423388 - RNA, 19 nt, Artificial Sequence
  Description of Artificial Sequence: Synthetic oligonucleotide
  Antisense Strand to SEQ ID NO: 423387
uuagcagagacauucuguc

SEQ ID NO: 423389 - RNA, 19 nt, Artificial Sequence
  Description of Artificial Sequence: Synthetic oligonucleotide
  Sense Strand Starting at position 1334 of SEQ ID NO: 315473
cuaguauguguugcugcua

SEQ ID NO: 423390 - RNA, 19 nt, Artificial Sequence
  Description of Artificial Sequence: Synthetic oligonucleotide
  Antisense Strand to SEQ ID NO: 423389
uagcagcaacacauacuag

SEQ ID NO: 423391 - RNA, 19 nt, Artificial Sequence
  Description of Artificial Sequence: Synthetic oligonucleotide
  Sense Strand Starting at position 1334 of SEQ ID NO: 315567
augaucucagauugucauu

SEQ ID NO: 423392 - RNA, 19 nt, Artificial Sequence
  Description of Artificial Sequence: Synthetic oligonucleotide
  Antisense Strand to SEQ ID NO: 423391
aaugacaaucugagaucau

SEQ ID NO: 423393 - RNA, 19 nt, Artificial Sequence
  Description of Artificial Sequence: Synthetic oligonucleotide
  Sense Strand Starting at position 1334 of SEQ ID NO: 315569
gaucucagauugucauuga

SEQ ID NO: 423394 - RNA, 19 nt, Artificial Sequence
  Description of Artificial Sequence: Synthetic oligonucleotide
  Antisense Strand to SEQ ID NO: 423393
ucaaugacaaucugagauc

SEQ ID NO: 423395 - RNA, 19 nt, Artificial Sequence
  Description of Artificial Sequence: Synthetic oligonucleotide
  Sense Strand Starting at position 1334 of SEQ ID NO: 315572
cucagauugucauugauaa

SEQ ID NO: 423396 - RNA, 19 nt, Artificial Sequence
  Description of Artificial Sequence: Synthetic oligonucleotide
  Antisense Strand to SEQ ID NO: 423395
uuaucaaugacaaucugag

SEQ ID NO: 423397 - RNA, 19 nt, Artificial Sequence
  Description of Artificial Sequence: Synthetic oligonucleotide
  Sense Strand Starting at position 1334 of SEQ ID NO: 315573
ucagauugucauugauaau

SEQ ID NO: 423398 - RNA, 19 nt, Artificial Sequence
  Description of Artificial Sequence: Synthetic oligonucleotide
  Antisense Strand to SEQ ID NO: 423397
auuaucaaugacaaucuga

SEQ ID NO: 423399 - RNA, 19 nt, Artificial Sequence
  Description of Artificial Sequence: Synthetic oligonucleotide
  Sense Strand Starting at position 1334 of SEQ ID NO: 315684
aaauauucuuggguaaagu

SEQ ID NO: 423400 - RNA, 19 nt, Artificial Sequence
  Description of Artificial Sequence: Synthetic oligonucleotide
  Antisense Strand to SEQ ID NO: 423399
acuuuacccaagaauauuu

SEQ ID NO: 423401 - RNA, 19 nt, Artificial Sequence
  Description of Artificial Sequence: Synthetic oligonucleotide
  Sense Strand Starting at position 1334 of SEQ ID NO: 315685
aauauucuuggguaaaguu

SEQ ID NO: 423402 - RNA, 19 nt, Artificial Sequence
  Description of Artificial Sequence: Synthetic oligonucleotide
  Antisense Strand to SEQ ID NO: 423401
aacuuuacccaagaauauu

SEQ ID NO: 423403 - RNA, 19 nt, Artificial Sequence
  Description of Artificial Sequence: Synthetic oligonucleotide
  Sense Strand Starting at position 1334 of SEQ ID NO: 315849
cuugaucugcuauauaaag

SEQ ID NO: 423404 - RNA, 19 nt, Artificial Sequence
  Description of Artificial Sequence: Synthetic oligonucleotide
  Antisense Strand to SEQ ID NO: 423403
cuuuauauagcagaucaag

SEQ ID NO: 423405 - RNA, 19 nt, Artificial Sequence
  Description of Artificial Sequence: Synthetic oligonucleotide
  Sense Strand Starting at position 1334 of SEQ ID NO: 315951
gcuuaaagguacuuggaaa

SEQ ID NO: 423406 - RNA, 19 nt, Artificial Sequence
  Description of Artificial Sequence: Synthetic oligonucleotide
  Antisense Strand to SEQ ID NO: 423405
uuuccaaguaccuuuaagc

SEQ ID NO: 423407 - RNA, 19 nt, Artificial Sequence
  Description of Artificial Sequence: Synthetic oligonucleotide
  Sense Strand Starting at position 1334 of SEQ ID NO: 316329
gggagucuacuguauaccu

SEQ ID NO: 423408 - RNA, 19 nt, Artificial Sequence
  Description of Artificial Sequence: Synthetic oligonucleotide
  Antisense Strand to SEQ ID NO: 423407
agguauacaguagacuccc

SEQ ID NO: 423409 - RNA, 19 nt, Artificial Sequence
  Description of Artificial Sequence: Synthetic oligonucleotide
  Sense Strand Starting at position 1334 of SEQ ID NO: 316755
uacuuaugugauggaguaa

SEQ ID NO: 423410 - RNA, 19 nt, Artificial Sequence
  Description of Artificial Sequence: Synthetic oligonucleotide
  Antisense Strand to SEQ ID NO: 423409
uuacuccaucacauaagua

SEQ ID NO: 423411 - RNA, 19 nt, Artificial Sequence
  Description of Artificial Sequence: Synthetic oligonucleotide
  Sense Strand Starting at position 1334 of SEQ ID NO: 316934
uggaaauccuagcuuauau

SEQ ID NO: 423412 - RNA, 19 nt, Artificial Sequence
  Description of Artificial Sequence: Synthetic oligonucleotide
  Antisense Strand to SEQ ID NO: 423411
auauaagcuaggauuucca

SEQ ID NO: 423413 - RNA, 19 nt, Artificial Sequence
  Description of Artificial Sequence: Synthetic oligonucleotide
  Sense Strand Starting at position 1334 of SEQ ID NO: 316993
aaaugacaaggcugugauu

SEQ ID NO: 423414 - RNA, 19 nt, Artificial Sequence
  Description of Artificial Sequence: Synthetic oligonucleotide
  Antisense Strand to SEQ ID NO: 423413
aaucacagccuugucauuu

SEQ ID NO: 423415 - RNA, 19 nt, Artificial Sequence
  Description of Artificial Sequence: Synthetic oligonucleotide
  Sense Strand Starting at position 1334 of SEQ ID NO: 317170
guagacugugagcagagau

SEQ ID NO: 423416 - RNA, 19 nt, Artificial Sequence
  Description of Artificial Sequence: Synthetic oligonucleotide
  Antisense Strand to SEQ ID NO: 423415
aucucugcucacagucuac

SEQ ID NO: 423417 - RNA, 19 nt, Artificial Sequence
  Description of Artificial Sequence: Synthetic oligonucleotide
  Sense Strand Starting at position 1334 of SEQ ID NO: 317234
gccuuuggugaggagagua

SEQ ID NO: 423418 - RNA, 19 nt, Artificial Sequence
  Description of Artificial Sequence: Synthetic oligonucleotide
  Antisense Strand to SEQ ID NO: 423417
uacucuccucaccaaaggc

SEQ ID NO: 423419 - RNA, 19 nt, Artificial Sequence
  Description of Artificial Sequence: Synthetic oligonucleotide
  Sense Strand Starting at position 1334 of SEQ ID NO: 317390
ucuuuccacuggucagaau

SEQ ID NO: 423420 - RNA, 19 nt, Artificial Sequence
  Description of Artificial Sequence: Synthetic oligonucleotide
  Antisense Strand to SEQ ID NO: 423419
auucugaccaguggaaaga

SEQ ID NO: 423421 - RNA, 19 nt, Artificial Sequence
  Description of Artificial Sequence: Synthetic oligonucleotide
  Sense Strand Starting at position 1334 of SEQ ID NO: 317391
cuuuccacuggucagaaua

SEQ ID NO: 423422 - RNA, 19 nt, Artificial Sequence
  Description of Artificial Sequence: Synthetic oligonucleotide
  Antisense Strand to SEQ ID NO: 423421
uauucugaccaguggaaag

SEQ ID NO: 423423 - RNA, 19 nt, Artificial Sequence
  Description of Artificial Sequence: Synthetic oligonucleotide
  Sense Strand Starting at position 1334 of SEQ ID NO: 317442
uaggauagacgucagugaa

SEQ ID NO: 423424 - RNA, 19 nt, Artificial Sequence
  Description of Artificial Sequence: Synthetic oligonucleotide
  Antisense Strand to SEQ ID NO: 423423
uucacugacgucuauccua

SEQ ID NO: 423425 - RNA, 19 nt, Artificial Sequence
  Description of Artificial Sequence: Synthetic oligonucleotide
  Sense Strand Starting at position 1334 of SEQ ID NO: 317475
auuggauuccuuuggguac

SEQ ID NO: 423426 - RNA, 19 nt, Artificial Sequence
  Description of Artificial Sequence: Synthetic oligonucleotide
  Antisense Strand to SEQ ID NO: 423425
guacccaaaggaauccaau

SEQ ID NO: 423427 - RNA, 19 nt, Artificial Sequence
  Description of Artificial Sequence: Synthetic oligonucleotide
  Sense Strand Starting at position 1334 of SEQ ID NO: 317479
gauuccuuuggguacaguu

SEQ ID NO: 423428 - RNA, 19 nt, Artificial Sequence
  Description of Artificial Sequence: Synthetic oligonucleotide
  Antisense Strand to SEQ ID NO: 423427
aacuguacccaaaggaauc

SEQ ID NO: 423429 - RNA, 19 nt, Artificial Sequence
  Description of Artificial Sequence: Synthetic oligonucleotide
  Sense Strand Starting at position 1334 of SEQ ID NO: 317527
agcagaggaaagugaucua

SEQ ID NO: 423430 - RNA, 19 nt, Artificial Sequence
  Description of Artificial Sequence: Synthetic oligonucleotide
  Antisense Strand to SEQ ID NO: 423429
uagaucacuuuccucugcu

SEQ ID NO: 423431 - RNA, 19 nt, Artificial Sequence
  Description of Artificial Sequence: Synthetic oligonucleotide
  Sense Strand Starting at position 1334 of SEQ ID NO: 317712
auucuuauuccacaggguu

SEQ ID NO: 423432 - RNA, 19 nt, Artificial Sequence
  Description of Artificial Sequence: Synthetic oligonucleotide
  Antisense Strand to SEQ ID NO: 423431
aacccuguggaauaagaau

SEQ ID NO: 423433 - RNA, 19 nt, Artificial Sequence
  Description of Artificial Sequence: Synthetic oligonucleotide
  Sense Strand Starting at position 1334 of SEQ ID NO: 317868
acuagacuucuuuauggca

SEQ ID NO: 423434 - RNA, 19 nt, Artificial Sequence
  Description of Artificial Sequence: Synthetic oligonucleotide
  Antisense Strand to SEQ ID NO: 423433
ugccauaaagaagucuagu

SEQ ID NO: 423435 - RNA, 19 nt, Artificial Sequence
  Description of Artificial Sequence: Synthetic oligonucleotide
  Sense Strand Starting at position 1334 of SEQ ID NO: 317975
uuucuaauugguuauacag

SEQ ID NO: 423436 - RNA, 19 nt, Artificial Sequence
  Description of Artificial Sequence: Synthetic oligonucleotide
  Antisense Strand to SEQ ID NO: 423435
cuguauaaccaauuagaaa

SEQ ID NO: 423437 - RNA, 19 nt, Artificial Sequence
  Description of Artificial Sequence: Synthetic oligonucleotide
  Sense Strand Starting at position 1334 of SEQ ID NO: 318192
ugaggucucagugauguaa

SEQ ID NO: 423438 - RNA, 19 nt, Artificial Sequence
  Description of Artificial Sequence: Synthetic oligonucleotide
  Antisense Strand to SEQ ID NO: 423437
uuacaucacugagaccuca

SEQ ID NO: 423439 - RNA, 19 nt, Artificial Sequence
  Description of Artificial Sequence: Synthetic oligonucleotide
  Sense Strand Starting at position 1334 of SEQ ID NO: 318196
gucucagugauguaacuga

SEQ ID NO: 423440 - RNA, 19 nt, Artificial Sequence
  Description of Artificial Sequence: Synthetic oligonucleotide
  Antisense Strand to SEQ ID NO: 423439
ucaguuacaucacugagac

SEQ ID NO: 423441 - RNA, 19 nt, Artificial Sequence
  Description of Artificial Sequence: Synthetic oligonucleotide
  Sense Strand Starting at position 1334 of SEQ ID NO: 318201
agugauguaacugacggaa

SEQ ID NO: 423442 - RNA, 19 nt, Artificial Sequence
  Description of Artificial Sequence: Synthetic oligonucleotide
  Antisense Strand to SEQ ID NO: 423441
uuccgucaguuacaucacu

SEQ ID NO: 423443 - RNA, 19 nt, Artificial Sequence
  Description of Artificial Sequence: Synthetic oligonucleotide
  Sense Strand Starting at position 1334 of SEQ ID NO: 318403
cuuggauauccauguuuaa

SEQ ID NO: 423444 - RNA, 19 nt, Artificial Sequence
  Description of Artificial Sequence: Synthetic oligonucleotide
  Antisense Strand to SEQ ID NO: 423443
uuaaacauggauauccaag

SEQ ID NO: 423445 - RNA, 19 nt, Artificial Sequence
  Description of Artificial Sequence: Synthetic oligonucleotide
  Sense Strand Starting at position 1334 of SEQ ID NO: 318406
ggauauccauguuuaaaga

SEQ ID NO: 423446 - RNA, 19 nt, Artificial Sequence
  Description of Artificial Sequence: Synthetic oligonucleotide
  Antisense Strand to SEQ ID NO: 423445
ucuuuaaacauggauaucc

SEQ ID NO: 423447 - RNA, 19 nt, Artificial Sequence
  Description of Artificial Sequence: Synthetic oligonucleotide
  Sense Strand Starting at position 1334 of SEQ ID NO: 318414
auguuuaaagagggucaaa

SEQ ID NO: 423448 - RNA, 19 nt, Artificial Sequence
  Description of Artificial Sequence: Synthetic oligonucleotide
  Antisense Strand to SEQ ID NO: 423447
uuugacccucuuuaaacau

SEQ ID NO: 423449 - RNA, 19 nt, Artificial Sequence
  Description of Artificial Sequence: Synthetic oligonucleotide
  Sense Strand Starting at position 1334 of SEQ ID NO: 318632
acaauagacuuggcaauca

SEQ ID NO: 423450 - RNA, 19 nt, Artificial Sequence
  Description of Artificial Sequence: Synthetic oligonucleotide
  Antisense Strand to SEQ ID NO: 423449
ugauugccaagucuauugu

SEQ ID NO: 423451 - RNA, 19 nt, Artificial Sequence
  Description of Artificial Sequence: Synthetic oligonucleotide
  Sense Strand Starting at position 1334 of SEQ ID NO: 318736
uuagauuccucauugguca

SEQ ID NO: 423452 - RNA, 19 nt, Artificial Sequence
  Description of Artificial Sequence: Synthetic oligonucleotide
  Antisense Strand to SEQ ID NO: 423451
ugaccaaugaggaaucuaa

SEQ ID NO: 423453 - RNA, 19 nt, Artificial Sequence
  Description of Artificial Sequence: Synthetic oligonucleotide
  Sense Strand Starting at position 1334 of SEQ ID NO: 318741
uuccucauuggucaaauga

SEQ ID NO: 423454 - RNA, 19 nt, Artificial Sequence
  Description of Artificial Sequence: Synthetic oligonucleotide
  Antisense Strand to SEQ ID NO: 423453
ucauuugaccaaugaggaa

SEQ ID NO: 423455 - RNA, 19 nt, Artificial Sequence
  Description of Artificial Sequence: Synthetic oligonucleotide
  Sense Strand Starting at position 1334 of SEQ ID NO: 318813
cucacaguuuaguuauaag

SEQ ID NO: 423456 - RNA, 19 nt, Artificial Sequence
  Description of Artificial Sequence: Synthetic oligonucleotide
  Antisense Strand to SEQ ID NO: 423455
cuuauaacuaaacugugag

SEQ ID NO: 423457 - RNA, 19 nt, Artificial Sequence
  Description of Artificial Sequence: Synthetic oligonucleotide
  Sense Strand Starting at position 1334 of SEQ ID NO: 319197
acagauaaaucuuuggcau

SEQ ID NO: 423458 - RNA, 19 nt, Artificial Sequence
  Description of Artificial Sequence: Synthetic oligonucleotide
  Antisense Strand to SEQ ID NO: 423457
augccaaagauuuaucugu

SEQ ID NO: 423459 - RNA, 19 nt, Artificial Sequence
  Description of Artificial Sequence: Synthetic oligonucleotide
  Sense Strand Starting at position 1334 of SEQ ID NO: 319214
auuggaggguuucccuaau

SEQ ID NO: 423460 - RNA, 19 nt, Artificial Sequence
  Description of Artificial Sequence: Synthetic oligonucleotide
  Antisense Strand to SEQ ID NO: 423459
auuagggaaacccuccaau

SEQ ID NO: 423461 - RNA, 19 nt, Artificial Sequence
  Description of Artificial Sequence: Synthetic oligonucleotide
  Sense Strand Starting at position 1335 of SEQ ID NO: 315585
gacagaaugugauccagug

SEQ ID NO: 423462 - RNA, 19 nt, Artificial Sequence
  Description of Artificial Sequence: Synthetic oligonucleotide
  Antisense Strand to SEQ ID NO: 423461
cacuggaucacauucuguc

SEQ ID NO: 423463 - RNA, 19 nt, Artificial Sequence
  Description of Artificial Sequence: Synthetic oligonucleotide
  Sense Strand Starting at position 1335 of SEQ ID NO: 315591
augugauccagugggaauu

SEQ ID NO: 423464 - RNA, 19 nt, Artificial Sequence
  Description of Artificial Sequence: Synthetic oligonucleotide
  Antisense Strand to SEQ ID NO: 423463
aauucccacuggaucacau

SEQ ID NO: 423465 - RNA, 19 nt, Artificial Sequence
  Description of Artificial Sequence: Synthetic oligonucleotide
  Sense Strand Starting at position 1335 of SEQ ID NO: 315592
ugugauccagugggaauua

SEQ ID NO: 423466 - RNA, 19 nt, Artificial Sequence
  Description of Artificial Sequence: Synthetic oligonucleotide
  Antisense Strand to SEQ ID NO: 423465
uaauucccacuggaucaca

SEQ ID NO: 423467 - RNA, 19 nt, Artificial Sequence
  Description of Artificial Sequence: Synthetic oligonucleotide
  Sense Strand Starting at position 1335 of SEQ ID NO: 315805
acaugagagucaucugauu

SEQ ID NO: 423468 - RNA, 19 nt, Artificial Sequence
  Description of Artificial Sequence: Synthetic oligonucleotide
  Antisense Strand to SEQ ID NO: 423467
aaucagaugacucucaugu

SEQ ID NO: 423469 - RNA, 19 nt, Artificial Sequence
  Description of Artificial Sequence: Synthetic oligonucleotide
  Sense Strand Starting at position 1335 of SEQ ID NO: 315872
acuaguaucauguagaugu

SEQ ID NO: 423470 - RNA, 19 nt, Artificial Sequence
  Description of Artificial Sequence: Synthetic oligonucleotide
  Antisense Strand to SEQ ID NO: 423469
acaucuacaugauacuagu

SEQ ID NO: 423471 - RNA, 19 nt, Artificial Sequence
  Description of Artificial Sequence: Synthetic oligonucleotide
  Sense Strand Starting at position 1335 of SEQ ID NO: 315874
uaguaucauguagauguua

SEQ ID NO: 423472 - RNA, 19 nt, Artificial Sequence
  Description of Artificial Sequence: Synthetic oligonucleotide
  Antisense Strand to SEQ ID NO: 423471
uaacaucuacaugauacua

SEQ ID NO: 423473 - RNA, 19 nt, Artificial Sequence
  Description of Artificial Sequence: Synthetic oligonucleotide
  Sense Strand Starting at position 1335 of SEQ ID NO: 316065
guuaucacagaauaugcaa

SEQ ID NO: 423474 - RNA, 19 nt, Artificial Sequence
  Description of Artificial Sequence: Synthetic oligonucleotide
  Antisense Strand to SEQ ID NO: 423473
uugcauauucugugauaac

SEQ ID NO: 423475 - RNA, 19 nt, Artificial Sequence
  Description of Artificial Sequence: Synthetic oligonucleotide
  Sense Strand Starting at position 1335 of SEQ ID NO: 316111
gguaauguugcucacauaa

SEQ ID NO: 423476 - RNA, 19 nt, Artificial Sequence
  Description of Artificial Sequence: Synthetic oligonucleotide
  Antisense Strand to SEQ ID NO: 423475
uuaugugagcaacauuacc

SEQ ID NO: 423477 - RNA, 19 nt, Artificial Sequence
  Description of Artificial Sequence: Synthetic oligonucleotide
  Sense Strand Starting at position 1335 of SEQ ID NO: 316334
aggacacuuuaguuauuau

SEQ ID NO: 423478 - RNA, 19 nt, Artificial Sequence
  Description of Artificial Sequence: Synthetic oligonucleotide
  Antisense Strand to SEQ ID NO: 423477
auaauaacuaaaguguccu

SEQ ID NO: 423479 - RNA, 19 nt, Artificial Sequence
  Description of Artificial Sequence: Synthetic oligonucleotide
  Sense Strand Starting at position 1335 of SEQ ID NO: 316470
acccaaauauguucgaaac

SEQ ID NO: 423480 - RNA, 19 nt, Artificial Sequence
  Description of Artificial Sequence: Synthetic oligonucleotide
  Antisense Strand to SEQ ID NO: 423479
guuucgaacauauuugggu

SEQ ID NO: 423481 - RNA, 19 nt, Artificial Sequence
  Description of Artificial Sequence: Synthetic oligonucleotide
  Sense Strand Starting at position 1335 of SEQ ID NO: 316471
cccaaauauguucgaaaca

SEQ ID NO: 423482 - RNA, 19 nt, Artificial Sequence
  Description of Artificial Sequence: Synthetic oligonucleotide
  Antisense Strand to SEQ ID NO: 423481
uguuucgaacauauuuggg

SEQ ID NO: 423483 - RNA, 19 nt, Artificial Sequence
  Description of Artificial Sequence: Synthetic oligonucleotide
  Sense Strand Starting at position 1335 of SEQ ID NO: 316853
ccugcacaagucugaaaca

SEQ ID NO: 423484 - RNA, 19 nt, Artificial Sequence
  Description of Artificial Sequence: Synthetic oligonucleotide
  Antisense Strand to SEQ ID NO: 423483
uguuucagacuugugcagg

SEQ ID NO: 423485 - RNA, 19 nt, Artificial Sequence
  Description of Artificial Sequence: Synthetic oligonucleotide
  Sense Strand Starting at position 1335 of SEQ ID NO: 316863
ucugaaacaucagucuaug

SEQ ID NO: 423486 - RNA, 19 nt, Artificial Sequence
  Description of Artificial Sequence: Synthetic oligonucleotide
  Antisense Strand to SEQ ID NO: 423485
cauagacugauguuucaga

SEQ ID NO: 423487 - RNA, 19 nt, Artificial Sequence
  Description of Artificial Sequence: Synthetic oligonucleotide
  Sense Strand Starting at position 1335 of SEQ ID NO: 316893
aaauguacucuguaccgau

SEQ ID NO: 423488 - RNA, 19 nt, Artificial Sequence
  Description of Artificial Sequence: Synthetic oligonucleotide
  Antisense Strand to SEQ ID NO: 423487
aucgguacagaguacauuu

SEQ ID NO: 423489 - RNA, 19 nt, Artificial Sequence
  Description of Artificial Sequence: Synthetic oligonucleotide
  Sense Strand Starting at position 1335 of SEQ ID NO: 316928
cuuucuaacccucgagaau

SEQ ID NO: 423490 - RNA, 19 nt, Artificial Sequence
  Description of Artificial Sequence: Synthetic oligonucleotide
  Antisense Strand to SEQ ID NO: 423489
auucucgaggguuagaaag

SEQ ID NO: 423491 - RNA, 19 nt, Artificial Sequence
  Description of Artificial Sequence: Synthetic oligonucleotide
  Sense Strand Starting at position 1335 of SEQ ID NO: 316929
uuucuaacccucgagaaug

SEQ ID NO: 423492 - RNA, 19 nt, Artificial Sequence
  Description of Artificial Sequence: Synthetic oligonucleotide
  Antisense Strand to SEQ ID NO: 423491
cauucucgaggguuagaaa

SEQ ID NO: 423493 - RNA, 19 nt, Artificial Sequence
  Description of Artificial Sequence: Synthetic oligonucleotide
  Sense Strand Starting at position 1335 of SEQ ID NO: 316940
cgagaauguuaagaauuua

SEQ ID NO: 423494 - RNA, 19 nt, Artificial Sequence
  Description of Artificial Sequence: Synthetic oligonucleotide
  Antisense Strand to SEQ ID NO: 423493
uaaauucuuaacauucucg

SEQ ID NO: 423495 - RNA, 19 nt, Artificial Sequence
  Description of Artificial Sequence: Synthetic oligonucleotide
  Sense Strand Starting at position 1335 of SEQ ID NO: 316972
agcuuaagagugcaauuau

SEQ ID NO: 423496 - RNA, 19 nt, Artificial Sequence
  Description of Artificial Sequence: Synthetic oligonucleotide
  Antisense Strand to SEQ ID NO: 423495
auaauugcacucuuaagcu

SEQ ID NO: 423497 - RNA, 19 nt, Artificial Sequence
  Description of Artificial Sequence: Synthetic oligonucleotide
  Sense Strand Starting at position 1335 of SEQ ID NO: 316981
gugcaauuauuugccagua

SEQ ID NO: 423498 - RNA, 19 nt, Artificial Sequence
  Description of Artificial Sequence: Synthetic oligonucleotide
  Antisense Strand to SEQ ID NO: 423497
uacuggcaaauaauugcac

SEQ ID NO: 423499 - RNA, 19 nt, Artificial Sequence
  Description of Artificial Sequence: Synthetic oligonucleotide
  Sense Strand Starting at position 1335 of SEQ ID NO: 316982
ugcaauuauuugccaguaa

SEQ ID NO: 423500 - RNA, 19 nt, Artificial Sequence
  Description of Artificial Sequence: Synthetic oligonucleotide
  Antisense Strand to SEQ ID NO: 423499
uuacuggcaaauaauugca

SEQ ID NO: 423501 - RNA, 19 nt, Artificial Sequence
  Description of Artificial Sequence: Synthetic oligonucleotide
  Sense Strand Starting at position 1335 of SEQ ID NO: 317100
agaagacuuucgccaauca

SEQ ID NO: 423502 - RNA, 19 nt, Artificial Sequence
  Description of Artificial Sequence: Synthetic oligonucleotide
  Antisense Strand to SEQ ID NO: 423501
ugauuggcgaaagucuucu

SEQ ID NO: 423503 - RNA, 19 nt, Artificial Sequence
  Description of Artificial Sequence: Synthetic oligonucleotide
  Sense Strand Starting at position 1335 of SEQ ID NO: 317144
uugucagggugauuuguua

SEQ ID NO: 423504 - RNA, 19 nt, Artificial Sequence
  Description of Artificial Sequence: Synthetic oligonucleotide
  Antisense Strand to SEQ ID NO: 423503
uaacaaaucacccugacaa

SEQ ID NO: 423505 - RNA, 19 nt, Artificial Sequence
  Description of Artificial Sequence: Synthetic oligonucleotide
  Sense Strand Starting at position 1335 of SEQ ID NO: 317148
cagggugauuuguuagcuu

SEQ ID NO: 423506 - RNA, 19 nt, Artificial Sequence
  Description of Artificial Sequence: Synthetic oligonucleotide
  Antisense Strand to SEQ ID NO: 423505
aagcuaacaaaucacccug

SEQ ID NO: 423507 - RNA, 19 nt, Artificial Sequence
  Description of Artificial Sequence: Synthetic oligonucleotide
  Sense Strand Starting at position 1335 of SEQ ID NO: 317151
ggugauuuguuagcuuuaa

SEQ ID NO: 423508 - RNA, 19 nt, Artificial Sequence
  Description of Artificial Sequence: Synthetic oligonucleotide
  Antisense Strand to SEQ ID NO: 423507
uuaaagcuaacaaaucacc

SEQ ID NO: 423509 - RNA, 19 nt, Artificial Sequence
  Description of Artificial Sequence: Synthetic oligonucleotide
  Sense Strand Starting at position 1335 of SEQ ID NO: 317152
gugauuuguuagcuuuaau

SEQ ID NO: 423510 - RNA, 19 nt, Artificial Sequence
  Description of Artificial Sequence: Synthetic oligonucleotide
  Antisense Strand to SEQ ID NO: 423509
auuaaagcuaacaaaucac

SEQ ID NO: 423511 - RNA, 19 nt, Artificial Sequence
  Description of Artificial Sequence: Synthetic oligonucleotide
  Sense Strand Starting at position 1335 of SEQ ID NO: 317291
ucagaugccguuuauaaac

SEQ ID NO: 423512 - RNA, 19 nt, Artificial Sequence
  Description of Artificial Sequence: Synthetic oligonucleotide
  Antisense Strand to SEQ ID NO: 423511
guuuauaaacggcaucuga

SEQ ID NO: 423513 - RNA, 19 nt, Artificial Sequence
  Description of Artificial Sequence: Synthetic oligonucleotide
  Sense Strand Starting at position 1335 of SEQ ID NO: 317343
gaggacaucucaguugaau

SEQ ID NO: 423514 - RNA, 19 nt, Artificial Sequence
  Description of Artificial Sequence: Synthetic oligonucleotide
  Antisense Strand to SEQ ID NO: 423513
auucaacugagauguccuc

SEQ ID NO: 423515 - RNA, 19 nt, Artificial Sequence
  Description of Artificial Sequence: Synthetic oligonucleotide
  Sense Strand Starting at position 1335 of SEQ ID NO: 317445
cacagucauugggcagaca

SEQ ID NO: 423516 - RNA, 19 nt, Artificial Sequence
  Description of Artificial Sequence: Synthetic oligonucleotide
  Antisense Strand to SEQ ID NO: 423515
ugucugcccaaugacugug

SEQ ID NO: 423517 - RNA, 19 nt, Artificial Sequence
  Description of Artificial Sequence: Synthetic oligonucleotide
  Sense Strand Starting at position 1335 of SEQ ID NO: 317575
aacacagaaguaugaguua

SEQ ID NO: 423518 - RNA, 19 nt, Artificial Sequence
  Description of Artificial Sequence: Synthetic oligonucleotide
  Antisense Strand to SEQ ID NO: 423517
uaacucauacuucuguguu

SEQ ID NO: 423519 - RNA, 19 nt, Artificial Sequence
  Description of Artificial Sequence: Synthetic oligonucleotide
  Sense Strand Starting at position 1335 of SEQ ID NO: 317586
augaguuaugagugucaga

SEQ ID NO: 423520 - RNA, 19 nt, Artificial Sequence
  Description of Artificial Sequence: Synthetic oligonucleotide
  Antisense Strand to SEQ ID NO: 423519
ucugacacucauaacucau

SEQ ID NO: 423521 - RNA, 19 nt, Artificial Sequence
  Description of Artificial Sequence: Synthetic oligonucleotide
  Sense Strand Starting at position 1335 of SEQ ID NO: 317756
guauuaaaugcugagaauu

SEQ ID NO: 423522 - RNA, 19 nt, Artificial Sequence
  Description of Artificial Sequence: Synthetic oligonucleotide
  Antisense Strand to SEQ ID NO: 423521
aauucucagcauuuaauac

SEQ ID NO: 423523 - RNA, 19 nt, Artificial Sequence
  Description of Artificial Sequence: Synthetic oligonucleotide
  Sense Strand Starting at position 1335 of SEQ ID NO: 317836
aacagauagugugcaaaua

SEQ ID NO: 423524 - RNA, 19 nt, Artificial Sequence
  Description of Artificial Sequence: Synthetic oligonucleotide
  Antisense Strand to SEQ ID NO: 423523
uauuugcacacuaucuguu

SEQ ID NO: 423525 - RNA, 19 nt, Artificial Sequence
  Description of Artificial Sequence: Synthetic oligonucleotide
  Sense Strand Starting at position 1335 of SEQ ID NO: 317837
acagauagugugcaaauaa

SEQ ID NO: 423526 - RNA, 19 nt, Artificial Sequence
  Description of Artificial Sequence: Synthetic oligonucleotide
  Antisense Strand to SEQ ID NO: 423525
uuauuugcacacuaucugu

SEQ ID NO: 423527 - RNA, 19 nt, Artificial Sequence
  Description of Artificial Sequence: Synthetic oligonucleotide
  Sense Strand Starting at position 1335 of SEQ ID NO: 317916
acuugaguccauuaugcaa

SEQ ID NO: 423528 - RNA, 19 nt, Artificial Sequence
  Description of Artificial Sequence: Synthetic oligonucleotide
  Antisense Strand to SEQ ID NO: 423527
uugcauaauggacucaagu

SEQ ID NO: 423529 - RNA, 19 nt, Artificial Sequence
  Description of Artificial Sequence: Synthetic oligonucleotide
  Sense Strand Starting at position 1335 of SEQ ID NO: 318409
agaaguaccaguggugaga

SEQ ID NO: 423530 - RNA, 19 nt, Artificial Sequence
  Description of Artificial Sequence: Synthetic oligonucleotide
  Antisense Strand to SEQ ID NO: 423529
ucucaccacugguacuucu

SEQ ID NO: 423531 - RNA, 19 nt, Artificial Sequence
  Description of Artificial Sequence: Synthetic oligonucleotide
  Sense Strand Starting at position 1335 of SEQ ID NO: 318879
aucuacuucuagucagaua

SEQ ID NO: 423532 - RNA, 19 nt, Artificial Sequence
  Description of Artificial Sequence: Synthetic oligonucleotide
  Antisense Strand to SEQ ID NO: 423531
uaucugacuagaaguagau

SEQ ID NO: 423533 - RNA, 19 nt, Artificial Sequence
  Description of Artificial Sequence: Synthetic oligonucleotide
  Sense Strand Starting at position 1335 of SEQ ID NO: 318910
ugggacuaagagugcaaau

SEQ ID NO: 423534 - RNA, 19 nt, Artificial Sequence
  Description of Artificial Sequence: Synthetic oligonucleotide
  Antisense Strand to SEQ ID NO: 423533
auuugcacucuuaguccca

SEQ ID NO: 423535 - RNA, 19 nt, Artificial Sequence
  Description of Artificial Sequence: Synthetic oligonucleotide
  Sense Strand Starting at position 1335 of SEQ ID NO: 318912
ggacuaagagugcaaaugu

SEQ ID NO: 423536 - RNA, 19 nt, Artificial Sequence
  Description of Artificial Sequence: Synthetic oligonucleotide
  Antisense Strand to SEQ ID NO: 423535
acauuugcacucuuagucc

SEQ ID NO: 423537 - RNA, 19 nt, Artificial Sequence
  Description of Artificial Sequence: Synthetic oligonucleotide
  Sense Strand Starting at position 1335 of SEQ ID NO: 319173
gagcacuuaucaguaaaug

SEQ ID NO: 423538 - RNA, 19 nt, Artificial Sequence
  Description of Artificial Sequence: Synthetic oligonucleotide
  Antisense Strand to SEQ ID NO: 423537
cauuuacugauaagugcuc

SEQ ID NO: 423539 - RNA, 19 nt, Artificial Sequence
  Description of Artificial Sequence: Synthetic oligonucleotide
  Sense Strand Starting at position 1335 of SEQ ID NO: 319174
agcacuuaucaguaaaugu

SEQ ID NO: 423540 - RNA, 19 nt, Artificial Sequence
  Description of Artificial Sequence: Synthetic oligonucleotide
  Antisense Strand to SEQ ID NO: 423539
acauuuacugauaagugcu

SEQ ID NO: 423541 - RNA, 19 nt, Artificial Sequence
  Description of Artificial Sequence: Synthetic oligonucleotide
  Sense Strand Starting at position 1336 of SEQ ID NO: 315497
gggagaguaugaguuauua

SEQ ID NO: 423542 - RNA, 19 nt, Artificial Sequence
  Description of Artificial Sequence: Synthetic oligonucleotide
  Antisense Strand to SEQ ID NO: 423541
uaauaacucauacucuccc

SEQ ID NO: 423543 - RNA, 19 nt, Artificial Sequence
  Description of Artificial Sequence: Synthetic oligonucleotide
  Sense Strand Starting at position 1336 of SEQ ID NO: 315501
gaguaugaguuauuaagaa

SEQ ID NO: 423544 - RNA, 19 nt, Artificial Sequence
  Description of Artificial Sequence: Synthetic oligonucleotide
  Antisense Strand to SEQ ID NO: 423543
uucuuaauaacucauacuc

SEQ ID NO: 423545 - RNA, 19 nt, Artificial Sequence
  Description of Artificial Sequence: Synthetic oligonucleotide
  Sense Strand Starting at position 1336 of SEQ ID NO: 315641
aucagugucccuuaaauug

SEQ ID NO: 423546 - RNA, 19 nt, Artificial Sequence
  Description of Artificial Sequence: Synthetic oligonucleotide
  Antisense Strand to SEQ ID NO: 423545
caauuuaagggacacugau

SEQ ID NO: 423547 - RNA, 19 nt, Artificial Sequence
  Description of Artificial Sequence: Synthetic oligonucleotide
  Sense Strand Starting at position 1336 of SEQ ID NO: 315658
ugaggacaauacuauauuu

SEQ ID NO: 423548 - RNA, 19 nt, Artificial Sequence
  Description of Artificial Sequence: Synthetic oligonucleotide
  Antisense Strand to SEQ ID NO: 423547
aaauauaguauuguccuca

SEQ ID NO: 423549 - RNA, 19 nt, Artificial Sequence
  Description of Artificial Sequence: Synthetic oligonucleotide
  Sense Strand Starting at position 1336 of SEQ ID NO: 315678
gguuuaauacugugaggac

SEQ ID NO: 423550 - RNA, 19 nt, Artificial Sequence
  Description of Artificial Sequence: Synthetic oligonucleotide
  Antisense Strand to SEQ ID NO: 423549
guccucacaguauuaaacc

SEQ ID NO: 423551 - RNA, 19 nt, Artificial Sequence
  Description of Artificial Sequence: Synthetic oligonucleotide
  Sense Strand Starting at position 1336 of SEQ ID NO: 315773
ugauacuaugaaugcagaa

SEQ ID NO: 423552 - RNA, 19 nt, Artificial Sequence
  Description of Artificial Sequence: Synthetic oligonucleotide
  Antisense Strand to SEQ ID NO: 423551
uucugcauucauaguauca

SEQ ID NO: 423553 - RNA, 19 nt, Artificial Sequence
  Description of Artificial Sequence: Synthetic oligonucleotide
  Sense Strand Starting at position 1336 of SEQ ID NO: 315875
uuagcaaagugaucuuuag

SEQ ID NO: 423554 - RNA, 19 nt, Artificial Sequence
  Description of Artificial Sequence: Synthetic oligonucleotide
  Antisense Strand to SEQ ID NO: 423553
cuaaagaucacuuugcuaa

SEQ ID NO: 423555 - RNA, 19 nt, Artificial Sequence
  Description of Artificial Sequence: Synthetic oligonucleotide
  Sense Strand Starting at position 1336 of SEQ ID NO: 315896
caguauuagcaagaauguu

SEQ ID NO: 423556 - RNA, 19 nt, Artificial Sequence
  Description of Artificial Sequence: Synthetic oligonucleotide
  Antisense Strand to SEQ ID NO: 423555
aacauucuugcuaauacug

SEQ ID NO: 423557 - RNA, 19 nt, Artificial Sequence
  Description of Artificial Sequence: Synthetic oligonucleotide
  Sense Strand Starting at position 1336 of SEQ ID NO: 316428
aggagugacgacugagaau

SEQ ID NO: 423558 - RNA, 19 nt, Artificial Sequence
  Description of Artificial Sequence: Synthetic oligonucleotide
  Antisense Strand to SEQ ID NO: 423557
auucucagucgucacuccu

SEQ ID NO: 423559 - RNA, 19 nt, Artificial Sequence
  Description of Artificial Sequence: Synthetic oligonucleotide
  Sense Strand Starting at position 1336 of SEQ ID NO: 316530
agugcugaagcacagaaau

SEQ ID NO: 423560 - RNA, 19 nt, Artificial Sequence
  Description of Artificial Sequence: Synthetic oligonucleotide
  Antisense Strand to SEQ ID NO: 423559
auuucugugcuucagcacu

SEQ ID NO: 423561 - RNA, 19 nt, Artificial Sequence
  Description of Artificial Sequence: Synthetic oligonucleotide
  Sense Strand Starting at position 1336 of SEQ ID NO: 316674
cugccagaggaauguacau

SEQ ID NO: 423562 - RNA, 19 nt, Artificial Sequence
  Description of Artificial Sequence: Synthetic oligonucleotide
  Antisense Strand to SEQ ID NO: 423561
auguacauuccucuggcag

SEQ ID NO: 423563 - RNA, 19 nt, Artificial Sequence
  Description of Artificial Sequence: Synthetic oligonucleotide
  Sense Strand Starting at position 1336 of SEQ ID NO: 316853
gugaguucccaguagacaa

SEQ ID NO: 423564 - RNA, 19 nt, Artificial Sequence
  Description of Artificial Sequence: Synthetic oligonucleotide
  Antisense Strand to SEQ ID NO: 423563
uugucuacugggaacucac

SEQ ID NO: 423565 - RNA, 19 nt, Artificial Sequence
  Description of Artificial Sequence: Synthetic oligonucleotide
  Sense Strand Starting at position 1336 of SEQ ID NO: 317234
gugaaaugaguucagugau

SEQ ID NO: 423566 - RNA, 19 nt, Artificial Sequence
  Description of Artificial Sequence: Synthetic oligonucleotide
  Antisense Strand to SEQ ID NO: 423565
aucacugaacucauuucac

SEQ ID NO: 423567 - RNA, 19 nt, Artificial Sequence
  Description of Artificial Sequence: Synthetic oligonucleotide
  Sense Strand Starting at position 1336 of SEQ ID NO: 317368
gguuuaggucaggagcaaa

SEQ ID NO: 423568 - RNA, 19 nt, Artificial Sequence
  Description of Artificial Sequence: Synthetic oligonucleotide
  Antisense Strand to SEQ ID NO: 423567
uuugcuccugaccuaaacc

SEQ ID NO: 423569 - RNA, 19 nt, Artificial Sequence
  Description of Artificial Sequence: Synthetic oligonucleotide
  Sense Strand Starting at position 1336 of SEQ ID NO: 317436
agaaauacugcaggucaaa

SEQ ID NO: 423570 - RNA, 19 nt, Artificial Sequence
  Description of Artificial Sequence: Synthetic oligonucleotide
  Antisense Strand to SEQ ID NO: 423569
uuugaccugcaguauuucu

SEQ ID NO: 423571 - RNA, 19 nt, Artificial Sequence
  Description of Artificial Sequence: Synthetic oligonucleotide
  Sense Strand Starting at position 1336 of SEQ ID NO: 317608
aaagaugcucauuaagguu

SEQ ID NO: 423572 - RNA, 19 nt, Artificial Sequence
  Description of Artificial Sequence: Synthetic oligonucleotide
  Antisense Strand to SEQ ID NO: 423571
aaccuuaaugagcaucuuu

SEQ ID NO: 423573 - RNA, 19 nt, Artificial Sequence
  Description of Artificial Sequence: Synthetic oligonucleotide
  Sense Strand Starting at position 1336 of SEQ ID NO: 317616
ucauuaagguuucugaaau

SEQ ID NO: 423574 - RNA, 19 nt, Artificial Sequence
  Description of Artificial Sequence: Synthetic oligonucleotide
  Antisense Strand to SEQ ID NO: 423573
auuucagaaaccuuaauga

SEQ ID NO: 423575 - RNA, 19 nt, Artificial Sequence
  Description of Artificial Sequence: Synthetic oligonucleotide
  Sense Strand Starting at position 1336 of SEQ ID NO: 317668
aagaaauggugacuuccua

SEQ ID NO: 423576 - RNA, 19 nt, Artificial Sequence
  Description of Artificial Sequence: Synthetic oligonucleotide
  Antisense Strand to SEQ ID NO: 423575
uaggaagucaccauuucuu

SEQ ID NO: 423577 - RNA, 19 nt, Artificial Sequence
  Description of Artificial Sequence: Synthetic oligonucleotide
  Sense Strand Starting at position 1336 of SEQ ID NO: 317675
ggugacuuccuauauacua

SEQ ID NO: 423578 - RNA, 19 nt, Artificial Sequence
  Description of Artificial Sequence: Synthetic oligonucleotide
  Antisense Strand to SEQ ID NO: 423577
uaguauauaggaagucacc

SEQ ID NO: 423579 - RNA, 19 nt, Artificial Sequence
  Description of Artificial Sequence: Synthetic oligonucleotide
  Sense Strand Starting at position 1336 of SEQ ID NO: 317796
auaauaugagucugauauc

SEQ ID NO: 423580 - RNA, 19 nt, Artificial Sequence
  Description of Artificial Sequence: Synthetic oligonucleotide
  Antisense Strand to SEQ ID NO: 423579
gauaucagacucauauuau

SEQ ID NO: 423581 - RNA, 19 nt, Artificial Sequence
  Description of Artificial Sequence: Synthetic oligonucleotide
  Sense Strand Starting at position 1336 of SEQ ID NO: 317802
ugagucugauaucucaaag

SEQ ID NO: 423582 - RNA, 19 nt, Artificial Sequence
  Description of Artificial Sequence: Synthetic oligonucleotide
  Antisense Strand to SEQ ID NO: 423581
cuuugagauaucagacuca

SEQ ID NO: 423583 - RNA, 19 nt, Artificial Sequence
  Description of Artificial Sequence: Synthetic oligonucleotide
  Sense Strand Starting at position 1336 of SEQ ID NO: 317846
guauauagccuguaugaaa

SEQ ID NO: 423584 - RNA, 19 nt, Artificial Sequence
  Description of Artificial Sequence: Synthetic oligonucleotide
  Antisense Strand to SEQ ID NO: 423583
uuucauacaggcuauauac

SEQ ID NO: 423585 - RNA, 19 nt, Artificial Sequence
  Description of Artificial Sequence: Synthetic oligonucleotide
  Sense Strand Starting at position 1336 of SEQ ID NO: 317874
aggaguacucuuuaaguug

SEQ ID NO: 423586 - RNA, 19 nt, Artificial Sequence
  Description of Artificial Sequence: Synthetic oligonucleotide
  Antisense Strand to SEQ ID NO: 423585
caacuuaaagaguacuccu

SEQ ID NO: 423587 - RNA, 19 nt, Artificial Sequence
  Description of Artificial Sequence: Synthetic oligonucleotide
  Sense Strand Starting at position 1336 of SEQ ID NO: 317964
augacacugugaccauauu

SEQ ID NO: 423588 - RNA, 19 nt, Artificial Sequence
  Description of Artificial Sequence: Synthetic oligonucleotide
  Antisense Strand to SEQ ID NO: 423587
aauauggucacagugucau

SEQ ID NO: 423589 - RNA, 19 nt, Artificial Sequence
  Description of Artificial Sequence: Synthetic oligonucleotide
  Sense Strand Starting at position 1336 of SEQ ID NO: 318208
aagucuugguaucugaaca

SEQ ID NO: 423590 - RNA, 19 nt, Artificial Sequence
  Description of Artificial Sequence: Synthetic oligonucleotide
  Antisense Strand to SEQ ID NO: 423589
uguucagauaccaagacuu

SEQ ID NO: 423591 - RNA, 19 nt, Artificial Sequence
  Description of Artificial Sequence: Synthetic oligonucleotide
  Sense Strand Starting at position 1336 of SEQ ID NO: 318288
gguaguaauggccauaaag

SEQ ID NO: 423592 - RNA, 19 nt, Artificial Sequence
  Description of Artificial Sequence: Synthetic oligonucleotide
  Antisense Strand to SEQ ID NO: 423591
cuuuauggccauuacuacc

SEQ ID NO: 423593 - RNA, 19 nt, Artificial Sequence
  Description of Artificial Sequence: Synthetic oligonucleotide
  Sense Strand Starting at position 1336 of SEQ ID NO: 318452
aauguugucccucagagau

SEQ ID NO: 423594 - RNA, 19 nt, Artificial Sequence
  Description of Artificial Sequence: Synthetic oligonucleotide
  Antisense Strand to SEQ ID NO: 423593
aucucugagggacaacauu

SEQ ID NO: 423595 - RNA, 19 nt, Artificial Sequence
  Description of Artificial Sequence: Synthetic oligonucleotide
  Sense Strand Starting at position 1336 of SEQ ID NO: 318528
gguauuaagucaucugaac

SEQ ID NO: 423596 - RNA, 19 nt, Artificial Sequence
  Description of Artificial Sequence: Synthetic oligonucleotide
  Antisense Strand to SEQ ID NO: 423595
guucagaugacuuaauacc

SEQ ID NO: 423597 - RNA, 19 nt, Artificial Sequence
  Description of Artificial Sequence: Synthetic oligonucleotide
  Sense Strand Starting at position 1336 of SEQ ID NO: 318639
gaaucauuguaagcacuga

SEQ ID NO: 423598 - RNA, 19 nt, Artificial Sequence
  Description of Artificial Sequence: Synthetic oligonucleotide
  Antisense Strand to SEQ ID NO: 423597
ucagugcuuacaaugauuc

SEQ ID NO: 423599 - RNA, 19 nt, Artificial Sequence
  Description of Artificial Sequence: Synthetic oligonucleotide
  Sense Strand Starting at position 1336 of SEQ ID NO: 318691
cugucacauggugaacauu

SEQ ID NO: 423600 - RNA, 19 nt, Artificial Sequence
  Description of Artificial Sequence: Synthetic oligonucleotide
  Antisense Strand to SEQ ID NO: 423599
aauguucaccaugugacag

SEQ ID NO: 423601 - RNA, 19 nt, Artificial Sequence
  Description of Artificial Sequence: Synthetic oligonucleotide
  Sense Strand Starting at position 1336 of SEQ ID NO: 318758
cuuuauaaguauccaguga

SEQ ID NO: 423602 - RNA, 19 nt, Artificial Sequence
  Description of Artificial Sequence: Synthetic oligonucleotide
  Antisense Strand to SEQ ID NO: 423601
ucacuggauacuuauaaag

SEQ ID NO: 423603 - RNA, 19 nt, Artificial Sequence
  Description of Artificial Sequence: Synthetic oligonucleotide
  Sense Strand Starting at position 1336 of SEQ ID NO: 318762
auaaguauccagugaaaga

SEQ ID NO: 423604 - RNA, 19 nt, Artificial Sequence
  Description of Artificial Sequence: Synthetic oligonucleotide
  Antisense Strand to SEQ ID NO: 423603
ucuuucacuggauacuuau

SEQ ID NO: 423605 - RNA, 19 nt, Artificial Sequence
  Description of Artificial Sequence: Synthetic oligonucleotide
  Sense Strand Starting at position 1336 of SEQ ID NO: 318883
auuucugucuggguauguu

SEQ ID NO: 423606 - RNA, 19 nt, Artificial Sequence
  Description of Artificial Sequence: Synthetic oligonucleotide
  Antisense Strand to SEQ ID NO: 423605
aacauacccagacagaaau

SEQ ID NO: 423607 - RNA, 19 nt, Artificial Sequence
  Description of Artificial Sequence: Synthetic oligonucleotide
  Sense Strand Starting at position 1336 of SEQ ID NO: 318992
cuaacaguuguccaguaac

SEQ ID NO: 423608 - RNA, 19 nt, Artificial Sequence
  Description of Artificial Sequence: Synthetic oligonucleotide
  Antisense Strand to SEQ ID NO: 423607
guuacuggacaacuguuag

SEQ ID NO: 423609 - RNA, 19 nt, Artificial Sequence
  Description of Artificial Sequence: Synthetic oligonucleotide
  Sense Strand Starting at position 1336 of SEQ ID NO: 318995
acaguuguccaguaacuag

SEQ ID NO: 423610 - RNA, 19 nt, Artificial Sequence
  Description of Artificial Sequence: Synthetic oligonucleotide
  Antisense Strand to SEQ ID NO: 423609
cuaguuacuggacaacugu

SEQ ID NO: 423611 - RNA, 19 nt, Artificial Sequence
  Description of Artificial Sequence: Synthetic oligonucleotide
  Sense Strand Starting at position 1336 of SEQ ID NO: 319143
agccuaauugauuaauugu

SEQ ID NO: 423612 - RNA, 19 nt, Artificial Sequence
  Description of Artificial Sequence: Synthetic oligonucleotide
  Antisense Strand to SEQ ID NO: 423611
acaauuaaucaauuaggcu

SEQ ID NO: 423613 - RNA, 19 nt, Artificial Sequence
  Description of Artificial Sequence: Synthetic oligonucleotide
  Sense Strand Starting at position 1336 of SEQ ID NO: 319151
ugauuaauugugggucuga

SEQ ID NO: 423614 - RNA, 19 nt, Artificial Sequence
  Description of Artificial Sequence: Synthetic oligonucleotide
  Antisense Strand to SEQ ID NO: 423613
ucagacccacaauuaauca

SEQ ID NO: 423615 - RNA, 19 nt, Artificial Sequence
  Description of Artificial Sequence: Synthetic oligonucleotide
  Sense Strand Starting at position 1336 of SEQ ID NO: 319152
gauuaauugugggucugac

SEQ ID NO: 423616 - RNA, 19 nt, Artificial Sequence
  Description of Artificial Sequence: Synthetic oligonucleotide
  Antisense Strand to SEQ ID NO: 423615
gucagacccacaauuaauc

SEQ ID NO: 423617 - RNA, 19 nt, Artificial Sequence
  Description of Artificial Sequence: Synthetic oligonucleotide
  Sense Strand Starting at position 1336 of SEQ ID NO: 319167
ugaccaucuggcugaugaa

SEQ ID NO: 423618 - RNA, 19 nt, Artificial Sequence
  Description of Artificial Sequence: Synthetic oligonucleotide
  Antisense Strand to SEQ ID NO: 423617
uucaucagccagaugguca

SEQ ID NO: 423619 - RNA, 19 nt, Artificial Sequence
  Description of Artificial Sequence: Synthetic oligonucleotide
  Sense Strand Starting at position 1336 of SEQ ID NO: 319201
gugauuacuguguaacaca

SEQ ID NO: 423620 - RNA, 19 nt, Artificial Sequence
  Description of Artificial Sequence: Synthetic oligonucleotide
  Antisense Strand to SEQ ID NO: 423619
uguguuacacaguaaucac

SEQ ID NO: 423621 - RNA, 19 nt, Artificial Sequence
  Description of Artificial Sequence: Synthetic oligonucleotide
  Sense Strand Starting at position 1337 of SEQ ID NO: 315238
gaggaauguuaaccuccua

SEQ ID NO: 423622 - RNA, 19 nt, Artificial Sequence
  Description of Artificial Sequence: Synthetic oligonucleotide
  Antisense Strand to SEQ ID NO: 423621
uaggagguuaacauuccuc

SEQ ID NO: 423623 - RNA, 19 nt, Artificial Sequence
  Description of Artificial Sequence: Synthetic oligonucleotide
  Sense Strand Starting at position 1337 of SEQ ID NO: 315545
ggaauugugauaggaagcu

SEQ ID NO: 423624 - RNA, 19 nt, Artificial Sequence
  Description of Artificial Sequence: Synthetic oligonucleotide
  Antisense Strand to SEQ ID NO: 423623
agcuuccuaucacaauucc

SEQ ID NO: 423625 - RNA, 19 nt, Artificial Sequence
  Description of Artificial Sequence: Synthetic oligonucleotide
  Sense Strand Starting at position 1337 of SEQ ID NO: 315623
uaggaaacuugggcuauau

SEQ ID NO: 423626 - RNA, 19 nt, Artificial Sequence
  Description of Artificial Sequence: Synthetic oligonucleotide
  Antisense Strand to SEQ ID NO: 423625
auauagcccaaguuuccua

SEQ ID NO: 423627 - RNA, 19 nt, Artificial Sequence
  Description of Artificial Sequence: Synthetic oligonucleotide
  Sense Strand Starting at position 1337 of SEQ ID NO: 315652
gaguucugugguuaagaau

SEQ ID NO: 423628 - RNA, 19 nt, Artificial Sequence
  Description of Artificial Sequence: Synthetic oligonucleotide
  Antisense Strand to SEQ ID NO: 423627
auucuuaaccacagaacuc

SEQ ID NO: 423629 - RNA, 19 nt, Artificial Sequence
  Description of Artificial Sequence: Synthetic oligonucleotide
  Sense Strand Starting at position 1337 of SEQ ID NO: 315660
ugguuaagaaucugaagca

SEQ ID NO: 423630 - RNA, 19 nt, Artificial Sequence
  Description of Artificial Sequence: Synthetic oligonucleotide
  Antisense Strand to SEQ ID NO: 423629
ugcuucagauucuuaacca

SEQ ID NO: 423631 - RNA, 19 nt, Artificial Sequence
  Description of Artificial Sequence: Synthetic oligonucleotide
  Sense Strand Starting at position 1337 of SEQ ID NO: 315699
uccaaagcugaguaccaau

SEQ ID NO: 423632 - RNA, 19 nt, Artificial Sequence
  Description of Artificial Sequence: Synthetic oligonucleotide
  Antisense Strand to SEQ ID NO: 423631
auugguacucagcuuugga

SEQ ID NO: 423633 - RNA, 19 nt, Artificial Sequence
  Description of Artificial Sequence: Synthetic oligonucleotide
  Sense Strand Starting at position 1337 of SEQ ID NO: 315776
auauacaucugguuaaaug

SEQ ID NO: 423634 - RNA, 19 nt, Artificial Sequence
  Description of Artificial Sequence: Synthetic oligonucleotide
  Antisense Strand to SEQ ID NO: 423633
cauuuaaccagauguauau

SEQ ID NO: 423635 - RNA, 19 nt, Artificial Sequence
  Description of Artificial Sequence: Synthetic oligonucleotide
  Sense Strand Starting at position 1337 of SEQ ID NO: 315937
uugugauuccuggaaguuu

SEQ ID NO: 423636 - RNA, 19 nt, Artificial Sequence
  Description of Artificial Sequence: Synthetic oligonucleotide
  Antisense Strand to SEQ ID NO: 423635
aaacuuccaggaaucacaa

SEQ ID NO: 423637 - RNA, 19 nt, Artificial Sequence
  Description of Artificial Sequence: Synthetic oligonucleotide
  Sense Strand Starting at position 1337 of SEQ ID NO: 315969
ccauauuggcgacaucaaa

SEQ ID NO: 423638 - RNA, 19 nt, Artificial Sequence
  Description of Artificial Sequence: Synthetic oligonucleotide
  Antisense Strand to SEQ ID NO: 423637
uuugaugucgccaauaugg

SEQ ID NO: 423639 - RNA, 19 nt, Artificial Sequence
  Description of Artificial Sequence: Synthetic oligonucleotide
  Sense Strand Starting at position 1337 of SEQ ID NO: 316236
gggagaguaugaguuauua

SEQ ID NO: 423640 - RNA, 19 nt, Artificial Sequence
  Description of Artificial Sequence: Synthetic oligonucleotide
  Antisense Strand to SEQ ID NO: 423639
uaauaacucauacucuccc

SEQ ID NO: 423641 - RNA, 19 nt, Artificial Sequence
  Description of Artificial Sequence: Synthetic oligonucleotide
  Sense Strand Starting at position 1337 of SEQ ID NO: 316240
gaguaugaguuauuaagaa

SEQ ID NO: 423642 - RNA, 19 nt, Artificial Sequence
  Description of Artificial Sequence: Synthetic oligonucleotide
  Antisense Strand to SEQ ID NO: 423641
uucuuaauaacucauacuc

SEQ ID NO: 423643 - RNA, 19 nt, Artificial Sequence
  Description of Artificial Sequence: Synthetic oligonucleotide
  Sense Strand Starting at position 1337 of SEQ ID NO: 316380
aucagugucccuuaaauug

SEQ ID NO: 423644 - RNA, 19 nt, Artificial Sequence
  Description of Artificial Sequence: Synthetic oligonucleotide
  Antisense Strand to SEQ ID NO: 423643
caauuuaagggacacugau

SEQ ID NO: 423645 - RNA, 19 nt, Artificial Sequence
  Description of Artificial Sequence: Synthetic oligonucleotide
  Sense Strand Starting at position 1337 of SEQ ID NO: 316397
ugaggacaauacuauauuu

SEQ ID NO: 423646 - RNA, 19 nt, Artificial Sequence
  Description of Artificial Sequence: Synthetic oligonucleotide
  Antisense Strand to SEQ ID NO: 423645
aaauauaguauuguccuca

SEQ ID NO: 423647 - RNA, 19 nt, Artificial Sequence
  Description of Artificial Sequence: Synthetic oligonucleotide
  Sense Strand Starting at position 1337 of SEQ ID NO: 316417
gguuuaauacugugaggac

SEQ ID NO: 423648 - RNA, 19 nt, Artificial Sequence
  Description of Artificial Sequence: Synthetic oligonucleotide
  Antisense Strand to SEQ ID NO: 423647
guccucacaguauuaaacc

SEQ ID NO: 423649 - RNA, 19 nt, Artificial Sequence
  Description of Artificial Sequence: Synthetic oligonucleotide
  Sense Strand Starting at position 1337 of SEQ ID NO: 316512
ugauacuaugaaugcagaa

SEQ ID NO: 423650 - RNA, 19 nt, Artificial Sequence
  Description of Artificial Sequence: Synthetic oligonucleotide
  Antisense Strand to SEQ ID NO: 423649
uucugcauucauaguauca

SEQ ID NO: 423651 - RNA, 19 nt, Artificial Sequence
  Description of Artificial Sequence: Synthetic oligonucleotide
  Sense Strand Starting at position 1337 of SEQ ID NO: 316614
uuagcaaagugaucuuuag

SEQ ID NO: 423652 - RNA, 19 nt, Artificial Sequence
  Description of Artificial Sequence: Synthetic oligonucleotide
  Antisense Strand to SEQ ID NO: 423651
cuaaagaucacuuugcuaa

SEQ ID NO: 423653 - RNA, 19 nt, Artificial Sequence
  Description of Artificial Sequence: Synthetic oligonucleotide
  Sense Strand Starting at position 1337 of SEQ ID NO: 316635
caguauuagcaagaauguu

SEQ ID NO: 423654 - RNA, 19 nt, Artificial Sequence
  Description of Artificial Sequence: Synthetic oligonucleotide
  Antisense Strand to SEQ ID NO: 423653
aacauucuugcuaauacug

SEQ ID NO: 423655 - RNA, 19 nt, Artificial Sequence
  Description of Artificial Sequence: Synthetic oligonucleotide
  Sense Strand Starting at position 1337 of SEQ ID NO: 317167
aggagugacgacugagaau

SEQ ID NO: 423656 - RNA, 19 nt, Artificial Sequence
  Description of Artificial Sequence: Synthetic oligonucleotide
  Antisense Strand to SEQ ID NO: 423655
auucucagucgucacuccu

SEQ ID NO: 423657 - RNA, 19 nt, Artificial Sequence
  Description of Artificial Sequence: Synthetic oligonucleotide
  Sense Strand Starting at position 1337 of SEQ ID NO: 317269
agugcugaagcacagaaau

SEQ ID NO: 423658 - RNA, 19 nt, Artificial Sequence
  Description of Artificial Sequence: Synthetic oligonucleotide
  Antisense Strand to SEQ ID NO: 423657
auuucugugcuucagcacu

SEQ ID NO: 423659 - RNA, 19 nt, Artificial Sequence
  Description of Artificial Sequence: Synthetic oligonucleotide
  Sense Strand Starting at position 1337 of SEQ ID NO: 317413
cugccagaggaauguacau

SEQ ID NO: 423660 - RNA, 19 nt, Artificial Sequence
  Description of Artificial Sequence: Synthetic oligonucleotide
  Antisense Strand to SEQ ID NO: 423659
auguacauuccucuggcag

SEQ ID NO: 423661 - RNA, 19 nt, Artificial Sequence
  Description of Artificial Sequence: Synthetic oligonucleotide
  Sense Strand Starting at position 1337 of SEQ ID NO: 317569
uugaauucuguugggaagu

SEQ ID NO: 423662 - RNA, 19 nt, Artificial Sequence
  Description of Artificial Sequence: Synthetic oligonucleotide
  Antisense Strand to SEQ ID NO: 423661
acuucccaacagaauucaa

SEQ ID NO: 423663 - RNA, 19 nt, Artificial Sequence
  Description of Artificial Sequence: Synthetic oligonucleotide
  Sense Strand Starting at position 1337 of SEQ ID NO: 317592
gugaguucccaguagacaa

SEQ ID NO: 423664 - RNA, 19 nt, Artificial Sequence
  Description of Artificial Sequence: Synthetic oligonucleotide
  Antisense Strand to SEQ ID NO: 423663
uugucuacugggaacucac

SEQ ID NO: 423665 - RNA, 19 nt, Artificial Sequence
  Description of Artificial Sequence: Synthetic oligonucleotide
  Sense Strand Starting at position 1337 of SEQ ID NO: 317973
gugaaaugaguucagugau

SEQ ID NO: 423666 - RNA, 19 nt, Artificial Sequence
  Description of Artificial Sequence: Synthetic oligonucleotide
  Antisense Strand to SEQ ID NO: 423665
aucacugaacucauuucac

SEQ ID NO: 423667 - RNA, 19 nt, Artificial Sequence
  Description of Artificial Sequence: Synthetic oligonucleotide
  Sense Strand Starting at position 1337 of SEQ ID NO: 318065
gcagucucuggucaugaga

SEQ ID NO: 423668 - RNA, 19 nt, Artificial Sequence
  Description of Artificial Sequence: Synthetic oligonucleotide
  Antisense Strand to SEQ ID NO: 423667
ucucaugaccagagacugc

SEQ ID NO: 423669 - RNA, 19 nt, Artificial Sequence
  Description of Artificial Sequence: Synthetic oligonucleotide
  Sense Strand Starting at position 1337 of SEQ ID NO: 318107
gguuuaggucaggagcaaa

SEQ ID NO: 423670 - RNA, 19 nt, Artificial Sequence
  Description of Artificial Sequence: Synthetic oligonucleotide
  Antisense Strand to SEQ ID NO: 423669
uuugcuccugaccuaaacc

SEQ ID NO: 423671 - RNA, 19 nt, Artificial Sequence
  Description of Artificial Sequence: Synthetic oligonucleotide
  Sense Strand Starting at position 1337 of SEQ ID NO: 318175
agaaauacugcaggucaaa

SEQ ID NO: 423672 - RNA, 19 nt, Artificial Sequence
  Description of Artificial Sequence: Synthetic oligonucleotide
  Antisense Strand to SEQ ID NO: 423671
uuugaccugcaguauuucu

SEQ ID NO: 423673 - RNA, 19 nt, Artificial Sequence
  Description of Artificial Sequence: Synthetic oligonucleotide
  Sense Strand Starting at position 1337 of SEQ ID NO: 318347
aaagaugcucauuaagguu

SEQ ID NO: 423674 - RNA, 19 nt, Artificial Sequence
  Description of Artificial Sequence: Synthetic oligonucleotide
  Antisense Strand to SEQ ID NO: 423673
aaccuuaaugagcaucuuu

SEQ ID NO: 423675 - RNA, 19 nt, Artificial Sequence
  Description of Artificial Sequence: Synthetic oligonucleotide
  Sense Strand Starting at position 1337 of SEQ ID NO: 318355
ucauuaagguuucugaaau

SEQ ID NO: 423676 - RNA, 19 nt, Artificial Sequence
  Description of Artificial Sequence: Synthetic oligonucleotide
  Antisense Strand to SEQ ID NO: 423675
auuucagaaaccuuaauga

SEQ ID NO: 423677 - RNA, 19 nt, Artificial Sequence
  Description of Artificial Sequence: Synthetic oligonucleotide
  Sense Strand Starting at position 1337 of SEQ ID NO: 318407
aagaaauggugacuuccua

SEQ ID NO: 423678 - RNA, 19 nt, Artificial Sequence
  Description of Artificial Sequence: Synthetic oligonucleotide
  Antisense Strand to SEQ ID NO: 423677
uaggaagucaccauuucuu

SEQ ID NO: 423679 - RNA, 19 nt, Artificial Sequence
  Description of Artificial Sequence: Synthetic oligonucleotide
  Sense Strand Starting at position 1337 of SEQ ID NO: 318414
ggugacuuccuauauacua

SEQ ID NO: 423680 - RNA, 19 nt, Artificial Sequence
  Description of Artificial Sequence: Synthetic oligonucleotide
  Antisense Strand to SEQ ID NO: 423679
uaguauauaggaagucacc

SEQ ID NO: 423681 - RNA, 19 nt, Artificial Sequence
  Description of Artificial Sequence: Synthetic oligonucleotide
  Sense Strand Starting at position 1337 of SEQ ID NO: 318535
auaauaugagucugauauc

SEQ ID NO: 423682 - RNA, 19 nt, Artificial Sequence
  Description of Artificial Sequence: Synthetic oligonucleotide
  Antisense Strand to SEQ ID NO: 423681
gauaucagacucauauuau

SEQ ID NO: 423683 - RNA, 19 nt, Artificial Sequence
  Description of Artificial Sequence: Synthetic oligonucleotide
  Sense Strand Starting at position 1337 of SEQ ID NO: 318541
ugagucugauaucucaaag

SEQ ID NO: 423684 - RNA, 19 nt, Artificial Sequence
  Description of Artificial Sequence: Synthetic oligonucleotide
  Antisense Strand to SEQ ID NO: 423683
cuuugagauaucagacuca

SEQ ID NO: 423685 - RNA, 19 nt, Artificial Sequence
  Description of Artificial Sequence: Synthetic oligonucleotide
  Sense Strand Starting at position 1337 of SEQ ID NO: 318585
guauauagccuguaugaaa

SEQ ID NO: 423686 - RNA, 19 nt, Artificial Sequence
  Description of Artificial Sequence: Synthetic oligonucleotide
  Antisense Strand to SEQ ID NO: 423685
uuucauacaggcuauauac

SEQ ID NO: 423687 - RNA, 19 nt, Artificial Sequence
  Description of Artificial Sequence: Synthetic oligonucleotide
  Sense Strand Starting at position 1337 of SEQ ID NO: 318613
aggaguacucuuuaaguug

SEQ ID NO: 423688 - RNA, 19 nt, Artificial Sequence
  Description of Artificial Sequence: Synthetic oligonucleotide
  Antisense Strand to SEQ ID NO: 423687
caacuuaaagaguacuccu

SEQ ID NO: 423689 - RNA, 19 nt, Artificial Sequence
  Description of Artificial Sequence: Synthetic oligonucleotide
  Sense Strand Starting at position 1337 of SEQ ID NO: 318703
augacacugugaccauauu

SEQ ID NO: 423690 - RNA, 19 nt, Artificial Sequence
  Description of Artificial Sequence: Synthetic oligonucleotide
  Antisense Strand to SEQ ID NO: 423689
aauauggucacagugucau

SEQ ID NO: 423691 - RNA, 19 nt, Artificial Sequence
  Description of Artificial Sequence: Synthetic oligonucleotide
  Sense Strand Starting at position 1337 of SEQ ID NO: 318911
ggaggcaaauugcucuaua

SEQ ID NO: 423692 - RNA, 19 nt, Artificial Sequence
  Description of Artificial Sequence: Synthetic oligonucleotide
  Antisense Strand to SEQ ID NO: 423691
uauagagcaauuugccucc

SEQ ID NO: 423693 - RNA, 19 nt, Artificial Sequence
  Description of Artificial Sequence: Synthetic oligonucleotide
  Sense Strand Starting at position 1337 of SEQ ID NO: 318914
ggcaaauugcucuauaagu

SEQ ID NO: 423694 - RNA, 19 nt, Artificial Sequence
  Description of Artificial Sequence: Synthetic oligonucleotide
  Antisense Strand to SEQ ID NO: 423693
acuuauagagcaauuugcc

SEQ ID NO: 423695 - RNA, 19 nt, Artificial Sequence
  Description of Artificial Sequence: Synthetic oligonucleotide
  Sense Strand Starting at position 1337 of SEQ ID NO: 318947
aagucuugguaucugaaca

SEQ ID NO: 423696 - RNA, 19 nt, Artificial Sequence
  Description of Artificial Sequence: Synthetic oligonucleotide
  Antisense Strand to SEQ ID NO: 423695
uguucagauaccaagacuu

SEQ ID NO: 423697 - RNA, 19 nt, Artificial Sequence
  Description of Artificial Sequence: Synthetic oligonucleotide
  Sense Strand Starting at position 1337 of SEQ ID NO: 319027
gguaguaauggccauaaag

SEQ ID NO: 423698 - RNA, 19 nt, Artificial Sequence
  Description of Artificial Sequence: Synthetic oligonucleotide
  Antisense Strand to SEQ ID NO: 423697
cuuuauggccauuacuacc

SEQ ID NO: 423699 - RNA, 19 nt, Artificial Sequence
  Description of Artificial Sequence: Synthetic oligonucleotide
  Sense Strand Starting at position 1337 of SEQ ID NO: 319191
aauguugucccucagagau

SEQ ID NO: 423700 - RNA, 19 nt, Artificial Sequence
  Description of Artificial Sequence: Synthetic oligonucleotide
  Antisense Strand to SEQ ID NO: 423699
aucucugagggacaacauu

SEQ ID NO: 423701 - RNA, 19 nt, Artificial Sequence
  Description of Artificial Sequence: Synthetic oligonucleotide
  Sense Strand Starting at position 1338 of SEQ ID NO: 315267
gccacaucuugacuggaca

SEQ ID NO: 423702 - RNA, 19 nt, Artificial Sequence
  Description of Artificial Sequence: Synthetic oligonucleotide
  Antisense Strand to SEQ ID NO: 423701
uguccagucaagauguggc

SEQ ID NO: 423703 - RNA, 19 nt, Artificial Sequence
  Description of Artificial Sequence: Synthetic oligonucleotide
  Sense Strand Starting at position 1338 of SEQ ID NO: 315268
ccacaucuugacuggacaa

SEQ ID NO: 423704 - RNA, 19 nt, Artificial Sequence
  Description of Artificial Sequence: Synthetic oligonucleotide
  Antisense Strand to SEQ ID NO: 423703
uuguccagucaagaugugg

SEQ ID NO: 423705 - RNA, 19 nt, Artificial Sequence
  Description of Artificial Sequence: Synthetic oligonucleotide
  Sense Strand Starting at position 1338 of SEQ ID NO: 315739
uuuaaagaugacugguuau

SEQ ID NO: 423706 - RNA, 19 nt, Artificial Sequence
  Description of Artificial Sequence: Synthetic oligonucleotide
  Antisense Strand to SEQ ID NO: 423705
auaaccagucaucuuuaaa

SEQ ID NO: 423707 - RNA, 19 nt, Artificial Sequence
  Description of Artificial Sequence: Synthetic oligonucleotide
  Sense Strand Starting at position 1338 of SEQ ID NO: 315742
aaagaugacugguuaucac

SEQ ID NO: 423708 - RNA, 19 nt, Artificial Sequence
  Description of Artificial Sequence: Synthetic oligonucleotide
  Antisense Strand to SEQ ID NO: 423707
gugauaaccagucaucuuu

SEQ ID NO: 423709 - RNA, 19 nt, Artificial Sequence
  Description of Artificial Sequence: Synthetic oligonucleotide
  Sense Strand Starting at position 1338 of SEQ ID NO: 315745
gaugacugguuaucacuua

SEQ ID NO: 423710 - RNA, 19 nt, Artificial Sequence
  Description of Artificial Sequence: Synthetic oligonucleotide
  Antisense Strand to SEQ ID NO: 423709
uaagugauaaccagucauc

SEQ ID NO: 423711 - RNA, 19 nt, Artificial Sequence
  Description of Artificial Sequence: Synthetic oligonucleotide
  Sense Strand Starting at position 1338 of SEQ ID NO: 315875
gugaauggccucuauaauu

SEQ ID NO: 423712 - RNA, 19 nt, Artificial Sequence
  Description of Artificial Sequence: Synthetic oligonucleotide
  Antisense Strand to SEQ ID NO: 423711
aauuauagaggccauucac

SEQ ID NO: 423713 - RNA, 19 nt, Artificial Sequence
  Description of Artificial Sequence: Synthetic oligonucleotide
  Sense Strand Starting at position 1338 of SEQ ID NO: 316034
gcugauucugaggacagua

SEQ ID NO: 423714 - RNA, 19 nt, Artificial Sequence
  Description of Artificial Sequence: Synthetic oligonucleotide
  Antisense Strand to SEQ ID NO: 423713
uacuguccucagaaucagc

SEQ ID NO: 423715 - RNA, 19 nt, Artificial Sequence
  Description of Artificial Sequence: Synthetic oligonucleotide
  Sense Strand Starting at position 1338 of SEQ ID NO: 316137
cccaguucggagugagaga

SEQ ID NO: 423716 - RNA, 19 nt, Artificial Sequence
  Description of Artificial Sequence: Synthetic oligonucleotide
  Antisense Strand to SEQ ID NO: 423715
ucucucacuccgaacuggg

SEQ ID NO: 423717 - RNA, 19 nt, Artificial Sequence
  Description of Artificial Sequence: Synthetic oligonucleotide
  Sense Strand Starting at position 1338 of SEQ ID NO: 316138
ccaguucggagugagagau

SEQ ID NO: 423718 - RNA, 19 nt, Artificial Sequence
  Description of Artificial Sequence: Synthetic oligonucleotide
  Antisense Strand to SEQ ID NO: 423717
aucucucacuccgaacugg

SEQ ID NO: 423719 - RNA, 19 nt, Artificial Sequence
  Description of Artificial Sequence: Synthetic oligonucleotide
  Sense Strand Starting at position 1338 of SEQ ID NO: 316148
gugagagaucagcggauua

SEQ ID NO: 423720 - RNA, 19 nt, Artificial Sequence
  Description of Artificial Sequence: Synthetic oligonucleotide
  Antisense Strand to SEQ ID NO: 423719
uaauccgcugaucucucac

SEQ ID NO: 423721 - RNA, 19 nt, Artificial Sequence
  Description of Artificial Sequence: Synthetic oligonucleotide
  Sense Strand Starting at position 1338 of SEQ ID NO: 316160
cggauuaccgcgcuaggua

SEQ ID NO: 423722 - RNA, 19 nt, Artificial Sequence
  Description of Artificial Sequence: Synthetic oligonucleotide
  Antisense Strand to SEQ ID NO: 423721
uaccuagcgcgguaauccg

SEQ ID NO: 423723 - RNA, 19 nt, Artificial Sequence
  Description of Artificial Sequence: Synthetic oligonucleotide
  Sense Strand Starting at position 1338 of SEQ ID NO: 316180
cguagcuguacgccauauu

SEQ ID NO: 423724 - RNA, 19 nt, Artificial Sequence
  Description of Artificial Sequence: Synthetic oligonucleotide
  Antisense Strand to SEQ ID NO: 423723
aauauggcguacagcuacg

SEQ ID NO: 423725 - RNA, 19 nt, Artificial Sequence
  Description of Artificial Sequence: Synthetic oligonucleotide
  Sense Strand Starting at position 1338 of SEQ ID NO: 316240
auguuugugcaaguguguu

SEQ ID NO: 423726 - RNA, 19 nt, Artificial Sequence
  Description of Artificial Sequence: Synthetic oligonucleotide
  Antisense Strand to SEQ ID NO: 423725
aacacacuugcacaaacau

SEQ ID NO: 423727 - RNA, 19 nt, Artificial Sequence
  Description of Artificial Sequence: Synthetic oligonucleotide
  Sense Strand Starting at position 1338 of SEQ ID NO: 316242
guuugugcaaguguguuua

SEQ ID NO: 423728 - RNA, 19 nt, Artificial Sequence
  Description of Artificial Sequence: Synthetic oligonucleotide
  Antisense Strand to SEQ ID NO: 423727
uaaacacacuugcacaaac

SEQ ID NO: 423729 - RNA, 19 nt, Artificial Sequence
  Description of Artificial Sequence: Synthetic oligonucleotide
  Sense Strand Starting at position 1338 of SEQ ID NO: 316253
uguguuuaucaauagaacu

SEQ ID NO: 423730 - RNA, 19 nt, Artificial Sequence
  Description of Artificial Sequence: Synthetic oligonucleotide
  Antisense Strand to SEQ ID NO: 423729
aguucuauugauaaacaca

SEQ ID NO: 423731 - RNA, 19 nt, Artificial Sequence
  Description of Artificial Sequence: Synthetic oligonucleotide
  Sense Strand Starting at position 1338 of SEQ ID NO: 316372
uacauuaaacaguguacga

SEQ ID NO: 423732 - RNA, 19 nt, Artificial Sequence
  Description of Artificial Sequence: Synthetic oligonucleotide
  Antisense Strand to SEQ ID NO: 423731
ucguacacuguuuaaugua

SEQ ID NO: 423733 - RNA, 19 nt, Artificial Sequence
  Description of Artificial Sequence: Synthetic oligonucleotide
  Sense Strand Starting at position 1338 of SEQ ID NO: 316374
cauuaaacaguguacgaga

SEQ ID NO: 423734 - RNA, 19 nt, Artificial Sequence
  Description of Artificial Sequence: Synthetic oligonucleotide
  Antisense Strand to SEQ ID NO: 423733
ucucguacacuguuuaaug

SEQ ID NO: 423735 - RNA, 19 nt, Artificial Sequence
  Description of Artificial Sequence: Synthetic oligonucleotide
  Sense Strand Starting at position 1338 of SEQ ID NO: 316500
gaaggaaaggugugucuuc

SEQ ID NO: 423736 - RNA, 19 nt, Artificial Sequence
  Description of Artificial Sequence: Synthetic oligonucleotide
  Antisense Strand to SEQ ID NO: 423735
gaagacacaccuuuccuuc

SEQ ID NO: 423737 - RNA, 19 nt, Artificial Sequence
  Description of Artificial Sequence: Synthetic oligonucleotide
  Sense Strand Starting at position 1338 of SEQ ID NO: 317152
aaauuagaguuuguggcau

SEQ ID NO: 423738 - RNA, 19 nt, Artificial Sequence
  Description of Artificial Sequence: Synthetic oligonucleotide
  Antisense Strand to SEQ ID NO: 423737
augccacaaacucuaauuu

SEQ ID NO: 423739 - RNA, 19 nt, Artificial Sequence
  Description of Artificial Sequence: Synthetic oligonucleotide
  Sense Strand Starting at position 1338 of SEQ ID NO: 317173
ccuccucgcgcucuuuaau

SEQ ID NO: 423740 - RNA, 19 nt, Artificial Sequence
  Description of Artificial Sequence: Synthetic oligonucleotide
  Antisense Strand to SEQ ID NO: 423739
auuaaagagcgcgaggagg

SEQ ID NO: 423741 - RNA, 19 nt, Artificial Sequence
  Description of Artificial Sequence: Synthetic oligonucleotide
  Sense Strand Starting at position 1338 of SEQ ID NO: 317508
cgcucagagaaguauuaac

SEQ ID NO: 423742 - RNA, 19 nt, Artificial Sequence
  Description of Artificial Sequence: Synthetic oligonucleotide
  Antisense Strand to SEQ ID NO: 423741
guuaauacuucucugagcg

SEQ ID NO: 423743 - RNA, 19 nt, Artificial Sequence
  Description of Artificial Sequence: Synthetic oligonucleotide
  Sense Strand Starting at position 1338 of SEQ ID NO: 317519
guauuaacaggcgauuggu

SEQ ID NO: 423744 - RNA, 19 nt, Artificial Sequence
  Description of Artificial Sequence: Synthetic oligonucleotide
  Antisense Strand to SEQ ID NO: 423743
accaaucgccuguuaauac

SEQ ID NO: 423745 - RNA, 19 nt, Artificial Sequence
  Description of Artificial Sequence: Synthetic oligonucleotide
  Sense Strand Starting at position 1338 of SEQ ID NO: 317690
ccaugauuggucgacacag

SEQ ID NO: 423746 - RNA, 19 nt, Artificial Sequence
  Description of Artificial Sequence: Synthetic oligonucleotide
  Antisense Strand to SEQ ID NO: 423745
cugugucgaccaaucaugg

SEQ ID NO: 423747 - RNA, 19 nt, Artificial Sequence
  Description of Artificial Sequence: Synthetic oligonucleotide
  Sense Strand Starting at position 1338 of SEQ ID NO: 318240
agugcuagggcucaaggaa

SEQ ID NO: 423748 - RNA, 19 nt, Artificial Sequence
  Description of Artificial Sequence: Synthetic oligonucleotide
  Antisense Strand to SEQ ID NO: 423747
uuccuugagcccuagcacu

SEQ ID NO: 423749 - RNA, 19 nt, Artificial Sequence
  Description of Artificial Sequence: Synthetic oligonucleotide
  Sense Strand Starting at position 1338 of SEQ ID NO: 318299
aagaguuuggaguaagccu

SEQ ID NO: 423750 - RNA, 19 nt, Artificial Sequence
  Description of Artificial Sequence: Synthetic oligonucleotide
  Antisense Strand to SEQ ID NO: 423749
aggcuuacuccaaacucuu

SEQ ID NO: 423751 - RNA, 19 nt, Artificial Sequence
  Description of Artificial Sequence: Synthetic oligonucleotide
  Sense Strand Starting at position 1338 of SEQ ID NO: 318421
ucaauauccugggugguaa

SEQ ID NO: 423752 - RNA, 19 nt, Artificial Sequence
  Description of Artificial Sequence: Synthetic oligonucleotide
  Antisense Strand to SEQ ID NO: 423751
uuaccacccaggauauuga

SEQ ID NO: 423753 - RNA, 19 nt, Artificial Sequence
  Description of Artificial Sequence: Synthetic oligonucleotide
  Sense Strand Starting at position 1338 of SEQ ID NO: 318422
caauauccugggugguaaa

SEQ ID NO: 423754 - RNA, 19 nt, Artificial Sequence
  Description of Artificial Sequence: Synthetic oligonucleotide
  Antisense Strand to SEQ ID NO: 423753
uuuaccacccaggauauug

SEQ ID NO: 423755 - RNA, 19 nt, Artificial Sequence
  Description of Artificial Sequence: Synthetic oligonucleotide
  Sense Strand Starting at position 1338 of SEQ ID NO: 318551
accaaauauugguccagua

SEQ ID NO: 423756 - RNA, 19 nt, Artificial Sequence
  Description of Artificial Sequence: Synthetic oligonucleotide
  Antisense Strand to SEQ ID NO: 423755
uacuggaccaauauuuggu

SEQ ID NO: 423757 - RNA, 19 nt, Artificial Sequence
  Description of Artificial Sequence: Synthetic oligonucleotide
  Sense Strand Starting at position 1338 of SEQ ID NO: 318567
guacucaggcauuggagaa

SEQ ID NO: 423758 - RNA, 19 nt, Artificial Sequence
  Description of Artificial Sequence: Synthetic oligonucleotide
  Antisense Strand to SEQ ID NO: 423757
uucuccaaugccugaguac

SEQ ID NO: 423759 - RNA, 19 nt, Artificial Sequence
  Description of Artificial Sequence: Synthetic oligonucleotide
  Sense Strand Starting at position 1338 of SEQ ID NO: 318806
cacuguacuugggauuuga

SEQ ID NO: 423760 - RNA, 19 nt, Artificial Sequence
  Description of Artificial Sequence: Synthetic oligonucleotide
  Antisense Strand to SEQ ID NO: 423759
ucaaaucccaaguacagug

SEQ ID NO: 423761 - RNA, 19 nt, Artificial Sequence
  Description of Artificial Sequence: Synthetic oligonucleotide
  Sense Strand Starting at position 1338 of SEQ ID NO: 318842
ggacauggauuugauguau

SEQ ID NO: 423762 - RNA, 19 nt, Artificial Sequence
  Description of Artificial Sequence: Synthetic oligonucleotide
  Antisense Strand to SEQ ID NO: 423761
auacaucaaauccaugucc

SEQ ID NO: 423763 - RNA, 19 nt, Artificial Sequence
  Description of Artificial Sequence: Synthetic oligonucleotide
  Sense Strand Starting at position 1338 of SEQ ID NO: 318871
agacuuaagucaucuggau

SEQ ID NO: 423764 - RNA, 19 nt, Artificial Sequence
  Description of Artificial Sequence: Synthetic oligonucleotide
  Antisense Strand to SEQ ID NO: 423763
auccagaugacuuaagucu

SEQ ID NO: 423765 - RNA, 19 nt, Artificial Sequence
  Description of Artificial Sequence: Synthetic oligonucleotide
  Sense Strand Starting at position 1338 of SEQ ID NO: 318927
cacauaagaugccugguua

SEQ ID NO: 423766 - RNA, 19 nt, Artificial Sequence
  Description of Artificial Sequence: Synthetic oligonucleotide
  Antisense Strand to SEQ ID NO: 423765
uaaccaggcaucuuaugug

SEQ ID NO: 423767 - RNA, 19 nt, Artificial Sequence
  Description of Artificial Sequence: Synthetic oligonucleotide
  Sense Strand Starting at position 1338 of SEQ ID NO: 318928
acauaagaugccugguuag

SEQ ID NO: 423768 - RNA, 19 nt, Artificial Sequence
  Description of Artificial Sequence: Synthetic oligonucleotide
  Antisense Strand to SEQ ID NO: 423767
cuaaccaggcaucuuaugu

SEQ ID NO: 423769 - RNA, 19 nt, Artificial Sequence
  Description of Artificial Sequence: Synthetic oligonucleotide
  Sense Strand Starting at position 1338 of SEQ ID NO: 318942
guuagaggucuuugacaga

SEQ ID NO: 423770 - RNA, 19 nt, Artificial Sequence
  Description of Artificial Sequence: Synthetic oligonucleotide
  Antisense Strand to SEQ ID NO: 423769
ucugucaaagaccucuaac

SEQ ID NO: 423771 - RNA, 19 nt, Artificial Sequence
  Description of Artificial Sequence: Synthetic oligonucleotide
  Sense Strand Starting at position 1338 of SEQ ID NO: 318972
auaaauuggcccuggugaa

SEQ ID NO: 423772 - RNA, 19 nt, Artificial Sequence
  Description of Artificial Sequence: Synthetic oligonucleotide
  Antisense Strand to SEQ ID NO: 423771
uucaccagggccaauuuau

SEQ ID NO: 423773 - RNA, 19 nt, Artificial Sequence
  Description of Artificial Sequence: Synthetic oligonucleotide
  Sense Strand Starting at position 1338 of SEQ ID NO: 318973
uaaauuggcccuggugaaa

SEQ ID NO: 423774 - RNA, 19 nt, Artificial Sequence
  Description of Artificial Sequence: Synthetic oligonucleotide
  Antisense Strand to SEQ ID NO: 423773
uuucaccagggccaauuua

SEQ ID NO: 423775 - RNA, 19 nt, Artificial Sequence
  Description of Artificial Sequence: Synthetic oligonucleotide
  Sense Strand Starting at position 1338 of SEQ ID NO: 319005
gggccuugaccucauuaau

SEQ ID NO: 423776 - RNA, 19 nt, Artificial Sequence
  Description of Artificial Sequence: Synthetic oligonucleotide
  Antisense Strand to SEQ ID NO: 423775
auuaaugaggucaaggccc

SEQ ID NO: 423777 - RNA, 19 nt, Artificial Sequence
  Description of Artificial Sequence: Synthetic oligonucleotide
  Sense Strand Starting at position 1338 of SEQ ID NO: 319037
ucuugugaggauuauaugu

SEQ ID NO: 423778 - RNA, 19 nt, Artificial Sequence
  Description of Artificial Sequence: Synthetic oligonucleotide
  Antisense Strand to SEQ ID NO: 423777
acauauaauccucacaaga

SEQ ID NO: 423779 - RNA, 19 nt, Artificial Sequence
  Description of Artificial Sequence: Synthetic oligonucleotide
  Sense Strand Starting at position 1338 of SEQ ID NO: 319045
ggauuauauguaugaggcu

SEQ ID NO: 423780 - RNA, 19 nt, Artificial Sequence
  Description of Artificial Sequence: Synthetic oligonucleotide
  Antisense Strand to SEQ ID NO: 423779
agccucauacauauaaucc

SEQ ID NO: 423781 - RNA, 19 nt, Artificial Sequence
  Description of Artificial Sequence: Synthetic oligonucleotide
  Sense Strand Starting at position 1339 of SEQ ID NO: 315359
augccucuucgagaugauu

SEQ ID NO: 423782 - RNA, 19 nt, Artificial Sequence
  Description of Artificial Sequence: Synthetic oligonucleotide
  Antisense Strand to SEQ ID NO: 423781
aaucaucucgaagaggcau

SEQ ID NO: 423783 - RNA, 19 nt, Artificial Sequence
  Description of Artificial Sequence: Synthetic oligonucleotide
  Sense Strand Starting at position 1339 of SEQ ID NO: 315481
aaauuauacuggcugaagu

SEQ ID NO: 423784 - RNA, 19 nt, Artificial Sequence
  Description of Artificial Sequence: Synthetic oligonucleotide
  Antisense Strand to SEQ ID NO: 423783
acuucagccaguauaauuu

SEQ ID NO: 423785 - RNA, 19 nt, Artificial Sequence
  Description of Artificial Sequence: Synthetic oligonucleotide
  Sense Strand Starting at position 1339 of SEQ ID NO: 315646
cugcuuaaauuaucaagag

SEQ ID NO: 423786 - RNA, 19 nt, Artificial Sequence
  Description of Artificial Sequence: Synthetic oligonucleotide
  Antisense Strand to SEQ ID NO: 423785
cucuugauaauuuaagcag

SEQ ID NO: 423787 - RNA, 19 nt, Artificial Sequence
  Description of Artificial Sequence: Synthetic oligonucleotide
  Sense Strand Starting at position 1339 of SEQ ID NO: 315708
gguagucucaauuagucua

SEQ ID NO: 423788 - RNA, 19 nt, Artificial Sequence
  Description of Artificial Sequence: Synthetic oligonucleotide
  Antisense Strand to SEQ ID NO: 423787
uagacuaauugagacuacc

SEQ ID NO: 423789 - RNA, 19 nt, Artificial Sequence
  Description of Artificial Sequence: Synthetic oligonucleotide
  Sense Strand Starting at position 1339 of SEQ ID NO: 315929
cggguugcugaagaaagaa

SEQ ID NO: 423790 - RNA, 19 nt, Artificial Sequence
  Description of Artificial Sequence: Synthetic oligonucleotide
  Antisense Strand to SEQ ID NO: 423789
uucuuucuucagcaacccg

SEQ ID NO: 423791 - RNA, 19 nt, Artificial Sequence
  Description of Artificial Sequence: Synthetic oligonucleotide
  Sense Strand Starting at position 1339 of SEQ ID NO: 315972
cuguacaaacuauguuuaa

SEQ ID NO: 423792 - RNA, 19 nt, Artificial Sequence
  Description of Artificial Sequence: Synthetic oligonucleotide
  Antisense Strand to SEQ ID NO: 423791
uuaaacauaguuuguacag

SEQ ID NO: 423793 - RNA, 19 nt, Artificial Sequence
  Description of Artificial Sequence: Synthetic oligonucleotide
  Sense Strand Starting at position 1339 of SEQ ID NO: 316030
caaugaacaguguauguca

SEQ ID NO: 423794 - RNA, 19 nt, Artificial Sequence
  Description of Artificial Sequence: Synthetic oligonucleotide
  Antisense Strand to SEQ ID NO: 423793
ugacauacacuguucauug

SEQ ID NO: 423795 - RNA, 19 nt, Artificial Sequence
  Description of Artificial Sequence: Synthetic oligonucleotide
  Sense Strand Starting at position 1339 of SEQ ID NO: 316079
gucaauguaugaucucaaa

SEQ ID NO: 423796 - RNA, 19 nt, Artificial Sequence
  Description of Artificial Sequence: Synthetic oligonucleotide
  Antisense Strand to SEQ ID NO: 423795
uuugagaucauacauugac

SEQ ID NO: 423797 - RNA, 19 nt, Artificial Sequence
  Description of Artificial Sequence: Synthetic oligonucleotide
  Sense Strand Starting at position 1339 of SEQ ID NO: 316205
auuacugugugguuaauuu

SEQ ID NO: 423798 - RNA, 19 nt, Artificial Sequence
  Description of Artificial Sequence: Synthetic oligonucleotide
  Antisense Strand to SEQ ID NO: 423797
aaauuaaccacacaguaau

SEQ ID NO: 423799 - RNA, 19 nt, Artificial Sequence
  Description of Artificial Sequence: Synthetic oligonucleotide
  Sense Strand Starting at position 1339 of SEQ ID NO: 316250
uuguaaauuuccucagugu

SEQ ID NO: 423800 - RNA, 19 nt, Artificial Sequence
  Description of Artificial Sequence: Synthetic oligonucleotide
  Antisense Strand to SEQ ID NO: 423799
acacugaggaaauuuacaa

SEQ ID NO: 423801 - RNA, 19 nt, Artificial Sequence
  Description of Artificial Sequence: Synthetic oligonucleotide
  Sense Strand Starting at position 1339 of SEQ ID NO: 316266
uguaucauuccugauuagu

SEQ ID NO: 423802 - RNA, 19 nt, Artificial Sequence
  Description of Artificial Sequence: Synthetic oligonucleotide
  Antisense Strand to SEQ ID NO: 423801
acuaaucaggaaugauaca

SEQ ID NO: 423803 - RNA, 19 nt, Artificial Sequence
  Description of Artificial Sequence: Synthetic oligonucleotide
  Sense Strand Starting at position 1339 of SEQ ID NO: 316269
aucauuccugauuaguuga

SEQ ID NO: 423804 - RNA, 19 nt, Artificial Sequence
  Description of Artificial Sequence: Synthetic oligonucleotide
  Antisense Strand to SEQ ID NO: 423803
ucaacuaaucaggaaugau

SEQ ID NO: 423805 - RNA, 19 nt, Artificial Sequence
  Description of Artificial Sequence: Synthetic oligonucleotide
  Sense Strand Starting at position 1339 of SEQ ID NO: 316274
uccugauuaguugaccuuu
